United States Patent Application Publication US 2005/0255487 A1 - sequence listing, part 23

SEQ ID NO: 615483 - RNA, 19 nt, Homo sapiens
  misc_RNA (1)...(19): siRNA sense strand
uaagccaagugaugucaug

SEQ ID NO: 615484 - RNA, 19 nt, Homo sapiens
  misc_RNA (1)...(19): siRNA sense strand
gcacugaagaggagaagca

SEQ ID NO: 615485 - RNA, 19 nt, Homo sapiens
  misc_RNA (1)...(19): siRNA sense strand
uaugauagcagucuuucuu

SEQ ID NO: 615486 - RNA, 19 nt, Homo sapiens
  misc_RNA (1)...(19): siRNA sense strand
gccaagugaugucaugcuu

SEQ ID NO: 615487 - RNA, 19 nt, Homo sapiens
  misc_RNA (1)...(19): siRNA sense strand
gugugaagacuaccuauga

SEQ ID NO: 615488 - RNA, 19 nt, Homo sapiens
  misc_RNA (1)...(19): siRNA sense strand
gacgcuaagcucaaaguuu

SEQ ID NO: 615489 - RNA, 19 nt, Homo sapiens
  misc_RNA (1)...(19): siRNA sense strand
gauagcagucuuucuucuu

SEQ ID NO: 615490 - RNA, 19 nt, Homo sapiens
  misc_RNA (1)...(19): siRNA sense strand
cuuguucacuuccgaaaug

SEQ ID NO: 615491 - RNA, 19 nt, Homo sapiens
  misc_RNA (1)...(19): siRNA sense strand
ggagaacuacggugugaag

SEQ ID NO: 615492 - RNA, 19 nt, Homo sapiens
  misc_RNA (1)...(19): siRNA sense strand
ccauugccaugaacucgaa

SEQ ID NO: 615493 - RNA, 19 nt, Homo sapiens
  misc_RNA (1)...(19): siRNA sense strand
gacuucaacuaugcuacua

SEQ ID NO: 615494 - RNA, 19 nt, Homo sapiens
  misc_RNA (1)...(19): siRNA sense strand
cuuauacggugcccuuaga

SEQ ID NO: 615495 - RNA, 19 nt, Homo sapiens
  misc_RNA (1)...(19): siRNA sense strand
aagacaaguucaccgauuc

SEQ ID NO: 615496 - RNA, 19 nt, Homo sapiens
  misc_RNA (1)...(19): siRNA sense strand
cagcaacagcgacgacuau

SEQ ID NO: 615497 - RNA, 19 nt, Homo sapiens
  misc_RNA (1)...(19): siRNA sense strand
caacagcgacgacuaugac

SEQ ID NO: 615498 - RNA, 19 nt, Homo sapiens
  misc_RNA (1)...(19): siRNA sense strand
ugucaugcuuguucacuuc

SEQ ID NO: 615499 - RNA, 19 nt, Homo sapiens
  misc_RNA (1)...(19): siRNA sense strand
agucugacauguccaaugg

SEQ ID NO: 615500 - RNA, 19 nt, Homo sapiens
  misc_RNA (1)...(19): siRNA sense strand
uagcagucuuucuucuuau

SEQ ID NO: 615501 - RNA, 19 nt, Homo sapiens
  misc_RNA (1)...(19): siRNA sense strand
uugaaggcgucuacaacaa

SEQ ID NO: 615502 - RNA, 19 nt, Homo sapiens
  misc_RNA (1)...(19): siRNA sense strand
ggaucgccauggagaacga

SEQ ID NO: 615503 - RNA, 19 nt, Homo sapiens
  misc_RNA (1)...(19): siRNA sense strand
agcagucuuucuucuuaua

SEQ ID NO: 615504 - RNA, 19 nt, Homo sapiens
  misc_RNA (1)...(19): siRNA sense strand
guucacuuccgaaauguug

SEQ ID NO: 615505 - RNA, 19 nt, Homo sapiens
  misc_RNA (1)...(19): siRNA sense strand
gcauuuccuuacagcuguu

SEQ ID NO: 615506 - RNA, 19 nt, Homo sapiens
  misc_RNA (1)...(19): siRNA sense strand
cuuccgaaauguugacuuc

SEQ ID NO: 615507 - RNA, 19 nt, Homo sapiens
  misc_RNA (1)...(19): siRNA sense strand
ugaaggcgucuacaacaau

SEQ ID NO: 615508 - RNA, 19 nt, Homo sapiens
  misc_RNA (1)...(19): siRNA sense strand
ugugaagacuaccuaugau

SEQ ID NO: 615509 - RNA, 19 nt, Homo sapiens
  misc_RNA (1)...(19): siRNA sense strand
ugauagcagucuuucuucu

SEQ ID NO: 615510 - RNA, 19 nt, Homo sapiens
  misc_RNA (1)...(19): siRNA sense strand
gugaugucaugcuuguuca

SEQ ID NO: 615511 - RNA, 19 nt, Homo sapiens
  misc_RNA (1)...(19): siRNA sense strand
aaaaugguaccacuuauga

SEQ ID NO: 615512 - RNA, 19 nt, Homo sapiens
  misc_RNA (1)...(19): siRNA sense strand
gaaaaggacaacucagaag

SEQ ID NO: 615513 - RNA, 19 nt, Homo sapiens
  misc_RNA (1)...(19): siRNA sense strand
gggagccgaaggcaucuug

SEQ ID NO: 615514 - RNA, 19 nt, Homo sapiens
  misc_RNA (1)...(19): siRNA sense strand
gacgaugggcgcacugaag

SEQ ID NO: 615515 - RNA, 19 nt, Homo sapiens
  misc_RNA (1)...(19): siRNA sense strand
caugaacucgaaagugaau

SEQ ID NO: 615516 - RNA, 19 nt, Homo sapiens
  misc_RNA (1)...(19): siRNA sense strand
gaccucgagucugacaugu

SEQ ID NO: 615517 - RNA, 19 nt, Homo sapiens
  misc_RNA (1)...(19): siRNA sense strand
ccacuugugauguaaaggu

SEQ ID NO: 615518 - RNA, 19 nt, Homo sapiens
  misc_RNA (1)...(19): siRNA sense strand
ggaccccaaugaaauguuc

SEQ ID NO: 615519 - RNA, 19 nt, Homo sapiens
  misc_RNA (1)...(19): siRNA sense strand
ggugugaagacuaccuaug

SEQ ID NO: 615520 - RNA, 19 nt, Homo sapiens
  misc_RNA (1)...(19): siRNA sense strand
uauacggugcccuuagaaa

SEQ ID NO: 615521 - RNA, 19 nt, Homo sapiens
  misc_RNA (1)...(19): siRNA sense strand
gccaugaacucgaaaguga

SEQ ID NO: 615522 - RNA, 19 nt, Homo sapiens
  misc_RNA (1)...(19): siRNA sense strand
gaaggcgucuacaacaauu

SEQ ID NO: 615523 - RNA, 19 nt, Homo sapiens
  misc_RNA (1)...(19): siRNA sense strand
ccaguuggcucgagagauu

SEQ ID NO: 615524 - RNA, 19 nt, Homo sapiens
  misc_RNA (1)...(19): siRNA sense strand
gaggagaacuacgguguga

SEQ ID NO: 615525 - RNA, 19 nt, Homo sapiens
  misc_RNA (1)...(19): siRNA sense strand
gggcuccacuugugaugua

SEQ ID NO: 615526 - RNA, 19 nt, Homo sapiens
  misc_RNA (1)...(19): siRNA sense strand
auagcagucuuucuucuua

SEQ ID NO: 615527 - RNA, 19 nt, Homo sapiens
  misc_RNA (1)...(19): siRNA sense strand
aaagacaaguucaccgauu

SEQ ID NO: 615528 - RNA, 19 nt, Homo sapiens
  misc_RNA (1)...(19): siRNA sense strand
ucaagacgcuaagcucaaa

SEQ ID NO: 615529 - RNA, 19 nt, Homo sapiens
  misc_RNA (1)...(19): siRNA sense strand
gaacuacggugugaagacu

SEQ ID NO: 615530 - RNA, 19 nt, Homo sapiens
  misc_RNA (1)...(19): siRNA sense strand
acuaugaccucgagucuga

SEQ ID NO: 615531 - RNA, 19 nt, Homo sapiens
  misc_RNA (1)...(19): siRNA sense strand
ggacagagcacaggaaagg

SEQ ID NO: 615532 - RNA, 19 nt, Homo sapiens
  misc_RNA (1)...(19): siRNA sense strand
caacuaugcuacuaaagac

SEQ ID NO: 615533 - RNA, 19 nt, Homo sapiens
  misc_RNA (1)...(19): siRNA sense strand
guucaccgauucagccauu

SEQ ID NO: 615534 - RNA, 19 nt, Homo sapiens
  misc_RNA (1)...(19): siRNA sense strand
gaaauguucaaguucaaug

SEQ ID NO: 615535 - RNA, 19 nt, Homo sapiens
  misc_RNA (1)...(19): siRNA sense strand
ucaacuaugcuacuaaaga

SEQ ID NO: 615536 - RNA, 19 nt, Homo sapiens
  misc_RNA (1)...(19): siRNA sense strand
gugaagacuaccuaugaua

SEQ ID NO: 615537 - RNA, 19 nt, Homo sapiens
  misc_RNA (1)...(19): siRNA sense strand
cuucaacuaugcuacuaaa

SEQ ID NO: 615538 - RNA, 19 nt, Homo sapiens
  misc_RNA (1)...(19): siRNA sense strand
gcaacagcgacgacuauga

SEQ ID NO: 615539 - RNA, 19 nt, Homo sapiens
  misc_RNA (1)...(19): siRNA sense strand
uaagccaagugaugucaug

SEQ ID NO: 615540 - RNA, 19 nt, Homo sapiens
  misc_RNA (1)...(19): siRNA sense strand
gcacugaagaggagaagca

SEQ ID NO: 615541 - RNA, 19 nt, Homo sapiens
  misc_RNA (1)...(19): siRNA sense strand
uaugauagcagucuuucuu

SEQ ID NO: 615542 - RNA, 19 nt, Homo sapiens
  misc_RNA (1)...(19): siRNA sense strand
gccaagugaugucaugcuu

SEQ ID NO: 615543 - RNA, 19 nt, Homo sapiens
  misc_RNA (1)...(19): siRNA sense strand
gugugaagacuaccuauga

SEQ ID NO: 615544 - RNA, 19 nt, Homo sapiens
  misc_RNA (1)...(19): siRNA sense strand
gacgcuaagcucaaaguuu

SEQ ID NO: 615545 - RNA, 19 nt, Homo sapiens
  misc_RNA (1)...(19): siRNA sense strand
gauagcagucuuucuucuu

SEQ ID NO: 615546 - RNA, 19 nt, Homo sapiens
  misc_RNA (1)...(19): siRNA sense strand
cuuguucacuuccgaaaug

SEQ ID NO: 615547 - RNA, 19 nt, Homo sapiens
  misc_RNA (1)...(19): siRNA sense strand
ggagaacuacggugugaag

SEQ ID NO: 615548 - RNA, 19 nt, Homo sapiens
  misc_RNA (1)...(19): siRNA sense strand
ccauugccaugaacucgaa

SEQ ID NO: 615549 - RNA, 19 nt, Homo sapiens
  misc_RNA (1)...(19): siRNA sense strand
gacuucaacuaugcuacua

SEQ ID NO: 615550 - RNA, 19 nt, Homo sapiens
  misc_RNA (1)...(19): siRNA sense strand
cuuauacggugcccuuaga

SEQ ID NO: 615551 - RNA, 19 nt, Homo sapiens
  misc_RNA (1)...(19): siRNA sense strand
aagacaaguucaccgauuc

SEQ ID NO: 615552 - RNA, 19 nt, Homo sapiens
  misc_RNA (1)...(19): siRNA sense strand
cagcaacagcgacgacuau

SEQ ID NO: 615553 - RNA, 19 nt, Homo sapiens
  misc_RNA (1)...(19): siRNA sense strand
caacagcgacgacuaugac

SEQ ID NO: 615554 - RNA, 19 nt, Homo sapiens
  misc_RNA (1)...(19): siRNA sense strand
ugucaugcuuguucacuuc

SEQ ID NO: 615555 - RNA, 19 nt, Homo sapiens
  misc_RNA (1)...(19): siRNA sense strand
agucugacauguccaaugg

SEQ ID NO: 615556 - RNA, 19 nt, Homo sapiens
  misc_RNA (1)...(19): siRNA sense strand
uagcagucuuucuucuuau

SEQ ID NO: 615557 - RNA, 19 nt, Homo sapiens
  misc_RNA (1)...(19): siRNA sense strand
uugaaggcgucuacaacaa

SEQ ID NO: 615558 - RNA, 19 nt, Homo sapiens
  misc_RNA (1)...(19): siRNA sense strand
ggaucgccauggagaacga

SEQ ID NO: 615559 - RNA, 19 nt, Homo sapiens
  misc_RNA (1)...(19): siRNA sense strand
agcagucuuucuucuuaua

SEQ ID NO: 615560 - RNA, 19 nt, Homo sapiens
  misc_RNA (1)...(19): siRNA sense strand
guucacuuccgaaauguug

SEQ ID NO: 615561 - RNA, 19 nt, Homo sapiens
  misc_RNA (1)...(19): siRNA sense strand
gcauuuccuuacagcuguu

SEQ ID NO: 615562 - RNA, 19 nt, Homo sapiens
  misc_RNA (1)...(19): siRNA sense strand
cuuccgaaauguugacuuc

SEQ ID NO: 615563 - RNA, 19 nt, Homo sapiens
  misc_RNA (1)...(19): siRNA sense strand
ugaaggcgucuacaacaau

SEQ ID NO: 615564 - RNA, 19 nt, Homo sapiens
  misc_RNA (1)...(19): siRNA sense strand
ugugaagacuaccuaugau

SEQ ID NO: 615565 - RNA, 19 nt, Homo sapiens
  misc_RNA (1)...(19): siRNA sense strand
ugauagcagucuuucuucu

SEQ ID NO: 615566 - RNA, 19 nt, Homo sapiens
  misc_RNA (1)...(19): siRNA sense strand
gugaugucaugcuuguuca

SEQ ID NO: 615567 - RNA, 19 nt, Homo sapiens
  misc_RNA (1)...(19): siRNA sense strand
aaaaugguaccacuuauga

SEQ ID NO: 615568 - RNA, 19 nt, Homo sapiens
  misc_RNA (1)...(19): siRNA sense strand
gaaaaggacaacucagaag

SEQ ID NO: 615569 - RNA, 19 nt, Homo sapiens
  misc_RNA (1)...(19): siRNA sense strand
gggagccgaaggcaucuug

SEQ ID NO: 615570 - RNA, 19 nt, Homo sapiens
  misc_RNA (1)...(19): siRNA sense strand
gacgaugggcgcacugaag

SEQ ID NO: 615571 - RNA, 19 nt, Homo sapiens
  misc_RNA (1)...(19): siRNA sense strand
caugaacucgaaagugaau

SEQ ID NO: 615572 - RNA, 19 nt, Homo sapiens
  misc_RNA (1)...(19): siRNA sense strand
gaccucgagucugacaugu

SEQ ID NO: 615573 - RNA, 19 nt, Homo sapiens
  misc_RNA (1)...(19): siRNA sense strand
ccacuugugauguaaaggu

SEQ ID NO: 615574 - RNA, 19 nt, Homo sapiens
  misc_RNA (1)...(19): siRNA sense strand
ggaccccaaugaaauguuc

SEQ ID NO: 615575 - RNA, 19 nt, Homo sapiens
  misc_RNA (1)...(19): siRNA sense strand
ggugugaagacuaccuaug

SEQ ID NO: 615576 - RNA, 19 nt, Homo sapiens
  misc_RNA (1)...(19): siRNA sense strand
uauacggugcccuuagaaa

SEQ ID NO: 615577 - RNA, 19 nt, Homo sapiens
  misc_RNA (1)...(19): siRNA sense strand
gccaugaacucgaaaguga

SEQ ID NO: 615578 - RNA, 19 nt, Homo sapiens
  misc_RNA (1)...(19): siRNA sense strand
gaaggcgucuacaacaauu

SEQ ID NO: 615579 - RNA, 19 nt, Homo sapiens
  misc_RNA (1)...(19): siRNA sense strand
ccaguuggcucgagagauu

SEQ ID NO: 615580 - RNA, 19 nt, Homo sapiens
  misc_RNA (1)...(19): siRNA sense strand
gaggagaacuacgguguga

SEQ ID NO: 615581 - RNA, 19 nt, Homo sapiens
  misc_RNA (1)...(19): siRNA sense strand
gggcuccacuugugaugua

SEQ ID NO: 615582 - RNA, 19 nt, Homo sapiens
  misc_RNA (1)...(19): siRNA sense strand
auagcagucuuucuucuua

SEQ ID NO: 615583 - RNA, 19 nt, Homo sapiens
  misc_RNA (1)...(19): siRNA sense strand
aaagacaaguucaccgauu

SEQ ID NO: 615584 - RNA, 19 nt, Homo sapiens
  misc_RNA (1)...(19): siRNA sense strand
ucaagacgcuaagcucaaa

SEQ ID NO: 615585 - RNA, 19 nt, Homo sapiens
  misc_RNA (1)...(19): siRNA sense strand
gaacuacggugugaagacu

SEQ ID NO: 615586 - RNA, 19 nt, Homo sapiens
  misc_RNA (1)...(19): siRNA sense strand
acuaugaccucgagucuga

SEQ ID NO: 615587 - RNA, 19 nt, Homo sapiens
  misc_RNA (1)...(19): siRNA sense strand
ggacagagcacaggaaagg

SEQ ID NO: 615588 - RNA, 19 nt, Homo sapiens
  misc_RNA (1)...(19): siRNA sense strand
caacuaugcuacuaaagac

SEQ ID NO: 615589 - RNA, 19 nt, Homo sapiens
  misc_RNA (1)...(19): siRNA sense strand
guucaccgauucagccauu

SEQ ID NO: 615590 - RNA, 19 nt, Homo sapiens
  misc_RNA (1)...(19): siRNA sense strand
gaaauguucaaguucaaug

SEQ ID NO: 615591 - RNA, 19 nt, Homo sapiens
  misc_RNA (1)...(19): siRNA sense strand
ucaacuaugcuacuaaaga

SEQ ID NO: 615592 - RNA, 19 nt, Homo sapiens
  misc_RNA (1)...(19): siRNA sense strand
gugaagacuaccuaugaua

SEQ ID NO: 615593 - RNA, 19 nt, Homo sapiens
  misc_RNA (1)...(19): siRNA sense strand
cuucaacuaugcuacuaaa

SEQ ID NO: 615594 - RNA, 19 nt, Homo sapiens
  misc_RNA (1)...(19): siRNA sense strand
gcaacagcgacgacuauga

SEQ ID NO: 615595 - RNA, 19 nt, Homo sapiens
  misc_RNA (1)...(19): siRNA sense strand
uaagccaagugaugucaug

SEQ ID NO: 615596 - RNA, 19 nt, Homo sapiens
  misc_RNA (1)...(19): siRNA sense strand
gcacugaagaggagaagca

SEQ ID NO: 615597 - RNA, 19 nt, Homo sapiens
  misc_RNA (1)...(19): siRNA sense strand
uaugauagcagucuuucuu

SEQ ID NO: 615598 - RNA, 19 nt, Homo sapiens
  misc_RNA (1)...(19): siRNA sense strand
gccaagugaugucaugcuu

SEQ ID NO: 615599 - RNA, 19 nt, Homo sapiens
  misc_RNA (1)...(19): siRNA sense strand
gugugaagacuaccuauga

SEQ ID NO: 615600 - RNA, 19 nt, Homo sapiens
  misc_RNA (1)...(19): siRNA sense strand
gacgcuaagcucaaaguuu

SEQ ID NO: 615601 - RNA, 19 nt, Homo sapiens
  misc_RNA (1)...(19): siRNA sense strand
gauagcagucuuucuucuu

SEQ ID NO: 615602 - RNA, 19 nt, Homo sapiens
  misc_RNA (1)...(19): siRNA sense strand
cuuguucacuuccgaaaug

SEQ ID NO: 615603 - RNA, 19 nt, Homo sapiens
  misc_RNA (1)...(19): siRNA sense strand
ggagaacuacggugugaag

SEQ ID NO: 615604 - RNA, 19 nt, Homo sapiens
  misc_RNA (1)...(19): siRNA sense strand
ccauugccaugaacucgaa

SEQ ID NO: 615605 - RNA, 19 nt, Homo sapiens
  misc_RNA (1)...(19): siRNA sense strand
gacuucaacuaugcuacua

SEQ ID NO: 615606 - RNA, 19 nt, Homo sapiens
  misc_RNA (1)...(19): siRNA sense strand
cuuauacggugcccuuaga

SEQ ID NO: 615607 - RNA, 19 nt, Homo sapiens
  misc_RNA (1)...(19): siRNA sense strand
aagacaaguucaccgauuc

SEQ ID NO: 615608 - RNA, 19 nt, Homo sapiens
  misc_RNA (1)...(19): siRNA sense strand
cagcaacagcgacgacuau

SEQ ID NO: 615609 - RNA, 19 nt, Homo sapiens
  misc_RNA (1)...(19): siRNA sense strand
caacagcgacgacuaugac

SEQ ID NO: 615610 - RNA, 19 nt, Homo sapiens
  misc_RNA (1)...(19): siRNA sense strand
ugucaugcuuguucacuuc

SEQ ID NO: 615611 - RNA, 19 nt, Homo sapiens
  misc_RNA (1)...(19): siRNA sense strand
agucugacauguccaaugg

SEQ ID NO: 615612 - RNA, 19 nt, Homo sapiens
  misc_RNA (1)...(19): siRNA sense strand
uagcagucuuucuucuuau

SEQ ID NO: 615613 - RNA, 19 nt, Homo sapiens
  misc_RNA (1)...(19): siRNA sense strand
uugaaggcgucuacaacaa

SEQ ID NO: 615614 - RNA, 19 nt, Homo sapiens
  misc_RNA (1)...(19): siRNA sense strand
ggaucgccauggagaacga

SEQ ID NO: 615615 - RNA, 19 nt, Homo sapiens
  misc_RNA (1)...(19): siRNA sense strand
agcagucuuucuucuuaua

SEQ ID NO: 615616 - RNA, 19 nt, Homo sapiens
  misc_RNA (1)...(19): siRNA sense strand
guucacuuccgaaauguug

SEQ ID NO: 615617 - RNA, 19 nt, Homo sapiens
  misc_RNA (1)...(19): siRNA sense strand
gcauuuccuuacagcuguu

SEQ ID NO: 615618 - RNA, 19 nt, Homo sapiens
  misc_RNA (1)...(19): siRNA sense strand
cuuccgaaauguugacuuc

SEQ ID NO: 615619 - RNA, 19 nt, Homo sapiens
  misc_RNA (1)...(19): siRNA sense strand
ugaaggcgucuacaacaau

SEQ ID NO: 615620 - RNA, 19 nt, Homo sapiens
  misc_RNA (1)...(19): siRNA sense strand
ugugaagacuaccuaugau

SEQ ID NO: 615621 - RNA, 19 nt, Homo sapiens
  misc_RNA (1)...(19): siRNA sense strand
ugauagcagucuuucuucu

SEQ ID NO: 615622 - RNA, 19 nt, Homo sapiens
  misc_RNA (1)...(19): siRNA sense strand
gugaugucaugcuuguuca

SEQ ID NO: 615623 - RNA, 19 nt, Homo sapiens
  misc_RNA (1)...(19): siRNA sense strand
aaaaugguaccacuuauga

SEQ ID NO: 615624 - RNA, 19 nt, Homo sapiens
  misc_RNA (1)...(19): siRNA sense strand
gaaaaggacaacucagaag

SEQ ID NO: 615625 - RNA, 19 nt, Homo sapiens
  misc_RNA (1)...(19): siRNA sense strand
gggagccgaaggcaucuug

SEQ ID NO: 615626 - RNA, 19 nt, Homo sapiens
  misc_RNA (1)...(19): siRNA sense strand
gacgaugggcgcacugaag

SEQ ID NO: 615627 - RNA, 19 nt, Homo sapiens
  misc_RNA (1)...(19): siRNA sense strand
caugaacucgaaagugaau

SEQ ID NO: 615628 - RNA, 19 nt, Homo sapiens
  misc_RNA (1)...(19): siRNA sense strand
gaccucgagucugacaugu

SEQ ID NO: 615629 - RNA, 19 nt, Homo sapiens
  misc_RNA (1)...(19): siRNA sense strand
ccacuugugauguaaaggu

SEQ ID NO: 615630 - RNA, 19 nt, Homo sapiens
  misc_RNA (1)...(19): siRNA sense strand
ggaccccaaugaaauguuc

SEQ ID NO: 615631 - RNA, 19 nt, Homo sapiens
  misc_RNA (1)...(19): siRNA sense strand
ggugugaagacuaccuaug

SEQ ID NO: 615632 - RNA, 19 nt, Homo sapiens
  misc_RNA (1)...(19): siRNA sense strand
uauacggugcccuuagaaa

SEQ ID NO: 615633 - RNA, 19 nt, Homo sapiens
  misc_RNA (1)...(19): siRNA sense strand
ggaaacagcuccagcaguu

SEQ ID NO: 615634 - RNA, 19 nt, Homo sapiens
  misc_RNA (1)...(19): siRNA sense strand
gaaguugccuguugauaaa

SEQ ID NO: 615635 - RNA, 19 nt, Homo sapiens
  misc_RNA (1)...(19): siRNA sense strand
gaacaaaucccagauggaa

SEQ ID NO: 615636 - RNA, 19 nt, Homo sapiens
  misc_RNA (1)...(19): siRNA sense strand
gaggaagagugauucguuu

SEQ ID NO: 615637 - RNA, 19 nt, Homo sapiens
  misc_RNA (1)...(19): siRNA sense strand
gauggaauguguauugaug

SEQ ID NO: 615638 - RNA, 19 nt, Homo sapiens
  misc_RNA (1)...(19): siRNA sense strand
gaagagugauucguuuaga

SEQ ID NO: 615639 - RNA, 19 nt, Homo sapiens
  misc_RNA (1)...(19): siRNA sense strand
gaaagaacaaucagcaguu

SEQ ID NO: 615640 - RNA, 19 nt, Homo sapiens
  misc_RNA (1)...(19): siRNA sense strand
gggaagaauuacucugaaa

SEQ ID NO: 615641 - RNA, 19 nt, Homo sapiens
  misc_RNA (1)...(19): siRNA sense strand
ggaaaagacuucaaacugu

SEQ ID NO: 615642 - RNA, 19 nt, Homo sapiens
  misc_RNA (1)...(19): siRNA sense strand
gaagaauuacucugaaaug

SEQ ID NO: 615643 - RNA, 19 nt, Homo sapiens
  misc_RNA (1)...(19): siRNA sense strand
gaacuggaaagaacaauca

SEQ ID NO: 615644 - RNA, 19 nt, Homo sapiens
  misc_RNA (1)...(19): siRNA sense strand
ccauuaagauugagugugu

SEQ ID NO: 615645 - RNA, 19 nt, Homo sapiens
  misc_RNA (1)...(19): siRNA sense strand
ugaaguugccuguugauaa

SEQ ID NO: 615646 - RNA, 19 nt, Homo sapiens
  misc_RNA (1)...(19): siRNA sense strand
aacaaucgcuucaaugaug

SEQ ID NO: 615647 - RNA, 19 nt, Homo sapiens
  misc_RNA (1)...(19): siRNA sense strand
gaauugcucccuacuccua

SEQ ID NO: 615648 - RNA, 19 nt, Homo sapiens
  misc_RNA (1)...(19): siRNA sense strand
gcagaaguguuuacaagcu

SEQ ID NO: 615649 - RNA, 19 nt, Homo sapiens
  misc_RNA (1)...(19): siRNA sense strand
gagggaagaauuacucuga

SEQ ID NO: 615650 - RNA, 19 nt, Homo sapiens
  misc_RNA (1)...(19): siRNA sense strand
ggaggaagagugauucguu

SEQ ID NO: 615651 - RNA, 19 nt, Homo sapiens
  misc_RNA (1)...(19): siRNA sense strand
gaagaacaaaucccagaug

SEQ ID NO: 615652 - RNA, 19 nt, Homo sapiens
  misc_RNA (1)...(19): siRNA sense strand
ccaacucucugcucuuugu

SEQ ID NO: 615653 - RNA, 19 nt, Homo sapiens
  misc_RNA (1)...(19): siRNA sense strand
ccagauggaauguguauug

SEQ ID NO: 615654 - RNA, 19 nt, Homo sapiens
  misc_RNA (1)...(19): siRNA sense strand
cagaaguguuuacaagcua

SEQ ID NO: 615655 - RNA, 19 nt, Homo sapiens
  misc_RNA (1)...(19): siRNA sense strand
guccaacucucugcucuuu

SEQ ID NO: 615656 - RNA, 19 nt, Homo sapiens
  misc_RNA (1)...(19): siRNA sense strand
aaagaacaaucagcaguug

SEQ ID NO: 615657 - RNA, 19 nt, Homo sapiens
  misc_RNA (1)...(19): siRNA sense strand
ggaagaauuacucugaaau

SEQ ID NO: 615658 - RNA, 19 nt, Homo sapiens
  misc_RNA (1)...(19): siRNA sense strand
ccgcagaaguguuuacaag

SEQ ID NO: 615659 - RNA, 19 nt, Homo sapiens
  misc_RNA (1)...(19): siRNA sense strand
caccauggcugaggaaaca

SEQ ID NO: 615660 - RNA, 19 nt, Homo sapiens
  misc_RNA (1)...(19): siRNA sense strand
cagauggaauguguauuga

SEQ ID NO: 615661 - RNA, 19 nt, Homo sapiens
  misc_RNA (1)...(19): siRNA sense strand
gggaggaaguguccaacuc

SEQ ID NO: 615662 - RNA, 19 nt, Homo sapiens
  misc_RNA (1)...(19): siRNA sense strand
ggaagagugauucguuuag

SEQ ID NO: 615663 - RNA, 19 nt, Homo sapiens
  misc_RNA (1)...(19): siRNA sense strand
gcuuuggagggaagaauua

SEQ ID NO: 615664 - RNA, 19 nt, Homo sapiens
  misc_RNA (1)...(19): siRNA sense strand
uggaugccuuugacuauga

SEQ ID NO: 615665 - RNA, 19 nt, Homo sapiens
  misc_RNA (1)...(19): siRNA sense strand
gguggaauuuucaagauaa

SEQ ID NO: 615666 - RNA, 19 nt, Homo sapiens
  misc_RNA (1)...(19): siRNA sense strand
acaaaucccagauggaaug

SEQ ID NO: 615667 - RNA, 19 nt, Homo sapiens
  misc_RNA (1)...(19): siRNA sense strand
gggauucauucaccaagca

SEQ ID NO: 615668 - RNA, 19 nt, Homo sapiens
  misc_RNA (1)...(19): siRNA sense strand
caauggaggaagagugauu

SEQ ID NO: 615669 - RNA, 19 nt, Homo sapiens
  misc_RNA (1)...(19): siRNA sense strand
ggaagaacaaaucccagau

SEQ ID NO: 615670 - RNA, 19 nt, Homo sapiens
  misc_RNA (1)...(19): siRNA sense strand
acugugaaguugccuguug

SEQ ID NO: 615671 - RNA, 19 nt, Homo sapiens
  misc_RNA (1)...(19): siRNA sense strand
gaggcuauguugccaccau

SEQ ID NO: 615672 - RNA, 19 nt, Homo sapiens
  misc_RNA (1)...(19): siRNA sense strand
accugaagcugguggaauu

SEQ ID NO: 615673 - RNA, 19 nt, Homo sapiens
  misc_RNA (1)...(19): siRNA sense strand
guggaugccuuugacuaug

SEQ ID NO: 615674 - RNA, 19 nt, Homo sapiens
  misc_RNA (1)...(19): siRNA sense strand
aaucccagauggaaugugu

SEQ ID NO: 615675 - RNA, 19 nt, Homo sapiens
  misc_RNA (1)...(19): siRNA sense strand
ggaggaaguguccaacucu

SEQ ID NO: 615676 - RNA, 19 nt, Homo sapiens
  misc_RNA (1)...(19): siRNA sense strand
uggguggccuguuacaaug

SEQ ID NO: 615677 - RNA, 19 nt, Homo sapiens
  misc_RNA (1)...(19): siRNA sense strand
uacaauggaggaagaguga

SEQ ID NO: 615678 - RNA, 19 nt, Homo sapiens
  misc_RNA (1)...(19): siRNA sense strand
gcccuguacucccucuuuc

SEQ ID NO: 615679 - RNA, 19 nt, Homo sapiens
  misc_RNA (1)...(19): siRNA sense strand
aagagugauucguuuagau

SEQ ID NO: 615680 - RNA, 19 nt, Homo sapiens
  misc_RNA (1)...(19): siRNA sense strand
aggaagagugauucguuua

SEQ ID NO: 615681 - RNA, 19 nt, Homo sapiens
  misc_RNA (1)...(19): siRNA sense strand
aaaacaaucgcuucaauga

SEQ ID NO: 615682 - RNA, 19 nt, Homo sapiens
  misc_RNA (1)...(19): siRNA sense strand
agacaggacagaucuccaa

SEQ ID NO: 615683 - RNA, 19 nt, Homo sapiens
  misc_RNA (1)...(19): siRNA sense strand
ucguuuagauccugugaca

SEQ ID NO: 615684 - RNA, 19 nt, Homo sapiens
  misc_RNA (1)...(19): siRNA sense strand
uuguagacauuccugcaaa

SEQ ID NO: 615685 - RNA, 19 nt, Homo sapiens
  misc_RNA (1)...(19): siRNA sense strand
gggaaaagacuucaaacug

SEQ ID NO: 615686 - RNA, 19 nt, Homo sapiens
  misc_RNA (1)...(19): siRNA sense strand
aaacaaucgcuucaaugau

SEQ ID NO: 615687 - RNA, 19 nt, Homo sapiens
  misc_RNA (1)...(19): siRNA sense strand
cuacuccuaugcgggauga

SEQ ID NO: 615688 - RNA, 19 nt, Homo sapiens
  misc_RNA (1)...(19): siRNA sense strand
uguggugagucuccaguau

SEQ ID NO: 615689 - RNA, 19 nt, Homo sapiens
  misc_RNA (1)...(19): siRNA sense strand
gguggccuguuacaaugga

SEQ ID NO: 615690 - RNA, 19 nt, Homo sapiens
  misc_RNA (1)...(19): siRNA sense strand
gugaaguugccuguugaua

SEQ ID NO: 615691 - RNA, 19 nt, Homo sapiens
  misc_RNA (1)...(19): siRNA sense strand
agggaagaauuacucugaa

SEQ ID NO: 615692 - RNA, 19 nt, Homo sapiens
  misc_RNA (1)...(19): siRNA sense strand
gguggauaacgacaagaaa

SEQ ID NO: 615693 - RNA, 19 nt, Homo sapiens
  misc_RNA (1)...(19): siRNA sense strand
acaacuucaugcugcuuug

SEQ ID NO: 615694 - RNA, 19 nt, Homo sapiens
  misc_RNA (1)...(19): siRNA sense strand
uccaaccgcagaaguguuu

SEQ ID NO: 615695 - RNA, 19 nt, Homo sapiens
  misc_RNA (1)...(19): siRNA sense strand
gaaacagcuccagcaguuc

SEQ ID NO: 615696 - RNA, 19 nt, Homo sapiens
  misc_RNA (1)...(19): siRNA sense strand
ucucugcucuuuguagaca

SEQ ID NO: 615697 - RNA, 19 nt, Homo sapiens
  misc_RNA (1)...(19): siRNA sense strand
aaacagcuccagcaguucu

SEQ ID NO: 615698 - RNA, 19 nt, Homo sapiens
  misc_RNA (1)...(19): siRNA sense strand
gaaguguuuacaagcuaga

SEQ ID NO: 615699 - RNA, 19 nt, Homo sapiens
  misc_RNA (1)...(19): siRNA sense strand
cguggaugccuuugacuau

SEQ ID NO: 615700 - RNA, 19 nt, Homo sapiens
  misc_RNA (1)...(19): siRNA sense strand
ggcccuguacucccucuuu

SEQ ID NO: 615701 - RNA, 19 nt, Homo sapiens
  misc_RNA (1)...(19): siRNA sense strand
aagcaaguacagcgaguga

SEQ ID NO: 615702 - RNA, 19 nt, Homo sapiens
  misc_RNA (1)...(19): siRNA sense strand
cugugaaguugccuguuga

SEQ ID NO: 615703 - RNA, 19 nt, Homo sapiens
  misc_RNA (1)...(19): siRNA sense strand
acucucugcucuuuguaga

SEQ ID NO: 615704 - RNA, 19 nt, Homo sapiens
  misc_RNA (1)...(19): siRNA sense strand
ggaaacagcuccagcaguu

SEQ ID NO: 615705 - RNA, 19 nt, Homo sapiens
  misc_RNA (1)...(19): siRNA sense strand
gaaguugccuguugauaaa

SEQ ID NO: 615706 - RNA, 19 nt, Homo sapiens
  misc_RNA (1)...(19): siRNA sense strand
gaacaaaucccagauggaa

SEQ ID NO: 615707 - RNA, 19 nt, Homo sapiens
  misc_RNA (1)...(19): siRNA sense strand
gaggaagagugauucguuu

SEQ ID NO: 615708 - RNA, 19 nt, Homo sapiens
  misc_RNA (1)...(19): siRNA sense strand
gauggaauguguauugaug

SEQ ID NO: 615709 - RNA, 19 nt, Homo sapiens
  misc_RNA (1)...(19): siRNA sense strand
gaagagugauucguuuaga

SEQ ID NO: 615710 - RNA, 19 nt, Homo sapiens
  misc_RNA (1)...(19): siRNA sense strand
gaaagaacaaucagcaguu

SEQ ID NO: 615711 - RNA, 19 nt, Homo sapiens
  misc_RNA (1)...(19): siRNA sense strand
gggaagaauuacucugaaa

SEQ ID NO: 615712 - RNA, 19 nt, Homo sapiens
  misc_RNA (1)...(19): siRNA sense strand
ggaaaagacuucaaacugu

SEQ ID NO: 615713 - RNA, 19 nt, Homo sapiens
  misc_RNA (1)...(19): siRNA sense strand
gaagaauuacucugaaaug

SEQ ID NO: 615714 - RNA, 19 nt, Homo sapiens
  misc_RNA (1)...(19): siRNA sense strand
gaacuggaaagaacaauca

SEQ ID NO: 615715 - RNA, 19 nt, Homo sapiens
  misc_RNA (1)...(19): siRNA sense strand
ccauuaagauugagugugu

SEQ ID NO: 615716 - RNA, 19 nt, Homo sapiens
  misc_RNA (1)...(19): siRNA sense strand
ugaaguugccuguugauaa

SEQ ID NO: 615717 - RNA, 19 nt, Homo sapiens
  misc_RNA (1)...(19): siRNA sense strand
aacaaucgcuucaaugaug

SEQ ID NO: 615718 - RNA, 19 nt, Homo sapiens
  misc_RNA (1)...(19): siRNA sense strand
gaauugcucccuacuccua

SEQ ID NO: 615719 - RNA, 19 nt, Homo sapiens
  misc_RNA (1)...(19): siRNA sense strand
gcagaaguguuuacaagcu

SEQ ID NO: 615720 - RNA, 19 nt, Homo sapiens
  misc_RNA (1)...(19): siRNA sense strand
gagggaagaauuacucuga

SEQ ID NO: 615721 - RNA, 19 nt, Homo sapiens
  misc_RNA (1)...(19): siRNA sense strand
ggaggaagagugauucguu

SEQ ID NO: 615722 - RNA, 19 nt, Homo sapiens
  misc_RNA (1)...(19): siRNA sense strand
gaagaacaaaucccagaug

SEQ ID NO: 615723 - RNA, 19 nt, Homo sapiens
  misc_RNA (1)...(19): siRNA sense strand
ccaacucucugcucuuugu

SEQ ID NO: 615724 - RNA, 19 nt, Homo sapiens
  misc_RNA (1)...(19): siRNA sense strand
ccagauggaauguguauug

SEQ ID NO: 615725 - RNA, 19 nt, Homo sapiens
  misc_RNA (1)...(19): siRNA sense strand
cagaaguguuuacaagcua

SEQ ID NO: 615726 - RNA, 19 nt, Homo sapiens
  misc_RNA (1)...(19): siRNA sense strand
guccaacucucugcucuuu

SEQ ID NO: 615727 - RNA, 19 nt, Homo sapiens
  misc_RNA (1)...(19): siRNA sense strand
aaagaacaaucagcaguug

SEQ ID NO: 615728 - RNA, 19 nt, Homo sapiens
  misc_RNA (1)...(19): siRNA sense strand
ggaagaauuacucugaaau

SEQ ID NO: 615729 - RNA, 19 nt, Homo sapiens
  misc_RNA (1)...(19): siRNA sense strand
ccgcagaaguguuuacaag

SEQ ID NO: 615730 - RNA, 19 nt, Homo sapiens
  misc_RNA (1)...(19): siRNA sense strand
caccauggcugaggaaaca

SEQ ID NO: 615731 - RNA, 19 nt, Homo sapiens
  misc_RNA (1)...(19): siRNA sense strand
cagauggaauguguauuga

SEQ ID NO: 615732 - RNA, 19 nt, Homo sapiens
  misc_RNA (1)...(19): siRNA sense strand
gggaggaaguguccaacuc

SEQ ID NO: 615733 - RNA, 19 nt, Homo sapiens
  misc_RNA (1)...(19): siRNA sense strand
ggaagagugauucguuuag

SEQ ID NO: 615734 - RNA, 19 nt, Homo sapiens
  misc_RNA (1)...(19): siRNA sense strand
gcuuuggagggaagaauua

SEQ ID NO: 615735 - RNA, 19 nt, Homo sapiens
  misc_RNA (1)...(19): siRNA sense strand
uggaugccuuugacuauga

SEQ ID NO: 615736 - RNA, 19 nt, Homo sapiens
  misc_RNA (1)...(19): siRNA sense strand
gguggaauuuucaagauaa

SEQ ID NO: 615737 - RNA, 19 nt, Homo sapiens
  misc_RNA (1)...(19): siRNA sense strand
acaaaucccagauggaaug

SEQ ID NO: 615738 - RNA, 19 nt, Homo sapiens
  misc_RNA (1)...(19): siRNA sense strand
gggauucauucaccaagca

SEQ ID NO: 615739 - RNA, 19 nt, Homo sapiens
  misc_RNA (1)...(19): siRNA sense strand
caauggaggaagagugauu

SEQ ID NO: 615740 - RNA, 19 nt, Homo sapiens
  misc_RNA (1)...(19): siRNA sense strand
ggaagaacaaaucccagau

SEQ ID NO: 615741 - RNA, 19 nt, Homo sapiens
  misc_RNA (1)...(19): siRNA sense strand
acugugaaguugccuguug

SEQ ID NO: 615742 - RNA, 19 nt, Homo sapiens
  misc_RNA (1)...(19): siRNA sense strand
gaggcuauguugccaccau

SEQ ID NO: 615743 - RNA, 19 nt, Homo sapiens
  misc_RNA (1)...(19): siRNA sense strand
accugaagcugguggaauu

SEQ ID NO: 615744 - RNA, 19 nt, Homo sapiens
  misc_RNA (1)...(19): siRNA sense strand
guggaugccuuugacuaug

SEQ ID NO: 615745 - RNA, 19 nt, Homo sapiens
  misc_RNA (1)...(19): siRNA sense strand
aaucccagauggaaugugu

SEQ ID NO: 615746 - RNA, 19 nt, Homo sapiens
  misc_RNA (1)...(19): siRNA sense strand
ggaggaaguguccaacucu

SEQ ID NO: 615747 - RNA, 19 nt, Homo sapiens
  misc_RNA (1)...(19): siRNA sense strand
uggguggccuguuacaaug

SEQ ID NO: 615748 - RNA, 19 nt, Homo sapiens
  misc_RNA (1)...(19): siRNA sense strand
uacaauggaggaagaguga

SEQ ID NO: 615749 - RNA, 19 nt, Homo sapiens
  misc_RNA (1)...(19): siRNA sense strand
gcccuguacucccucuuuc

SEQ ID NO: 615750 - RNA, 19 nt, Homo sapiens
  misc_RNA (1)...(19): siRNA sense strand
aagagugauucguuuagau

SEQ ID NO: 615751 - RNA, 19 nt, Homo sapiens
  misc_RNA (1)...(19): siRNA sense strand
aggaagagugauucguuua

SEQ ID NO: 615752 - RNA, 19 nt, Homo sapiens
  misc_RNA (1)...(19): siRNA sense strand
aaaacaaucgcuucaauga

SEQ ID NO: 615753 - RNA, 19 nt, Homo sapiens
  misc_RNA (1)...(19): siRNA sense strand
agacaggacagaucuccaa

SEQ ID NO: 615754 - RNA, 19 nt, Homo sapiens
  misc_RNA (1)...(19): siRNA sense strand
ucguuuagauccugugaca

SEQ ID NO: 615755 - RNA, 19 nt, Homo sapiens
  misc_RNA (1)...(19): siRNA sense strand
uuguagacauuccugcaaa

SEQ ID NO: 615756 - RNA, 19 nt, Homo sapiens
  misc_RNA (1)...(19): siRNA sense strand
gggaaaagacuucaaacug

SEQ ID NO: 615757 - RNA, 19 nt, Homo sapiens
  misc_RNA (1)...(19): siRNA sense strand
aaacaaucgcuucaaugau

SEQ ID NO: 615758 - RNA, 19 nt, Homo sapiens
  misc_RNA (1)...(19): siRNA sense strand
cuacuccuaugcgggauga

SEQ ID NO: 615759 - RNA, 19 nt, Homo sapiens
  misc_RNA (1)...(19): siRNA sense strand
uguggugagucuccaguau

SEQ ID NO: 615760 - RNA, 19 nt, Homo sapiens
  misc_RNA (1)...(19): siRNA sense strand
gguggccuguuacaaugga

SEQ ID NO: 615761 - RNA, 19 nt, Homo sapiens
  misc_RNA (1)...(19): siRNA sense strand
gugaaguugccuguugaua

SEQ ID NO: 615762 - RNA, 19 nt, Homo sapiens
  misc_RNA (1)...(19): siRNA sense strand
agggaagaauuacucugaa

SEQ ID NO: 615763 - RNA, 19 nt, Homo sapiens
  misc_RNA (1)...(19): siRNA sense strand
gguggauaacgacaagaaa

SEQ ID NO: 615764 - RNA, 19 nt, Homo sapiens
  misc_RNA (1)...(19): siRNA sense strand
acaacuucaugcugcuuug

SEQ ID NO: 615765 - RNA, 19 nt, Homo sapiens
  misc_RNA (1)...(19): siRNA sense strand
uccaaccgcagaaguguuu

SEQ ID NO: 615766 - RNA, 19 nt, Homo sapiens
  misc_RNA (1)...(19): siRNA sense strand
gaaacagcuccagcaguuc

SEQ ID NO: 615767 - RNA, 19 nt, Homo sapiens
  misc_RNA (1)...(19): siRNA sense strand
ucucugcucuuuguagaca

SEQ ID NO: 615768 - RNA, 19 nt, Homo sapiens
  misc_RNA (1)...(19): siRNA sense strand
aaacagcuccagcaguucu

SEQ ID NO: 615769 - RNA, 19 nt, Homo sapiens
  misc_RNA (1)...(19): siRNA sense strand
gaaguguuuacaagcuaga

SEQ ID NO: 615770 - RNA, 19 nt, Homo sapiens
  misc_RNA (1)...(19): siRNA sense strand
cguggaugccuuugacuau

SEQ ID NO: 615771 - RNA, 19 nt, Homo sapiens
  misc_RNA (1)...(19): siRNA sense strand
ggcccuguacucccucuuu

SEQ ID NO: 615772 - RNA, 19 nt, Homo sapiens
  misc_RNA (1)...(19): siRNA sense strand
aagcaaguacagcgaguga

SEQ ID NO: 615773 - RNA, 19 nt, Homo sapiens
  misc_RNA (1)...(19): siRNA sense strand
cugugaaguugccuguuga

SEQ ID NO: 615774 - RNA, 19 nt, Homo sapiens
  misc_RNA (1)...(19): siRNA sense strand
acucucugcucuuuguaga

SEQ ID NO: 615775 - RNA, 19 nt, Homo sapiens
  misc_RNA (1)...(19): siRNA sense strand
ugaagaagcuguaaagaaa

SEQ ID NO: 615776 - RNA, 19 nt, Homo sapiens
  misc_RNA (1)...(19): siRNA sense strand
gaaggucacuguccauuuc

SEQ ID NO: 615777 - RNA, 19 nt, Homo sapiens
  misc_RNA (1)...(19): siRNA sense strand
uaaggaagaugauucagaa

SEQ ID NO: 615778 - RNA, 19 nt, Homo sapiens
  misc_RNA (1)...(19): siRNA sense strand
ggaagaagaugaggacagu

SEQ ID NO: 615779 - RNA, 19 nt, Homo sapiens
  misc_RNA (1)...(19): siRNA sense strand
cgaagaaacugggaaagga

SEQ ID NO: 615780 - RNA, 19 nt, Homo sapiens
  misc_RNA (1)...(19): siRNA sense strand
ggagggaguuaacaaguuc

SEQ ID NO: 615781 - RNA, 19 nt, Homo sapiens
  misc_RNA (1)...(19): siRNA sense strand
ggaagaugauucagaagca

SEQ ID NO: 615782 - RNA, 19 nt, Homo sapiens
  misc_RNA (1)...(19): siRNA sense strand
gaagaugaggacagugaua

SEQ ID NO: 615783 - RNA, 19 nt, Homo sapiens
  misc_RNA (1)...(19): siRNA sense strand
agagugaggucaagccuuu

SEQ ID NO: 615784 - RNA, 19 nt, Homo sapiens
  misc_RNA (1)...(19): siRNA sense strand
ggaagucaauuugcagaug

SEQ ID NO: 615785 - RNA, 19 nt, Homo sapiens
  misc_RNA (1)...(19): siRNA sense strand
ggacacagaggaagaggaa

SEQ ID NO: 615786 - RNA, 19 nt, Homo sapiens
  misc_RNA (1)...(19): siRNA sense strand
gcagggaagucaauuugca

SEQ ID NO: 615787 - RNA, 19 nt, Homo sapiens
  misc_RNA (1)...(19): siRNA sense strand
ggaggaagaugaggaugug

SEQ ID NO: 615788 - RNA, 19 nt, Homo sapiens
  misc_RNA (1)...(19): siRNA sense strand
gaguuaacaaguucucuua

SEQ ID NO: 615789 - RNA, 19 nt, Homo sapiens
  misc_RNA (1)...(19): siRNA sense strand
ggaggaggacgaugaagaa

SEQ ID NO: 615790 - RNA, 19 nt, Homo sapiens
  misc_RNA (1)...(19): siRNA sense strand
ggaggaagaugaggacagu

SEQ ID NO: 615791 - RNA, 19 nt, Homo sapiens
  misc_RNA (1)...(19): siRNA sense strand
ggaagaggaagaugaggaa

SEQ ID NO: 615792 - RNA, 19 nt, Homo sapiens
  misc_RNA (1)...(19): siRNA sense strand
ggacagugacucuggauca

SEQ ID NO: 615793 - RNA, 19 nt, Homo sapiens
  misc_RNA (1)...(19): siRNA sense strand
ggagaaagccgaggaagag

SEQ ID NO: 615794 - RNA, 19 nt, Homo sapiens
  misc_RNA (1)...(19): siRNA sense strand
guuaacaaguucucuuauc

SEQ ID NO: 615795 - RNA, 19 nt, Homo sapiens
  misc_RNA (1)...(19): siRNA sense strand
gaaaagagacagaggaaga

SEQ ID NO: 615796 - RNA, 19 nt, Homo sapiens
  misc_RNA (1)...(19): siRNA sense strand
ggaggacgaugaagaagcu

SEQ ID NO: 615797 - RNA, 19 nt, Homo sapiens
  misc_RNA (1)...(19): siRNA sense strand
agaggaagaugaggaagaa

SEQ ID NO: 615798 - RNA, 19 nt, Homo sapiens
  misc_RNA (1)...(19): siRNA sense strand
aaagaaagaagcucacaga

SEQ ID NO: 615799 - RNA, 19 nt, Homo sapiens
  misc_RNA (1)...(19): siRNA sense strand
ggaaaaggcacacgaagaa

SEQ ID NO: 615800 - RNA, 19 nt, Homo sapiens
  misc_RNA (1)...(19): siRNA sense strand
aagaagcuguaaagaaaga

SEQ ID NO: 615801 - RNA, 19 nt, Homo sapiens
  misc_RNA (1)...(19): siRNA sense strand
ggauaaggaagaugauuca

SEQ ID NO: 615802 - RNA, 19 nt, Homo sapiens
  misc_RNA (1)...(19): siRNA sense strand
gggcagggaagucaauuug

SEQ ID NO: 615803 - RNA, 19 nt, Homo sapiens
  misc_RNA (1)...(19): siRNA sense strand
gaagcagccuuaggagaag

SEQ ID NO: 615804 - RNA, 19 nt, Homo sapiens
  misc_RNA (1)...(19): siRNA sense strand
agaagcagccuuaggagaa

SEQ ID NO: 615805 - RNA, 19 nt, Homo sapiens
  misc_RNA (1)...(19): siRNA sense strand
gaaguaaaggagccaggaa

SEQ ID NO: 615806 - RNA, 19 nt, Homo sapiens
  misc_RNA (1)...(19): siRNA sense strand
ggacgaugaagaagcugua

SEQ ID NO: 615807 - RNA, 19 nt, Homo sapiens
  misc_RNA (1)...(19): siRNA sense strand
ggaagagggaguugcugaa

SEQ ID NO: 615808 - RNA, 19 nt, Homo sapiens
  misc_RNA (1)...(19): siRNA sense strand
gaacagaaagaaguaaagg

SEQ ID NO: 615809 - RNA, 19 nt, Homo sapiens
  misc_RNA (1)...(19): siRNA sense strand
ggauguggauagugaggau

SEQ ID NO: 615810 - RNA, 19 nt, Homo sapiens
  misc_RNA (1)...(19): siRNA sense strand
gaagaugaggauguggaua

SEQ ID NO: 615811 - RNA, 19 nt, Homo sapiens
  misc_RNA (1)...(19): siRNA sense strand
cagaggaggaggaagauga

SEQ ID NO: 615812 - RNA, 19 nt, Homo sapiens
  misc_RNA (1)...(19): siRNA sense strand
ggacacagaggaggaggaa

SEQ ID NO: 615813 - RNA, 19 nt, Homo sapiens
  misc_RNA (1)...(19): siRNA sense strand
agaggaggcugaagacagu

SEQ ID NO: 615814 - RNA, 19 nt, Homo sapiens
  misc_RNA (1)...(19): siRNA sense strand
gaagcucacagaaccucua

SEQ ID NO: 615815 - RNA, 19 nt, Homo sapiens
  misc_RNA (1)...(19): siRNA sense strand
ccucaggaacccaccuuua

SEQ ID NO: 615816 - RNA, 19 nt, Homo sapiens
  misc_RNA (1)...(19): siRNA sense strand
gcucacagaaccucuacuu

SEQ ID NO: 615817 - RNA, 19 nt, Homo sapiens
  misc_RNA (1)...(19): siRNA sense strand
gagaggacacagaggaaga

SEQ ID NO: 615818 - RNA, 19 nt, Homo sapiens
  misc_RNA (1)...(19): siRNA sense strand
acacagaggaggaggaaga

SEQ ID NO: 615819 - RNA, 19 nt, Homo sapiens
  misc_RNA (1)...(19): siRNA sense strand
ggaagaugaggaagaagau

SEQ ID NO: 615820 - RNA, 19 nt, Homo sapiens
  misc_RNA (1)...(19): siRNA sense strand
ggaggaggaggacgaugaa

SEQ ID NO: 615821 - RNA, 19 nt, Homo sapiens
  misc_RNA (1)...(19): siRNA sense strand
ugagaaggauggagaagcu

SEQ ID NO: 615822 - RNA, 19 nt, Homo sapiens
  misc_RNA (1)...(19): siRNA sense strand
gaagaagcuguaaagaaag

SEQ ID NO: 615823 - RNA, 19 nt, Homo sapiens
  misc_RNA (1)...(19): siRNA sense strand
ggaguuaacaaguucucuu

SEQ ID NO: 615824 - RNA, 19 nt, Homo sapiens
  misc_RNA (1)...(19): siRNA sense strand
gagaaggucacuguccauu

SEQ ID NO: 615825 - RNA, 19 nt, Homo sapiens
  misc_RNA (1)...(19): siRNA sense strand
cuauguaccuggagagaag

SEQ ID NO: 615826 - RNA, 19 nt, Homo sapiens
  misc_RNA (1)...(19): siRNA sense strand
ggauggagaagcugagugu

SEQ ID NO: 615827 - RNA, 19 nt, Homo sapiens
  misc_RNA (1)...(19): siRNA sense strand
ugaugaugauggcauguau

SEQ ID NO: 615828 - RNA, 19 nt, Homo sapiens
  misc_RNA (1)...(19): siRNA sense strand
ucucccagccuucugauaa

SEQ ID NO: 615829 - RNA, 19 nt, Homo sapiens
  misc_RNA (1)...(19): siRNA sense strand
ccgaguggccaucuaugua

SEQ ID NO: 615830 - RNA, 19 nt, Homo sapiens
  misc_RNA (1)...(19): siRNA sense strand
cagaggaagaggaagauga

SEQ ID NO: 615831 - RNA, 19 nt, Homo sapiens
  misc_RNA (1)...(19): siRNA sense strand
gaagaggagggaguuaaca

SEQ ID NO: 615832 - RNA, 19 nt, Homo sapiens
  misc_RNA (1)...(19): siRNA sense strand
acacugcaagguucugaua

SEQ ID NO: 615833 - RNA, 19 nt, Homo sapiens
  misc_RNA (1)...(19): siRNA sense strand
augaggauguggauaguga

SEQ ID NO: 615834 - RNA, 19 nt, Homo sapiens
  misc_RNA (1)...(19): siRNA sense strand
gugaggauaaggaagauga

SEQ ID NO: 615835 - RNA, 19 nt, Homo sapiens
  misc_RNA (1)...(19): siRNA sense strand
ggauagugaggauaaggaa

SEQ ID NO: 615836 - RNA, 19 nt, Homo sapiens
  misc_RNA (1)...(19): siRNA sense strand
gaagagggaguugcugaag

SEQ ID NO: 615837 - RNA, 19 nt, Homo sapiens
  misc_RNA (1)...(19): siRNA sense strand
gaaagagaagcugagacuu

SEQ ID NO: 615838 - RNA, 19 nt, Homo sapiens
  misc_RNA (1)...(19): siRNA sense strand
aagaagaugaggacaguga

SEQ ID NO: 615839 - RNA, 19 nt, Homo sapiens
  misc_RNA (1)...(19): siRNA sense strand
gagaggcguccgaggagaa

SEQ ID NO: 615840 - RNA, 19 nt, Homo sapiens
  misc_RNA (1)...(19): siRNA sense strand
aggagggaguuaacaaguu

SEQ ID NO: 615841 - RNA, 19 nt, Homo sapiens
  misc_RNA (1)...(19): siRNA sense strand
aagagggaguugcugaaga

SEQ ID NO: 615842 - RNA, 19 nt, Homo sapiens
  misc_RNA (1)...(19): siRNA sense strand
gaggagggaguuaacaagu

SEQ ID NO: 615843 - RNA, 19 nt, Homo sapiens
  misc_RNA (1)...(19): siRNA sense strand
ugauucagaagcagccuua

SEQ ID NO: 615844 - RNA, 19 nt, Homo sapiens
  misc_RNA (1)...(19): siRNA sense strand
gaugaaagagaagcugaga

SEQ ID NO: 615845 - RNA, 19 nt, Homo sapiens
  misc_RNA (1)...(19): siRNA sense strand
acacagaggaagaggaaga

SEQ ID NO: 615846 - RNA, 19 nt, Homo sapiens
  misc_RNA (1)...(19): siRNA sense strand
gaugaagaagcuguaaaga

SEQ ID NO: 615847 - RNA, 19 nt, Homo sapiens
  misc_RNA (1)...(19): siRNA sense strand
agagggaguugcugaagag

SEQ ID NO: 615848 - RNA, 19 nt, Homo sapiens
  misc_RNA (1)...(19): siRNA sense strand
gaggauaaggaagaugauu

SEQ ID NO: 615849 - RNA, 19 nt, Homo sapiens
  misc_RNA (1)...(19): siRNA sense strand
ugaaagagaagcugagacu

SEQ ID NO: 615850 - RNA, 19 nt, Homo sapiens
  misc_RNA (1)...(19): siRNA sense strand
gugaugaagaggagaguga

SEQ ID NO: 615851 - RNA, 19 nt, Homo sapiens
  misc_RNA (1)...(19): siRNA sense strand
cugcaagguucugauaaga

SEQ ID NO: 615852 - RNA, 19 nt, Homo sapiens
  misc_RNA (1)...(19): siRNA sense strand
ggaagaugaggauguggau

SEQ ID NO: 615853 - RNA, 19 nt, Homo sapiens
  misc_RNA (1)...(19): siRNA sense strand
ggaggaggaagaugaggau

SEQ ID NO: 615854 - RNA, 19 nt, Homo sapiens
  misc_RNA (1)...(19): siRNA sense strand
cggaggaggaggaagauga

SEQ ID NO: 615855 - RNA, 19 nt, Homo sapiens
  misc_RNA (1)...(19): siRNA sense strand
gaagaugaggaagaagaug

SEQ ID NO: 615856 - RNA, 19 nt, Homo sapiens
  misc_RNA (1)...(19): siRNA sense strand
ggacacugcaagguucuga

SEQ ID NO: 615857 - RNA, 19 nt, Homo sapiens
  misc_RNA (1)...(19): siRNA sense strand
ggaggagaaagccgaggaa

SEQ ID NO: 615858 - RNA, 19 nt, Homo sapiens
  misc_RNA (1)...(19): siRNA sense strand
ggcaaccagugucccuaga

SEQ ID NO: 615859 - RNA, 19 nt, Homo sapiens
  misc_RNA (1)...(19): siRNA sense strand
acacggaggaggaggaaga

SEQ ID NO: 615860 - RNA, 19 nt, Homo sapiens
  misc_RNA (1)...(19): siRNA sense strand
ggacacggaggaggaggaa

SEQ ID NO: 615861 - RNA, 19 nt, Homo sapiens
  misc_RNA (1)...(19): siRNA sense strand
caggaucagccgaggauga

SEQ ID NO: 615862 - RNA, 19 nt, Homo sapiens
  misc_RNA (1)...(19): siRNA sense strand
gaggauaaaagaacagaaa

SEQ ID NO: 615863 - RNA, 19 nt, Homo sapiens
  misc_RNA (1)...(19): siRNA sense strand
augaagaagcuguaaagaa

SEQ ID NO: 615864 - RNA, 19 nt, Homo sapiens
  misc_RNA (1)...(19): siRNA sense strand
uuaacaaguucucuuaucc

SEQ ID NO: 615865 - RNA, 19 nt, Homo sapiens
  misc_RNA (1)...(19): siRNA sense strand
agaaggucacuguccauuu

SEQ ID NO: 615866 - RNA, 19 nt, Homo sapiens
  misc_RNA (1)...(19): siRNA sense strand
gaucagccgaggaugaaag

SEQ ID NO: 615867 - RNA, 19 nt, Homo sapiens
  misc_RNA (1)...(19): siRNA sense strand
aagaugaggaagaagauga

SEQ ID NO: 615868 - RNA, 19 nt, Homo sapiens
  misc_RNA (1)...(19): siRNA sense strand
cugaaggccuggguguauu

SEQ ID NO: 615869 - RNA, 19 nt, Homo sapiens
  misc_RNA (1)...(19): siRNA sense strand
acacgaagaaacugggaaa

SEQ ID NO: 615870 - RNA, 19 nt, Homo sapiens
  misc_RNA (1)...(19): siRNA sense strand
gauaaggacacugcaaggu

SEQ ID NO: 615871 - RNA, 19 nt, Homo sapiens
  misc_RNA (1)...(19): siRNA sense strand
agaaagaagcucacagaac

SEQ ID NO: 615872 - RNA, 19 nt, Homo sapiens
  misc_RNA (1)...(19): siRNA sense strand
cgaugaagaagcuguaaag

SEQ ID NO: 615873 - RNA, 19 nt, Homo sapiens
  misc_RNA (1)...(19): siRNA sense strand
gagaaacacuggggcugaa

SEQ ID NO: 615874 - RNA, 19 nt, Homo sapiens
  misc_RNA (1)...(19): siRNA sense strand
agagacagaggaagaggaa

SEQ ID NO: 615875 - RNA, 19 nt, Homo sapiens
  misc_RNA (1)...(19): siRNA sense strand
aagaagagcucagauagaa

SEQ ID NO: 615876 - RNA, 19 nt, Homo sapiens
  misc_RNA (1)...(19): siRNA sense strand
gcagauacuuggagaaugg

SEQ ID NO: 615877 - RNA, 19 nt, Homo sapiens
  misc_RNA (1)...(19): siRNA sense strand
gagcucagauagaaacaga

SEQ ID NO: 615878 - RNA, 19 nt, Homo sapiens
  misc_RNA (1)...(19): siRNA sense strand
gaagaagagcucagauaga

SEQ ID NO: 615879 - RNA, 19 nt, Homo sapiens
  misc_RNA (1)...(19): siRNA sense strand
ggaagaagagcucagauag

SEQ ID NO: 615880 - RNA, 19 nt, Homo sapiens
  misc_RNA (1)...(19): siRNA sense strand
ucucacagcuaauaaagug

SEQ ID NO: 615881 - RNA, 19 nt, Homo sapiens
  misc_RNA (1)...(19): siRNA sense strand
gcugugauguggaggaaga

SEQ ID NO: 615882 - RNA, 19 nt, Homo sapiens
  misc_RNA (1)...(19): siRNA sense strand
gggugucucucacagcuaa

SEQ ID NO: 615883 - RNA, 19 nt, Homo sapiens
  misc_RNA (1)...(19): siRNA sense strand
caucguugcuggccuuguu

SEQ ID NO: 615884 - RNA, 19 nt, Homo sapiens
  misc_RNA (1)...(19): siRNA sense strand
gaagagcucagauagaaac

SEQ ID NO: 615885 - RNA, 19 nt, Homo sapiens
  misc_RNA (1)...(19): siRNA sense strand
ucacccagcgcuucuauga

SEQ ID NO: 615886 - RNA, 19 nt, Homo sapiens
  misc_RNA (1)...(19): siRNA sense strand
gcgcgcagauccuccaaag

SEQ ID NO: 615887 - RNA, 19 nt, Homo sapiens
  misc_RNA (1)...(19): siRNA sense strand
cagaggaguucaggaccua

SEQ ID NO: 615888 - RNA, 19 nt, Homo sapiens
  misc_RNA (1)...(19): siRNA sense strand
ucuaugaggcagaggaaua

SEQ ID NO: 615889 - RNA, 19 nt, Homo sapiens
  misc_RNA (1)...(19): siRNA sense strand
ggaggaagaagagcucaga

SEQ ID NO: 615890 - RNA, 19 nt, Homo sapiens
  misc_RNA (1)...(19): siRNA sense strand
ggaauaugcagaggaguuc

SEQ ID NO: 615891 - RNA, 19 nt, Homo sapiens
  misc_RNA (1)...(19): siRNA sense strand
uguggucgcugcugugaug

SEQ ID NO: 615892 - RNA, 19 nt, Homo sapiens
  misc_RNA (1)...(19): siRNA sense strand
aggaagaagagcucagaua

SEQ ID NO: 615893 - RNA, 19 nt, Homo sapiens
  misc_RNA (1)...(19): siRNA sense strand
ggagaggaacagagauaca

SEQ ID NO: 615894 - RNA, 19 nt, Homo sapiens
  misc_RNA (1)...(19): siRNA sense strand
cguacgacggcaaggauua

SEQ ID NO: 615895 - RNA, 19 nt, Homo sapiens
  misc_RNA (1)...(19): siRNA sense strand
gaucacccagcgcuucuau

SEQ ID NO: 615896 - RNA, 19 nt, Homo sapiens
  misc_RNA (1)...(19): siRNA sense strand
aggauuacaucucccugaa

SEQ ID NO: 615897 - RNA, 19 nt, Homo sapiens
  misc_RNA (1)...(19): siRNA sense strand
gcgagugccuggaguugcu

SEQ ID NO: 615898 - RNA, 19 nt, Homo sapiens
  misc_RNA (1)...(19): siRNA sense strand
ggacaccguggcucagauc

SEQ ID NO: 615899 - RNA, 19 nt, Homo sapiens
  misc_RNA (1)...(19): siRNA sense strand
ggaacagacccaggacaca

SEQ ID NO: 615900 - RNA, 19 nt, Homo sapiens
  misc_RNA (1)...(19): siRNA sense strand
cuggagaggaacagagaua

SEQ ID NO: 615901 - RNA, 19 nt, Homo sapiens
  misc_RNA (1)...(19): siRNA sense strand
cuacaucgccguggaguac

SEQ ID NO: 615902 - RNA, 19 nt, Homo sapiens
  misc_RNA (1)...(19): siRNA sense strand
gcucccacuccuugaggua

SEQ ID NO: 615903 - RNA, 19 nt, Homo sapiens
  misc_RNA (1)...(19): siRNA sense strand
caaaggagauagaaaugua

SEQ ID NO: 615904 - RNA, 19 nt, Homo sapiens
  misc_RNA (1)...(19): siRNA sense strand
gcagaaagcggguaugaua

SEQ ID NO: 615905 - RNA, 19 nt, Homo sapiens
  misc_RNA (1)...(19): siRNA sense strand
uaacgaagcucgauaaagu

SEQ ID NO: 615906 - RNA, 19 nt, Homo sapiens
  misc_RNA (1)...(19): siRNA sense strand
ggaaaccaguggauauuaa

SEQ ID NO: 615907 - RNA, 19 nt, Homo sapiens
  misc_RNA (1)...(19): siRNA sense strand
gaaagacaguguuacagaa

SEQ ID NO: 615908 - RNA, 19 nt, Homo sapiens
  misc_RNA (1)...(19): siRNA sense strand
gcaaugcucacaccaaaua

SEQ ID NO: 615909 - RNA, 19 nt, Homo sapiens
  misc_RNA (1)...(19): siRNA sense strand
gagaguggauugcccagua

SEQ ID NO: 615910 - RNA, 19 nt, Homo sapiens
  misc_RNA (1)...(19): siRNA sense strand
aaacggaucuccaacuaaa

SEQ ID NO: 615911 - RNA, 19 nt, Homo sapiens
  misc_RNA (1)...(19): siRNA sense strand
gauguuuacucuucacuuu

SEQ ID NO: 615912 - RNA, 19 nt, Homo sapiens
  misc_RNA (1)...(19): siRNA sense strand
gaauaacgaagcucgauaa

SEQ ID NO: 615913 - RNA, 19 nt, Homo sapiens
  misc_RNA (1)...(19): siRNA sense strand
gaaagcggguaugauauug

SEQ ID NO: 615914 - RNA, 19 nt, Homo sapiens
  misc_RNA (1)...(19): siRNA sense strand
agaaaucuuugucuccuua

SEQ ID NO: 615915 - RNA, 19 nt, Homo sapiens
  misc_RNA (1)...(19): siRNA sense strand
gaggaggcaucucuggaua

SEQ ID NO: 615916 - RNA, 19 nt, Homo sapiens
  misc_RNA (1)...(19): siRNA sense strand
ucaaacggaucuccaacua

SEQ ID NO: 615917 - RNA, 19 nt, Homo sapiens
  misc_RNA (1)...(19): siRNA sense strand
gguaugauauugccuuguu

SEQ ID NO: 615918 - RNA, 19 nt, Homo sapiens
  misc_RNA (1)...(19): siRNA sense strand
gaggacacaucuuucuuug

SEQ ID NO: 615919 - RNA, 19 nt, Homo sapiens
  misc_RNA (1)...(19): siRNA sense strand
gaaggacaccugcuuugaa

SEQ ID NO: 615920 - RNA, 19 nt, Homo sapiens
  misc_RNA (1)...(19): siRNA sense strand
ccaaagaaucucaaagaaa

SEQ ID NO: 615921 - RNA, 19 nt, Homo sapiens
  misc_RNA (1)...(19): siRNA sense strand
gcacuuaccacccaagaug

SEQ ID NO: 615922 - RNA, 19 nt, Homo sapiens
  misc_RNA (1)...(19): siRNA sense strand
gauauugccuuguugaaac

SEQ ID NO: 615923 - RNA, 19 nt, Homo sapiens
  misc_RNA (1)...(19): siRNA sense strand
guucugccauucuucauuu

SEQ ID NO: 615924 - RNA, 19 nt, Homo sapiens
  misc_RNA (1)...(19): siRNA sense strand
ccaugacacugauuucuug

SEQ ID NO: 615925 - RNA, 19 nt, Homo sapiens
  misc_RNA (1)...(19): siRNA sense strand
gaucccacccgaugguuua

SEQ ID NO: 615926 - RNA, 19 nt, Homo sapiens
  misc_RNA (1)...(19): siRNA sense strand
ggauacacauuaagguugu

SEQ ID NO: 615927 - RNA, 19 nt, Homo sapiens
  misc_RNA (1)...(19): siRNA sense strand
cagaaacacugccaagagu

SEQ ID NO: 615928 - RNA, 19 nt, Homo sapiens
  misc_RNA (1)...(19): siRNA sense strand
uuacacagauucucaacga

SEQ ID NO: 615929 - RNA, 19 nt, Homo sapiens
  misc_RNA (1)...(19): siRNA sense strand
ggacauuacuacggucuuc

SEQ ID NO: 615930 - RNA, 19 nt, Homo sapiens
  misc_RNA (1)...(19): siRNA sense strand
cagaaacugugcaccaaug

SEQ ID NO: 615931 - RNA, 19 nt, Homo sapiens
  misc_RNA (1)...(19): siRNA sense strand
uuucuaaucuggcuuguau

SEQ ID NO: 615932 - RNA, 19 nt, Homo sapiens
  misc_RNA (1)...(19): siRNA sense strand
gaaagccaagauacccuua

SEQ ID NO: 615933 - RNA, 19 nt, Homo sapiens
  misc_RNA (1)...(19): siRNA sense strand
ugacucaguuguugaagga

SEQ ID NO: 615934 - RNA, 19 nt, Homo sapiens
  misc_RNA (1)...(19): siRNA sense strand
gugaaugugugacucaguu

SEQ ID NO: 615935 - RNA, 19 nt, Homo sapiens
  misc_RNA (1)...(19): siRNA sense strand
gaauaggacagcagcgauu

SEQ ID NO: 615936 - RNA, 19 nt, Homo sapiens
  misc_RNA (1)...(19): siRNA sense strand
gcccaaagaaucucaaaga

SEQ ID NO: 615937 - RNA, 19 nt, Homo sapiens
  misc_RNA (1)...(19): siRNA sense strand
uaacauuugucuacugaag

SEQ ID NO: 615938 - RNA, 19 nt, Homo sapiens
  misc_RNA (1)...(19): siRNA sense strand
uuacuuguguccugaaaga

SEQ ID NO: 615939 - RNA, 19 nt, Homo sapiens
  misc_RNA (1)...(19): siRNA sense strand
ggacauaaaauaacccaua

SEQ ID NO: 615940 - RNA, 19 nt, Homo sapiens
  misc_RNA (1)...(19): siRNA sense strand
ucacgaggccugccagaaa

SEQ ID NO: 615941 - RNA, 19 nt, Homo sapiens
  misc_RNA (1)...(19): siRNA sense strand
ggccgaaucugcacucauc

SEQ ID NO: 615942 - RNA, 19 nt, Homo sapiens
  misc_RNA (1)...(19): siRNA sense strand
gguauucuuucaagcaaug

SEQ ID NO: 615943 - RNA, 19 nt, Homo sapiens
  misc_RNA (1)...(19): siRNA sense strand
ggcgaaggcugugcucaaa

SEQ ID NO: 615944 - RNA, 19 nt, Homo sapiens
  misc_RNA (1)...(19): siRNA sense strand
gccaagauacccuuaguga

SEQ ID NO: 615945 - RNA, 19 nt, Homo sapiens
  misc_RNA (1)...(19): siRNA sense strand
uaaaguggugucuggauuu

SEQ ID NO: 615946 - RNA, 19 nt, Homo sapiens
  misc_RNA (1)...(19): siRNA sense strand
caagugguacauuucauuu

SEQ ID NO: 615947 - RNA, 19 nt, Homo sapiens
  misc_RNA (1)...(19): siRNA sense strand
cccaaagaaucucaaagaa

SEQ ID NO: 615948 - RNA, 19 nt, Homo sapiens
  misc_RNA (1)...(19): siRNA sense strand
ggaggcaucucuggauaca

SEQ ID NO: 615949 - RNA, 19 nt, Homo sapiens
  misc_RNA (1)...(19): siRNA sense strand
gaagagugccagaagagau

SEQ ID NO: 615950 - RNA, 19 nt, Homo sapiens
  misc_RNA (1)...(19): siRNA sense strand
ggacaccugcuuugaagga

SEQ ID NO: 615951 - RNA, 19 nt, Homo sapiens
  misc_RNA (1)...(19): siRNA sense strand
ccauaugccugccuuccaa

SEQ ID NO: 615952 - RNA, 19 nt, Homo sapiens
  misc_RNA (1)...(19): siRNA sense strand
guagagucaccuaagauuu

SEQ ID NO: 615953 - RNA, 19 nt, Homo sapiens
  misc_RNA (1)...(19): siRNA sense strand
ugaaagacaguguuacaga

SEQ ID NO: 615954 - RNA, 19 nt, Homo sapiens
  misc_RNA (1)...(19): siRNA sense strand
ggaauggcccaaagaaucu

SEQ ID NO: 615955 - RNA, 19 nt, Homo sapiens
  misc_RNA (1)...(19): siRNA sense strand
uggaaaccacagugaauua

SEQ ID NO: 615956 - RNA, 19 nt, Homo sapiens
  misc_RNA (1)...(19): siRNA sense strand
gaagagauacagaggacau

SEQ ID NO: 615957 - RNA, 19 nt, Homo sapiens
  misc_RNA (1)...(19): siRNA sense strand
gguagagucaccuaagauu

SEQ ID NO: 615958 - RNA, 19 nt, Homo sapiens
  misc_RNA (1)...(19): siRNA sense strand
gagauacagaggacauaaa

SEQ ID NO: 615959 - RNA, 19 nt, Homo sapiens
  misc_RNA (1)...(19): siRNA sense strand
gaagggaagggcaaguguu

SEQ ID NO: 615960 - RNA, 19 nt, Homo sapiens
  misc_RNA (1)...(19): siRNA sense strand
agaaagcggguaugauauu

SEQ ID NO: 615961 - RNA, 19 nt, Homo sapiens
  misc_RNA (1)...(19): siRNA sense strand
auaaaguggugucuggauu

SEQ ID NO: 615962 - RNA, 19 nt, Homo sapiens
  misc_RNA (1)...(19): siRNA sense strand
caacgaagagugccagaag

SEQ ID NO: 615963 - RNA, 19 nt, Homo sapiens
  misc_RNA (1)...(19): siRNA sense strand
caaacggaucuccaacuaa

SEQ ID NO: 615964 - RNA, 19 nt, Homo sapiens
  misc_RNA (1)...(19): siRNA sense strand
gccagaaacugugcaccaa

SEQ ID NO: 615965 - RNA, 19 nt, Homo sapiens
  misc_RNA (1)...(19): siRNA sense strand
acagugaauuacacagauu

SEQ ID NO: 615966 - RNA, 19 nt, Homo sapiens
  misc_RNA (1)...(19): siRNA sense strand
aagggaagggcaaguguua

SEQ ID NO: 615967 - RNA, 19 nt, Homo sapiens
  misc_RNA (1)...(19): siRNA sense strand
aaagacaguguuacagaaa

SEQ ID NO: 615968 - RNA, 19 nt, Homo sapiens
  misc_RNA (1)...(19): siRNA sense strand
cgaaggcugugcucaaagg

SEQ ID NO: 615969 - RNA, 19 nt, Homo sapiens
  misc_RNA (1)...(19): siRNA sense strand
gcagcgauuucuggguauu

SEQ ID NO: 615970 - RNA, 19 nt, Homo sapiens
  misc_RNA (1)...(19): siRNA sense strand
gaaaccacagugaauuaca

SEQ ID NO: 615971 - RNA, 19 nt, Homo sapiens
  misc_RNA (1)...(19): siRNA sense strand
ccaguguucugccauucuu

SEQ ID NO: 615972 - RNA, 19 nt, Homo sapiens
  misc_RNA (1)...(19): siRNA sense strand
ccugugcacuuucuaaucu

SEQ ID NO: 615973 - RNA, 19 nt, Homo sapiens
  misc_RNA (1)...(19): siRNA sense strand
gccagguagucugcacuua

SEQ ID NO: 615974 - RNA, 19 nt, Homo sapiens
  misc_RNA (1)...(19): siRNA sense strand
gaaaucuuugucuccuuaa

SEQ ID NO: 615975 - RNA, 19 nt, Homo sapiens
  misc_RNA (1)...(19): siRNA sense strand
ccacagugaauuacacaga

SEQ ID NO: 615976 - RNA, 19 nt, Homo sapiens
  misc_RNA (1)...(19): siRNA sense strand
agaggacacaucuuucuuu

SEQ ID NO: 615977 - RNA, 19 nt, Homo sapiens
  misc_RNA (1)...(19): siRNA sense strand
ucaagugguacauuucauu

SEQ ID NO: 615978 - RNA, 19 nt, Homo sapiens
  misc_RNA (1)...(19): siRNA sense strand
cacccaagauguuuacucu

SEQ ID NO: 615979 - RNA, 19 nt, Homo sapiens
  misc_RNA (1)...(19): siRNA sense strand
acaaugaggucuggcaucu

SEQ ID NO: 615980 - RNA, 19 nt, Homo sapiens
  misc_RNA (1)...(19): siRNA sense strand
aagagugccagaagagaua

SEQ ID NO: 615981 - RNA, 19 nt, Homo sapiens
  misc_RNA (1)...(19): siRNA sense strand
acaaaauacucuccagaaa

SEQ ID NO: 615982 - RNA, 19 nt, Homo sapiens
  misc_RNA (1)...(19): siRNA sense strand
uaaugaguguaccaccaaa

SEQ ID NO: 615983 - RNA, 19 nt, Homo sapiens
  misc_RNA (1)...(19): siRNA sense strand
aggcaucucuggauacaca

SEQ ID NO: 615984 - RNA, 19 nt, Homo sapiens
  misc_RNA (1)...(19): siRNA sense strand
cugaaauccugugcacuuu

SEQ ID NO: 615985 - RNA, 19 nt, Homo sapiens
  misc_RNA (1)...(19): siRNA sense strand
gggacaccaaccagaauaa

SEQ ID NO: 615986 - RNA, 19 nt, Homo sapiens
  misc_RNA (1)...(19): siRNA sense strand
caucucuggauacacauua

SEQ ID NO: 615987 - RNA, 19 nt, Homo sapiens
  misc_RNA (1)...(19): siRNA sense strand
gauaaaguggugucuggau

SEQ ID NO: 615988 - RNA, 19 nt, Homo sapiens
  misc_RNA (1)...(19): siRNA sense strand
aaggacaccugcuuugaag

SEQ ID NO: 615989 - RNA, 19 nt, Homo sapiens
  misc_RNA (1)...(19): siRNA sense strand
guaugauauugccuuguug

SEQ ID NO: 615990 - RNA, 19 nt, Homo sapiens
  misc_RNA (1)...(19): siRNA sense strand
uggaaaccaguggauauua

SEQ ID NO: 615991 - RNA, 19 nt, Homo sapiens
  misc_RNA (1)...(19): siRNA sense strand
ucacaccaagcgccaagua

SEQ ID NO: 615992 - RNA, 19 nt, Homo sapiens
  misc_RNA (1)...(19): siRNA sense strand
ugaaggacaccugcuuuga

SEQ ID NO: 615993 - RNA, 19 nt, Homo sapiens
  misc_RNA (1)...(19): siRNA sense strand
cagaaagcggguaugauau

SEQ ID NO: 615994 - RNA, 19 nt, Homo sapiens
  misc_RNA (1)...(19): siRNA sense strand
ucaucccgguugcuuguuu

SEQ ID NO: 615995 - RNA, 19 nt, Homo sapiens
  misc_RNA (1)...(19): siRNA sense strand
agaauaacgaagcucgaua

SEQ ID NO: 615996 - RNA, 19 nt, Homo sapiens
  misc_RNA (1)...(19): siRNA sense strand
cacagugaauuacacagau

SEQ ID NO: 615997 - RNA, 19 nt, Homo sapiens
  misc_RNA (1)...(19): siRNA sense strand
guccugaaagacaguguua

SEQ ID NO: 615998 - RNA, 19 nt, Homo sapiens
  misc_RNA (1)...(19): siRNA sense strand
acagcaacaucgacagugu

SEQ ID NO: 615999 - RNA, 19 nt, Homo sapiens
  misc_RNA (1)...(19): siRNA sense strand
uguuuacucuucacuuuca

SEQ ID NO: 616000 - RNA, 19 nt, Homo sapiens
  misc_RNA (1)...(19): siRNA sense strand
gggcgaaggcugugcucaa

SEQ ID NO: 616001 - RNA, 19 nt, Homo sapiens
  misc_RNA (1)...(19): siRNA sense strand
ccaaaggagauagaaaugu

SEQ ID NO: 616002 - RNA, 19 nt, Homo sapiens
  misc_RNA (1)...(19): siRNA sense strand
ggaaaccacagugaauuac

SEQ ID NO: 616003 - RNA, 19 nt, Homo sapiens
  misc_RNA (1)...(19): siRNA sense strand
caaaggagauagaaaugua

SEQ ID NO: 616004 - RNA, 19 nt, Homo sapiens
  misc_RNA (1)...(19): siRNA sense strand
gcagaaagcggguaugaua

SEQ ID NO: 616005 - RNA, 19 nt, Homo sapiens
  misc_RNA (1)...(19): siRNA sense strand
uaacgaagcucgauaaagu

SEQ ID NO: 616006 - RNA, 19 nt, Homo sapiens
  misc_RNA (1)...(19): siRNA sense strand
ggaaaccaguggauauuaa

SEQ ID NO: 616007 - RNA, 19 nt, Homo sapiens
  misc_RNA (1)...(19): siRNA sense strand
gaaagacaguguuacagaa

SEQ ID NO: 616008 - RNA, 19 nt, Homo sapiens
  misc_RNA (1)...(19): siRNA sense strand
gcaaugcucacaccaaaua

SEQ ID NO: 616009 - RNA, 19 nt, Homo sapiens
  misc_RNA (1)...(19): siRNA sense strand
gagaguggauugcccagua

SEQ ID NO: 616010 - RNA, 19 nt, Homo sapiens
  misc_RNA (1)...(19): siRNA sense strand
aaacggaucuccaacuaaa

SEQ ID NO: 616011 - RNA, 19 nt, Homo sapiens
  misc_RNA (1)...(19): siRNA sense strand
gauguuuacucuucacuuu

SEQ ID NO: 616012 - RNA, 19 nt, Homo sapiens
  misc_RNA (1)...(19): siRNA sense strand
gaauaacgaagcucgauaa

SEQ ID NO: 616013 - RNA, 19 nt, Homo sapiens
  misc_RNA (1)...(19): siRNA sense strand
gaaagcggguaugauauug

SEQ ID NO: 616014 - RNA, 19 nt, Homo sapiens
  misc_RNA (1)...(19): siRNA sense strand
agaaaucuuugucuccuua

SEQ ID NO: 616015 - RNA, 19 nt, Homo sapiens
  misc_RNA (1)...(19): siRNA sense strand
gaggaggcaucucuggaua

SEQ ID NO: 616016 - RNA, 19 nt, Homo sapiens
  misc_RNA (1)...(19): siRNA sense strand
ucaaacggaucuccaacua

SEQ ID NO: 616017 - RNA, 19 nt, Homo sapiens
  misc_RNA (1)...(19): siRNA sense strand
gguaugauauugccuuguu

SEQ ID NO: 616018 - RNA, 19 nt, Homo sapiens
  misc_RNA (1)...(19): siRNA sense strand
gaggacacaucuuucuuug

SEQ ID NO: 616019 - RNA, 19 nt, Homo sapiens
  misc_RNA (1)...(19): siRNA sense strand
gaaggacaccugcuuugaa

SEQ ID NO: 616020 - RNA, 19 nt, Homo sapiens
  misc_RNA (1)...(19): siRNA sense strand
ccaaagaaucucaaagaaa

SEQ ID NO: 616021 - RNA, 19 nt, Homo sapiens
  misc_RNA (1)...(19): siRNA sense strand
gcacuuaccacccaagaug

SEQ ID NO: 616022 - RNA, 19 nt, Homo sapiens
  misc_RNA (1)...(19): siRNA sense strand
gauauugccuuguugaaac

SEQ ID NO: 616023 - RNA, 19 nt, Homo sapiens
  misc_RNA (1)...(19): siRNA sense strand
guucugccauucuucauuu

SEQ ID NO: 616024 - RNA, 19 nt, Homo sapiens
  misc_RNA (1)...(19): siRNA sense strand
ccaugacacugauuucuug

SEQ ID NO: 616025 - RNA, 19 nt, Homo sapiens
  misc_RNA (1)...(19): siRNA sense strand
gaucccacccgaugguuua

SEQ ID NO: 616026 - RNA, 19 nt, Homo sapiens
  misc_RNA (1)...(19): siRNA sense strand
ggauacacauuaagguugu

SEQ ID NO: 616027 - RNA, 19 nt, Homo sapiens
  misc_RNA (1)...(19): siRNA sense strand
cagaaacacugccaagagu

SEQ ID NO: 616028 - RNA, 19 nt, Homo sapiens
  misc_RNA (1)...(19): siRNA sense strand
uuacacagauucucaacga

SEQ ID NO: 616029 - RNA, 19 nt, Homo sapiens
  misc_RNA (1)...(19): siRNA sense strand
ggacauuacuacggucuuc

SEQ ID NO: 616030 - RNA, 19 nt, Homo sapiens
  misc_RNA (1)...(19): siRNA sense strand
cagaaacugugcaccaaug

SEQ ID NO: 616031 - RNA, 19 nt, Homo sapiens
  misc_RNA (1)...(19): siRNA sense strand
uuucuaaucuggcuuguau

SEQ ID NO: 616032 - RNA, 19 nt, Homo sapiens
  misc_RNA (1)...(19): siRNA sense strand
gaaagccaagauacccuua

SEQ ID NO: 616033 - RNA, 19 nt, Homo sapiens
  misc_RNA (1)...(19): siRNA sense strand
ugacucaguuguugaagga

SEQ ID NO: 616034 - RNA, 19 nt, Homo sapiens
  misc_RNA (1)...(19): siRNA sense strand
gugaaugugugacucaguu

SEQ ID NO: 616035 - RNA, 19 nt, Homo sapiens
  misc_RNA (1)...(19): siRNA sense strand
gaauaggacagcagcgauu

SEQ ID NO: 616036 - RNA, 19 nt, Homo sapiens
  misc_RNA (1)...(19): siRNA sense strand
gcccaaagaaucucaaaga

SEQ ID NO: 616037 - RNA, 19 nt, Homo sapiens
  misc_RNA (1)...(19): siRNA sense strand
uaacauuugucuacugaag

SEQ ID NO: 616038 - RNA, 19 nt, Homo sapiens
  misc_RNA (1)...(19): siRNA sense strand
uuacuuguguccugaaaga

SEQ ID NO: 616039 - RNA, 19 nt, Homo sapiens
  misc_RNA (1)...(19): siRNA sense strand
ggacauaaaauaacccaua

SEQ ID NO: 616040 - RNA, 19 nt, Homo sapiens
  misc_RNA (1)...(19): siRNA sense strand
ucacgaggccugccagaaa

SEQ ID NO: 616041 - RNA, 19 nt, Homo sapiens
  misc_RNA (1)...(19): siRNA sense strand
ggccgaaucugcacucauc

SEQ ID NO: 616042 - RNA, 19 nt, Homo sapiens
  misc_RNA (1)...(19): siRNA sense strand
gguauucuuucaagcaaug

SEQ ID NO: 616043 - RNA, 19 nt, Homo sapiens
  misc_RNA (1)...(19): siRNA sense strand
ggcgaaggcugugcucaaa

SEQ ID NO: 616044 - RNA, 19 nt, Homo sapiens
  misc_RNA (1)...(19): siRNA sense strand
gccaagauacccuuaguga

SEQ ID NO: 616045 - RNA, 19 nt, Homo sapiens
  misc_RNA (1)...(19): siRNA sense strand
uaaaguggugucuggauuu

SEQ ID NO: 616046 - RNA, 19 nt, Homo sapiens
  misc_RNA (1)...(19): siRNA sense strand
caagugguacauuucauuu

SEQ ID NO: 616047 - RNA, 19 nt, Homo sapiens
  misc_RNA (1)...(19): siRNA sense strand
cccaaagaaucucaaagaa

SEQ ID NO: 616048 - RNA, 19 nt, Homo sapiens
  misc_RNA (1)...(19): siRNA sense strand
ggaggcaucucuggauaca

SEQ ID NO: 616049 - RNA, 19 nt, Homo sapiens
  misc_RNA (1)...(19): siRNA sense strand
gaagagugccagaagagau

SEQ ID NO: 616050 - RNA, 19 nt, Homo sapiens
  misc_RNA (1)...(19): siRNA sense strand
ggacaccugcuuugaagga

SEQ ID NO: 616051 - RNA, 19 nt, Homo sapiens
  misc_RNA (1)...(19): siRNA sense strand
ccauaugccugccuuccaa

SEQ ID NO: 616052 - RNA, 19 nt, Homo sapiens
  misc_RNA (1)...(19): siRNA sense strand
guagagucaccuaagauuu

SEQ ID NO: 616053 - RNA, 19 nt, Homo sapiens
  misc_RNA (1)...(19): siRNA sense strand
ugaaagacaguguuacaga

SEQ ID NO: 616054 - RNA, 19 nt, Homo sapiens
  misc_RNA (1)...(19): siRNA sense strand
ggaauggcccaaagaaucu

SEQ ID NO: 616055 - RNA, 19 nt, Homo sapiens
  misc_RNA (1)...(19): siRNA sense strand
uggaaaccacagugaauua

SEQ ID NO: 616056 - RNA, 19 nt, Homo sapiens
  misc_RNA (1)...(19): siRNA sense strand
gaagagauacagaggacau

SEQ ID NO: 616057 - RNA, 19 nt, Homo sapiens
  misc_RNA (1)...(19): siRNA sense strand
gguagagucaccuaagauu

SEQ ID NO: 616058 - RNA, 19 nt, Homo sapiens
  misc_RNA (1)...(19): siRNA sense strand
gagauacagaggacauaaa

SEQ ID NO: 616059 - RNA, 19 nt, Homo sapiens
  misc_RNA (1)...(19): siRNA sense strand
gaagggaagggcaaguguu

SEQ ID NO: 616060 - RNA, 19 nt, Homo sapiens
  misc_RNA (1)...(19): siRNA sense strand
agaaagcggguaugauauu

SEQ ID NO: 616061 - RNA, 19 nt, Homo sapiens
  misc_RNA (1)...(19): siRNA sense strand
auaaaguggugucuggauu

SEQ ID NO: 616062 - RNA, 19 nt, Homo sapiens
  misc_RNA (1)...(19): siRNA sense strand
caacgaagagugccagaag

SEQ ID NO: 616063 - RNA, 19 nt, Homo sapiens
  misc_RNA (1)...(19): siRNA sense strand
caaacggaucuccaacuaa

SEQ ID NO: 616064 - RNA, 19 nt, Homo sapiens
  misc_RNA (1)...(19): siRNA sense strand
gccagaaacugugcaccaa

SEQ ID NO: 616065 - RNA, 19 nt, Homo sapiens
  misc_RNA (1)...(19): siRNA sense strand
acagugaauuacacagauu

SEQ ID NO: 616066 - RNA, 19 nt, Homo sapiens
  misc_RNA (1)...(19): siRNA sense strand
aagggaagggcaaguguua

SEQ ID NO: 616067 - RNA, 19 nt, Homo sapiens
  misc_RNA (1)...(19): siRNA sense strand
aaagacaguguuacagaaa

SEQ ID NO: 616068 - RNA, 19 nt, Homo sapiens
  misc_RNA (1)...(19): siRNA sense strand
cgaaggcugugcucaaagg

SEQ ID NO: 616069 - RNA, 19 nt, Homo sapiens
  misc_RNA (1)...(19): siRNA sense strand
gcagcgauuucuggguauu

SEQ ID NO: 616070 - RNA, 19 nt, Homo sapiens
  misc_RNA (1)...(19): siRNA sense strand
gaaaccacagugaauuaca

SEQ ID NO: 616071 - RNA, 19 nt, Homo sapiens
  misc_RNA (1)...(19): siRNA sense strand
ccaguguucugccauucuu

SEQ ID NO: 616072 - RNA, 19 nt, Homo sapiens
  misc_RNA (1)...(19): siRNA sense strand
ccugugcacuuucuaaucu

SEQ ID NO: 616073 - RNA, 19 nt, Homo sapiens
  misc_RNA (1)...(19): siRNA sense strand
gccagguagucugcacuua

SEQ ID NO: 616074 - RNA, 19 nt, Homo sapiens
  misc_RNA (1)...(19): siRNA sense strand
gaaaucuuugucuccuuaa

SEQ ID NO: 616075 - RNA, 19 nt, Homo sapiens
  misc_RNA (1)...(19): siRNA sense strand
ccacagugaauuacacaga

SEQ ID NO: 616076 - RNA, 19 nt, Homo sapiens
  misc_RNA (1)...(19): siRNA sense strand
agaggacacaucuuucuuu

SEQ ID NO: 616077 - RNA, 19 nt, Homo sapiens
  misc_RNA (1)...(19): siRNA sense strand
ucaagugguacauuucauu

SEQ ID NO: 616078 - RNA, 19 nt, Homo sapiens
  misc_RNA (1)...(19): siRNA sense strand
cacccaagauguuuacucu

SEQ ID NO: 616079 - RNA, 19 nt, Homo sapiens
  misc_RNA (1)...(19): siRNA sense strand
acaaugaggucuggcaucu

SEQ ID NO: 616080 - RNA, 19 nt, Homo sapiens
  misc_RNA (1)...(19): siRNA sense strand
aagagugccagaagagaua

SEQ ID NO: 616081 - RNA, 19 nt, Homo sapiens
  misc_RNA (1)...(19): siRNA sense strand
acaaaauacucuccagaaa

SEQ ID NO: 616082 - RNA, 19 nt, Homo sapiens
  misc_RNA (1)...(19): siRNA sense strand
uaaugaguguaccaccaaa

SEQ ID NO: 616083 - RNA, 19 nt, Homo sapiens
  misc_RNA (1)...(19): siRNA sense strand
aggcaucucuggauacaca

SEQ ID NO: 616084 - RNA, 19 nt, Homo sapiens
  misc_RNA (1)...(19): siRNA sense strand
cugaaauccugugcacuuu

SEQ ID NO: 616085 - RNA, 19 nt, Homo sapiens
  misc_RNA (1)...(19): siRNA sense strand
gggacaccaaccagaauaa

SEQ ID NO: 616086 - RNA, 19 nt, Homo sapiens
  misc_RNA (1)...(19): siRNA sense strand
caucucuggauacacauua

SEQ ID NO: 616087 - RNA, 19 nt, Homo sapiens
  misc_RNA (1)...(19): siRNA sense strand
gauaaaguggugucuggau

SEQ ID NO: 616088 - RNA, 19 nt, Homo sapiens
  misc_RNA (1)...(19): siRNA sense strand
aaggacaccugcuuugaag

SEQ ID NO: 616089 - RNA, 19 nt, Homo sapiens
  misc_RNA (1)...(19): siRNA sense strand
guaugauauugccuuguug

SEQ ID NO: 616090 - RNA, 19 nt, Homo sapiens
  misc_RNA (1)...(19): siRNA sense strand
uggaaaccaguggauauua

SEQ ID NO: 616091 - RNA, 19 nt, Homo sapiens
  misc_RNA (1)...(19): siRNA sense strand
ucacaccaagcgccaagua

SEQ ID NO: 616092 - RNA, 19 nt, Homo sapiens
  misc_RNA (1)...(19): siRNA sense strand
ugaaggacaccugcuuuga

SEQ ID NO: 616093 - RNA, 19 nt, Homo sapiens
  misc_RNA (1)...(19): siRNA sense strand
cagaaagcggguaugauau

SEQ ID NO: 616094 - RNA, 19 nt, Homo sapiens
  misc_RNA (1)...(19): siRNA sense strand
ucaucccgguugcuuguuu

SEQ ID NO: 616095 - RNA, 19 nt, Homo sapiens
  misc_RNA (1)...(19): siRNA sense strand
agaauaacgaagcucgaua

SEQ ID NO: 616096 - RNA, 19 nt, Homo sapiens
  misc_RNA (1)...(19): siRNA sense strand
cacagugaauuacacagau

SEQ ID NO: 616097 - RNA, 19 nt, Homo sapiens
  misc_RNA (1)...(19): siRNA sense strand
guccugaaagacaguguua

SEQ ID NO: 616098 - RNA, 19 nt, Homo sapiens
  misc_RNA (1)...(19): siRNA sense strand
acagcaacaucgacagugu

SEQ ID NO: 616099 - RNA, 19 nt, Homo sapiens
  misc_RNA (1)...(19): siRNA sense strand
uguuuacucuucacuuuca

SEQ ID NO: 616100 - RNA, 19 nt, Homo sapiens
  misc_RNA (1)...(19): siRNA sense strand
gggcgaaggcugugcucaa

SEQ ID NO: 616101 - RNA, 19 nt, Homo sapiens
  misc_RNA (1)...(19): siRNA sense strand
ccaaaggagauagaaaugu

SEQ ID NO: 616102 - RNA, 19 nt, Homo sapiens
  misc_RNA (1)...(19): siRNA sense strand
ggaaaccacagugaauuac

SEQ ID NO: 616103 - RNA, 19 nt, Homo sapiens
  misc_RNA (1)...(19): siRNA sense strand
gcagagauauuacagauug

SEQ ID NO: 616104 - RNA, 19 nt, Homo sapiens
  misc_RNA (1)...(19): siRNA sense strand
gguggaaucugcagaaaua

SEQ ID NO: 616105 - RNA, 19 nt, Homo sapiens
  misc_RNA (1)...(19): siRNA sense strand
caacagacauugcugaaga

SEQ ID NO: 616106 - RNA, 19 nt, Homo sapiens
  misc_RNA (1)...(19): siRNA sense strand
gagacaauguaucgaaaua

SEQ ID NO: 616107 - RNA, 19 nt, Homo sapiens
  misc_RNA (1)...(19): siRNA sense strand
caaaggacauguuaaagau

SEQ ID NO: 616108 - RNA, 19 nt, Homo sapiens
  misc_RNA (1)...(19): siRNA sense strand
gcaaauggagcucccuuua

SEQ ID NO: 616109 - RNA, 19 nt, Homo sapiens
  misc_RNA (1)...(19): siRNA sense strand
caaauauggugcugaugua

SEQ ID NO: 616110 - RNA, 19 nt, Homo sapiens
  misc_RNA (1)...(19): siRNA sense strand
gcaaaggacauguuaaaga

SEQ ID NO: 616111 - RNA, 19 nt, Homo sapiens
  misc_RNA (1)...(19): siRNA sense strand
caagucaucacaauaguua

SEQ ID NO: 616112 - RNA, 19 nt, Homo sapiens
  misc_RNA (1)...(19): siRNA sense strand
caacaaguauuaacaguac

SEQ ID NO: 616113 - RNA, 19 nt, Homo sapiens
  misc_RNA (1)...(19): siRNA sense strand
gaugacagcucuccauugg

SEQ ID NO: 616114 - RNA, 19 nt, Homo sapiens
  misc_RNA (1)...(19): siRNA sense strand
gacaauacaugcugcaaca

SEQ ID NO: 616115 - RNA, 19 nt, Homo sapiens
  misc_RNA (1)...(19): siRNA sense strand
gaugaugaaguucguauuu

SEQ ID NO: 616116 - RNA, 19 nt, Homo sapiens
  misc_RNA (1)...(19): siRNA sense strand
gaagaaacuguuauaagug

SEQ ID NO: 616117 - RNA, 19 nt, Homo sapiens
  misc_RNA (1)...(19): siRNA sense strand
gaccgaacaccauuacaua

SEQ ID NO: 616118 - RNA, 19 nt, Homo sapiens
  misc_RNA (1)...(19): siRNA sense strand
ccacagaacacaaucauca

SEQ ID NO: 616119 - RNA, 19 nt, Homo sapiens
  misc_RNA (1)...(19): siRNA sense strand
gcauggugcugaugucaau

SEQ ID NO: 616120 - RNA, 19 nt, Homo sapiens
  misc_RNA (1)...(19): siRNA sense strand
gcugggaacuucuccacuu

SEQ ID NO: 616121 - RNA, 19 nt, Homo sapiens
  misc_RNA (1)...(19): siRNA sense strand
gauguacacacgcaaagua

SEQ ID NO: 616122 - RNA, 19 nt, Homo sapiens
  misc_RNA (1)...(19): siRNA sense strand
gugcugaugucaaugcaaa

SEQ ID NO: 616123 - RNA, 19 nt, Homo sapiens
  misc_RNA (1)...(19): siRNA sense strand
uagcagagauauuacagau

SEQ ID NO: 616124 - RNA, 19 nt, Homo sapiens
  misc_RNA (1)...(19): siRNA sense strand
uggaaacucuucuacauca

SEQ ID NO: 616125 - RNA, 19 nt, Homo sapiens
  misc_RNA (1)...(19): siRNA sense strand
ggaaucugcagaaauagaa

SEQ ID NO: 616126 - RNA, 19 nt, Homo sapiens
  misc_RNA (1)...(19): siRNA sense strand
gaagaaccaccagcuaaga

SEQ ID NO: 616127 - RNA, 19 nt, Homo sapiens
  misc_RNA (1)...(19): siRNA sense strand
gaacuucuccacuucaucu

SEQ ID NO: 616128 - RNA, 19 nt, Homo sapiens
  misc_RNA (1)...(19): siRNA sense strand
agacauugcugaagaaacu

SEQ ID NO: 616129 - RNA, 19 nt, Homo sapiens
  misc_RNA (1)...(19): siRNA sense strand
aaggacauguuaaagauga

SEQ ID NO: 616130 - RNA, 19 nt, Homo sapiens
  misc_RNA (1)...(19): siRNA sense strand
gugaagaaccaccagcuaa

SEQ ID NO: 616131 - RNA, 19 nt, Homo sapiens
  misc_RNA (1)...(19): siRNA sense strand
gagcaggucaagaugauga

SEQ ID NO: 616132 - RNA, 19 nt, Homo sapiens
  misc_RNA (1)...(19): siRNA sense strand
ggaaauuugcacucuauuc

SEQ ID NO: 616133 - RNA, 19 nt, Homo sapiens
  misc_RNA (1)...(19): siRNA sense strand
aaacucuucuacaucagua

SEQ ID NO: 616134 - RNA, 19 nt, Homo sapiens
  misc_RNA (1)...(19): siRNA sense strand
caaugcaaaggacauguua

SEQ ID NO: 616135 - RNA, 19 nt, Homo sapiens
  misc_RNA (1)...(19): siRNA sense strand
uaagagacaauguaucgaa

SEQ ID NO: 616136 - RNA, 19 nt, Homo sapiens
  misc_RNA (1)...(19): siRNA sense strand
ggucagcccaucauuguga

SEQ ID NO: 616137 - RNA, 19 nt, Homo sapiens
  misc_RNA (1)...(19): siRNA sense strand
agaaccaaaucaacacaaa

SEQ ID NO: 616138 - RNA, 19 nt, Homo sapiens
  misc_RNA (1)...(19): siRNA sense strand
uguaucugcuguucaguuu

SEQ ID NO: 616139 - RNA, 19 nt, Homo sapiens
  misc_RNA (1)...(19): siRNA sense strand
gacaacaaguauuaacagu

SEQ ID NO: 616140 - RNA, 19 nt, Homo sapiens
  misc_RNA (1)...(19): siRNA sense strand
guacacacgcaaaguaaau

SEQ ID NO: 616141 - RNA, 19 nt, Homo sapiens
  misc_RNA (1)...(19): siRNA sense strand
aaauggagcucccuuuacu

SEQ ID NO: 616142 - RNA, 19 nt, Homo sapiens
  misc_RNA (1)...(19): siRNA sense strand
agauggacaacaaguauua

SEQ ID NO: 616143 - RNA, 19 nt, Homo sapiens
  misc_RNA (1)...(19): siRNA sense strand
acaccacaguuuaucauug

SEQ ID NO: 616144 - RNA, 19 nt, Homo sapiens
  misc_RNA (1)...(19): siRNA sense strand
caauagacaauggaaauga

SEQ ID NO: 616145 - RNA, 19 nt, Homo sapiens
  misc_RNA (1)...(19): siRNA sense strand
gcaagucaucacaauaguu

SEQ ID NO: 616146 - RNA, 19 nt, Homo sapiens
  misc_RNA (1)...(19): siRNA sense strand
ggagcucccuuuacuacag

SEQ ID NO: 616147 - RNA, 19 nt, Homo sapiens
  misc_RNA (1)...(19): siRNA sense strand
cacaauaguuacagaugga

SEQ ID NO: 616148 - RNA, 19 nt, Homo sapiens
  misc_RNA (1)...(19): siRNA sense strand
ggaccgaacaccauuacau

SEQ ID NO: 616149 - RNA, 19 nt, Homo sapiens
  misc_RNA (1)...(19): siRNA sense strand
aagagacaauguaucgaaa

SEQ ID NO: 616150 - RNA, 19 nt, Homo sapiens
  misc_RNA (1)...(19): siRNA sense strand
gagcucccuuuacuacaga

SEQ ID NO: 616151 - RNA, 19 nt, Homo sapiens
  misc_RNA (1)...(19): siRNA sense strand
cagcaagucaucacaauag

SEQ ID NO: 616152 - RNA, 19 nt, Homo sapiens
  misc_RNA (1)...(19): siRNA sense strand
gcugcaacaccacaguuua

SEQ ID NO: 616153 - RNA, 19 nt, Homo sapiens
  misc_RNA (1)...(19): siRNA sense strand
caacacaaacccagagagu

SEQ ID NO: 616154 - RNA, 19 nt, Homo sapiens
  misc_RNA (1)...(19): siRNA sense strand
ucaaauauggugcugaugu

SEQ ID NO: 616155 - RNA, 19 nt, Homo sapiens
  misc_RNA (1)...(19): siRNA sense strand
gcacaguauggucauuauu

SEQ ID NO: 616156 - RNA, 19 nt, Homo sapiens
  misc_RNA (1)...(19): siRNA sense strand
gcuaagagacaauguaucg

SEQ ID NO: 616157 - RNA, 19 nt, Homo sapiens
  misc_RNA (1)...(19): siRNA sense strand
ccagauggacaacaaguau

SEQ ID NO: 616158 - RNA, 19 nt, Homo sapiens
  misc_RNA (1)...(19): siRNA sense strand
gagcuggugugagcagaga

SEQ ID NO: 616159 - RNA, 19 nt, Homo sapiens
  misc_RNA (1)...(19): siRNA sense strand
ggacaacaaguauuaacag

SEQ ID NO: 616160 - RNA, 19 nt, Homo sapiens
  misc_RNA (1)...(19): siRNA sense strand
gcaacaccacaguuuauca

SEQ ID NO: 616161 - RNA, 19 nt, Homo sapiens
  misc_RNA (1)...(19): siRNA sense strand
gcugaagaaacuguuauaa

SEQ ID NO: 616162 - RNA, 19 nt, Homo sapiens
  misc_RNA (1)...(19): siRNA sense strand
gcagagaugccagaaccaa

SEQ ID NO: 616163 - RNA, 19 nt, Homo sapiens
  misc_RNA (1)...(19): siRNA sense strand
uaacaguaccagcaacaga

SEQ ID NO: 616164 - RNA, 19 nt, Homo sapiens
  misc_RNA (1)...(19): siRNA sense strand
cagcacaguauggucauua

SEQ ID NO: 616165 - RNA, 19 nt, Homo sapiens
  misc_RNA (1)...(19): siRNA sense strand
gaaauuugcacucuauucc

SEQ ID NO: 616166 - RNA, 19 nt, Homo sapiens
  misc_RNA (1)...(19): siRNA sense strand
ugccuuagcugaagcaucu

SEQ ID NO: 616167 - RNA, 19 nt, Homo sapiens
  misc_RNA (1)...(19): siRNA sense strand
gcacgagcaggucaagaug

SEQ ID NO: 616168 - RNA, 19 nt, Homo sapiens
  misc_RNA (1)...(19): siRNA sense strand
ggaauuggucagcccauca

SEQ ID NO: 616169 - RNA, 19 nt, Homo sapiens
  misc_RNA (1)...(19): siRNA sense strand
ggccacagaagaaguaguu

SEQ ID NO: 616170 - RNA, 19 nt, Homo sapiens
  misc_RNA (1)...(19): siRNA sense strand
caucaguauuagcuacauu

SEQ ID NO: 616171 - RNA, 19 nt, Homo sapiens
  misc_RNA (1)...(19): siRNA sense strand
gaagauuuagcagagauau

SEQ ID NO: 616172 - RNA, 19 nt, Homo sapiens
  misc_RNA (1)...(19): siRNA sense strand
caccacaguuuaucauugg

SEQ ID NO: 616173 - RNA, 19 nt, Homo sapiens
  misc_RNA (1)...(19): siRNA sense strand
cagcuaagagacaauguau

SEQ ID NO: 616174 - RNA, 19 nt, Homo sapiens
  misc_RNA (1)...(19): siRNA sense strand
caugccagauggacaacaa

SEQ ID NO: 616175 - RNA, 19 nt, Homo sapiens
  misc_RNA (1)...(19): siRNA sense strand
gaaacucuucuacaucagu

SEQ ID NO: 616176 - RNA, 19 nt, Homo sapiens
  misc_RNA (1)...(19): siRNA sense strand
caagaggugguggaacuuu

SEQ ID NO: 616177 - RNA, 19 nt, Homo sapiens
  misc_RNA (1)...(19): siRNA sense strand
cagacuggcugggaacuuc

SEQ ID NO: 616178 - RNA, 19 nt, Homo sapiens
  misc_RNA (1)...(19): siRNA sense strand
gauauuacagauugcuaug

SEQ ID NO: 616179 - RNA, 19 nt, Homo sapiens
  misc_RNA (1)...(19): siRNA sense strand
gcagcacaguauggucauu

SEQ ID NO: 616180 - RNA, 19 nt, Homo sapiens
  misc_RNA (1)...(19): siRNA sense strand
ucagcaagucaucacaaua

SEQ ID NO: 616181 - RNA, 19 nt, Homo sapiens
  misc_RNA (1)...(19): siRNA sense strand
caaauggagcucccuuuac

SEQ ID NO: 616182 - RNA, 19 nt, Homo sapiens
  misc_RNA (1)...(19): siRNA sense strand
uucagaaacuccaguagug

SEQ ID NO: 616183 - RNA, 19 nt, Homo sapiens
  misc_RNA (1)...(19): siRNA sense strand
cagaacacaaucaucaaga

SEQ ID NO: 616184 - RNA, 19 nt, Homo sapiens
  misc_RNA (1)...(19): siRNA sense strand
ccagcuaagagacaaugua

SEQ ID NO: 616185 - RNA, 19 nt, Homo sapiens
  misc_RNA (1)...(19): siRNA sense strand
uuggaaauuugcacucuau

SEQ ID NO: 616186 - RNA, 19 nt, Homo sapiens
  misc_RNA (1)...(19): siRNA sense strand
caacaccacaguuuaucau

SEQ ID NO: 616187 - RNA, 19 nt, Homo sapiens
  misc_RNA (1)...(19): siRNA sense strand
gagauauuacagauugcua

SEQ ID NO: 616188 - RNA, 19 nt, Homo sapiens
  misc_RNA (1)...(19): siRNA sense strand
gguggaacuuuuaaucaaa

SEQ ID NO: 616189 - RNA, 19 nt, Homo sapiens
  misc_RNA (1)...(19): siRNA sense strand
gggaacuucuccacuucau

SEQ ID NO: 616190 - RNA, 19 nt, Homo sapiens
  misc_RNA (1)...(19): siRNA sense strand
gauggacaacaaguauuaa

SEQ ID NO: 616191 - RNA, 19 nt, Homo sapiens
  misc_RNA (1)...(19): siRNA sense strand
uaucugcuguucaguuugg

SEQ ID NO: 616192 - RNA, 19 nt, Homo sapiens
  misc_RNA (1)...(19): siRNA sense strand
cagagaguccugacacugu

SEQ ID NO: 616193 - RNA, 19 nt, Homo sapiens
  misc_RNA (1)...(19): siRNA sense strand
uauuacagauugcuaugca

SEQ ID NO: 616194 - RNA, 19 nt, Homo sapiens
  misc_RNA (1)...(19): siRNA sense strand
acacacgcaaaguaaauuu

SEQ ID NO: 616195 - RNA, 19 nt, Homo sapiens
  misc_RNA (1)...(19): siRNA sense strand
gaaacuguuauaagugaag

SEQ ID NO: 616196 - RNA, 19 nt, Homo sapiens
  misc_RNA (1)...(19): siRNA sense strand
ccgaacaccauuacauaug

SEQ ID NO: 616197 - RNA, 19 nt, Homo sapiens
  misc_RNA (1)...(19): siRNA sense strand
gucagcaagucaucacaau

SEQ ID NO: 616198 - RNA, 19 nt, Homo sapiens
  misc_RNA (1)...(19): siRNA sense strand
cacaguauggucauuauuc

SEQ ID NO: 616199 - RNA, 19 nt, Homo sapiens
  misc_RNA (1)...(19): siRNA sense strand
uuuggaaacucuucuacau

SEQ ID NO: 616200 - RNA, 19 nt, Homo sapiens
  misc_RNA (1)...(19): siRNA sense strand
gacaauggaaaugaagauu

SEQ ID NO: 616201 - RNA, 19 nt, Homo sapiens
  misc_RNA (1)...(19): siRNA sense strand
gaaccaaaucaacacaaac

SEQ ID NO: 616202 - RNA, 19 nt, Homo sapiens
  misc_RNA (1)...(19): siRNA sense strand
ucaucuagcagcacaguau

SEQ ID NO: 616203 - RNA, 19 nt, Homo sapiens
  misc_RNA (1)...(19): siRNA sense strand
gcagagauauuacagauug

SEQ ID NO: 616204 - RNA, 19 nt, Homo sapiens
  misc_RNA (1)...(19): siRNA sense strand
gguggaaucugcagaaaua

SEQ ID NO: 616205 - RNA, 19 nt, Homo sapiens
  misc_RNA (1)...(19): siRNA sense strand
caacagacauugcugaaga

SEQ ID NO: 616206 - RNA, 19 nt, Homo sapiens
  misc_RNA (1)...(19): siRNA sense strand
gagacaauguaucgaaaua

SEQ ID NO: 616207 - RNA, 19 nt, Homo sapiens
  misc_RNA (1)...(19): siRNA sense strand
caaaggacauguuaaagau

SEQ ID NO: 616208 - RNA, 19 nt, Homo sapiens
  misc_RNA (1)...(19): siRNA sense strand
gcaaauggagcucccuuua

SEQ ID NO: 616209 - RNA, 19 nt, Homo sapiens
  misc_RNA (1)...(19): siRNA sense strand
caaauauggugcugaugua

SEQ ID NO: 616210 - RNA, 19 nt, Homo sapiens
  misc_RNA (1)...(19): siRNA sense strand
gcaaaggacauguuaaaga

SEQ ID NO: 616211 - RNA, 19 nt, Homo sapiens
  misc_RNA (1)...(19): siRNA sense strand
caagucaucacaauaguua

SEQ ID NO: 616212 - RNA, 19 nt, Homo sapiens
  misc_RNA (1)...(19): siRNA sense strand
caacaaguauuaacaguac

SEQ ID NO: 616213 - RNA, 19 nt, Homo sapiens
  misc_RNA (1)...(19): siRNA sense strand
gaugacagcucuccauugg

SEQ ID NO: 616214 - RNA, 19 nt, Homo sapiens
  misc_RNA (1)...(19): siRNA sense strand
gacaauacaugcugcaaca

SEQ ID NO: 616215 - RNA, 19 nt, Homo sapiens
  misc_RNA (1)...(19): siRNA sense strand
gaugaugaaguucguauuu

SEQ ID NO: 616216 - RNA, 19 nt, Homo sapiens
  misc_RNA (1)...(19): siRNA sense strand
gaagaaacuguuauaagug

SEQ ID NO: 616217 - RNA, 19 nt, Homo sapiens
  misc_RNA (1)...(19): siRNA sense strand
gaccgaacaccauuacaua

SEQ ID NO: 616218 - RNA, 19 nt, Homo sapiens
  misc_RNA (1)...(19): siRNA sense strand
ccacagaacacaaucauca

SEQ ID NO: 616219 - RNA, 19 nt, Homo sapiens
  misc_RNA (1)...(19): siRNA sense strand
gcauggugcugaugucaau

SEQ ID NO: 616220 - RNA, 19 nt, Homo sapiens
  misc_RNA (1)...(19): siRNA sense strand
gcugggaacuucuccacuu

SEQ ID NO: 616221 - RNA, 19 nt, Homo sapiens
  misc_RNA (1)...(19): siRNA sense strand
gauguacacacgcaaagua

SEQ ID NO: 616222 - RNA, 19 nt, Homo sapiens
  misc_RNA (1)...(19): siRNA sense strand
gugcugaugucaaugcaaa

SEQ ID NO: 616223 - RNA, 19 nt, Homo sapiens
  misc_RNA (1)...(19): siRNA sense strand
uagcagagauauuacagau

SEQ ID NO: 616224 - RNA, 19 nt, Homo sapiens
  misc_RNA (1)...(19): siRNA sense strand
uggaaacucuucuacauca

SEQ ID NO: 616225 - RNA, 19 nt, Homo sapiens
  misc_RNA (1)...(19): siRNA sense strand
ggaaucugcagaaauagaa

SEQ ID NO: 616226 - RNA, 19 nt, Homo sapiens
  misc_RNA (1)...(19): siRNA sense strand
gaagaaccaccagcuaaga

SEQ ID NO: 616227 - RNA, 19 nt, Homo sapiens
  misc_RNA (1)...(19): siRNA sense strand
gaacuucuccacuucaucu

SEQ ID NO: 616228 - RNA, 19 nt, Homo sapiens
  misc_RNA (1)...(19): siRNA sense strand
agacauugcugaagaaacu

SEQ ID NO: 616229 - RNA, 19 nt, Homo sapiens
  misc_RNA (1)...(19): siRNA sense strand
aaggacauguuaaagauga

SEQ ID NO: 616230 - RNA, 19 nt, Homo sapiens
  misc_RNA (1)...(19): siRNA sense strand
gugaagaaccaccagcuaa

SEQ ID NO: 616231 - RNA, 19 nt, Homo sapiens
  misc_RNA (1)...(19): siRNA sense strand
gagcaggucaagaugauga

SEQ ID NO: 616232 - RNA, 19 nt, Homo sapiens
  misc_RNA (1)...(19): siRNA sense strand
ggaaauuugcacucuauuc

SEQ ID NO: 616233 - RNA, 19 nt, Homo sapiens
  misc_RNA (1)...(19): siRNA sense strand
aaacucuucuacaucagua

SEQ ID NO: 616234 - RNA, 19 nt, Homo sapiens
  misc_RNA (1)...(19): siRNA sense strand
caaugcaaaggacauguua

SEQ ID NO: 616235 - RNA, 19 nt, Homo sapiens
  misc_RNA (1)...(19): siRNA sense strand
uaagagacaauguaucgaa

SEQ ID NO: 616236 - RNA, 19 nt, Homo sapiens
  misc_RNA (1)...(19): siRNA sense strand
ggucagcccaucauuguga

SEQ ID NO: 616237 - RNA, 19 nt, Homo sapiens
  misc_RNA (1)...(19): siRNA sense strand
agaaccaaaucaacacaaa

SEQ ID NO: 616238 - RNA, 19 nt, Homo sapiens
  misc_RNA (1)...(19): siRNA sense strand
uguaucugcuguucaguuu

SEQ ID NO: 616239 - RNA, 19 nt, Homo sapiens
  misc_RNA (1)...(19): siRNA sense strand
gacaacaaguauuaacagu

SEQ ID NO: 616240 - RNA, 19 nt, Homo sapiens
  misc_RNA (1)...(19): siRNA sense strand
guacacacgcaaaguaaau

SEQ ID NO: 616241 - RNA, 19 nt, Homo sapiens
  misc_RNA (1)...(19): siRNA sense strand
aaauggagcucccuuuacu

SEQ ID NO: 616242 - RNA, 19 nt, Homo sapiens
  misc_RNA (1)...(19): siRNA sense strand
agauggacaacaaguauua

SEQ ID NO: 616243 - RNA, 19 nt, Homo sapiens
  misc_RNA (1)...(19): siRNA sense strand
acaccacaguuuaucauug

SEQ ID NO: 616244 - RNA, 19 nt, Homo sapiens
  misc_RNA (1)...(19): siRNA sense strand
caauagacaauggaaauga

SEQ ID NO: 616245 - RNA, 19 nt, Homo sapiens
  misc_RNA (1)...(19): siRNA sense strand
gcaagucaucacaauaguu

SEQ ID NO: 616246 - RNA, 19 nt, Homo sapiens
  misc_RNA (1)...(19): siRNA sense strand
ggagcucccuuuacuacag

SEQ ID NO: 616247 - RNA, 19 nt, Homo sapiens
  misc_RNA (1)...(19): siRNA sense strand
cacaauaguuacagaugga

SEQ ID NO: 616248 - RNA, 19 nt, Homo sapiens
  misc_RNA (1)...(19): siRNA sense strand
ggaccgaacaccauuacau

SEQ ID NO: 616249 - RNA, 19 nt, Homo sapiens
  misc_RNA (1)...(19): siRNA sense strand
aagagacaauguaucgaaa

SEQ ID NO: 616250 - RNA, 19 nt, Homo sapiens
  misc_RNA (1)...(19): siRNA sense strand
gagcucccuuuacuacaga

SEQ ID NO: 616251 - RNA, 19 nt, Homo sapiens
  misc_RNA (1)...(19): siRNA sense strand
cagcaagucaucacaauag

SEQ ID NO: 616252 - RNA, 19 nt, Homo sapiens
  misc_RNA (1)...(19): siRNA sense strand
gcugcaacaccacaguuua

SEQ ID NO: 616253 - RNA, 19 nt, Homo sapiens
  misc_RNA (1)...(19): siRNA sense strand
caacacaaacccagagagu

SEQ ID NO: 616254 - RNA, 19 nt, Homo sapiens
  misc_RNA (1)...(19): siRNA sense strand
ucaaauauggugcugaugu

SEQ ID NO: 616255 - RNA, 19 nt, Homo sapiens
  misc_RNA (1)...(19): siRNA sense strand
gcacaguauggucauuauu

SEQ ID NO: 616256 - RNA, 19 nt, Homo sapiens
  misc_RNA (1)...(19): siRNA sense strand
gcuaagagacaauguaucg

SEQ ID NO: 616257 - RNA, 19 nt, Homo sapiens
  misc_RNA (1)...(19): siRNA sense strand
ccagauggacaacaaguau

SEQ ID NO: 616258 - RNA, 19 nt, Homo sapiens
  misc_RNA (1)...(19): siRNA sense strand
gagcuggugugagcagaga

SEQ ID NO: 616259 - RNA, 19 nt, Homo sapiens
  misc_RNA (1)...(19): siRNA sense strand
ggacaacaaguauuaacag

SEQ ID NO: 616260 - RNA, 19 nt, Homo sapiens
  misc_RNA (1)...(19): siRNA sense strand
gcaacaccacaguuuauca

SEQ ID NO: 616261 - RNA, 19 nt, Homo sapiens
  misc_RNA (1)...(19): siRNA sense strand
gcugaagaaacuguuauaa

SEQ ID NO: 616262 - RNA, 19 nt, Homo sapiens
  misc_RNA (1)...(19): siRNA sense strand
gcagagaugccagaaccaa

SEQ ID NO: 616263 - RNA, 19 nt, Homo sapiens
  misc_RNA (1)...(19): siRNA sense strand
uaacaguaccagcaacaga

SEQ ID NO: 616264 - RNA, 19 nt, Homo sapiens
  misc_RNA (1)...(19): siRNA sense strand
cagcacaguauggucauua

SEQ ID NO: 616265 - RNA, 19 nt, Homo sapiens
  misc_RNA (1)...(19): siRNA sense strand
gaaauuugcacucuauucc

SEQ ID NO: 616266 - RNA, 19 nt, Homo sapiens
  misc_RNA (1)...(19): siRNA sense strand
ugccuuagcugaagcaucu

SEQ ID NO: 616267 - RNA, 19 nt, Homo sapiens
  misc_RNA (1)...(19): siRNA sense strand
gcacgagcaggucaagaug

SEQ ID NO: 616268 - RNA, 19 nt, Homo sapiens
  misc_RNA (1)...(19): siRNA sense strand
ggaauuggucagcccauca

SEQ ID NO: 616269 - RNA, 19 nt, Homo sapiens
  misc_RNA (1)...(19): siRNA sense strand
ggccacagaagaaguaguu

SEQ ID NO: 616270 - RNA, 19 nt, Homo sapiens
  misc_RNA (1)...(19): siRNA sense strand
caucaguauuagcuacauu

SEQ ID NO: 616271 - RNA, 19 nt, Homo sapiens
  misc_RNA (1)...(19): siRNA sense strand
gaagauuuagcagagauau

SEQ ID NO: 616272 - RNA, 19 nt, Homo sapiens
  misc_RNA (1)...(19): siRNA sense strand
caccacaguuuaucauugg

SEQ ID NO: 616273 - RNA, 19 nt, Homo sapiens
  misc_RNA (1)...(19): siRNA sense strand
cagcuaagagacaauguau

SEQ ID NO: 616274 - RNA, 19 nt, Homo sapiens
  misc_RNA (1)...(19): siRNA sense strand
caugccagauggacaacaa

SEQ ID NO: 616275 - RNA, 19 nt, Homo sapiens
  misc_RNA (1)...(19): siRNA sense strand
gaaacucuucuacaucagu

SEQ ID NO: 616276 - RNA, 19 nt, Homo sapiens
  misc_RNA (1)...(19): siRNA sense strand
caagaggugguggaacuuu

SEQ ID NO: 616277 - RNA, 19 nt, Homo sapiens
  misc_RNA (1)...(19): siRNA sense strand
cagacuggcugggaacuuc

SEQ ID NO: 616278 - RNA, 19 nt, Homo sapiens
  misc_RNA (1)...(19): siRNA sense strand
gauauuacagauugcuaug

SEQ ID NO: 616279 - RNA, 19 nt, Homo sapiens
  misc_RNA (1)...(19): siRNA sense strand
gcagcacaguauggucauu

SEQ ID NO: 616280 - RNA, 19 nt, Homo sapiens
  misc_RNA (1)...(19): siRNA sense strand
ucagcaagucaucacaaua

SEQ ID NO: 616281 - RNA, 19 nt, Homo sapiens
  misc_RNA (1)...(19): siRNA sense strand
caaauggagcucccuuuac

SEQ ID NO: 616282 - RNA, 19 nt, Homo sapiens
  misc_RNA (1)...(19): siRNA sense strand
uucagaaacuccaguagug

SEQ ID NO: 616283 - RNA, 19 nt, Homo sapiens
  misc_RNA (1)...(19): siRNA sense strand
cagaacacaaucaucaaga

SEQ ID NO: 616284 - RNA, 19 nt, Homo sapiens
  misc_RNA (1)...(19): siRNA sense strand
ccagcuaagagacaaugua

SEQ ID NO: 616285 - RNA, 19 nt, Homo sapiens
  misc_RNA (1)...(19): siRNA sense strand
uuggaaauuugcacucuau

SEQ ID NO: 616286 - RNA, 19 nt, Homo sapiens
  misc_RNA (1)...(19): siRNA sense strand
caacaccacaguuuaucau

SEQ ID NO: 616287 - RNA, 19 nt, Homo sapiens
  misc_RNA (1)...(19): siRNA sense strand
gagauauuacagauugcua

SEQ ID NO: 616288 - RNA, 19 nt, Homo sapiens
  misc_RNA (1)...(19): siRNA sense strand
gguggaacuuuuaaucaaa

SEQ ID NO: 616289 - RNA, 19 nt, Homo sapiens
  misc_RNA (1)...(19): siRNA sense strand
gggaacuucuccacuucau

SEQ ID NO: 616290 - RNA, 19 nt, Homo sapiens
  misc_RNA (1)...(19): siRNA sense strand
gauggacaacaaguauuaa

SEQ ID NO: 616291 - RNA, 19 nt, Homo sapiens
  misc_RNA (1)...(19): siRNA sense strand
uaucugcuguucaguuugg

SEQ ID NO: 616292 - RNA, 19 nt, Homo sapiens
  misc_RNA (1)...(19): siRNA sense strand
cagagaguccugacacugu

SEQ ID NO: 616293 - RNA, 19 nt, Homo sapiens
  misc_RNA (1)...(19): siRNA sense strand
uauuacagauugcuaugca

SEQ ID NO: 616294 - RNA, 19 nt, Homo sapiens
  misc_RNA (1)...(19): siRNA sense strand
acacacgcaaaguaaauuu

SEQ ID NO: 616295 - RNA, 19 nt, Homo sapiens
  misc_RNA (1)...(19): siRNA sense strand
gaaacuguuauaagugaag

SEQ ID NO: 616296 - RNA, 19 nt, Homo sapiens
  misc_RNA (1)...(19): siRNA sense strand
ccgaacaccauuacauaug

SEQ ID NO: 616297 - RNA, 19 nt, Homo sapiens
  misc_RNA (1)...(19): siRNA sense strand
gucagcaagucaucacaau

SEQ ID NO: 616298 - RNA, 19 nt, Homo sapiens
  misc_RNA (1)...(19): siRNA sense strand
cacaguauggucauuauuc

SEQ ID NO: 616299 - RNA, 19 nt, Homo sapiens
  misc_RNA (1)...(19): siRNA sense strand
uuuggaaacucuucuacau

SEQ ID NO: 616300 - RNA, 19 nt, Homo sapiens
  misc_RNA (1)...(19): siRNA sense strand
gacaauggaaaugaagauu

SEQ ID NO: 616301 - RNA, 19 nt, Homo sapiens
  misc_RNA (1)...(19): siRNA sense strand
gaaccaaaucaacacaaac

SEQ ID NO: 616302 - RNA, 19 nt, Homo sapiens
  misc_RNA (1)...(19): siRNA sense strand
ucaucuagcagcacaguau

SEQ ID NO: 616303 - RNA, 19 nt, Homo sapiens
  misc_RNA (1)...(19): siRNA sense strand
gcagagauauuacagauug

SEQ ID NO: 616304 - RNA, 19 nt, Homo sapiens
  misc_RNA (1)...(19): siRNA sense strand
gguggaaucugcagaaaua

SEQ ID NO: 616305 - RNA, 19 nt, Homo sapiens
  misc_RNA (1)...(19): siRNA sense strand
caacagacauugcugaaga

SEQ ID NO: 616306 - RNA, 19 nt, Homo sapiens
  misc_RNA (1)...(19): siRNA sense strand
gagacaauguaucgaaaua

SEQ ID NO: 616307 - RNA, 19 nt, Homo sapiens
  misc_RNA (1)...(19): siRNA sense strand
caaaggacauguuaaagau

SEQ ID NO: 616308 - RNA, 19 nt, Homo sapiens
  misc_RNA (1)...(19): siRNA sense strand
gcaaauggagcucccuuua

SEQ ID NO: 616309 - RNA, 19 nt, Homo sapiens
  misc_RNA (1)...(19): siRNA sense strand
caaauauggugcugaugua

SEQ ID NO: 616310 - RNA, 19 nt, Homo sapiens
  misc_RNA (1)...(19): siRNA sense strand
gcaaaggacauguuaaaga

SEQ ID NO: 616311 - RNA, 19 nt, Homo sapiens
  misc_RNA (1)...(19): siRNA sense strand
caagucaucacaauaguua

SEQ ID NO: 616312 - RNA, 19 nt, Homo sapiens
  misc_RNA (1)...(19): siRNA sense strand
caacaaguauuaacaguac

SEQ ID NO: 616313 - RNA, 19 nt, Homo sapiens
  misc_RNA (1)...(19): siRNA sense strand
gaugacagcucuccauugg

SEQ ID NO: 616314 - RNA, 19 nt, Homo sapiens
  misc_RNA (1)...(19): siRNA sense strand
gacaauacaugcugcaaca

SEQ ID NO: 616315 - RNA, 19 nt, Homo sapiens
  misc_RNA (1)...(19): siRNA sense strand
gaugaugaaguucguauuu

SEQ ID NO: 616316 - RNA, 19 nt, Homo sapiens
  misc_RNA (1)...(19): siRNA sense strand
gaagaaacuguuauaagug

SEQ ID NO: 616317 - RNA, 19 nt, Homo sapiens
  misc_RNA (1)...(19): siRNA sense strand
gaccgaacaccauuacaua

SEQ ID NO: 616318 - RNA, 19 nt, Homo sapiens
  misc_RNA (1)...(19): siRNA sense strand
ccacagaacacaaucauca

SEQ ID NO: 616319 - RNA, 19 nt, Homo sapiens
  misc_RNA (1)...(19): siRNA sense strand
gcauggugcugaugucaau

SEQ ID NO: 616320 - RNA, 19 nt, Homo sapiens
  misc_RNA (1)...(19): siRNA sense strand
gcugggaacuucuccacuu

SEQ ID NO: 616321 - RNA, 19 nt, Homo sapiens
  misc_RNA (1)...(19): siRNA sense strand
gauguacacacgcaaagua

SEQ ID NO: 616322 - RNA, 19 nt, Homo sapiens
  misc_RNA (1)...(19): siRNA sense strand
gugcugaugucaaugcaaa

SEQ ID NO: 616323 - RNA, 19 nt, Homo sapiens
  misc_RNA (1)...(19): siRNA sense strand
uagcagagauauuacagau

SEQ ID NO: 616324 - RNA, 19 nt, Homo sapiens
  misc_RNA (1)...(19): siRNA sense strand
uggaaacucuucuacauca

SEQ ID NO: 616325 - RNA, 19 nt, Homo sapiens
  misc_RNA (1)...(19): siRNA sense strand
ggaaucugcagaaauagaa

SEQ ID NO: 616326 - RNA, 19 nt, Homo sapiens
  misc_RNA (1)...(19): siRNA sense strand
gaagaaccaccagcuaaga

SEQ ID NO: 616327 - RNA, 19 nt, Homo sapiens
  misc_RNA (1)...(19): siRNA sense strand
gaacuucuccacuucaucu

SEQ ID NO: 616328 - RNA, 19 nt, Homo sapiens
  misc_RNA (1)...(19): siRNA sense strand
agacauugcugaagaaacu

SEQ ID NO: 616329 - RNA, 19 nt, Homo sapiens
  misc_RNA (1)...(19): siRNA sense strand
aaggacauguuaaagauga

SEQ ID NO: 616330 - RNA, 19 nt, Homo sapiens
  misc_RNA (1)...(19): siRNA sense strand
gugaagaaccaccagcuaa

SEQ ID NO: 616331 - RNA, 19 nt, Homo sapiens
  misc_RNA (1)...(19): siRNA sense strand
gagcaggucaagaugauga

SEQ ID NO: 616332 - RNA, 19 nt, Homo sapiens
  misc_RNA (1)...(19): siRNA sense strand
ggaaauuugcacucuauuc

SEQ ID NO: 616333 - RNA, 19 nt, Homo sapiens
  misc_RNA (1)...(19): siRNA sense strand
aaacucuucuacaucagua

SEQ ID NO: 616334 - RNA, 19 nt, Homo sapiens
  misc_RNA (1)...(19): siRNA sense strand
caaugcaaaggacauguua

SEQ ID NO: 616335 - RNA, 19 nt, Homo sapiens
  misc_RNA (1)...(19): siRNA sense strand
uaagagacaauguaucgaa

SEQ ID NO: 616336 - RNA, 19 nt, Homo sapiens
  misc_RNA (1)...(19): siRNA sense strand
ggucagcccaucauuguga

SEQ ID NO: 616337 - RNA, 19 nt, Homo sapiens
  misc_RNA (1)...(19): siRNA sense strand
agaaccaaaucaacacaaa

SEQ ID NO: 616338 - RNA, 19 nt, Homo sapiens
  misc_RNA (1)...(19): siRNA sense strand
uguaucugcuguucaguuu

SEQ ID NO: 616339 - RNA, 19 nt, Homo sapiens
  misc_RNA (1)...(19): siRNA sense strand
gacaacaaguauuaacagu

SEQ ID NO: 616340 - RNA, 19 nt, Homo sapiens
  misc_RNA (1)...(19): siRNA sense strand
guacacacgcaaaguaaau

SEQ ID NO: 616341 - RNA, 19 nt, Homo sapiens
  misc_RNA (1)...(19): siRNA sense strand
aaauggagcucccuuuacu

SEQ ID NO: 616342 - RNA, 19 nt, Homo sapiens
  misc_RNA (1)...(19): siRNA sense strand
agauggacaacaaguauua

SEQ ID NO: 616343 - RNA, 19 nt, Homo sapiens
  misc_RNA (1)...(19): siRNA sense strand
acaccacaguuuaucauug

SEQ ID NO: 616344 - RNA, 19 nt, Homo sapiens
  misc_RNA (1)...(19): siRNA sense strand
caauagacaauggaaauga

SEQ ID NO: 616345 - RNA, 19 nt, Homo sapiens
  misc_RNA (1)...(19): siRNA sense strand
gcaagucaucacaauaguu

SEQ ID NO: 616346 - RNA, 19 nt, Homo sapiens
  misc_RNA (1)...(19): siRNA sense strand
ggagcucccuuuacuacag

SEQ ID NO: 616347 - RNA, 19 nt, Homo sapiens
  misc_RNA (1)...(19): siRNA sense strand
cacaauaguuacagaugga

SEQ ID NO: 616348 - RNA, 19 nt, Homo sapiens
  misc_RNA (1)...(19): siRNA sense strand
ggaccgaacaccauuacau

SEQ ID NO: 616349 - RNA, 19 nt, Homo sapiens
  misc_RNA (1)...(19): siRNA sense strand
aagagacaauguaucgaaa

SEQ ID NO: 616350 - RNA, 19 nt, Homo sapiens
  misc_RNA (1)...(19): siRNA sense strand
gagcucccuuuacuacaga

SEQ ID NO: 616351 - RNA, 19 nt, Homo sapiens
  misc_RNA (1)...(19): siRNA sense strand
cagcaagucaucacaauag

SEQ ID NO: 616352 - RNA, 19 nt, Homo sapiens
  misc_RNA (1)...(19): siRNA sense strand
gcugcaacaccacaguuua

SEQ ID NO: 616353 - RNA, 19 nt, Homo sapiens
  misc_RNA (1)...(19): siRNA sense strand
caacacaaacccagagagu

SEQ ID NO: 616354 - RNA, 19 nt, Homo sapiens
  misc_RNA (1)...(19): siRNA sense strand
ucaaauauggugcugaugu

SEQ ID NO: 616355 - RNA, 19 nt, Homo sapiens
  misc_RNA (1)...(19): siRNA sense strand
gcacaguauggucauuauu

SEQ ID NO: 616356 - RNA, 19 nt, Homo sapiens
  misc_RNA (1)...(19): siRNA sense strand
gcuaagagacaauguaucg

SEQ ID NO: 616357 - RNA, 19 nt, Homo sapiens
  misc_RNA (1)...(19): siRNA sense strand
ccagauggacaacaaguau

SEQ ID NO: 616358 - RNA, 19 nt, Homo sapiens
  misc_RNA (1)...(19): siRNA sense strand
gagcuggugugagcagaga

SEQ ID NO: 616359 - RNA, 19 nt, Homo sapiens
  misc_RNA (1)...(19): siRNA sense strand
ggacaacaaguauuaacag

SEQ ID NO: 616360 - RNA, 19 nt, Homo sapiens
  misc_RNA (1)...(19): siRNA sense strand
gcaacaccacaguuuauca

SEQ ID NO: 616361 - RNA, 19 nt, Homo sapiens
  misc_RNA (1)...(19): siRNA sense strand
gcugaagaaacuguuauaa

SEQ ID NO: 616362 - RNA, 19 nt, Homo sapiens
  misc_RNA (1)...(19): siRNA sense strand
gcagagaugccagaaccaa

SEQ ID NO: 616363 - RNA, 19 nt, Homo sapiens
  misc_RNA (1)...(19): siRNA sense strand
uaacaguaccagcaacaga

SEQ ID NO: 616364 - RNA, 19 nt, Homo sapiens
  misc_RNA (1)...(19): siRNA sense strand
cagcacaguauggucauua

SEQ ID NO: 616365 - RNA, 19 nt, Homo sapiens
  misc_RNA (1)...(19): siRNA sense strand
gaaauuugcacucuauucc

SEQ ID NO: 616366 - RNA, 19 nt, Homo sapiens
  misc_RNA (1)...(19): siRNA sense strand
ugccuuagcugaagcaucu

SEQ ID NO: 616367 - RNA, 19 nt, Homo sapiens
  misc_RNA (1)...(19): siRNA sense strand
gcacgagcaggucaagaug

SEQ ID NO: 616368 - RNA, 19 nt, Homo sapiens
  misc_RNA (1)...(19): siRNA sense strand
ggaauuggucagcccauca

SEQ ID NO: 616369 - RNA, 19 nt, Homo sapiens
  misc_RNA (1)...(19): siRNA sense strand
ggccacagaagaaguaguu

SEQ ID NO: 616370 - RNA, 19 nt, Homo sapiens
  misc_RNA (1)...(19): siRNA sense strand
caucaguauuagcuacauu

SEQ ID NO: 616371 - RNA, 19 nt, Homo sapiens
  misc_RNA (1)...(19): siRNA sense strand
gaagauuuagcagagauau

SEQ ID NO: 616372 - RNA, 19 nt, Homo sapiens
  misc_RNA (1)...(19): siRNA sense strand
caccacaguuuaucauugg

SEQ ID NO: 616373 - RNA, 19 nt, Homo sapiens
  misc_RNA (1)...(19): siRNA sense strand
cagcuaagagacaauguau

SEQ ID NO: 616374 - RNA, 19 nt, Homo sapiens
  misc_RNA (1)...(19): siRNA sense strand
caugccagauggacaacaa

SEQ ID NO: 616375 - RNA, 19 nt, Homo sapiens
  misc_RNA (1)...(19): siRNA sense strand
gaaacucuucuacaucagu

SEQ ID NO: 616376 - RNA, 19 nt, Homo sapiens
  misc_RNA (1)...(19): siRNA sense strand
caagaggugguggaacuuu

SEQ ID NO: 616377 - RNA, 19 nt, Homo sapiens
  misc_RNA (1)...(19): siRNA sense strand
cagacuggcugggaacuuc

SEQ ID NO: 616378 - RNA, 19 nt, Homo sapiens
  misc_RNA (1)...(19): siRNA sense strand
gauauuacagauugcuaug

SEQ ID NO: 616379 - RNA, 19 nt, Homo sapiens
  misc_RNA (1)...(19): siRNA sense strand
gcagcacaguauggucauu

SEQ ID NO: 616380 - RNA, 19 nt, Homo sapiens
  misc_RNA (1)...(19): siRNA sense strand
ucagcaagucaucacaaua

SEQ ID NO: 616381 - RNA, 19 nt, Homo sapiens
  misc_RNA (1)...(19): siRNA sense strand
caaauggagcucccuuuac

SEQ ID NO: 616382 - RNA, 19 nt, Homo sapiens
  misc_RNA (1)...(19): siRNA sense strand
uucagaaacuccaguagug

SEQ ID NO: 616383 - RNA, 19 nt, Homo sapiens
  misc_RNA (1)...(19): siRNA sense strand
cagaacacaaucaucaaga

SEQ ID NO: 616384 - RNA, 19 nt, Homo sapiens
  misc_RNA (1)...(19): siRNA sense strand
ccagcuaagagacaaugua

SEQ ID NO: 616385 - RNA, 19 nt, Homo sapiens
  misc_RNA (1)...(19): siRNA sense strand
uuggaaauuugcacucuau

SEQ ID NO: 616386 - RNA, 19 nt, Homo sapiens
  misc_RNA (1)...(19): siRNA sense strand
caacaccacaguuuaucau

SEQ ID NO: 616387 - RNA, 19 nt, Homo sapiens
  misc_RNA (1)...(19): siRNA sense strand
gagauauuacagauugcua

SEQ ID NO: 616388 - RNA, 19 nt, Homo sapiens
  misc_RNA (1)...(19): siRNA sense strand
gguggaacuuuuaaucaaa

SEQ ID NO: 616389 - RNA, 19 nt, Homo sapiens
  misc_RNA (1)...(19): siRNA sense strand
gggaacuucuccacuucau

SEQ ID NO: 616390 - RNA, 19 nt, Homo sapiens
  misc_RNA (1)...(19): siRNA sense strand
gauggacaacaaguauuaa

SEQ ID NO: 616391 - RNA, 19 nt, Homo sapiens
  misc_RNA (1)...(19): siRNA sense strand
uaucugcuguucaguuugg

SEQ ID NO: 616392 - RNA, 19 nt, Homo sapiens
  misc_RNA (1)...(19): siRNA sense strand
cagagaguccugacacugu

SEQ ID NO: 616393 - RNA, 19 nt, Homo sapiens
  misc_RNA (1)...(19): siRNA sense strand
uauuacagauugcuaugca

SEQ ID NO: 616394 - RNA, 19 nt, Homo sapiens
  misc_RNA (1)...(19): siRNA sense strand
acacacgcaaaguaaauuu

SEQ ID NO: 616395 - RNA, 19 nt, Homo sapiens
  misc_RNA (1)...(19): siRNA sense strand
gaaacuguuauaagugaag

SEQ ID NO: 616396 - RNA, 19 nt, Homo sapiens
  misc_RNA (1)...(19): siRNA sense strand
ccgaacaccauuacauaug

SEQ ID NO: 616397 - RNA, 19 nt, Homo sapiens
  misc_RNA (1)...(19): siRNA sense strand
gucagcaagucaucacaau

SEQ ID NO: 616398 - RNA, 19 nt, Homo sapiens
  misc_RNA (1)...(19): siRNA sense strand
cacaguauggucauuauuc

SEQ ID NO: 616399 - RNA, 19 nt, Homo sapiens
  misc_RNA (1)...(19): siRNA sense strand
uuuggaaacucuucuacau

SEQ ID NO: 616400 - RNA, 19 nt, Homo sapiens
  misc_RNA (1)...(19): siRNA sense strand
gacaauggaaaugaagauu

SEQ ID NO: 616401 - RNA, 19 nt, Homo sapiens
  misc_RNA (1)...(19): siRNA sense strand
gaaccaaaucaacacaaac

SEQ ID NO: 616402 - RNA, 19 nt, Homo sapiens
  misc_RNA (1)...(19): siRNA sense strand
ucaucuagcagcacaguau

SEQ ID NO: 616403 - RNA, 19 nt, Homo sapiens
  misc_RNA (1)...(19): siRNA sense strand
gcagagauauuacagauug

SEQ ID NO: 616404 - RNA, 19 nt, Homo sapiens
  misc_RNA (1)...(19): siRNA sense strand
gguggaaucugcagaaaua

SEQ ID NO: 616405 - RNA, 19 nt, Homo sapiens
  misc_RNA (1)...(19): siRNA sense strand
caacagacauugcugaaga

SEQ ID NO: 616406 - RNA, 19 nt, Homo sapiens
  misc_RNA (1)...(19): siRNA sense strand
gagacaauguaucgaaaua

SEQ ID NO: 616407 - RNA, 19 nt, Homo sapiens
  misc_RNA (1)...(19): siRNA sense strand
caaaggacauguuaaagau

SEQ ID NO: 616408 - RNA, 19 nt, Homo sapiens
  misc_RNA (1)...(19): siRNA sense strand
gcaaauggagcucccuuua

SEQ ID NO: 616409 - RNA, 19 nt, Homo sapiens
  misc_RNA (1)...(19): siRNA sense strand
caaauauggugcugaugua

SEQ ID NO: 616410 - RNA, 19 nt, Homo sapiens
  misc_RNA (1)...(19): siRNA sense strand
gcaaaggacauguuaaaga

SEQ ID NO: 616411 - RNA, 19 nt, Homo sapiens
  misc_RNA (1)...(19): siRNA sense strand
caagucaucacaauaguua

SEQ ID NO: 616412 - RNA, 19 nt, Homo sapiens
  misc_RNA (1)...(19): siRNA sense strand
caacaaguauuaacaguac

SEQ ID NO: 616413 - RNA, 19 nt, Homo sapiens
  misc_RNA (1)...(19): siRNA sense strand
gaugacagcucuccauugg

SEQ ID NO: 616414 - RNA, 19 nt, Homo sapiens
  misc_RNA (1)...(19): siRNA sense strand
gacaauacaugcugcaaca

SEQ ID NO: 616415 - RNA, 19 nt, Homo sapiens
  misc_RNA (1)...(19): siRNA sense strand
gaugaugaaguucguauuu

SEQ ID NO: 616416 - RNA, 19 nt, Homo sapiens
  misc_RNA (1)...(19): siRNA sense strand
gaagaaacuguuauaagug

SEQ ID NO: 616417 - RNA, 19 nt, Homo sapiens
  misc_RNA (1)...(19): siRNA sense strand
gaccgaacaccauuacaua

SEQ ID NO: 616418 - RNA, 19 nt, Homo sapiens
  misc_RNA (1)...(19): siRNA sense strand
ccacagaacacaaucauca

SEQ ID NO: 616419 - RNA, 19 nt, Homo sapiens
  misc_RNA (1)...(19): siRNA sense strand
gcauggugcugaugucaau

SEQ ID NO: 616420 - RNA, 19 nt, Homo sapiens
  misc_RNA (1)...(19): siRNA sense strand
gcugggaacuucuccacuu

SEQ ID NO: 616421 - RNA, 19 nt, Homo sapiens
  misc_RNA (1)...(19): siRNA sense strand
gauguacacacgcaaagua

SEQ ID NO: 616422 - RNA, 19 nt, Homo sapiens
  misc_RNA (1)...(19): siRNA sense strand
gugcugaugucaaugcaaa

SEQ ID NO: 616423 - RNA, 19 nt, Homo sapiens
  misc_RNA (1)...(19): siRNA sense strand
uagcagagauauuacagau

SEQ ID NO: 616424 - RNA, 19 nt, Homo sapiens
  misc_RNA (1)...(19): siRNA sense strand
uggaaacucuucuacauca

SEQ ID NO: 616425 - RNA, 19 nt, Homo sapiens
  misc_RNA (1)...(19): siRNA sense strand
ggaaucugcagaaauagaa

SEQ ID NO: 616426 - RNA, 19 nt, Homo sapiens
  misc_RNA (1)...(19): siRNA sense strand
gaagaaccaccagcuaaga

SEQ ID NO: 616427 - RNA, 19 nt, Homo sapiens
  misc_RNA (1)...(19): siRNA sense strand
gaacuucuccacuucaucu

SEQ ID NO: 616428 - RNA, 19 nt, Homo sapiens
  misc_RNA (1)...(19): siRNA sense strand
agacauugcugaagaaacu

SEQ ID NO: 616429 - RNA, 19 nt, Homo sapiens
  misc_RNA (1)...(19): siRNA sense strand
aaggacauguuaaagauga

SEQ ID NO: 616430 - RNA, 19 nt, Homo sapiens
  misc_RNA (1)...(19): siRNA sense strand
gugaagaaccaccagcuaa

SEQ ID NO: 616431 - RNA, 19 nt, Homo sapiens
  misc_RNA (1)...(19): siRNA sense strand
gagcaggucaagaugauga

SEQ ID NO: 616432 - RNA, 19 nt, Homo sapiens
  misc_RNA (1)...(19): siRNA sense strand
ggaaauuugcacucuauuc

SEQ ID NO: 616433 - RNA, 19 nt, Homo sapiens
  misc_RNA (1)...(19): siRNA sense strand
aaacucuucuacaucagua

SEQ ID NO: 616434 - RNA, 19 nt, Homo sapiens
  misc_RNA (1)...(19): siRNA sense strand
caaugcaaaggacauguua

SEQ ID NO: 616435 - RNA, 19 nt, Homo sapiens
  misc_RNA (1)...(19): siRNA sense strand
uaagagacaauguaucgaa

SEQ ID NO: 616436 - RNA, 19 nt, Homo sapiens
  misc_RNA (1)...(19): siRNA sense strand
ggucagcccaucauuguga

SEQ ID NO: 616437 - RNA, 19 nt, Homo sapiens
  misc_RNA (1)...(19): siRNA sense strand
agaaccaaaucaacacaaa

SEQ ID NO: 616438 - RNA, 19 nt, Homo sapiens
  misc_RNA (1)...(19): siRNA sense strand
uguaucugcuguucaguuu

SEQ ID NO: 616439 - RNA, 19 nt, Homo sapiens
  misc_RNA (1)...(19): siRNA sense strand
gacaacaaguauuaacagu

SEQ ID NO: 616440 - RNA, 19 nt, Homo sapiens
  misc_RNA (1)...(19): siRNA sense strand
guacacacgcaaaguaaau

SEQ ID NO: 616441 - RNA, 19 nt, Homo sapiens
  misc_RNA (1)...(19): siRNA sense strand
aaauggagcucccuuuacu

SEQ ID NO: 616442 - RNA, 19 nt, Homo sapiens
  misc_RNA (1)...(19): siRNA sense strand
agauggacaacaaguauua

SEQ ID NO: 616443 - RNA, 19 nt, Homo sapiens
  misc_RNA (1)...(19): siRNA sense strand
acaccacaguuuaucauug

SEQ ID NO: 616444 - RNA, 19 nt, Homo sapiens
  misc_RNA (1)...(19): siRNA sense strand
caauagacaauggaaauga

SEQ ID NO: 616445 - RNA, 19 nt, Homo sapiens
  misc_RNA (1)...(19): siRNA sense strand
gcaagucaucacaauaguu

SEQ ID NO: 616446 - RNA, 19 nt, Homo sapiens
  misc_RNA (1)...(19): siRNA sense strand
ggagcucccuuuacuacag

SEQ ID NO: 616447 - RNA, 19 nt, Homo sapiens
  misc_RNA (1)...(19): siRNA sense strand
cacaauaguuacagaugga

SEQ ID NO: 616448 - RNA, 19 nt, Homo sapiens
  misc_RNA (1)...(19): siRNA sense strand
ggaccgaacaccauuacau

SEQ ID NO: 616449 - RNA, 19 nt, Homo sapiens
  misc_RNA (1)...(19): siRNA sense strand
aagagacaauguaucgaaa

SEQ ID NO: 616450 - RNA, 19 nt, Homo sapiens
  misc_RNA (1)...(19): siRNA sense strand
gagcucccuuuacuacaga

SEQ ID NO: 616451 - RNA, 19 nt, Homo sapiens
  misc_RNA (1)...(19): siRNA sense strand
cagcaagucaucacaauag

SEQ ID NO: 616452 - RNA, 19 nt, Homo sapiens
  misc_RNA (1)...(19): siRNA sense strand
gcugcaacaccacaguuua

SEQ ID NO: 616453 - RNA, 19 nt, Homo sapiens
  misc_RNA (1)...(19): siRNA sense strand
caacacaaacccagagagu

SEQ ID NO: 616454 - RNA, 19 nt, Homo sapiens
  misc_RNA (1)...(19): siRNA sense strand
ucaaauauggugcugaugu

SEQ ID NO: 616455 - RNA, 19 nt, Homo sapiens
  misc_RNA (1)...(19): siRNA sense strand
gcacaguauggucauuauu

SEQ ID NO: 616456 - RNA, 19 nt, Homo sapiens
  misc_RNA (1)...(19): siRNA sense strand
gcuaagagacaauguaucg

SEQ ID NO: 616457 - RNA, 19 nt, Homo sapiens
  misc_RNA (1)...(19): siRNA sense strand
ccagauggacaacaaguau

SEQ ID NO: 616458 - RNA, 19 nt, Homo sapiens
  misc_RNA (1)...(19): siRNA sense strand
gagcuggugugagcagaga

SEQ ID NO: 616459 - RNA, 19 nt, Homo sapiens
  misc_RNA (1)...(19): siRNA sense strand
ggacaacaaguauuaacag

SEQ ID NO: 616460 - RNA, 19 nt, Homo sapiens
  misc_RNA (1)...(19): siRNA sense strand
gcaacaccacaguuuauca

SEQ ID NO: 616461 - RNA, 19 nt, Homo sapiens
  misc_RNA (1)...(19): siRNA sense strand
gcugaagaaacuguuauaa

SEQ ID NO: 616462 - RNA, 19 nt, Homo sapiens
  misc_RNA (1)...(19): siRNA sense strand
gcagagaugccagaaccaa

SEQ ID NO: 616463 - RNA, 19 nt, Homo sapiens
  misc_RNA (1)...(19): siRNA sense strand
uaacaguaccagcaacaga

SEQ ID NO: 616464 - RNA, 19 nt, Homo sapiens
  misc_RNA (1)...(19): siRNA sense strand
cagcacaguauggucauua

SEQ ID NO: 616465 - RNA, 19 nt, Homo sapiens
  misc_RNA (1)...(19): siRNA sense strand
gaaauuugcacucuauucc

SEQ ID NO: 616466 - RNA, 19 nt, Homo sapiens
  misc_RNA (1)...(19): siRNA sense strand
ugccuuagcugaagcaucu

SEQ ID NO: 616467 - RNA, 19 nt, Homo sapiens
  misc_RNA (1)...(19): siRNA sense strand
gcacgagcaggucaagaug

SEQ ID NO: 616468 - RNA, 19 nt, Homo sapiens
  misc_RNA (1)...(19): siRNA sense strand
ggaauuggucagcccauca

SEQ ID NO: 616469 - RNA, 19 nt, Homo sapiens
  misc_RNA (1)...(19): siRNA sense strand
ggccacagaagaaguaguu

SEQ ID NO: 616470 - RNA, 19 nt, Homo sapiens
  misc_RNA (1)...(19): siRNA sense strand
caucaguauuagcuacauu

SEQ ID NO: 616471 - RNA, 19 nt, Homo sapiens
  misc_RNA (1)...(19): siRNA sense strand
gaagauuuagcagagauau

SEQ ID NO: 616472 - RNA, 19 nt, Homo sapiens
  misc_RNA (1)...(19): siRNA sense strand
caccacaguuuaucauugg

SEQ ID NO: 616473 - RNA, 19 nt, Homo sapiens
  misc_RNA (1)...(19): siRNA sense strand
cagcuaagagacaauguau

SEQ ID NO: 616474 - RNA, 19 nt, Homo sapiens
  misc_RNA (1)...(19): siRNA sense strand
caugccagauggacaacaa

SEQ ID NO: 616475 - RNA, 19 nt, Homo sapiens
  misc_RNA (1)...(19): siRNA sense strand
gaaacucuucuacaucagu

SEQ ID NO: 616476 - RNA, 19 nt, Homo sapiens
  misc_RNA (1)...(19): siRNA sense strand
caagaggugguggaacuuu

SEQ ID NO: 616477 - RNA, 19 nt, Homo sapiens
  misc_RNA (1)...(19): siRNA sense strand
cagacuggcugggaacuuc

SEQ ID NO: 616478 - RNA, 19 nt, Homo sapiens
  misc_RNA (1)...(19): siRNA sense strand
gauauuacagauugcuaug

SEQ ID NO: 616479 - RNA, 19 nt, Homo sapiens
  misc_RNA (1)...(19): siRNA sense strand
gcagcacaguauggucauu

SEQ ID NO: 616480 - RNA, 19 nt, Homo sapiens
  misc_RNA (1)...(19): siRNA sense strand
ucagcaagucaucacaaua

SEQ ID NO: 616481 - RNA, 19 nt, Homo sapiens
  misc_RNA (1)...(19): siRNA sense strand
caaauggagcucccuuuac

SEQ ID NO: 616482 - RNA, 19 nt, Homo sapiens
  misc_RNA (1)...(19): siRNA sense strand
uucagaaacuccaguagug

SEQ ID NO: 616483 - RNA, 19 nt, Homo sapiens
  misc_RNA (1)...(19): siRNA sense strand
cagaacacaaucaucaaga

SEQ ID NO: 616484 - RNA, 19 nt, Homo sapiens
  misc_RNA (1)...(19): siRNA sense strand
ccagcuaagagacaaugua

SEQ ID NO: 616485 - RNA, 19 nt, Homo sapiens
  misc_RNA (1)...(19): siRNA sense strand
uuggaaauuugcacucuau

SEQ ID NO: 616486 - RNA, 19 nt, Homo sapiens
  misc_RNA (1)...(19): siRNA sense strand
caacaccacaguuuaucau

SEQ ID NO: 616487 - RNA, 19 nt, Homo sapiens
  misc_RNA (1)...(19): siRNA sense strand
gagauauuacagauugcua

SEQ ID NO: 616488 - RNA, 19 nt, Homo sapiens
  misc_RNA (1)...(19): siRNA sense strand
gguggaacuuuuaaucaaa

SEQ ID NO: 616489 - RNA, 19 nt, Homo sapiens
  misc_RNA (1)...(19): siRNA sense strand
gggaacuucuccacuucau

SEQ ID NO: 616490 - RNA, 19 nt, Homo sapiens
  misc_RNA (1)...(19): siRNA sense strand
gauggacaacaaguauuaa

SEQ ID NO: 616491 - RNA, 19 nt, Homo sapiens
  misc_RNA (1)...(19): siRNA sense strand
uaucugcuguucaguuugg

SEQ ID NO: 616492 - RNA, 19 nt, Homo sapiens
  misc_RNA (1)...(19): siRNA sense strand
cagagaguccugacacugu

SEQ ID NO: 616493 - RNA, 19 nt, Homo sapiens
  misc_RNA (1)...(19): siRNA sense strand
uauuacagauugcuaugca

SEQ ID NO: 616494 - RNA, 19 nt, Homo sapiens
  misc_RNA (1)...(19): siRNA sense strand
acacacgcaaaguaaauuu

SEQ ID NO: 616495 - RNA, 19 nt, Homo sapiens
  misc_RNA (1)...(19): siRNA sense strand
gaaacuguuauaagugaag

SEQ ID NO: 616496 - RNA, 19 nt, Homo sapiens
  misc_RNA (1)...(19): siRNA sense strand
ccgaacaccauuacauaug

SEQ ID NO: 616497 - RNA, 19 nt, Homo sapiens
  misc_RNA (1)...(19): siRNA sense strand
gucagcaagucaucacaau

SEQ ID NO: 616498 - RNA, 19 nt, Homo sapiens
  misc_RNA (1)...(19): siRNA sense strand
cacaguauggucauuauuc

SEQ ID NO: 616499 - RNA, 19 nt, Homo sapiens
  misc_RNA (1)...(19): siRNA sense strand
uuuggaaacucuucuacau

SEQ ID NO: 616500 - RNA, 19 nt, Homo sapiens
  misc_RNA (1)...(19): siRNA sense strand
gacaauggaaaugaagauu

SEQ ID NO: 616501 - RNA, 19 nt, Homo sapiens
  misc_RNA (1)...(19): siRNA sense strand
gaaccaaaucaacacaaac

SEQ ID NO: 616502 - RNA, 19 nt, Homo sapiens
  misc_RNA (1)...(19): siRNA sense strand
ucaucuagcagcacaguau

SEQ ID NO: 616503 - RNA, 19 nt, Homo sapiens
  misc_RNA (1)...(19): siRNA sense strand
gcagagauauuacagauug

SEQ ID NO: 616504 - RNA, 19 nt, Homo sapiens
  misc_RNA (1)...(19): siRNA sense strand
gguggaaucugcagaaaua

SEQ ID NO: 616505 - RNA, 19 nt, Homo sapiens
  misc_RNA (1)...(19): siRNA sense strand
caacagacauugcugaaga

SEQ ID NO: 616506 - RNA, 19 nt, Homo sapiens
  misc_RNA (1)...(19): siRNA sense strand
gagacaauguaucgaaaua

SEQ ID NO: 616507 - RNA, 19 nt, Homo sapiens
  misc_RNA (1)...(19): siRNA sense strand
caaaggacauguuaaagau

SEQ ID NO: 616508 - RNA, 19 nt, Homo sapiens
  misc_RNA (1)...(19): siRNA sense strand
gcaaauggagcucccuuua

SEQ ID NO: 616509 - RNA, 19 nt, Homo sapiens
  misc_RNA (1)...(19): siRNA sense strand
caaauauggugcugaugua

SEQ ID NO: 616510 - RNA, 19 nt, Homo sapiens
  misc_RNA (1)...(19): siRNA sense strand
gcaaaggacauguuaaaga

SEQ ID NO: 616511 - RNA, 19 nt, Homo sapiens
  misc_RNA (1)...(19): siRNA sense strand
caagucaucacaauaguua

SEQ ID NO: 616512 - RNA, 19 nt, Homo sapiens
  misc_RNA (1)...(19): siRNA sense strand
caacaaguauuaacaguac

SEQ ID NO: 616513 - RNA, 19 nt, Homo sapiens
  misc_RNA (1)...(19): siRNA sense strand
gaugacagcucuccauugg

SEQ ID NO: 616514 - RNA, 19 nt, Homo sapiens
  misc_RNA (1)...(19): siRNA sense strand
gacaauacaugcugcaaca

SEQ ID NO: 616515 - RNA, 19 nt, Homo sapiens
  misc_RNA (1)...(19): siRNA sense strand
gaugaugaaguucguauuu

SEQ ID NO: 616516 - RNA, 19 nt, Homo sapiens
  misc_RNA (1)...(19): siRNA sense strand
gaagaaacuguuauaagug

SEQ ID NO: 616517 - RNA, 19 nt, Homo sapiens
  misc_RNA (1)...(19): siRNA sense strand
gaccgaacaccauuacaua

SEQ ID NO: 616518 - RNA, 19 nt, Homo sapiens
  misc_RNA (1)...(19): siRNA sense strand
ccacagaacacaaucauca

SEQ ID NO: 616519 - RNA, 19 nt, Homo sapiens
  misc_RNA (1)...(19): siRNA sense strand
gcauggugcugaugucaau

SEQ ID NO: 616520 - RNA, 19 nt, Homo sapiens
  misc_RNA (1)...(19): siRNA sense strand
gcugggaacuucuccacuu

SEQ ID NO: 616521 - RNA, 19 nt, Homo sapiens
  misc_RNA (1)...(19): siRNA sense strand
gauguacacacgcaaagua

SEQ ID NO: 616522 - RNA, 19 nt, Homo sapiens
  misc_RNA (1)...(19): siRNA sense strand
gugcugaugucaaugcaaa

SEQ ID NO: 616523 - RNA, 19 nt, Homo sapiens
  misc_RNA (1)...(19): siRNA sense strand
uagcagagauauuacagau

SEQ ID NO: 616524 - RNA, 19 nt, Homo sapiens
  misc_RNA (1)...(19): siRNA sense strand
uggaaacucuucuacauca

SEQ ID NO: 616525 - RNA, 19 nt, Homo sapiens
  misc_RNA (1)...(19): siRNA sense strand
ggaaucugcagaaauagaa

SEQ ID NO: 616526 - RNA, 19 nt, Homo sapiens
  misc_RNA (1)...(19): siRNA sense strand
gaagaaccaccagcuaaga

SEQ ID NO: 616527 - RNA, 19 nt, Homo sapiens
  misc_RNA (1)...(19): siRNA sense strand
gaacuucuccacuucaucu

SEQ ID NO: 616528 - RNA, 19 nt, Homo sapiens
  misc_RNA (1)...(19): siRNA sense strand
agacauugcugaagaaacu

SEQ ID NO: 616529 - RNA, 19 nt, Homo sapiens
  misc_RNA (1)...(19): siRNA sense strand
aaggacauguuaaagauga

SEQ ID NO: 616530 - RNA, 19 nt, Homo sapiens
  misc_RNA (1)...(19): siRNA sense strand
gugaagaaccaccagcuaa

SEQ ID NO: 616531 - RNA, 19 nt, Homo sapiens
  misc_RNA (1)...(19): siRNA sense strand
gagcaggucaagaugauga

SEQ ID NO: 616532 - RNA, 19 nt, Homo sapiens
  misc_RNA (1)...(19): siRNA sense strand
ggaaauuugcacucuauuc

SEQ ID NO: 616533 - RNA, 19 nt, Homo sapiens
  misc_RNA (1)...(19): siRNA sense strand
aaacucuucuacaucagua

SEQ ID NO: 616534 - RNA, 19 nt, Homo sapiens
  misc_RNA (1)...(19): siRNA sense strand
caaugcaaaggacauguua

SEQ ID NO: 616535 - RNA, 19 nt, Homo sapiens
  misc_RNA (1)...(19): siRNA sense strand
uaagagacaauguaucgaa

SEQ ID NO: 616536 - RNA, 19 nt, Homo sapiens
  misc_RNA (1)...(19): siRNA sense strand
ggucagcccaucauuguga

SEQ ID NO: 616537 - RNA, 19 nt, Homo sapiens
  misc_RNA (1)...(19): siRNA sense strand
agaaccaaaucaacacaaa

SEQ ID NO: 616538 - RNA, 19 nt, Homo sapiens
  misc_RNA (1)...(19): siRNA sense strand
uguaucugcuguucaguuu

SEQ ID NO: 616539 - RNA, 19 nt, Homo sapiens
  misc_RNA (1)...(19): siRNA sense strand
gacaacaaguauuaacagu

SEQ ID NO: 616540 - RNA, 19 nt, Homo sapiens
  misc_RNA (1)...(19): siRNA sense strand
guacacacgcaaaguaaau

SEQ ID NO: 616541 - RNA, 19 nt, Homo sapiens
  misc_RNA (1)...(19): siRNA sense strand
aaauggagcucccuuuacu

SEQ ID NO: 616542 - RNA, 19 nt, Homo sapiens
  misc_RNA (1)...(19): siRNA sense strand
agauggacaacaaguauua

SEQ ID NO: 616543 - RNA, 19 nt, Homo sapiens
  misc_RNA (1)...(19): siRNA sense strand
acaccacaguuuaucauug

SEQ ID NO: 616544 - RNA, 19 nt, Homo sapiens
  misc_RNA (1)...(19): siRNA sense strand
caauagacaauggaaauga

SEQ ID NO: 616545 - RNA, 19 nt, Homo sapiens
  misc_RNA (1)...(19): siRNA sense strand
gcaagucaucacaauaguu

SEQ ID NO: 616546 - RNA, 19 nt, Homo sapiens
  misc_RNA (1)...(19): siRNA sense strand
ggagcucccuuuacuacag

SEQ ID NO: 616547 - RNA, 19 nt, Homo sapiens
  misc_RNA (1)...(19): siRNA sense strand
cacaauaguuacagaugga

SEQ ID NO: 616548 - RNA, 19 nt, Homo sapiens
  misc_RNA (1)...(19): siRNA sense strand
ggaccgaacaccauuacau

SEQ ID NO: 616549 - RNA, 19 nt, Homo sapiens
  misc_RNA (1)...(19): siRNA sense strand
aagagacaauguaucgaaa

SEQ ID NO: 616550 - RNA, 19 nt, Homo sapiens
  misc_RNA (1)...(19): siRNA sense strand
gagcucccuuuacuacaga

SEQ ID NO: 616551 - RNA, 19 nt, Homo sapiens
  misc_RNA (1)...(19): siRNA sense strand
cagcaagucaucacaauag

SEQ ID NO: 616552 - RNA, 19 nt, Homo sapiens
  misc_RNA (1)...(19): siRNA sense strand
gcugcaacaccacaguuua

SEQ ID NO: 616553 - RNA, 19 nt, Homo sapiens
  misc_RNA (1)...(19): siRNA sense strand
caacacaaacccagagagu

SEQ ID NO: 616554 - RNA, 19 nt, Homo sapiens
  misc_RNA (1)...(19): siRNA sense strand
ucaaauauggugcugaugu

SEQ ID NO: 616555 - RNA, 19 nt, Homo sapiens
  misc_RNA (1)...(19): siRNA sense strand
gcacaguauggucauuauu

SEQ ID NO: 616556 - RNA, 19 nt, Homo sapiens
  misc_RNA (1)...(19): siRNA sense strand
gcuaagagacaauguaucg

SEQ ID NO: 616557 - RNA, 19 nt, Homo sapiens
  misc_RNA (1)...(19): siRNA sense strand
ccagauggacaacaaguau

SEQ ID NO: 616558 - RNA, 19 nt, Homo sapiens
  misc_RNA (1)...(19): siRNA sense strand
gagcuggugugagcagaga

SEQ ID NO: 616559 - RNA, 19 nt, Homo sapiens
  misc_RNA (1)...(19): siRNA sense strand
ggacaacaaguauuaacag

SEQ ID NO: 616560 - RNA, 19 nt, Homo sapiens
  misc_RNA (1)...(19): siRNA sense strand
gcaacaccacaguuuauca

SEQ ID NO: 616561 - RNA, 19 nt, Homo sapiens
  misc_RNA (1)...(19): siRNA sense strand
gcugaagaaacuguuauaa

SEQ ID NO: 616562 - RNA, 19 nt, Homo sapiens
  misc_RNA (1)...(19): siRNA sense strand
gcagagaugccagaaccaa

SEQ ID NO: 616563 - RNA, 19 nt, Homo sapiens
  misc_RNA (1)...(19): siRNA sense strand
uaacaguaccagcaacaga

SEQ ID NO: 616564 - RNA, 19 nt, Homo sapiens
  misc_RNA (1)...(19): siRNA sense strand
cagcacaguauggucauua

SEQ ID NO: 616565 - RNA, 19 nt, Homo sapiens
  misc_RNA (1)...(19): siRNA sense strand
gaaauuugcacucuauucc

SEQ ID NO: 616566 - RNA, 19 nt, Homo sapiens
  misc_RNA (1)...(19): siRNA sense strand
ugccuuagcugaagcaucu

SEQ ID NO: 616567 - RNA, 19 nt, Homo sapiens
  misc_RNA (1)...(19): siRNA sense strand
gcacgagcaggucaagaug

SEQ ID NO: 616568 - RNA, 19 nt, Homo sapiens
  misc_RNA (1)...(19): siRNA sense strand
ggaauuggucagcccauca

SEQ ID NO: 616569 - RNA, 19 nt, Homo sapiens
  misc_RNA (1)...(19): siRNA sense strand
ggccacagaagaaguaguu

SEQ ID NO: 616570 - RNA, 19 nt, Homo sapiens
  misc_RNA (1)...(19): siRNA sense strand
caucaguauuagcuacauu

SEQ ID NO: 616571 - RNA, 19 nt, Homo sapiens
  misc_RNA (1)...(19): siRNA sense strand
gaagauuuagcagagauau

SEQ ID NO: 616572 - RNA, 19 nt, Homo sapiens
  misc_RNA (1)...(19): siRNA sense strand
caccacaguuuaucauugg

SEQ ID NO: 616573 - RNA, 19 nt, Homo sapiens
  misc_RNA (1)...(19): siRNA sense strand
cagcuaagagacaauguau

SEQ ID NO: 616574 - RNA, 19 nt, Homo sapiens
  misc_RNA (1)...(19): siRNA sense strand
caugccagauggacaacaa

SEQ ID NO: 616575 - RNA, 19 nt, Homo sapiens
  misc_RNA (1)...(19): siRNA sense strand
gaaacucuucuacaucagu

SEQ ID NO: 616576 - RNA, 19 nt, Homo sapiens
  misc_RNA (1)...(19): siRNA sense strand
caagaggugguggaacuuu

SEQ ID NO: 616577 - RNA, 19 nt, Homo sapiens
  misc_RNA (1)...(19): siRNA sense strand
cagacuggcugggaacuuc

SEQ ID NO: 616578 - RNA, 19 nt, Homo sapiens
  misc_RNA (1)...(19): siRNA sense strand
gauauuacagauugcuaug

SEQ ID NO: 616579 - RNA, 19 nt, Homo sapiens
  misc_RNA (1)...(19): siRNA sense strand
gcagcacaguauggucauu

SEQ ID NO: 616580 - RNA, 19 nt, Homo sapiens
  misc_RNA (1)...(19): siRNA sense strand
ucagcaagucaucacaaua

SEQ ID NO: 616581 - RNA, 19 nt, Homo sapiens
  misc_RNA (1)...(19): siRNA sense strand
caaauggagcucccuuuac

SEQ ID NO: 616582 - RNA, 19 nt, Homo sapiens
  misc_RNA (1)...(19): siRNA sense strand
uucagaaacuccaguagug

SEQ ID NO: 616583 - RNA, 19 nt, Homo sapiens
  misc_RNA (1)...(19): siRNA sense strand
cagaacacaaucaucaaga

SEQ ID NO: 616584 - RNA, 19 nt, Homo sapiens
  misc_RNA (1)...(19): siRNA sense strand
ccagcuaagagacaaugua

SEQ ID NO: 616585 - RNA, 19 nt, Homo sapiens
  misc_RNA (1)...(19): siRNA sense strand
uuggaaauuugcacucuau

SEQ ID NO: 616586 - RNA, 19 nt, Homo sapiens
  misc_RNA (1)...(19): siRNA sense strand
caacaccacaguuuaucau

SEQ ID NO: 616587 - RNA, 19 nt, Homo sapiens
  misc_RNA (1)...(19): siRNA sense strand
gagauauuacagauugcua

SEQ ID NO: 616588 - RNA, 19 nt, Homo sapiens
  misc_RNA (1)...(19): siRNA sense strand
gguggaacuuuuaaucaaa

SEQ ID NO: 616589 - RNA, 19 nt, Homo sapiens
  misc_RNA (1)...(19): siRNA sense strand
gggaacuucuccacuucau

SEQ ID NO: 616590 - RNA, 19 nt, Homo sapiens
  misc_RNA (1)...(19): siRNA sense strand
gauggacaacaaguauuaa

SEQ ID NO: 616591 - RNA, 19 nt, Homo sapiens
  misc_RNA (1)...(19): siRNA sense strand
uaucugcuguucaguuugg

SEQ ID NO: 616592 - RNA, 19 nt, Homo sapiens
  misc_RNA (1)...(19): siRNA sense strand
cagagaguccugacacugu

SEQ ID NO: 616593 - RNA, 19 nt, Homo sapiens
  misc_RNA (1)...(19): siRNA sense strand
uauuacagauugcuaugca

SEQ ID NO: 616594 - RNA, 19 nt, Homo sapiens
  misc_RNA (1)...(19): siRNA sense strand
acacacgcaaaguaaauuu

SEQ ID NO: 616595 - RNA, 19 nt, Homo sapiens
  misc_RNA (1)...(19): siRNA sense strand
gaaacuguuauaagugaag

SEQ ID NO: 616596 - RNA, 19 nt, Homo sapiens
  misc_RNA (1)...(19): siRNA sense strand
ccgaacaccauuacauaug

SEQ ID NO: 616597 - RNA, 19 nt, Homo sapiens
  misc_RNA (1)...(19): siRNA sense strand
gucagcaagucaucacaau

SEQ ID NO: 616598 - RNA, 19 nt, Homo sapiens
  misc_RNA (1)...(19): siRNA sense strand
cacaguauggucauuauuc

SEQ ID NO: 616599 - RNA, 19 nt, Homo sapiens
  misc_RNA (1)...(19): siRNA sense strand
uuuggaaacucuucuacau

SEQ ID NO: 616600 - RNA, 19 nt, Homo sapiens
  misc_RNA (1)...(19): siRNA sense strand
gacaauggaaaugaagauu

SEQ ID NO: 616601 - RNA, 19 nt, Homo sapiens
  misc_RNA (1)...(19): siRNA sense strand
gaaccaaaucaacacaaac

SEQ ID NO: 616602 - RNA, 19 nt, Homo sapiens
  misc_RNA (1)...(19): siRNA sense strand
ucaucuagcagcacaguau

SEQ ID NO: 616603 - RNA, 19 nt, Homo sapiens
  misc_RNA (1)...(19): siRNA sense strand
gcagagauauuacagauug

SEQ ID NO: 616604 - RNA, 19 nt, Homo sapiens
  misc_RNA (1)...(19): siRNA sense strand
gguggaaucugcagaaaua

SEQ ID NO: 616605 - RNA, 19 nt, Homo sapiens
  misc_RNA (1)...(19): siRNA sense strand
caacagacauugcugaaga

SEQ ID NO: 616606 - RNA, 19 nt, Homo sapiens
  misc_RNA (1)...(19): siRNA sense strand
gagacaauguaucgaaaua

SEQ ID NO: 616607 - RNA, 19 nt, Homo sapiens
  misc_RNA (1)...(19): siRNA sense strand
caaaggacauguuaaagau

SEQ ID NO: 616608 - RNA, 19 nt, Homo sapiens
  misc_RNA (1)...(19): siRNA sense strand
gcaaauggagcucccuuua

SEQ ID NO: 616609 - RNA, 19 nt, Homo sapiens
  misc_RNA (1)...(19): siRNA sense strand
caaauauggugcugaugua

SEQ ID NO: 616610 - RNA, 19 nt, Homo sapiens
  misc_RNA (1)...(19): siRNA sense strand
gcaaaggacauguuaaaga

SEQ ID NO: 616611 - RNA, 19 nt, Homo sapiens
  misc_RNA (1)...(19): siRNA sense strand
caagucaucacaauaguua

SEQ ID NO: 616612 - RNA, 19 nt, Homo sapiens
  misc_RNA (1)...(19): siRNA sense strand
caacaaguauuaacaguac

SEQ ID NO: 616613 - RNA, 19 nt, Homo sapiens
  misc_RNA (1)...(19): siRNA sense strand
gaugacagcucuccauugg

SEQ ID NO: 616614 - RNA, 19 nt, Homo sapiens
  misc_RNA (1)...(19): siRNA sense strand
gacaauacaugcugcaaca

SEQ ID NO: 616615 - RNA, 19 nt, Homo sapiens
  misc_RNA (1)...(19): siRNA sense strand
gaugaugaaguucguauuu

SEQ ID NO: 616616 - RNA, 19 nt, Homo sapiens
  misc_RNA (1)...(19): siRNA sense strand
gaagaaacuguuauaagug

SEQ ID NO: 616617 - RNA, 19 nt, Homo sapiens
  misc_RNA (1)...(19): siRNA sense strand
gaccgaacaccauuacaua

SEQ ID NO: 616618 - RNA, 19 nt, Homo sapiens
  misc_RNA (1)...(19): siRNA sense strand
ccacagaacacaaucauca

SEQ ID NO: 616619 - RNA, 19 nt, Homo sapiens
  misc_RNA (1)...(19): siRNA sense strand
gcauggugcugaugucaau

SEQ ID NO: 616620 - RNA, 19 nt, Homo sapiens
  misc_RNA (1)...(19): siRNA sense strand
gcugggaacuucuccacuu

SEQ ID NO: 616621 - RNA, 19 nt, Homo sapiens
  misc_RNA (1)...(19): siRNA sense strand
gauguacacacgcaaagua

SEQ ID NO: 616622 - RNA, 19 nt, Homo sapiens
  misc_RNA (1)...(19): siRNA sense strand
gugcugaugucaaugcaaa

SEQ ID NO: 616623 - RNA, 19 nt, Homo sapiens
  misc_RNA (1)...(19): siRNA sense strand
uagcagagauauuacagau

SEQ ID NO: 616624 - RNA, 19 nt, Homo sapiens
  misc_RNA (1)...(19): siRNA sense strand
uggaaacucuucuacauca

SEQ ID NO: 616625 - RNA, 19 nt, Homo sapiens
  misc_RNA (1)...(19): siRNA sense strand
ggaaucugcagaaauagaa

SEQ ID NO: 616626 - RNA, 19 nt, Homo sapiens
  misc_RNA (1)...(19): siRNA sense strand
gaagaaccaccagcuaaga

SEQ ID NO: 616627 - RNA, 19 nt, Homo sapiens
  misc_RNA (1)...(19): siRNA sense strand
gaacuucuccacuucaucu

SEQ ID NO: 616628 - RNA, 19 nt, Homo sapiens
  misc_RNA (1)...(19): siRNA sense strand
agacauugcugaagaaacu

SEQ ID NO: 616629 - RNA, 19 nt, Homo sapiens
  misc_RNA (1)...(19): siRNA sense strand
aaggacauguuaaagauga

SEQ ID NO: 616630 - RNA, 19 nt, Homo sapiens
  misc_RNA (1)...(19): siRNA sense strand
gugaagaaccaccagcuaa

SEQ ID NO: 616631 - RNA, 19 nt, Homo sapiens
  misc_RNA (1)...(19): siRNA sense strand
gagcaggucaagaugauga

SEQ ID NO: 616632 - RNA, 19 nt, Homo sapiens
  misc_RNA (1)...(19): siRNA sense strand
ggaaauuugcacucuauuc

SEQ ID NO: 616633 - RNA, 19 nt, Homo sapiens
  misc_RNA (1)...(19): siRNA sense strand
aaacucuucuacaucagua

SEQ ID NO: 616634 - RNA, 19 nt, Homo sapiens
  misc_RNA (1)...(19): siRNA sense strand
caaugcaaaggacauguua

SEQ ID NO: 616635 - RNA, 19 nt, Homo sapiens
  misc_RNA (1)...(19): siRNA sense strand
uaagagacaauguaucgaa

SEQ ID NO: 616636 - RNA, 19 nt, Homo sapiens
  misc_RNA (1)...(19): siRNA sense strand
ggucagcccaucauuguga

SEQ ID NO: 616637 - RNA, 19 nt, Homo sapiens
  misc_RNA (1)...(19): siRNA sense strand
agaaccaaaucaacacaaa

SEQ ID NO: 616638 - RNA, 19 nt, Homo sapiens
  misc_RNA (1)...(19): siRNA sense strand
uguaucugcuguucaguuu

SEQ ID NO: 616639 - RNA, 19 nt, Homo sapiens
  misc_RNA (1)...(19): siRNA sense strand
gacaacaaguauuaacagu

SEQ ID NO: 616640 - RNA, 19 nt, Homo sapiens
  misc_RNA (1)...(19): siRNA sense strand
guacacacgcaaaguaaau

SEQ ID NO: 616641 - RNA, 19 nt, Homo sapiens
  misc_RNA (1)...(19): siRNA sense strand
aaauggagcucccuuuacu

SEQ ID NO: 616642 - RNA, 19 nt, Homo sapiens
  misc_RNA (1)...(19): siRNA sense strand
agauggacaacaaguauua

SEQ ID NO: 616643 - RNA, 19 nt, Homo sapiens
  misc_RNA (1)...(19): siRNA sense strand
acaccacaguuuaucauug

SEQ ID NO: 616644 - RNA, 19 nt, Homo sapiens
  misc_RNA (1)...(19): siRNA sense strand
caauagacaauggaaauga

SEQ ID NO: 616645 - RNA, 19 nt, Homo sapiens
  misc_RNA (1)...(19): siRNA sense strand
gcaagucaucacaauaguu

SEQ ID NO: 616646 - RNA, 19 nt, Homo sapiens
  misc_RNA (1)...(19): siRNA sense strand
ggagcucccuuuacuacag

SEQ ID NO: 616647 - RNA, 19 nt, Homo sapiens
  misc_RNA (1)...(19): siRNA sense strand
cacaauaguuacagaugga

SEQ ID NO: 616648 - RNA, 19 nt, Homo sapiens
  misc_RNA (1)...(19): siRNA sense strand
ggaccgaacaccauuacau

SEQ ID NO: 616649 - RNA, 19 nt, Homo sapiens
  misc_RNA (1)...(19): siRNA sense strand
aagagacaauguaucgaaa

SEQ ID NO: 616650 - RNA, 19 nt, Homo sapiens
  misc_RNA (1)...(19): siRNA sense strand
gagcucccuuuacuacaga

SEQ ID NO: 616651 - RNA, 19 nt, Homo sapiens
  misc_RNA (1)...(19): siRNA sense strand
cagcaagucaucacaauag

SEQ ID NO: 616652 - RNA, 19 nt, Homo sapiens
  misc_RNA (1)...(19): siRNA sense strand
gcugcaacaccacaguuua

SEQ ID NO: 616653 - RNA, 19 nt, Homo sapiens
  misc_RNA (1)...(19): siRNA sense strand
caacacaaacccagagagu

SEQ ID NO: 616654 - RNA, 19 nt, Homo sapiens
  misc_RNA (1)...(19): siRNA sense strand
ucaaauauggugcugaugu

SEQ ID NO: 616655 - RNA, 19 nt, Homo sapiens
  misc_RNA (1)...(19): siRNA sense strand
gcacaguauggucauuauu

SEQ ID NO: 616656 - RNA, 19 nt, Homo sapiens
  misc_RNA (1)...(19): siRNA sense strand
gcuaagagacaauguaucg

SEQ ID NO: 616657 - RNA, 19 nt, Homo sapiens
  misc_RNA (1)...(19): siRNA sense strand
ccagauggacaacaaguau

SEQ ID NO: 616658 - RNA, 19 nt, Homo sapiens
  misc_RNA (1)...(19): siRNA sense strand
gagcuggugugagcagaga

SEQ ID NO: 616659 - RNA, 19 nt, Homo sapiens
  misc_RNA (1)...(19): siRNA sense strand
ggacaacaaguauuaacag

SEQ ID NO: 616660 - RNA, 19 nt, Homo sapiens
  misc_RNA (1)...(19): siRNA sense strand
gcaacaccacaguuuauca

SEQ ID NO: 616661 - RNA, 19 nt, Homo sapiens
  misc_RNA (1)...(19): siRNA sense strand
gcugaagaaacuguuauaa

SEQ ID NO: 616662 - RNA, 19 nt, Homo sapiens
  misc_RNA (1)...(19): siRNA sense strand
gcagagaugccagaaccaa

SEQ ID NO: 616663 - RNA, 19 nt, Homo sapiens
  misc_RNA (1)...(19): siRNA sense strand
uaacaguaccagcaacaga

SEQ ID NO: 616664 - RNA, 19 nt, Homo sapiens
  misc_RNA (1)...(19): siRNA sense strand
cagcacaguauggucauua

SEQ ID NO: 616665 - RNA, 19 nt, Homo sapiens
  misc_RNA (1)...(19): siRNA sense strand
gaaauuugcacucuauucc

SEQ ID NO: 616666 - RNA, 19 nt, Homo sapiens
  misc_RNA (1)...(19): siRNA sense strand
ugccuuagcugaagcaucu

SEQ ID NO: 616667 - RNA, 19 nt, Homo sapiens
  misc_RNA (1)...(19): siRNA sense strand
gcacgagcaggucaagaug

SEQ ID NO: 616668 - RNA, 19 nt, Homo sapiens
  misc_RNA (1)...(19): siRNA sense strand
ggaauuggucagcccauca

SEQ ID NO: 616669 - RNA, 19 nt, Homo sapiens
  misc_RNA (1)...(19): siRNA sense strand
ggccacagaagaaguaguu

SEQ ID NO: 616670 - RNA, 19 nt, Homo sapiens
  misc_RNA (1)...(19): siRNA sense strand
caucaguauuagcuacauu

SEQ ID NO: 616671 - RNA, 19 nt, Homo sapiens
  misc_RNA (1)...(19): siRNA sense strand
gaagauuuagcagagauau

SEQ ID NO: 616672 - RNA, 19 nt, Homo sapiens
  misc_RNA (1)...(19): siRNA sense strand
caccacaguuuaucauugg

SEQ ID NO: 616673 - RNA, 19 nt, Homo sapiens
  misc_RNA (1)...(19): siRNA sense strand
cagcuaagagacaauguau

SEQ ID NO: 616674 - RNA, 19 nt, Homo sapiens
  misc_RNA (1)...(19): siRNA sense strand
caugccagauggacaacaa

SEQ ID NO: 616675 - RNA, 19 nt, Homo sapiens
  misc_RNA (1)...(19): siRNA sense strand
gaaacucuucuacaucagu

SEQ ID NO: 616676 - RNA, 19 nt, Homo sapiens
  misc_RNA (1)...(19): siRNA sense strand
caagaggugguggaacuuu

SEQ ID NO: 616677 - RNA, 19 nt, Homo sapiens
  misc_RNA (1)...(19): siRNA sense strand
cagacuggcugggaacuuc

SEQ ID NO: 616678 - RNA, 19 nt, Homo sapiens
  misc_RNA (1)...(19): siRNA sense strand
gauauuacagauugcuaug

SEQ ID NO: 616679 - RNA, 19 nt, Homo sapiens
  misc_RNA (1)...(19): siRNA sense strand
gcagcacaguauggucauu

SEQ ID NO: 616680 - RNA, 19 nt, Homo sapiens
  misc_RNA (1)...(19): siRNA sense strand
ucagcaagucaucacaaua

SEQ ID NO: 616681 - RNA, 19 nt, Homo sapiens
  misc_RNA (1)...(19): siRNA sense strand
caaauggagcucccuuuac

SEQ ID NO: 616682 - RNA, 19 nt, Homo sapiens
  misc_RNA (1)...(19): siRNA sense strand
uucagaaacuccaguagug

SEQ ID NO: 616683 - RNA, 19 nt, Homo sapiens
  misc_RNA (1)...(19): siRNA sense strand
cagaacacaaucaucaaga

SEQ ID NO: 616684 - RNA, 19 nt, Homo sapiens
  misc_RNA (1)...(19): siRNA sense strand
ccagcuaagagacaaugua

SEQ ID NO: 616685 - RNA, 19 nt, Homo sapiens
  misc_RNA (1)...(19): siRNA sense strand
uuggaaauuugcacucuau

SEQ ID NO: 616686 - RNA, 19 nt, Homo sapiens
  misc_RNA (1)...(19): siRNA sense strand
caacaccacaguuuaucau

SEQ ID NO: 616687 - RNA, 19 nt, Homo sapiens
  misc_RNA (1)...(19): siRNA sense strand
gagauauuacagauugcua

SEQ ID NO: 616688 - RNA, 19 nt, Homo sapiens
  misc_RNA (1)...(19): siRNA sense strand
gguggaacuuuuaaucaaa

SEQ ID NO: 616689 - RNA, 19 nt, Homo sapiens
  misc_RNA (1)...(19): siRNA sense strand
gggaacuucuccacuucau

SEQ ID NO: 616690 - RNA, 19 nt, Homo sapiens
  misc_RNA (1)...(19): siRNA sense strand
gauggacaacaaguauuaa

SEQ ID NO: 616691 - RNA, 19 nt, Homo sapiens
  misc_RNA (1)...(19): siRNA sense strand
uaucugcuguucaguuugg

SEQ ID NO: 616692 - RNA, 19 nt, Homo sapiens
  misc_RNA (1)...(19): siRNA sense strand
cagagaguccugacacugu

SEQ ID NO: 616693 - RNA, 19 nt, Homo sapiens
  misc_RNA (1)...(19): siRNA sense strand
uauuacagauugcuaugca

SEQ ID NO: 616694 - RNA, 19 nt, Homo sapiens
  misc_RNA (1)...(19): siRNA sense strand
acacacgcaaaguaaauuu

SEQ ID NO: 616695 - RNA, 19 nt, Homo sapiens
  misc_RNA (1)...(19): siRNA sense strand
gaaacuguuauaagugaag

SEQ ID NO: 616696 - RNA, 19 nt, Homo sapiens
  misc_RNA (1)...(19): siRNA sense strand
ccgaacaccauuacauaug

SEQ ID NO: 616697 - RNA, 19 nt, Homo sapiens
  misc_RNA (1)...(19): siRNA sense strand
gucagcaagucaucacaau

SEQ ID NO: 616698 - RNA, 19 nt, Homo sapiens
  misc_RNA (1)...(19): siRNA sense strand
cacaguauggucauuauuc

SEQ ID NO: 616699 - RNA, 19 nt, Homo sapiens
  misc_RNA (1)...(19): siRNA sense strand
uuuggaaacucuucuacau

SEQ ID NO: 616700 - RNA, 19 nt, Homo sapiens
  misc_RNA (1)...(19): siRNA sense strand
gacaauggaaaugaagauu

SEQ ID NO: 616701 - RNA, 19 nt, Homo sapiens
  misc_RNA (1)...(19): siRNA sense strand
gaaccaaaucaacacaaac

SEQ ID NO: 616702 - RNA, 19 nt, Homo sapiens
  misc_RNA (1)...(19): siRNA sense strand
ucaucuagcagcacaguau

SEQ ID NO: 616703 - RNA, 19 nt, Homo sapiens
  misc_RNA (1)...(19): siRNA sense strand
gcagagauauuacagauug

SEQ ID NO: 616704 - RNA, 19 nt, Homo sapiens
  misc_RNA (1)...(19): siRNA sense strand
gguggaaucugcagaaaua

SEQ ID NO: 616705 - RNA, 19 nt, Homo sapiens
  misc_RNA (1)...(19): siRNA sense strand
caacagacauugcugaaga

SEQ ID NO: 616706 - RNA, 19 nt, Homo sapiens
  misc_RNA (1)...(19): siRNA sense strand
gagacaauguaucgaaaua

SEQ ID NO: 616707 - RNA, 19 nt, Homo sapiens
  misc_RNA (1)...(19): siRNA sense strand
caaaggacauguuaaagau

SEQ ID NO: 616708 - RNA, 19 nt, Homo sapiens
  misc_RNA (1)...(19): siRNA sense strand
gcaaauggagcucccuuua

SEQ ID NO: 616709 - RNA, 19 nt, Homo sapiens
  misc_RNA (1)...(19): siRNA sense strand
caaauauggugcugaugua

SEQ ID NO: 616710 - RNA, 19 nt, Homo sapiens
  misc_RNA (1)...(19): siRNA sense strand
gcaaaggacauguuaaaga

SEQ ID NO: 616711 - RNA, 19 nt, Homo sapiens
  misc_RNA (1)...(19): siRNA sense strand
caagucaucacaauaguua

SEQ ID NO: 616712 - RNA, 19 nt, Homo sapiens
  misc_RNA (1)...(19): siRNA sense strand
caacaaguauuaacaguac

SEQ ID NO: 616713 - RNA, 19 nt, Homo sapiens
  misc_RNA (1)...(19): siRNA sense strand
gaugacagcucuccauugg

SEQ ID NO: 616714 - RNA, 19 nt, Homo sapiens
  misc_RNA (1)...(19): siRNA sense strand
gacaauacaugcugcaaca

SEQ ID NO: 616715 - RNA, 19 nt, Homo sapiens
  misc_RNA (1)...(19): siRNA sense strand
gaugaugaaguucguauuu

SEQ ID NO: 616716 - RNA, 19 nt, Homo sapiens
  misc_RNA (1)...(19): siRNA sense strand
gaagaaacuguuauaagug

SEQ ID NO: 616717 - RNA, 19 nt, Homo sapiens
  misc_RNA (1)...(19): siRNA sense strand
gaccgaacaccauuacaua

SEQ ID NO: 616718 - RNA, 19 nt, Homo sapiens
  misc_RNA (1)...(19): siRNA sense strand
ccacagaacacaaucauca

SEQ ID NO: 616719 - RNA, 19 nt, Homo sapiens
  misc_RNA (1)...(19): siRNA sense strand
gcauggugcugaugucaau

SEQ ID NO: 616720 - RNA, 19 nt, Homo sapiens
  misc_RNA (1)...(19): siRNA sense strand
gcugggaacuucuccacuu

SEQ ID NO: 616721 - RNA, 19 nt, Homo sapiens
  misc_RNA (1)...(19): siRNA sense strand
gauguacacacgcaaagua

SEQ ID NO: 616722 - RNA, 19 nt, Homo sapiens
  misc_RNA (1)...(19): siRNA sense strand
gugcugaugucaaugcaaa

SEQ ID NO: 616723 - RNA, 19 nt, Homo sapiens
  misc_RNA (1)...(19): siRNA sense strand
uagcagagauauuacagau

SEQ ID NO: 616724 - RNA, 19 nt, Homo sapiens
  misc_RNA (1)...(19): siRNA sense strand
uggaaacucuucuacauca

SEQ ID NO: 616725 - RNA, 19 nt, Homo sapiens
  misc_RNA (1)...(19): siRNA sense strand
ggaaucugcagaaauagaa

SEQ ID NO: 616726 - RNA, 19 nt, Homo sapiens
  misc_RNA (1)...(19): siRNA sense strand
gaagaaccaccagcuaaga

SEQ ID NO: 616727 - RNA, 19 nt, Homo sapiens
  misc_RNA (1)...(19): siRNA sense strand
gaacuucuccacuucaucu

SEQ ID NO: 616728 - RNA, 19 nt, Homo sapiens
  misc_RNA (1)...(19): siRNA sense strand
agacauugcugaagaaacu

SEQ ID NO: 616729 - RNA, 19 nt, Homo sapiens
  misc_RNA (1)...(19): siRNA sense strand
aaggacauguuaaagauga

SEQ ID NO: 616730 - RNA, 19 nt, Homo sapiens
  misc_RNA (1)...(19): siRNA sense strand
gugaagaaccaccagcuaa

SEQ ID NO: 616731 - RNA, 19 nt, Homo sapiens
  misc_RNA (1)...(19): siRNA sense strand
gagcaggucaagaugauga

SEQ ID NO: 616732 - RNA, 19 nt, Homo sapiens
  misc_RNA (1)...(19): siRNA sense strand
ggaaauuugcacucuauuc

SEQ ID NO: 616733 - RNA, 19 nt, Homo sapiens
  misc_RNA (1)...(19): siRNA sense strand
aaacucuucuacaucagua

SEQ ID NO: 616734 - RNA, 19 nt, Homo sapiens
  misc_RNA (1)...(19): siRNA sense strand
caaugcaaaggacauguua

SEQ ID NO: 616735 - RNA, 19 nt, Homo sapiens
  misc_RNA (1)...(19): siRNA sense strand
uaagagacaauguaucgaa

SEQ ID NO: 616736 - RNA, 19 nt, Homo sapiens
  misc_RNA (1)...(19): siRNA sense strand
ggucagcccaucauuguga

SEQ ID NO: 616737 - RNA, 19 nt, Homo sapiens
  misc_RNA (1)...(19): siRNA sense strand
agaaccaaaucaacacaaa

SEQ ID NO: 616738 - RNA, 19 nt, Homo sapiens
  misc_RNA (1)...(19): siRNA sense strand
uguaucugcuguucaguuu

SEQ ID NO: 616739 - RNA, 19 nt, Homo sapiens
  misc_RNA (1)...(19): siRNA sense strand
gacaacaaguauuaacagu

SEQ ID NO: 616740 - RNA, 19 nt, Homo sapiens
  misc_RNA (1)...(19): siRNA sense strand
guacacacgcaaaguaaau

SEQ ID NO: 616741 - RNA, 19 nt, Homo sapiens
  misc_RNA (1)...(19): siRNA sense strand
aaauggagcucccuuuacu

SEQ ID NO: 616742 - RNA, 19 nt, Homo sapiens
  misc_RNA (1)...(19): siRNA sense strand
agauggacaacaaguauua

SEQ ID NO: 616743 - RNA, 19 nt, Homo sapiens
  misc_RNA (1)...(19): siRNA sense strand
acaccacaguuuaucauug

SEQ ID NO: 616744 - RNA, 19 nt, Homo sapiens
  misc_RNA (1)...(19): siRNA sense strand
caauagacaauggaaauga

SEQ ID NO: 616745 - RNA, 19 nt, Homo sapiens
  misc_RNA (1)...(19): siRNA sense strand
gcaagucaucacaauaguu

SEQ ID NO: 616746 - RNA, 19 nt, Homo sapiens
  misc_RNA (1)...(19): siRNA sense strand
ggagcucccuuuacuacag

SEQ ID NO: 616747 - RNA, 19 nt, Homo sapiens
  misc_RNA (1)...(19): siRNA sense strand
cacaauaguuacagaugga

SEQ ID NO: 616748 - RNA, 19 nt, Homo sapiens
  misc_RNA (1)...(19): siRNA sense strand
ggaccgaacaccauuacau

SEQ ID NO: 616749 - RNA, 19 nt, Homo sapiens
  misc_RNA (1)...(19): siRNA sense strand
aagagacaauguaucgaaa

SEQ ID NO: 616750 - RNA, 19 nt, Homo sapiens
  misc_RNA (1)...(19): siRNA sense strand
gagcucccuuuacuacaga

SEQ ID NO: 616751 - RNA, 19 nt, Homo sapiens
  misc_RNA (1)...(19): siRNA sense strand
cagcaagucaucacaauag

SEQ ID NO: 616752 - RNA, 19 nt, Homo sapiens
  misc_RNA (1)...(19): siRNA sense strand
gcugcaacaccacaguuua

SEQ ID NO: 616753 - RNA, 19 nt, Homo sapiens
  misc_RNA (1)...(19): siRNA sense strand
caacacaaacccagagagu

SEQ ID NO: 616754 - RNA, 19 nt, Homo sapiens
  misc_RNA (1)...(19): siRNA sense strand
ucaaauauggugcugaugu

SEQ ID NO: 616755 - RNA, 19 nt, Homo sapiens
  misc_RNA (1)...(19): siRNA sense strand
gcacaguauggucauuauu

SEQ ID NO: 616756 - RNA, 19 nt, Homo sapiens
  misc_RNA (1)...(19): siRNA sense strand
gcuaagagacaauguaucg

SEQ ID NO: 616757 - RNA, 19 nt, Homo sapiens
  misc_RNA (1)...(19): siRNA sense strand
ccagauggacaacaaguau

SEQ ID NO: 616758 - RNA, 19 nt, Homo sapiens
  misc_RNA (1)...(19): siRNA sense strand
gagcuggugugagcagaga

SEQ ID NO: 616759 - RNA, 19 nt, Homo sapiens
  misc_RNA (1)...(19): siRNA sense strand
ggacaacaaguauuaacag

SEQ ID NO: 616760 - RNA, 19 nt, Homo sapiens
  misc_RNA (1)...(19): siRNA sense strand
gcaacaccacaguuuauca

SEQ ID NO: 616761 - RNA, 19 nt, Homo sapiens
  misc_RNA (1)...(19): siRNA sense strand
gcugaagaaacuguuauaa

SEQ ID NO: 616762 - RNA, 19 nt, Homo sapiens
  misc_RNA (1)...(19): siRNA sense strand
gcagagaugccagaaccaa

SEQ ID NO: 616763 - RNA, 19 nt, Homo sapiens
  misc_RNA (1)...(19): siRNA sense strand
uaacaguaccagcaacaga

SEQ ID NO: 616764 - RNA, 19 nt, Homo sapiens
  misc_RNA (1)...(19): siRNA sense strand
cagcacaguauggucauua

SEQ ID NO: 616765 - RNA, 19 nt, Homo sapiens
  misc_RNA (1)...(19): siRNA sense strand
gaaauuugcacucuauucc

SEQ ID NO: 616766 - RNA, 19 nt, Homo sapiens
  misc_RNA (1)...(19): siRNA sense strand
ugccuuagcugaagcaucu

SEQ ID NO: 616767 - RNA, 19 nt, Homo sapiens
  misc_RNA (1)...(19): siRNA sense strand
gcacgagcaggucaagaug

SEQ ID NO: 616768 - RNA, 19 nt, Homo sapiens
  misc_RNA (1)...(19): siRNA sense strand
ggaauuggucagcccauca

SEQ ID NO: 616769 - RNA, 19 nt, Homo sapiens
  misc_RNA (1)...(19): siRNA sense strand
ggccacagaagaaguaguu

SEQ ID NO: 616770 - RNA, 19 nt, Homo sapiens
  misc_RNA (1)...(19): siRNA sense strand
caucaguauuagcuacauu

SEQ ID NO: 616771 - RNA, 19 nt, Homo sapiens
  misc_RNA (1)...(19): siRNA sense strand
gaagauuuagcagagauau

SEQ ID NO: 616772 - RNA, 19 nt, Homo sapiens
  misc_RNA (1)...(19): siRNA sense strand
caccacaguuuaucauugg

SEQ ID NO: 616773 - RNA, 19 nt, Homo sapiens
  misc_RNA (1)...(19): siRNA sense strand
cagcuaagagacaauguau

SEQ ID NO: 616774 - RNA, 19 nt, Homo sapiens
  misc_RNA (1)...(19): siRNA sense strand
caugccagauggacaacaa

SEQ ID NO: 616775 - RNA, 19 nt, Homo sapiens
  misc_RNA (1)...(19): siRNA sense strand
gaaacucuucuacaucagu

SEQ ID NO: 616776 - RNA, 19 nt, Homo sapiens
  misc_RNA (1)...(19): siRNA sense strand
caagaggugguggaacuuu

SEQ ID NO: 616777 - RNA, 19 nt, Homo sapiens
  misc_RNA (1)...(19): siRNA sense strand
cagacuggcugggaacuuc

SEQ ID NO: 616778 - RNA, 19 nt, Homo sapiens
  misc_RNA (1)...(19): siRNA sense strand
gauauuacagauugcuaug

SEQ ID NO: 616779 - RNA, 19 nt, Homo sapiens
  misc_RNA (1)...(19): siRNA sense strand
gcagcacaguauggucauu

SEQ ID NO: 616780 - RNA, 19 nt, Homo sapiens
  misc_RNA (1)...(19): siRNA sense strand
ucagcaagucaucacaaua

SEQ ID NO: 616781 - RNA, 19 nt, Homo sapiens
  misc_RNA (1)...(19): siRNA sense strand
caaauggagcucccuuuac

SEQ ID NO: 616782 - RNA, 19 nt, Homo sapiens
  misc_RNA (1)...(19): siRNA sense strand
uucagaaacuccaguagug

SEQ ID NO: 616783 - RNA, 19 nt, Homo sapiens
  misc_RNA (1)...(19): siRNA sense strand
cagaacacaaucaucaaga

SEQ ID NO: 616784 - RNA, 19 nt, Homo sapiens
  misc_RNA (1)...(19): siRNA sense strand
ccagcuaagagacaaugua

SEQ ID NO: 616785 - RNA, 19 nt, Homo sapiens
  misc_RNA (1)...(19): siRNA sense strand
uuggaaauuugcacucuau

SEQ ID NO: 616786 - RNA, 19 nt, Homo sapiens
  misc_RNA (1)...(19): siRNA sense strand
caacaccacaguuuaucau

SEQ ID NO: 616787 - RNA, 19 nt, Homo sapiens
  misc_RNA (1)...(19): siRNA sense strand
gagauauuacagauugcua

SEQ ID NO: 616788 - RNA, 19 nt, Homo sapiens
  misc_RNA (1)...(19): siRNA sense strand
gguggaacuuuuaaucaaa

SEQ ID NO: 616789 - RNA, 19 nt, Homo sapiens
  misc_RNA (1)...(19): siRNA sense strand
gggaacuucuccacuucau

SEQ ID NO: 616790 - RNA, 19 nt, Homo sapiens
  misc_RNA (1)...(19): siRNA sense strand
gauggacaacaaguauuaa

SEQ ID NO: 616791 - RNA, 19 nt, Homo sapiens
  misc_RNA (1)...(19): siRNA sense strand
uaucugcuguucaguuugg

SEQ ID NO: 616792 - RNA, 19 nt, Homo sapiens
  misc_RNA (1)...(19): siRNA sense strand
cagagaguccugacacugu

SEQ ID NO: 616793 - RNA, 19 nt, Homo sapiens
  misc_RNA (1)...(19): siRNA sense strand
uauuacagauugcuaugca

SEQ ID NO: 616794 - RNA, 19 nt, Homo sapiens
  misc_RNA (1)...(19): siRNA sense strand
acacacgcaaaguaaauuu

SEQ ID NO: 616795 - RNA, 19 nt, Homo sapiens
  misc_RNA (1)...(19): siRNA sense strand
gaaacuguuauaagugaag

SEQ ID NO: 616796 - RNA, 19 nt, Homo sapiens
  misc_RNA (1)...(19): siRNA sense strand
ccgaacaccauuacauaug

SEQ ID NO: 616797 - RNA, 19 nt, Homo sapiens
  misc_RNA (1)...(19): siRNA sense strand
gucagcaagucaucacaau

SEQ ID NO: 616798 - RNA, 19 nt, Homo sapiens
  misc_RNA (1)...(19): siRNA sense strand
cacaguauggucauuauuc

SEQ ID NO: 616799 - RNA, 19 nt, Homo sapiens
  misc_RNA (1)...(19): siRNA sense strand
uuuggaaacucuucuacau

SEQ ID NO: 616800 - RNA, 19 nt, Homo sapiens
  misc_RNA (1)...(19): siRNA sense strand
gacaauggaaaugaagauu

SEQ ID NO: 616801 - RNA, 19 nt, Homo sapiens
  misc_RNA (1)...(19): siRNA sense strand
gaaccaaaucaacacaaac

SEQ ID NO: 616802 - RNA, 19 nt, Homo sapiens
  misc_RNA (1)...(19): siRNA sense strand
ucaucuagcagcacaguau

SEQ ID NO: 616803 - RNA, 19 nt, Homo sapiens
  misc_RNA (1)...(19): siRNA sense strand
gcagagauauuacagauug

SEQ ID NO: 616804 - RNA, 19 nt, Homo sapiens
  misc_RNA (1)...(19): siRNA sense strand
gguggaaucugcagaaaua

SEQ ID NO: 616805 - RNA, 19 nt, Homo sapiens
  misc_RNA (1)...(19): siRNA sense strand
caacagacauugcugaaga

SEQ ID NO: 616806 - RNA, 19 nt, Homo sapiens
  misc_RNA (1)...(19): siRNA sense strand
gagacaauguaucgaaaua

SEQ ID NO: 616807 - RNA, 19 nt, Homo sapiens
  misc_RNA (1)...(19): siRNA sense strand
caaaggacauguuaaagau

SEQ ID NO: 616808 - RNA, 19 nt, Homo sapiens
  misc_RNA (1)...(19): siRNA sense strand
gcaaauggagcucccuuua

SEQ ID NO: 616809 - RNA, 19 nt, Homo sapiens
  misc_RNA (1)...(19): siRNA sense strand
caaauauggugcugaugua

SEQ ID NO: 616810 - RNA, 19 nt, Homo sapiens
  misc_RNA (1)...(19): siRNA sense strand
gcaaaggacauguuaaaga

SEQ ID NO: 616811 - RNA, 19 nt, Homo sapiens
  misc_RNA (1)...(19): siRNA sense strand
caagucaucacaauaguua

SEQ ID NO: 616812 - RNA, 19 nt, Homo sapiens
  misc_RNA (1)...(19): siRNA sense strand
caacaaguauuaacaguac

SEQ ID NO: 616813 - RNA, 19 nt, Homo sapiens
  misc_RNA (1)...(19): siRNA sense strand
gaugacagcucuccauugg

SEQ ID NO: 616814 - RNA, 19 nt, Homo sapiens
  misc_RNA (1)...(19): siRNA sense strand
gacaauacaugcugcaaca

SEQ ID NO: 616815 - RNA, 19 nt, Homo sapiens
  misc_RNA (1)...(19): siRNA sense strand
gaugaugaaguucguauuu

SEQ ID NO: 616816 - RNA, 19 nt, Homo sapiens
  misc_RNA (1)...(19): siRNA sense strand
gaagaaacuguuauaagug

SEQ ID NO: 616817 - RNA, 19 nt, Homo sapiens
  misc_RNA (1)...(19): siRNA sense strand
gaccgaacaccauuacaua

SEQ ID NO: 616818 - RNA, 19 nt, Homo sapiens
  misc_RNA (1)...(19): siRNA sense strand
ccacagaacacaaucauca

SEQ ID NO: 616819 - RNA, 19 nt, Homo sapiens
  misc_RNA (1)...(19): siRNA sense strand
gcauggugcugaugucaau

SEQ ID NO: 616820 - RNA, 19 nt, Homo sapiens
  misc_RNA (1)...(19): siRNA sense strand
gcugggaacuucuccacuu

SEQ ID NO: 616821 - RNA, 19 nt, Homo sapiens
  misc_RNA (1)...(19): siRNA sense strand
gauguacacacgcaaagua

SEQ ID NO: 616822 - RNA, 19 nt, Homo sapiens
  misc_RNA (1)...(19): siRNA sense strand
gugcugaugucaaugcaaa

SEQ ID NO: 616823 - RNA, 19 nt, Homo sapiens
  misc_RNA (1)...(19): siRNA sense strand
uagcagagauauuacagau

SEQ ID NO: 616824 - RNA, 19 nt, Homo sapiens
  misc_RNA (1)...(19): siRNA sense strand
uggaaacucuucuacauca

SEQ ID NO: 616825 - RNA, 19 nt, Homo sapiens
  misc_RNA (1)...(19): siRNA sense strand
ggaaucugcagaaauagaa

SEQ ID NO: 616826 - RNA, 19 nt, Homo sapiens
  misc_RNA (1)...(19): siRNA sense strand
gaagaaccaccagcuaaga

SEQ ID NO: 616827 - RNA, 19 nt, Homo sapiens
  misc_RNA (1)...(19): siRNA sense strand
gaacuucuccacuucaucu

SEQ ID NO: 616828 - RNA, 19 nt, Homo sapiens
  misc_RNA (1)...(19): siRNA sense strand
agacauugcugaagaaacu

SEQ ID NO: 616829 - RNA, 19 nt, Homo sapiens
  misc_RNA (1)...(19): siRNA sense strand
aaggacauguuaaagauga

SEQ ID NO: 616830 - RNA, 19 nt, Homo sapiens
  misc_RNA (1)...(19): siRNA sense strand
gugaagaaccaccagcuaa

SEQ ID NO: 616831 - RNA, 19 nt, Homo sapiens
  misc_RNA (1)...(19): siRNA sense strand
gagcaggucaagaugauga

SEQ ID NO: 616832 - RNA, 19 nt, Homo sapiens
  misc_RNA (1)...(19): siRNA sense strand
ggaaauuugcacucuauuc

SEQ ID NO: 616833 - RNA, 19 nt, Homo sapiens
  misc_RNA (1)...(19): siRNA sense strand
aaacucuucuacaucagua

SEQ ID NO: 616834 - RNA, 19 nt, Homo sapiens
  misc_RNA (1)...(19): siRNA sense strand
caaugcaaaggacauguua

SEQ ID NO: 616835 - RNA, 19 nt, Homo sapiens
  misc_RNA (1)...(19): siRNA sense strand
uaagagacaauguaucgaa

SEQ ID NO: 616836 - RNA, 19 nt, Homo sapiens
  misc_RNA (1)...(19): siRNA sense strand
ggucagcccaucauuguga

SEQ ID NO: 616837 - RNA, 19 nt, Homo sapiens
  misc_RNA (1)...(19): siRNA sense strand
agaaccaaaucaacacaaa

SEQ ID NO: 616838 - RNA, 19 nt, Homo sapiens
  misc_RNA (1)...(19): siRNA sense strand
uguaucugcuguucaguuu

SEQ ID NO: 616839 - RNA, 19 nt, Homo sapiens
  misc_RNA (1)...(19): siRNA sense strand
gacaacaaguauuaacagu

SEQ ID NO: 616840 - RNA, 19 nt, Homo sapiens
  misc_RNA (1)...(19): siRNA sense strand
guacacacgcaaaguaaau

SEQ ID NO: 616841 - RNA, 19 nt, Homo sapiens
  misc_RNA (1)...(19): siRNA sense strand
aaauggagcucccuuuacu

SEQ ID NO: 616842 - RNA, 19 nt, Homo sapiens
  misc_RNA (1)...(19): siRNA sense strand
agauggacaacaaguauua

SEQ ID NO: 616843 - RNA, 19 nt, Homo sapiens
  misc_RNA (1)...(19): siRNA sense strand
acaccacaguuuaucauug

SEQ ID NO: 616844 - RNA, 19 nt, Homo sapiens
  misc_RNA (1)...(19): siRNA sense strand
caauagacaauggaaauga

SEQ ID NO: 616845 - RNA, 19 nt, Homo sapiens
  misc_RNA (1)...(19): siRNA sense strand
gcaagucaucacaauaguu

SEQ ID NO: 616846 - RNA, 19 nt, Homo sapiens
  misc_RNA (1)...(19): siRNA sense strand
ggagcucccuuuacuacag

SEQ ID NO: 616847 - RNA, 19 nt, Homo sapiens
  misc_RNA (1)...(19): siRNA sense strand
cacaauaguuacagaugga

SEQ ID NO: 616848 - RNA, 19 nt, Homo sapiens
  misc_RNA (1)...(19): siRNA sense strand
ggaccgaacaccauuacau

SEQ ID NO: 616849 - RNA, 19 nt, Homo sapiens
  misc_RNA (1)...(19): siRNA sense strand
aagagacaauguaucgaaa

SEQ ID NO: 616850 - RNA, 19 nt, Homo sapiens
  misc_RNA (1)...(19): siRNA sense strand
gagcucccuuuacuacaga

SEQ ID NO: 616851 - RNA, 19 nt, Homo sapiens
  misc_RNA (1)...(19): siRNA sense strand
cagcaagucaucacaauag

SEQ ID NO: 616852 - RNA, 19 nt, Homo sapiens
  misc_RNA (1)...(19): siRNA sense strand
gcugcaacaccacaguuua

SEQ ID NO: 616853 - RNA, 19 nt, Homo sapiens
  misc_RNA (1)...(19): siRNA sense strand
caacacaaacccagagagu

SEQ ID NO: 616854 - RNA, 19 nt, Homo sapiens
  misc_RNA (1)...(19): siRNA sense strand
ucaaauauggugcugaugu

SEQ ID NO: 616855 - RNA, 19 nt, Homo sapiens
  misc_RNA (1)...(19): siRNA sense strand
gcacaguauggucauuauu

SEQ ID NO: 616856 - RNA, 19 nt, Homo sapiens
  misc_RNA (1)...(19): siRNA sense strand
gcuaagagacaauguaucg

SEQ ID NO: 616857 - RNA, 19 nt, Homo sapiens
  misc_RNA (1)...(19): siRNA sense strand
ccagauggacaacaaguau

SEQ ID NO: 616858 - RNA, 19 nt, Homo sapiens
  misc_RNA (1)...(19): siRNA sense strand
gagcuggugugagcagaga

SEQ ID NO: 616859 - RNA, 19 nt, Homo sapiens
  misc_RNA (1)...(19): siRNA sense strand
ggacaacaaguauuaacag

SEQ ID NO: 616860 - RNA, 19 nt, Homo sapiens
  misc_RNA (1)...(19): siRNA sense strand
gcaacaccacaguuuauca

SEQ ID NO: 616861 - RNA, 19 nt, Homo sapiens
  misc_RNA (1)...(19): siRNA sense strand
gcugaagaaacuguuauaa

SEQ ID NO: 616862 - RNA, 19 nt, Homo sapiens
  misc_RNA (1)...(19): siRNA sense strand
gcagagaugccagaaccaa

SEQ ID NO: 616863 - RNA, 19 nt, Homo sapiens
  misc_RNA (1)...(19): siRNA sense strand
uaacaguaccagcaacaga

SEQ ID NO: 616864 - RNA, 19 nt, Homo sapiens
  misc_RNA (1)...(19): siRNA sense strand
cagcacaguauggucauua

SEQ ID NO: 616865 - RNA, 19 nt, Homo sapiens
  misc_RNA (1)...(19): siRNA sense strand
gaaauuugcacucuauucc

SEQ ID NO: 616866 - RNA, 19 nt, Homo sapiens
  misc_RNA (1)...(19): siRNA sense strand
ugccuuagcugaagcaucu

SEQ ID NO: 616867 - RNA, 19 nt, Homo sapiens
  misc_RNA (1)...(19): siRNA sense strand
gcacgagcaggucaagaug

SEQ ID NO: 616868 - RNA, 19 nt, Homo sapiens
  misc_RNA (1)...(19): siRNA sense strand
ggaauuggucagcccauca

SEQ ID NO: 616869 - RNA, 19 nt, Homo sapiens
  misc_RNA (1)...(19): siRNA sense strand
ggccacagaagaaguaguu

SEQ ID NO: 616870 - RNA, 19 nt, Homo sapiens
  misc_RNA (1)...(19): siRNA sense strand
caucaguauuagcuacauu

SEQ ID NO: 616871 - RNA, 19 nt, Homo sapiens
  misc_RNA (1)...(19): siRNA sense strand
gaagauuuagcagagauau

SEQ ID NO: 616872 - RNA, 19 nt, Homo sapiens
  misc_RNA (1)...(19): siRNA sense strand
caccacaguuuaucauugg

SEQ ID NO: 616873 - RNA, 19 nt, Homo sapiens
  misc_RNA (1)...(19): siRNA sense strand
cagcuaagagacaauguau

SEQ ID NO: 616874 - RNA, 19 nt, Homo sapiens
  misc_RNA (1)...(19): siRNA sense strand
caugccagauggacaacaa

SEQ ID NO: 616875 - RNA, 19 nt, Homo sapiens
  misc_RNA (1)...(19): siRNA sense strand
gaaacucuucuacaucagu

SEQ ID NO: 616876 - RNA, 19 nt, Homo sapiens
  misc_RNA (1)...(19): siRNA sense strand
caagaggugguggaacuuu

SEQ ID NO: 616877 - RNA, 19 nt, Homo sapiens
  misc_RNA (1)...(19): siRNA sense strand
cagacuggcugggaacuuc

SEQ ID NO: 616878 - RNA, 19 nt, Homo sapiens
  misc_RNA (1)...(19): siRNA sense strand
gauauuacagauugcuaug

SEQ ID NO: 616879 - RNA, 19 nt, Homo sapiens
  misc_RNA (1)...(19): siRNA sense strand
gcagcacaguauggucauu

SEQ ID NO: 616880 - RNA, 19 nt, Homo sapiens
  misc_RNA (1)...(19): siRNA sense strand
ucagcaagucaucacaaua

SEQ ID NO: 616881 - RNA, 19 nt, Homo sapiens
  misc_RNA (1)...(19): siRNA sense strand
caaauggagcucccuuuac

SEQ ID NO: 616882 - RNA, 19 nt, Homo sapiens
  misc_RNA (1)...(19): siRNA sense strand
uucagaaacuccaguagug

SEQ ID NO: 616883 - RNA, 19 nt, Homo sapiens
  misc_RNA (1)...(19): siRNA sense strand
cagaacacaaucaucaaga

SEQ ID NO: 616884 - RNA, 19 nt, Homo sapiens
  misc_RNA (1)...(19): siRNA sense strand
ccagcuaagagacaaugua

SEQ ID NO: 616885 - RNA, 19 nt, Homo sapiens
  misc_RNA (1)...(19): siRNA sense strand
uuggaaauuugcacucuau

SEQ ID NO: 616886 - RNA, 19 nt, Homo sapiens
  misc_RNA (1)...(19): siRNA sense strand
caacaccacaguuuaucau

SEQ ID NO: 616887 - RNA, 19 nt, Homo sapiens
  misc_RNA (1)...(19): siRNA sense strand
gagauauuacagauugcua

SEQ ID NO: 616888 - RNA, 19 nt, Homo sapiens
  misc_RNA (1)...(19): siRNA sense strand
gguggaacuuuuaaucaaa

SEQ ID NO: 616889 - RNA, 19 nt, Homo sapiens
  misc_RNA (1)...(19): siRNA sense strand
gggaacuucuccacuucau

SEQ ID NO: 616890 - RNA, 19 nt, Homo sapiens
  misc_RNA (1)...(19): siRNA sense strand
gauggacaacaaguauuaa

SEQ ID NO: 616891 - RNA, 19 nt, Homo sapiens
  misc_RNA (1)...(19): siRNA sense strand
uaucugcuguucaguuugg

SEQ ID NO: 616892 - RNA, 19 nt, Homo sapiens
  misc_RNA (1)...(19): siRNA sense strand
cagagaguccugacacugu

SEQ ID NO: 616893 - RNA, 19 nt, Homo sapiens
  misc_RNA (1)...(19): siRNA sense strand
uauuacagauugcuaugca

SEQ ID NO: 616894 - RNA, 19 nt, Homo sapiens
  misc_RNA (1)...(19): siRNA sense strand
acacacgcaaaguaaauuu

SEQ ID NO: 616895 - RNA, 19 nt, Homo sapiens
  misc_RNA (1)...(19): siRNA sense strand
gaaacuguuauaagugaag

SEQ ID NO: 616896 - RNA, 19 nt, Homo sapiens
  misc_RNA (1)...(19): siRNA sense strand
ccgaacaccauuacauaug

SEQ ID NO: 616897 - RNA, 19 nt, Homo sapiens
  misc_RNA (1)...(19): siRNA sense strand
gucagcaagucaucacaau

SEQ ID NO: 616898 - RNA, 19 nt, Homo sapiens
  misc_RNA (1)...(19): siRNA sense strand
cacaguauggucauuauuc

SEQ ID NO: 616899 - RNA, 19 nt, Homo sapiens
  misc_RNA (1)...(19): siRNA sense strand
uuuggaaacucuucuacau

SEQ ID NO: 616900 - RNA, 19 nt, Homo sapiens
  misc_RNA (1)...(19): siRNA sense strand
gacaauggaaaugaagauu

SEQ ID NO: 616901 - RNA, 19 nt, Homo sapiens
  misc_RNA (1)...(19): siRNA sense strand
gaaccaaaucaacacaaac

SEQ ID NO: 616902 - RNA, 19 nt, Homo sapiens
  misc_RNA (1)...(19): siRNA sense strand
ucaucuagcagcacaguau

SEQ ID NO: 616903 - RNA, 19 nt, Homo sapiens
  misc_RNA (1)...(19): siRNA sense strand
gcagagauauuacagauug

SEQ ID NO: 616904 - RNA, 19 nt, Homo sapiens
  misc_RNA (1)...(19): siRNA sense strand
gguggaaucugcagaaaua

SEQ ID NO: 616905 - RNA, 19 nt, Homo sapiens
  misc_RNA (1)...(19): siRNA sense strand
caacagacauugcugaaga

SEQ ID NO: 616906 - RNA, 19 nt, Homo sapiens
  misc_RNA (1)...(19): siRNA sense strand
gagacaauguaucgaaaua

SEQ ID NO: 616907 - RNA, 19 nt, Homo sapiens
  misc_RNA (1)...(19): siRNA sense strand
caaaggacauguuaaagau

SEQ ID NO: 616908 - RNA, 19 nt, Homo sapiens
  misc_RNA (1)...(19): siRNA sense strand
gcaaauggagcucccuuua

SEQ ID NO: 616909 - RNA, 19 nt, Homo sapiens
  misc_RNA (1)...(19): siRNA sense strand
caaauauggugcugaugua

SEQ ID NO: 616910 - RNA, 19 nt, Homo sapiens
  misc_RNA (1)...(19): siRNA sense strand
gcaaaggacauguuaaaga

SEQ ID NO: 616911 - RNA, 19 nt, Homo sapiens
  misc_RNA (1)...(19): siRNA sense strand
caagucaucacaauaguua

SEQ ID NO: 616912 - RNA, 19 nt, Homo sapiens
  misc_RNA (1)...(19): siRNA sense strand
caacaaguauuaacaguac

SEQ ID NO: 616913 - RNA, 19 nt, Homo sapiens
  misc_RNA (1)...(19): siRNA sense strand
gaugacagcucuccauugg

SEQ ID NO: 616914 - RNA, 19 nt, Homo sapiens
  misc_RNA (1)...(19): siRNA sense strand
gacaauacaugcugcaaca

SEQ ID NO: 616915 - RNA, 19 nt, Homo sapiens
  misc_RNA (1)...(19): siRNA sense strand
gaugaugaaguucguauuu

SEQ ID NO: 616916 - RNA, 19 nt, Homo sapiens
  misc_RNA (1)...(19): siRNA sense strand
gaagaaacuguuauaagug

SEQ ID NO: 616917 - RNA, 19 nt, Homo sapiens
  misc_RNA (1)...(19): siRNA sense strand
gaccgaacaccauuacaua

SEQ ID NO: 616918 - RNA, 19 nt, Homo sapiens
  misc_RNA (1)...(19): siRNA sense strand
ccacagaacacaaucauca

SEQ ID NO: 616919 - RNA, 19 nt, Homo sapiens
  misc_RNA (1)...(19): siRNA sense strand
gcauggugcugaugucaau

SEQ ID NO: 616920 - RNA, 19 nt, Homo sapiens
  misc_RNA (1)...(19): siRNA sense strand
gcugggaacuucuccacuu

SEQ ID NO: 616921 - RNA, 19 nt, Homo sapiens
  misc_RNA (1)...(19): siRNA sense strand
gauguacacacgcaaagua

SEQ ID NO: 616922 - RNA, 19 nt, Homo sapiens
  misc_RNA (1)...(19): siRNA sense strand
gugcugaugucaaugcaaa

SEQ ID NO: 616923 - RNA, 19 nt, Homo sapiens
  misc_RNA (1)...(19): siRNA sense strand
uagcagagauauuacagau

SEQ ID NO: 616924 - RNA, 19 nt, Homo sapiens
  misc_RNA (1)...(19): siRNA sense strand
uggaaacucuucuacauca

SEQ ID NO: 616925 - RNA, 19 nt, Homo sapiens
  misc_RNA (1)...(19): siRNA sense strand
ggaaucugcagaaauagaa

SEQ ID NO: 616926 - RNA, 19 nt, Homo sapiens
  misc_RNA (1)...(19): siRNA sense strand
gaagaaccaccagcuaaga

SEQ ID NO: 616927 - RNA, 19 nt, Homo sapiens
  misc_RNA (1)...(19): siRNA sense strand
gaacuucuccacuucaucu

SEQ ID NO: 616928 - RNA, 19 nt, Homo sapiens
  misc_RNA (1)...(19): siRNA sense strand
agacauugcugaagaaacu

SEQ ID NO: 616929 - RNA, 19 nt, Homo sapiens
  misc_RNA (1)...(19): siRNA sense strand
aaggacauguuaaagauga

SEQ ID NO: 616930 - RNA, 19 nt, Homo sapiens
  misc_RNA (1)...(19): siRNA sense strand
gugaagaaccaccagcuaa

SEQ ID NO: 616931 - RNA, 19 nt, Homo sapiens
  misc_RNA (1)...(19): siRNA sense strand
gagcaggucaagaugauga

SEQ ID NO: 616932 - RNA, 19 nt, Homo sapiens
  misc_RNA (1)...(19): siRNA sense strand
ggaaauuugcacucuauuc

SEQ ID NO: 616933 - RNA, 19 nt, Homo sapiens
  misc_RNA (1)...(19): siRNA sense strand
aaacucuucuacaucagua

SEQ ID NO: 616934 - RNA, 19 nt, Homo sapiens
  misc_RNA (1)...(19): siRNA sense strand
caaugcaaaggacauguua

SEQ ID NO: 616935 - RNA, 19 nt, Homo sapiens
  misc_RNA (1)...(19): siRNA sense strand
uaagagacaauguaucgaa

SEQ ID NO: 616936 - RNA, 19 nt, Homo sapiens
  misc_RNA (1)...(19): siRNA sense strand
ggucagcccaucauuguga

SEQ ID NO: 616937 - RNA, 19 nt, Homo sapiens
  misc_RNA (1)...(19): siRNA sense strand
agaaccaaaucaacacaaa

SEQ ID NO: 616938 - RNA, 19 nt, Homo sapiens
  misc_RNA (1)...(19): siRNA sense strand
uguaucugcuguucaguuu

SEQ ID NO: 616939 - RNA, 19 nt, Homo sapiens
  misc_RNA (1)...(19): siRNA sense strand
gacaacaaguauuaacagu

SEQ ID NO: 616940 - RNA, 19 nt, Homo sapiens
  misc_RNA (1)...(19): siRNA sense strand
guacacacgcaaaguaaau

SEQ ID NO: 616941 - RNA, 19 nt, Homo sapiens
  misc_RNA (1)...(19): siRNA sense strand
aaauggagcucccuuuacu

SEQ ID NO: 616942 - RNA, 19 nt, Homo sapiens
  misc_RNA (1)...(19): siRNA sense strand
agauggacaacaaguauua

SEQ ID NO: 616943 - RNA, 19 nt, Homo sapiens
  misc_RNA (1)...(19): siRNA sense strand
acaccacaguuuaucauug

SEQ ID NO: 616944 - RNA, 19 nt, Homo sapiens
  misc_RNA (1)...(19): siRNA sense strand
caauagacaauggaaauga

SEQ ID NO: 616945 - RNA, 19 nt, Homo sapiens
  misc_RNA (1)...(19): siRNA sense strand
gcaagucaucacaauaguu

SEQ ID NO: 616946 - RNA, 19 nt, Homo sapiens
  misc_RNA (1)...(19): siRNA sense strand
ggagcucccuuuacuacag

SEQ ID NO: 616947 - RNA, 19 nt, Homo sapiens
  misc_RNA (1)...(19): siRNA sense strand
cacaauaguuacagaugga

SEQ ID NO: 616948 - RNA, 19 nt, Homo sapiens
  misc_RNA (1)...(19): siRNA sense strand
ggaccgaacaccauuacau

SEQ ID NO: 616949 - RNA, 19 nt, Homo sapiens
  misc_RNA (1)...(19): siRNA sense strand
aagagacaauguaucgaaa

SEQ ID NO: 616950 - RNA, 19 nt, Homo sapiens
  misc_RNA (1)...(19): siRNA sense strand
gagcucccuuuacuacaga

SEQ ID NO: 616951 - RNA, 19 nt, Homo sapiens
  misc_RNA (1)...(19): siRNA sense strand
cagcaagucaucacaauag

SEQ ID NO: 616952 - RNA, 19 nt, Homo sapiens
  misc_RNA (1)...(19): siRNA sense strand
gcugcaacaccacaguuua

SEQ ID NO: 616953 - RNA, 19 nt, Homo sapiens
  misc_RNA (1)...(19): siRNA sense strand
caacacaaacccagagagu

SEQ ID NO: 616954 - RNA, 19 nt, Homo sapiens
  misc_RNA (1)...(19): siRNA sense strand
ucaaauauggugcugaugu

SEQ ID NO: 616955 - RNA, 19 nt, Homo sapiens
  misc_RNA (1)...(19): siRNA sense strand
gcacaguauggucauuauu

SEQ ID NO: 616956 - RNA, 19 nt, Homo sapiens
  misc_RNA (1)...(19): siRNA sense strand
gcuaagagacaauguaucg

SEQ ID NO: 616957 - RNA, 19 nt, Homo sapiens
  misc_RNA (1)...(19): siRNA sense strand
ccagauggacaacaaguau

SEQ ID NO: 616958 - RNA, 19 nt, Homo sapiens
  misc_RNA (1)...(19): siRNA sense strand
gagcuggugugagcagaga

SEQ ID NO: 616959 - RNA, 19 nt, Homo sapiens
  misc_RNA (1)...(19): siRNA sense strand
ggacaacaaguauuaacag

SEQ ID NO: 616960 - RNA, 19 nt, Homo sapiens
  misc_RNA (1)...(19): siRNA sense strand
gcaacaccacaguuuauca

SEQ ID NO: 616961 - RNA, 19 nt, Homo sapiens
  misc_RNA (1)...(19): siRNA sense strand
gcugaagaaacuguuauaa

SEQ ID NO: 616962 - RNA, 19 nt, Homo sapiens
  misc_RNA (1)...(19): siRNA sense strand
gcagagaugccagaaccaa

SEQ ID NO: 616963 - RNA, 19 nt, Homo sapiens
  misc_RNA (1)...(19): siRNA sense strand
uaacaguaccagcaacaga

SEQ ID NO: 616964 - RNA, 19 nt, Homo sapiens
  misc_RNA (1)...(19): siRNA sense strand
cagcacaguauggucauua

SEQ ID NO: 616965 - RNA, 19 nt, Homo sapiens
  misc_RNA (1)...(19): siRNA sense strand
gaaauuugcacucuauucc

SEQ ID NO: 616966 - RNA, 19 nt, Homo sapiens
  misc_RNA (1)...(19): siRNA sense strand
ugccuuagcugaagcaucu

SEQ ID NO: 616967 - RNA, 19 nt, Homo sapiens
  misc_RNA (1)...(19): siRNA sense strand
gcacgagcaggucaagaug

SEQ ID NO: 616968 - RNA, 19 nt, Homo sapiens
  misc_RNA (1)...(19): siRNA sense strand
ggaauuggucagcccauca

SEQ ID NO: 616969 - RNA, 19 nt, Homo sapiens
  misc_RNA (1)...(19): siRNA sense strand
ggccacagaagaaguaguu

SEQ ID NO: 616970 - RNA, 19 nt, Homo sapiens
  misc_RNA (1)...(19): siRNA sense strand
caucaguauuagcuacauu

SEQ ID NO: 616971 - RNA, 19 nt, Homo sapiens
  misc_RNA (1)...(19): siRNA sense strand
gaagauuuagcagagauau

SEQ ID NO: 616972 - RNA, 19 nt, Homo sapiens
  misc_RNA (1)...(19): siRNA sense strand
caccacaguuuaucauugg

SEQ ID NO: 616973 - RNA, 19 nt, Homo sapiens
  misc_RNA (1)...(19): siRNA sense strand
cagcuaagagacaauguau

SEQ ID NO: 616974 - RNA, 19 nt, Homo sapiens
  misc_RNA (1)...(19): siRNA sense strand
caugccagauggacaacaa

SEQ ID NO: 616975 - RNA, 19 nt, Homo sapiens
  misc_RNA (1)...(19): siRNA sense strand
gaaacucuucuacaucagu

SEQ ID NO: 616976 - RNA, 19 nt, Homo sapiens
  misc_RNA (1)...(19): siRNA sense strand
caagaggugguggaacuuu

SEQ ID NO: 616977 - RNA, 19 nt, Homo sapiens
  misc_RNA (1)...(19): siRNA sense strand
cagacuggcugggaacuuc

SEQ ID NO: 616978 - RNA, 19 nt, Homo sapiens
  misc_RNA (1)...(19): siRNA sense strand
gauauuacagauugcuaug

SEQ ID NO: 616979 - RNA, 19 nt, Homo sapiens
  misc_RNA (1)...(19): siRNA sense strand
gcagcacaguauggucauu

SEQ ID NO: 616980 - RNA, 19 nt, Homo sapiens
  misc_RNA (1)...(19): siRNA sense strand
ucagcaagucaucacaaua

SEQ ID NO: 616981 - RNA, 19 nt, Homo sapiens
  misc_RNA (1)...(19): siRNA sense strand
caaauggagcucccuuuac

SEQ ID NO: 616982 - RNA, 19 nt, Homo sapiens
  misc_RNA (1)...(19): siRNA sense strand
uucagaaacuccaguagug

SEQ ID NO: 616983 - RNA, 19 nt, Homo sapiens
  misc_RNA (1)...(19): siRNA sense strand
cagaacacaaucaucaaga

SEQ ID NO: 616984 - RNA, 19 nt, Homo sapiens
  misc_RNA (1)...(19): siRNA sense strand
ccagcuaagagacaaugua

SEQ ID NO: 616985 - RNA, 19 nt, Homo sapiens
  misc_RNA (1)...(19): siRNA sense strand
uuggaaauuugcacucuau

SEQ ID NO: 616986 - RNA, 19 nt, Homo sapiens
  misc_RNA (1)...(19): siRNA sense strand
caacaccacaguuuaucau

SEQ ID NO: 616987 - RNA, 19 nt, Homo sapiens
  misc_RNA (1)...(19): siRNA sense strand
gagauauuacagauugcua

SEQ ID NO: 616988 - RNA, 19 nt, Homo sapiens
  misc_RNA (1)...(19): siRNA sense strand
gguggaacuuuuaaucaaa

SEQ ID NO: 616989 - RNA, 19 nt, Homo sapiens
  misc_RNA (1)...(19): siRNA sense strand
gggaacuucuccacuucau

SEQ ID NO: 616990 - RNA, 19 nt, Homo sapiens
  misc_RNA (1)...(19): siRNA sense strand
gauggacaacaaguauuaa

SEQ ID NO: 616991 - RNA, 19 nt, Homo sapiens
  misc_RNA (1)...(19): siRNA sense strand
uaucugcuguucaguuugg

SEQ ID NO: 616992 - RNA, 19 nt, Homo sapiens
  misc_RNA (1)...(19): siRNA sense strand
cagagaguccugacacugu

SEQ ID NO: 616993 - RNA, 19 nt, Homo sapiens
  misc_RNA (1)...(19): siRNA sense strand
uauuacagauugcuaugca

SEQ ID NO: 616994 - RNA, 19 nt, Homo sapiens
  misc_RNA (1)...(19): siRNA sense strand
acacacgcaaaguaaauuu

SEQ ID NO: 616995 - RNA, 19 nt, Homo sapiens
  misc_RNA (1)...(19): siRNA sense strand
gaaacuguuauaagugaag

SEQ ID NO: 616996 - RNA, 19 nt, Homo sapiens
  misc_RNA (1)...(19): siRNA sense strand
ccgaacaccauuacauaug

SEQ ID NO: 616997 - RNA, 19 nt, Homo sapiens
  misc_RNA (1)...(19): siRNA sense strand
gucagcaagucaucacaau

SEQ ID NO: 616998 - RNA, 19 nt, Homo sapiens
  misc_RNA (1)...(19): siRNA sense strand
cacaguauggucauuauuc

SEQ ID NO: 616999 - RNA, 19 nt, Homo sapiens
  misc_RNA (1)...(19): siRNA sense strand
uuuggaaacucuucuacau

SEQ ID NO: 617000 - RNA, 19 nt, Homo sapiens
  misc_RNA (1)...(19): siRNA sense strand
gacaauggaaaugaagauu

SEQ ID NO: 617001 - RNA, 19 nt, Homo sapiens
  misc_RNA (1)...(19): siRNA sense strand
gaaccaaaucaacacaaac

SEQ ID NO: 617002 - RNA, 19 nt, Homo sapiens
  misc_RNA (1)...(19): siRNA sense strand
ucaucuagcagcacaguau

SEQ ID NO: 617003 - RNA, 19 nt, Homo sapiens
  misc_RNA (1)...(19): siRNA sense strand
gcagagauauuacagauug

SEQ ID NO: 617004 - RNA, 19 nt, Homo sapiens
  misc_RNA (1)...(19): siRNA sense strand
gguggaaucugcagaaaua

SEQ ID NO: 617005 - RNA, 19 nt, Homo sapiens
  misc_RNA (1)...(19): siRNA sense strand
caacagacauugcugaaga

SEQ ID NO: 617006 - RNA, 19 nt, Homo sapiens
  misc_RNA (1)...(19): siRNA sense strand
gagacaauguaucgaaaua

SEQ ID NO: 617007 - RNA, 19 nt, Homo sapiens
  misc_RNA (1)...(19): siRNA sense strand
caaaggacauguuaaagau

SEQ ID NO: 617008 - RNA, 19 nt, Homo sapiens
  misc_RNA (1)...(19): siRNA sense strand
gcaaauggagcucccuuua

SEQ ID NO: 617009 - RNA, 19 nt, Homo sapiens
  misc_RNA (1)...(19): siRNA sense strand
caaauauggugcugaugua

SEQ ID NO: 617010 - RNA, 19 nt, Homo sapiens
  misc_RNA (1)...(19): siRNA sense strand
gcaaaggacauguuaaaga

SEQ ID NO: 617011 - RNA, 19 nt, Homo sapiens
  misc_RNA (1)...(19): siRNA sense strand
caagucaucacaauaguua

SEQ ID NO: 617012 - RNA, 19 nt, Homo sapiens
  misc_RNA (1)...(19): siRNA sense strand
caacaaguauuaacaguac

SEQ ID NO: 617013 - RNA, 19 nt, Homo sapiens
  misc_RNA (1)...(19): siRNA sense strand
gaugacagcucuccauugg

SEQ ID NO: 617014 - RNA, 19 nt, Homo sapiens
  misc_RNA (1)...(19): siRNA sense strand
gacaauacaugcugcaaca

SEQ ID NO: 617015 - RNA, 19 nt, Homo sapiens
  misc_RNA (1)...(19): siRNA sense strand
gaugaugaaguucguauuu

SEQ ID NO: 617016 - RNA, 19 nt, Homo sapiens
  misc_RNA (1)...(19): siRNA sense strand
gaagaaacuguuauaagug

SEQ ID NO: 617017 - RNA, 19 nt, Homo sapiens
  misc_RNA (1)...(19): siRNA sense strand
gaccgaacaccauuacaua

SEQ ID NO: 617018 - RNA, 19 nt, Homo sapiens
  misc_RNA (1)...(19): siRNA sense strand
ccacagaacacaaucauca

SEQ ID NO: 617019 - RNA, 19 nt, Homo sapiens
  misc_RNA (1)...(19): siRNA sense strand
gcauggugcugaugucaau

SEQ ID NO: 617020 - RNA, 19 nt, Homo sapiens
  misc_RNA (1)...(19): siRNA sense strand
gcugggaacuucuccacuu

SEQ ID NO: 617021 - RNA, 19 nt, Homo sapiens
  misc_RNA (1)...(19): siRNA sense strand
gauguacacacgcaaagua

SEQ ID NO: 617022 - RNA, 19 nt, Homo sapiens
  misc_RNA (1)...(19): siRNA sense strand
gugcugaugucaaugcaaa

SEQ ID NO: 617023 - RNA, 19 nt, Homo sapiens
  misc_RNA (1)...(19): siRNA sense strand
uagcagagauauuacagau

SEQ ID NO: 617024 - RNA, 19 nt, Homo sapiens
  misc_RNA (1)...(19): siRNA sense strand
uggaaacucuucuacauca

SEQ ID NO: 617025 - RNA, 19 nt, Homo sapiens
  misc_RNA (1)...(19): siRNA sense strand
ggaaucugcagaaauagaa

SEQ ID NO: 617026 - RNA, 19 nt, Homo sapiens
  misc_RNA (1)...(19): siRNA sense strand
gaagaaccaccagcuaaga

SEQ ID NO: 617027 - RNA, 19 nt, Homo sapiens
  misc_RNA (1)...(19): siRNA sense strand
gaacuucuccacuucaucu

SEQ ID NO: 617028 - RNA, 19 nt, Homo sapiens
  misc_RNA (1)...(19): siRNA sense strand
agacauugcugaagaaacu

SEQ ID NO: 617029 - RNA, 19 nt, Homo sapiens
  misc_RNA (1)...(19): siRNA sense strand
aaggacauguuaaagauga

SEQ ID NO: 617030 - RNA, 19 nt, Homo sapiens
  misc_RNA (1)...(19): siRNA sense strand
gugaagaaccaccagcuaa

SEQ ID NO: 617031 - RNA, 19 nt, Homo sapiens
  misc_RNA (1)...(19): siRNA sense strand
gagcaggucaagaugauga

SEQ ID NO: 617032 - RNA, 19 nt, Homo sapiens
  misc_RNA (1)...(19): siRNA sense strand
ggaaauuugcacucuauuc

SEQ ID NO: 617033 - RNA, 19 nt, Homo sapiens
  misc_RNA (1)...(19): siRNA sense strand
aaacucuucuacaucagua

SEQ ID NO: 617034 - RNA, 19 nt, Homo sapiens
  misc_RNA (1)...(19): siRNA sense strand
caaugcaaaggacauguua

SEQ ID NO: 617035 - RNA, 19 nt, Homo sapiens
  misc_RNA (1)...(19): siRNA sense strand
uaagagacaauguaucgaa

SEQ ID NO: 617036 - RNA, 19 nt, Homo sapiens
  misc_RNA (1)...(19): siRNA sense strand
ggucagcccaucauuguga

SEQ ID NO: 617037 - RNA, 19 nt, Homo sapiens
  misc_RNA (1)...(19): siRNA sense strand
agaaccaaaucaacacaaa

SEQ ID NO: 617038 - RNA, 19 nt, Homo sapiens
  misc_RNA (1)...(19): siRNA sense strand
uguaucugcuguucaguuu

SEQ ID NO: 617039 - RNA, 19 nt, Homo sapiens
  misc_RNA (1)...(19): siRNA sense strand
gacaacaaguauuaacagu

SEQ ID NO: 617040 - RNA, 19 nt, Homo sapiens
  misc_RNA (1)...(19): siRNA sense strand
guacacacgcaaaguaaau

SEQ ID NO: 617041 - RNA, 19 nt, Homo sapiens
  misc_RNA (1)...(19): siRNA sense strand
aaauggagcucccuuuacu

SEQ ID NO: 617042 - RNA, 19 nt, Homo sapiens
  misc_RNA (1)...(19): siRNA sense strand
agauggacaacaaguauua

SEQ ID NO: 617043 - RNA, 19 nt, Homo sapiens
  misc_RNA (1)...(19): siRNA sense strand
acaccacaguuuaucauug

SEQ ID NO: 617044 - RNA, 19 nt, Homo sapiens
  misc_RNA (1)...(19): siRNA sense strand
caauagacaauggaaauga

SEQ ID NO: 617045 - RNA, 19 nt, Homo sapiens
  misc_RNA (1)...(19): siRNA sense strand
gcaagucaucacaauaguu

SEQ ID NO: 617046 - RNA, 19 nt, Homo sapiens
  misc_RNA (1)...(19): siRNA sense strand
ggagcucccuuuacuacag

SEQ ID NO: 617047 - RNA, 19 nt, Homo sapiens
  misc_RNA (1)...(19): siRNA sense strand
cacaauaguuacagaugga

SEQ ID NO: 617048 - RNA, 19 nt, Homo sapiens
  misc_RNA (1)...(19): siRNA sense strand
ggaccgaacaccauuacau

SEQ ID NO: 617049 - RNA, 19 nt, Homo sapiens
  misc_RNA (1)...(19): siRNA sense strand
aagagacaauguaucgaaa

SEQ ID NO: 617050 - RNA, 19 nt, Homo sapiens
  misc_RNA (1)...(19): siRNA sense strand
gagcucccuuuacuacaga

SEQ ID NO: 617051 - RNA, 19 nt, Homo sapiens
  misc_RNA (1)...(19): siRNA sense strand
cagcaagucaucacaauag

SEQ ID NO: 617052 - RNA, 19 nt, Homo sapiens
  misc_RNA (1)...(19): siRNA sense strand
gcugcaacaccacaguuua

SEQ ID NO: 617053 - RNA, 19 nt, Homo sapiens
  misc_RNA (1)...(19): siRNA sense strand
caacacaaacccagagagu

SEQ ID NO: 617054 - RNA, 19 nt, Homo sapiens
  misc_RNA (1)...(19): siRNA sense strand
ucaaauauggugcugaugu

SEQ ID NO: 617055 - RNA, 19 nt, Homo sapiens
  misc_RNA (1)...(19): siRNA sense strand
gcacaguauggucauuauu

SEQ ID NO: 617056 - RNA, 19 nt, Homo sapiens
  misc_RNA (1)...(19): siRNA sense strand
gcuaagagacaauguaucg

SEQ ID NO: 617057 - RNA, 19 nt, Homo sapiens
  misc_RNA (1)...(19): siRNA sense strand
ccagauggacaacaaguau

SEQ ID NO: 617058 - RNA, 19 nt, Homo sapiens
  misc_RNA (1)...(19): siRNA sense strand
gagcuggugugagcagaga

SEQ ID NO: 617059 - RNA, 19 nt, Homo sapiens
  misc_RNA (1)...(19): siRNA sense strand
ggacaacaaguauuaacag

SEQ ID NO: 617060 - RNA, 19 nt, Homo sapiens
  misc_RNA (1)...(19): siRNA sense strand
gcaacaccacaguuuauca

SEQ ID NO: 617061 - RNA, 19 nt, Homo sapiens
  misc_RNA (1)...(19): siRNA sense strand
gcugaagaaacuguuauaa

SEQ ID NO: 617062 - RNA, 19 nt, Homo sapiens
  misc_RNA (1)...(19): siRNA sense strand
gcagagaugccagaaccaa

SEQ ID NO: 617063 - RNA, 19 nt, Homo sapiens
  misc_RNA (1)...(19): siRNA sense strand
uaacaguaccagcaacaga

SEQ ID NO: 617064 - RNA, 19 nt, Homo sapiens
  misc_RNA (1)...(19): siRNA sense strand
cagcacaguauggucauua

SEQ ID NO: 617065 - RNA, 19 nt, Homo sapiens
  misc_RNA (1)...(19): siRNA sense strand
gaaauuugcacucuauucc

SEQ ID NO: 617066 - RNA, 19 nt, Homo sapiens
  misc_RNA (1)...(19): siRNA sense strand
ugccuuagcugaagcaucu

SEQ ID NO: 617067 - RNA, 19 nt, Homo sapiens
  misc_RNA (1)...(19): siRNA sense strand
gcacgagcaggucaagaug

SEQ ID NO: 617068 - RNA, 19 nt, Homo sapiens
  misc_RNA (1)...(19): siRNA sense strand
ggaauuggucagcccauca

SEQ ID NO: 617069 - RNA, 19 nt, Homo sapiens
  misc_RNA (1)...(19): siRNA sense strand
ggccacagaagaaguaguu

SEQ ID NO: 617070 - RNA, 19 nt, Homo sapiens
  misc_RNA (1)...(19): siRNA sense strand
caucaguauuagcuacauu

SEQ ID NO: 617071 - RNA, 19 nt, Homo sapiens
  misc_RNA (1)...(19): siRNA sense strand
gaagauuuagcagagauau

SEQ ID NO: 617072 - RNA, 19 nt, Homo sapiens
  misc_RNA (1)...(19): siRNA sense strand
caccacaguuuaucauugg

SEQ ID NO: 617073 - RNA, 19 nt, Homo sapiens
  misc_RNA (1)...(19): siRNA sense strand
cagcuaagagacaauguau

SEQ ID NO: 617074 - RNA, 19 nt, Homo sapiens
  misc_RNA (1)...(19): siRNA sense strand
caugccagauggacaacaa

SEQ ID NO: 617075 - RNA, 19 nt, Homo sapiens
  misc_RNA (1)...(19): siRNA sense strand
gaaacucuucuacaucagu

SEQ ID NO: 617076 - RNA, 19 nt, Homo sapiens
  misc_RNA (1)...(19): siRNA sense strand
caagaggugguggaacuuu

SEQ ID NO: 617077 - RNA, 19 nt, Homo sapiens
  misc_RNA (1)...(19): siRNA sense strand
cagacuggcugggaacuuc

SEQ ID NO: 617078 - RNA, 19 nt, Homo sapiens
  misc_RNA (1)...(19): siRNA sense strand
gauauuacagauugcuaug

SEQ ID NO: 617079 - RNA, 19 nt, Homo sapiens
  misc_RNA (1)...(19): siRNA sense strand
gcagcacaguauggucauu

SEQ ID NO: 617080 - RNA, 19 nt, Homo sapiens
  misc_RNA (1)...(19): siRNA sense strand
ucagcaagucaucacaaua

SEQ ID NO: 617081 - RNA, 19 nt, Homo sapiens
  misc_RNA (1)...(19): siRNA sense strand
caaauggagcucccuuuac

SEQ ID NO: 617082 - RNA, 19 nt, Homo sapiens
  misc_RNA (1)...(19): siRNA sense strand
uucagaaacuccaguagug

SEQ ID NO: 617083 - RNA, 19 nt, Homo sapiens
  misc_RNA (1)...(19): siRNA sense strand
cagaacacaaucaucaaga

SEQ ID NO: 617084 - RNA, 19 nt, Homo sapiens
  misc_RNA (1)...(19): siRNA sense strand
ccagcuaagagacaaugua

SEQ ID NO: 617085 - RNA, 19 nt, Homo sapiens
  misc_RNA (1)...(19): siRNA sense strand
uuggaaauuugcacucuau

SEQ ID NO: 617086 - RNA, 19 nt, Homo sapiens
  misc_RNA (1)...(19): siRNA sense strand
caacaccacaguuuaucau

SEQ ID NO: 617087 - RNA, 19 nt, Homo sapiens
  misc_RNA (1)...(19): siRNA sense strand
gagauauuacagauugcua

SEQ ID NO: 617088 - RNA, 19 nt, Homo sapiens
  misc_RNA (1)...(19): siRNA sense strand
gguggaacuuuuaaucaaa

SEQ ID NO: 617089 - RNA, 19 nt, Homo sapiens
  misc_RNA (1)...(19): siRNA sense strand
gggaacuucuccacuucau

SEQ ID NO: 617090 - RNA, 19 nt, Homo sapiens
  misc_RNA (1)...(19): siRNA sense strand
gauggacaacaaguauuaa

SEQ ID NO: 617091 - RNA, 19 nt, Homo sapiens
  misc_RNA (1)...(19): siRNA sense strand
uaucugcuguucaguuugg

SEQ ID NO: 617092 - RNA, 19 nt, Homo sapiens
  misc_RNA (1)...(19): siRNA sense strand
cagagaguccugacacugu

SEQ ID NO: 617093 - RNA, 19 nt, Homo sapiens
  misc_RNA (1)...(19): siRNA sense strand
uauuacagauugcuaugca

SEQ ID NO: 617094 - RNA, 19 nt, Homo sapiens
  misc_RNA (1)...(19): siRNA sense strand
acacacgcaaaguaaauuu

SEQ ID NO: 617095 - RNA, 19 nt, Homo sapiens
  misc_RNA (1)...(19): siRNA sense strand
gaaacuguuauaagugaag

SEQ ID NO: 617096 - RNA, 19 nt, Homo sapiens
  misc_RNA (1)...(19): siRNA sense strand
ccgaacaccauuacauaug

SEQ ID NO: 617097 - RNA, 19 nt, Homo sapiens
  misc_RNA (1)...(19): siRNA sense strand
gucagcaagucaucacaau

SEQ ID NO: 617098 - RNA, 19 nt, Homo sapiens
  misc_RNA (1)...(19): siRNA sense strand
cacaguauggucauuauuc

SEQ ID NO: 617099 - RNA, 19 nt, Homo sapiens
  misc_RNA (1)...(19): siRNA sense strand
uuuggaaacucuucuacau

SEQ ID NO: 617100 - RNA, 19 nt, Homo sapiens
  misc_RNA (1)...(19): siRNA sense strand
gacaauggaaaugaagauu

SEQ ID NO: 617101 - RNA, 19 nt, Homo sapiens
  misc_RNA (1)...(19): siRNA sense strand
gaaccaaaucaacacaaac

SEQ ID NO: 617102 - RNA, 19 nt, Homo sapiens
  misc_RNA (1)...(19): siRNA sense strand
ucaucuagcagcacaguau

SEQ ID NO: 617103 - RNA, 19 nt, Homo sapiens
  misc_RNA (1)...(19): siRNA sense strand
gcaagaagauuucaaagaa

SEQ ID NO: 617104 - RNA, 19 nt, Homo sapiens
  misc_RNA (1)...(19): siRNA sense strand
aaacggaacuugccuguga

SEQ ID NO: 617105 - RNA, 19 nt, Homo sapiens
  misc_RNA (1)...(19): siRNA sense strand
gaacuugccugugaauuuc

SEQ ID NO: 617106 - RNA, 19 nt, Homo sapiens
  misc_RNA (1)...(19): siRNA sense strand
gaacgaauuuguaucucuu

SEQ ID NO: 617107 - RNA, 19 nt, Homo sapiens
  misc_RNA (1)...(19): siRNA sense strand
gaagacacccauaaagaaa

SEQ ID NO: 617108 - RNA, 19 nt, Homo sapiens
  misc_RNA (1)...(19): siRNA sense strand
ggaacuugccugugaauuu

SEQ ID NO: 617109 - RNA, 19 nt, Homo sapiens
  misc_RNA (1)...(19): siRNA sense strand
ggagauccuugguuucaaa

SEQ ID NO: 617110 - RNA, 19 nt, Homo sapiens
  misc_RNA (1)...(19): siRNA sense strand
ggacaucacaccaaagauu

SEQ ID NO: 617111 - RNA, 19 nt, Homo sapiens
  misc_RNA (1)...(19): siRNA sense strand
uaaaguugcugucugaguu

SEQ ID NO: 617112 - RNA, 19 nt, Homo sapiens
  misc_RNA (1)...(19): siRNA sense strand
gagaagacacccauaaaga

SEQ ID NO: 617113 - RNA, 19 nt, Homo sapiens
  misc_RNA (1)...(19): siRNA sense strand
guacagagaugccaagaac

SEQ ID NO: 617114 - RNA, 19 nt, Homo sapiens
  misc_RNA (1)...(19): siRNA sense strand
gaaaaugggacuaguaaua

SEQ ID NO: 617115 - RNA, 19 nt, Homo sapiens
  misc_RNA (1)...(19): siRNA sense strand
gcaauuuaauggcaaagga

SEQ ID NO: 617116 - RNA, 19 nt, Homo sapiens
  misc_RNA (1)...(19): siRNA sense strand
cacgguaacugccaugaua

SEQ ID NO: 617117 - RNA, 19 nt, Homo sapiens
  misc_RNA (1)...(19): siRNA sense strand
gaagagaauccgaagaaga

SEQ ID NO: 617118 - RNA, 19 nt, Homo sapiens
  misc_RNA (1)...(19): siRNA sense strand
ggaggugaauggaagagaa

SEQ ID NO: 617119 - RNA, 19 nt, Homo sapiens
  misc_RNA (1)...(19): siRNA sense strand
gaacgggcaccaacaagaa

SEQ ID NO: 617120 - RNA, 19 nt, Homo sapiens
  misc_RNA (1)...(19): siRNA sense strand
ucaaggacaucacaccaaa

SEQ ID NO: 617121 - RNA, 19 nt, Homo sapiens
  misc_RNA (1)...(19): siRNA sense strand
caugauagcccgagaguug

SEQ ID NO: 617122 - RNA, 19 nt, Homo sapiens
  misc_RNA (1)...(19): siRNA sense strand
uugaggagcugaagaaguu

SEQ ID NO: 617123 - RNA, 19 nt, Homo sapiens
  misc_RNA (1)...(19): siRNA sense strand
gaggagaagacacccauaa

SEQ ID NO: 617124 - RNA, 19 nt, Homo sapiens
  misc_RNA (1)...(19): siRNA sense strand
gaaauaagucaaguguuug

SEQ ID NO: 617125 - RNA, 19 nt, Homo sapiens
  misc_RNA (1)...(19): siRNA sense strand
guggaguccugccaugaua

SEQ ID NO: 617126 - RNA, 19 nt, Homo sapiens
  misc_RNA (1)...(19): siRNA sense strand
gcagggaguuugugaugca

SEQ ID NO: 617127 - RNA, 19 nt, Homo sapiens
  misc_RNA (1)...(19): siRNA sense strand
ugaggauccugcagaauga

SEQ ID NO: 617128 - RNA, 19 nt, Homo sapiens
  misc_RNA (1)...(19): siRNA sense strand
ggaugcaguccaccuauaa

SEQ ID NO: 617129 - RNA, 19 nt, Homo sapiens
  misc_RNA (1)...(19): siRNA sense strand
cagagaggcuggaggugaa

SEQ ID NO: 617130 - RNA, 19 nt, Homo sapiens
  misc_RNA (1)...(19): siRNA sense strand
aaaccacacugcagaagga

SEQ ID NO: 617131 - RNA, 19 nt, Homo sapiens
  misc_RNA (1)...(19): siRNA sense strand
gaacgaguaaagccuagaa

SEQ ID NO: 617132 - RNA, 19 nt, Homo sapiens
  misc_RNA (1)...(19): siRNA sense strand
gacaucacaccaaagauuu

SEQ ID NO: 617133 - RNA, 19 nt, Homo sapiens
  misc_RNA (1)...(19): siRNA sense strand
guaauaaagaggaugaguu

SEQ ID NO: 617134 - RNA, 19 nt, Homo sapiens
  misc_RNA (1)...(19): siRNA sense strand
ugaagaacuuugugaccaa

SEQ ID NO: 617135 - RNA, 19 nt, Homo sapiens
  misc_RNA (1)...(19): siRNA sense strand
ggagaagacacccauaaag

SEQ ID NO: 617136 - RNA, 19 nt, Homo sapiens
  misc_RNA (1)...(19): siRNA sense strand
aguaaagccuagaaucaaa

SEQ ID NO: 617137 - RNA, 19 nt, Homo sapiens
  misc_RNA (1)...(19): siRNA sense strand
caagacaggcugcgaaaca

SEQ ID NO: 617138 - RNA, 19 nt, Homo sapiens
  misc_RNA (1)...(19): siRNA sense strand
ccaacaaaguacagagaug

SEQ ID NO: 617139 - RNA, 19 nt, Homo sapiens
  misc_RNA (1)...(19): siRNA sense strand
acacgaugcugcugccaaa

SEQ ID NO: 617140 - RNA, 19 nt, Homo sapiens
  misc_RNA (1)...(19): siRNA sense strand
aagagaauccgaagaagaa

SEQ ID NO: 617141 - RNA, 19 nt, Homo sapiens
  misc_RNA (1)...(19): siRNA sense strand
gaaacggaccaaugucugu

SEQ ID NO: 617142 - RNA, 19 nt, Homo sapiens
  misc_RNA (1)...(19): siRNA sense strand
caagaacgaauuuguaucu

SEQ ID NO: 617143 - RNA, 19 nt, Homo sapiens
  misc_RNA (1)...(19): siRNA sense strand
gagcaacuggacuaucuuu

SEQ ID NO: 617144 - RNA, 19 nt, Homo sapiens
  misc_RNA (1)...(19): siRNA sense strand
uaauaaagaggaugaguuc

SEQ ID NO: 617145 - RNA, 19 nt, Homo sapiens
  misc_RNA (1)...(19): siRNA sense strand
agaagacacccauaaagaa

SEQ ID NO: 617146 - RNA, 19 nt, Homo sapiens
  misc_RNA (1)...(19): siRNA sense strand
ggaacgggcaccaacaaga

SEQ ID NO: 617147 - RNA, 19 nt, Homo sapiens
  misc_RNA (1)...(19): siRNA sense strand
uguuugagauugcacuuaa

SEQ ID NO: 617148 - RNA, 19 nt, Homo sapiens
  misc_RNA (1)...(19): siRNA sense strand
ggaagagaauccgaagaag

SEQ ID NO: 617149 - RNA, 19 nt, Homo sapiens
  misc_RNA (1)...(19): siRNA sense strand
gaguaaagccuagaaucaa

SEQ ID NO: 617150 - RNA, 19 nt, Homo sapiens
  misc_RNA (1)...(19): siRNA sense strand
cgaguaaagccuagaauca

SEQ ID NO: 617151 - RNA, 19 nt, Homo sapiens
  misc_RNA (1)...(19): siRNA sense strand
gcaaaggaaagacaagaca

SEQ ID NO: 617152 - RNA, 19 nt, Homo sapiens
  misc_RNA (1)...(19): siRNA sense strand
cgccauagcuguucuugag

SEQ ID NO: 617153 - RNA, 19 nt, Homo sapiens
  misc_RNA (1)...(19): siRNA sense strand
cggaugcaguccaccuaua

SEQ ID NO: 617154 - RNA, 19 nt, Homo sapiens
  misc_RNA (1)...(19): siRNA sense strand
ucuuaaaguugcugucuga

SEQ ID NO: 617155 - RNA, 19 nt, Homo sapiens
  misc_RNA (1)...(19): siRNA sense strand
gcgcugaacaucuuaaagu

SEQ ID NO: 617156 - RNA, 19 nt, Homo sapiens
  misc_RNA (1)...(19): siRNA sense strand
ccaguuccaccuuuacuuu

SEQ ID NO: 617157 - RNA, 19 nt, Homo sapiens
  misc_RNA (1)...(19): siRNA sense strand
gauccuugguuucaaaguc

SEQ ID NO: 617158 - RNA, 19 nt, Homo sapiens
  misc_RNA (1)...(19): siRNA sense strand
gaggacagcaauuuaaugg

SEQ ID NO: 617159 - RNA, 19 nt, Homo sapiens
  misc_RNA (1)...(19): siRNA sense strand
ggaggacagcaauuuaaug

SEQ ID NO: 617160 - RNA, 19 nt, Homo sapiens
  misc_RNA (1)...(19): siRNA sense strand
gggaaaagcaagaagauuu

SEQ ID NO: 617161 - RNA, 19 nt, Homo sapiens
  misc_RNA (1)...(19): siRNA sense strand
gacaagacaggcugcgaaa

SEQ ID NO: 617162 - RNA, 19 nt, Homo sapiens
  misc_RNA (1)...(19): siRNA sense strand
uggcugcgcugaacaucuu

SEQ ID NO: 617163 - RNA, 19 nt, Homo sapiens
  misc_RNA (1)...(19): siRNA sense strand
gaaggaacgggcaccaaca

SEQ ID NO: 617164 - RNA, 19 nt, Homo sapiens
  misc_RNA (1)...(19): siRNA sense strand
uggaagagaauccgaagaa

SEQ ID NO: 617165 - RNA, 19 nt, Homo sapiens
  misc_RNA (1)...(19): siRNA sense strand
ccacagacaagcccagaau

SEQ ID NO: 617166 - RNA, 19 nt, Homo sapiens
  misc_RNA (1)...(19): siRNA sense strand
ccucugaucagccauggua

SEQ ID NO: 617167 - RNA, 19 nt, Homo sapiens
  misc_RNA (1)...(19): siRNA sense strand
gcaaugcagccgagaacau

SEQ ID NO: 617168 - RNA, 19 nt, Homo sapiens
  misc_RNA (1)...(19): siRNA sense strand
gcugaacaucuuaaaguug

SEQ ID NO: 617169 - RNA, 19 nt, Homo sapiens
  misc_RNA (1)...(19): siRNA sense strand
gugggaggacagcaauuua

SEQ ID NO: 617170 - RNA, 19 nt, Homo sapiens
  misc_RNA (1)...(19): siRNA sense strand
ggagaaggagccagaguac

SEQ ID NO: 617171 - RNA, 19 nt, Homo sapiens
  misc_RNA (1)...(19): siRNA sense strand
acagacaagcccagaauau

SEQ ID NO: 617172 - RNA, 19 nt, Homo sapiens
  misc_RNA (1)...(19): siRNA sense strand
caauguauaagccuguuga

SEQ ID NO: 617173 - RNA, 19 nt, Homo sapiens
  misc_RNA (1)...(19): siRNA sense strand
gaacaggaaacggaccaau

SEQ ID NO: 617174 - RNA, 19 nt, Homo sapiens
  misc_RNA (1)...(19): siRNA sense strand
gaccaacaaaguacagaga

SEQ ID NO: 617175 - RNA, 19 nt, Homo sapiens
  misc_RNA (1)...(19): siRNA sense strand
uguaggaguuagucaagga

SEQ ID NO: 617176 - RNA, 19 nt, Homo sapiens
  misc_RNA (1)...(19): siRNA sense strand
ccgagaacaugcuggagau

SEQ ID NO: 617177 - RNA, 19 nt, Homo sapiens
  misc_RNA (1)...(19): siRNA sense strand
gcaguccaccuauaacuac

SEQ ID NO: 617178 - RNA, 19 nt, Homo sapiens
  misc_RNA (1)...(19): siRNA sense strand
gggaggacagcaauuuaau

SEQ ID NO: 617179 - RNA, 19 nt, Homo sapiens
  misc_RNA (1)...(19): siRNA sense strand
gagaugccaagaacaggaa

SEQ ID NO: 617180 - RNA, 19 nt, Homo sapiens
  misc_RNA (1)...(19): siRNA sense strand
gaacuuugugaccaagguu

SEQ ID NO: 617181 - RNA, 19 nt, Homo sapiens
  misc_RNA (1)...(19): siRNA sense strand
gcccgagaguuguuguaug

SEQ ID NO: 617182 - RNA, 19 nt, Homo sapiens
  misc_RNA (1)...(19): siRNA sense strand
caguuccaccuuuacuuua

SEQ ID NO: 617183 - RNA, 19 nt, Homo sapiens
  misc_RNA (1)...(19): siRNA sense strand
caugagaggaggugcuuau

SEQ ID NO: 617184 - RNA, 19 nt, Homo sapiens
  misc_RNA (1)...(19): siRNA sense strand
accuauaacuacaacauga

SEQ ID NO: 617185 - RNA, 19 nt, Homo sapiens
  misc_RNA (1)...(19): siRNA sense strand
aguacacgcuccucacaga

SEQ ID NO: 617186 - RNA, 19 nt, Homo sapiens
  misc_RNA (1)...(19): siRNA sense strand
gccugcaguugaacgagua

SEQ ID NO: 617187 - RNA, 19 nt, Homo sapiens
  misc_RNA (1)...(19): siRNA sense strand
cagacaagcccagaauaug

SEQ ID NO: 617188 - RNA, 19 nt, Homo sapiens
  misc_RNA (1)...(19): siRNA sense strand
acaggaaacggaccaaugu

SEQ ID NO: 617189 - RNA, 19 nt, Homo sapiens
  misc_RNA (1)...(19): siRNA sense strand
cgcugaacaucuuaaaguu

SEQ ID NO: 617190 - RNA, 19 nt, Homo sapiens
  misc_RNA (1)...(19): siRNA sense strand
cugagcaacuggacuaucu

SEQ ID NO: 617191 - RNA, 19 nt, Homo sapiens
  misc_RNA (1)...(19): siRNA sense strand
cccgagaguuguuguaugg

SEQ ID NO: 617192 - RNA, 19 nt, Homo sapiens
  misc_RNA (1)...(19): siRNA sense strand
caaacccgcacucaaguca

SEQ ID NO: 617193 - RNA, 19 nt, Homo sapiens
  misc_RNA (1)...(19): siRNA sense strand
gaagguggccaagcgcaau

SEQ ID NO: 617194 - RNA, 19 nt, Homo sapiens
  misc_RNA (1)...(19): siRNA sense strand
ccucugagcaacuggacua

SEQ ID NO: 617195 - RNA, 19 nt, Homo sapiens
  misc_RNA (1)...(19): siRNA sense strand
agaacgaauuuguaucucu

SEQ ID NO: 617196 - RNA, 19 nt, Homo sapiens
  misc_RNA (1)...(19): siRNA sense strand
uacaaagacuuccccaaaa

SEQ ID NO: 617197 - RNA, 19 nt, Homo sapiens
  misc_RNA (1)...(19): siRNA sense strand
agacaagcccagaauaugg

SEQ ID NO: 617198 - RNA, 19 nt, Homo sapiens
  misc_RNA (1)...(19): siRNA sense strand
ggaguccugccaugauaug

SEQ ID NO: 617199 - RNA, 19 nt, Homo sapiens
  misc_RNA (1)...(19): siRNA sense strand
caccaaacccgcacucaag

SEQ ID NO: 617200 - RNA, 19 nt, Homo sapiens
  misc_RNA (1)...(19): siRNA sense strand
gaacaugcuggagauccuu

SEQ ID NO: 617201 - RNA, 19 nt, Homo sapiens
  misc_RNA (1)...(19): siRNA sense strand
caaugcagccgagaacaug

SEQ ID NO: 617202 - RNA, 19 nt, Homo sapiens
  misc_RNA (1)...(19): siRNA sense strand
ugggaggacagcaauuuaa

SEQ ID NO: 617203 - RNA, 19 nt, Homo sapiens
  misc_RNA (1)...(19): siRNA sense strand
gcaagaagauuucaaagaa

SEQ ID NO: 617204 - RNA, 19 nt, Homo sapiens
  misc_RNA (1)...(19): siRNA sense strand
aaacggaacuugccuguga

SEQ ID NO: 617205 - RNA, 19 nt, Homo sapiens
  misc_RNA (1)...(19): siRNA sense strand
gaacuugccugugaauuuc

SEQ ID NO: 617206 - RNA, 19 nt, Homo sapiens
  misc_RNA (1)...(19): siRNA sense strand
gaacgaauuuguaucucuu

SEQ ID NO: 617207 - RNA, 19 nt, Homo sapiens
  misc_RNA (1)...(19): siRNA sense strand
gaagacacccauaaagaaa

SEQ ID NO: 617208 - RNA, 19 nt, Homo sapiens
  misc_RNA (1)...(19): siRNA sense strand
ggaacuugccugugaauuu

SEQ ID NO: 617209 - RNA, 19 nt, Homo sapiens
  misc_RNA (1)...(19): siRNA sense strand
ggagauccuugguuucaaa

SEQ ID NO: 617210 - RNA, 19 nt, Homo sapiens
  misc_RNA (1)...(19): siRNA sense strand
ggacaucacaccaaagauu

SEQ ID NO: 617211 - RNA, 19 nt, Homo sapiens
  misc_RNA (1)...(19): siRNA sense strand
uaaaguugcugucugaguu

SEQ ID NO: 617212 - RNA, 19 nt, Homo sapiens
  misc_RNA (1)...(19): siRNA sense strand
gagaagacacccauaaaga

SEQ ID NO: 617213 - RNA, 19 nt, Homo sapiens
  misc_RNA (1)...(19): siRNA sense strand
guacagagaugccaagaac

SEQ ID NO: 617214 - RNA, 19 nt, Homo sapiens
  misc_RNA (1)...(19): siRNA sense strand
gaaaaugggacuaguaaua

SEQ ID NO: 617215 - RNA, 19 nt, Homo sapiens
  misc_RNA (1)...(19): siRNA sense strand
gcaauuuaauggcaaagga

SEQ ID NO: 617216 - RNA, 19 nt, Homo sapiens
  misc_RNA (1)...(19): siRNA sense strand
cacgguaacugccaugaua

SEQ ID NO: 617217 - RNA, 19 nt, Homo sapiens
  misc_RNA (1)...(19): siRNA sense strand
gaagagaauccgaagaaga

SEQ ID NO: 617218 - RNA, 19 nt, Homo sapiens
  misc_RNA (1)...(19): siRNA sense strand
ggaggugaauggaagagaa

SEQ ID NO: 617219 - RNA, 19 nt, Homo sapiens
  misc_RNA (1)...(19): siRNA sense strand
gaacgggcaccaacaagaa

SEQ ID NO: 617220 - RNA, 19 nt, Homo sapiens
  misc_RNA (1)...(19): siRNA sense strand
ucaaggacaucacaccaaa

SEQ ID NO: 617221 - RNA, 19 nt, Homo sapiens
  misc_RNA (1)...(19): siRNA sense strand
caugauagcccgagaguug

SEQ ID NO: 617222 - RNA, 19 nt, Homo sapiens
  misc_RNA (1)...(19): siRNA sense strand
uugaggagcugaagaaguu

SEQ ID NO: 617223 - RNA, 19 nt, Homo sapiens
  misc_RNA (1)...(19): siRNA sense strand
gaggagaagacacccauaa

SEQ ID NO: 617224 - RNA, 19 nt, Homo sapiens
  misc_RNA (1)...(19): siRNA sense strand
gaaauaagucaaguguuug

SEQ ID NO: 617225 - RNA, 19 nt, Homo sapiens
  misc_RNA (1)...(19): siRNA sense strand
guggaguccugccaugaua

SEQ ID NO: 617226 - RNA, 19 nt, Homo sapiens
  misc_RNA (1)...(19): siRNA sense strand
gcagggaguuugugaugca

SEQ ID NO: 617227 - RNA, 19 nt, Homo sapiens
  misc_RNA (1)...(19): siRNA sense strand
ugaggauccugcagaauga

SEQ ID NO: 617228 - RNA, 19 nt, Homo sapiens
  misc_RNA (1)...(19): siRNA sense strand
ggaugcaguccaccuauaa

SEQ ID NO: 617229 - RNA, 19 nt, Homo sapiens
  misc_RNA (1)...(19): siRNA sense strand
cagagaggcuggaggugaa

SEQ ID NO: 617230 - RNA, 19 nt, Homo sapiens
  misc_RNA (1)...(19): siRNA sense strand
aaaccacacugcagaagga

SEQ ID NO: 617231 - RNA, 19 nt, Homo sapiens
  misc_RNA (1)...(19): siRNA sense strand
gaacgaguaaagccuagaa

SEQ ID NO: 617232 - RNA, 19 nt, Homo sapiens
  misc_RNA (1)...(19): siRNA sense strand
gacaucacaccaaagauuu

SEQ ID NO: 617233 - RNA, 19 nt, Homo sapiens
  misc_RNA (1)...(19): siRNA sense strand
guaauaaagaggaugaguu

SEQ ID NO: 617234 - RNA, 19 nt, Homo sapiens
  misc_RNA (1)...(19): siRNA sense strand
ugaagaacuuugugaccaa

SEQ ID NO: 617235 - RNA, 19 nt, Homo sapiens
  misc_RNA (1)...(19): siRNA sense strand
ggagaagacacccauaaag

SEQ ID NO: 617236 - RNA, 19 nt, Homo sapiens
  misc_RNA (1)...(19): siRNA sense strand
aguaaagccuagaaucaaa

SEQ ID NO: 617237 - RNA, 19 nt, Homo sapiens
  misc_RNA (1)...(19): siRNA sense strand
caagacaggcugcgaaaca

SEQ ID NO: 617238 - RNA, 19 nt, Homo sapiens
  misc_RNA (1)...(19): siRNA sense strand
ccaacaaaguacagagaug

SEQ ID NO: 617239 - RNA, 19 nt, Homo sapiens
  misc_RNA (1)...(19): siRNA sense strand
acacgaugcugcugccaaa

SEQ ID NO: 617240 - RNA, 19 nt, Homo sapiens
  misc_RNA (1)...(19): siRNA sense strand
aagagaauccgaagaagaa

SEQ ID NO: 617241 - RNA, 19 nt, Homo sapiens
  misc_RNA (1)...(19): siRNA sense strand
gaaacggaccaaugucugu

SEQ ID NO: 617242 - RNA, 19 nt, Homo sapiens
  misc_RNA (1)...(19): siRNA sense strand
caagaacgaauuuguaucu

SEQ ID NO: 617243 - RNA, 19 nt, Homo sapiens
  misc_RNA (1)...(19): siRNA sense strand
gagcaacuggacuaucuuu

SEQ ID NO: 617244 - RNA, 19 nt, Homo sapiens
  misc_RNA (1)...(19): siRNA sense strand
uaauaaagaggaugaguuc

SEQ ID NO: 617245 - RNA, 19 nt, Homo sapiens
  misc_RNA (1)...(19): siRNA sense strand
agaagacacccauaaagaa

SEQ ID NO: 617246 - RNA, 19 nt, Homo sapiens
  misc_RNA (1)...(19): siRNA sense strand
ggaacgggcaccaacaaga

SEQ ID NO: 617247 - RNA, 19 nt, Homo sapiens
  misc_RNA (1)...(19): siRNA sense strand
uguuugagauugcacuuaa

SEQ ID NO: 617248 - RNA, 19 nt, Homo sapiens
  misc_RNA (1)...(19): siRNA sense strand
ggaagagaauccgaagaag

SEQ ID NO: 617249 - RNA, 19 nt, Homo sapiens
  misc_RNA (1)...(19): siRNA sense strand
gaguaaagccuagaaucaa

SEQ ID NO: 617250 - RNA, 19 nt, Homo sapiens
  misc_RNA (1)...(19): siRNA sense strand
cgaguaaagccuagaauca

SEQ ID NO: 617251 - RNA, 19 nt, Homo sapiens
  misc_RNA (1)...(19): siRNA sense strand
gcaaaggaaagacaagaca

SEQ ID NO: 617252 - RNA, 19 nt, Homo sapiens
  misc_RNA (1)...(19): siRNA sense strand
cgccauagcuguucuugag

SEQ ID NO: 617253 - RNA, 19 nt, Homo sapiens
  misc_RNA (1)...(19): siRNA sense strand
cggaugcaguccaccuaua

SEQ ID NO: 617254 - RNA, 19 nt, Homo sapiens
  misc_RNA (1)...(19): siRNA sense strand
ucuuaaaguugcugucuga

SEQ ID NO: 617255 - RNA, 19 nt, Homo sapiens
  misc_RNA (1)...(19): siRNA sense strand
gcgcugaacaucuuaaagu

SEQ ID NO: 617256 - RNA, 19 nt, Homo sapiens
  misc_RNA (1)...(19): siRNA sense strand
ccaguuccaccuuuacuuu

SEQ ID NO: 617257 - RNA, 19 nt, Homo sapiens
  misc_RNA (1)...(19): siRNA sense strand
gauccuugguuucaaaguc

SEQ ID NO: 617258 - RNA, 19 nt, Homo sapiens
  misc_RNA (1)...(19): siRNA sense strand
gaggacagcaauuuaaugg

SEQ ID NO: 617259 - RNA, 19 nt, Homo sapiens
  misc_RNA (1)...(19): siRNA sense strand
ggaggacagcaauuuaaug

SEQ ID NO: 617260 - RNA, 19 nt, Homo sapiens
  misc_RNA (1)...(19): siRNA sense strand
gggaaaagcaagaagauuu

SEQ ID NO: 617261 - RNA, 19 nt, Homo sapiens
  misc_RNA (1)...(19): siRNA sense strand
gacaagacaggcugcgaaa

SEQ ID NO: 617262 - RNA, 19 nt, Homo sapiens
  misc_RNA (1)...(19): siRNA sense strand
uggcugcgcugaacaucuu

SEQ ID NO: 617263 - RNA, 19 nt, Homo sapiens
  misc_RNA (1)...(19): siRNA sense strand
gaaggaacgggcaccaaca

SEQ ID NO: 617264 - RNA, 19 nt, Homo sapiens
  misc_RNA (1)...(19): siRNA sense strand
uggaagagaauccgaagaa

SEQ ID NO: 617265 - RNA, 19 nt, Homo sapiens
  misc_RNA (1)...(19): siRNA sense strand
ccacagacaagcccagaau

SEQ ID NO: 617266 - RNA, 19 nt, Homo sapiens
  misc_RNA (1)...(19): siRNA sense strand
ccucugaucagccauggua

SEQ ID NO: 617267 - RNA, 19 nt, Homo sapiens
  misc_RNA (1)...(19): siRNA sense strand
gcaaugcagccgagaacau

SEQ ID NO: 617268 - RNA, 19 nt, Homo sapiens
  misc_RNA (1)...(19): siRNA sense strand
gcugaacaucuuaaaguug

SEQ ID NO: 617269 - RNA, 19 nt, Homo sapiens
  misc_RNA (1)...(19): siRNA sense strand
gugggaggacagcaauuua

SEQ ID NO: 617270 - RNA, 19 nt, Homo sapiens
  misc_RNA (1)...(19): siRNA sense strand
ggagaaggagccagaguac

SEQ ID NO: 617271 - RNA, 19 nt, Homo sapiens
  misc_RNA (1)...(19): siRNA sense strand
acagacaagcccagaauau

SEQ ID NO: 617272 - RNA, 19 nt, Homo sapiens
  misc_RNA (1)...(19): siRNA sense strand
caauguauaagccuguuga

SEQ ID NO: 617273 - RNA, 19 nt, Homo sapiens
  misc_RNA (1)...(19): siRNA sense strand
gaacaggaaacggaccaau

SEQ ID NO: 617274 - RNA, 19 nt, Homo sapiens
  misc_RNA (1)...(19): siRNA sense strand
gaccaacaaaguacagaga

SEQ ID NO: 617275 - RNA, 19 nt, Homo sapiens
  misc_RNA (1)...(19): siRNA sense strand
uguaggaguuagucaagga

SEQ ID NO: 617276 - RNA, 19 nt, Homo sapiens
  misc_RNA (1)...(19): siRNA sense strand
ccgagaacaugcuggagau

SEQ ID NO: 617277 - RNA, 19 nt, Homo sapiens
  misc_RNA (1)...(19): siRNA sense strand
gcaguccaccuauaacuac

SEQ ID NO: 617278 - RNA, 19 nt, Homo sapiens
  misc_RNA (1)...(19): siRNA sense strand
gggaggacagcaauuuaau

SEQ ID NO: 617279 - RNA, 19 nt, Homo sapiens
  misc_RNA (1)...(19): siRNA sense strand
gagaugccaagaacaggaa

SEQ ID NO: 617280 - RNA, 19 nt, Homo sapiens
  misc_RNA (1)...(19): siRNA sense strand
gaacuuugugaccaagguu

SEQ ID NO: 617281 - RNA, 19 nt, Homo sapiens
  misc_RNA (1)...(19): siRNA sense strand
gcccgagaguuguuguaug

SEQ ID NO: 617282 - RNA, 19 nt, Homo sapiens
  misc_RNA (1)...(19): siRNA sense strand
caguuccaccuuuacuuua

SEQ ID NO: 617283 - RNA, 19 nt, Homo sapiens
  misc_RNA (1)...(19): siRNA sense strand
caugagaggaggugcuuau

SEQ ID NO: 617284 - RNA, 19 nt, Homo sapiens
  misc_RNA (1)...(19): siRNA sense strand
accuauaacuacaacauga

SEQ ID NO: 617285 - RNA, 19 nt, Homo sapiens
  misc_RNA (1)...(19): siRNA sense strand
aguacacgcuccucacaga

SEQ ID NO: 617286 - RNA, 19 nt, Homo sapiens
  misc_RNA (1)...(19): siRNA sense strand
gccugcaguugaacgagua

SEQ ID NO: 617287 - RNA, 19 nt, Homo sapiens
  misc_RNA (1)...(19): siRNA sense strand
cagacaagcccagaauaug

SEQ ID NO: 617288 - RNA, 19 nt, Homo sapiens
  misc_RNA (1)...(19): siRNA sense strand
acaggaaacggaccaaugu

SEQ ID NO: 617289 - RNA, 19 nt, Homo sapiens
  misc_RNA (1)...(19): siRNA sense strand
cgcugaacaucuuaaaguu

SEQ ID NO: 617290 - RNA, 19 nt, Homo sapiens
  misc_RNA (1)...(19): siRNA sense strand
cugagcaacuggacuaucu

SEQ ID NO: 617291 - RNA, 19 nt, Homo sapiens
  misc_RNA (1)...(19): siRNA sense strand
cccgagaguuguuguaugg

SEQ ID NO: 617292 - RNA, 19 nt, Homo sapiens
  misc_RNA (1)...(19): siRNA sense strand
caaacccgcacucaaguca

SEQ ID NO: 617293 - RNA, 19 nt, Homo sapiens
  misc_RNA (1)...(19): siRNA sense strand
gaagguggccaagcgcaau

SEQ ID NO: 617294 - RNA, 19 nt, Homo sapiens
  misc_RNA (1)...(19): siRNA sense strand
ccucugagcaacuggacua

SEQ ID NO: 617295 - RNA, 19 nt, Homo sapiens
  misc_RNA (1)...(19): siRNA sense strand
agaacgaauuuguaucucu

SEQ ID NO: 617296 - RNA, 19 nt, Homo sapiens
  misc_RNA (1)...(19): siRNA sense strand
uacaaagacuuccccaaaa

SEQ ID NO: 617297 - RNA, 19 nt, Homo sapiens
  misc_RNA (1)...(19): siRNA sense strand
agacaagcccagaauaugg

SEQ ID NO: 617298 - RNA, 19 nt, Homo sapiens
  misc_RNA (1)...(19): siRNA sense strand
ggaguccugccaugauaug

SEQ ID NO: 617299 - RNA, 19 nt, Homo sapiens
  misc_RNA (1)...(19): siRNA sense strand
caccaaacccgcacucaag

SEQ ID NO: 617300 - RNA, 19 nt, Homo sapiens
  misc_RNA (1)...(19): siRNA sense strand
gaacaugcuggagauccuu

SEQ ID NO: 617301 - RNA, 19 nt, Homo sapiens
  misc_RNA (1)...(19): siRNA sense strand
caaugcagccgagaacaug

SEQ ID NO: 617302 - RNA, 19 nt, Homo sapiens
  misc_RNA (1)...(19): siRNA sense strand
ugggaggacagcaauuuaa

SEQ ID NO: 617303 - RNA, 19 nt, Homo sapiens
  misc_RNA (1)...(19): siRNA sense strand
gcaagaagauuucaaagaa

SEQ ID NO: 617304 - RNA, 19 nt, Homo sapiens
  misc_RNA (1)...(19): siRNA sense strand
aaacggaacuugccuguga

SEQ ID NO: 617305 - RNA, 19 nt, Homo sapiens
  misc_RNA (1)...(19): siRNA sense strand
gaacuugccugugaauuuc

SEQ ID NO: 617306 - RNA, 19 nt, Homo sapiens
  misc_RNA (1)...(19): siRNA sense strand
gaacgaauuuguaucucuu

SEQ ID NO: 617307 - RNA, 19 nt, Homo sapiens
  misc_RNA (1)...(19): siRNA sense strand
gaagacacccauaaagaaa

SEQ ID NO: 617308 - RNA, 19 nt, Homo sapiens
  misc_RNA (1)...(19): siRNA sense strand
ggaacuugccugugaauuu

SEQ ID NO: 617309 - RNA, 19 nt, Homo sapiens
  misc_RNA (1)...(19): siRNA sense strand
ggagauccuugguuucaaa

SEQ ID NO: 617310 - RNA, 19 nt, Homo sapiens
  misc_RNA (1)...(19): siRNA sense strand
ggacaucacaccaaagauu

SEQ ID NO: 617311 - RNA, 19 nt, Homo sapiens
  misc_RNA (1)...(19): siRNA sense strand
uaaaguugcugucugaguu

SEQ ID NO: 617312 - RNA, 19 nt, Homo sapiens
  misc_RNA (1)...(19): siRNA sense strand
gagaagacacccauaaaga

SEQ ID NO: 617313 - RNA, 19 nt, Homo sapiens
  misc_RNA (1)...(19): siRNA sense strand
guacagagaugccaagaac

SEQ ID NO: 617314 - RNA, 19 nt, Homo sapiens
  misc_RNA (1)...(19): siRNA sense strand
gaaaaugggacuaguaaua

SEQ ID NO: 617315 - RNA, 19 nt, Homo sapiens
  misc_RNA (1)...(19): siRNA sense strand
gcaauuuaauggcaaagga

SEQ ID NO: 617316 - RNA, 19 nt, Homo sapiens
  misc_RNA (1)...(19): siRNA sense strand
cacgguaacugccaugaua

SEQ ID NO: 617317 - RNA, 19 nt, Homo sapiens
  misc_RNA (1)...(19): siRNA sense strand
gaagagaauccgaagaaga

SEQ ID NO: 617318 - RNA, 19 nt, Homo sapiens
  misc_RNA (1)...(19): siRNA sense strand
ggaggugaauggaagagaa

SEQ ID NO: 617319 - RNA, 19 nt, Homo sapiens
  misc_RNA (1)...(19): siRNA sense strand
gaacgggcaccaacaagaa

SEQ ID NO: 617320 - RNA, 19 nt, Homo sapiens
  misc_RNA (1)...(19): siRNA sense strand
ucaaggacaucacaccaaa

SEQ ID NO: 617321 - RNA, 19 nt, Homo sapiens
  misc_RNA (1)...(19): siRNA sense strand
caugauagcccgagaguug

SEQ ID NO: 617322 - RNA, 19 nt, Homo sapiens
  misc_RNA (1)...(19): siRNA sense strand
uugaggagcugaagaaguu

SEQ ID NO: 617323 - RNA, 19 nt, Homo sapiens
  misc_RNA (1)...(19): siRNA sense strand
gaggagaagacacccauaa

SEQ ID NO: 617324 - RNA, 19 nt, Homo sapiens
  misc_RNA (1)...(19): siRNA sense strand
gaaauaagucaaguguuug

SEQ ID NO: 617325 - RNA, 19 nt, Homo sapiens
  misc_RNA (1)...(19): siRNA sense strand
guggaguccugccaugaua

SEQ ID NO: 617326 - RNA, 19 nt, Homo sapiens
  misc_RNA (1)...(19): siRNA sense strand
gcagggaguuugugaugca

SEQ ID NO: 617327 - RNA, 19 nt, Homo sapiens
  misc_RNA (1)...(19): siRNA sense strand
ugaggauccugcagaauga

SEQ ID NO: 617328 - RNA, 19 nt, Homo sapiens
  misc_RNA (1)...(19): siRNA sense strand
ggaugcaguccaccuauaa

SEQ ID NO: 617329 - RNA, 19 nt, Homo sapiens
  misc_RNA (1)...(19): siRNA sense strand
cagagaggcuggaggugaa

SEQ ID NO: 617330 - RNA, 19 nt, Homo sapiens
  misc_RNA (1)...(19): siRNA sense strand
aaaccacacugcagaagga

SEQ ID NO: 617331 - RNA, 19 nt, Homo sapiens
  misc_RNA (1)...(19): siRNA sense strand
gaacgaguaaagccuagaa

SEQ ID NO: 617332 - RNA, 19 nt, Homo sapiens
  misc_RNA (1)...(19): siRNA sense strand
gacaucacaccaaagauuu

SEQ ID NO: 617333 - RNA, 19 nt, Homo sapiens
  misc_RNA (1)...(19): siRNA sense strand
guaauaaagaggaugaguu

SEQ ID NO: 617334 - RNA, 19 nt, Homo sapiens
  misc_RNA (1)...(19): siRNA sense strand
ugaagaacuuugugaccaa

SEQ ID NO: 617335 - RNA, 19 nt, Homo sapiens
  misc_RNA (1)...(19): siRNA sense strand
ggagaagacacccauaaag

SEQ ID NO: 617336 - RNA, 19 nt, Homo sapiens
  misc_RNA (1)...(19): siRNA sense strand
aguaaagccuagaaucaaa

SEQ ID NO: 617337 - RNA, 19 nt, Homo sapiens
  misc_RNA (1)...(19): siRNA sense strand
caagacaggcugcgaaaca

SEQ ID NO: 617338 - RNA, 19 nt, Homo sapiens
  misc_RNA (1)...(19): siRNA sense strand
ccaacaaaguacagagaug

SEQ ID NO: 617339 - RNA, 19 nt, Homo sapiens
  misc_RNA (1)...(19): siRNA sense strand
acacgaugcugcugccaaa

SEQ ID NO: 617340 - RNA, 19 nt, Homo sapiens
  misc_RNA (1)...(19): siRNA sense strand
aagagaauccgaagaagaa

SEQ ID NO: 617341 - RNA, 19 nt, Homo sapiens
  misc_RNA (1)...(19): siRNA sense strand
gaaacggaccaaugucugu

SEQ ID NO: 617342 - RNA, 19 nt, Homo sapiens
  misc_RNA (1)...(19): siRNA sense strand
caagaacgaauuuguaucu

SEQ ID NO: 617343 - RNA, 19 nt, Homo sapiens
  misc_RNA (1)...(19): siRNA sense strand
gagcaacuggacuaucuuu

SEQ ID NO: 617344 - RNA, 19 nt, Homo sapiens
  misc_RNA (1)...(19): siRNA sense strand
uaauaaagaggaugaguuc

SEQ ID NO: 617345 - RNA, 19 nt, Homo sapiens
  misc_RNA (1)...(19): siRNA sense strand
agaagacacccauaaagaa

SEQ ID NO: 617346 - RNA, 19 nt, Homo sapiens
  misc_RNA (1)...(19): siRNA sense strand
ggaacgggcaccaacaaga

SEQ ID NO: 617347 - RNA, 19 nt, Homo sapiens
  misc_RNA (1)...(19): siRNA sense strand
uguuugagauugcacuuaa

SEQ ID NO: 617348 - RNA, 19 nt, Homo sapiens
  misc_RNA (1)...(19): siRNA sense strand
ggaagagaauccgaagaag

SEQ ID NO: 617349 - RNA, 19 nt, Homo sapiens
  misc_RNA (1)...(19): siRNA sense strand
gaguaaagccuagaaucaa

SEQ ID NO: 617350 - RNA, 19 nt, Homo sapiens
  misc_RNA (1)...(19): siRNA sense strand
cgaguaaagccuagaauca

SEQ ID NO: 617351 - RNA, 19 nt, Homo sapiens
  misc_RNA (1)...(19): siRNA sense strand
gcaaaggaaagacaagaca

SEQ ID NO: 617352 - RNA, 19 nt, Homo sapiens
  misc_RNA (1)...(19): siRNA sense strand
cgccauagcuguucuugag

SEQ ID NO: 617353 - RNA, 19 nt, Homo sapiens
  misc_RNA (1)...(19): siRNA sense strand
cggaugcaguccaccuaua

SEQ ID NO: 617354 - RNA, 19 nt, Homo sapiens
  misc_RNA (1)...(19): siRNA sense strand
ucuuaaaguugcugucuga

SEQ ID NO: 617355 - RNA, 19 nt, Homo sapiens
  misc_RNA (1)...(19): siRNA sense strand
ccaguuccaccuuuacuuu

SEQ ID NO: 617356 - RNA, 19 nt, Homo sapiens
  misc_RNA (1)...(19): siRNA sense strand
gcgcugaacaucuuaaagu

SEQ ID NO: 617357 - RNA, 19 nt, Homo sapiens
  misc_RNA (1)...(19): siRNA sense strand
gauccuugguuucaaaguc

SEQ ID NO: 617358 - RNA, 19 nt, Homo sapiens
  misc_RNA (1)...(19): siRNA sense strand
ggaggacagcaauuuaaug

SEQ ID NO: 617359 - RNA, 19 nt, Homo sapiens
  misc_RNA (1)...(19): siRNA sense strand
gaggacagcaauuuaaugg

SEQ ID NO: 617360 - RNA, 19 nt, Homo sapiens
  misc_RNA (1)...(19): siRNA sense strand
gggaaaagcaagaagauuu

SEQ ID NO: 617361 - RNA, 19 nt, Homo sapiens
  misc_RNA (1)...(19): siRNA sense strand
gacaagacaggcugcgaaa

SEQ ID NO: 617362 - RNA, 19 nt, Homo sapiens
  misc_RNA (1)...(19): siRNA sense strand
uggcugcgcugaacaucuu

SEQ ID NO: 617363 - RNA, 19 nt, Homo sapiens
  misc_RNA (1)...(19): siRNA sense strand
gaaggaacgggcaccaaca

SEQ ID NO: 617364 - RNA, 19 nt, Homo sapiens
  misc_RNA (1)...(19): siRNA sense strand
uggaagagaauccgaagaa

SEQ ID NO: 617365 - RNA, 19 nt, Homo sapiens
  misc_RNA (1)...(19): siRNA sense strand
ccacagacaagcccagaau

SEQ ID NO: 617366 - RNA, 19 nt, Homo sapiens
  misc_RNA (1)...(19): siRNA sense strand
ccucugaucagccauggua

SEQ ID NO: 617367 - RNA, 19 nt, Homo sapiens
  misc_RNA (1)...(19): siRNA sense strand
gcaaugcagccgagaacau

SEQ ID NO: 617368 - RNA, 19 nt, Homo sapiens
  misc_RNA (1)...(19): siRNA sense strand
gcugaacaucuuaaaguug

SEQ ID NO: 617369 - RNA, 19 nt, Homo sapiens
  misc_RNA (1)...(19): siRNA sense strand
ggagaaggagccagaguac

SEQ ID NO: 617370 - RNA, 19 nt, Homo sapiens
  misc_RNA (1)...(19): siRNA sense strand
gugggaggacagcaauuua

SEQ ID NO: 617371 - RNA, 19 nt, Homo sapiens
  misc_RNA (1)...(19): siRNA sense strand
acagacaagcccagaauau

SEQ ID NO: 617372 - RNA, 19 nt, Homo sapiens
  misc_RNA (1)...(19): siRNA sense strand
gcaguccaccuauaacuac

SEQ ID NO: 617373 - RNA, 19 nt, Homo sapiens
  misc_RNA (1)...(19): siRNA sense strand
gaacaggaaacggaccaau

SEQ ID NO: 617374 - RNA, 19 nt, Homo sapiens
  misc_RNA (1)...(19): siRNA sense strand
gaccaacaaaguacagaga

SEQ ID NO: 617375 - RNA, 19 nt, Homo sapiens
  misc_RNA (1)...(19): siRNA sense strand
caauguauaagccuguuga

SEQ ID NO: 617376 - RNA, 19 nt, Homo sapiens
  misc_RNA (1)...(19): siRNA sense strand
uguaggaguuagucaagga

SEQ ID NO: 617377 - RNA, 19 nt, Homo sapiens
  misc_RNA (1)...(19): siRNA sense strand
ccgagaacaugcuggagau

SEQ ID NO: 617378 - RNA, 19 nt, Homo sapiens
  misc_RNA (1)...(19): siRNA sense strand
gggaggacagcaauuuaau

SEQ ID NO: 617379 - RNA, 19 nt, Homo sapiens
  misc_RNA (1)...(19): siRNA sense strand
gagaugccaagaacaggaa

SEQ ID NO: 617380 - RNA, 19 nt, Homo sapiens
  misc_RNA (1)...(19): siRNA sense strand
gaacuuugugaccaagguu

SEQ ID NO: 617381 - RNA, 19 nt, Homo sapiens
  misc_RNA (1)...(19): siRNA sense strand
caugagaggaggugcuuau

SEQ ID NO: 617382 - RNA, 19 nt, Homo sapiens
  misc_RNA (1)...(19): siRNA sense strand
caguuccaccuuuacuuua

SEQ ID NO: 617383 - RNA, 19 nt, Homo sapiens
  misc_RNA (1)...(19): siRNA sense strand
gcccgagaguuguuguaug

SEQ ID NO: 617384 - RNA, 19 nt, Homo sapiens
  misc_RNA (1)...(19): siRNA sense strand
aguacacgcuccucacaga

SEQ ID NO: 617385 - RNA, 19 nt, Homo sapiens
  misc_RNA (1)...(19): siRNA sense strand
accuauaacuacaacauga

SEQ ID NO: 617386 - RNA, 19 nt, Homo sapiens
  misc_RNA (1)...(19): siRNA sense strand
gccugcaguugaacgagua

SEQ ID NO: 617387 - RNA, 19 nt, Homo sapiens
  misc_RNA (1)...(19): siRNA sense strand
cagacaagcccagaauaug

SEQ ID NO: 617388 - RNA, 19 nt, Homo sapiens
  misc_RNA (1)...(19): siRNA sense strand
acaggaaacggaccaaugu

SEQ ID NO: 617389 - RNA, 19 nt, Homo sapiens
  misc_RNA (1)...(19): siRNA sense strand
cgcugaacaucuuaaaguu

SEQ ID NO: 617390 - RNA, 19 nt, Homo sapiens
  misc_RNA (1)...(19): siRNA sense strand
cugagcaacuggacuaucu

SEQ ID NO: 617391 - RNA, 19 nt, Homo sapiens
  misc_RNA (1)...(19): siRNA sense strand
cccgagaguuguuguaugg

SEQ ID NO: 617392 - RNA, 19 nt, Homo sapiens
  misc_RNA (1)...(19): siRNA sense strand
caaacccgcacucaaguca

SEQ ID NO: 617393 - RNA, 19 nt, Homo sapiens
  misc_RNA (1)...(19): siRNA sense strand
gaagguggccaagcgcaau

SEQ ID NO: 617394 - RNA, 19 nt, Homo sapiens
  misc_RNA (1)...(19): siRNA sense strand
ccucugagcaacuggacua

SEQ ID NO: 617395 - RNA, 19 nt, Homo sapiens
  misc_RNA (1)...(19): siRNA sense strand
agaacgaauuuguaucucu

SEQ ID NO: 617396 - RNA, 19 nt, Homo sapiens
  misc_RNA (1)...(19): siRNA sense strand
uacaaagacuuccccaaaa

SEQ ID NO: 617397 - RNA, 19 nt, Homo sapiens
  misc_RNA (1)...(19): siRNA sense strand
caauuuaauggcaaaggaa

SEQ ID NO: 617398 - RNA, 19 nt, Homo sapiens
  misc_RNA (1)...(19): siRNA sense strand
ggaguccugccaugauaug

SEQ ID NO: 617399 - RNA, 19 nt, Homo sapiens
  misc_RNA (1)...(19): siRNA sense strand
caccaaacccgcacucaag

SEQ ID NO: 617400 - RNA, 19 nt, Homo sapiens
  misc_RNA (1)...(19): siRNA sense strand
gaacaugcuggagauccuu

SEQ ID NO: 617401 - RNA, 19 nt, Homo sapiens
  misc_RNA (1)...(19): siRNA sense strand
caaugcagccgagaacaug

SEQ ID NO: 617402 - RNA, 19 nt, Homo sapiens
  misc_RNA (1)...(19): siRNA sense strand
ugggaggacagcaauuuaa

SEQ ID NO: 617403 - RNA, 19 nt, Homo sapiens
  misc_RNA (1)...(19): siRNA sense strand
gcaagaagauuucaaagaa

SEQ ID NO: 617404 - RNA, 19 nt, Homo sapiens
  misc_RNA (1)...(19): siRNA sense strand
aaacggaacuugccuguga

SEQ ID NO: 617405 - RNA, 19 nt, Homo sapiens
  misc_RNA (1)...(19): siRNA sense strand
gaacuugccugugaauuuc

SEQ ID NO: 617406 - RNA, 19 nt, Homo sapiens
  misc_RNA (1)...(19): siRNA sense strand
gaacgaauuuguaucucuu

SEQ ID NO: 617407 - RNA, 19 nt, Homo sapiens
  misc_RNA (1)...(19): siRNA sense strand
gaagacacccauaaagaaa

SEQ ID NO: 617408 - RNA, 19 nt, Homo sapiens
  misc_RNA (1)...(19): siRNA sense strand
ggaacuugccugugaauuu

SEQ ID NO: 617409 - RNA, 19 nt, Homo sapiens
  misc_RNA (1)...(19): siRNA sense strand
ggagauccuugguuucaaa

SEQ ID NO: 617410 - RNA, 19 nt, Homo sapiens
  misc_RNA (1)...(19): siRNA sense strand
ggacaucacaccaaagauu

SEQ ID NO: 617411 - RNA, 19 nt, Homo sapiens
  misc_RNA (1)...(19): siRNA sense strand
uaaaguugcugucugaguu

SEQ ID NO: 617412 - RNA, 19 nt, Homo sapiens
  misc_RNA (1)...(19): siRNA sense strand
gagaagacacccauaaaga

SEQ ID NO: 617413 - RNA, 19 nt, Homo sapiens
  misc_RNA (1)...(19): siRNA sense strand
guacagagaugccaagaac

SEQ ID NO: 617414 - RNA, 19 nt, Homo sapiens
  misc_RNA (1)...(19): siRNA sense strand
gaaaaugggacuaguaaua

SEQ ID NO: 617415 - RNA, 19 nt, Homo sapiens
  misc_RNA (1)...(19): siRNA sense strand
gcaauuuaauggcaaagga

SEQ ID NO: 617416 - RNA, 19 nt, Homo sapiens
  misc_RNA (1)...(19): siRNA sense strand
cacgguaacugccaugaua

SEQ ID NO: 617417 - RNA, 19 nt, Homo sapiens
  misc_RNA (1)...(19): siRNA sense strand
gaagagaauccgaagaaga

SEQ ID NO: 617418 - RNA, 19 nt, Homo sapiens
  misc_RNA (1)...(19): siRNA sense strand
ggaggugaauggaagagaa

SEQ ID NO: 617419 - RNA, 19 nt, Homo sapiens
  misc_RNA (1)...(19): siRNA sense strand
gaacgggcaccaacaagaa

SEQ ID NO: 617420 - RNA, 19 nt, Homo sapiens
  misc_RNA (1)...(19): siRNA sense strand
ucaaggacaucacaccaaa

SEQ ID NO: 617421 - RNA, 19 nt, Homo sapiens
  misc_RNA (1)...(19): siRNA sense strand
caugauagcccgagaguug

SEQ ID NO: 617422 - RNA, 19 nt, Homo sapiens
  misc_RNA (1)...(19): siRNA sense strand
uugaggagcugaagaaguu

SEQ ID NO: 617423 - RNA, 19 nt, Homo sapiens
  misc_RNA (1)...(19): siRNA sense strand
gaggagaagacacccauaa

SEQ ID NO: 617424 - RNA, 19 nt, Homo sapiens
  misc_RNA (1)...(19): siRNA sense strand
gaaauaagucaaguguuug

SEQ ID NO: 617425 - RNA, 19 nt, Homo sapiens
  misc_RNA (1)...(19): siRNA sense strand
guggaguccugccaugaua

SEQ ID NO: 617426 - RNA, 19 nt, Homo sapiens
  misc_RNA (1)...(19): siRNA sense strand
gcagggaguuugugaugca

SEQ ID NO: 617427 - RNA, 19 nt, Homo sapiens
  misc_RNA (1)...(19): siRNA sense strand
ugaggauccugcagaauga

SEQ ID NO: 617428 - RNA, 19 nt, Homo sapiens
  misc_RNA (1)...(19): siRNA sense strand
ggaugcaguccaccuauaa

SEQ ID NO: 617429 - RNA, 19 nt, Homo sapiens
  misc_RNA (1)...(19): siRNA sense strand
cagagaggcuggaggugaa

SEQ ID NO: 617430 - RNA, 19 nt, Homo sapiens
  misc_RNA (1)...(19): siRNA sense strand
aaaccacacugcagaagga

SEQ ID NO: 617431 - RNA, 19 nt, Homo sapiens
  misc_RNA (1)...(19): siRNA sense strand
gaacgaguaaagccuagaa

SEQ ID NO: 617432 - RNA, 19 nt, Homo sapiens
  misc_RNA (1)...(19): siRNA sense strand
gacaucacaccaaagauuu

SEQ ID NO: 617433 - RNA, 19 nt, Homo sapiens
  misc_RNA (1)...(19): siRNA sense strand
guaauaaagaggaugaguu

SEQ ID NO: 617434 - RNA, 19 nt, Homo sapiens
  misc_RNA (1)...(19): siRNA sense strand
ugaagaacuuugugaccaa

SEQ ID NO: 617435 - RNA, 19 nt, Homo sapiens
  misc_RNA (1)...(19): siRNA sense strand
ggagaagacacccauaaag

SEQ ID NO: 617436 - RNA, 19 nt, Homo sapiens
  misc_RNA (1)...(19): siRNA sense strand
aguaaagccuagaaucaaa

SEQ ID NO: 617437 - RNA, 19 nt, Homo sapiens
  misc_RNA (1)...(19): siRNA sense strand
caagacaggcugcgaaaca

SEQ ID NO: 617438 - RNA, 19 nt, Homo sapiens
  misc_RNA (1)...(19): siRNA sense strand
ccaacaaaguacagagaug

SEQ ID NO: 617439 - RNA, 19 nt, Homo sapiens
  misc_RNA (1)...(19): siRNA sense strand
acacgaugcugcugccaaa

SEQ ID NO: 617440 - RNA, 19 nt, Homo sapiens
  misc_RNA (1)...(19): siRNA sense strand
aagagaauccgaagaagaa

SEQ ID NO: 617441 - RNA, 19 nt, Homo sapiens
  misc_RNA (1)...(19): siRNA sense strand
gaaacggaccaaugucugu

SEQ ID NO: 617442 - RNA, 19 nt, Homo sapiens
  misc_RNA (1)...(19): siRNA sense strand
caagaacgaauuuguaucu

SEQ ID NO: 617443 - RNA, 19 nt, Homo sapiens
  misc_RNA (1)...(19): siRNA sense strand
gagcaacuggacuaucuuu

SEQ ID NO: 617444 - RNA, 19 nt, Homo sapiens
  misc_RNA (1)...(19): siRNA sense strand
uaauaaagaggaugaguuc

SEQ ID NO: 617445 - RNA, 19 nt, Homo sapiens
  misc_RNA (1)...(19): siRNA sense strand
agaagacacccauaaagaa

SEQ ID NO: 617446 - RNA, 19 nt, Homo sapiens
  misc_RNA (1)...(19): siRNA sense strand
ggaacgggcaccaacaaga

SEQ ID NO: 617447 - RNA, 19 nt, Homo sapiens
  misc_RNA (1)...(19): siRNA sense strand
uguuugagauugcacuuaa

SEQ ID NO: 617448 - RNA, 19 nt, Homo sapiens
  misc_RNA (1)...(19): siRNA sense strand
ggaagagaauccgaagaag

SEQ ID NO: 617449 - RNA, 19 nt, Homo sapiens
  misc_RNA (1)...(19): siRNA sense strand
gaguaaagccuagaaucaa

SEQ ID NO: 617450 - RNA, 19 nt, Homo sapiens
  misc_RNA (1)...(19): siRNA sense strand
cgaguaaagccuagaauca

SEQ ID NO: 617451 - RNA, 19 nt, Homo sapiens
  misc_RNA (1)...(19): siRNA sense strand
gcaaaggaaagacaagaca

SEQ ID NO: 617452 - RNA, 19 nt, Homo sapiens
  misc_RNA (1)...(19): siRNA sense strand
cgccauagcuguucuugag

SEQ ID NO: 617453 - RNA, 19 nt, Homo sapiens
  misc_RNA (1)...(19): siRNA sense strand
cggaugcaguccaccuaua

SEQ ID NO: 617454 - RNA, 19 nt, Homo sapiens
  misc_RNA (1)...(19): siRNA sense strand
ucuuaaaguugcugucuga

SEQ ID NO: 617455 - RNA, 19 nt, Homo sapiens
  misc_RNA (1)...(19): siRNA sense strand
gcgcugaacaucuuaaagu

SEQ ID NO: 617456 - RNA, 19 nt, Homo sapiens
  misc_RNA (1)...(19): siRNA sense strand
ccaguuccaccuuuacuuu

SEQ ID NO: 617457 - RNA, 19 nt, Homo sapiens
  misc_RNA (1)...(19): siRNA sense strand
gauccuugguuucaaaguc

SEQ ID NO: 617458 - RNA, 19 nt, Homo sapiens
  misc_RNA (1)...(19): siRNA sense strand
gaggacagcaauuuaaugg

SEQ ID NO: 617459 - RNA, 19 nt, Homo sapiens
  misc_RNA (1)...(19): siRNA sense strand
ggaggacagcaauuuaaug

SEQ ID NO: 617460 - RNA, 19 nt, Homo sapiens
  misc_RNA (1)...(19): siRNA sense strand
gggaaaagcaagaagauuu

SEQ ID NO: 617461 - RNA, 19 nt, Homo sapiens
  misc_RNA (1)...(19): siRNA sense strand
gacaagacaggcugcgaaa

SEQ ID NO: 617462 - RNA, 19 nt, Homo sapiens
  misc_RNA (1)...(19): siRNA sense strand
uggcugcgcugaacaucuu

SEQ ID NO: 617463 - RNA, 19 nt, Homo sapiens
  misc_RNA (1)...(19): siRNA sense strand
gaaggaacgggcaccaaca

SEQ ID NO: 617464 - RNA, 19 nt, Homo sapiens
  misc_RNA (1)...(19): siRNA sense strand
uggaagagaauccgaagaa

SEQ ID NO: 617465 - RNA, 19 nt, Homo sapiens
  misc_RNA (1)...(19): siRNA sense strand
ccacagacaagcccagaau

SEQ ID NO: 617466 - RNA, 19 nt, Homo sapiens
  misc_RNA (1)...(19): siRNA sense strand
ccucugaucagccauggua

SEQ ID NO: 617467 - RNA, 19 nt, Homo sapiens
  misc_RNA (1)...(19): siRNA sense strand
gcaaugcagccgagaacau

SEQ ID NO: 617468 - RNA, 19 nt, Homo sapiens
  misc_RNA (1)...(19): siRNA sense strand
gcugaacaucuuaaaguug

SEQ ID NO: 617469 - RNA, 19 nt, Homo sapiens
  misc_RNA (1)...(19): siRNA sense strand
gugggaggacagcaauuua

SEQ ID NO: 617470 - RNA, 19 nt, Homo sapiens
  misc_RNA (1)...(19): siRNA sense strand
ggagaaggagccagaguac

SEQ ID NO: 617471 - RNA, 19 nt, Homo sapiens
  misc_RNA (1)...(19): siRNA sense strand
acagacaagcccagaauau

SEQ ID NO: 617472 - RNA, 19 nt, Homo sapiens
  misc_RNA (1)...(19): siRNA sense strand
caauguauaagccuguuga

SEQ ID NO: 617473 - RNA, 19 nt, Homo sapiens
  misc_RNA (1)...(19): siRNA sense strand
gaacaggaaacggaccaau

SEQ ID NO: 617474 - RNA, 19 nt, Homo sapiens
  misc_RNA (1)...(19): siRNA sense strand
gaccaacaaaguacagaga

SEQ ID NO: 617475 - RNA, 19 nt, Homo sapiens
  misc_RNA (1)...(19): siRNA sense strand
uguaggaguuagucaagga

SEQ ID NO: 617476 - RNA, 19 nt, Homo sapiens
  misc_RNA (1)...(19): siRNA sense strand
ccgagaacaugcuggagau

SEQ ID NO: 617477 - RNA, 19 nt, Homo sapiens
  misc_RNA (1)...(19): siRNA sense strand
gcaguccaccuauaacuac

SEQ ID NO: 617478 - RNA, 19 nt, Homo sapiens
  misc_RNA (1)...(19): siRNA sense strand
gggaggacagcaauuuaau

SEQ ID NO: 617479 - RNA, 19 nt, Homo sapiens
  misc_RNA (1)...(19): siRNA sense strand
gagaugccaagaacaggaa

SEQ ID NO: 617480 - RNA, 19 nt, Homo sapiens
  misc_RNA (1)...(19): siRNA sense strand
gaacuuugugaccaagguu

SEQ ID NO: 617481 - RNA, 19 nt, Homo sapiens
  misc_RNA (1)...(19): siRNA sense strand
gcccgagaguuguuguaug

SEQ ID NO: 617482 - RNA, 19 nt, Homo sapiens
  misc_RNA (1)...(19): siRNA sense strand
caguuccaccuuuacuuua

SEQ ID NO: 617483 - RNA, 19 nt, Homo sapiens
  misc_RNA (1)...(19): siRNA sense strand
caugagaggaggugcuuau

SEQ ID NO: 617484 - RNA, 19 nt, Homo sapiens
  misc_RNA (1)...(19): siRNA sense strand
accuauaacuacaacauga

SEQ ID NO: 617485 - RNA, 19 nt, Homo sapiens
  misc_RNA (1)...(19): siRNA sense strand
aguacacgcuccucacaga

SEQ ID NO: 617486 - RNA, 19 nt, Homo sapiens
  misc_RNA (1)...(19): siRNA sense strand
gccugcaguugaacgagua

SEQ ID NO: 617487 - RNA, 19 nt, Homo sapiens
  misc_RNA (1)...(19): siRNA sense strand
cagacaagcccagaauaug

SEQ ID NO: 617488 - RNA, 19 nt, Homo sapiens
  misc_RNA (1)...(19): siRNA sense strand
acaggaaacggaccaaugu

SEQ ID NO: 617489 - RNA, 19 nt, Homo sapiens
  misc_RNA (1)...(19): siRNA sense strand
cgcugaacaucuuaaaguu

SEQ ID NO: 617490 - RNA, 19 nt, Homo sapiens
  misc_RNA (1)...(19): siRNA sense strand
cugagcaacuggacuaucu

SEQ ID NO: 617491 - RNA, 19 nt, Homo sapiens
  misc_RNA (1)...(19): siRNA sense strand
cccgagaguuguuguaugg

SEQ ID NO: 617492 - RNA, 19 nt, Homo sapiens
  misc_RNA (1)...(19): siRNA sense strand
caaacccgcacucaaguca

SEQ ID NO: 617493 - RNA, 19 nt, Homo sapiens
  misc_RNA (1)...(19): siRNA sense strand
gaagguggccaagcgcaau

SEQ ID NO: 617494 - RNA, 19 nt, Homo sapiens
  misc_RNA (1)...(19): siRNA sense strand
ccucugagcaacuggacua

SEQ ID NO: 617495 - RNA, 19 nt, Homo sapiens
  misc_RNA (1)...(19): siRNA sense strand
agaacgaauuuguaucucu

SEQ ID NO: 617496 - RNA, 19 nt, Homo sapiens
  misc_RNA (1)...(19): siRNA sense strand
uacaaagacuuccccaaaa

SEQ ID NO: 617497 - RNA, 19 nt, Homo sapiens
  misc_RNA (1)...(19): siRNA sense strand
agacaagcccagaauaugg

SEQ ID NO: 617498 - RNA, 19 nt, Homo sapiens
  misc_RNA (1)...(19): siRNA sense strand
ggaguccugccaugauaug

SEQ ID NO: 617499 - RNA, 19 nt, Homo sapiens
  misc_RNA (1)...(19): siRNA sense strand
caccaaacccgcacucaag

SEQ ID NO: 617500 - RNA, 19 nt, Homo sapiens
  misc_RNA (1)...(19): siRNA sense strand
gaacaugcuggagauccuu

SEQ ID NO: 617501 - RNA, 19 nt, Homo sapiens
  misc_RNA (1)...(19): siRNA sense strand
caaugcagccgagaacaug

SEQ ID NO: 617502 - RNA, 19 nt, Homo sapiens
  misc_RNA (1)...(19): siRNA sense strand
ugggaggacagcaauuuaa

SEQ ID NO: 617503 - RNA, 19 nt, Homo sapiens
  misc_RNA (1)...(19): siRNA sense strand
ggaagacccuggcgaguau

SEQ ID NO: 617504 - RNA, 19 nt, Homo sapiens
  misc_RNA (1)...(19): siRNA sense strand
ugacaucacuggccauaaa

SEQ ID NO: 617505 - RNA, 19 nt, Homo sapiens
  misc_RNA (1)...(19): siRNA sense strand
gaaagccgcuccugacauc

SEQ ID NO: 617506 - RNA, 19 nt, Homo sapiens
  misc_RNA (1)...(19): siRNA sense strand
ggagugagaacaagaauga

SEQ ID NO: 617507 - RNA, 19 nt, Homo sapiens
  misc_RNA (1)...(19): siRNA sense strand
ccaacaaucacaaagauaa

SEQ ID NO: 617508 - RNA, 19 nt, Homo sapiens
  misc_RNA (1)...(19): siRNA sense strand
gaagaggccagaugagguu

SEQ ID NO: 617509 - RNA, 19 nt, Homo sapiens
  misc_RNA (1)...(19): siRNA sense strand
ccagagaaacacaaauuaa

SEQ ID NO: 617510 - RNA, 19 nt, Homo sapiens
  misc_RNA (1)...(19): siRNA sense strand
ugaaccagcuggaccaaug

SEQ ID NO: 617511 - RNA, 19 nt, Homo sapiens
  misc_RNA (1)...(19): siRNA sense strand
acacugaguugaacauugu

SEQ ID NO: 617512 - RNA, 19 nt, Homo sapiens
  misc_RNA (1)...(19): siRNA sense strand
ggugaucauuguuguguau

SEQ ID NO: 617513 - RNA, 19 nt, Homo sapiens
  misc_RNA (1)...(19): siRNA sense strand
gugaagaggucauuauucg

SEQ ID NO: 617514 - RNA, 19 nt, Homo sapiens
  misc_RNA (1)...(19): siRNA sense strand
ggauauggcgcaagaagga

SEQ ID NO: 617515 - RNA, 19 nt, Homo sapiens
  misc_RNA (1)...(19): siRNA sense strand
gcucucacacccuuacaua

SEQ ID NO: 617516 - RNA, 19 nt, Homo sapiens
  misc_RNA (1)...(19): siRNA sense strand
gccagagaaacacaaauua

SEQ ID NO: 617517 - RNA, 19 nt, Homo sapiens
  misc_RNA (1)...(19): siRNA sense strand
gccgagagcugaggauuca

SEQ ID NO: 617518 - RNA, 19 nt, Homo sapiens
  misc_RNA (1)...(19): siRNA sense strand
ugucagcgcuccuaaagca

SEQ ID NO: 617519 - RNA, 19 nt, Homo sapiens
  misc_RNA (1)...(19): siRNA sense strand
gcaggaugccacuauguau

SEQ ID NO: 617520 - RNA, 19 nt, Homo sapiens
  misc_RNA (1)...(19): siRNA sense strand
ccacugcguauaucacuuu

SEQ ID NO: 617521 - RNA, 19 nt, Homo sapiens
  misc_RNA (1)...(19): siRNA sense strand
gaaccagcuggaccaauga

SEQ ID NO: 617522 - RNA, 19 nt, Homo sapiens
  misc_RNA (1)...(19): siRNA sense strand
uaccaacaaucacaaagau

SEQ ID NO: 617523 - RNA, 19 nt, Homo sapiens
  misc_RNA (1)...(19): siRNA sense strand
uaaagcaaacgccaccauu

SEQ ID NO: 617524 - RNA, 19 nt, Homo sapiens
  misc_RNA (1)...(19): siRNA sense strand
gacuggauauggcgcaaga

SEQ ID NO: 617525 - RNA, 19 nt, Homo sapiens
  misc_RNA (1)...(19): siRNA sense strand
acauacagcuacuggacaa

SEQ ID NO: 617526 - RNA, 19 nt, Homo sapiens
  misc_RNA (1)...(19): siRNA sense strand
ggccauaaacggagugaga

SEQ ID NO: 617527 - RNA, 19 nt, Homo sapiens
  misc_RNA (1)...(19): siRNA sense strand
uggaguacaggaucaauaa

SEQ ID NO: 617528 - RNA, 19 nt, Homo sapiens
  misc_RNA (1)...(19): siRNA sense strand
uaagaaugccagcaacaug

SEQ ID NO: 617529 - RNA, 19 nt, Homo sapiens
  misc_RNA (1)...(19): siRNA sense strand
gcaaacgccaccauugaag

SEQ ID NO: 617530 - RNA, 19 nt, Homo sapiens
  misc_RNA (1)...(19): siRNA sense strand
aagcaaacgccaccauuga

SEQ ID NO: 617531 - RNA, 19 nt, Homo sapiens
  misc_RNA (1)...(19): siRNA sense strand
ggaugcccauggacauugu

SEQ ID NO: 617532 - RNA, 19 nt, Homo sapiens
  misc_RNA (1)...(19): siRNA sense strand
cggaagacccuggcgagua

SEQ ID NO: 617533 - RNA, 19 nt, Homo sapiens
  misc_RNA (1)...(19): siRNA sense strand
ccaacucuaccaacaauca

SEQ ID NO: 617534 - RNA, 19 nt, Homo sapiens
  misc_RNA (1)...(19): siRNA sense strand
ccagugaagaggucauuau

SEQ ID NO: 617535 - RNA, 19 nt, Homo sapiens
  misc_RNA (1)...(19): siRNA sense strand
aaagcaaacgccaccauug

SEQ ID NO: 617536 - RNA, 19 nt, Homo sapiens
  misc_RNA (1)...(19): siRNA sense strand
aaccaacucuaccaacaau

SEQ ID NO: 617537 - RNA, 19 nt, Homo sapiens
  misc_RNA (1)...(19): siRNA sense strand
uacacugaguugaacauug

SEQ ID NO: 617538 - RNA, 19 nt, Homo sapiens
  misc_RNA (1)...(19): siRNA sense strand
cgccagagaaacacaaauu

SEQ ID NO: 617539 - RNA, 19 nt, Homo sapiens
  misc_RNA (1)...(19): siRNA sense strand
agaggaagaggccagauga

SEQ ID NO: 617540 - RNA, 19 nt, Homo sapiens
  misc_RNA (1)...(19): siRNA sense strand
caggaugccacuauguauu

SEQ ID NO: 617541 - RNA, 19 nt, Homo sapiens
  misc_RNA (1)...(19): siRNA sense strand
cagugaagaggucauuauu

SEQ ID NO: 617542 - RNA, 19 nt, Homo sapiens
  misc_RNA (1)...(19): siRNA sense strand
cacuauguauugcaaguca

SEQ ID NO: 617543 - RNA, 19 nt, Homo sapiens
  misc_RNA (1)...(19): siRNA sense strand
agaacgggaugcccaugga

SEQ ID NO: 617544 - RNA, 19 nt, Homo sapiens
  misc_RNA (1)...(19): siRNA sense strand
cuaccaacaaucacaaaga

SEQ ID NO: 617545 - RNA, 19 nt, Homo sapiens
  misc_RNA (1)...(19): siRNA sense strand
guaagaaugccagcaacau

SEQ ID NO: 617546 - RNA, 19 nt, Homo sapiens
  misc_RNA (1)...(19): siRNA sense strand
aaaccaacucuaccaacaa

SEQ ID NO: 617547 - RNA, 19 nt, Homo sapiens
  misc_RNA (1)...(19): siRNA sense strand
ugagguuccugacgaugau

SEQ ID NO: 617548 - RNA, 19 nt, Homo sapiens
  misc_RNA (1)...(19): siRNA sense strand
ugggaauucuggcugaaau

SEQ ID NO: 617549 - RNA, 19 nt, Homo sapiens
  misc_RNA (1)...(19): siRNA sense strand
ucuggccgcuucuucauca

SEQ ID NO: 617550 - RNA, 19 nt, Homo sapiens
  misc_RNA (1)...(19): siRNA sense strand
ccagcaacauggaguacag

SEQ ID NO: 617551 - RNA, 19 nt, Homo sapiens
  misc_RNA (1)...(19): siRNA sense strand
ggccgcuucuucaucauca

SEQ ID NO: 617552 - RNA, 19 nt, Homo sapiens
  misc_RNA (1)...(19): siRNA sense strand
aaacggagugagaacaaga

SEQ ID NO: 617553 - RNA, 19 nt, Homo sapiens
  misc_RNA (1)...(19): siRNA sense strand
uacagcuacuggacaaaga

SEQ ID NO: 617554 - RNA, 19 nt, Homo sapiens
  misc_RNA (1)...(19): siRNA sense strand
cugcguauaucacuuuguc

SEQ ID NO: 617555 - RNA, 19 nt, Homo sapiens
  misc_RNA (1)...(19): siRNA sense strand
uggcgaguaugaauguaau

SEQ ID NO: 617556 - RNA, 19 nt, Homo sapiens
  misc_RNA (1)...(19): siRNA sense strand
gccacuauguauugcaagu

SEQ ID NO: 617557 - RNA, 19 nt, Homo sapiens
  misc_RNA (1)...(19): siRNA sense strand
uaaacggagugagaacaag

SEQ ID NO: 617558 - RNA, 19 nt, Homo sapiens
  misc_RNA (1)...(19): siRNA sense strand
ucucacacccuuacauaca

SEQ ID NO: 617559 - RNA, 19 nt, Homo sapiens
  misc_RNA (1)...(19): siRNA sense strand
caaacgccaccauugaagu

SEQ ID NO: 617560 - RNA, 19 nt, Homo sapiens
  misc_RNA (1)...(19): siRNA sense strand
ucagcgcuccuaaagcaaa

SEQ ID NO: 617561 - RNA, 19 nt, Homo sapiens
  misc_RNA (1)...(19): siRNA sense strand
gaaaauuacacugaguuga

SEQ ID NO: 617562 - RNA, 19 nt, Homo sapiens
  misc_RNA (1)...(19): siRNA sense strand
gccauaaacggagugagaa

SEQ ID NO: 617563 - RNA, 19 nt, Homo sapiens
  misc_RNA (1)...(19): siRNA sense strand
cgccaccauugaagugaaa

SEQ ID NO: 617564 - RNA, 19 nt, Homo sapiens
  misc_RNA (1)...(19): siRNA sense strand
aaacgccaccauugaagug

SEQ ID NO: 617565 - RNA, 19 nt, Homo sapiens
  misc_RNA (1)...(19): siRNA sense strand
gggaugcccauggacauug

SEQ ID NO: 617566 - RNA, 19 nt, Homo sapiens
  misc_RNA (1)...(19): siRNA sense strand
aggaugccacuauguauug

SEQ ID NO: 617567 - RNA, 19 nt, Homo sapiens
  misc_RNA (1)...(19): siRNA sense strand
cugaaauuaucauccuugu

SEQ ID NO: 617568 - RNA, 19 nt, Homo sapiens
  misc_RNA (1)...(19): siRNA sense strand
aaauuacacugaguugaac

SEQ ID NO: 617569 - RNA, 19 nt, Homo sapiens
  misc_RNA (1)...(19): siRNA sense strand
ggaaaauuacacugaguug

SEQ ID NO: 617570 - RNA, 19 nt, Homo sapiens
  misc_RNA (1)...(19): siRNA sense strand
cugucacccugcaguguaa

SEQ ID NO: 617571 - RNA, 19 nt, Homo sapiens
  misc_RNA (1)...(19): siRNA sense strand
gugaaagccgcuccugaca

SEQ ID NO: 617572 - RNA, 19 nt, Homo sapiens
  misc_RNA (1)...(19): siRNA sense strand
gcuacuggacaaagaaugg

SEQ ID NO: 617573 - RNA, 19 nt, Homo sapiens
  misc_RNA (1)...(19): siRNA sense strand
ccugucacccugcagugua

SEQ ID NO: 617574 - RNA, 19 nt, Homo sapiens
  misc_RNA (1)...(19): siRNA sense strand
aaaaccaacucuaccaaca

SEQ ID NO: 617575 - RNA, 19 nt, Homo sapiens
  misc_RNA (1)...(19): siRNA sense strand
gcaacauggaguacaggau

SEQ ID NO: 617576 - RNA, 19 nt, Homo sapiens
  misc_RNA (1)...(19): siRNA sense strand
ggaagacccuggcgaguau

SEQ ID NO: 617577 - RNA, 19 nt, Homo sapiens
  misc_RNA (1)...(19): siRNA sense strand
ugacaucacuggccauaaa

SEQ ID NO: 617578 - RNA, 19 nt, Homo sapiens
  misc_RNA (1)...(19): siRNA sense strand
gaaagccgcuccugacauc

SEQ ID NO: 617579 - RNA, 19 nt, Homo sapiens
  misc_RNA (1)...(19): siRNA sense strand
ggagugagaacaagaauga

SEQ ID NO: 617580 - RNA, 19 nt, Homo sapiens
  misc_RNA (1)...(19): siRNA sense strand
ccaacaaucacaaagauaa

SEQ ID NO: 617581 - RNA, 19 nt, Homo sapiens
  misc_RNA (1)...(19): siRNA sense strand
gaagaggccagaugagguu

SEQ ID NO: 617582 - RNA, 19 nt, Homo sapiens
  misc_RNA (1)...(19): siRNA sense strand
ccagagaaacacaaauuaa

SEQ ID NO: 617583 - RNA, 19 nt, Homo sapiens
  misc_RNA (1)...(19): siRNA sense strand
ugaaccagcuggaccaaug

SEQ ID NO: 617584 - RNA, 19 nt, Homo sapiens
  misc_RNA (1)...(19): siRNA sense strand
acacugaguugaacauugu

SEQ ID NO: 617585 - RNA, 19 nt, Homo sapiens
  misc_RNA (1)...(19): siRNA sense strand
ggugaucauuguuguguau

SEQ ID NO: 617586 - RNA, 19 nt, Homo sapiens
  misc_RNA (1)...(19): siRNA sense strand
ggauauggcgcaagaagga

SEQ ID NO: 617587 - RNA, 19 nt, Homo sapiens
  misc_RNA (1)...(19): siRNA sense strand
gcucucacacccuuacaua

SEQ ID NO: 617588 - RNA, 19 nt, Homo sapiens
  misc_RNA (1)...(19): siRNA sense strand
gccagagaaacacaaauua

SEQ ID NO: 617589 - RNA, 19 nt, Homo sapiens
  misc_RNA (1)...(19): siRNA sense strand
gccgagagcugaggauuca

SEQ ID NO: 617590 - RNA, 19 nt, Homo sapiens
  misc_RNA (1)...(19): siRNA sense strand
ugucagcgcuccuaaagca

SEQ ID NO: 617591 - RNA, 19 nt, Homo sapiens
  misc_RNA (1)...(19): siRNA sense strand
gcaggaugccacuauguau

SEQ ID NO: 617592 - RNA, 19 nt, Homo sapiens
  misc_RNA (1)...(19): siRNA sense strand
ccacugcguauaucacuuu

SEQ ID NO: 617593 - RNA, 19 nt, Homo sapiens
  misc_RNA (1)...(19): siRNA sense strand
gaaccagcuggaccaauga

SEQ ID NO: 617594 - RNA, 19 nt, Homo sapiens
  misc_RNA (1)...(19): siRNA sense strand
uaccaacaaucacaaagau

SEQ ID NO: 617595 - RNA, 19 nt, Homo sapiens
  misc_RNA (1)...(19): siRNA sense strand
uaaagcaaacgccaccauu

SEQ ID NO: 617596 - RNA, 19 nt, Homo sapiens
  misc_RNA (1)...(19): siRNA sense strand
gacuggauauggcgcaaga

SEQ ID NO: 617597 - RNA, 19 nt, Homo sapiens
  misc_RNA (1)...(19): siRNA sense strand
acauacagcuacuggacaa

SEQ ID NO: 617598 - RNA, 19 nt, Homo sapiens
  misc_RNA (1)...(19): siRNA sense strand
ggccauaaacggagugaga

SEQ ID NO: 617599 - RNA, 19 nt, Homo sapiens
  misc_RNA (1)...(19): siRNA sense strand
uggaguacaggaucaauaa

SEQ ID NO: 617600 - RNA, 19 nt, Homo sapiens
  misc_RNA (1)...(19): siRNA sense strand
uaagaaugccagcaacaug

SEQ ID NO: 617601 - RNA, 19 nt, Homo sapiens
  misc_RNA (1)...(19): siRNA sense strand
gcaaacgccaccauugaag

SEQ ID NO: 617602 - RNA, 19 nt, Homo sapiens
  misc_RNA (1)...(19): siRNA sense strand
aagcaaacgccaccauuga

SEQ ID NO: 617603 - RNA, 19 nt, Homo sapiens
  misc_RNA (1)...(19): siRNA sense strand
ggaugcccauggacauugu

SEQ ID NO: 617604 - RNA, 19 nt, Homo sapiens
  misc_RNA (1)...(19): siRNA sense strand
cggaagacccuggcgagua

SEQ ID NO: 617605 - RNA, 19 nt, Homo sapiens
  misc_RNA (1)...(19): siRNA sense strand
ccaacucuaccaacaauca

SEQ ID NO: 617606 - RNA, 19 nt, Homo sapiens
  misc_RNA (1)...(19): siRNA sense strand
aaagcaaacgccaccauug

SEQ ID NO: 617607 - RNA, 19 nt, Homo sapiens
  misc_RNA (1)...(19): siRNA sense strand
aaccaacucuaccaacaau

SEQ ID NO: 617608 - RNA, 19 nt, Homo sapiens
  misc_RNA (1)...(19): siRNA sense strand
uacacugaguugaacauug

SEQ ID NO: 617609 - RNA, 19 nt, Homo sapiens
  misc_RNA (1)...(19): siRNA sense strand
cgccagagaaacacaaauu

SEQ ID NO: 617610 - RNA, 19 nt, Homo sapiens
  misc_RNA (1)...(19): siRNA sense strand
agaggaagaggccagauga

SEQ ID NO: 617611 - RNA, 19 nt, Homo sapiens
  misc_RNA (1)...(19): siRNA sense strand
caggaugccacuauguauu

SEQ ID NO: 617612 - RNA, 19 nt, Homo sapiens
  misc_RNA (1)...(19): siRNA sense strand
cacuauguauugcaaguca

SEQ ID NO: 617613 - RNA, 19 nt, Homo sapiens
  misc_RNA (1)...(19): siRNA sense strand
agaacgggaugcccaugga

SEQ ID NO: 617614 - RNA, 19 nt, Homo sapiens
  misc_RNA (1)...(19): siRNA sense strand
cuaccaacaaucacaaaga

SEQ ID NO: 617615 - RNA, 19 nt, Homo sapiens
  misc_RNA (1)...(19): siRNA sense strand
guaagaaugccagcaacau

SEQ ID NO: 617616 - RNA, 19 nt, Homo sapiens
  misc_RNA (1)...(19): siRNA sense strand
aaaccaacucuaccaacaa

SEQ ID NO: 617617 - RNA, 19 nt, Homo sapiens
  misc_RNA (1)...(19): siRNA sense strand
ugagguuccugacgaugau

SEQ ID NO: 617618 - RNA, 19 nt, Homo sapiens
  misc_RNA (1)...(19): siRNA sense strand
ugggaauucuggcugaaau

SEQ ID NO: 617619 - RNA, 19 nt, Homo sapiens
  misc_RNA (1)...(19): siRNA sense strand
ucuggccgcuucuucauca

SEQ ID NO: 617620 - RNA, 19 nt, Homo sapiens
  misc_RNA (1)...(19): siRNA sense strand
uacagcuacuggacaaaga

SEQ ID NO: 617621 - RNA, 19 nt, Homo sapiens
  misc_RNA (1)...(19): siRNA sense strand
ggccgcuucuucaucauca

SEQ ID NO: 617622 - RNA, 19 nt, Homo sapiens
  misc_RNA (1)...(19): siRNA sense strand
ccagcaacauggaguacag

SEQ ID NO: 617623 - RNA, 19 nt, Homo sapiens
  misc_RNA (1)...(19): siRNA sense strand
aaacggagugagaacaaga

SEQ ID NO: 617624 - RNA, 19 nt, Homo sapiens
  misc_RNA (1)...(19): siRNA sense strand
cugcguauaucacuuuguc

SEQ ID NO: 617625 - RNA, 19 nt, Homo sapiens
  misc_RNA (1)...(19): siRNA sense strand
uggcgaguaugaauguaau

SEQ ID NO: 617626 - RNA, 19 nt, Homo sapiens
  misc_RNA (1)...(19): siRNA sense strand
gccacuauguauugcaagu

SEQ ID NO: 617627 - RNA, 19 nt, Homo sapiens
  misc_RNA (1)...(19): siRNA sense strand
uaaacggagugagaacaag

SEQ ID NO: 617628 - RNA, 19 nt, Homo sapiens
  misc_RNA (1)...(19): siRNA sense strand
ucucacacccuuacauaca

SEQ ID NO: 617629 - RNA, 19 nt, Homo sapiens
  misc_RNA (1)...(19): siRNA sense strand
caaacgccaccauugaagu

SEQ ID NO: 617630 - RNA, 19 nt, Homo sapiens
  misc_RNA (1)...(19): siRNA sense strand
ucagcgcuccuaaagcaaa

SEQ ID NO: 617631 - RNA, 19 nt, Homo sapiens
  misc_RNA (1)...(19): siRNA sense strand
gaaaauuacacugaguuga

SEQ ID NO: 617632 - RNA, 19 nt, Homo sapiens
  misc_RNA (1)...(19): siRNA sense strand
gccauaaacggagugagaa

SEQ ID NO: 617633 - RNA, 19 nt, Homo sapiens
  misc_RNA (1)...(19): siRNA sense strand
cgccaccauugaagugaaa

SEQ ID NO: 617634 - RNA, 19 nt, Homo sapiens
  misc_RNA (1)...(19): siRNA sense strand
aaacgccaccauugaagug

SEQ ID NO: 617635 - RNA, 19 nt, Homo sapiens
  misc_RNA (1)...(19): siRNA sense strand
gggaugcccauggacauug

SEQ ID NO: 617636 - RNA, 19 nt, Homo sapiens
  misc_RNA (1)...(19): siRNA sense strand
aggaugccacuauguauug

SEQ ID NO: 617637 - RNA, 19 nt, Homo sapiens
  misc_RNA (1)...(19): siRNA sense strand
cugaaauuaucauccuugu

SEQ ID NO: 617638 - RNA, 19 nt, Homo sapiens
  misc_RNA (1)...(19): siRNA sense strand
aaauuacacugaguugaac

SEQ ID NO: 617639 - RNA, 19 nt, Homo sapiens
  misc_RNA (1)...(19): siRNA sense strand
ggaaaauuacacugaguug

SEQ ID NO: 617640 - RNA, 19 nt, Homo sapiens
  misc_RNA (1)...(19): siRNA sense strand
cugucacccugcaguguaa

SEQ ID NO: 617641 - RNA, 19 nt, Homo sapiens
  misc_RNA (1)...(19): siRNA sense strand
gugaaagccgcuccugaca

SEQ ID NO: 617642 - RNA, 19 nt, Homo sapiens
  misc_RNA (1)...(19): siRNA sense strand
ccugucacccugcagugua

SEQ ID NO: 617643 - RNA, 19 nt, Homo sapiens
  misc_RNA (1)...(19): siRNA sense strand
gcuacuggacaaagaaugg

SEQ ID NO: 617644 - RNA, 19 nt, Homo sapiens
  misc_RNA (1)...(19): siRNA sense strand
aaaaccaacucuaccaaca

SEQ ID NO: 617645 - RNA, 19 nt, Homo sapiens
  misc_RNA (1)...(19): siRNA sense strand
gcaacauggaguacaggau

SEQ ID NO: 617646 - RNA, 19 nt, Homo sapiens
  misc_RNA (1)...(19): siRNA sense strand
cgagaaggcuggcuauuga

SEQ ID NO: 617647 - RNA, 19 nt, Homo sapiens
  misc_RNA (1)...(19): siRNA sense strand
gaacacuugugaagacauu

SEQ ID NO: 617648 - RNA, 19 nt, Homo sapiens
  misc_RNA (1)...(19): siRNA sense strand
ggagagagaugaguuuaau

SEQ ID NO: 617649 - RNA, 19 nt, Homo sapiens
  misc_RNA (1)...(19): siRNA sense strand
gaagaacacuugugaagac

SEQ ID NO: 617650 - RNA, 19 nt, Homo sapiens
  misc_RNA (1)...(19): siRNA sense strand
caacugccuuuacuacuuu

SEQ ID NO: 617651 - RNA, 19 nt, Homo sapiens
  misc_RNA (1)...(19): siRNA sense strand
ggaaucaucccuuuagaga

SEQ ID NO: 617652 - RNA, 19 nt, Homo sapiens
  misc_RNA (1)...(19): siRNA sense strand
gacaauaaagaccaaguua

SEQ ID NO: 617653 - RNA, 19 nt, Homo sapiens
  misc_RNA (1)...(19): siRNA sense strand
gguaaagacuuggaagaga

SEQ ID NO: 617654 - RNA, 19 nt, Homo sapiens
  misc_RNA (1)...(19): siRNA sense strand
gaagagacgcugguucauu

SEQ ID NO: 617655 - RNA, 19 nt, Homo sapiens
  misc_RNA (1)...(19): siRNA sense strand
agaacgaccuccugaagaa

SEQ ID NO: 617656 - RNA, 19 nt, Homo sapiens
  misc_RNA (1)...(19): siRNA sense strand
gugaagacauugcccaguu

SEQ ID NO: 617657 - RNA, 19 nt, Homo sapiens
  misc_RNA (1)...(19): siRNA sense strand
gcgaagggcucaacaagac

SEQ ID NO: 617658 - RNA, 19 nt, Homo sapiens
  misc_RNA (1)...(19): siRNA sense strand
gagaugaguuuaauaucca

SEQ ID NO: 617659 - RNA, 19 nt, Homo sapiens
  misc_RNA (1)...(19): siRNA sense strand
gcagaaguagcuaaugaaa

SEQ ID NO: 617660 - RNA, 19 nt, Homo sapiens
  misc_RNA (1)...(19): siRNA sense strand
aaucaucccuuuagagaau

SEQ ID NO: 617661 - RNA, 19 nt, Homo sapiens
  misc_RNA (1)...(19): siRNA sense strand
ugaguucacugaucuuaau

SEQ ID NO: 617662 - RNA, 19 nt, Homo sapiens
  misc_RNA (1)...(19): siRNA sense strand
gagaaggaggaguggauua

SEQ ID NO: 617663 - RNA, 19 nt, Homo sapiens
  misc_RNA (1)...(19): siRNA sense strand
gucaagaacuggagaacau

SEQ ID NO: 617664 - RNA, 19 nt, Homo sapiens
  misc_RNA (1)...(19): siRNA sense strand
aagagacgcugguucauuc

SEQ ID NO: 617665 - RNA, 19 nt, Homo sapiens
  misc_RNA (1)...(19): siRNA sense strand
agacauugcccaguucuua

SEQ ID NO: 617666 - RNA, 19 nt, Homo sapiens
  misc_RNA (1)...(19): siRNA sense strand
gcagaggaacaaacaggua

SEQ ID NO: 617667 - RNA, 19 nt, Homo sapiens
  misc_RNA (1)...(19): siRNA sense strand
gcccaguucuuauauaaag

SEQ ID NO: 617668 - RNA, 19 nt, Homo sapiens
  misc_RNA (1)...(19): siRNA sense strand
gaagaucgaccggaugaug

SEQ ID NO: 617669 - RNA, 19 nt, Homo sapiens
  misc_RNA (1)...(19): siRNA sense strand
gggauccaguucuuaauag

SEQ ID NO: 617670 - RNA, 19 nt, Homo sapiens
  misc_RNA (1)...(19): siRNA sense strand
acaacugccuuuacuacuu

SEQ ID NO: 617671 - RNA, 19 nt, Homo sapiens
  misc_RNA (1)...(19): siRNA sense strand
gagaacgaccuccugaaga

SEQ ID NO: 617672 - RNA, 19 nt, Homo sapiens
  misc_RNA (1)...(19): siRNA sense strand
ggauccaguucuuaauaga

SEQ ID NO: 617673 - RNA, 19 nt, Homo sapiens
  misc_RNA (1)...(19): siRNA sense strand
gagagagaugaguuuaaua

SEQ ID NO: 617674 - RNA, 19 nt, Homo sapiens
  misc_RNA (1)...(19): siRNA sense strand
ccagguucuucaugcauuu

SEQ ID NO: 617675 - RNA, 19 nt, Homo sapiens
  misc_RNA (1)...(19): siRNA sense strand
ugaccucacucacacuuuc

SEQ ID NO: 617676 - RNA, 19 nt, Homo sapiens
  misc_RNA (1)...(19): siRNA sense strand
gaacaccagucugcacaac

SEQ ID NO: 617677 - RNA, 19 nt, Homo sapiens
  misc_RNA (1)...(19): siRNA sense strand
cagaagaucgaccggauga

SEQ ID NO: 617678 - RNA, 19 nt, Homo sapiens
  misc_RNA (1)...(19): siRNA sense strand
gggaaugaccucacucaca

SEQ ID NO: 617679 - RNA, 19 nt, Homo sapiens
  misc_RNA (1)...(19): siRNA sense strand
gggagagagaugaguuuaa

SEQ ID NO: 617680 - RNA, 19 nt, Homo sapiens
  misc_RNA (1)...(19): siRNA sense strand
gcugguucauucugacuga

SEQ ID NO: 617681 - RNA, 19 nt, Homo sapiens
  misc_RNA (1)...(19): siRNA sense strand
gcugaaggaugagauagca

SEQ ID NO: 617682 - RNA, 19 nt, Homo sapiens
  misc_RNA (1)...(19): siRNA sense strand
ugaagacauugcccaguuc

SEQ ID NO: 617683 - RNA, 19 nt, Homo sapiens
  misc_RNA (1)...(19): siRNA sense strand
acagcuacguucccaguga

SEQ ID NO: 617684 - RNA, 19 nt, Homo sapiens
  misc_RNA (1)...(19): siRNA sense strand
uugcccaguucuuauauaa

SEQ ID NO: 617685 - RNA, 19 nt, Homo sapiens
  misc_RNA (1)...(19): siRNA sense strand
aaacugcuuugagcuuuau

SEQ ID NO: 617686 - RNA, 19 nt, Homo sapiens
  misc_RNA (1)...(19): siRNA sense strand
ucaaagauaagcccacugu

SEQ ID NO: 617687 - RNA, 19 nt, Homo sapiens
  misc_RNA (1)...(19): siRNA sense strand
gugcaauaauggcguguuc

SEQ ID NO: 617688 - RNA, 19 nt, Homo sapiens
  misc_RNA (1)...(19): siRNA sense strand
gaaucaucccuuuagagaa

SEQ ID NO: 617689 - RNA, 19 nt, Homo sapiens
  misc_RNA (1)...(19): siRNA sense strand
agacgcugguucauucuga

SEQ ID NO: 617690 - RNA, 19 nt, Homo sapiens
  misc_RNA (1)...(19): siRNA sense strand
gcacaaccccaaugucaaa

SEQ ID NO: 617691 - RNA, 19 nt, Homo sapiens
  misc_RNA (1)...(19): siRNA sense strand
ggaggacgacagcuacguu

SEQ ID NO: 617692 - RNA, 19 nt, Homo sapiens
  misc_RNA (1)...(19): siRNA sense strand
ugacugacaacugccuuua

SEQ ID NO: 617693 - RNA, 19 nt, Homo sapiens
  misc_RNA (1)...(19): siRNA sense strand
gcccagcgauauugucagu

SEQ ID NO: 617694 - RNA, 19 nt, Homo sapiens
  misc_RNA (1)...(19): siRNA sense strand
ggaugagauagcagaagua

SEQ ID NO: 617695 - RNA, 19 nt, Homo sapiens
  misc_RNA (1)...(19): siRNA sense strand
gaguggauuaagugcauua

SEQ ID NO: 617696 - RNA, 19 nt, Homo sapiens
  misc_RNA (1)...(19): siRNA sense strand
agaaggaggaguggauuaa

SEQ ID NO: 617697 - RNA, 19 nt, Homo sapiens
  misc_RNA (1)...(19): siRNA sense strand
ggagaaggaggaguggauu

SEQ ID NO: 617698 - RNA, 19 nt, Homo sapiens
  misc_RNA (1)...(19): siRNA sense strand
cgacaauaaagaccaaguu

SEQ ID NO: 617699 - RNA, 19 nt, Homo sapiens
  misc_RNA (1)...(19): siRNA sense strand
agacagccaucggcgacua

SEQ ID NO: 617700 - RNA, 19 nt, Homo sapiens
  misc_RNA (1)...(19): siRNA sense strand
ugagauagcagaaguagcu

SEQ ID NO: 617701 - RNA, 19 nt, Homo sapiens
  misc_RNA (1)...(19): siRNA sense strand
gaaggaugagauagcagaa

SEQ ID NO: 617702 - RNA, 19 nt, Homo sapiens
  misc_RNA (1)...(19): siRNA sense strand
ugaagaacacuugugaaga

SEQ ID NO: 617703 - RNA, 19 nt, Homo sapiens
  misc_RNA (1)...(19): siRNA sense strand
ggaguggauuaagugcauu

SEQ ID NO: 617704 - RNA, 19 nt, Homo sapiens
  misc_RNA (1)...(19): siRNA sense strand
guggaaucaucccuuuaga

SEQ ID NO: 617705 - RNA, 19 nt, Homo sapiens
  misc_RNA (1)...(19): siRNA sense strand
gaggcugaaggaugagaua

SEQ ID NO: 617706 - RNA, 19 nt, Homo sapiens
  misc_RNA (1)...(19): siRNA sense strand
gagaaggcuggcuauugaa

SEQ ID NO: 617707 - RNA, 19 nt, Homo sapiens
  misc_RNA (1)...(19): siRNA sense strand
cagaagacgacgggaauga

SEQ ID NO: 617708 - RNA, 19 nt, Homo sapiens
  misc_RNA (1)...(19): siRNA sense strand
caugaguucacugaucuua

SEQ ID NO: 617709 - RNA, 19 nt, Homo sapiens
  misc_RNA (1)...(19): siRNA sense strand
agagaugaguuuaauaucc

SEQ ID NO: 617710 - RNA, 19 nt, Homo sapiens
  misc_RNA (1)...(19): siRNA sense strand
gaaguagcuaaugaaauug

SEQ ID NO: 617711 - RNA, 19 nt, Homo sapiens
  misc_RNA (1)...(19): siRNA sense strand
aaggaggaguggauuaagu

SEQ ID NO: 617712 - RNA, 19 nt, Homo sapiens
  misc_RNA (1)...(19): siRNA sense strand
gcaauaauggcguguucca

SEQ ID NO: 617713 - RNA, 19 nt, Homo sapiens
  misc_RNA (1)...(19): siRNA sense strand
gagagaugaguuuaauauc

SEQ ID NO: 617714 - RNA, 19 nt, Homo sapiens
  misc_RNA (1)...(19): siRNA sense strand
gacauugcccaguucuuau

SEQ ID NO: 617715 - RNA, 19 nt, Homo sapiens
  misc_RNA (1)...(19): siRNA sense strand
cgacgggaaugaccucacu

SEQ ID NO: 617716 - RNA, 19 nt, Homo sapiens
  misc_RNA (1)...(19): siRNA sense strand
uugaguauaccacggauaa

SEQ ID NO: 617717 - RNA, 19 nt, Homo sapiens
  misc_RNA (1)...(19): siRNA sense strand
ugacaacugccuuuacuac

SEQ ID NO: 617718 - RNA, 19 nt, Homo sapiens
  misc_RNA (1)...(19): siRNA sense strand
ccgagaaggcuggcuauug

SEQ ID NO: 617719 - RNA, 19 nt, Homo sapiens
  misc_RNA (1)...(19): siRNA sense strand
acauugcccaguucuuaua

SEQ ID NO: 617720 - RNA, 19 nt, Homo sapiens
  misc_RNA (1)...(19): siRNA sense strand
gaugagauagcagaaguag

SEQ ID NO: 617721 - RNA, 19 nt, Homo sapiens
  misc_RNA (1)...(19): siRNA sense strand
ucacucacacuuucuucaa

SEQ ID NO: 617722 - RNA, 19 nt, Homo sapiens
  misc_RNA (1)...(19): siRNA sense strand
gcagaggagcgucaagaac

SEQ ID NO: 617723 - RNA, 19 nt, Homo sapiens
  misc_RNA (1)...(19): siRNA sense strand
cagaaguagcuaaugaaau

SEQ ID NO: 617724 - RNA, 19 nt, Homo sapiens
  misc_RNA (1)...(19): siRNA sense strand
gaaggaggaguggauuaag

SEQ ID NO: 617725 - RNA, 19 nt, Homo sapiens
  misc_RNA (1)...(19): siRNA sense strand
uaaagaccaaguuaucaag

SEQ ID NO: 617726 - RNA, 19 nt, Homo sapiens
  misc_RNA (1)...(19): siRNA sense strand
uggaagagacgcugguuca

SEQ ID NO: 617727 - RNA, 19 nt, Homo sapiens
  misc_RNA (1)...(19): siRNA sense strand
cugcaugaguucacugauc

SEQ ID NO: 617728 - RNA, 19 nt, Homo sapiens
  misc_RNA (1)...(19): siRNA sense strand
ugaguuuaauauccagguu

SEQ ID NO: 617729 - RNA, 19 nt, Homo sapiens
  misc_RNA (1)...(19): siRNA sense strand
ggcgaagggcucaacaaga

SEQ ID NO: 617730 - RNA, 19 nt, Homo sapiens
  misc_RNA (1)...(19): siRNA sense strand
aggaugagauagcagaagu

SEQ ID NO: 617731 - RNA, 19 nt, Homo sapiens
  misc_RNA (1)...(19): siRNA sense strand
cagaggagcgucaagaacu

SEQ ID NO: 617732 - RNA, 19 nt, Homo sapiens
  misc_RNA (1)...(19): siRNA sense strand
guggcaggguaaagacuug

SEQ ID NO: 617733 - RNA, 19 nt, Homo sapiens
  misc_RNA (1)...(19): siRNA sense strand
agaaggcuggcuauugaaa

SEQ ID NO: 617734 - RNA, 19 nt, Homo sapiens
  misc_RNA (1)...(19): siRNA sense strand
cagcagaggagcgucaaga

SEQ ID NO: 617735 - RNA, 19 nt, Homo sapiens
  misc_RNA (1)...(19): siRNA sense strand
ccggagaggcccagaagau

SEQ ID NO: 617736 - RNA, 19 nt, Homo sapiens
  misc_RNA (1)...(19): siRNA sense strand
aaaaggggauccaguucuu

SEQ ID NO: 617737 - RNA, 19 nt, Homo sapiens
  misc_RNA (1)...(19): siRNA sense strand
agaggagcgucaagaacug

SEQ ID NO: 617738 - RNA, 19 nt, Homo sapiens
  misc_RNA (1)...(19): siRNA sense strand
gagcuccuccggaaucucu

SEQ ID NO: 617739 - RNA, 19 nt, Homo sapiens
  misc_RNA (1)...(19): siRNA sense strand
gagaggcccagaagaucga

SEQ ID NO: 617740 - RNA, 19 nt, Homo sapiens
  misc_RNA (1)...(19): siRNA sense strand
gccaugaaccgaggcauca

SEQ ID NO: 617741 - RNA, 19 nt, Homo sapiens
  misc_RNA (1)...(19): siRNA sense strand
cccguggaaucaucccuuu

SEQ ID NO: 617742 - RNA, 19 nt, Homo sapiens
  misc_RNA (1)...(19): siRNA sense strand
gauccacagaggaaaggaa

SEQ ID NO: 617743 - RNA, 19 nt, Homo sapiens
  misc_RNA (1)...(19): siRNA sense strand
gcaggguaaagacuuggaa

SEQ ID NO: 617744 - RNA, 19 nt, Homo sapiens
  misc_RNA (1)...(19): siRNA sense strand
gaagacauugcccaguucu

SEQ ID NO: 617745 - RNA, 19 nt, Homo sapiens
  misc_RNA (1)...(19): siRNA sense strand
acucacacuuucuucaauc

SEQ ID NO: 617746 - RNA, 19 nt, Homo sapiens
  misc_RNA (1)...(19): siRNA sense strand
cgagaaggcuggcuauuga

SEQ ID NO: 617747 - RNA, 19 nt, Homo sapiens
  misc_RNA (1)...(19): siRNA sense strand
gaacacuugugaagacauu

SEQ ID NO: 617748 - RNA, 19 nt, Homo sapiens
  misc_RNA (1)...(19): siRNA sense strand
ggagagagaugaguuuaau

SEQ ID NO: 617749 - RNA, 19 nt, Homo sapiens
  misc_RNA (1)...(19): siRNA sense strand
gaagaacacuugugaagac

SEQ ID NO: 617750 - RNA, 19 nt, Homo sapiens
  misc_RNA (1)...(19): siRNA sense strand
caacugccuuuacuacuuu

SEQ ID NO: 617751 - RNA, 19 nt, Homo sapiens
  misc_RNA (1)...(19): siRNA sense strand
ggaaucaucccuuuagaga

SEQ ID NO: 617752 - RNA, 19 nt, Homo sapiens
  misc_RNA (1)...(19): siRNA sense strand
gacaauaaagaccaaguua

SEQ ID NO: 617753 - RNA, 19 nt, Homo sapiens
  misc_RNA (1)...(19): siRNA sense strand
gguaaagacuuggaagaga

SEQ ID NO: 617754 - RNA, 19 nt, Homo sapiens
  misc_RNA (1)...(19): siRNA sense strand
gaagagacgcugguucauu

SEQ ID NO: 617755 - RNA, 19 nt, Homo sapiens
  misc_RNA (1)...(19): siRNA sense strand
agaacgaccuccugaagaa

SEQ ID NO: 617756 - RNA, 19 nt, Homo sapiens
  misc_RNA (1)...(19): siRNA sense strand
gugaagacauugcccaguu

SEQ ID NO: 617757 - RNA, 19 nt, Homo sapiens
  misc_RNA (1)...(19): siRNA sense strand
gcgaagggcucaacaagac

SEQ ID NO: 617758 - RNA, 19 nt, Homo sapiens
  misc_RNA (1)...(19): siRNA sense strand
gagaugaguuuaauaucca

SEQ ID NO: 617759 - RNA, 19 nt, Homo sapiens
  misc_RNA (1)...(19): siRNA sense strand
gcagaaguagcuaaugaaa

SEQ ID NO: 617760 - RNA, 19 nt, Homo sapiens
  misc_RNA (1)...(19): siRNA sense strand
aaucaucccuuuagagaau

SEQ ID NO: 617761 - RNA, 19 nt, Homo sapiens
  misc_RNA (1)...(19): siRNA sense strand
ugaguucacugaucuuaau

SEQ ID NO: 617762 - RNA, 19 nt, Homo sapiens
  misc_RNA (1)...(19): siRNA sense strand
gagaaggaggaguggauua

SEQ ID NO: 617763 - RNA, 19 nt, Homo sapiens
  misc_RNA (1)...(19): siRNA sense strand
gucaagaacuggagaacau

SEQ ID NO: 617764 - RNA, 19 nt, Homo sapiens
  misc_RNA (1)...(19): siRNA sense strand
aagagacgcugguucauuc

SEQ ID NO: 617765 - RNA, 19 nt, Homo sapiens
  misc_RNA (1)...(19): siRNA sense strand
agacauugcccaguucuua

SEQ ID NO: 617766 - RNA, 19 nt, Homo sapiens
  misc_RNA (1)...(19): siRNA sense strand
gcagaggaacaaacaggua

SEQ ID NO: 617767 - RNA, 19 nt, Homo sapiens
  misc_RNA (1)...(19): siRNA sense strand
gcccaguucuuauauaaag

SEQ ID NO: 617768 - RNA, 19 nt, Homo sapiens
  misc_RNA (1)...(19): siRNA sense strand
gaagaucgaccggaugaug

SEQ ID NO: 617769 - RNA, 19 nt, Homo sapiens
  misc_RNA (1)...(19): siRNA sense strand
gggauccaguucuuaauag

SEQ ID NO: 617770 - RNA, 19 nt, Homo sapiens
  misc_RNA (1)...(19): siRNA sense strand
acaacugccuuuacuacuu

SEQ ID NO: 617771 - RNA, 19 nt, Homo sapiens
  misc_RNA (1)...(19): siRNA sense strand
gagaacgaccuccugaaga

SEQ ID NO: 617772 - RNA, 19 nt, Homo sapiens
  misc_RNA (1)...(19): siRNA sense strand
ggauccaguucuuaauaga

SEQ ID NO: 617773 - RNA, 19 nt, Homo sapiens
  misc_RNA (1)...(19): siRNA sense strand
gagagagaugaguuuaaua

SEQ ID NO: 617774 - RNA, 19 nt, Homo sapiens
  misc_RNA (1)...(19): siRNA sense strand
ccagguucuucaugcauuu

SEQ ID NO: 617775 - RNA, 19 nt, Homo sapiens
  misc_RNA (1)...(19): siRNA sense strand
ugaccucacucacacuuuc

SEQ ID NO: 617776 - RNA, 19 nt, Homo sapiens
  misc_RNA (1)...(19): siRNA sense strand
gaacaccagucugcacaac

SEQ ID NO: 617777 - RNA, 19 nt, Homo sapiens
  misc_RNA (1)...(19): siRNA sense strand
cagaagaucgaccggauga

SEQ ID NO: 617778 - RNA, 19 nt, Homo sapiens
  misc_RNA (1)...(19): siRNA sense strand
gggaaugaccucacucaca

SEQ ID NO: 617779 - RNA, 19 nt, Homo sapiens
  misc_RNA (1)...(19): siRNA sense strand
gggagagagaugaguuuaa

SEQ ID NO: 617780 - RNA, 19 nt, Homo sapiens
  misc_RNA (1)...(19): siRNA sense strand
gcugguucauucugacuga

SEQ ID NO: 617781 - RNA, 19 nt, Homo sapiens
  misc_RNA (1)...(19): siRNA sense strand
gcugaaggaugagauagca

SEQ ID NO: 617782 - RNA, 19 nt, Homo sapiens
  misc_RNA (1)...(19): siRNA sense strand
ugaagacauugcccaguuc

SEQ ID NO: 617783 - RNA, 19 nt, Homo sapiens
  misc_RNA (1)...(19): siRNA sense strand
acagcuacguucccaguga

SEQ ID NO: 617784 - RNA, 19 nt, Homo sapiens
  misc_RNA (1)...(19): siRNA sense strand
uugcccaguucuuauauaa

SEQ ID NO: 617785 - RNA, 19 nt, Homo sapiens
  misc_RNA (1)...(19): siRNA sense strand
aaacugcuuugagcuuuau

SEQ ID NO: 617786 - RNA, 19 nt, Homo sapiens
  misc_RNA (1)...(19): siRNA sense strand
ucaaagauaagcccacugu

SEQ ID NO: 617787 - RNA, 19 nt, Homo sapiens
  misc_RNA (1)...(19): siRNA sense strand
gugcaauaauggcguguuc

SEQ ID NO: 617788 - RNA, 19 nt, Homo sapiens
  misc_RNA (1)...(19): siRNA sense strand
gaaucaucccuuuagagaa

SEQ ID NO: 617789 - RNA, 19 nt, Homo sapiens
  misc_RNA (1)...(19): siRNA sense strand
agacgcugguucauucuga

SEQ ID NO: 617790 - RNA, 19 nt, Homo sapiens
  misc_RNA (1)...(19): siRNA sense strand
gcacaaccccaaugucaaa

SEQ ID NO: 617791 - RNA, 19 nt, Homo sapiens
  misc_RNA (1)...(19): siRNA sense strand
ggaggacgacagcuacguu

SEQ ID NO: 617792 - RNA, 19 nt, Homo sapiens
  misc_RNA (1)...(19): siRNA sense strand
ugacugacaacugccuuua

SEQ ID NO: 617793 - RNA, 19 nt, Homo sapiens
  misc_RNA (1)...(19): siRNA sense strand
gcccagcgauauugucagu

SEQ ID NO: 617794 - RNA, 19 nt, Homo sapiens
  misc_RNA (1)...(19): siRNA sense strand
ggaugagauagcagaagua

SEQ ID NO: 617795 - RNA, 19 nt, Homo sapiens
  misc_RNA (1)...(19): siRNA sense strand
gaguggauuaagugcauua

SEQ ID NO: 617796 - RNA, 19 nt, Homo sapiens
  misc_RNA (1)...(19): siRNA sense strand
agaaggaggaguggauuaa

SEQ ID NO: 617797 - RNA, 19 nt, Homo sapiens
  misc_RNA (1)...(19): siRNA sense strand
ggagaaggaggaguggauu

SEQ ID NO: 617798 - RNA, 19 nt, Homo sapiens
  misc_RNA (1)...(19): siRNA sense strand
cgacaauaaagaccaaguu

SEQ ID NO: 617799 - RNA, 19 nt, Homo sapiens
  misc_RNA (1)...(19): siRNA sense strand
agacagccaucggcgacua

SEQ ID NO: 617800 - RNA, 19 nt, Homo sapiens
  misc_RNA (1)...(19): siRNA sense strand
ugagauagcagaaguagcu

SEQ ID NO: 617801 - RNA, 19 nt, Homo sapiens
  misc_RNA (1)...(19): siRNA sense strand
gaaggaugagauagcagaa

SEQ ID NO: 617802 - RNA, 19 nt, Homo sapiens
  misc_RNA (1)...(19): siRNA sense strand
ugaagaacacuugugaaga

SEQ ID NO: 617803 - RNA, 19 nt, Homo sapiens
  misc_RNA (1)...(19): siRNA sense strand
ggaguggauuaagugcauu

SEQ ID NO: 617804 - RNA, 19 nt, Homo sapiens
  misc_RNA (1)...(19): siRNA sense strand
guggaaucaucccuuuaga

SEQ ID NO: 617805 - RNA, 19 nt, Homo sapiens
  misc_RNA (1)...(19): siRNA sense strand
gaggcugaaggaugagaua

SEQ ID NO: 617806 - RNA, 19 nt, Homo sapiens
  misc_RNA (1)...(19): siRNA sense strand
gagaaggcuggcuauugaa

SEQ ID NO: 617807 - RNA, 19 nt, Homo sapiens
  misc_RNA (1)...(19): siRNA sense strand
cagaagacgacgggaauga

SEQ ID NO: 617808 - RNA, 19 nt, Homo sapiens
  misc_RNA (1)...(19): siRNA sense strand
caugaguucacugaucuua

SEQ ID NO: 617809 - RNA, 19 nt, Homo sapiens
  misc_RNA (1)...(19): siRNA sense strand
agagaugaguuuaauaucc

SEQ ID NO: 617810 - RNA, 19 nt, Homo sapiens
  misc_RNA (1)...(19): siRNA sense strand
gaaguagcuaaugaaauug

SEQ ID NO: 617811 - RNA, 19 nt, Homo sapiens
  misc_RNA (1)...(19): siRNA sense strand
aaggaggaguggauuaagu

SEQ ID NO: 617812 - RNA, 19 nt, Homo sapiens
  misc_RNA (1)...(19): siRNA sense strand
gcaauaauggcguguucca

SEQ ID NO: 617813 - RNA, 19 nt, Homo sapiens
  misc_RNA (1)...(19): siRNA sense strand
gagagaugaguuuaauauc

SEQ ID NO: 617814 - RNA, 19 nt, Homo sapiens
  misc_RNA (1)...(19): siRNA sense strand
gacauugcccaguucuuau

SEQ ID NO: 617815 - RNA, 19 nt, Homo sapiens
  misc_RNA (1)...(19): siRNA sense strand
cgacgggaaugaccucacu

SEQ ID NO: 617816 - RNA, 19 nt, Homo sapiens
  misc_RNA (1)...(19): siRNA sense strand
uugaguauaccacggauaa

SEQ ID NO: 617817 - RNA, 19 nt, Homo sapiens
  misc_RNA (1)...(19): siRNA sense strand
ugacaacugccuuuacuac

SEQ ID NO: 617818 - RNA, 19 nt, Homo sapiens
  misc_RNA (1)...(19): siRNA sense strand
ccgagaaggcuggcuauug

SEQ ID NO: 617819 - RNA, 19 nt, Homo sapiens
  misc_RNA (1)...(19): siRNA sense strand
acauugcccaguucuuaua

SEQ ID NO: 617820 - RNA, 19 nt, Homo sapiens
  misc_RNA (1)...(19): siRNA sense strand
gaugagauagcagaaguag

SEQ ID NO: 617821 - RNA, 19 nt, Homo sapiens
  misc_RNA (1)...(19): siRNA sense strand
ucacucacacuuucuucaa

SEQ ID NO: 617822 - RNA, 19 nt, Homo sapiens
  misc_RNA (1)...(19): siRNA sense strand
gcagaggagcgucaagaac

SEQ ID NO: 617823 - RNA, 19 nt, Homo sapiens
  misc_RNA (1)...(19): siRNA sense strand
cagaaguagcuaaugaaau

SEQ ID NO: 617824 - RNA, 19 nt, Homo sapiens
  misc_RNA (1)...(19): siRNA sense strand
gaaggaggaguggauuaag

SEQ ID NO: 617825 - RNA, 19 nt, Homo sapiens
  misc_RNA (1)...(19): siRNA sense strand
uaaagaccaaguuaucaag

SEQ ID NO: 617826 - RNA, 19 nt, Homo sapiens
  misc_RNA (1)...(19): siRNA sense strand
uggaagagacgcugguuca

SEQ ID NO: 617827 - RNA, 19 nt, Homo sapiens
  misc_RNA (1)...(19): siRNA sense strand
cugcaugaguucacugauc

SEQ ID NO: 617828 - RNA, 19 nt, Homo sapiens
  misc_RNA (1)...(19): siRNA sense strand
ugaguuuaauauccagguu

SEQ ID NO: 617829 - RNA, 19 nt, Homo sapiens
  misc_RNA (1)...(19): siRNA sense strand
ggcgaagggcucaacaaga

SEQ ID NO: 617830 - RNA, 19 nt, Homo sapiens
  misc_RNA (1)...(19): siRNA sense strand
aggaugagauagcagaagu

SEQ ID NO: 617831 - RNA, 19 nt, Homo sapiens
  misc_RNA (1)...(19): siRNA sense strand
cagaggagcgucaagaacu

SEQ ID NO: 617832 - RNA, 19 nt, Homo sapiens
  misc_RNA (1)...(19): siRNA sense strand
guggcaggguaaagacuug

SEQ ID NO: 617833 - RNA, 19 nt, Homo sapiens
  misc_RNA (1)...(19): siRNA sense strand
agaaggcuggcuauugaaa

SEQ ID NO: 617834 - RNA, 19 nt, Homo sapiens
  misc_RNA (1)...(19): siRNA sense strand
cagcagaggagcgucaaga

SEQ ID NO: 617835 - RNA, 19 nt, Homo sapiens
  misc_RNA (1)...(19): siRNA sense strand
ccggagaggcccagaagau

SEQ ID NO: 617836 - RNA, 19 nt, Homo sapiens
  misc_RNA (1)...(19): siRNA sense strand
aaaaggggauccaguucuu

SEQ ID NO: 617837 - RNA, 19 nt, Homo sapiens
  misc_RNA (1)...(19): siRNA sense strand
agaggagcgucaagaacug

SEQ ID NO: 617838 - RNA, 19 nt, Homo sapiens
  misc_RNA (1)...(19): siRNA sense strand
gagcuccuccggaaucucu

SEQ ID NO: 617839 - RNA, 19 nt, Homo sapiens
  misc_RNA (1)...(19): siRNA sense strand
gagaggcccagaagaucga

SEQ ID NO: 617840 - RNA, 19 nt, Homo sapiens
  misc_RNA (1)...(19): siRNA sense strand
gccaugaaccgaggcauca

SEQ ID NO: 617841 - RNA, 19 nt, Homo sapiens
  misc_RNA (1)...(19): siRNA sense strand
cccguggaaucaucccuuu

SEQ ID NO: 617842 - RNA, 19 nt, Homo sapiens
  misc_RNA (1)...(19): siRNA sense strand
gauccacagaggaaaggaa

SEQ ID NO: 617843 - RNA, 19 nt, Homo sapiens
  misc_RNA (1)...(19): siRNA sense strand
gcaggguaaagacuuggaa

SEQ ID NO: 617844 - RNA, 19 nt, Homo sapiens
  misc_RNA (1)...(19): siRNA sense strand
gaagacauugcccaguucu

SEQ ID NO: 617845 - RNA, 19 nt, Homo sapiens
  misc_RNA (1)...(19): siRNA sense strand
acucacacuuucuucaauc

SEQ ID NO: 617846 - RNA, 19 nt, Homo sapiens
  misc_RNA (1)...(19): siRNA sense strand
gaaaugagcccuucaagau

SEQ ID NO: 617847 - RNA, 19 nt, Homo sapiens
  misc_RNA (1)...(19): siRNA sense strand
ggaagaaguucaacaugga

SEQ ID NO: 617848 - RNA, 19 nt, Homo sapiens
  misc_RNA (1)...(19): siRNA sense strand
ggauggagcuggagaacau

SEQ ID NO: 617849 - RNA, 19 nt, Homo sapiens
  misc_RNA (1)...(19): siRNA sense strand
ggauuucagucaagaagaa

SEQ ID NO: 617850 - RNA, 19 nt, Homo sapiens
  misc_RNA (1)...(19): siRNA sense strand
gaacugcuuugaacuuuac

SEQ ID NO: 617851 - RNA, 19 nt, Homo sapiens
  misc_RNA (1)...(19): siRNA sense strand
cgaacugcuuugaacuuua

SEQ ID NO: 617852 - RNA, 19 nt, Homo sapiens
  misc_RNA (1)...(19): siRNA sense strand
caacaccagucuccacaau

SEQ ID NO: 617853 - RNA, 19 nt, Homo sapiens
  misc_RNA (1)...(19): siRNA sense strand
gaacacacccgaggagauc

SEQ ID NO: 617854 - RNA, 19 nt, Homo sapiens
  misc_RNA (1)...(19): siRNA sense strand
caacugccucuacuacuuu

SEQ ID NO: 617855 - RNA, 19 nt, Homo sapiens
  misc_RNA (1)...(19): siRNA sense strand
uggcagugcuccaugcuuu

SEQ ID NO: 617856 - RNA, 19 nt, Homo sapiens
  misc_RNA (1)...(19): siRNA sense strand
gcaaugggcaggaagaagu

SEQ ID NO: 617857 - RNA, 19 nt, Homo sapiens
  misc_RNA (1)...(19): siRNA sense strand
aaaccgaacugcuuugaac

SEQ ID NO: 617858 - RNA, 19 nt, Homo sapiens
  misc_RNA (1)...(19): siRNA sense strand
aaugagcccuucaagauuc

SEQ ID NO: 617859 - RNA, 19 nt, Homo sapiens
  misc_RNA (1)...(19): siRNA sense strand
gcaggaagaaguucaacau

SEQ ID NO: 617860 - RNA, 19 nt, Homo sapiens
  misc_RNA (1)...(19): siRNA sense strand
ccgaacugcuuugaacuuu

SEQ ID NO: 617861 - RNA, 19 nt, Homo sapiens
  misc_RNA (1)...(19): siRNA sense strand
acaacugccucuacuacuu

SEQ ID NO: 617862 - RNA, 19 nt, Homo sapiens
  misc_RNA (1)...(19): siRNA sense strand
cgaaaugagcccuucaaga

SEQ ID NO: 617863 - RNA, 19 nt, Homo sapiens
  misc_RNA (1)...(19): siRNA sense strand
ggaaaccgaacugcuuuga

SEQ ID NO: 617864 - RNA, 19 nt, Homo sapiens
  misc_RNA (1)...(19): siRNA sense strand
gaaaccgaacugcuuugaa

SEQ ID NO: 617865 - RNA, 19 nt, Homo sapiens
  misc_RNA (1)...(19): siRNA sense strand
ccacagacacgugcuaugu

SEQ ID NO: 617866 - RNA, 19 nt, Homo sapiens
  misc_RNA (1)...(19): siRNA sense strand
gagaaggacgaguggauca

SEQ ID NO: 617867 - RNA, 19 nt, Homo sapiens
  misc_RNA (1)...(19): siRNA sense strand
aaaugagcccuucaagauu

SEQ ID NO: 617868 - RNA, 19 nt, Homo sapiens
  misc_RNA (1)...(19): siRNA sense strand
gcugguuuauccucacaga

SEQ ID NO: 617869 - RNA, 19 nt, Homo sapiens
  misc_RNA (1)...(19): siRNA sense strand
gcucaucaaagccugcaaa

SEQ ID NO: 617870 - RNA, 19 nt, Homo sapiens
  misc_RNA (1)...(19): siRNA sense strand
ggagaggcccagaaaauug

SEQ ID NO: 617871 - RNA, 19 nt, Homo sapiens
  misc_RNA (1)...(19): siRNA sense strand
ggagagggaagaacugaac

SEQ ID NO: 617872 - RNA, 19 nt, Homo sapiens
  misc_RNA (1)...(19): siRNA sense strand
gccgagugguggagggaaa

SEQ ID NO: 617873 - RNA, 19 nt, Homo sapiens
  misc_RNA (1)...(19): siRNA sense strand
gguuuauccucacagacaa

SEQ ID NO: 617874 - RNA, 19 nt, Homo sapiens
  misc_RNA (1)...(19): siRNA sense strand
ccacgcaggaggagaagga

SEQ ID NO: 617875 - RNA, 19 nt, Homo sapiens
  misc_RNA (1)...(19): siRNA sense strand
acagacaacugccucuacu

SEQ ID NO: 617876 - RNA, 19 nt, Homo sapiens
  misc_RNA (1)...(19): siRNA sense strand
gccaaugagggcaguaaga

SEQ ID NO: 617877 - RNA, 19 nt, Homo sapiens
  misc_RNA (1)...(19): siRNA sense strand
guccuucgccgucaucaug

SEQ ID NO: 617878 - RNA, 19 nt, Homo sapiens
  misc_RNA (1)...(19): siRNA sense strand
uacgacagcauccgaaaug

SEQ ID NO: 617879 - RNA, 19 nt, Homo sapiens
  misc_RNA (1)...(19): siRNA sense strand
guacgacagcauccgaaau

SEQ ID NO: 617880 - RNA, 19 nt, Homo sapiens
  misc_RNA (1)...(19): siRNA sense strand
uuguggaucugcaugaguu

SEQ ID NO: 617881 - RNA, 19 nt, Homo sapiens
  misc_RNA (1)...(19): siRNA sense strand
gaaggacgaguggaucaag

SEQ ID NO: 617882 - RNA, 19 nt, Homo sapiens
  misc_RNA (1)...(19): siRNA sense strand
ccggaaaccgaacugcuuu

SEQ ID NO: 617883 - RNA, 19 nt, Homo sapiens
  misc_RNA (1)...(19): siRNA sense strand
caaugggcaggaagaaguu

SEQ ID NO: 617884 - RNA, 19 nt, Homo sapiens
  misc_RNA (1)...(19): siRNA sense strand
caucaaagccugcaaaacu

SEQ ID NO: 617885 - RNA, 19 nt, Homo sapiens
  misc_RNA (1)...(19): siRNA sense strand
gaaccuggcagugcuccau

SEQ ID NO: 617886 - RNA, 19 nt, Homo sapiens
  misc_RNA (1)...(19): siRNA sense strand
aagcggauuucagucaaga

SEQ ID NO: 617887 - RNA, 19 nt, Homo sapiens
  misc_RNA (1)...(19): siRNA sense strand
aaauugaccggaugaugga

SEQ ID NO: 617888 - RNA, 19 nt, Homo sapiens
  misc_RNA (1)...(19): siRNA sense strand
gaaaauugaccggaugaug

SEQ ID NO: 617889 - RNA, 19 nt, Homo sapiens
  misc_RNA (1)...(19): siRNA sense strand
caguuucuauggagcuuuc

SEQ ID NO: 617890 - RNA, 19 nt, Homo sapiens
  misc_RNA (1)...(19): siRNA sense strand
gcccucaggcaguuucuau

SEQ ID NO: 617891 - RNA, 19 nt, Homo sapiens
  misc_RNA (1)...(19): siRNA sense strand
gcgcugguuuauccucaca

SEQ ID NO: 617892 - RNA, 19 nt, Homo sapiens
  misc_RNA (1)...(19): siRNA sense strand
gcaacggaaccggaagaug

SEQ ID NO: 617893 - RNA, 19 nt, Homo sapiens
  misc_RNA (1)...(19): siRNA sense strand
agacaacugccucuacuac

SEQ ID NO: 617894 - RNA, 19 nt, Homo sapiens
  misc_RNA (1)...(19): siRNA sense strand
ucacagacaacugccucua

SEQ ID NO: 617895 - RNA, 19 nt, Homo sapiens
  misc_RNA (1)...(19): siRNA sense strand
acaccagucuccacaaucc

SEQ ID NO: 617896 - RNA, 19 nt, Homo sapiens
  misc_RNA (1)...(19): siRNA sense strand
caggaagaaguucaacaug

SEQ ID NO: 617897 - RNA, 19 nt, Homo sapiens
  misc_RNA (1)...(19): siRNA sense strand
gagaggcccagaaaauuga

SEQ ID NO: 617898 - RNA, 19 nt, Homo sapiens
  misc_RNA (1)...(19): siRNA sense strand
cgugcuaugugcuguccuu

SEQ ID NO: 617899 - RNA, 19 nt, Homo sapiens
  misc_RNA (1)...(19): siRNA sense strand
cagacaacugccucuacua

SEQ ID NO: 617900 - RNA, 19 nt, Homo sapiens
  misc_RNA (1)...(19): siRNA sense strand
gaaaugagcccuucaagau

SEQ ID NO: 617901 - RNA, 19 nt, Homo sapiens
  misc_RNA (1)...(19): siRNA sense strand
ggaagaaguucaacaugga

SEQ ID NO: 617902 - RNA, 19 nt, Homo sapiens
  misc_RNA (1)...(19): siRNA sense strand
ggauggagcuggagaacau

SEQ ID NO: 617903 - RNA, 19 nt, Homo sapiens
  misc_RNA (1)...(19): siRNA sense strand
ggauuucagucaagaagaa

SEQ ID NO: 617904 - RNA, 19 nt, Homo sapiens
  misc_RNA (1)...(19): siRNA sense strand
gaacugcuuugaacuuuac

SEQ ID NO: 617905 - RNA, 19 nt, Homo sapiens
  misc_RNA (1)...(19): siRNA sense strand
cgaacugcuuugaacuuua

SEQ ID NO: 617906 - RNA, 19 nt, Homo sapiens
  misc_RNA (1)...(19): siRNA sense strand
caacaccagucuccacaau

SEQ ID NO: 617907 - RNA, 19 nt, Homo sapiens
  misc_RNA (1)...(19): siRNA sense strand
gaacacacccgaggagauc

SEQ ID NO: 617908 - RNA, 19 nt, Homo sapiens
  misc_RNA (1)...(19): siRNA sense strand
caacugccucuacuacuuu

SEQ ID NO: 617909 - RNA, 19 nt, Homo sapiens
  misc_RNA (1)...(19): siRNA sense strand
uggcagugcuccaugcuuu

SEQ ID NO: 617910 - RNA, 19 nt, Homo sapiens
  misc_RNA (1)...(19): siRNA sense strand
gcaaugggcaggaagaagu

SEQ ID NO: 617911 - RNA, 19 nt, Homo sapiens
  misc_RNA (1)...(19): siRNA sense strand
aaaccgaacugcuuugaac

SEQ ID NO: 617912 - RNA, 19 nt, Homo sapiens
  misc_RNA (1)...(19): siRNA sense strand
aaugagcccuucaagauuc

SEQ ID NO: 617913 - RNA, 19 nt, Homo sapiens
  misc_RNA (1)...(19): siRNA sense strand
gcaggaagaaguucaacau

SEQ ID NO: 617914 - RNA, 19 nt, Homo sapiens
  misc_RNA (1)...(19): siRNA sense strand
ccgaacugcuuugaacuuu

SEQ ID NO: 617915 - RNA, 19 nt, Homo sapiens
  misc_RNA (1)...(19): siRNA sense strand
acaacugccucuacuacuu

SEQ ID NO: 617916 - RNA, 19 nt, Homo sapiens
  misc_RNA (1)...(19): siRNA sense strand
cgaaaugagcccuucaaga

SEQ ID NO: 617917 - RNA, 19 nt, Homo sapiens
  misc_RNA (1)...(19): siRNA sense strand
ggaaaccgaacugcuuuga

SEQ ID NO: 617918 - RNA, 19 nt, Homo sapiens
  misc_RNA (1)...(19): siRNA sense strand
gaaaccgaacugcuuugaa

SEQ ID NO: 617919 - RNA, 19 nt, Homo sapiens
  misc_RNA (1)...(19): siRNA sense strand
ccacagacacgugcuaugu

SEQ ID NO: 617920 - RNA, 19 nt, Homo sapiens
  misc_RNA (1)...(19): siRNA sense strand
gagaaggacgaguggauca

SEQ ID NO: 617921 - RNA, 19 nt, Homo sapiens
  misc_RNA (1)...(19): siRNA sense strand
aaaugagcccuucaagauu

SEQ ID NO: 617922 - RNA, 19 nt, Homo sapiens
  misc_RNA (1)...(19): siRNA sense strand
gcugguuuauccucacaga

SEQ ID NO: 617923 - RNA, 19 nt, Homo sapiens
  misc_RNA (1)...(19): siRNA sense strand
gcucaucaaagccugcaaa

SEQ ID NO: 617924 - RNA, 19 nt, Homo sapiens
  misc_RNA (1)...(19): siRNA sense strand
ggagaggcccagaaaauug

SEQ ID NO: 617925 - RNA, 19 nt, Homo sapiens
  misc_RNA (1)...(19): siRNA sense strand
ggagagggaagaacugaac

SEQ ID NO: 617926 - RNA, 19 nt, Homo sapiens
  misc_RNA (1)...(19): siRNA sense strand
gccgagugguggagggaaa

SEQ ID NO: 617927 - RNA, 19 nt, Homo sapiens
  misc_RNA (1)...(19): siRNA sense strand
gguuuauccucacagacaa

SEQ ID NO: 617928 - RNA, 19 nt, Homo sapiens
  misc_RNA (1)...(19): siRNA sense strand
ccacgcaggaggagaagga

SEQ ID NO: 617929 - RNA, 19 nt, Homo sapiens
  misc_RNA (1)...(19): siRNA sense strand
acagacaacugccucuacu

SEQ ID NO: 617930 - RNA, 19 nt, Homo sapiens
  misc_RNA (1)...(19): siRNA sense strand
gccaaugagggcaguaaga

SEQ ID NO: 617931 - RNA, 19 nt, Homo sapiens
  misc_RNA (1)...(19): siRNA sense strand
guccuucgccgucaucaug

SEQ ID NO: 617932 - RNA, 19 nt, Homo sapiens
  misc_RNA (1)...(19): siRNA sense strand
uacgacagcauccgaaaug

SEQ ID NO: 617933 - RNA, 19 nt, Homo sapiens
  misc_RNA (1)...(19): siRNA sense strand
guacgacagcauccgaaau

SEQ ID NO: 617934 - RNA, 19 nt, Homo sapiens
  misc_RNA (1)...(19): siRNA sense strand
uuguggaucugcaugaguu

SEQ ID NO: 617935 - RNA, 19 nt, Homo sapiens
  misc_RNA (1)...(19): siRNA sense strand
gaaggacgaguggaucaag

SEQ ID NO: 617936 - RNA, 19 nt, Homo sapiens
  misc_RNA (1)...(19): siRNA sense strand
ccggaaaccgaacugcuuu

SEQ ID NO: 617937 - RNA, 19 nt, Homo sapiens
  misc_RNA (1)...(19): siRNA sense strand
caaugggcaggaagaaguu

SEQ ID NO: 617938 - RNA, 19 nt, Homo sapiens
  misc_RNA (1)...(19): siRNA sense strand
caucaaagccugcaaaacu

SEQ ID NO: 617939 - RNA, 19 nt, Homo sapiens
  misc_RNA (1)...(19): siRNA sense strand
gaaccuggcagugcuccau

SEQ ID NO: 617940 - RNA, 19 nt, Homo sapiens
  misc_RNA (1)...(19): siRNA sense strand
aagcggauuucagucaaga

SEQ ID NO: 617941 - RNA, 19 nt, Homo sapiens
  misc_RNA (1)...(19): siRNA sense strand
aaauugaccggaugaugga

SEQ ID NO: 617942 - RNA, 19 nt, Homo sapiens
  misc_RNA (1)...(19): siRNA sense strand
gaaaauugaccggaugaug

SEQ ID NO: 617943 - RNA, 19 nt, Homo sapiens
  misc_RNA (1)...(19): siRNA sense strand
caguuucuauggagcuuuc

SEQ ID NO: 617944 - RNA, 19 nt, Homo sapiens
  misc_RNA (1)...(19): siRNA sense strand
gcccucaggcaguuucuau

SEQ ID NO: 617945 - RNA, 19 nt, Homo sapiens
  misc_RNA (1)...(19): siRNA sense strand
gcgcugguuuauccucaca

SEQ ID NO: 617946 - RNA, 19 nt, Homo sapiens
  misc_RNA (1)...(19): siRNA sense strand
gcaacggaaccggaagaug

SEQ ID NO: 617947 - RNA, 19 nt, Homo sapiens
  misc_RNA (1)...(19): siRNA sense strand
agacaacugccucuacuac

SEQ ID NO: 617948 - RNA, 19 nt, Homo sapiens
  misc_RNA (1)...(19): siRNA sense strand
ucacagacaacugccucua

SEQ ID NO: 617949 - RNA, 19 nt, Homo sapiens
  misc_RNA (1)...(19): siRNA sense strand
acaccagucuccacaaucc

SEQ ID NO: 617950 - RNA, 19 nt, Homo sapiens
  misc_RNA (1)...(19): siRNA sense strand
caggaagaaguucaacaug

SEQ ID NO: 617951 - RNA, 19 nt, Homo sapiens
  misc_RNA (1)...(19): siRNA sense strand
gagaggcccagaaaauuga

SEQ ID NO: 617952 - RNA, 19 nt, Homo sapiens
  misc_RNA (1)...(19): siRNA sense strand
cgugcuaugugcuguccuu

SEQ ID NO: 617953 - RNA, 19 nt, Homo sapiens
  misc_RNA (1)...(19): siRNA sense strand
cagacaacugccucuacua

SEQ ID NO: 617954 - RNA, 19 nt, Homo sapiens
  misc_RNA (1)...(19): siRNA sense strand
uaaaggcgcugcuugauuu

SEQ ID NO: 617955 - RNA, 19 nt, Homo sapiens
  misc_RNA (1)...(19): siRNA sense strand
gaacucagcccgcaucauu

SEQ ID NO: 617956 - RNA, 19 nt, Homo sapiens
  misc_RNA (1)...(19): siRNA sense strand
ggauaaagauggagacaag

SEQ ID NO: 617957 - RNA, 19 nt, Homo sapiens
  misc_RNA (1)...(19): siRNA sense strand
uggaggagcugcugaacaa

SEQ ID NO: 617958 - RNA, 19 nt, Homo sapiens
  misc_RNA (1)...(19): siRNA sense strand
uugaggagguucuggauuu

SEQ ID NO: 617959 - RNA, 19 nt, Homo sapiens
  misc_RNA (1)...(19): siRNA sense strand
gaggagcaguucacagugu

SEQ ID NO: 617960 - RNA, 19 nt, Homo sapiens
  misc_RNA (1)...(19): siRNA sense strand
acacugcccuccaucuaaa

SEQ ID NO: 617961 - RNA, 19 nt, Homo sapiens
  misc_RNA (1)...(19): siRNA sense strand
caacacugcccuccaucua

SEQ ID NO: 617962 - RNA, 19 nt, Homo sapiens
  misc_RNA (1)...(19): siRNA sense strand
ccacaacuacugcgugauu

SEQ ID NO: 617963 - RNA, 19 nt, Homo sapiens
  misc_RNA (1)...(19): siRNA sense strand
ucacagacgucaucaccau

SEQ ID NO: 617964 - RNA, 19 nt, Homo sapiens
  misc_RNA (1)...(19): siRNA sense strand
gaacgagggcaucuaugug

SEQ ID NO: 617965 - RNA, 19 nt, Homo sapiens
  misc_RNA (1)...(19): siRNA sense strand
gcagaugacagaggccaua

SEQ ID NO: 617966 - RNA, 19 nt, Homo sapiens
  misc_RNA (1)...(19): siRNA sense strand
uaacagugcaggacacaga

SEQ ID NO: 617967 - RNA, 19 nt, Homo sapiens
  misc_RNA (1)...(19): siRNA sense strand
ggaaaggugcgcgcuguga

SEQ ID NO: 617968 - RNA, 19 nt, Homo sapiens
  misc_RNA (1)...(19): siRNA sense strand
ucgaugacuuccauaagaa

SEQ ID NO: 617969 - RNA, 19 nt, Homo sapiens
  misc_RNA (1)...(19): siRNA sense strand
gagaaggacacagcuaaga

SEQ ID NO: 617970 - RNA, 19 nt, Homo sapiens
  misc_RNA (1)...(19): siRNA sense strand
ggccugacuucuucacaga

SEQ ID NO: 617971 - RNA, 19 nt, Homo sapiens
  misc_RNA (1)...(19): siRNA sense strand
cauucgcacugcugucuuu

SEQ ID NO: 617972 - RNA, 19 nt, Homo sapiens
  misc_RNA (1)...(19): siRNA sense strand
gugagaaggacacagcuaa

SEQ ID NO: 617973 - RNA, 19 nt, Homo sapiens
  misc_RNA (1)...(19): siRNA sense strand
gccuacaacuggcacuuug

SEQ ID NO: 617974 - RNA, 19 nt, Homo sapiens
  misc_RNA (1)...(19): siRNA sense strand
gcuuggugcuguuugaugu

SEQ ID NO: 617975 - RNA, 19 nt, Homo sapiens
  misc_RNA (1)...(19): siRNA sense strand
cuaaaggcgcugcuugauu

SEQ ID NO: 617976 - RNA, 19 nt, Homo sapiens
  misc_RNA (1)...(19): siRNA sense strand
cgagaacgagggcaucuau

SEQ ID NO: 617977 - RNA, 19 nt, Homo sapiens
  misc_RNA (1)...(19): siRNA sense strand
uggcugagguggaggugaa

SEQ ID NO: 617978 - RNA, 19 nt, Homo sapiens
  misc_RNA (1)...(19): siRNA sense strand
ccaucgagaucaccaccaa

SEQ ID NO: 617979 - RNA, 19 nt, Homo sapiens
  misc_RNA (1)...(19): siRNA sense strand
ucaagggagagaagucuuu

SEQ ID NO: 617980 - RNA, 19 nt, Homo sapiens
  misc_RNA (1)...(19): siRNA sense strand
gaaaggugcgcgcugugau

SEQ ID NO: 617981 - RNA, 19 nt, Homo sapiens
  misc_RNA (1)...(19): siRNA sense strand
gcccaacacugcccuccau

SEQ ID NO: 617982 - RNA, 19 nt, Homo sapiens
  misc_RNA (1)...(19): siRNA sense strand
gaccggauggcaagaauca

SEQ ID NO: 617983 - RNA, 19 nt, Homo sapiens
  misc_RNA (1)...(19): siRNA sense strand
caaugagaggguacuguuu

SEQ ID NO: 617984 - RNA, 19 nt, Homo sapiens
  misc_RNA (1)...(19): siRNA sense strand
caggagagcagcuggaaca

SEQ ID NO: 617985 - RNA, 19 nt, Homo sapiens
  misc_RNA (1)...(19): siRNA sense strand
uucgaugacuuccauaaga

SEQ ID NO: 617986 - RNA, 19 nt, Homo sapiens
  misc_RNA (1)...(19): siRNA sense strand
gaaguccugugggagaaag

SEQ ID NO: 617987 - RNA, 19 nt, Homo sapiens
  misc_RNA (1)...(19): siRNA sense strand
gggcaucuaugugcaggau

SEQ ID NO: 617988 - RNA, 19 nt, Homo sapiens
  misc_RNA (1)...(19): siRNA sense strand
ugaggagguucuggauuug

SEQ ID NO: 617989 - RNA, 19 nt, Homo sapiens
  misc_RNA (1)...(19): siRNA sense strand
ccagucagaagccgagaaa

SEQ ID NO: 617990 - RNA, 19 nt, Homo sapiens
  misc_RNA (1)...(19): siRNA sense strand
aggaguggcugguaacagu

SEQ ID NO: 617991 - RNA, 19 nt, Homo sapiens
  misc_RNA (1)...(19): siRNA sense strand
agguggaggugaagaaguu

SEQ ID NO: 617992 - RNA, 19 nt, Homo sapiens
  misc_RNA (1)...(19): siRNA sense strand
caguggagccuguggauca

SEQ ID NO: 617993 - RNA, 19 nt, Homo sapiens
  misc_RNA (1)...(19): siRNA sense strand
acaaugagaggguacuguu

SEQ ID NO: 617994 - RNA, 19 nt, Homo sapiens
  misc_RNA (1)...(19): siRNA sense strand
ugacuuccauaagaacuca

SEQ ID NO: 617995 - RNA, 19 nt, Homo sapiens
  misc_RNA (1)...(19): siRNA sense strand
gaagaaguucaagcagaug

SEQ ID NO: 617996 - RNA, 19 nt, Homo sapiens
  misc_RNA (1)...(19): siRNA sense strand
uguaggugaugccugcaaa

SEQ ID NO: 617997 - RNA, 19 nt, Homo sapiens
  misc_RNA (1)...(19): siRNA sense strand
gccaggccaucccucuaga

SEQ ID NO: 617998 - RNA, 19 nt, Homo sapiens
  misc_RNA (1)...(19): siRNA sense strand
aaugagaggguacuguuug

SEQ ID NO: 617999 - RNA, 19 nt, Homo sapiens
  misc_RNA (1)...(19): siRNA sense strand
caggggaggugcuggaaaa

SEQ ID NO: 618000 - RNA, 19 nt, Homo sapiens
  misc_RNA (1)...(19): siRNA sense strand
guacgacuaccgagagaag

SEQ ID NO: 618001 - RNA, 19 nt, Homo sapiens
  misc_RNA (1)...(19): siRNA sense strand
agaacgagggcaucuaugu

SEQ ID NO: 618002 - RNA, 19 nt, Homo sapiens
  misc_RNA (1)...(19): siRNA sense strand
aaaggugcgcgcugugauu

SEQ ID NO: 618003 - RNA, 19 nt, Homo sapiens
  misc_RNA (1)...(19): siRNA sense strand
gacgucaucaccaucgaaa

SEQ ID NO: 618004 - RNA, 19 nt, Homo sapiens
  misc_RNA (1)...(19): siRNA sense strand
cggugcagguguacgacua

SEQ ID NO: 618005 - RNA, 19 nt, Homo sapiens
  misc_RNA (1)...(19): siRNA sense strand
ggugagaaggacacagcua

SEQ ID NO: 618006 - RNA, 19 nt, Homo sapiens
  misc_RNA (1)...(19): siRNA sense strand
guaccucccagcgguguuu

SEQ ID NO: 618007 - RNA, 19 nt, Homo sapiens
  misc_RNA (1)...(19): siRNA sense strand
gggaggugcuggaaaagga

SEQ ID NO: 618008 - RNA, 19 nt, Homo sapiens
  misc_RNA (1)...(19): siRNA sense strand
ggugcgcgcugugauugga

SEQ ID NO: 618009 - RNA, 19 nt, Homo sapiens
  misc_RNA (1)...(19): siRNA sense strand
guaugugccaucugccaaa

SEQ ID NO: 618010 - RNA, 19 nt, Homo sapiens
  misc_RNA (1)...(19): siRNA sense strand
ggaggucguggagaucauu

SEQ ID NO: 618011 - RNA, 19 nt, Homo sapiens
  misc_RNA (1)...(19): siRNA sense strand
gaaguucaagcagaugaca

SEQ ID NO: 618012 - RNA, 19 nt, Homo sapiens
  misc_RNA (1)...(19): siRNA sense strand
guggaggucgggccaaaga

SEQ ID NO: 618013 - RNA, 19 nt, Homo sapiens
  misc_RNA (1)...(19): siRNA sense strand
gaagguccgagagcuggaa

SEQ ID NO: 618014 - RNA, 19 nt, Homo sapiens
  misc_RNA (1)...(19): siRNA sense strand
gauuggaagcaccuacaug

SEQ ID NO: 618015 - RNA, 19 nt, Homo sapiens
  misc_RNA (1)...(19): siRNA sense strand
ggcagaagcgcguggucaa

SEQ ID NO: 618016 - RNA, 19 nt, Homo sapiens
  misc_RNA (1)...(19): siRNA sense strand
gaugucacagggcaaguuc

SEQ ID NO: 618017 - RNA, 19 nt, Homo sapiens
  misc_RNA (1)...(19): siRNA sense strand
ggggaggaguggcugguaa

SEQ ID NO: 618018 - RNA, 19 nt, Homo sapiens
  misc_RNA (1)...(19): siRNA sense strand
aacugcagcuggccuacaa

SEQ ID NO: 618019 - RNA, 19 nt, Homo sapiens
  misc_RNA (1)...(19): siRNA sense strand
gagaacgagggcaucuaug

SEQ ID NO: 618020 - RNA, 19 nt, Homo sapiens
  misc_RNA (1)...(19): siRNA sense strand
ggagagcagcuggaacaag

SEQ ID NO: 618021 - RNA, 19 nt, Homo sapiens
  misc_RNA (1)...(19): siRNA sense strand
gcaggagaugaguggcuuu

SEQ ID NO: 618022 - RNA, 19 nt, Homo sapiens
  misc_RNA (1)...(19): siRNA sense strand
guguacgacuaccgagaga

SEQ ID NO: 618023 - RNA, 19 nt, Homo sapiens
  misc_RNA (1)...(19): siRNA sense strand
ugugccaucugccaaagug

SEQ ID NO: 618024 - RNA, 19 nt, Homo sapiens
  misc_RNA (1)...(19): siRNA sense strand
guguggaggucgggccaaa

SEQ ID NO: 618025 - RNA, 19 nt, Homo sapiens
  misc_RNA (1)...(19): siRNA sense strand
aaguggaggucguggagau

SEQ ID NO: 618026 - RNA, 19 nt, Homo sapiens
  misc_RNA (1)...(19): siRNA sense strand
ggccuacaacuggcacuuu

SEQ ID NO: 618027 - RNA, 19 nt, Homo sapiens
  misc_RNA (1)...(19): siRNA sense strand
uaaaggcgcugcuugauuu

SEQ ID NO: 618028 - RNA, 19 nt, Homo sapiens
  misc_RNA (1)...(19): siRNA sense strand
gaacucagcccgcaucauu

SEQ ID NO: 618029 - RNA, 19 nt, Homo sapiens
  misc_RNA (1)...(19): siRNA sense strand
ggauaaagauggagacaag

SEQ ID NO: 618030 - RNA, 19 nt, Homo sapiens
  misc_RNA (1)...(19): siRNA sense strand
uggaggagcugcugaacaa

SEQ ID NO: 618031 - RNA, 19 nt, Homo sapiens
  misc_RNA (1)...(19): siRNA sense strand
uugaggagguucuggauuu

SEQ ID NO: 618032 - RNA, 19 nt, Homo sapiens
  misc_RNA (1)...(19): siRNA sense strand
gaggagcaguucacagugu

SEQ ID NO: 618033 - RNA, 19 nt, Homo sapiens
  misc_RNA (1)...(19): siRNA sense strand
acacugcccuccaucuaaa

SEQ ID NO: 618034 - RNA, 19 nt, Homo sapiens
  misc_RNA (1)...(19): siRNA sense strand
caacacugcccuccaucua

SEQ ID NO: 618035 - RNA, 19 nt, Homo sapiens
  misc_RNA (1)...(19): siRNA sense strand
ccacaacuacugcgugauu

SEQ ID NO: 618036 - RNA, 19 nt, Homo sapiens
  misc_RNA (1)...(19): siRNA sense strand
ucacagacgucaucaccau

SEQ ID NO: 618037 - RNA, 19 nt, Homo sapiens
  misc_RNA (1)...(19): siRNA sense strand
gaacgagggcaucuaugug

SEQ ID NO: 618038 - RNA, 19 nt, Homo sapiens
  misc_RNA (1)...(19): siRNA sense strand
gcagaugacagaggccaua

SEQ ID NO: 618039 - RNA, 19 nt, Homo sapiens
  misc_RNA (1)...(19): siRNA sense strand
uaacagugcaggacacaga

SEQ ID NO: 618040 - RNA, 19 nt, Homo sapiens
  misc_RNA (1)...(19): siRNA sense strand
ggaaaggugcgcgcuguga

SEQ ID NO: 618041 - RNA, 19 nt, Homo sapiens
  misc_RNA (1)...(19): siRNA sense strand
ucgaugacuuccauaagaa

SEQ ID NO: 618042 - RNA, 19 nt, Homo sapiens
  misc_RNA (1)...(19): siRNA sense strand
gagaaggacacagcuaaga

SEQ ID NO: 618043 - RNA, 19 nt, Homo sapiens
  misc_RNA (1)...(19): siRNA sense strand
ggccugacuucuucacaga

SEQ ID NO: 618044 - RNA, 19 nt, Homo sapiens
  misc_RNA (1)...(19): siRNA sense strand
cauucgcacugcugucuuu

SEQ ID NO: 618045 - RNA, 19 nt, Homo sapiens
  misc_RNA (1)...(19): siRNA sense strand
gugagaaggacacagcuaa

SEQ ID NO: 618046 - RNA, 19 nt, Homo sapiens
  misc_RNA (1)...(19): siRNA sense strand
gccuacaacuggcacuuug

SEQ ID NO: 618047 - RNA, 19 nt, Homo sapiens
  misc_RNA (1)...(19): siRNA sense strand
gcuuggugcuguuugaugu

SEQ ID NO: 618048 - RNA, 19 nt, Homo sapiens
  misc_RNA (1)...(19): siRNA sense strand
cuaaaggcgcugcuugauu

SEQ ID NO: 618049 - RNA, 19 nt, Homo sapiens
  misc_RNA (1)...(19): siRNA sense strand
cgagaacgagggcaucuau

SEQ ID NO: 618050 - RNA, 19 nt, Homo sapiens
  misc_RNA (1)...(19): siRNA sense strand
uggcugagguggaggugaa

SEQ ID NO: 618051 - RNA, 19 nt, Homo sapiens
  misc_RNA (1)...(19): siRNA sense strand
ccaucgagaucaccaccaa

SEQ ID NO: 618052 - RNA, 19 nt, Homo sapiens
  misc_RNA (1)...(19): siRNA sense strand
ucaagggagagaagucuuu

SEQ ID NO: 618053 - RNA, 19 nt, Homo sapiens
  misc_RNA (1)...(19): siRNA sense strand
gaaaggugcgcgcugugau

SEQ ID NO: 618054 - RNA, 19 nt, Homo sapiens
  misc_RNA (1)...(19): siRNA sense strand
gcccaacacugcccuccau

SEQ ID NO: 618055 - RNA, 19 nt, Homo sapiens
  misc_RNA (1)...(19): siRNA sense strand
gaccggauggcaagaauca

SEQ ID NO: 618056 - RNA, 19 nt, Homo sapiens
  misc_RNA (1)...(19): siRNA sense strand
caaugagaggguacuguuu

SEQ ID NO: 618057 - RNA, 19 nt, Homo sapiens
  misc_RNA (1)...(19): siRNA sense strand
caggagagcagcuggaaca

SEQ ID NO: 618058 - RNA, 19 nt, Homo sapiens
  misc_RNA (1)...(19): siRNA sense strand
uucgaugacuuccauaaga

SEQ ID NO: 618059 - RNA, 19 nt, Homo sapiens
  misc_RNA (1)...(19): siRNA sense strand
gaaguccugugggagaaag

SEQ ID NO: 618060 - RNA, 19 nt, Homo sapiens
  misc_RNA (1)...(19): siRNA sense strand
gggcaucuaugugcaggau

SEQ ID NO: 618061 - RNA, 19 nt, Homo sapiens
  misc_RNA (1)...(19): siRNA sense strand
ugaggagguucuggauuug

SEQ ID NO: 618062 - RNA, 19 nt, Homo sapiens
  misc_RNA (1)...(19): siRNA sense strand
ccagucagaagccgagaaa

SEQ ID NO: 618063 - RNA, 19 nt, Homo sapiens
  misc_RNA (1)...(19): siRNA sense strand
aggaguggcugguaacagu

SEQ ID NO: 618064 - RNA, 19 nt, Homo sapiens
  misc_RNA (1)...(19): siRNA sense strand
agguggaggugaagaaguu

SEQ ID NO: 618065 - RNA, 19 nt, Homo sapiens
  misc_RNA (1)...(19): siRNA sense strand
caguggagccuguggauca

SEQ ID NO: 618066 - RNA, 19 nt, Homo sapiens
  misc_RNA (1)...(19): siRNA sense strand
acaaugagaggguacuguu

SEQ ID NO: 618067 - RNA, 19 nt, Homo sapiens
  misc_RNA (1)...(19): siRNA sense strand
ugacuuccauaagaacuca

SEQ ID NO: 618068 - RNA, 19 nt, Homo sapiens
  misc_RNA (1)...(19): siRNA sense strand
gaagaaguucaagcagaug

SEQ ID NO: 618069 - RNA, 19 nt, Homo sapiens
  misc_RNA (1)...(19): siRNA sense strand
uguaggugaugccugcaaa

SEQ ID NO: 618070 - RNA, 19 nt, Homo sapiens
  misc_RNA (1)...(19): siRNA sense strand
gccaggccaucccucuaga

SEQ ID NO: 618071 - RNA, 19 nt, Homo sapiens
  misc_RNA (1)...(19): siRNA sense strand
aaugagaggguacuguuug

SEQ ID NO: 618072 - RNA, 19 nt, Homo sapiens
  misc_RNA (1)...(19): siRNA sense strand
caggggaggugcuggaaaa

SEQ ID NO: 618073 - RNA, 19 nt, Homo sapiens
  misc_RNA (1)...(19): siRNA sense strand
guacgacuaccgagagaag

SEQ ID NO: 618074 - RNA, 19 nt, Homo sapiens
  misc_RNA (1)...(19): siRNA sense strand
agaacgagggcaucuaugu

SEQ ID NO: 618075 - RNA, 19 nt, Homo sapiens
  misc_RNA (1)...(19): siRNA sense strand
aaaggugcgcgcugugauu

SEQ ID NO: 618076 - RNA, 19 nt, Homo sapiens
  misc_RNA (1)...(19): siRNA sense strand
gacgucaucaccaucgaaa

SEQ ID NO: 618077 - RNA, 19 nt, Homo sapiens
  misc_RNA (1)...(19): siRNA sense strand
cggugcagguguacgacua

SEQ ID NO: 618078 - RNA, 19 nt, Homo sapiens
  misc_RNA (1)...(19): siRNA sense strand
ggugagaaggacacagcua

SEQ ID NO: 618079 - RNA, 19 nt, Homo sapiens
  misc_RNA (1)...(19): siRNA sense strand
guaccucccagcgguguuu

SEQ ID NO: 618080 - RNA, 19 nt, Homo sapiens
  misc_RNA (1)...(19): siRNA sense strand
gggaggugcuggaaaagga

SEQ ID NO: 618081 - RNA, 19 nt, Homo sapiens
  misc_RNA (1)...(19): siRNA sense strand
ggugcgcgcugugauugga

SEQ ID NO: 618082 - RNA, 19 nt, Homo sapiens
  misc_RNA (1)...(19): siRNA sense strand
guaugugccaucugccaaa

SEQ ID NO: 618083 - RNA, 19 nt, Homo sapiens
  misc_RNA (1)...(19): siRNA sense strand
ggaggucguggagaucauu

SEQ ID NO: 618084 - RNA, 19 nt, Homo sapiens
  misc_RNA (1)...(19): siRNA sense strand
gaaguucaagcagaugaca

SEQ ID NO: 618085 - RNA, 19 nt, Homo sapiens
  misc_RNA (1)...(19): siRNA sense strand
guggaggucgggccaaaga

SEQ ID NO: 618086 - RNA, 19 nt, Homo sapiens
  misc_RNA (1)...(19): siRNA sense strand
gaagguccgagagcuggaa

SEQ ID NO: 618087 - RNA, 19 nt, Homo sapiens
  misc_RNA (1)...(19): siRNA sense strand
gauuggaagcaccuacaug

SEQ ID NO: 618088 - RNA, 19 nt, Homo sapiens
  misc_RNA (1)...(19): siRNA sense strand
ggcagaagcgcguggucaa

SEQ ID NO: 618089 - RNA, 19 nt, Homo sapiens
  misc_RNA (1)...(19): siRNA sense strand
gaugucacagggcaaguuc

SEQ ID NO: 618090 - RNA, 19 nt, Homo sapiens
  misc_RNA (1)...(19): siRNA sense strand
ggggaggaguggcugguaa

SEQ ID NO: 618091 - RNA, 19 nt, Homo sapiens
  misc_RNA (1)...(19): siRNA sense strand
aacugcagcuggccuacaa

SEQ ID NO: 618092 - RNA, 19 nt, Homo sapiens
  misc_RNA (1)...(19): siRNA sense strand
gagaacgagggcaucuaug

SEQ ID NO: 618093 - RNA, 19 nt, Homo sapiens
  misc_RNA (1)...(19): siRNA sense strand
ggagagcagcuggaacaag

SEQ ID NO: 618094 - RNA, 19 nt, Homo sapiens
  misc_RNA (1)...(19): siRNA sense strand
gcaggagaugaguggcuuu

SEQ ID NO: 618095 - RNA, 19 nt, Homo sapiens
  misc_RNA (1)...(19): siRNA sense strand
guguacgacuaccgagaga

SEQ ID NO: 618096 - RNA, 19 nt, Homo sapiens
  misc_RNA (1)...(19): siRNA sense strand
ugugccaucugccaaagug

SEQ ID NO: 618097 - RNA, 19 nt, Homo sapiens
  misc_RNA (1)...(19): siRNA sense strand
guguggaggucgggccaaa

SEQ ID NO: 618098 - RNA, 19 nt, Homo sapiens
  misc_RNA (1)...(19): siRNA sense strand
aaguggaggucguggagau

SEQ ID NO: 618099 - RNA, 19 nt, Homo sapiens
  misc_RNA (1)...(19): siRNA sense strand
ggccuacaacuggcacuuu

SEQ ID NO: 618100 - RNA, 19 nt, Homo sapiens
  misc_RNA (1)...(19): siRNA sense strand
gggacaaguucuccaaaug

SEQ ID NO: 618101 - RNA, 19 nt, Homo sapiens
  misc_RNA (1)...(19): siRNA sense strand
ggacaaguucuccaaaugu

SEQ ID NO: 618102 - RNA, 19 nt, Homo sapiens
  misc_RNA (1)...(19): siRNA sense strand
ggagaucuguguucguaca

SEQ ID NO: 618103 - RNA, 19 nt, Homo sapiens
  misc_RNA (1)...(19): siRNA sense strand
aaggagaucuguguucgua

SEQ ID NO: 618104 - RNA, 19 nt, Homo sapiens
  misc_RNA (1)...(19): siRNA sense strand
gacaaguucuccaaaugug

SEQ ID NO: 618105 - RNA, 19 nt, Homo sapiens
  misc_RNA (1)...(19): siRNA sense strand
cgacaacccagacuacuau

SEQ ID NO: 618106 - RNA, 19 nt, Homo sapiens
  misc_RNA (1)...(19): siRNA sense strand
ucaacgaggucugcuucua

SEQ ID NO: 618107 - RNA, 19 nt, Homo sapiens
  misc_RNA (1)...(19): siRNA sense strand
gcaaacagugucucaacga

SEQ ID NO: 618108 - RNA, 19 nt, Homo sapiens
  misc_RNA (1)...(19): siRNA sense strand
ccuccgagcugaccucugu

SEQ ID NO: 618109 - RNA, 19 nt, Homo sapiens
  misc_RNA (1)...(19): siRNA sense strand
gcagcaaguccaacaggaa

SEQ ID NO: 618110 - RNA, 19 nt, Homo sapiens
  misc_RNA (1)...(19): siRNA sense strand
acacaggccuugcaaacag

SEQ ID NO: 618111 - RNA, 19 nt, Homo sapiens
  misc_RNA (1)...(19): siRNA sense strand
guguguacgucauuaacaa

SEQ ID NO: 618112 - RNA, 19 nt, Homo sapiens
  misc_RNA (1)...(19): siRNA sense strand
caacccagacuacuaugau

SEQ ID NO: 618113 - RNA, 19 nt, Homo sapiens
  misc_RNA (1)...(19): siRNA sense strand
gcacccgccucuacuccau

SEQ ID NO: 618114 - RNA, 19 nt, Homo sapiens
  misc_RNA (1)...(19): siRNA sense strand
cgggacaaguucuccaaau

SEQ ID NO: 618115 - RNA, 19 nt, Homo sapiens
  misc_RNA (1)...(19): siRNA sense strand
caacgaggucugcuucuac

SEQ ID NO: 618116 - RNA, 19 nt, Homo sapiens
  misc_RNA (1)...(19): siRNA sense strand
cuccaaauguggcgugaug

SEQ ID NO: 618117 - RNA, 19 nt, Homo sapiens
  misc_RNA (1)...(19): siRNA sense strand
gaucgacaacccagacuac

SEQ ID NO: 618118 - RNA, 19 nt, Homo sapiens
  misc_RNA (1)...(19): siRNA sense strand
gccuaccucuuccugcuau

SEQ ID NO: 618119 - RNA, 19 nt, Homo sapiens
  misc_RNA (1)...(19): siRNA sense strand
aacccagacuacuaugauu

SEQ ID NO: 618120 - RNA, 19 nt, Homo sapiens
  misc_RNA (1)...(19): siRNA sense strand
acccagacuacuaugauua

SEQ ID NO: 618121 - RNA, 19 nt, Homo sapiens
  misc_RNA (1)...(19): siRNA sense strand
cgccguguguacgucauua

SEQ ID NO: 618122 - RNA, 19 nt, Homo sapiens
  misc_RNA (1)...(19): siRNA sense strand
ucgacaacccagacuacua

SEQ ID NO: 618123 - RNA, 19 nt, Homo sapiens
  misc_RNA (1)...(19): siRNA sense strand
uuaacaaggagaucugugu

SEQ ID NO: 618124 - RNA, 19 nt, Homo sapiens
  misc_RNA (1)...(19): siRNA sense strand
guccaguacacccacuaua

SEQ ID NO: 618125 - RNA, 19 nt, Homo sapiens
  misc_RNA (1)...(19): siRNA sense strand
gggacaaguucuccaaaug

SEQ ID NO: 618126 - RNA, 19 nt, Homo sapiens
  misc_RNA (1)...(19): siRNA sense strand
ggacaaguucuccaaaugu

SEQ ID NO: 618127 - RNA, 19 nt, Homo sapiens
  misc_RNA (1)...(19): siRNA sense strand
ggagaucuguguucguaca

SEQ ID NO: 618128 - RNA, 19 nt, Homo sapiens
  misc_RNA (1)...(19): siRNA sense strand
aaggagaucuguguucgua

SEQ ID NO: 618129 - RNA, 19 nt, Homo sapiens
  misc_RNA (1)...(19): siRNA sense strand
gacaaguucuccaaaugug

SEQ ID NO: 618130 - RNA, 19 nt, Homo sapiens
  misc_RNA (1)...(19): siRNA sense strand
cgacaacccagacuacuau

SEQ ID NO: 618131 - RNA, 19 nt, Homo sapiens
  misc_RNA (1)...(19): siRNA sense strand
ucaacgaggucugcuucua

SEQ ID NO: 618132 - RNA, 19 nt, Homo sapiens
  misc_RNA (1)...(19): siRNA sense strand
gcaaacagugucucaacga

SEQ ID NO: 618133 - RNA, 19 nt, Homo sapiens
  misc_RNA (1)...(19): siRNA sense strand
ccuccgagcugaccucugu

SEQ ID NO: 618134 - RNA, 19 nt, Homo sapiens
  misc_RNA (1)...(19): siRNA sense strand
gcagcaaguccaacaggaa

SEQ ID NO: 618135 - RNA, 19 nt, Homo sapiens
  misc_RNA (1)...(19): siRNA sense strand
acacaggccuugcaaacag

SEQ ID NO: 618136 - RNA, 19 nt, Homo sapiens
  misc_RNA (1)...(19): siRNA sense strand
guguguacgucauuaacaa

SEQ ID NO: 618137 - RNA, 19 nt, Homo sapiens
  misc_RNA (1)...(19): siRNA sense strand
caacccagacuacuaugau

SEQ ID NO: 618138 - RNA, 19 nt, Homo sapiens
  misc_RNA (1)...(19): siRNA sense strand
gcacccgccucuacuccau

SEQ ID NO: 618139 - RNA, 19 nt, Homo sapiens
  misc_RNA (1)...(19): siRNA sense strand
cgggacaaguucuccaaau

SEQ ID NO: 618140 - RNA, 19 nt, Homo sapiens
  misc_RNA (1)...(19): siRNA sense strand
caacgaggucugcuucuac

SEQ ID NO: 618141 - RNA, 19 nt, Homo sapiens
  misc_RNA (1)...(19): siRNA sense strand
cuccaaauguggcgugaug

SEQ ID NO: 618142 - RNA, 19 nt, Homo sapiens
  misc_RNA (1)...(19): siRNA sense strand
gaucgacaacccagacuac

SEQ ID NO: 618143 - RNA, 19 nt, Homo sapiens
  misc_RNA (1)...(19): siRNA sense strand
gccuaccucuuccugcuau

SEQ ID NO: 618144 - RNA, 19 nt, Homo sapiens
  misc_RNA (1)...(19): siRNA sense strand
aacccagacuacuaugauu

SEQ ID NO: 618145 - RNA, 19 nt, Homo sapiens
  misc_RNA (1)...(19): siRNA sense strand
acccagacuacuaugauua

SEQ ID NO: 618146 - RNA, 19 nt, Homo sapiens
  misc_RNA (1)...(19): siRNA sense strand
cgccguguguacgucauua

SEQ ID NO: 618147 - RNA, 19 nt, Homo sapiens
  misc_RNA (1)...(19): siRNA sense strand
ucgacaacccagacuacua

SEQ ID NO: 618148 - RNA, 19 nt, Homo sapiens
  misc_RNA (1)...(19): siRNA sense strand
uuaacaaggagaucugugu

SEQ ID NO: 618149 - RNA, 19 nt, Homo sapiens
  misc_RNA (1)...(19): siRNA sense strand
guccaguacacccacuaua

SEQ ID NO: 618150 - RNA, 19 nt, Homo sapiens
  misc_RNA (1)...(19): siRNA sense strand
gaauccagcuccacaguua

SEQ ID NO: 618151 - RNA, 19 nt, Homo sapiens
  misc_RNA (1)...(19): siRNA sense strand
gaacaguacuggacaaggu

SEQ ID NO: 618152 - RNA, 19 nt, Homo sapiens
  misc_RNA (1)...(19): siRNA sense strand
gcaccugacauuagaaaua

SEQ ID NO: 618153 - RNA, 19 nt, Homo sapiens
  misc_RNA (1)...(19): siRNA sense strand
gagauugggcauauucuua

SEQ ID NO: 618154 - RNA, 19 nt, Homo sapiens
  misc_RNA (1)...(19): siRNA sense strand
caaggaggauuucucaguu

SEQ ID NO: 618155 - RNA, 19 nt, Homo sapiens
  misc_RNA (1)...(19): siRNA sense strand
gcacaaacuugccugaucu

SEQ ID NO: 618156 - RNA, 19 nt, Homo sapiens
  misc_RNA (1)...(19): siRNA sense strand
ggaugcaccugacauuaga

SEQ ID NO: 618157 - RNA, 19 nt, Homo sapiens
  misc_RNA (1)...(19): siRNA sense strand
gaaccaccaccaucaguaa

SEQ ID NO: 618158 - RNA, 19 nt, Homo sapiens
  misc_RNA (1)...(19): siRNA sense strand
ccaaagacaaggaggauuu

SEQ ID NO: 618159 - RNA, 19 nt, Homo sapiens
  misc_RNA (1)...(19): siRNA sense strand
uuauaaggcucuaugacua

SEQ ID NO: 618160 - RNA, 19 nt, Homo sapiens
  misc_RNA (1)...(19): siRNA sense strand
cuucaaggauggagaauug

SEQ ID NO: 618161 - RNA, 19 nt, Homo sapiens
  misc_RNA (1)...(19): siRNA sense strand
ugaagcaccucgccuccua

SEQ ID NO: 618162 - RNA, 19 nt, Homo sapiens
  misc_RNA (1)...(19): siRNA sense strand
gcccagcuuuccugagaua

SEQ ID NO: 618163 - RNA, 19 nt, Homo sapiens
  misc_RNA (1)...(19): siRNA sense strand
aaggaggauuucucaguua

SEQ ID NO: 618164 - RNA, 19 nt, Homo sapiens
  misc_RNA (1)...(19): siRNA sense strand
uaacaacccggaaauuaug

SEQ ID NO: 618165 - RNA, 19 nt, Homo sapiens
  misc_RNA (1)...(19): siRNA sense strand
ggaaccaccaccaucagua

SEQ ID NO: 618166 - RNA, 19 nt, Homo sapiens
  misc_RNA (1)...(19): siRNA sense strand
ccucaaggauccugacuca

SEQ ID NO: 618167 - RNA, 19 nt, Homo sapiens
  misc_RNA (1)...(19): siRNA sense strand
aaacuugccugaucuuguc

SEQ ID NO: 618168 - RNA, 19 nt, Homo sapiens
  misc_RNA (1)...(19): siRNA sense strand
ccaagauggugcagggaaa

SEQ ID NO: 618169 - RNA, 19 nt, Homo sapiens
  misc_RNA (1)...(19): siRNA sense strand
ccgaucagcuuguucuaau

SEQ ID NO: 618170 - RNA, 19 nt, Homo sapiens
  misc_RNA (1)...(19): siRNA sense strand
caaacuuucuggguauuau

SEQ ID NO: 618171 - RNA, 19 nt, Homo sapiens
  misc_RNA (1)...(19): siRNA sense strand
uagcuuaggucuccucaca

SEQ ID NO: 618172 - RNA, 19 nt, Homo sapiens
  misc_RNA (1)...(19): siRNA sense strand
cuuaacaacccggaaauua

SEQ ID NO: 618173 - RNA, 19 nt, Homo sapiens
  misc_RNA (1)...(19): siRNA sense strand
gcugcaagauuuaguuagu

SEQ ID NO: 618174 - RNA, 19 nt, Homo sapiens
  misc_RNA (1)...(19): siRNA sense strand
uccauaugcugcaagauuu

SEQ ID NO: 618175 - RNA, 19 nt, Homo sapiens
  misc_RNA (1)...(19): siRNA sense strand
caacaggguuccauuugcu

SEQ ID NO: 618176 - RNA, 19 nt, Homo sapiens
  misc_RNA (1)...(19): siRNA sense strand
ccuaggaacuuaucuacag

SEQ ID NO: 618177 - RNA, 19 nt, Homo sapiens
  misc_RNA (1)...(19): siRNA sense strand
gcagagcugggcuuccuuu

SEQ ID NO: 618178 - RNA, 19 nt, Homo sapiens
  misc_RNA (1)...(19): siRNA sense strand
gaaaagcucuacuggacau

SEQ ID NO: 618179 - RNA, 19 nt, Homo sapiens
  misc_RNA (1)...(19): siRNA sense strand
ugaagacgcccaaagacaa

SEQ ID NO: 618180 - RNA, 19 nt, Homo sapiens
  misc_RNA (1)...(19): siRNA sense strand
gcagcugaaggaagagaua

SEQ ID NO: 618181 - RNA, 19 nt, Homo sapiens
  misc_RNA (1)...(19): siRNA sense strand
ucagcuuguucuaaucuuu

SEQ ID NO: 618182 - RNA, 19 nt, Homo sapiens
  misc_RNA (1)...(19): siRNA sense strand
gcaccucgccuccuacucu

SEQ ID NO: 618183 - RNA, 19 nt, Homo sapiens
  misc_RNA (1)...(19): siRNA sense strand
acaguuacaggaugagaua

SEQ ID NO: 618184 - RNA, 19 nt, Homo sapiens
  misc_RNA (1)...(19): siRNA sense strand
caccugacauuagaaauag

SEQ ID NO: 618185 - RNA, 19 nt, Homo sapiens
  misc_RNA (1)...(19): siRNA sense strand
ucagguagcaggcaaggaa

SEQ ID NO: 618186 - RNA, 19 nt, Homo sapiens
  misc_RNA (1)...(19): siRNA sense strand
acacauggaggcucaggua

SEQ ID NO: 618187 - RNA, 19 nt, Homo sapiens
  misc_RNA (1)...(19): siRNA sense strand
uuaacaacccggaaauuau

SEQ ID NO: 618188 - RNA, 19 nt, Homo sapiens
  misc_RNA (1)...(19): siRNA sense strand
gcacuauguacacagauau

SEQ ID NO: 618189 - RNA, 19 nt, Homo sapiens
  misc_RNA (1)...(19): siRNA sense strand
cauuugcucccuuaucuuu

SEQ ID NO: 618190 - RNA, 19 nt, Homo sapiens
  misc_RNA (1)...(19): siRNA sense strand
ccauaugcugcaagauuua

SEQ ID NO: 618191 - RNA, 19 nt, Homo sapiens
  misc_RNA (1)...(19): siRNA sense strand
gaagacgcccaaagacaag

SEQ ID NO: 618192 - RNA, 19 nt, Homo sapiens
  misc_RNA (1)...(19): siRNA sense strand
cugcaagauuuaguuagua

SEQ ID NO: 618193 - RNA, 19 nt, Homo sapiens
  misc_RNA (1)...(19): siRNA sense strand
guccaacacaggccuagua

SEQ ID NO: 618194 - RNA, 19 nt, Homo sapiens
  misc_RNA (1)...(19): siRNA sense strand
ggcaggagguauagagucu

SEQ ID NO: 618195 - RNA, 19 nt, Homo sapiens
  misc_RNA (1)...(19): siRNA sense strand
augacuaucuccagcaauu

SEQ ID NO: 618196 - RNA, 19 nt, Homo sapiens
  misc_RNA (1)...(19): siRNA sense strand
ucaucaaggugacagugaa

SEQ ID NO: 618197 - RNA, 19 nt, Homo sapiens
  misc_RNA (1)...(19): siRNA sense strand
cagcacaacccugagauug

SEQ ID NO: 618198 - RNA, 19 nt, Homo sapiens
  misc_RNA (1)...(19): siRNA sense strand
gccaacaggguuccauuug

SEQ ID NO: 618199 - RNA, 19 nt, Homo sapiens
  misc_RNA (1)...(19): siRNA sense strand
caaacuugccugaucuugu

SEQ ID NO: 618200 - RNA, 19 nt, Homo sapiens
  misc_RNA (1)...(19): siRNA sense strand
cccagucccuaggaacuua

SEQ ID NO: 618201 - RNA, 19 nt, Homo sapiens
  misc_RNA (1)...(19): siRNA sense strand
ccaaacuuucuggguauua

SEQ ID NO: 618202 - RNA, 19 nt, Homo sapiens
  misc_RNA (1)...(19): siRNA sense strand
caaggauggagaauuguga

SEQ ID NO: 618203 - RNA, 19 nt, Homo sapiens
  misc_RNA (1)...(19): siRNA sense strand
ccaacaggguuccauuugc

SEQ ID NO: 618204 - RNA, 19 nt, Homo sapiens
  misc_RNA (1)...(19): siRNA sense strand
agacaaggaggauuucuca

SEQ ID NO: 618205 - RNA, 19 nt, Homo sapiens
  misc_RNA (1)...(19): siRNA sense strand
uuacguaacccugccauga

SEQ ID NO: 618206 - RNA, 19 nt, Homo sapiens
  misc_RNA (1)...(19): siRNA sense strand
uccaugggcuuucugaauc

SEQ ID NO: 618207 - RNA, 19 nt, Homo sapiens
  misc_RNA (1)...(19): siRNA sense strand
gguuccauuugcucccuua

SEQ ID NO: 618208 - RNA, 19 nt, Homo sapiens
  misc_RNA (1)...(19): siRNA sense strand
ccaggaaccaccaccauca

SEQ ID NO: 618209 - RNA, 19 nt, Homo sapiens
  misc_RNA (1)...(19): siRNA sense strand
gguauuauaaggcucuaug

SEQ ID NO: 618210 - RNA, 19 nt, Homo sapiens
  misc_RNA (1)...(19): siRNA sense strand
gggcccaaguccuggauca

SEQ ID NO: 618211 - RNA, 19 nt, Homo sapiens
  misc_RNA (1)...(19): siRNA sense strand
guuacaggaugagauacaa

SEQ ID NO: 618212 - RNA, 19 nt, Homo sapiens
  misc_RNA (1)...(19): siRNA sense strand
agauugggcauauucuuaa

SEQ ID NO: 618213 - RNA, 19 nt, Homo sapiens
  misc_RNA (1)...(19): siRNA sense strand
gaucagcuuguucuaaucu

SEQ ID NO: 618214 - RNA, 19 nt, Homo sapiens
  misc_RNA (1)...(19): siRNA sense strand
ucaaggauccugacucacu

SEQ ID NO: 618215 - RNA, 19 nt, Homo sapiens
  misc_RNA (1)...(19): siRNA sense strand
gaggauuucucaguuacag

SEQ ID NO: 618216 - RNA, 19 nt, Homo sapiens
  misc_RNA (1)...(19): siRNA sense strand
cugcccagcuuuccugaga

SEQ ID NO: 618217 - RNA, 19 nt, Homo sapiens
  misc_RNA (1)...(19): siRNA sense strand
cagugaagacgcccaaaga

SEQ ID NO: 618218 - RNA, 19 nt, Homo sapiens
  misc_RNA (1)...(19): siRNA sense strand
uauaaggcucuaugacuau

SEQ ID NO: 618219 - RNA, 19 nt, Homo sapiens
  misc_RNA (1)...(19): siRNA sense strand
uggacaagguggagaccaa

SEQ ID NO: 618220 - RNA, 19 nt, Homo sapiens
  misc_RNA (1)...(19): siRNA sense strand
ugacuaucuccagcaauua

SEQ ID NO: 618221 - RNA, 19 nt, Homo sapiens
  misc_RNA (1)...(19): siRNA sense strand
cagccaagcuccauuuacc

SEQ ID NO: 618222 - RNA, 19 nt, Homo sapiens
  misc_RNA (1)...(19): siRNA sense strand
uagagaagauccccuuaug

SEQ ID NO: 618223 - RNA, 19 nt, Homo sapiens
  misc_RNA (1)...(19): siRNA sense strand
agagaacaguacuggacaa

SEQ ID NO: 618224 - RNA, 19 nt, Homo sapiens
  misc_RNA (1)...(19): siRNA sense strand
ccaccaccaucaguaaaca

SEQ ID NO: 618225 - RNA, 19 nt, Homo sapiens
  misc_RNA (1)...(19): siRNA sense strand
gugaagacgcccaaagaca

SEQ ID NO: 618226 - RNA, 19 nt, Homo sapiens
  misc_RNA (1)...(19): siRNA sense strand
gcaucugcccucagccaaa

SEQ ID NO: 618227 - RNA, 19 nt, Homo sapiens
  misc_RNA (1)...(19): siRNA sense strand
cauggaggcucagguagca

SEQ ID NO: 618228 - RNA, 19 nt, Homo sapiens
  misc_RNA (1)...(19): siRNA sense strand
guuugugacucagcucauu

SEQ ID NO: 618229 - RNA, 19 nt, Homo sapiens
  misc_RNA (1)...(19): siRNA sense strand
uacgccagcugguucuuga

SEQ ID NO: 618230 - RNA, 19 nt, Homo sapiens
  misc_RNA (1)...(19): siRNA sense strand
ccucagccaagcuccauuu

SEQ ID NO: 618231 - RNA, 19 nt, Homo sapiens
  misc_RNA (1)...(19): siRNA sense strand
cuucaggcccucauugcua

SEQ ID NO: 618232 - RNA, 19 nt, Homo sapiens
  misc_RNA (1)...(19): siRNA sense strand
ucaguaacuuggagagcau

SEQ ID NO: 618233 - RNA, 19 nt, Homo sapiens
  misc_RNA (1)...(19): siRNA sense strand
caucugcccucagccaaag

SEQ ID NO: 618234 - RNA, 19 nt, Homo sapiens
  misc_RNA (1)...(19): siRNA sense strand
acaaggaggauuucucagu

SEQ ID NO: 618235 - RNA, 19 nt, Homo sapiens
  misc_RNA (1)...(19): siRNA sense strand
gagaagauccccuuauguc

SEQ ID NO: 618236 - RNA, 19 nt, Homo sapiens
  misc_RNA (1)...(19): siRNA sense strand
caccaucaguaaacagagu

SEQ ID NO: 618237 - RNA, 19 nt, Homo sapiens
  misc_RNA (1)...(19): siRNA sense strand
guauuauaaggcucuauga

SEQ ID NO: 618238 - RNA, 19 nt, Homo sapiens
  misc_RNA (1)...(19): siRNA sense strand
guccaugggcuuucugaau

SEQ ID NO: 618239 - RNA, 19 nt, Homo sapiens
  misc_RNA (1)...(19): siRNA sense strand
gcuuauccaagaucucuga

SEQ ID NO: 618240 - RNA, 19 nt, Homo sapiens
  misc_RNA (1)...(19): siRNA sense strand
uccauuugcucccuuaucu

SEQ ID NO: 618241 - RNA, 19 nt, Homo sapiens
  misc_RNA (1)...(19): siRNA sense strand
caugaugcaggagaugaua

SEQ ID NO: 618242 - RNA, 19 nt, Homo sapiens
  misc_RNA (1)...(19): siRNA sense strand
caaagacaaggaggauuuc

SEQ ID NO: 618243 - RNA, 19 nt, Homo sapiens
  misc_RNA (1)...(19): siRNA sense strand
cuccauaugcugcaagauu

SEQ ID NO: 618244 - RNA, 19 nt, Homo sapiens
  misc_RNA (1)...(19): siRNA sense strand
caagguggagaccaagaug

SEQ ID NO: 618245 - RNA, 19 nt, Homo sapiens
  misc_RNA (1)...(19): siRNA sense strand
ggagucaguagcaaucaag

SEQ ID NO: 618246 - RNA, 19 nt, Homo sapiens
  misc_RNA (1)...(19): siRNA sense strand
cuaugacuaucuccagcaa

SEQ ID NO: 618247 - RNA, 19 nt, Homo sapiens
  misc_RNA (1)...(19): siRNA sense strand
acagacacaugcacuaucc

SEQ ID NO: 618248 - RNA, 19 nt, Homo sapiens
  misc_RNA (1)...(19): siRNA sense strand
cagcuuguucuaaucuuug

SEQ ID NO: 618249 - RNA, 19 nt, Homo sapiens
  misc_RNA (1)...(19): siRNA sense strand
cuacuggacauagcacaaa

SEQ ID NO: 618250 - RNA, 19 nt, Homo sapiens
  misc_RNA (1)...(19): siRNA sense strand
gagcuagaauucaaguuua

SEQ ID NO: 618251 - RNA, 19 nt, Homo sapiens
  misc_RNA (1)...(19): siRNA sense strand
acagggagcugcagaggua

SEQ ID NO: 618252 - RNA, 19 nt, Homo sapiens
  misc_RNA (1)...(19): siRNA sense strand
gagauggccugcaaugaga

SEQ ID NO: 618253 - RNA, 19 nt, Homo sapiens
  misc_RNA (1)...(19): siRNA sense strand
gaagcaaguuuaucagauc

SEQ ID NO: 618254 - RNA, 19 nt, Homo sapiens
  misc_RNA (1)...(19): siRNA sense strand
uggaagaauugguagauaa

SEQ ID NO: 618255 - RNA, 19 nt, Homo sapiens
  misc_RNA (1)...(19): siRNA sense strand
gaagcucuuuccugacauu

SEQ ID NO: 618256 - RNA, 19 nt, Homo sapiens
  misc_RNA (1)...(19): siRNA sense strand
ucacauaacuuuggacaag

SEQ ID NO: 618257 - RNA, 19 nt, Homo sapiens
  misc_RNA (1)...(19): siRNA sense strand
gaucuggagacacuaauaa

SEQ ID NO: 618258 - RNA, 19 nt, Homo sapiens
  misc_RNA (1)...(19): siRNA sense strand
gaagagugagcuagaauuc

SEQ ID NO: 618259 - RNA, 19 nt, Homo sapiens
  misc_RNA (1)...(19): siRNA sense strand
caaaggcuauccuccugaa

SEQ ID NO: 618260 - RNA, 19 nt, Homo sapiens
  misc_RNA (1)...(19): siRNA sense strand
caacacccgugcuucauca

SEQ ID NO: 618261 - RNA, 19 nt, Homo sapiens
  misc_RNA (1)...(19): siRNA sense strand
ccauacaccucgaagcauu

SEQ ID NO: 618262 - RNA, 19 nt, Homo sapiens
  misc_RNA (1)...(19): siRNA sense strand
gaaggcaccauucuaacaa

SEQ ID NO: 618263 - RNA, 19 nt, Homo sapiens
  misc_RNA (1)...(19): siRNA sense strand
cagaagcucuuuccugaca

SEQ ID NO: 618264 - RNA, 19 nt, Homo sapiens
  misc_RNA (1)...(19): siRNA sense strand
gaacgucacauaacuuugg

SEQ ID NO: 618265 - RNA, 19 nt, Homo sapiens
  misc_RNA (1)...(19): siRNA sense strand
agagugagcuagaauucaa

SEQ ID NO: 618266 - RNA, 19 nt, Homo sapiens
  misc_RNA (1)...(19): siRNA sense strand
gaaacaggcauagcgauau

SEQ ID NO: 618267 - RNA, 19 nt, Homo sapiens
  misc_RNA (1)...(19): siRNA sense strand
caucauggaagaauuggua

SEQ ID NO: 618268 - RNA, 19 nt, Homo sapiens
  misc_RNA (1)...(19): siRNA sense strand
uggaugagauggcaguuga

SEQ ID NO: 618269 - RNA, 19 nt, Homo sapiens
  misc_RNA (1)...(19): siRNA sense strand
ggaaggcaccauucuaaca

SEQ ID NO: 618270 - RNA, 19 nt, Homo sapiens
  misc_RNA (1)...(19): siRNA sense strand
ugaaacaggcauagcgaua

SEQ ID NO: 618271 - RNA, 19 nt, Homo sapiens
  misc_RNA (1)...(19): siRNA sense strand
caaacgacaucuggaguuc

SEQ ID NO: 618272 - RNA, 19 nt, Homo sapiens
  misc_RNA (1)...(19): siRNA sense strand
ccagugggaugcagucaau

SEQ ID NO: 618273 - RNA, 19 nt, Homo sapiens
  misc_RNA (1)...(19): siRNA sense strand
ugagauggcaguugaauuc

SEQ ID NO: 618274 - RNA, 19 nt, Homo sapiens
  misc_RNA (1)...(19): siRNA sense strand
ccagaagagugagcuagaa

SEQ ID NO: 618275 - RNA, 19 nt, Homo sapiens
  misc_RNA (1)...(19): siRNA sense strand
ggaagaauugguagauaau

SEQ ID NO: 618276 - RNA, 19 nt, Homo sapiens
  misc_RNA (1)...(19): siRNA sense strand
ugaagcaaguuuaucagau

SEQ ID NO: 618277 - RNA, 19 nt, Homo sapiens
  misc_RNA (1)...(19): siRNA sense strand
gguagauaaucauggcaaa

SEQ ID NO: 618278 - RNA, 19 nt, Homo sapiens
  misc_RNA (1)...(19): siRNA sense strand
cuggagacacuaauaauuu

SEQ ID NO: 618279 - RNA, 19 nt, Homo sapiens
  misc_RNA (1)...(19): siRNA sense strand
ugagcuagaauucaaguuu

SEQ ID NO: 618280 - RNA, 19 nt, Homo sapiens
  misc_RNA (1)...(19): siRNA sense strand
aaacaggcauagcgauauc

SEQ ID NO: 618281 - RNA, 19 nt, Homo sapiens
  misc_RNA (1)...(19): siRNA sense strand
gguguuggaacgucacaua

SEQ ID NO: 618282 - RNA, 19 nt, Homo sapiens
  misc_RNA (1)...(19): siRNA sense strand
ggaucuggagacacuaaua

SEQ ID NO: 618283 - RNA, 19 nt, Homo sapiens
  misc_RNA (1)...(19): siRNA sense strand
agacaucuuuaaucuagug

SEQ ID NO: 618284 - RNA, 19 nt, Homo sapiens
  misc_RNA (1)...(19): siRNA sense strand
ccggaaggcaccauucuaa

SEQ ID NO: 618285 - RNA, 19 nt, Homo sapiens
  misc_RNA (1)...(19): siRNA sense strand
ccaugaagcaaguuuauca

SEQ ID NO: 618286 - RNA, 19 nt, Homo sapiens
  misc_RNA (1)...(19): siRNA sense strand
caguugaauuccugcauga

SEQ ID NO: 618287 - RNA, 19 nt, Homo sapiens
  misc_RNA (1)...(19): siRNA sense strand
gcuggagccuggagaacug

SEQ ID NO: 618288 - RNA, 19 nt, Homo sapiens
  misc_RNA (1)...(19): siRNA sense strand
cacccgugcuucaucauug

SEQ ID NO: 618289 - RNA, 19 nt, Homo sapiens
  misc_RNA (1)...(19): siRNA sense strand
guucagccaugaccaguac

SEQ ID NO: 618290 - RNA, 19 nt, Homo sapiens
  misc_RNA (1)...(19): siRNA sense strand
ccugugagauggccugcaa

SEQ ID NO: 618291 - RNA, 19 nt, Homo sapiens
  misc_RNA (1)...(19): siRNA sense strand
gggcaacacccgugcuuca

SEQ ID NO: 618292 - RNA, 19 nt, Homo sapiens
  misc_RNA (1)...(19): siRNA sense strand
agaagguccuggucacugu

SEQ ID NO: 618293 - RNA, 19 nt, Homo sapiens
  misc_RNA (1)...(19): siRNA sense strand
guuggaacgucacauaacu

SEQ ID NO: 618294 - RNA, 19 nt, Homo sapiens
  misc_RNA (1)...(19): siRNA sense strand
gaagaauugguagauaauc

SEQ ID NO: 618295 - RNA, 19 nt, Homo sapiens
  misc_RNA (1)...(19): siRNA sense strand
aaaguuggaucuggagaca

SEQ ID NO: 618296 - RNA, 19 nt, Homo sapiens
  misc_RNA (1)...(19): siRNA sense strand
gaauugguagauaaucaug

SEQ ID NO: 618297 - RNA, 19 nt, Homo sapiens
  misc_RNA (1)...(19): siRNA sense strand
gcaacacccgugcuucauc

SEQ ID NO: 618298 - RNA, 19 nt, Homo sapiens
  misc_RNA (1)...(19): siRNA sense strand
gagguacgccgaggagguu

SEQ ID NO: 618299 - RNA, 19 nt, Homo sapiens
  misc_RNA (1)...(19): siRNA sense strand
uggaacgucacauaacuuu

SEQ ID NO: 618300 - RNA, 19 nt, Homo sapiens
  misc_RNA (1)...(19): siRNA sense strand
gaauaucagaagcucuuuc

SEQ ID NO: 618301 - RNA, 19 nt, Homo sapiens
  misc_RNA (1)...(19): siRNA sense strand
ugagauggccugcaaugag

SEQ ID NO: 618302 - RNA, 19 nt, Homo sapiens
  misc_RNA (1)...(19): siRNA sense strand
cacauaacuuuggacaaga

SEQ ID NO: 618303 - RNA, 19 nt, Homo sapiens
  misc_RNA (1)...(19): siRNA sense strand
ccgaggagguugggaucuu

SEQ ID NO: 618304 - RNA, 19 nt, Homo sapiens
  misc_RNA (1)...(19): siRNA sense strand
ggucacuguugaagaggau

SEQ ID NO: 618305 - RNA, 19 nt, Homo sapiens
  misc_RNA (1)...(19): siRNA sense strand
gaugagauggcaguugaau

SEQ ID NO: 618306 - RNA, 19 nt, Homo sapiens
  misc_RNA (1)...(19): siRNA sense strand
cgaggagguugggaucuuc

SEQ ID NO: 618307 - RNA, 19 nt, Homo sapiens
  misc_RNA (1)...(19): siRNA sense strand
ccuggucacuguugaagag

SEQ ID NO: 618308 - RNA, 19 nt, Homo sapiens
  misc_RNA (1)...(19): siRNA sense strand
ggccauacaccucgaagca

SEQ ID NO: 618309 - RNA, 19 nt, Homo sapiens
  misc_RNA (1)...(19): siRNA sense strand
cggaauaucagaagcucuu

SEQ ID NO: 618310 - RNA, 19 nt, Homo sapiens
  misc_RNA (1)...(19): siRNA sense strand
ucuggagacacuaauaauu

SEQ ID NO: 618311 - RNA, 19 nt, Homo sapiens
  misc_RNA (1)...(19): siRNA sense strand
agaagagugagcuagaauu

SEQ ID NO: 618312 - RNA, 19 nt, Homo sapiens
  misc_RNA (1)...(19): siRNA sense strand
acaaacgacaucuggaguu

SEQ ID NO: 618313 - RNA, 19 nt, Homo sapiens
  misc_RNA (1)...(19): siRNA sense strand
ugacauucccauaggguau

SEQ ID NO: 618314 - RNA, 19 nt, Homo sapiens
  misc_RNA (1)...(19): siRNA sense strand
ggaauaucagaagcucuuu

SEQ ID NO: 618315 - RNA, 19 nt, Homo sapiens
  misc_RNA (1)...(19): siRNA sense strand
gagguugggaucuucuuca

SEQ ID NO: 618316 - RNA, 19 nt, Homo sapiens
  misc_RNA (1)...(19): siRNA sense strand
auggaagaauugguagaua

SEQ ID NO: 618317 - RNA, 19 nt, Homo sapiens
  misc_RNA (1)...(19): siRNA sense strand
cagaagagugagcuagaau

SEQ ID NO: 618318 - RNA, 19 nt, Homo sapiens
  misc_RNA (1)...(19): siRNA sense strand
ccucuggcauggaugagau

SEQ ID NO: 618319 - RNA, 19 nt, Homo sapiens
  misc_RNA (1)...(19): siRNA sense strand
gaagguccuggucacuguu

SEQ ID NO: 618320 - RNA, 19 nt, Homo sapiens
  misc_RNA (1)...(19): siRNA sense strand
caccaugaagcaaguuuau

SEQ ID NO: 618321 - RNA, 19 nt, Homo sapiens
  misc_RNA (1)...(19): siRNA sense strand
acaccaugaagcaaguuua

SEQ ID NO: 618322 - RNA, 19 nt, Homo sapiens
  misc_RNA (1)...(19): siRNA sense strand
ggaacgucacauaacuuug

SEQ ID NO: 618323 - RNA, 19 nt, Homo sapiens
  misc_RNA (1)...(19): siRNA sense strand
gacauucccauaggguauu

SEQ ID NO: 618324 - RNA, 19 nt, Homo sapiens
  misc_RNA (1)...(19): siRNA sense strand
guguuggaacgucacauaa

SEQ ID NO: 618325 - RNA, 19 nt, Homo sapiens
  misc_RNA (1)...(19): siRNA sense strand
ggucaucucggaauaucag

SEQ ID NO: 618326 - RNA, 19 nt, Homo sapiens
  misc_RNA (1)...(19): siRNA sense strand
ugugguggccaaagugaaa

SEQ ID NO: 618327 - RNA, 19 nt, Homo sapiens
  misc_RNA (1)...(19): siRNA sense strand
augagaagcugggcaaguc

SEQ ID NO: 618328 - RNA, 19 nt, Homo sapiens
  misc_RNA (1)...(19): siRNA sense strand
ggagguugggaucuucuuc

SEQ ID NO: 618329 - RNA, 19 nt, Homo sapiens
  misc_RNA (1)...(19): siRNA sense strand
gaaagcagaauaccuguuu

SEQ ID NO: 618330 - RNA, 19 nt, Homo sapiens
  misc_RNA (1)...(19): siRNA sense strand
ugaauuaugugcuaaguga

SEQ ID NO: 618331 - RNA, 19 nt, Homo sapiens
  misc_RNA (1)...(19): siRNA sense strand
guaaugauguugaaaugga

SEQ ID NO: 618332 - RNA, 19 nt, Homo sapiens
  misc_RNA (1)...(19): siRNA sense strand
caagauaaaccuaguggua

SEQ ID NO: 618333 - RNA, 19 nt, Homo sapiens
  misc_RNA (1)...(19): siRNA sense strand
cagaauaccuguuucaaag

SEQ ID NO: 618334 - RNA, 19 nt, Homo sapiens
  misc_RNA (1)...(19): siRNA sense strand
gaucuggcgugaggaaaua

SEQ ID NO: 618335 - RNA, 19 nt, Homo sapiens
  misc_RNA (1)...(19): siRNA sense strand
gggaagaagacaagaauuu

SEQ ID NO: 618336 - RNA, 19 nt, Homo sapiens
  misc_RNA (1)...(19): siRNA sense strand
gaagaagacaagaauuuga

SEQ ID NO: 618337 - RNA, 19 nt, Homo sapiens
  misc_RNA (1)...(19): siRNA sense strand
ucuaacagcuugccaguug

SEQ ID NO: 618338 - RNA, 19 nt, Homo sapiens
  misc_RNA (1)...(19): siRNA sense strand
gaacaauaacuucucaaga

SEQ ID NO: 618339 - RNA, 19 nt, Homo sapiens
  misc_RNA (1)...(19): siRNA sense strand
gcagaauaccuguuucaaa

SEQ ID NO: 618340 - RNA, 19 nt, Homo sapiens
  misc_RNA (1)...(19): siRNA sense strand
caaauucucauaugccuuu

SEQ ID NO: 618341 - RNA, 19 nt, Homo sapiens
  misc_RNA (1)...(19): siRNA sense strand
aaaggaacaugacaaacuu

SEQ ID NO: 618342 - RNA, 19 nt, Homo sapiens
  misc_RNA (1)...(19): siRNA sense strand
gagggaaacuggucuaaaa

SEQ ID NO: 618343 - RNA, 19 nt, Homo sapiens
  misc_RNA (1)...(19): siRNA sense strand
gcgcagaggcuauuauuca

SEQ ID NO: 618344 - RNA, 19 nt, Homo sapiens
  misc_RNA (1)...(19): siRNA sense strand
ggaagaagacaagaauuug

SEQ ID NO: 618345 - RNA, 19 nt, Homo sapiens
  misc_RNA (1)...(19): siRNA sense strand
ggcuauagcuguuuguaug

SEQ ID NO: 618346 - RNA, 19 nt, Homo sapiens
  misc_RNA (1)...(19): siRNA sense strand
uaaagaagcagaagaaguc

SEQ ID NO: 618347 - RNA, 19 nt, Homo sapiens
  misc_RNA (1)...(19): siRNA sense strand
gaaagaaagaagaguagga

SEQ ID NO: 618348 - RNA, 19 nt, Homo sapiens
  misc_RNA (1)...(19): siRNA sense strand
gaagcuaauuuggauacaa

SEQ ID NO: 618349 - RNA, 19 nt, Homo sapiens
  misc_RNA (1)...(19): siRNA sense strand
ggacaagaacaauaacuuc

SEQ ID NO: 618350 - RNA, 19 nt, Homo sapiens
  misc_RNA (1)...(19): siRNA sense strand
ggaaauauggagagggaaa

SEQ ID NO: 618351 - RNA, 19 nt, Homo sapiens
  misc_RNA (1)...(19): siRNA sense strand
gaauaccuguuucaaagag

SEQ ID NO: 618352 - RNA, 19 nt, Homo sapiens
  misc_RNA (1)...(19): siRNA sense strand
caucaaccuuucuaaugaa

SEQ ID NO: 618353 - RNA, 19 nt, Homo sapiens
  misc_RNA (1)...(19): siRNA sense strand
guugagaacgauauacaua

SEQ ID NO: 618354 - RNA, 19 nt, Homo sapiens
  misc_RNA (1)...(19): siRNA sense strand
gacaagaauuugagaucug

SEQ ID NO: 618355 - RNA, 19 nt, Homo sapiens
  misc_RNA (1)...(19): siRNA sense strand
ggaaacugaagcuaauuug

SEQ ID NO: 618356 - RNA, 19 nt, Homo sapiens
  misc_RNA (1)...(19): siRNA sense strand
ggaggaccaugaagaaacu

SEQ ID NO: 618357 - RNA, 19 nt, Homo sapiens
  misc_RNA (1)...(19): siRNA sense strand
gaauuacacccuuggaauc

SEQ ID NO: 618358 - RNA, 19 nt, Homo sapiens
  misc_RNA (1)...(19): siRNA sense strand
gaaacgacgaggagcaguu

SEQ ID NO: 618359 - RNA, 19 nt, Homo sapiens
  misc_RNA (1)...(19): siRNA sense strand
gauccaaauucucauaugc

SEQ ID NO: 618360 - RNA, 19 nt, Homo sapiens
  misc_RNA (1)...(19): siRNA sense strand
gaaauggaaacugaagcua

SEQ ID NO: 618361 - RNA, 19 nt, Homo sapiens
  misc_RNA (1)...(19): siRNA sense strand
caacagcgcagaggcuauu

SEQ ID NO: 618362 - RNA, 19 nt, Homo sapiens
  misc_RNA (1)...(19): siRNA sense strand
ucaaagagucagccgguaa

SEQ ID NO: 618363 - RNA, 19 nt, Homo sapiens
  misc_RNA (1)...(19): siRNA sense strand
cagcaacaagaccuuaaua

SEQ ID NO: 618364 - RNA, 19 nt, Homo sapiens
  misc_RNA (1)...(19): siRNA sense strand
aaacugaagcuaauuugga

SEQ ID NO: 618365 - RNA, 19 nt, Homo sapiens
  misc_RNA (1)...(19): siRNA sense strand
gaaaauggcaacuuuaaag

SEQ ID NO: 618366 - RNA, 19 nt, Homo sapiens
  misc_RNA (1)...(19): siRNA sense strand
aauggaaacugaagcuaau

SEQ ID NO: 618367 - RNA, 19 nt, Homo sapiens
  misc_RNA (1)...(19): siRNA sense strand
gcaguucgaaugccaggaa

SEQ ID NO: 618368 - RNA, 19 nt, Homo sapiens
  misc_RNA (1)...(19): siRNA sense strand
agauaaaccuagugguaau

SEQ ID NO: 618369 - RNA, 19 nt, Homo sapiens
  misc_RNA (1)...(19): siRNA sense strand
caaaaggacaagaacaaua

SEQ ID NO: 618370 - RNA, 19 nt, Homo sapiens
  misc_RNA (1)...(19): siRNA sense strand
gaacuccucaaaguacaaa

SEQ ID NO: 618371 - RNA, 19 nt, Homo sapiens
  misc_RNA (1)...(19): siRNA sense strand
aaauggaaacugaagcuaa

SEQ ID NO: 618372 - RNA, 19 nt, Homo sapiens
  misc_RNA (1)...(19): siRNA sense strand
cgaauuacacccuuggaau

SEQ ID NO: 618373 - RNA, 19 nt, Homo sapiens
  misc_RNA (1)...(19): siRNA sense strand
gaagacaagaauuugagau

SEQ ID NO: 618374 - RNA, 19 nt, Homo sapiens
  misc_RNA (1)...(19): siRNA sense strand
gcagaagagccacugaaag

SEQ ID NO: 618375 - RNA, 19 nt, Homo sapiens
  misc_RNA (1)...(19): siRNA sense strand
ggugauccaaauucucaua

SEQ ID NO: 618376 - RNA, 19 nt, Homo sapiens
  misc_RNA (1)...(19): siRNA sense strand
ggaaacuggucuaaaauac

SEQ ID NO: 618377 - RNA, 19 nt, Homo sapiens
  misc_RNA (1)...(19): siRNA sense strand
aaagaaagaagaguaggaa

SEQ ID NO: 618378 - RNA, 19 nt, Homo sapiens
  misc_RNA (1)...(19): siRNA sense strand
gaaacugaagcuaauuugg

SEQ ID NO: 618379 - RNA, 19 nt, Homo sapiens
  misc_RNA (1)...(19): siRNA sense strand
aagauaaaccuagugguaa

SEQ ID NO: 618380 - RNA, 19 nt, Homo sapiens
  misc_RNA (1)...(19): siRNA sense strand
acaaccacaugauggagaa

SEQ ID NO: 618381 - RNA, 19 nt, Homo sapiens
  misc_RNA (1)...(19): siRNA sense strand
aggcauggcuuugggaaga

SEQ ID NO: 618382 - RNA, 19 nt, Homo sapiens
  misc_RNA (1)...(19): siRNA sense strand
gcagaggcuauuauucaug

SEQ ID NO: 618383 - RNA, 19 nt, Homo sapiens
  misc_RNA (1)...(19): siRNA sense strand
ggagagggaaacuggucua

SEQ ID NO: 618384 - RNA, 19 nt, Homo sapiens
  misc_RNA (1)...(19): siRNA sense strand
ggaccaugaagaaacuaaa

SEQ ID NO: 618385 - RNA, 19 nt, Homo sapiens
  misc_RNA (1)...(19): siRNA sense strand
ccggcuggaugcucgauuu

SEQ ID NO: 618386 - RNA, 19 nt, Homo sapiens
  misc_RNA (1)...(19): siRNA sense strand
aauggcaacuuuaaagaag

SEQ ID NO: 618387 - RNA, 19 nt, Homo sapiens
  misc_RNA (1)...(19): siRNA sense strand
cagaagagccacugaaagc

SEQ ID NO: 618388 - RNA, 19 nt, Homo sapiens
  misc_RNA (1)...(19): siRNA sense strand
caacuuuaaagaagcagaa

SEQ ID NO: 618389 - RNA, 19 nt, Homo sapiens
  misc_RNA (1)...(19): siRNA sense strand
agacaagaauuugagaucu

SEQ ID NO: 618390 - RNA, 19 nt, Homo sapiens
  misc_RNA (1)...(19): siRNA sense strand
gaaagcaaaaggacaagaa

SEQ ID NO: 618391 - RNA, 19 nt, Homo sapiens
  misc_RNA (1)...(19): siRNA sense strand
augauaaucucucagaaag

SEQ ID NO: 618392 - RNA, 19 nt, Homo sapiens
  misc_RNA (1)...(19): siRNA sense strand
uauggaaaauggcaacuuu

SEQ ID NO: 618393 - RNA, 19 nt, Homo sapiens
  misc_RNA (1)...(19): siRNA sense strand
gggaaacuggucuaaaaua

SEQ ID NO: 618394 - RNA, 19 nt, Homo sapiens
  misc_RNA (1)...(19): siRNA sense strand
gagagggaaacuggucuaa

SEQ ID NO: 618395 - RNA, 19 nt, Homo sapiens
  misc_RNA (1)...(19): siRNA sense strand
cagcgcagaggcuauuauu

SEQ ID NO: 618396 - RNA, 19 nt, Homo sapiens
  misc_RNA (1)...(19): siRNA sense strand
aagcuaauuuggauacaag

SEQ ID NO: 618397 - RNA, 19 nt, Homo sapiens
  misc_RNA (1)...(19): siRNA sense strand
ugguaaugauguugaaaug

SEQ ID NO: 618398 - RNA, 19 nt, Homo sapiens
  misc_RNA (1)...(19): siRNA sense strand
ggaaaauggcaacuuuaaa

SEQ ID NO: 618399 - RNA, 19 nt, Homo sapiens
  misc_RNA (1)...(19): siRNA sense strand
uggcagaaacagagagaaa

SEQ ID NO: 618400 - RNA, 19 nt, Homo sapiens
  misc_RNA (1)...(19): siRNA sense strand
caagugucauguuaaaaga

SEQ ID NO: 618401 - RNA, 19 nt, Homo sapiens
  misc_RNA (1)...(19): siRNA sense strand
ucaacaaccggacaagugu

SEQ ID NO: 618402 - RNA, 19 nt, Homo sapiens
  misc_RNA (1)...(19): siRNA sense strand
aaaccuagugguaaugaug

SEQ ID NO: 618403 - RNA, 19 nt, Homo sapiens
  misc_RNA (1)...(19): siRNA sense strand
gauaaaccuagugguaaug

SEQ ID NO: 618404 - RNA, 19 nt, Homo sapiens
  misc_RNA (1)...(19): siRNA sense strand
gcuacaaccacaugaugga

SEQ ID NO: 618405 - RNA, 19 nt, Homo sapiens
  misc_RNA (1)...(19): siRNA sense strand
uuucaacacuucagcuaca

SEQ ID NO: 618406 - RNA, 19 nt, Homo sapiens
  misc_RNA (1)...(19): siRNA sense strand
aagaauauuuggugaucca

SEQ ID NO: 618407 - RNA, 19 nt, Homo sapiens
  misc_RNA (1)...(19): siRNA sense strand
uuaucuaaguugcaacaug

SEQ ID NO: 618408 - RNA, 19 nt, Homo sapiens
  misc_RNA (1)...(19): siRNA sense strand
uggaaacugaagcuaauuu

SEQ ID NO: 618409 - RNA, 19 nt, Homo sapiens
  misc_RNA (1)...(19): siRNA sense strand
ugauccaaauucucauaug

SEQ ID NO: 618410 - RNA, 19 nt, Homo sapiens
  misc_RNA (1)...(19): siRNA sense strand
gcuaauuuggauacaagaa

SEQ ID NO: 618411 - RNA, 19 nt, Homo sapiens
  misc_RNA (1)...(19): siRNA sense strand
uauagcuguuuguauggaa

SEQ ID NO: 618412 - RNA, 19 nt, Homo sapiens
  misc_RNA (1)...(19): siRNA sense strand
caagaauugcagcaggaaa

SEQ ID NO: 618413 - RNA, 19 nt, Homo sapiens
  misc_RNA (1)...(19): siRNA sense strand
cagcuacaaccacaugaug

SEQ ID NO: 618414 - RNA, 19 nt, Homo sapiens
  misc_RNA (1)...(19): siRNA sense strand
cuaacagcuugccaguuga

SEQ ID NO: 618415 - RNA, 19 nt, Homo sapiens
  misc_RNA (1)...(19): siRNA sense strand
uuaaagaagcagaagaagu

SEQ ID NO: 618416 - RNA, 19 nt, Homo sapiens
  misc_RNA (1)...(19): siRNA sense strand
ggaacuccucaaaguacaa

SEQ ID NO: 618417 - RNA, 19 nt, Homo sapiens
  misc_RNA (1)...(19): siRNA sense strand
aacccuugaugcacaguuu

SEQ ID NO: 618418 - RNA, 19 nt, Homo sapiens
  misc_RNA (1)...(19): siRNA sense strand
gaauuaugugcuaagugaa

SEQ ID NO: 618419 - RNA, 19 nt, Homo sapiens
  misc_RNA (1)...(19): siRNA sense strand
gcagaaacagagagaaacg

SEQ ID NO: 618420 - RNA, 19 nt, Homo sapiens
  misc_RNA (1)...(19): siRNA sense strand
gauggcagaaacagagaga

SEQ ID NO: 618421 - RNA, 19 nt, Homo sapiens
  misc_RNA (1)...(19): siRNA sense strand
ugaaaaggaacaugacaaa

SEQ ID NO: 618422 - RNA, 19 nt, Homo sapiens
  misc_RNA (1)...(19): siRNA sense strand
aaacuggucuaaaauacug

SEQ ID NO: 618423 - RNA, 19 nt, Homo sapiens
  misc_RNA (1)...(19): siRNA sense strand
ggcauggcuuugggaagaa

SEQ ID NO: 618424 - RNA, 19 nt, Homo sapiens
  misc_RNA (1)...(19): siRNA sense strand
gggaugccgacccuacuga

SEQ ID NO: 618425 - RNA, 19 nt, Homo sapiens
  misc_RNA (1)...(19): siRNA sense strand
agcaacaagaccuuaauaa

SEQ ID NO: 618426 - RNA, 19 nt, Homo sapiens
  misc_RNA (1)...(19): siRNA sense strand
aacugaagcuaauuuggau

SEQ ID NO: 618427 - RNA, 19 nt, Homo sapiens
  misc_RNA (1)...(19): siRNA sense strand
acgaggagcaguucgaaug

SEQ ID NO: 618428 - RNA, 19 nt, Homo sapiens
  misc_RNA (1)...(19): siRNA sense strand
cuuuaaagaagcagaagaa

SEQ ID NO: 618429 - RNA, 19 nt, Homo sapiens
  misc_RNA (1)...(19): siRNA sense strand
gaaagcagaauaccuguuu

SEQ ID NO: 618430 - RNA, 19 nt, Homo sapiens
  misc_RNA (1)...(19): siRNA sense strand
ugaauuaugugcuaaguga

SEQ ID NO: 618431 - RNA, 19 nt, Homo sapiens
  misc_RNA (1)...(19): siRNA sense strand
guaaugauguugaaaugga

SEQ ID NO: 618432 - RNA, 19 nt, Homo sapiens
  misc_RNA (1)...(19): siRNA sense strand
caagauaaaccuaguggua

SEQ ID NO: 618433 - RNA, 19 nt, Homo sapiens
  misc_RNA (1)...(19): siRNA sense strand
cagaauaccuguuucaaag

SEQ ID NO: 618434 - RNA, 19 nt, Homo sapiens
  misc_RNA (1)...(19): siRNA sense strand
gaucuggcgugaggaaaua

SEQ ID NO: 618435 - RNA, 19 nt, Homo sapiens
  misc_RNA (1)...(19): siRNA sense strand
gggaagaagacaagaauuu

SEQ ID NO: 618436 - RNA, 19 nt, Homo sapiens
  misc_RNA (1)...(19): siRNA sense strand
gaagaagacaagaauuuga

SEQ ID NO: 618437 - RNA, 19 nt, Homo sapiens
  misc_RNA (1)...(19): siRNA sense strand
ucuaacagcuugccaguug

SEQ ID NO: 618438 - RNA, 19 nt, Homo sapiens
  misc_RNA (1)...(19): siRNA sense strand
gaacaauaacuucucaaga

SEQ ID NO: 618439 - RNA, 19 nt, Homo sapiens
  misc_RNA (1)...(19): siRNA sense strand
gcagaauaccuguuucaaa

SEQ ID NO: 618440 - RNA, 19 nt, Homo sapiens
  misc_RNA (1)...(19): siRNA sense strand
caaauucucauaugccuuu

SEQ ID NO: 618441 - RNA, 19 nt, Homo sapiens
  misc_RNA (1)...(19): siRNA sense strand
aaaggaacaugacaaacuu

SEQ ID NO: 618442 - RNA, 19 nt, Homo sapiens
  misc_RNA (1)...(19): siRNA sense strand
gagggaaacuggucuaaaa

SEQ ID NO: 618443 - RNA, 19 nt, Homo sapiens
  misc_RNA (1)...(19): siRNA sense strand
gcgcagaggcuauuauuca

SEQ ID NO: 618444 - RNA, 19 nt, Homo sapiens
  misc_RNA (1)...(19): siRNA sense strand
ggaagaagacaagaauuug

SEQ ID NO: 618445 - RNA, 19 nt, Homo sapiens
  misc_RNA (1)...(19): siRNA sense strand
ggcuauagcuguuuguaug

SEQ ID NO: 618446 - RNA, 19 nt, Homo sapiens
  misc_RNA (1)...(19): siRNA sense strand
uaaagaagcagaagaaguc

SEQ ID NO: 618447 - RNA, 19 nt, Homo sapiens
  misc_RNA (1)...(19): siRNA sense strand
gaaagaaagaagaguagga

SEQ ID NO: 618448 - RNA, 19 nt, Homo sapiens
  misc_RNA (1)...(19): siRNA sense strand
gaagcuaauuuggauacaa

SEQ ID NO: 618449 - RNA, 19 nt, Homo sapiens
  misc_RNA (1)...(19): siRNA sense strand
ggacaagaacaauaacuuc

SEQ ID NO: 618450 - RNA, 19 nt, Homo sapiens
  misc_RNA (1)...(19): siRNA sense strand
ggaaauauggagagggaaa

SEQ ID NO: 618451 - RNA, 19 nt, Homo sapiens
  misc_RNA (1)...(19): siRNA sense strand
gaauaccuguuucaaagag

SEQ ID NO: 618452 - RNA, 19 nt, Homo sapiens
  misc_RNA (1)...(19): siRNA sense strand
caucaaccuuucuaaugaa

SEQ ID NO: 618453 - RNA, 19 nt, Homo sapiens
  misc_RNA (1)...(19): siRNA sense strand
guugagaacgauauacaua

SEQ ID NO: 618454 - RNA, 19 nt, Homo sapiens
  misc_RNA (1)...(19): siRNA sense strand
gacaagaauuugagaucug

SEQ ID NO: 618455 - RNA, 19 nt, Homo sapiens
  misc_RNA (1)...(19): siRNA sense strand
ggaaacugaagcuaauuug

SEQ ID NO: 618456 - RNA, 19 nt, Homo sapiens
  misc_RNA (1)...(19): siRNA sense strand
ggaggaccaugaagaaacu

SEQ ID NO: 618457 - RNA, 19 nt, Homo sapiens
  misc_RNA (1)...(19): siRNA sense strand
gaauuacacccuuggaauc

SEQ ID NO: 618458 - RNA, 19 nt, Homo sapiens
  misc_RNA (1)...(19): siRNA sense strand
gaaacgacgaggagcaguu

SEQ ID NO: 618459 - RNA, 19 nt, Homo sapiens
  misc_RNA (1)...(19): siRNA sense strand
gauccaaauucucauaugc

SEQ ID NO: 618460 - RNA, 19 nt, Homo sapiens
  misc_RNA (1)...(19): siRNA sense strand
gaaauggaaacugaagcua

SEQ ID NO: 618461 - RNA, 19 nt, Homo sapiens
  misc_RNA (1)...(19): siRNA sense strand
caacagcgcagaggcuauu

SEQ ID NO: 618462 - RNA, 19 nt, Homo sapiens
  misc_RNA (1)...(19): siRNA sense strand
ucaaagagucagccgguaa

SEQ ID NO: 618463 - RNA, 19 nt, Homo sapiens
  misc_RNA (1)...(19): siRNA sense strand
cagcaacaagaccuuaaua

SEQ ID NO: 618464 - RNA, 19 nt, Homo sapiens
  misc_RNA (1)...(19): siRNA sense strand
aaacugaagcuaauuugga

SEQ ID NO: 618465 - RNA, 19 nt, Homo sapiens
  misc_RNA (1)...(19): siRNA sense strand
gaaaauggcaacuuuaaag

SEQ ID NO: 618466 - RNA, 19 nt, Homo sapiens
  misc_RNA (1)...(19): siRNA sense strand
aauggaaacugaagcuaau

SEQ ID NO: 618467 - RNA, 19 nt, Homo sapiens
  misc_RNA (1)...(19): siRNA sense strand
gcaguucgaaugccaggaa

SEQ ID NO: 618468 - RNA, 19 nt, Homo sapiens
  misc_RNA (1)...(19): siRNA sense strand
agauaaaccuagugguaau

SEQ ID NO: 618469 - RNA, 19 nt, Homo sapiens
  misc_RNA (1)...(19): siRNA sense strand
caaaaggacaagaacaaua

SEQ ID NO: 618470 - RNA, 19 nt, Homo sapiens
  misc_RNA (1)...(19): siRNA sense strand
gaacuccucaaaguacaaa

SEQ ID NO: 618471 - RNA, 19 nt, Homo sapiens
  misc_RNA (1)...(19): siRNA sense strand
aaauggaaacugaagcuaa

SEQ ID NO: 618472 - RNA, 19 nt, Homo sapiens
  misc_RNA (1)...(19): siRNA sense strand
cgaauuacacccuuggaau

SEQ ID NO: 618473 - RNA, 19 nt, Homo sapiens
  misc_RNA (1)...(19): siRNA sense strand
gaagacaagaauuugagau

SEQ ID NO: 618474 - RNA, 19 nt, Homo sapiens
  misc_RNA (1)...(19): siRNA sense strand
gcagaagagccacugaaag

SEQ ID NO: 618475 - RNA, 19 nt, Homo sapiens
  misc_RNA (1)...(19): siRNA sense strand
ggugauccaaauucucaua

SEQ ID NO: 618476 - RNA, 19 nt, Homo sapiens
  misc_RNA (1)...(19): siRNA sense strand
ggaaacuggucuaaaauac

SEQ ID NO: 618477 - RNA, 19 nt, Homo sapiens
  misc_RNA (1)...(19): siRNA sense strand
aaagaaagaagaguaggaa

SEQ ID NO: 618478 - RNA, 19 nt, Homo sapiens
  misc_RNA (1)...(19): siRNA sense strand
gaaacugaagcuaauuugg

SEQ ID NO: 618479 - RNA, 19 nt, Homo sapiens
  misc_RNA (1)...(19): siRNA sense strand
aagauaaaccuagugguaa

SEQ ID NO: 618480 - RNA, 19 nt, Homo sapiens
  misc_RNA (1)...(19): siRNA sense strand
acaaccacaugauggagaa

SEQ ID NO: 618481 - RNA, 19 nt, Homo sapiens
  misc_RNA (1)...(19): siRNA sense strand
aggcauggcuuugggaaga

SEQ ID NO: 618482 - RNA, 19 nt, Homo sapiens
  misc_RNA (1)...(19): siRNA sense strand
gcagaggcuauuauucaug

SEQ ID NO: 618483 - RNA, 19 nt, Homo sapiens
  misc_RNA (1)...(19): siRNA sense strand
ggagagggaaacuggucua

SEQ ID NO: 618484 - RNA, 19 nt, Homo sapiens
  misc_RNA (1)...(19): siRNA sense strand
ggaccaugaagaaacuaaa

SEQ ID NO: 618485 - RNA, 19 nt, Homo sapiens
  misc_RNA (1)...(19): siRNA sense strand
ccggcuggaugcucgauuu

SEQ ID NO: 618486 - RNA, 19 nt, Homo sapiens
  misc_RNA (1)...(19): siRNA sense strand
aauggcaacuuuaaagaag

SEQ ID NO: 618487 - RNA, 19 nt, Homo sapiens
  misc_RNA (1)...(19): siRNA sense strand
cagaagagccacugaaagc

SEQ ID NO: 618488 - RNA, 19 nt, Homo sapiens
  misc_RNA (1)...(19): siRNA sense strand
caacuuuaaagaagcagaa

SEQ ID NO: 618489 - RNA, 19 nt, Homo sapiens
  misc_RNA (1)...(19): siRNA sense strand
agacaagaauuugagaucu

SEQ ID NO: 618490 - RNA, 19 nt, Homo sapiens
  misc_RNA (1)...(19): siRNA sense strand
gaaagcaaaaggacaagaa

SEQ ID NO: 618491 - RNA, 19 nt, Homo sapiens
  misc_RNA (1)...(19): siRNA sense strand
augauaaucucucagaaag

SEQ ID NO: 618492 - RNA, 19 nt, Homo sapiens
  misc_RNA (1)...(19): siRNA sense strand
uauggaaaauggcaacuuu

SEQ ID NO: 618493 - RNA, 19 nt, Homo sapiens
  misc_RNA (1)...(19): siRNA sense strand
gggaaacuggucuaaaaua

SEQ ID NO: 618494 - RNA, 19 nt, Homo sapiens
  misc_RNA (1)...(19): siRNA sense strand
gagagggaaacuggucuaa

SEQ ID NO: 618495 - RNA, 19 nt, Homo sapiens
  misc_RNA (1)...(19): siRNA sense strand
cagcgcagaggcuauuauu

SEQ ID NO: 618496 - RNA, 19 nt, Homo sapiens
  misc_RNA (1)...(19): siRNA sense strand
aagcuaauuuggauacaag

SEQ ID NO: 618497 - RNA, 19 nt, Homo sapiens
  misc_RNA (1)...(19): siRNA sense strand
ugguaaugauguugaaaug

SEQ ID NO: 618498 - RNA, 19 nt, Homo sapiens
  misc_RNA (1)...(19): siRNA sense strand
ggaaaauggcaacuuuaaa

SEQ ID NO: 618499 - RNA, 19 nt, Homo sapiens
  misc_RNA (1)...(19): siRNA sense strand
uggcagaaacagagagaaa

SEQ ID NO: 618500 - RNA, 19 nt, Homo sapiens
  misc_RNA (1)...(19): siRNA sense strand
caagugucauguuaaaaga

SEQ ID NO: 618501 - RNA, 19 nt, Homo sapiens
  misc_RNA (1)...(19): siRNA sense strand
ucaacaaccggacaagugu

SEQ ID NO: 618502 - RNA, 19 nt, Homo sapiens
  misc_RNA (1)...(19): siRNA sense strand
aaaccuagugguaaugaug

SEQ ID NO: 618503 - RNA, 19 nt, Homo sapiens
  misc_RNA (1)...(19): siRNA sense strand
gauaaaccuagugguaaug

SEQ ID NO: 618504 - RNA, 19 nt, Homo sapiens
  misc_RNA (1)...(19): siRNA sense strand
gcuacaaccacaugaugga

SEQ ID NO: 618505 - RNA, 19 nt, Homo sapiens
  misc_RNA (1)...(19): siRNA sense strand
uuucaacacuucagcuaca

SEQ ID NO: 618506 - RNA, 19 nt, Homo sapiens
  misc_RNA (1)...(19): siRNA sense strand
aagaauauuuggugaucca

SEQ ID NO: 618507 - RNA, 19 nt, Homo sapiens
  misc_RNA (1)...(19): siRNA sense strand
uuaucuaaguugcaacaug

SEQ ID NO: 618508 - RNA, 19 nt, Homo sapiens
  misc_RNA (1)...(19): siRNA sense strand
uggaaacugaagcuaauuu

SEQ ID NO: 618509 - RNA, 19 nt, Homo sapiens
  misc_RNA (1)...(19): siRNA sense strand
ugauccaaauucucauaug

SEQ ID NO: 618510 - RNA, 19 nt, Homo sapiens
  misc_RNA (1)...(19): siRNA sense strand
gcuaauuuggauacaagaa

SEQ ID NO: 618511 - RNA, 19 nt, Homo sapiens
  misc_RNA (1)...(19): siRNA sense strand
uauagcuguuuguauggaa

SEQ ID NO: 618512 - RNA, 19 nt, Homo sapiens
  misc_RNA (1)...(19): siRNA sense strand
caagaauugcagcaggaaa

SEQ ID NO: 618513 - RNA, 19 nt, Homo sapiens
  misc_RNA (1)...(19): siRNA sense strand
cagcuacaaccacaugaug

SEQ ID NO: 618514 - RNA, 19 nt, Homo sapiens
  misc_RNA (1)...(19): siRNA sense strand
cuaacagcuugccaguuga

SEQ ID NO: 618515 - RNA, 19 nt, Homo sapiens
  misc_RNA (1)...(19): siRNA sense strand
uuaaagaagcagaagaagu

SEQ ID NO: 618516 - RNA, 19 nt, Homo sapiens
  misc_RNA (1)...(19): siRNA sense strand
ggaacuccucaaaguacaa

SEQ ID NO: 618517 - RNA, 19 nt, Homo sapiens
  misc_RNA (1)...(19): siRNA sense strand
aacccuugaugcacaguuu

SEQ ID NO: 618518 - RNA, 19 nt, Homo sapiens
  misc_RNA (1)...(19): siRNA sense strand
gaauuaugugcuaagugaa

SEQ ID NO: 618519 - RNA, 19 nt, Homo sapiens
  misc_RNA (1)...(19): siRNA sense strand
gcagaaacagagagaaacg

SEQ ID NO: 618520 - RNA, 19 nt, Homo sapiens
  misc_RNA (1)...(19): siRNA sense strand
gauggcagaaacagagaga

SEQ ID NO: 618521 - RNA, 19 nt, Homo sapiens
  misc_RNA (1)...(19): siRNA sense strand
ugaaaaggaacaugacaaa

SEQ ID NO: 618522 - RNA, 19 nt, Homo sapiens
  misc_RNA (1)...(19): siRNA sense strand
aaacuggucuaaaauacug

SEQ ID NO: 618523 - RNA, 19 nt, Homo sapiens
  misc_RNA (1)...(19): siRNA sense strand
ggcauggcuuugggaagaa

SEQ ID NO: 618524 - RNA, 19 nt, Homo sapiens
  misc_RNA (1)...(19): siRNA sense strand
gggaugccgacccuacuga

SEQ ID NO: 618525 - RNA, 19 nt, Homo sapiens
  misc_RNA (1)...(19): siRNA sense strand
agcaacaagaccuuaauaa

SEQ ID NO: 618526 - RNA, 19 nt, Homo sapiens
  misc_RNA (1)...(19): siRNA sense strand
aacugaagcuaauuuggau

SEQ ID NO: 618527 - RNA, 19 nt, Homo sapiens
  misc_RNA (1)...(19): siRNA sense strand
acgaggagcaguucgaaug

SEQ ID NO: 618528 - RNA, 19 nt, Homo sapiens
  misc_RNA (1)...(19): siRNA sense strand
cuuuaaagaagcagaagaa

SEQ ID NO: 618529 - RNA, 19 nt, Homo sapiens
  misc_RNA (1)...(19): siRNA sense strand
gaacaagauucgagaacaa

SEQ ID NO: 618530 - RNA, 19 nt, Homo sapiens
  misc_RNA (1)...(19): siRNA sense strand
gaacaaaaccgacaagaug

SEQ ID NO: 618531 - RNA, 19 nt, Homo sapiens
  misc_RNA (1)...(19): siRNA sense strand
ggaacaagauucgagaaca

SEQ ID NO: 618532 - RNA, 19 nt, Homo sapiens
  misc_RNA (1)...(19): siRNA sense strand
gagaugaggaacaagauuc

SEQ ID NO: 618533 - RNA, 19 nt, Homo sapiens
  misc_RNA (1)...(19): siRNA sense strand
ggagaugaggaacaagauu

SEQ ID NO: 618534 - RNA, 19 nt, Homo sapiens
  misc_RNA (1)...(19): siRNA sense strand
aagaagcgcgucaccauga

SEQ ID NO: 618535 - RNA, 19 nt, Homo sapiens
  misc_RNA (1)...(19): siRNA sense strand
gagcgucauugccgagaag

SEQ ID NO: 618536 - RNA, 19 nt, Homo sapiens
  misc_RNA (1)...(19): siRNA sense strand
ccgacaagaugugaaguca

SEQ ID NO: 618537 - RNA, 19 nt, Homo sapiens
  misc_RNA (1)...(19): siRNA sense strand
gaggaacaagauucgagaa

SEQ ID NO: 618538 - RNA, 19 nt, Homo sapiens
  misc_RNA (1)...(19): siRNA sense strand
ucaaccugauggagcagaa

SEQ ID NO: 618539 - RNA, 19 nt, Homo sapiens
  misc_RNA (1)...(19): siRNA sense strand
agaagaagcgcgucaccau

SEQ ID NO: 618540 - RNA, 19 nt, Homo sapiens
  misc_RNA (1)...(19): siRNA sense strand
guacuggagaugaggaaca

SEQ ID NO: 618541 - RNA, 19 nt, Homo sapiens
  misc_RNA (1)...(19): siRNA sense strand
cgagcgucauugccgagaa

SEQ ID NO: 618542 - RNA, 19 nt, Homo sapiens
  misc_RNA (1)...(19): siRNA sense strand
gaacaagauucgagaacaa

SEQ ID NO: 618543 - RNA, 19 nt, Homo sapiens
  misc_RNA (1)...(19): siRNA sense strand
gaacaaaaccgacaagaug

SEQ ID NO: 618544 - RNA, 19 nt, Homo sapiens
  misc_RNA (1)...(19): siRNA sense strand
ggaacaagauucgagaaca

SEQ ID NO: 618545 - RNA, 19 nt, Homo sapiens
  misc_RNA (1)...(19): siRNA sense strand
gagaugaggaacaagauuc

SEQ ID NO: 618546 - RNA, 19 nt, Homo sapiens
  misc_RNA (1)...(19): siRNA sense strand
ggagaugaggaacaagauu

SEQ ID NO: 618547 - RNA, 19 nt, Homo sapiens
  misc_RNA (1)...(19): siRNA sense strand
aagaagcgcgucaccauga

SEQ ID NO: 618548 - RNA, 19 nt, Homo sapiens
  misc_RNA (1)...(19): siRNA sense strand
gagcgucauugccgagaag

SEQ ID NO: 618549 - RNA, 19 nt, Homo sapiens
  misc_RNA (1)...(19): siRNA sense strand
ccgacaagaugugaaguca

SEQ ID NO: 618550 - RNA, 19 nt, Homo sapiens
  misc_RNA (1)...(19): siRNA sense strand
gaggaacaagauucgagaa

SEQ ID NO: 618551 - RNA, 19 nt, Homo sapiens
  misc_RNA (1)...(19): siRNA sense strand
ucaaccugauggagcagaa

SEQ ID NO: 618552 - RNA, 19 nt, Homo sapiens
  misc_RNA (1)...(19): siRNA sense strand
agaagaagcgcgucaccau

SEQ ID NO: 618553 - RNA, 19 nt, Homo sapiens
  misc_RNA (1)...(19): siRNA sense strand
guacuggagaugaggaaca

SEQ ID NO: 618554 - RNA, 19 nt, Homo sapiens
  misc_RNA (1)...(19): siRNA sense strand
cgagcgucauugccgagaa

SEQ ID NO: 618555 - RNA, 19 nt, Homo sapiens
  misc_RNA (1)...(19): siRNA sense strand
gaacaagauucgagaacaa

SEQ ID NO: 618556 - RNA, 19 nt, Homo sapiens
  misc_RNA (1)...(19): siRNA sense strand
gaacaaaaccgacaagaug

SEQ ID NO: 618557 - RNA, 19 nt, Homo sapiens
  misc_RNA (1)...(19): siRNA sense strand
ggaacaagauucgagaaca

SEQ ID NO: 618558 - RNA, 19 nt, Homo sapiens
  misc_RNA (1)...(19): siRNA sense strand
gagaugaggaacaagauuc

SEQ ID NO: 618559 - RNA, 19 nt, Homo sapiens
  misc_RNA (1)...(19): siRNA sense strand
ggagaugaggaacaagauu

SEQ ID NO: 618560 - RNA, 19 nt, Homo sapiens
  misc_RNA (1)...(19): siRNA sense strand
aagaagcgcgucaccauga

SEQ ID NO: 618561 - RNA, 19 nt, Homo sapiens
  misc_RNA (1)...(19): siRNA sense strand
gagcgucauugccgagaag

SEQ ID NO: 618562 - RNA, 19 nt, Homo sapiens
  misc_RNA (1)...(19): siRNA sense strand
ccgacaagaugugaaguca

SEQ ID NO: 618563 - RNA, 19 nt, Homo sapiens
  misc_RNA (1)...(19): siRNA sense strand
gaggaacaagauucgagaa

SEQ ID NO: 618564 - RNA, 19 nt, Homo sapiens
  misc_RNA (1)...(19): siRNA sense strand
ucaaccugauggagcagaa

SEQ ID NO: 618565 - RNA, 19 nt, Homo sapiens
  misc_RNA (1)...(19): siRNA sense strand
agaagaagcgcgucaccau

SEQ ID NO: 618566 - RNA, 19 nt, Homo sapiens
  misc_RNA (1)...(19): siRNA sense strand
guacuggagaugaggaaca

SEQ ID NO: 618567 - RNA, 19 nt, Homo sapiens
  misc_RNA (1)...(19): siRNA sense strand
cgagcgucauugccgagaa

SEQ ID NO: 618568 - RNA, 19 nt, Homo sapiens
  misc_RNA (1)...(19): siRNA sense strand
gaacaagauucgagaacaa

SEQ ID NO: 618569 - RNA, 19 nt, Homo sapiens
  misc_RNA (1)...(19): siRNA sense strand
gaacaaaaccgacaagaug

SEQ ID NO: 618570 - RNA, 19 nt, Homo sapiens
  misc_RNA (1)...(19): siRNA sense strand
ggaacaagauucgagaaca

SEQ ID NO: 618571 - RNA, 19 nt, Homo sapiens
  misc_RNA (1)...(19): siRNA sense strand
gagaugaggaacaagauuc

SEQ ID NO: 618572 - RNA, 19 nt, Homo sapiens
  misc_RNA (1)...(19): siRNA sense strand
ggagaugaggaacaagauu

SEQ ID NO: 618573 - RNA, 19 nt, Homo sapiens
  misc_RNA (1)...(19): siRNA sense strand
aagaagcgcgucaccauga

SEQ ID NO: 618574 - RNA, 19 nt, Homo sapiens
  misc_RNA (1)...(19): siRNA sense strand
gagcgucauugccgagaag

SEQ ID NO: 618575 - RNA, 19 nt, Homo sapiens
  misc_RNA (1)...(19): siRNA sense strand
ccgacaagaugugaaguca

SEQ ID NO: 618576 - RNA, 19 nt, Homo sapiens
  misc_RNA (1)...(19): siRNA sense strand
gaggaacaagauucgagaa

SEQ ID NO: 618577 - RNA, 19 nt, Homo sapiens
  misc_RNA (1)...(19): siRNA sense strand
ucaaccugauggagcagaa

SEQ ID NO: 618578 - RNA, 19 nt, Homo sapiens
  misc_RNA (1)...(19): siRNA sense strand
agaagaagcgcgucaccau

SEQ ID NO: 618579 - RNA, 19 nt, Homo sapiens
  misc_RNA (1)...(19): siRNA sense strand
guacuggagaugaggaaca

SEQ ID NO: 618580 - RNA, 19 nt, Homo sapiens
  misc_RNA (1)...(19): siRNA sense strand
cgagcgucauugccgagaa

SEQ ID NO: 618581 - RNA, 19 nt, Homo sapiens
  misc_RNA (1)...(19): siRNA sense strand
gaacaagauucgagaacaa

SEQ ID NO: 618582 - RNA, 19 nt, Homo sapiens
  misc_RNA (1)...(19): siRNA sense strand
gaacaaaaccgacaagaug

SEQ ID NO: 618583 - RNA, 19 nt, Homo sapiens
  misc_RNA (1)...(19): siRNA sense strand
ggaacaagauucgagaaca

SEQ ID NO: 618584 - RNA, 19 nt, Homo sapiens
  misc_RNA (1)...(19): siRNA sense strand
gagaugaggaacaagauuc

SEQ ID NO: 618585 - RNA, 19 nt, Homo sapiens
  misc_RNA (1)...(19): siRNA sense strand
ggagaugaggaacaagauu

SEQ ID NO: 618586 - RNA, 19 nt, Homo sapiens
  misc_RNA (1)...(19): siRNA sense strand
aagaagcgcgucaccauga

SEQ ID NO: 618587 - RNA, 19 nt, Homo sapiens
  misc_RNA (1)...(19): siRNA sense strand
gagcgucauugccgagaag

SEQ ID NO: 618588 - RNA, 19 nt, Homo sapiens
  misc_RNA (1)...(19): siRNA sense strand
ccgacaagaugugaaguca

SEQ ID NO: 618589 - RNA, 19 nt, Homo sapiens
  misc_RNA (1)...(19): siRNA sense strand
gaggaacaagauucgagaa

SEQ ID NO: 618590 - RNA, 19 nt, Homo sapiens
  misc_RNA (1)...(19): siRNA sense strand
ucaaccugauggagcagaa

SEQ ID NO: 618591 - RNA, 19 nt, Homo sapiens
  misc_RNA (1)...(19): siRNA sense strand
agaagaagcgcgucaccau

SEQ ID NO: 618592 - RNA, 19 nt, Homo sapiens
  misc_RNA (1)...(19): siRNA sense strand
guacuggagaugaggaaca

SEQ ID NO: 618593 - RNA, 19 nt, Homo sapiens
  misc_RNA (1)...(19): siRNA sense strand
cgagcgucauugccgagaa

SEQ ID NO: 618594 - RNA, 19 nt, Homo sapiens
  misc_RNA (1)...(19): siRNA sense strand
gaacaagauucgagaacaa

SEQ ID NO: 618595 - RNA, 19 nt, Homo sapiens
  misc_RNA (1)...(19): siRNA sense strand
gaacaaaaccgacaagaug

SEQ ID NO: 618596 - RNA, 19 nt, Homo sapiens
  misc_RNA (1)...(19): siRNA sense strand
ggaacaagauucgagaaca

SEQ ID NO: 618597 - RNA, 19 nt, Homo sapiens
  misc_RNA (1)...(19): siRNA sense strand
gagaugaggaacaagauuc

SEQ ID NO: 618598 - RNA, 19 nt, Homo sapiens
  misc_RNA (1)...(19): siRNA sense strand
ggagaugaggaacaagauu

SEQ ID NO: 618599 - RNA, 19 nt, Homo sapiens
  misc_RNA (1)...(19): siRNA sense strand
aagaagcgcgucaccauga

SEQ ID NO: 618600 - RNA, 19 nt, Homo sapiens
  misc_RNA (1)...(19): siRNA sense strand
gagcgucauugccgagaag

SEQ ID NO: 618601 - RNA, 19 nt, Homo sapiens
  misc_RNA (1)...(19): siRNA sense strand
ccgacaagaugugaaguca

SEQ ID NO: 618602 - RNA, 19 nt, Homo sapiens
  misc_RNA (1)...(19): siRNA sense strand
gaggaacaagauucgagaa

SEQ ID NO: 618603 - RNA, 19 nt, Homo sapiens
  misc_RNA (1)...(19): siRNA sense strand
ucaaccugauggagcagaa

SEQ ID NO: 618604 - RNA, 19 nt, Homo sapiens
  misc_RNA (1)...(19): siRNA sense strand
agaagaagcgcgucaccau

SEQ ID NO: 618605 - RNA, 19 nt, Homo sapiens
  misc_RNA (1)...(19): siRNA sense strand
guacuggagaugaggaaca

SEQ ID NO: 618606 - RNA, 19 nt, Homo sapiens
  misc_RNA (1)...(19): siRNA sense strand
cgagcgucauugccgagaa

SEQ ID NO: 618607 - RNA, 19 nt, Homo sapiens
  misc_RNA (1)...(19): siRNA sense strand
gaacaagauucgagaacaa

SEQ ID NO: 618608 - RNA, 19 nt, Homo sapiens
  misc_RNA (1)...(19): siRNA sense strand
gaacaaaaccgacaagaug

SEQ ID NO: 618609 - RNA, 19 nt, Homo sapiens
  misc_RNA (1)...(19): siRNA sense strand
ggaacaagauucgagaaca

SEQ ID NO: 618610 - RNA, 19 nt, Homo sapiens
  misc_RNA (1)...(19): siRNA sense strand
gagaugaggaacaagauuc

SEQ ID NO: 618611 - RNA, 19 nt, Homo sapiens
  misc_RNA (1)...(19): siRNA sense strand
ggagaugaggaacaagauu

SEQ ID NO: 618612 - RNA, 19 nt, Homo sapiens
  misc_RNA (1)...(19): siRNA sense strand
aagaagcgcgucaccauga

SEQ ID NO: 618613 - RNA, 19 nt, Homo sapiens
  misc_RNA (1)...(19): siRNA sense strand
gagcgucauugccgagaag

SEQ ID NO: 618614 - RNA, 19 nt, Homo sapiens
  misc_RNA (1)...(19): siRNA sense strand
ccgacaagaugugaaguca

SEQ ID NO: 618615 - RNA, 19 nt, Homo sapiens
  misc_RNA (1)...(19): siRNA sense strand
gaggaacaagauucgagaa

SEQ ID NO: 618616 - RNA, 19 nt, Homo sapiens
  misc_RNA (1)...(19): siRNA sense strand
ucaaccugauggagcagaa

SEQ ID NO: 618617 - RNA, 19 nt, Homo sapiens
  misc_RNA (1)...(19): siRNA sense strand
agaagaagcgcgucaccau

SEQ ID NO: 618618 - RNA, 19 nt, Homo sapiens
  misc_RNA (1)...(19): siRNA sense strand
guacuggagaugaggaaca

SEQ ID NO: 618619 - RNA, 19 nt, Homo sapiens
  misc_RNA (1)...(19): siRNA sense strand
cgagcgucauugccgagaa

SEQ ID NO: 618620 - RNA, 19 nt, Homo sapiens
  misc_RNA (1)...(19): siRNA sense strand
gaacaagauucgagaacaa

SEQ ID NO: 618621 - RNA, 19 nt, Homo sapiens
  misc_RNA (1)...(19): siRNA sense strand
gaacaaaaccgacaagaug

SEQ ID NO: 618622 - RNA, 19 nt, Homo sapiens
  misc_RNA (1)...(19): siRNA sense strand
ggaacaagauucgagaaca

SEQ ID NO: 618623 - RNA, 19 nt, Homo sapiens
  misc_RNA (1)...(19): siRNA sense strand
gagaugaggaacaagauuc

SEQ ID NO: 618624 - RNA, 19 nt, Homo sapiens
  misc_RNA (1)...(19): siRNA sense strand
ggagaugaggaacaagauu

SEQ ID NO: 618625 - RNA, 19 nt, Homo sapiens
  misc_RNA (1)...(19): siRNA sense strand
aagaagcgcgucaccauga

SEQ ID NO: 618626 - RNA, 19 nt, Homo sapiens
  misc_RNA (1)...(19): siRNA sense strand
gagcgucauugccgagaag

SEQ ID NO: 618627 - RNA, 19 nt, Homo sapiens
  misc_RNA (1)...(19): siRNA sense strand
ccgacaagaugugaaguca

SEQ ID NO: 618628 - RNA, 19 nt, Homo sapiens
  misc_RNA (1)...(19): siRNA sense strand
gaggaacaagauucgagaa

SEQ ID NO: 618629 - RNA, 19 nt, Homo sapiens
  misc_RNA (1)...(19): siRNA sense strand
ucaaccugauggagcagaa

SEQ ID NO: 618630 - RNA, 19 nt, Homo sapiens
  misc_RNA (1)...(19): siRNA sense strand
agaagaagcgcgucaccau

SEQ ID NO: 618631 - RNA, 19 nt, Homo sapiens
  misc_RNA (1)...(19): siRNA sense strand
guacuggagaugaggaaca

SEQ ID NO: 618632 - RNA, 19 nt, Homo sapiens
  misc_RNA (1)...(19): siRNA sense strand
cgagcgucauugccgagaa

SEQ ID NO: 618633 - RNA, 19 nt, Homo sapiens
  misc_RNA (1)...(19): siRNA sense strand
gaacaagauucgagaacaa

SEQ ID NO: 618634 - RNA, 19 nt, Homo sapiens
  misc_RNA (1)...(19): siRNA sense strand
gaacaaaaccgacaagaug

SEQ ID NO: 618635 - RNA, 19 nt, Homo sapiens
  misc_RNA (1)...(19): siRNA sense strand
ggaacaagauucgagaaca

SEQ ID NO: 618636 - RNA, 19 nt, Homo sapiens
  misc_RNA (1)...(19): siRNA sense strand
gagaugaggaacaagauuc

SEQ ID NO: 618637 - RNA, 19 nt, Homo sapiens
  misc_RNA (1)...(19): siRNA sense strand
ggagaugaggaacaagauu

SEQ ID NO: 618638 - RNA, 19 nt, Homo sapiens
  misc_RNA (1)...(19): siRNA sense strand
aagaagcgcgucaccauga

SEQ ID NO: 618639 - RNA, 19 nt, Homo sapiens
  misc_RNA (1)...(19): siRNA sense strand
gagcgucauugccgagaag

SEQ ID NO: 618640 - RNA, 19 nt, Homo sapiens
  misc_RNA (1)...(19): siRNA sense strand
ccgacaagaugugaaguca

SEQ ID NO: 618641 - RNA, 19 nt, Homo sapiens
  misc_RNA (1)...(19): siRNA sense strand
gaggaacaagauucgagaa

SEQ ID NO: 618642 - RNA, 19 nt, Homo sapiens
  misc_RNA (1)...(19): siRNA sense strand
ucaaccugauggagcagaa

SEQ ID NO: 618643 - RNA, 19 nt, Homo sapiens
  misc_RNA (1)...(19): siRNA sense strand
agaagaagcgcgucaccau

SEQ ID NO: 618644 - RNA, 19 nt, Homo sapiens
  misc_RNA (1)...(19): siRNA sense strand
guacuggagaugaggaaca

SEQ ID NO: 618645 - RNA, 19 nt, Homo sapiens
  misc_RNA (1)...(19): siRNA sense strand
cgagcgucauugccgagaa

SEQ ID NO: 618646 - RNA, 19 nt, Homo sapiens
  misc_RNA (1)...(19): siRNA sense strand
gaacaagauucgagaacaa

SEQ ID NO: 618647 - RNA, 19 nt, Homo sapiens
  misc_RNA (1)...(19): siRNA sense strand
gaacaaaaccgacaagaug

SEQ ID NO: 618648 - RNA, 19 nt, Homo sapiens
  misc_RNA (1)...(19): siRNA sense strand
ggaacaagauucgagaaca

SEQ ID NO: 618649 - RNA, 19 nt, Homo sapiens
  misc_RNA (1)...(19): siRNA sense strand
gagaugaggaacaagauuc

SEQ ID NO: 618650 - RNA, 19 nt, Homo sapiens
  misc_RNA (1)...(19): siRNA sense strand
ggagaugaggaacaagauu

SEQ ID NO: 618651 - RNA, 19 nt, Homo sapiens
  misc_RNA (1)...(19): siRNA sense strand
aagaagcgcgucaccauga

SEQ ID NO: 618652 - RNA, 19 nt, Homo sapiens
  misc_RNA (1)...(19): siRNA sense strand
gagcgucauugccgagaag

SEQ ID NO: 618653 - RNA, 19 nt, Homo sapiens
  misc_RNA (1)...(19): siRNA sense strand
ccgacaagaugugaaguca

SEQ ID NO: 618654 - RNA, 19 nt, Homo sapiens
  misc_RNA (1)...(19): siRNA sense strand
gaggaacaagauucgagaa

SEQ ID NO: 618655 - RNA, 19 nt, Homo sapiens
  misc_RNA (1)...(19): siRNA sense strand
ucaaccugauggagcagaa

SEQ ID NO: 618656 - RNA, 19 nt, Homo sapiens
  misc_RNA (1)...(19): siRNA sense strand
agaagaagcgcgucaccau

SEQ ID NO: 618657 - RNA, 19 nt, Homo sapiens
  misc_RNA (1)...(19): siRNA sense strand
guacuggagaugaggaaca

SEQ ID NO: 618658 - RNA, 19 nt, Homo sapiens
  misc_RNA (1)...(19): siRNA sense strand
cgagcgucauugccgagaa

SEQ ID NO: 618659 - RNA, 19 nt, Homo sapiens
  misc_RNA (1)...(19): siRNA sense strand
gaacaagauucgagaacaa

SEQ ID NO: 618660 - RNA, 19 nt, Homo sapiens
  misc_RNA (1)...(19): siRNA sense strand
gaacaaaaccgacaagaug

SEQ ID NO: 618661 - RNA, 19 nt, Homo sapiens
  misc_RNA (1)...(19): siRNA sense strand
ggaacaagauucgagaaca

SEQ ID NO: 618662 - RNA, 19 nt, Homo sapiens
  misc_RNA (1)...(19): siRNA sense strand
gagaugaggaacaagauuc

SEQ ID NO: 618663 - RNA, 19 nt, Homo sapiens
  misc_RNA (1)...(19): siRNA sense strand
ggagaugaggaacaagauu

SEQ ID NO: 618664 - RNA, 19 nt, Homo sapiens
  misc_RNA (1)...(19): siRNA sense strand
aagaagcgcgucaccauga

SEQ ID NO: 618665 - RNA, 19 nt, Homo sapiens
  misc_RNA (1)...(19): siRNA sense strand
gagcgucauugccgagaag

SEQ ID NO: 618666 - RNA, 19 nt, Homo sapiens
  misc_RNA (1)...(19): siRNA sense strand
ccgacaagaugugaaguca

SEQ ID NO: 618667 - RNA, 19 nt, Homo sapiens
  misc_RNA (1)...(19): siRNA sense strand
gaggaacaagauucgagaa

SEQ ID NO: 618668 - RNA, 19 nt, Homo sapiens
  misc_RNA (1)...(19): siRNA sense strand
ucaaccugauggagcagaa

SEQ ID NO: 618669 - RNA, 19 nt, Homo sapiens
  misc_RNA (1)...(19): siRNA sense strand
agaagaagcgcgucaccau

SEQ ID NO: 618670 - RNA, 19 nt, Homo sapiens
  misc_RNA (1)...(19): siRNA sense strand
guacuggagaugaggaaca

SEQ ID NO: 618671 - RNA, 19 nt, Homo sapiens
  misc_RNA (1)...(19): siRNA sense strand
cgagcgucauugccgagaa

SEQ ID NO: 618672 - RNA, 19 nt, Homo sapiens
  misc_RNA (1)...(19): siRNA sense strand
gaacaagauucgagaacaa

SEQ ID NO: 618673 - RNA, 19 nt, Homo sapiens
  misc_RNA (1)...(19): siRNA sense strand
gaacaaaaccgacaagaug

SEQ ID NO: 618674 - RNA, 19 nt, Homo sapiens
  misc_RNA (1)...(19): siRNA sense strand
ggaacaagauucgagaaca

SEQ ID NO: 618675 - RNA, 19 nt, Homo sapiens
  misc_RNA (1)...(19): siRNA sense strand
gagaugaggaacaagauuc

SEQ ID NO: 618676 - RNA, 19 nt, Homo sapiens
  misc_RNA (1)...(19): siRNA sense strand
ggagaugaggaacaagauu

SEQ ID NO: 618677 - RNA, 19 nt, Homo sapiens
  misc_RNA (1)...(19): siRNA sense strand
aagaagcgcgucaccauga

SEQ ID NO: 618678 - RNA, 19 nt, Homo sapiens
  misc_RNA (1)...(19): siRNA sense strand
gagcgucauugccgagaag

SEQ ID NO: 618679 - RNA, 19 nt, Homo sapiens
  misc_RNA (1)...(19): siRNA sense strand
ccgacaagaugugaaguca

SEQ ID NO: 618680 - RNA, 19 nt, Homo sapiens
  misc_RNA (1)...(19): siRNA sense strand
gaggaacaagauucgagaa

SEQ ID NO: 618681 - RNA, 19 nt, Homo sapiens
  misc_RNA (1)...(19): siRNA sense strand
ucaaccugauggagcagaa

SEQ ID NO: 618682 - RNA, 19 nt, Homo sapiens
  misc_RNA (1)...(19): siRNA sense strand
agaagaagcgcgucaccau

SEQ ID NO: 618683 - RNA, 19 nt, Homo sapiens
  misc_RNA (1)...(19): siRNA sense strand
guacuggagaugaggaaca

SEQ ID NO: 618684 - RNA, 19 nt, Homo sapiens
  misc_RNA (1)...(19): siRNA sense strand
cgagcgucauugccgagaa

SEQ ID NO: 618685 - RNA, 19 nt, Homo sapiens
  misc_RNA (1)...(19): siRNA sense strand
gaacaagauucgagaacaa

SEQ ID NO: 618686 - RNA, 19 nt, Homo sapiens
  misc_RNA (1)...(19): siRNA sense strand
gaacaaaaccgacaagaug

SEQ ID NO: 618687 - RNA, 19 nt, Homo sapiens
  misc_RNA (1)...(19): siRNA sense strand
ggaacaagauucgagaaca

SEQ ID NO: 618688 - RNA, 19 nt, Homo sapiens
  misc_RNA (1)...(19): siRNA sense strand
gagaugaggaacaagauuc

SEQ ID NO: 618689 - RNA, 19 nt, Homo sapiens
  misc_RNA (1)...(19): siRNA sense strand
ggagaugaggaacaagauu

SEQ ID NO: 618690 - RNA, 19 nt, Homo sapiens
  misc_RNA (1)...(19): siRNA sense strand
aagaagcgcgucaccauga

SEQ ID NO: 618691 - RNA, 19 nt, Homo sapiens
  misc_RNA (1)...(19): siRNA sense strand
gagcgucauugccgagaag

SEQ ID NO: 618692 - RNA, 19 nt, Homo sapiens
  misc_RNA (1)...(19): siRNA sense strand
ccgacaagaugugaaguca

SEQ ID NO: 618693 - RNA, 19 nt, Homo sapiens
  misc_RNA (1)...(19): siRNA sense strand
gaggaacaagauucgagaa

SEQ ID NO: 618694 - RNA, 19 nt, Homo sapiens
  misc_RNA (1)...(19): siRNA sense strand
ucaaccugauggagcagaa

SEQ ID NO: 618695 - RNA, 19 nt, Homo sapiens
  misc_RNA (1)...(19): siRNA sense strand
agaagaagcgcgucaccau

SEQ ID NO: 618696 - RNA, 19 nt, Homo sapiens
  misc_RNA (1)...(19): siRNA sense strand
guacuggagaugaggaaca

SEQ ID NO: 618697 - RNA, 19 nt, Homo sapiens
  misc_RNA (1)...(19): siRNA sense strand
cgagcgucauugccgagaa

SEQ ID NO: 618698 - RNA, 19 nt, Homo sapiens
  misc_RNA (1)...(19): siRNA sense strand
gaacaagauucgagaacaa

SEQ ID NO: 618699 - RNA, 19 nt, Homo sapiens
  misc_RNA (1)...(19): siRNA sense strand
gaacaaaaccgacaagaug

SEQ ID NO: 618700 - RNA, 19 nt, Homo sapiens
  misc_RNA (1)...(19): siRNA sense strand
ggaacaagauucgagaaca

SEQ ID NO: 618701 - RNA, 19 nt, Homo sapiens
  misc_RNA (1)...(19): siRNA sense strand
gagaugaggaacaagauuc

SEQ ID NO: 618702 - RNA, 19 nt, Homo sapiens
  misc_RNA (1)...(19): siRNA sense strand
ggagaugaggaacaagauu

SEQ ID NO: 618703 - RNA, 19 nt, Homo sapiens
  misc_RNA (1)...(19): siRNA sense strand
aagaagcgcgucaccauga

SEQ ID NO: 618704 - RNA, 19 nt, Homo sapiens
  misc_RNA (1)...(19): siRNA sense strand
gagcgucauugccgagaag

SEQ ID NO: 618705 - RNA, 19 nt, Homo sapiens
  misc_RNA (1)...(19): siRNA sense strand
ccgacaagaugugaaguca

SEQ ID NO: 618706 - RNA, 19 nt, Homo sapiens
  misc_RNA (1)...(19): siRNA sense strand
gaggaacaagauucgagaa

SEQ ID NO: 618707 - RNA, 19 nt, Homo sapiens
  misc_RNA (1)...(19): siRNA sense strand
ucaaccugauggagcagaa

SEQ ID NO: 618708 - RNA, 19 nt, Homo sapiens
  misc_RNA (1)...(19): siRNA sense strand
agaagaagcgcgucaccau

SEQ ID NO: 618709 - RNA, 19 nt, Homo sapiens
  misc_RNA (1)...(19): siRNA sense strand
guacuggagaugaggaaca

SEQ ID NO: 618710 - RNA, 19 nt, Homo sapiens
  misc_RNA (1)...(19): siRNA sense strand
cgagcgucauugccgagaa

SEQ ID NO: 618711 - RNA, 19 nt, Homo sapiens
  misc_RNA (1)...(19): siRNA sense strand
gaacaagauucgagaacaa

SEQ ID NO: 618712 - RNA, 19 nt, Homo sapiens
  misc_RNA (1)...(19): siRNA sense strand
gaacaaaaccgacaagaug

SEQ ID NO: 618713 - RNA, 19 nt, Homo sapiens
  misc_RNA (1)...(19): siRNA sense strand
ggaacaagauucgagaaca

SEQ ID NO: 618714 - RNA, 19 nt, Homo sapiens
  misc_RNA (1)...(19): siRNA sense strand
gagaugaggaacaagauuc

SEQ ID NO: 618715 - RNA, 19 nt, Homo sapiens
  misc_RNA (1)...(19): siRNA sense strand
ggagaugaggaacaagauu

SEQ ID NO: 618716 - RNA, 19 nt, Homo sapiens
  misc_RNA (1)...(19): siRNA sense strand
aagaagcgcgucaccauga

SEQ ID NO: 618717 - RNA, 19 nt, Homo sapiens
  misc_RNA (1)...(19): siRNA sense strand
gagcgucauugccgagaag

SEQ ID NO: 618718 - RNA, 19 nt, Homo sapiens
  misc_RNA (1)...(19): siRNA sense strand
ccgacaagaugugaaguca

SEQ ID NO: 618719 - RNA, 19 nt, Homo sapiens
  misc_RNA (1)...(19): siRNA sense strand
gaggaacaagauucgagaa

SEQ ID NO: 618720 - RNA, 19 nt, Homo sapiens
  misc_RNA (1)...(19): siRNA sense strand
ucaaccugauggagcagaa

SEQ ID NO: 618721 - RNA, 19 nt, Homo sapiens
  misc_RNA (1)...(19): siRNA sense strand
agaagaagcgcgucaccau

SEQ ID NO: 618722 - RNA, 19 nt, Homo sapiens
  misc_RNA (1)...(19): siRNA sense strand
guacuggagaugaggaaca

SEQ ID NO: 618723 - RNA, 19 nt, Homo sapiens
  misc_RNA (1)...(19): siRNA sense strand
cgagcgucauugccgagaa

SEQ ID NO: 618724 - RNA, 19 nt, Homo sapiens
  misc_RNA (1)...(19): siRNA sense strand
gaacaagauucgagaacaa

SEQ ID NO: 618725 - RNA, 19 nt, Homo sapiens
  misc_RNA (1)...(19): siRNA sense strand
gaacaaaaccgacaagaug

SEQ ID NO: 618726 - RNA, 19 nt, Homo sapiens
  misc_RNA (1)...(19): siRNA sense strand
ggaacaagauucgagaaca

SEQ ID NO: 618727 - RNA, 19 nt, Homo sapiens
  misc_RNA (1)...(19): siRNA sense strand
gagaugaggaacaagauuc

SEQ ID NO: 618728 - RNA, 19 nt, Homo sapiens
  misc_RNA (1)...(19): siRNA sense strand
ggagaugaggaacaagauu

SEQ ID NO: 618729 - RNA, 19 nt, Homo sapiens
  misc_RNA (1)...(19): siRNA sense strand
aagaagcgcgucaccauga

SEQ ID NO: 618730 - RNA, 19 nt, Homo sapiens
  misc_RNA (1)...(19): siRNA sense strand
gagcgucauugccgagaag

SEQ ID NO: 618731 - RNA, 19 nt, Homo sapiens
  misc_RNA (1)...(19): siRNA sense strand
ccgacaagaugugaaguca

SEQ ID NO: 618732 - RNA, 19 nt, Homo sapiens
  misc_RNA (1)...(19): siRNA sense strand
gaggaacaagauucgagaa

SEQ ID NO: 618733 - RNA, 19 nt, Homo sapiens
  misc_RNA (1)...(19): siRNA sense strand
ucaaccugauggagcagaa

SEQ ID NO: 618734 - RNA, 19 nt, Homo sapiens
  misc_RNA (1)...(19): siRNA sense strand
agaagaagcgcgucaccau

SEQ ID NO: 618735 - RNA, 19 nt, Homo sapiens
  misc_RNA (1)...(19): siRNA sense strand
guacuggagaugaggaaca

SEQ ID NO: 618736 - RNA, 19 nt, Homo sapiens
  misc_RNA (1)...(19): siRNA sense strand
cgagcgucauugccgagaa

SEQ ID NO: 618737 - RNA, 19 nt, Homo sapiens
  misc_RNA (1)...(19): siRNA sense strand
gaacaagauucgagaacaa

SEQ ID NO: 618738 - RNA, 19 nt, Homo sapiens
  misc_RNA (1)...(19): siRNA sense strand
gaacaaaaccgacaagaug

SEQ ID NO: 618739 - RNA, 19 nt, Homo sapiens
  misc_RNA (1)...(19): siRNA sense strand
ggaacaagauucgagaaca

SEQ ID NO: 618740 - RNA, 19 nt, Homo sapiens
  misc_RNA (1)...(19): siRNA sense strand
gagaugaggaacaagauuc

SEQ ID NO: 618741 - RNA, 19 nt, Homo sapiens
  misc_RNA (1)...(19): siRNA sense strand
ggagaugaggaacaagauu

SEQ ID NO: 618742 - RNA, 19 nt, Homo sapiens
  misc_RNA (1)...(19): siRNA sense strand
aagaagcgcgucaccauga

SEQ ID NO: 618743 - RNA, 19 nt, Homo sapiens
  misc_RNA (1)...(19): siRNA sense strand
gagcgucauugccgagaag

SEQ ID NO: 618744 - RNA, 19 nt, Homo sapiens
  misc_RNA (1)...(19): siRNA sense strand
ccgacaagaugugaaguca

SEQ ID NO: 618745 - RNA, 19 nt, Homo sapiens
  misc_RNA (1)...(19): siRNA sense strand
gaggaacaagauucgagaa

SEQ ID NO: 618746 - RNA, 19 nt, Homo sapiens
  misc_RNA (1)...(19): siRNA sense strand
ucaaccugauggagcagaa

SEQ ID NO: 618747 - RNA, 19 nt, Homo sapiens
  misc_RNA (1)...(19): siRNA sense strand
agaagaagcgcgucaccau

SEQ ID NO: 618748 - RNA, 19 nt, Homo sapiens
  misc_RNA (1)...(19): siRNA sense strand
guacuggagaugaggaaca

SEQ ID NO: 618749 - RNA, 19 nt, Homo sapiens
  misc_RNA (1)...(19): siRNA sense strand
cgagcgucauugccgagaa

SEQ ID NO: 618750 - RNA, 19 nt, Homo sapiens
  misc_RNA (1)...(19): siRNA sense strand
gaacaagauucgagaacaa

SEQ ID NO: 618751 - RNA, 19 nt, Homo sapiens
  misc_RNA (1)...(19): siRNA sense strand
gaacaaaaccgacaagaug

SEQ ID NO: 618752 - RNA, 19 nt, Homo sapiens
  misc_RNA (1)...(19): siRNA sense strand
ggaacaagauucgagaaca

SEQ ID NO: 618753 - RNA, 19 nt, Homo sapiens
  misc_RNA (1)...(19): siRNA sense strand
gagaugaggaacaagauuc

SEQ ID NO: 618754 - RNA, 19 nt, Homo sapiens
  misc_RNA (1)...(19): siRNA sense strand
ggagaugaggaacaagauu

SEQ ID NO: 618755 - RNA, 19 nt, Homo sapiens
  misc_RNA (1)...(19): siRNA sense strand
aagaagcgcgucaccauga

SEQ ID NO: 618756 - RNA, 19 nt, Homo sapiens
  misc_RNA (1)...(19): siRNA sense strand
gagcgucauugccgagaag

SEQ ID NO: 618757 - RNA, 19 nt, Homo sapiens
  misc_RNA (1)...(19): siRNA sense strand
ccgacaagaugugaaguca

SEQ ID NO: 618758 - RNA, 19 nt, Homo sapiens
  misc_RNA (1)...(19): siRNA sense strand
gaggaacaagauucgagaa

SEQ ID NO: 618759 - RNA, 19 nt, Homo sapiens
  misc_RNA (1)...(19): siRNA sense strand
ucaaccugauggagcagaa

SEQ ID NO: 618760 - RNA, 19 nt, Homo sapiens
  misc_RNA (1)...(19): siRNA sense strand
agaagaagcgcgucaccau

SEQ ID NO: 618761 - RNA, 19 nt, Homo sapiens
  misc_RNA (1)...(19): siRNA sense strand
guacuggagaugaggaaca

SEQ ID NO: 618762 - RNA, 19 nt, Homo sapiens
  misc_RNA (1)...(19): siRNA sense strand
cgagcgucauugccgagaa

SEQ ID NO: 618763 - RNA, 19 nt, Homo sapiens
  misc_RNA (1)...(19): siRNA sense strand
gaacaagauucgagaacaa

SEQ ID NO: 618764 - RNA, 19 nt, Homo sapiens
  misc_RNA (1)...(19): siRNA sense strand
gaacaaaaccgacaagaug

SEQ ID NO: 618765 - RNA, 19 nt, Homo sapiens
  misc_RNA (1)...(19): siRNA sense strand
ggaacaagauucgagaaca

SEQ ID NO: 618766 - RNA, 19 nt, Homo sapiens
  misc_RNA (1)...(19): siRNA sense strand
gagaugaggaacaagauuc

SEQ ID NO: 618767 - RNA, 19 nt, Homo sapiens
  misc_RNA (1)...(19): siRNA sense strand
ggagaugaggaacaagauu

SEQ ID NO: 618768 - RNA, 19 nt, Homo sapiens
  misc_RNA (1)...(19): siRNA sense strand
aagaagcgcgucaccauga

SEQ ID NO: 618769 - RNA, 19 nt, Homo sapiens
  misc_RNA (1)...(19): siRNA sense strand
gagcgucauugccgagaag

SEQ ID NO: 618770 - RNA, 19 nt, Homo sapiens
  misc_RNA (1)...(19): siRNA sense strand
ccgacaagaugugaaguca

SEQ ID NO: 618771 - RNA, 19 nt, Homo sapiens
  misc_RNA (1)...(19): siRNA sense strand
gaggaacaagauucgagaa

SEQ ID NO: 618772 - RNA, 19 nt, Homo sapiens
  misc_RNA (1)...(19): siRNA sense strand
ucaaccugauggagcagaa

SEQ ID NO: 618773 - RNA, 19 nt, Homo sapiens
  misc_RNA (1)...(19): siRNA sense strand
agaagaagcgcgucaccau

SEQ ID NO: 618774 - RNA, 19 nt, Homo sapiens
  misc_RNA (1)...(19): siRNA sense strand
guacuggagaugaggaaca

SEQ ID NO: 618775 - RNA, 19 nt, Homo sapiens
  misc_RNA (1)...(19): siRNA sense strand
cgagcgucauugccgagaa

SEQ ID NO: 618776 - RNA, 19 nt, Homo sapiens
  misc_RNA (1)...(19): siRNA sense strand
gaacaagauucgagaacaa

SEQ ID NO: 618777 - RNA, 19 nt, Homo sapiens
  misc_RNA (1)...(19): siRNA sense strand
gaacaaaaccgacaagaug

SEQ ID NO: 618778 - RNA, 19 nt, Homo sapiens
  misc_RNA (1)...(19): siRNA sense strand
ggaacaagauucgagaaca

SEQ ID NO: 618779 - RNA, 19 nt, Homo sapiens
  misc_RNA (1)...(19): siRNA sense strand
gagaugaggaacaagauuc

SEQ ID NO: 618780 - RNA, 19 nt, Homo sapiens
  misc_RNA (1)...(19): siRNA sense strand
ggagaugaggaacaagauu

SEQ ID NO: 618781 - RNA, 19 nt, Homo sapiens
  misc_RNA (1)...(19): siRNA sense strand
aagaagcgcgucaccauga

SEQ ID NO: 618782 - RNA, 19 nt, Homo sapiens
  misc_RNA (1)...(19): siRNA sense strand
gagcgucauugccgagaag

SEQ ID NO: 618783 - RNA, 19 nt, Homo sapiens
  misc_RNA (1)...(19): siRNA sense strand
ccgacaagaugugaaguca

SEQ ID NO: 618784 - RNA, 19 nt, Homo sapiens
  misc_RNA (1)...(19): siRNA sense strand
gaggaacaagauucgagaa

SEQ ID NO: 618785 - RNA, 19 nt, Homo sapiens
  misc_RNA (1)...(19): siRNA sense strand
ucaaccugauggagcagaa

SEQ ID NO: 618786 - RNA, 19 nt, Homo sapiens
  misc_RNA (1)...(19): siRNA sense strand
agaagaagcgcgucaccau

SEQ ID NO: 618787 - RNA, 19 nt, Homo sapiens
  misc_RNA (1)...(19): siRNA sense strand
guacuggagaugaggaaca

SEQ ID NO: 618788 - RNA, 19 nt, Homo sapiens
  misc_RNA (1)...(19): siRNA sense strand
cgagcgucauugccgagaa

SEQ ID NO: 618789 - RNA, 19 nt, Homo sapiens
  misc_RNA (1)...(19): siRNA sense strand
gaacaagauucgagaacaa

SEQ ID NO: 618790 - RNA, 19 nt, Homo sapiens
  misc_RNA (1)...(19): siRNA sense strand
gaacaaaaccgacaagaug

SEQ ID NO: 618791 - RNA, 19 nt, Homo sapiens
  misc_RNA (1)...(19): siRNA sense strand
ggaacaagauucgagaaca

SEQ ID NO: 618792 - RNA, 19 nt, Homo sapiens
  misc_RNA (1)...(19): siRNA sense strand
gagaugaggaacaagauuc

SEQ ID NO: 618793 - RNA, 19 nt, Homo sapiens
  misc_RNA (1)...(19): siRNA sense strand
ggagaugaggaacaagauu

SEQ ID NO: 618794 - RNA, 19 nt, Homo sapiens
  misc_RNA (1)...(19): siRNA sense strand
aagaagcgcgucaccauga

SEQ ID NO: 618795 - RNA, 19 nt, Homo sapiens
  misc_RNA (1)...(19): siRNA sense strand
gagcgucauugccgagaag

SEQ ID NO: 618796 - RNA, 19 nt, Homo sapiens
  misc_RNA (1)...(19): siRNA sense strand
ccgacaagaugugaaguca

SEQ ID NO: 618797 - RNA, 19 nt, Homo sapiens
  misc_RNA (1)...(19): siRNA sense strand
gaggaacaagauucgagaa

SEQ ID NO: 618798 - RNA, 19 nt, Homo sapiens
  misc_RNA (1)...(19): siRNA sense strand
ucaaccugauggagcagaa

SEQ ID NO: 618799 - RNA, 19 nt, Homo sapiens
  misc_RNA (1)...(19): siRNA sense strand
agaagaagcgcgucaccau

SEQ ID NO: 618800 - RNA, 19 nt, Homo sapiens
  misc_RNA (1)...(19): siRNA sense strand
guacuggagaugaggaaca

SEQ ID NO: 618801 - RNA, 19 nt, Homo sapiens
  misc_RNA (1)...(19): siRNA sense strand
cgagcgucauugccgagaa

SEQ ID NO: 618802 - RNA, 19 nt, Homo sapiens
  misc_RNA (1)...(19): siRNA sense strand
gaacaagauucgagaacaa

SEQ ID NO: 618803 - RNA, 19 nt, Homo sapiens
  misc_RNA (1)...(19): siRNA sense strand
gaacaaaaccgacaagaug

SEQ ID NO: 618804 - RNA, 19 nt, Homo sapiens
  misc_RNA (1)...(19): siRNA sense strand
ggaacaagauucgagaaca

SEQ ID NO: 618805 - RNA, 19 nt, Homo sapiens
  misc_RNA (1)...(19): siRNA sense strand
gagaugaggaacaagauuc

SEQ ID NO: 618806 - RNA, 19 nt, Homo sapiens
  misc_RNA (1)...(19): siRNA sense strand
ggagaugaggaacaagauu

SEQ ID NO: 618807 - RNA, 19 nt, Homo sapiens
  misc_RNA (1)...(19): siRNA sense strand
aagaagcgcgucaccauga

SEQ ID NO: 618808 - RNA, 19 nt, Homo sapiens
  misc_RNA (1)...(19): siRNA sense strand
gagcgucauugccgagaag

SEQ ID NO: 618809 - RNA, 19 nt, Homo sapiens
  misc_RNA (1)...(19): siRNA sense strand
ccgacaagaugugaaguca

SEQ ID NO: 618810 - RNA, 19 nt, Homo sapiens
  misc_RNA (1)...(19): siRNA sense strand
gaggaacaagauucgagaa

SEQ ID NO: 618811 - RNA, 19 nt, Homo sapiens
  misc_RNA (1)...(19): siRNA sense strand
ucaaccugauggagcagaa

SEQ ID NO: 618812 - RNA, 19 nt, Homo sapiens
  misc_RNA (1)...(19): siRNA sense strand
agaagaagcgcgucaccau

SEQ ID NO: 618813 - RNA, 19 nt, Homo sapiens
  misc_RNA (1)...(19): siRNA sense strand
guacuggagaugaggaaca

SEQ ID NO: 618814 - RNA, 19 nt, Homo sapiens
  misc_RNA (1)...(19): siRNA sense strand
cgagcgucauugccgagaa

SEQ ID NO: 618815 - RNA, 19 nt, Homo sapiens
  misc_RNA (1)...(19): siRNA sense strand
gaacaagauucgagaacaa

SEQ ID NO: 618816 - RNA, 19 nt, Homo sapiens
  misc_RNA (1)...(19): siRNA sense strand
gaacaaaaccgacaagaug

SEQ ID NO: 618817 - RNA, 19 nt, Homo sapiens
  misc_RNA (1)...(19): siRNA sense strand
ggaacaagauucgagaaca

SEQ ID NO: 618818 - RNA, 19 nt, Homo sapiens
  misc_RNA (1)...(19): siRNA sense strand
gagaugaggaacaagauuc

SEQ ID NO: 618819 - RNA, 19 nt, Homo sapiens
  misc_RNA (1)...(19): siRNA sense strand
ggagaugaggaacaagauu

SEQ ID NO: 618820 - RNA, 19 nt, Homo sapiens
  misc_RNA (1)...(19): siRNA sense strand
aagaagcgcgucaccauga

SEQ ID NO: 618821 - RNA, 19 nt, Homo sapiens
  misc_RNA (1)...(19): siRNA sense strand
gagcgucauugccgagaag

SEQ ID NO: 618822 - RNA, 19 nt, Homo sapiens
  misc_RNA (1)...(19): siRNA sense strand
ccgacaagaugugaaguca

SEQ ID NO: 618823 - RNA, 19 nt, Homo sapiens
  misc_RNA (1)...(19): siRNA sense strand
gaggaacaagauucgagaa

SEQ ID NO: 618824 - RNA, 19 nt, Homo sapiens
  misc_RNA (1)...(19): siRNA sense strand
ucaaccugauggagcagaa

SEQ ID NO: 618825 - RNA, 19 nt, Homo sapiens
  misc_RNA (1)...(19): siRNA sense strand
agaagaagcgcgucaccau

SEQ ID NO: 618826 - RNA, 19 nt, Homo sapiens
  misc_RNA (1)...(19): siRNA sense strand
guacuggagaugaggaaca

SEQ ID NO: 618827 - RNA, 19 nt, Homo sapiens
  misc_RNA (1)...(19): siRNA sense strand
cgagcgucauugccgagaa

SEQ ID NO: 618828 - RNA, 19 nt, Homo sapiens
  misc_RNA (1)...(19): siRNA sense strand
gaacaagauucgagaacaa

SEQ ID NO: 618829 - RNA, 19 nt, Homo sapiens
  misc_RNA (1)...(19): siRNA sense strand
gaacaaaaccgacaagaug

SEQ ID NO: 618830 - RNA, 19 nt, Homo sapiens
  misc_RNA (1)...(19): siRNA sense strand
ggaacaagauucgagaaca

SEQ ID NO: 618831 - RNA, 19 nt, Homo sapiens
  misc_RNA (1)...(19): siRNA sense strand
gagaugaggaacaagauuc

SEQ ID NO: 618832 - RNA, 19 nt, Homo sapiens
  misc_RNA (1)...(19): siRNA sense strand
ggagaugaggaacaagauu

SEQ ID NO: 618833 - RNA, 19 nt, Homo sapiens
  misc_RNA (1)...(19): siRNA sense strand
aagaagcgcgucaccauga

SEQ ID NO: 618834 - RNA, 19 nt, Homo sapiens
  misc_RNA (1)...(19): siRNA sense strand
gagcgucauugccgagaag

SEQ ID NO: 618835 - RNA, 19 nt, Homo sapiens
  misc_RNA (1)...(19): siRNA sense strand
ccgacaagaugugaaguca

SEQ ID NO: 618836 - RNA, 19 nt, Homo sapiens
  misc_RNA (1)...(19): siRNA sense strand
gaggaacaagauucgagaa

SEQ ID NO: 618837 - RNA, 19 nt, Homo sapiens
  misc_RNA (1)...(19): siRNA sense strand
ucaaccugauggagcagaa

SEQ ID NO: 618838 - RNA, 19 nt, Homo sapiens
  misc_RNA (1)...(19): siRNA sense strand
agaagaagcgcgucaccau

SEQ ID NO: 618839 - RNA, 19 nt, Homo sapiens
  misc_RNA (1)...(19): siRNA sense strand
guacuggagaugaggaaca

SEQ ID NO: 618840 - RNA, 19 nt, Homo sapiens
  misc_RNA (1)...(19): siRNA sense strand
cgagcgucauugccgagaa

SEQ ID NO: 618841 - RNA, 19 nt, Homo sapiens
  misc_RNA (1)...(19): siRNA sense strand
gaacaagauucgagaacaa

SEQ ID NO: 618842 - RNA, 19 nt, Homo sapiens
  misc_RNA (1)...(19): siRNA sense strand
gaacaaaaccgacaagaug

SEQ ID NO: 618843 - RNA, 19 nt, Homo sapiens
  misc_RNA (1)...(19): siRNA sense strand
ggaacaagauucgagaaca

SEQ ID NO: 618844 - RNA, 19 nt, Homo sapiens
  misc_RNA (1)...(19): siRNA sense strand
gagaugaggaacaagauuc

SEQ ID NO: 618845 - RNA, 19 nt, Homo sapiens
  misc_RNA (1)...(19): siRNA sense strand
ggagaugaggaacaagauu

SEQ ID NO: 618846 - RNA, 19 nt, Homo sapiens
  misc_RNA (1)...(19): siRNA sense strand
aagaagcgcgucaccauga

SEQ ID NO: 618847 - RNA, 19 nt, Homo sapiens
  misc_RNA (1)...(19): siRNA sense strand
gagcgucauugccgagaag

SEQ ID NO: 618848 - RNA, 19 nt, Homo sapiens
  misc_RNA (1)...(19): siRNA sense strand
ccgacaagaugugaaguca

SEQ ID NO: 618849 - RNA, 19 nt, Homo sapiens
  misc_RNA (1)...(19): siRNA sense strand
gaggaacaagauucgagaa

SEQ ID NO: 618850 - RNA, 19 nt, Homo sapiens
  misc_RNA (1)...(19): siRNA sense strand
ucaaccugauggagcagaa

SEQ ID NO: 618851 - RNA, 19 nt, Homo sapiens
  misc_RNA (1)...(19): siRNA sense strand
agaagaagcgcgucaccau

SEQ ID NO: 618852 - RNA, 19 nt, Homo sapiens
  misc_RNA (1)...(19): siRNA sense strand
guacuggagaugaggaaca

SEQ ID NO: 618853 - RNA, 19 nt, Homo sapiens
  misc_RNA (1)...(19): siRNA sense strand
cgagcgucauugccgagaa

SEQ ID NO: 618854 - RNA, 19 nt, Homo sapiens
  misc_RNA (1)...(19): siRNA sense strand
gaacaagauucgagaacaa

SEQ ID NO: 618855 - RNA, 19 nt, Homo sapiens
  misc_RNA (1)...(19): siRNA sense strand
gaacaaaaccgacaagaug

SEQ ID NO: 618856 - RNA, 19 nt, Homo sapiens
  misc_RNA (1)...(19): siRNA sense strand
ggaacaagauucgagaaca

SEQ ID NO: 618857 - RNA, 19 nt, Homo sapiens
  misc_RNA (1)...(19): siRNA sense strand
gagaugaggaacaagauuc

SEQ ID NO: 618858 - RNA, 19 nt, Homo sapiens
  misc_RNA (1)...(19): siRNA sense strand
ggagaugaggaacaagauu

SEQ ID NO: 618859 - RNA, 19 nt, Homo sapiens
  misc_RNA (1)...(19): siRNA sense strand
aagaagcgcgucaccauga

SEQ ID NO: 618860 - RNA, 19 nt, Homo sapiens
  misc_RNA (1)...(19): siRNA sense strand
gagcgucauugccgagaag

SEQ ID NO: 618861 - RNA, 19 nt, Homo sapiens
  misc_RNA (1)...(19): siRNA sense strand
ccgacaagaugugaaguca

SEQ ID NO: 618862 - RNA, 19 nt, Homo sapiens
  misc_RNA (1)...(19): siRNA sense strand
gaggaacaagauucgagaa

SEQ ID NO: 618863 - RNA, 19 nt, Homo sapiens
  misc_RNA (1)...(19): siRNA sense strand
ucaaccugauggagcagaa

SEQ ID NO: 618864 - RNA, 19 nt, Homo sapiens
  misc_RNA (1)...(19): siRNA sense strand
agaagaagcgcgucaccau

SEQ ID NO: 618865 - RNA, 19 nt, Homo sapiens
  misc_RNA (1)...(19): siRNA sense strand
guacuggagaugaggaaca

SEQ ID NO: 618866 - RNA, 19 nt, Homo sapiens
  misc_RNA (1)...(19): siRNA sense strand
cgagcgucauugccgagaa

SEQ ID NO: 618867 - RNA, 19 nt, Homo sapiens
  misc_RNA (1)...(19): siRNA sense strand
gaacaagauucgagaacaa

SEQ ID NO: 618868 - RNA, 19 nt, Homo sapiens
  misc_RNA (1)...(19): siRNA sense strand
gaacaaaaccgacaagaug

SEQ ID NO: 618869 - RNA, 19 nt, Homo sapiens
  misc_RNA (1)...(19): siRNA sense strand
ggaacaagauucgagaaca

SEQ ID NO: 618870 - RNA, 19 nt, Homo sapiens
  misc_RNA (1)...(19): siRNA sense strand
gagaugaggaacaagauuc

SEQ ID NO: 618871 - RNA, 19 nt, Homo sapiens
  misc_RNA (1)...(19): siRNA sense strand
ggagaugaggaacaagauu

SEQ ID NO: 618872 - RNA, 19 nt, Homo sapiens
  misc_RNA (1)...(19): siRNA sense strand
aagaagcgcgucaccauga

SEQ ID NO: 618873 - RNA, 19 nt, Homo sapiens
  misc_RNA (1)...(19): siRNA sense strand
gagcgucauugccgagaag

SEQ ID NO: 618874 - RNA, 19 nt, Homo sapiens
  misc_RNA (1)...(19): siRNA sense strand
ccgacaagaugugaaguca

SEQ ID NO: 618875 - RNA, 19 nt, Homo sapiens
  misc_RNA (1)...(19): siRNA sense strand
gaggaacaagauucgagaa

SEQ ID NO: 618876 - RNA, 19 nt, Homo sapiens
  misc_RNA (1)...(19): siRNA sense strand
ucaaccugauggagcagaa

SEQ ID NO: 618877 - RNA, 19 nt, Homo sapiens
  misc_RNA (1)...(19): siRNA sense strand
agaagaagcgcgucaccau

SEQ ID NO: 618878 - RNA, 19 nt, Homo sapiens
  misc_RNA (1)...(19): siRNA sense strand
guacuggagaugaggaaca

SEQ ID NO: 618879 - RNA, 19 nt, Homo sapiens
  misc_RNA (1)...(19): siRNA sense strand
cgagcgucauugccgagaa

SEQ ID NO: 618880 - RNA, 19 nt, Homo sapiens
  misc_RNA (1)...(19): siRNA sense strand
gaacaagauucgagaacaa

SEQ ID NO: 618881 - RNA, 19 nt, Homo sapiens
  misc_RNA (1)...(19): siRNA sense strand
gaacaaaaccgacaagaug

SEQ ID NO: 618882 - RNA, 19 nt, Homo sapiens
  misc_RNA (1)...(19): siRNA sense strand
ggaacaagauucgagaaca

SEQ ID NO: 618883 - RNA, 19 nt, Homo sapiens
  misc_RNA (1)...(19): siRNA sense strand
gagaugaggaacaagauuc

SEQ ID NO: 618884 - RNA, 19 nt, Homo sapiens
  misc_RNA (1)...(19): siRNA sense strand
ggagaugaggaacaagauu

SEQ ID NO: 618885 - RNA, 19 nt, Homo sapiens
  misc_RNA (1)...(19): siRNA sense strand
aagaagcgcgucaccauga

SEQ ID NO: 618886 - RNA, 19 nt, Homo sapiens
  misc_RNA (1)...(19): siRNA sense strand
gagcgucauugccgagaag

SEQ ID NO: 618887 - RNA, 19 nt, Homo sapiens
  misc_RNA (1)...(19): siRNA sense strand
ccgacaagaugugaaguca

SEQ ID NO: 618888 - RNA, 19 nt, Homo sapiens
  misc_RNA (1)...(19): siRNA sense strand
gaggaacaagauucgagaa

SEQ ID NO: 618889 - RNA, 19 nt, Homo sapiens
  misc_RNA (1)...(19): siRNA sense strand
ucaaccugauggagcagaa

SEQ ID NO: 618890 - RNA, 19 nt, Homo sapiens
  misc_RNA (1)...(19): siRNA sense strand
agaagaagcgcgucaccau

SEQ ID NO: 618891 - RNA, 19 nt, Homo sapiens
  misc_RNA (1)...(19): siRNA sense strand
guacuggagaugaggaaca

SEQ ID NO: 618892 - RNA, 19 nt, Homo sapiens
  misc_RNA (1)...(19): siRNA sense strand
cgagcgucauugccgagaa

SEQ ID NO: 618893 - RNA, 19 nt, Homo sapiens
  misc_RNA (1)...(19): siRNA sense strand
gaacaagauucgagaacaa

SEQ ID NO: 618894 - RNA, 19 nt, Homo sapiens
  misc_RNA (1)...(19): siRNA sense strand
gaacaaaaccgacaagaug

SEQ ID NO: 618895 - RNA, 19 nt, Homo sapiens
  misc_RNA (1)...(19): siRNA sense strand
ggaacaagauucgagaaca

SEQ ID NO: 618896 - RNA, 19 nt, Homo sapiens
  misc_RNA (1)...(19): siRNA sense strand
gagaugaggaacaagauuc

SEQ ID NO: 618897 - RNA, 19 nt, Homo sapiens
  misc_RNA (1)...(19): siRNA sense strand
ggagaugaggaacaagauu

SEQ ID NO: 618898 - RNA, 19 nt, Homo sapiens
  misc_RNA (1)...(19): siRNA sense strand
aagaagcgcgucaccauga

SEQ ID NO: 618899 - RNA, 19 nt, Homo sapiens
  misc_RNA (1)...(19): siRNA sense strand
gagcgucauugccgagaag

SEQ ID NO: 618900 - RNA, 19 nt, Homo sapiens
  misc_RNA (1)...(19): siRNA sense strand
ccgacaagaugugaaguca

SEQ ID NO: 618901 - RNA, 19 nt, Homo sapiens
  misc_RNA (1)...(19): siRNA sense strand
gaggaacaagauucgagaa

SEQ ID NO: 618902 - RNA, 19 nt, Homo sapiens
  misc_RNA (1)...(19): siRNA sense strand
ucaaccugauggagcagaa

SEQ ID NO: 618903 - RNA, 19 nt, Homo sapiens
  misc_RNA (1)...(19): siRNA sense strand
agaagaagcgcgucaccau

SEQ ID NO: 618904 - RNA, 19 nt, Homo sapiens
  misc_RNA (1)...(19): siRNA sense strand
guacuggagaugaggaaca

SEQ ID NO: 618905 - RNA, 19 nt, Homo sapiens
  misc_RNA (1)...(19): siRNA sense strand
cgagcgucauugccgagaa

SEQ ID NO: 618906 - RNA, 19 nt, Homo sapiens
  misc_RNA (1)...(19): siRNA sense strand
gaacaagauucgagaacaa

SEQ ID NO: 618907 - RNA, 19 nt, Homo sapiens
  misc_RNA (1)...(19): siRNA sense strand
gaacaaaaccgacaagaug

SEQ ID NO: 618908 - RNA, 19 nt, Homo sapiens
  misc_RNA (1)...(19): siRNA sense strand
ggaacaagauucgagaaca

SEQ ID NO: 618909 - RNA, 19 nt, Homo sapiens
  misc_RNA (1)...(19): siRNA sense strand
gagaugaggaacaagauuc

SEQ ID NO: 618910 - RNA, 19 nt, Homo sapiens
  misc_RNA (1)...(19): siRNA sense strand
ggagaugaggaacaagauu

SEQ ID NO: 618911 - RNA, 19 nt, Homo sapiens
  misc_RNA (1)...(19): siRNA sense strand
aagaagcgcgucaccauga

SEQ ID NO: 618912 - RNA, 19 nt, Homo sapiens
  misc_RNA (1)...(19): siRNA sense strand
gagcgucauugccgagaag

SEQ ID NO: 618913 - RNA, 19 nt, Homo sapiens
  misc_RNA (1)...(19): siRNA sense strand
ccgacaagaugugaaguca

SEQ ID NO: 618914 - RNA, 19 nt, Homo sapiens
  misc_RNA (1)...(19): siRNA sense strand
gaggaacaagauucgagaa

SEQ ID NO: 618915 - RNA, 19 nt, Homo sapiens
  misc_RNA (1)...(19): siRNA sense strand
ucaaccugauggagcagaa

SEQ ID NO: 618916 - RNA, 19 nt, Homo sapiens
  misc_RNA (1)...(19): siRNA sense strand
agaagaagcgcgucaccau

SEQ ID NO: 618917 - RNA, 19 nt, Homo sapiens
  misc_RNA (1)...(19): siRNA sense strand
guacuggagaugaggaaca

SEQ ID NO: 618918 - RNA, 19 nt, Homo sapiens
  misc_RNA (1)...(19): siRNA sense strand
cgagcgucauugccgagaa

SEQ ID NO: 618919 - RNA, 19 nt, Homo sapiens
  misc_RNA (1)...(19): siRNA sense strand
gaacaagauucgagaacaa

SEQ ID NO: 618920 - RNA, 19 nt, Homo sapiens
  misc_RNA (1)...(19): siRNA sense strand
gaacaaaaccgacaagaug

SEQ ID NO: 618921 - RNA, 19 nt, Homo sapiens
  misc_RNA (1)...(19): siRNA sense strand
ggaacaagauucgagaaca

SEQ ID NO: 618922 - RNA, 19 nt, Homo sapiens
  misc_RNA (1)...(19): siRNA sense strand
gagaugaggaacaagauuc

SEQ ID NO: 618923 - RNA, 19 nt, Homo sapiens
  misc_RNA (1)...(19): siRNA sense strand
ggagaugaggaacaagauu

SEQ ID NO: 618924 - RNA, 19 nt, Homo sapiens
  misc_RNA (1)...(19): siRNA sense strand
aagaagcgcgucaccauga

SEQ ID NO: 618925 - RNA, 19 nt, Homo sapiens
  misc_RNA (1)...(19): siRNA sense strand
gagcgucauugccgagaag

SEQ ID NO: 618926 - RNA, 19 nt, Homo sapiens
  misc_RNA (1)...(19): siRNA sense strand
ccgacaagaugugaaguca

SEQ ID NO: 618927 - RNA, 19 nt, Homo sapiens
  misc_RNA (1)...(19): siRNA sense strand
gaggaacaagauucgagaa

SEQ ID NO: 618928 - RNA, 19 nt, Homo sapiens
  misc_RNA (1)...(19): siRNA sense strand
ucaaccugauggagcagaa

SEQ ID NO: 618929 - RNA, 19 nt, Homo sapiens
  misc_RNA (1)...(19): siRNA sense strand
agaagaagcgcgucaccau

SEQ ID NO: 618930 - RNA, 19 nt, Homo sapiens
  misc_RNA (1)...(19): siRNA sense strand
guacuggagaugaggaaca

SEQ ID NO: 618931 - RNA, 19 nt, Homo sapiens
  misc_RNA (1)...(19): siRNA sense strand
cgagcgucauugccgagaa

SEQ ID NO: 618932 - RNA, 19 nt, Homo sapiens
  misc_RNA (1)...(19): siRNA sense strand
gaacaagauucgagaacaa

SEQ ID NO: 618933 - RNA, 19 nt, Homo sapiens
  misc_RNA (1)...(19): siRNA sense strand
gaacaaaaccgacaagaug

SEQ ID NO: 618934 - RNA, 19 nt, Homo sapiens
  misc_RNA (1)...(19): siRNA sense strand
ggaacaagauucgagaaca

SEQ ID NO: 618935 - RNA, 19 nt, Homo sapiens
  misc_RNA (1)...(19): siRNA sense strand
gagaugaggaacaagauuc

SEQ ID NO: 618936 - RNA, 19 nt, Homo sapiens
  misc_RNA (1)...(19): siRNA sense strand
ggagaugaggaacaagauu

SEQ ID NO: 618937 - RNA, 19 nt, Homo sapiens
  misc_RNA (1)...(19): siRNA sense strand
aagaagcgcgucaccauga

SEQ ID NO: 618938 - RNA, 19 nt, Homo sapiens
  misc_RNA (1)...(19): siRNA sense strand
gagcgucauugccgagaag

SEQ ID NO: 618939 - RNA, 19 nt, Homo sapiens
  misc_RNA (1)...(19): siRNA sense strand
ccgacaagaugugaaguca

SEQ ID NO: 618940 - RNA, 19 nt, Homo sapiens
  misc_RNA (1)...(19): siRNA sense strand
gaggaacaagauucgagaa

SEQ ID NO: 618941 - RNA, 19 nt, Homo sapiens
  misc_RNA (1)...(19): siRNA sense strand
ucaaccugauggagcagaa

SEQ ID NO: 618942 - RNA, 19 nt, Homo sapiens
  misc_RNA (1)...(19): siRNA sense strand
agaagaagcgcgucaccau

SEQ ID NO: 618943 - RNA, 19 nt, Homo sapiens
  misc_RNA (1)...(19): siRNA sense strand
guacuggagaugaggaaca

SEQ ID NO: 618944 - RNA, 19 nt, Homo sapiens
  misc_RNA (1)...(19): siRNA sense strand
cgagcgucauugccgagaa

SEQ ID NO: 618945 - RNA, 19 nt, Homo sapiens
  misc_RNA (1)...(19): siRNA sense strand
gaacaagauucgagaacaa

SEQ ID NO: 618946 - RNA, 19 nt, Homo sapiens
  misc_RNA (1)...(19): siRNA sense strand
gaacaaaaccgacaagaug

SEQ ID NO: 618947 - RNA, 19 nt, Homo sapiens
  misc_RNA (1)...(19): siRNA sense strand
ggaacaagauucgagaaca

SEQ ID NO: 618948 - RNA, 19 nt, Homo sapiens
  misc_RNA (1)...(19): siRNA sense strand
gagaugaggaacaagauuc

SEQ ID NO: 618949 - RNA, 19 nt, Homo sapiens
  misc_RNA (1)...(19): siRNA sense strand
ggagaugaggaacaagauu

SEQ ID NO: 618950 - RNA, 19 nt, Homo sapiens
  misc_RNA (1)...(19): siRNA sense strand
aagaagcgcgucaccauga

SEQ ID NO: 618951 - RNA, 19 nt, Homo sapiens
  misc_RNA (1)...(19): siRNA sense strand
gagcgucauugccgagaag

SEQ ID NO: 618952 - RNA, 19 nt, Homo sapiens
  misc_RNA (1)...(19): siRNA sense strand
ccgacaagaugugaaguca

SEQ ID NO: 618953 - RNA, 19 nt, Homo sapiens
  misc_RNA (1)...(19): siRNA sense strand
gaggaacaagauucgagaa

SEQ ID NO: 618954 - RNA, 19 nt, Homo sapiens
  misc_RNA (1)...(19): siRNA sense strand
ucaaccugauggagcagaa

SEQ ID NO: 618955 - RNA, 19 nt, Homo sapiens
  misc_RNA (1)...(19): siRNA sense strand
agaagaagcgcgucaccau

SEQ ID NO: 618956 - RNA, 19 nt, Homo sapiens
  misc_RNA (1)...(19): siRNA sense strand
guacuggagaugaggaaca

SEQ ID NO: 618957 - RNA, 19 nt, Homo sapiens
  misc_RNA (1)...(19): siRNA sense strand
cgagcgucauugccgagaa

SEQ ID NO: 618958 - RNA, 19 nt, Homo sapiens
  misc_RNA (1)...(19): siRNA sense strand
gaacaagauucgagaacaa

SEQ ID NO: 618959 - RNA, 19 nt, Homo sapiens
  misc_RNA (1)...(19): siRNA sense strand
gaacaaaaccgacaagaug

SEQ ID NO: 618960 - RNA, 19 nt, Homo sapiens
  misc_RNA (1)...(19): siRNA sense strand
ggaacaagauucgagaaca

SEQ ID NO: 618961 - RNA, 19 nt, Homo sapiens
  misc_RNA (1)...(19): siRNA sense strand
gagaugaggaacaagauuc

SEQ ID NO: 618962 - RNA, 19 nt, Homo sapiens
  misc_RNA (1)...(19): siRNA sense strand
ggagaugaggaacaagauu

SEQ ID NO: 618963 - RNA, 19 nt, Homo sapiens
  misc_RNA (1)...(19): siRNA sense strand
aagaagcgcgucaccauga

SEQ ID NO: 618964 - RNA, 19 nt, Homo sapiens
  misc_RNA (1)...(19): siRNA sense strand
gagcgucauugccgagaag

SEQ ID NO: 618965 - RNA, 19 nt, Homo sapiens
  misc_RNA (1)...(19): siRNA sense strand
ccgacaagaugugaaguca

SEQ ID NO: 618966 - RNA, 19 nt, Homo sapiens
  misc_RNA (1)...(19): siRNA sense strand
gaggaacaagauucgagaa

SEQ ID NO: 618967 - RNA, 19 nt, Homo sapiens
  misc_RNA (1)...(19): siRNA sense strand
ucaaccugauggagcagaa

SEQ ID NO: 618968 - RNA, 19 nt, Homo sapiens
  misc_RNA (1)...(19): siRNA sense strand
agaagaagcgcgucaccau

SEQ ID NO: 618969 - RNA, 19 nt, Homo sapiens
  misc_RNA (1)...(19): siRNA sense strand
guacuggagaugaggaaca

SEQ ID NO: 618970 - RNA, 19 nt, Homo sapiens
  misc_RNA (1)...(19): siRNA sense strand
cgagcgucauugccgagaa

SEQ ID NO: 618971 - RNA, 19 nt, Homo sapiens
  misc_RNA (1)...(19): siRNA sense strand
gaacaagauucgagaacaa

SEQ ID NO: 618972 - RNA, 19 nt, Homo sapiens
  misc_RNA (1)...(19): siRNA sense strand
gaacaaaaccgacaagaug

SEQ ID NO: 618973 - RNA, 19 nt, Homo sapiens
  misc_RNA (1)...(19): siRNA sense strand
ggaacaagauucgagaaca

SEQ ID NO: 618974 - RNA, 19 nt, Homo sapiens
  misc_RNA (1)...(19): siRNA sense strand
gagaugaggaacaagauuc

SEQ ID NO: 618975 - RNA, 19 nt, Homo sapiens
  misc_RNA (1)...(19): siRNA sense strand
ggagaugaggaacaagauu

SEQ ID NO: 618976 - RNA, 19 nt, Homo sapiens
  misc_RNA (1)...(19): siRNA sense strand
aagaagcgcgucaccauga

SEQ ID NO: 618977 - RNA, 19 nt, Homo sapiens
  misc_RNA (1)...(19): siRNA sense strand
gagcgucauugccgagaag

SEQ ID NO: 618978 - RNA, 19 nt, Homo sapiens
  misc_RNA (1)...(19): siRNA sense strand
ccgacaagaugugaaguca

SEQ ID NO: 618979 - RNA, 19 nt, Homo sapiens
  misc_RNA (1)...(19): siRNA sense strand
gaggaacaagauucgagaa

SEQ ID NO: 618980 - RNA, 19 nt, Homo sapiens
  misc_RNA (1)...(19): siRNA sense strand
ucaaccugauggagcagaa

SEQ ID NO: 618981 - RNA, 19 nt, Homo sapiens
  misc_RNA (1)...(19): siRNA sense strand
agaagaagcgcgucaccau

SEQ ID NO: 618982 - RNA, 19 nt, Homo sapiens
  misc_RNA (1)...(19): siRNA sense strand
guacuggagaugaggaaca

SEQ ID NO: 618983 - RNA, 19 nt, Homo sapiens
  misc_RNA (1)...(19): siRNA sense strand
cgagcgucauugccgagaa

SEQ ID NO: 618984 - RNA, 19 nt, Homo sapiens
  misc_RNA (1)...(19): siRNA sense strand
gaacaagauucgagaacaa

SEQ ID NO: 618985 - RNA, 19 nt, Homo sapiens
  misc_RNA (1)...(19): siRNA sense strand
gaacaaaaccgacaagaug

SEQ ID NO: 618986 - RNA, 19 nt, Homo sapiens
  misc_RNA (1)...(19): siRNA sense strand
ggaacaagauucgagaaca

SEQ ID NO: 618987 - RNA, 19 nt, Homo sapiens
  misc_RNA (1)...(19): siRNA sense strand
gagaugaggaacaagauuc

SEQ ID NO: 618988 - RNA, 19 nt, Homo sapiens
  misc_RNA (1)...(19): siRNA sense strand
ggagaugaggaacaagauu

SEQ ID NO: 618989 - RNA, 19 nt, Homo sapiens
  misc_RNA (1)...(19): siRNA sense strand
aagaagcgcgucaccauga

SEQ ID NO: 618990 - RNA, 19 nt, Homo sapiens
  misc_RNA (1)...(19): siRNA sense strand
gagcgucauugccgagaag

SEQ ID NO: 618991 - RNA, 19 nt, Homo sapiens
  misc_RNA (1)...(19): siRNA sense strand
ccgacaagaugugaaguca

SEQ ID NO: 618992 - RNA, 19 nt, Homo sapiens
  misc_RNA (1)...(19): siRNA sense strand
gaggaacaagauucgagaa

SEQ ID NO: 618993 - RNA, 19 nt, Homo sapiens
  misc_RNA (1)...(19): siRNA sense strand
ucaaccugauggagcagaa

SEQ ID NO: 618994 - RNA, 19 nt, Homo sapiens
  misc_RNA (1)...(19): siRNA sense strand
agaagaagcgcgucaccau

SEQ ID NO: 618995 - RNA, 19 nt, Homo sapiens
  misc_RNA (1)...(19): siRNA sense strand
guacuggagaugaggaaca

SEQ ID NO: 618996 - RNA, 19 nt, Homo sapiens
  misc_RNA (1)...(19): siRNA sense strand
cgagcgucauugccgagaa

SEQ ID NO: 618997 - RNA, 19 nt, Homo sapiens
  misc_RNA (1)...(19): siRNA sense strand
gaacaagauucgagaacaa

SEQ ID NO: 618998 - RNA, 19 nt, Homo sapiens
  misc_RNA (1)...(19): siRNA sense strand
gaacaaaaccgacaagaug

SEQ ID NO: 618999 - RNA, 19 nt, Homo sapiens
  misc_RNA (1)...(19): siRNA sense strand
ggaacaagauucgagaaca

SEQ ID NO: 619000 - RNA, 19 nt, Homo sapiens
  misc_RNA (1)...(19): siRNA sense strand
gagaugaggaacaagauuc

SEQ ID NO: 619001 - RNA, 19 nt, Homo sapiens
  misc_RNA (1)...(19): siRNA sense strand
ggagaugaggaacaagauu

SEQ ID NO: 619002 - RNA, 19 nt, Homo sapiens
  misc_RNA (1)...(19): siRNA sense strand
aagaagcgcgucaccauga

SEQ ID NO: 619003 - RNA, 19 nt, Homo sapiens
  misc_RNA (1)...(19): siRNA sense strand
gagcgucauugccgagaag

SEQ ID NO: 619004 - RNA, 19 nt, Homo sapiens
  misc_RNA (1)...(19): siRNA sense strand
ccgacaagaugugaaguca

SEQ ID NO: 619005 - RNA, 19 nt, Homo sapiens
  misc_RNA (1)...(19): siRNA sense strand
gaggaacaagauucgagaa

SEQ ID NO: 619006 - RNA, 19 nt, Homo sapiens
  misc_RNA (1)...(19): siRNA sense strand
ucaaccugauggagcagaa

SEQ ID NO: 619007 - RNA, 19 nt, Homo sapiens
  misc_RNA (1)...(19): siRNA sense strand
agaagaagcgcgucaccau

SEQ ID NO: 619008 - RNA, 19 nt, Homo sapiens
  misc_RNA (1)...(19): siRNA sense strand
guacuggagaugaggaaca

SEQ ID NO: 619009 - RNA, 19 nt, Homo sapiens
  misc_RNA (1)...(19): siRNA sense strand
cgagcgucauugccgagaa

SEQ ID NO: 619010 - RNA, 19 nt, Homo sapiens
  misc_RNA (1)...(19): siRNA sense strand
gaacaagauucgagaacaa

SEQ ID NO: 619011 - RNA, 19 nt, Homo sapiens
  misc_RNA (1)...(19): siRNA sense strand
gaacaaaaccgacaagaug

SEQ ID NO: 619012 - RNA, 19 nt, Homo sapiens
  misc_RNA (1)...(19): siRNA sense strand
ggaacaagauucgagaaca

SEQ ID NO: 619013 - RNA, 19 nt, Homo sapiens
  misc_RNA (1)...(19): siRNA sense strand
gagaugaggaacaagauuc

SEQ ID NO: 619014 - RNA, 19 nt, Homo sapiens
  misc_RNA (1)...(19): siRNA sense strand
ggagaugaggaacaagauu

SEQ ID NO: 619015 - RNA, 19 nt, Homo sapiens
  misc_RNA (1)...(19): siRNA sense strand
aagaagcgcgucaccauga

SEQ ID NO: 619016 - RNA, 19 nt, Homo sapiens
  misc_RNA (1)...(19): siRNA sense strand
gagcgucauugccgagaag

SEQ ID NO: 619017 - RNA, 19 nt, Homo sapiens
  misc_RNA (1)...(19): siRNA sense strand
ccgacaagaugugaaguca

SEQ ID NO: 619018 - RNA, 19 nt, Homo sapiens
  misc_RNA (1)...(19): siRNA sense strand
gaggaacaagauucgagaa

SEQ ID NO: 619019 - RNA, 19 nt, Homo sapiens
  misc_RNA (1)...(19): siRNA sense strand
ucaaccugauggagcagaa

SEQ ID NO: 619020 - RNA, 19 nt, Homo sapiens
  misc_RNA (1)...(19): siRNA sense strand
agaagaagcgcgucaccau

SEQ ID NO: 619021 - RNA, 19 nt, Homo sapiens
  misc_RNA (1)...(19): siRNA sense strand
guacuggagaugaggaaca

SEQ ID NO: 619022 - RNA, 19 nt, Homo sapiens
  misc_RNA (1)...(19): siRNA sense strand
cgagcgucauugccgagaa

SEQ ID NO: 619023 - RNA, 19 nt, Homo sapiens
  misc_RNA (1)...(19): siRNA sense strand
gaacaagauucgagaacaa

SEQ ID NO: 619024 - RNA, 19 nt, Homo sapiens
  misc_RNA (1)...(19): siRNA sense strand
gaacaaaaccgacaagaug

SEQ ID NO: 619025 - RNA, 19 nt, Homo sapiens
  misc_RNA (1)...(19): siRNA sense strand
ggaacaagauucgagaaca

SEQ ID NO: 619026 - RNA, 19 nt, Homo sapiens
  misc_RNA (1)...(19): siRNA sense strand
gagaugaggaacaagauuc

SEQ ID NO: 619027 - RNA, 19 nt, Homo sapiens
  misc_RNA (1)...(19): siRNA sense strand
ggagaugaggaacaagauu

SEQ ID NO: 619028 - RNA, 19 nt, Homo sapiens
  misc_RNA (1)...(19): siRNA sense strand
aagaagcgcgucaccauga

SEQ ID NO: 619029 - RNA, 19 nt, Homo sapiens
  misc_RNA (1)...(19): siRNA sense strand
gagcgucauugccgagaag

SEQ ID NO: 619030 - RNA, 19 nt, Homo sapiens
  misc_RNA (1)...(19): siRNA sense strand
ccgacaagaugugaaguca

SEQ ID NO: 619031 - RNA, 19 nt, Homo sapiens
  misc_RNA (1)...(19): siRNA sense strand
gaggaacaagauucgagaa

SEQ ID NO: 619032 - RNA, 19 nt, Homo sapiens
  misc_RNA (1)...(19): siRNA sense strand
ucaaccugauggagcagaa

SEQ ID NO: 619033 - RNA, 19 nt, Homo sapiens
  misc_RNA (1)...(19): siRNA sense strand
agaagaagcgcgucaccau

SEQ ID NO: 619034 - RNA, 19 nt, Homo sapiens
  misc_RNA (1)...(19): siRNA sense strand
guacuggagaugaggaaca

SEQ ID NO: 619035 - RNA, 19 nt, Homo sapiens
  misc_RNA (1)...(19): siRNA sense strand
cgagcgucauugccgagaa

SEQ ID NO: 619036 - RNA, 19 nt, Homo sapiens
  misc_RNA (1)...(19): siRNA sense strand
gaacaagauucgagaacaa

SEQ ID NO: 619037 - RNA, 19 nt, Homo sapiens
  misc_RNA (1)...(19): siRNA sense strand
gaacaaaaccgacaagaug

SEQ ID NO: 619038 - RNA, 19 nt, Homo sapiens
  misc_RNA (1)...(19): siRNA sense strand
ggaacaagauucgagaaca

SEQ ID NO: 619039 - RNA, 19 nt, Homo sapiens
  misc_RNA (1)...(19): siRNA sense strand
gagaugaggaacaagauuc

SEQ ID NO: 619040 - RNA, 19 nt, Homo sapiens
  misc_RNA (1)...(19): siRNA sense strand
ggagaugaggaacaagauu

SEQ ID NO: 619041 - RNA, 19 nt, Homo sapiens
  misc_RNA (1)...(19): siRNA sense strand
aagaagcgcgucaccauga

SEQ ID NO: 619042 - RNA, 19 nt, Homo sapiens
  misc_RNA (1)...(19): siRNA sense strand
gagcgucauugccgagaag

SEQ ID NO: 619043 - RNA, 19 nt, Homo sapiens
  misc_RNA (1)...(19): siRNA sense strand
ccgacaagaugugaaguca

SEQ ID NO: 619044 - RNA, 19 nt, Homo sapiens
  misc_RNA (1)...(19): siRNA sense strand
gaggaacaagauucgagaa

SEQ ID NO: 619045 - RNA, 19 nt, Homo sapiens
  misc_RNA (1)...(19): siRNA sense strand
ucaaccugauggagcagaa

SEQ ID NO: 619046 - RNA, 19 nt, Homo sapiens
  misc_RNA (1)...(19): siRNA sense strand
agaagaagcgcgucaccau

SEQ ID NO: 619047 - RNA, 19 nt, Homo sapiens
  misc_RNA (1)...(19): siRNA sense strand
guacuggagaugaggaaca

SEQ ID NO: 619048 - RNA, 19 nt, Homo sapiens
  misc_RNA (1)...(19): siRNA sense strand
cgagcgucauugccgagaa

SEQ ID NO: 619049 - RNA, 19 nt, Homo sapiens
  misc_RNA (1)...(19): siRNA sense strand
gaaaugaaccuaaggaauu

SEQ ID NO: 619050 - RNA, 19 nt, Homo sapiens
  misc_RNA (1)...(19): siRNA sense strand
uaucgaagcugaugaagua

SEQ ID NO: 619051 - RNA, 19 nt, Homo sapiens
  misc_RNA (1)...(19): siRNA sense strand
uaacuucgcugcuuucauu

SEQ ID NO: 619052 - RNA, 19 nt, Homo sapiens
  misc_RNA (1)...(19): siRNA sense strand
caaauuauauugccagaga

SEQ ID NO: 619053 - RNA, 19 nt, Homo sapiens
  misc_RNA (1)...(19): siRNA sense strand
gagaauggauccaccacua

SEQ ID NO: 619054 - RNA, 19 nt, Homo sapiens
  misc_RNA (1)...(19): siRNA sense strand
caagacaccuucauggaaa

SEQ ID NO: 619055 - RNA, 19 nt, Homo sapiens
  misc_RNA (1)...(19): siRNA sense strand
gacaacaucuuccgaaaug

SEQ ID NO: 619056 - RNA, 19 nt, Homo sapiens
  misc_RNA (1)...(19): siRNA sense strand
aaaaggacaugcacuauua

SEQ ID NO: 619057 - RNA, 19 nt, Homo sapiens
  misc_RNA (1)...(19): siRNA sense strand
caugaggucuauuaucuuu

SEQ ID NO: 619058 - RNA, 19 nt, Homo sapiens
  misc_RNA (1)...(19): siRNA sense strand
gggaugaaacccucuauaa

SEQ ID NO: 619059 - RNA, 19 nt, Homo sapiens
  misc_RNA (1)...(19): siRNA sense strand
gcaagacaccuucauggaa

SEQ ID NO: 619060 - RNA, 19 nt, Homo sapiens
  misc_RNA (1)...(19): siRNA sense strand
ccaaagcagugucuucuca

SEQ ID NO: 619061 - RNA, 19 nt, Homo sapiens
  misc_RNA (1)...(19): siRNA sense strand
caaauacagccaugaagaa

SEQ ID NO: 619062 - RNA, 19 nt, Homo sapiens
  misc_RNA (1)...(19): siRNA sense strand
gcaacauuauuaagcaguu

SEQ ID NO: 619063 - RNA, 19 nt, Homo sapiens
  misc_RNA (1)...(19): siRNA sense strand
ggacaugcacuauuaccaa

SEQ ID NO: 619064 - RNA, 19 nt, Homo sapiens
  misc_RNA (1)...(19): siRNA sense strand
gaugaaacccucuauaagg

SEQ ID NO: 619065 - RNA, 19 nt, Homo sapiens
  misc_RNA (1)...(19): siRNA sense strand
ggaaaugaaccuaaggaau

SEQ ID NO: 619066 - RNA, 19 nt, Homo sapiens
  misc_RNA (1)...(19): siRNA sense strand
ugggaaaccugguauugaa

SEQ ID NO: 619067 - RNA, 19 nt, Homo sapiens
  misc_RNA (1)...(19): siRNA sense strand
gaaauuaucgaagcugaug

SEQ ID NO: 619068 - RNA, 19 nt, Homo sapiens
  misc_RNA (1)...(19): siRNA sense strand
gggacaacaucuuccgaaa

SEQ ID NO: 619069 - RNA, 19 nt, Homo sapiens
  misc_RNA (1)...(19): siRNA sense strand
caagcuggcugccucuuuc

SEQ ID NO: 619070 - RNA, 19 nt, Homo sapiens
  misc_RNA (1)...(19): siRNA sense strand
ccaaauacagccaugaaga

SEQ ID NO: 619071 - RNA, 19 nt, Homo sapiens
  misc_RNA (1)...(19): siRNA sense strand
ggucuauuaucuuugcaaa

SEQ ID NO: 619072 - RNA, 19 nt, Homo sapiens
  misc_RNA (1)...(19): siRNA sense strand
ggacaacaucuuccgaaau

SEQ ID NO: 619073 - RNA, 19 nt, Homo sapiens
  misc_RNA (1)...(19): siRNA sense strand
acacuuaugugaugguugu

SEQ ID NO: 619074 - RNA, 19 nt, Homo sapiens
  misc_RNA (1)...(19): siRNA sense strand
cagcuacucugaucaacau

SEQ ID NO: 619075 - RNA, 19 nt, Homo sapiens
  misc_RNA (1)...(19): siRNA sense strand
gacaugcacuauuaccaau

SEQ ID NO: 619076 - RNA, 19 nt, Homo sapiens
  misc_RNA (1)...(19): siRNA sense strand
guauugaaccugugggauu

SEQ ID NO: 619077 - RNA, 19 nt, Homo sapiens
  misc_RNA (1)...(19): siRNA sense strand
ggaugaaacccucuauaag

SEQ ID NO: 619078 - RNA, 19 nt, Homo sapiens
  misc_RNA (1)...(19): siRNA sense strand
gcguuugucucgcccauug

SEQ ID NO: 619079 - RNA, 19 nt, Homo sapiens
  misc_RNA (1)...(19): siRNA sense strand
uuaaagagcgagaagaaga

SEQ ID NO: 619080 - RNA, 19 nt, Homo sapiens
  misc_RNA (1)...(19): siRNA sense strand
gcaagcuggcugccucuuu

SEQ ID NO: 619081 - RNA, 19 nt, Homo sapiens
  misc_RNA (1)...(19): siRNA sense strand
gaaaaggacaugcacuauu

SEQ ID NO: 619082 - RNA, 19 nt, Homo sapiens
  misc_RNA (1)...(19): siRNA sense strand
cgaagcugaugaaguacuu

SEQ ID NO: 619083 - RNA, 19 nt, Homo sapiens
  misc_RNA (1)...(19): siRNA sense strand
auguggagguucugauuua

SEQ ID NO: 619084 - RNA, 19 nt, Homo sapiens
  misc_RNA (1)...(19): siRNA sense strand
gcagcgugaugcccauaga

SEQ ID NO: 619085 - RNA, 19 nt, Homo sapiens
  misc_RNA (1)...(19): siRNA sense strand
ggagagccgcgaacuggaa

SEQ ID NO: 619086 - RNA, 19 nt, Homo sapiens
  misc_RNA (1)...(19): siRNA sense strand
ucauugacaucuuuacauc

SEQ ID NO: 619087 - RNA, 19 nt, Homo sapiens
  misc_RNA (1)...(19): siRNA sense strand
gguaauuucucacuaucag

SEQ ID NO: 619088 - RNA, 19 nt, Homo sapiens
  misc_RNA (1)...(19): siRNA sense strand
caacacuuaugugaugguu

SEQ ID NO: 619089 - RNA, 19 nt, Homo sapiens
  misc_RNA (1)...(19): siRNA sense strand
aagaagauuugaggcguuu

SEQ ID NO: 619090 - RNA, 19 nt, Homo sapiens
  misc_RNA (1)...(19): siRNA sense strand
gguccagcauaguuuauca

SEQ ID NO: 619091 - RNA, 19 nt, Homo sapiens
  misc_RNA (1)...(19): siRNA sense strand
uggagguucugauuuaugu

SEQ ID NO: 619092 - RNA, 19 nt, Homo sapiens
  misc_RNA (1)...(19): siRNA sense strand
ggaccaaagcagugucuuc

SEQ ID NO: 619093 - RNA, 19 nt, Homo sapiens
  misc_RNA (1)...(19): siRNA sense strand
gcccauagauuugagaaaa

SEQ ID NO: 619094 - RNA, 19 nt, Homo sapiens
  misc_RNA (1)...(19): siRNA sense strand
caugcacuauuaccaauca

SEQ ID NO: 619095 - RNA, 19 nt, Homo sapiens
  misc_RNA (1)...(19): siRNA sense strand
uauugaaccugugggauug

SEQ ID NO: 619096 - RNA, 19 nt, Homo sapiens
  misc_RNA (1)...(19): siRNA sense strand
gaagauuugaggcguuugu

SEQ ID NO: 619097 - RNA, 19 nt, Homo sapiens
  misc_RNA (1)...(19): siRNA sense strand
gguucugauuuaugucuuu

SEQ ID NO: 619098 - RNA, 19 nt, Homo sapiens
  misc_RNA (1)...(19): siRNA sense strand
gcgugaugcccauagauuu

SEQ ID NO: 619099 - RNA, 19 nt, Homo sapiens
  misc_RNA (1)...(19): siRNA sense strand
gcaaugccaggaaacacuu

SEQ ID NO: 619100 - RNA, 19 nt, Homo sapiens
  misc_RNA (1)...(19): siRNA sense strand
ggugggugcuaccaaauac

SEQ ID NO: 619101 - RNA, 19 nt, Homo sapiens
  misc_RNA (1)...(19): siRNA sense strand
aaagcagugucuucucaug

SEQ ID NO: 619102 - RNA, 19 nt, Homo sapiens
  misc_RNA (1)...(19): siRNA sense strand
gggugggugcuaccaaaua

SEQ ID NO: 619103 - RNA, 19 nt, Homo sapiens
  misc_RNA (1)...(19): siRNA sense strand
acucuaacuucgcugcuuu

SEQ ID NO: 619104 - RNA, 19 nt, Homo sapiens
  misc_RNA (1)...(19): siRNA sense strand
caacauuauuaagcaguuc

SEQ ID NO: 619105 - RNA, 19 nt, Homo sapiens
  misc_RNA (1)...(19): siRNA sense strand
ucugguaauuucucacuau

SEQ ID NO: 619106 - RNA, 19 nt, Homo sapiens
  misc_RNA (1)...(19): siRNA sense strand
cugcagaauucuccagaug

SEQ ID NO: 619107 - RNA, 19 nt, Homo sapiens
  misc_RNA (1)...(19): siRNA sense strand
gaaauguggagguucugau

SEQ ID NO: 619108 - RNA, 19 nt, Homo sapiens
  misc_RNA (1)...(19): siRNA sense strand
gccaggaaacacuuugaaa

SEQ ID NO: 619109 - RNA, 19 nt, Homo sapiens
  misc_RNA (1)...(19): siRNA sense strand
agcaugaggucuauuaucu

SEQ ID NO: 619110 - RNA, 19 nt, Homo sapiens
  misc_RNA (1)...(19): siRNA sense strand
cauccgcaaugccaggaaa

SEQ ID NO: 619111 - RNA, 19 nt, Homo sapiens
  misc_RNA (1)...(19): siRNA sense strand
aaauacagccaugaagaaa

SEQ ID NO: 619112 - RNA, 19 nt, Homo sapiens
  misc_RNA (1)...(19): siRNA sense strand
gagagcuacuuuucuggua

SEQ ID NO: 619113 - RNA, 19 nt, Homo sapiens
  misc_RNA (1)...(19): siRNA sense strand
ggcaagacaccuucaugga

SEQ ID NO: 619114 - RNA, 19 nt, Homo sapiens
  misc_RNA (1)...(19): siRNA sense strand
gcaugaggucuauuaucuu

SEQ ID NO: 619115 - RNA, 19 nt, Homo sapiens
  misc_RNA (1)...(19): siRNA sense strand
aagaguggauggaccaaag

SEQ ID NO: 619116 - RNA, 19 nt, Homo sapiens
  misc_RNA (1)...(19): siRNA sense strand
gaagucaggaacucuaacu

SEQ ID NO: 619117 - RNA, 19 nt, Homo sapiens
  misc_RNA (1)...(19): siRNA sense strand
gaaucugacucugagaaaa

SEQ ID NO: 619118 - RNA, 19 nt, Homo sapiens
  misc_RNA (1)...(19): siRNA sense strand
uaaagagcgagaagaagau

SEQ ID NO: 619119 - RNA, 19 nt, Homo sapiens
  misc_RNA (1)...(19): siRNA sense strand
acaccuucauggaaaauua

SEQ ID NO: 619120 - RNA, 19 nt, Homo sapiens
  misc_RNA (1)...(19): siRNA sense strand
ugaggucuauuaucuuugc

SEQ ID NO: 619121 - RNA, 19 nt, Homo sapiens
  misc_RNA (1)...(19): siRNA sense strand
gagagccgcgaacuggaaa

SEQ ID NO: 619122 - RNA, 19 nt, Homo sapiens
  misc_RNA (1)...(19): siRNA sense strand
auccaacacuuaugugaug

SEQ ID NO: 619123 - RNA, 19 nt, Homo sapiens
  misc_RNA (1)...(19): siRNA sense strand
cagcuggaaaugaaccuaa

SEQ ID NO: 619124 - RNA, 19 nt, Homo sapiens
  misc_RNA (1)...(19): siRNA sense strand
guucugauuuaugucuuug

SEQ ID NO: 619125 - RNA, 19 nt, Homo sapiens
  misc_RNA (1)...(19): siRNA sense strand
gaccaaagcagugucuucu

SEQ ID NO: 619126 - RNA, 19 nt, Homo sapiens
  misc_RNA (1)...(19): siRNA sense strand
ugagagagcuacuuuucug

SEQ ID NO: 619127 - RNA, 19 nt, Homo sapiens
  misc_RNA (1)...(19): siRNA sense strand
cagcugauucccaauguuc

SEQ ID NO: 619128 - RNA, 19 nt, Homo sapiens
  misc_RNA (1)...(19): siRNA sense strand
aaauguggagguucugauu

SEQ ID NO: 619129 - RNA, 19 nt, Homo sapiens
  misc_RNA (1)...(19): siRNA sense strand
gaaaacgacggagaaagaa

SEQ ID NO: 619130 - RNA, 19 nt, Homo sapiens
  misc_RNA (1)...(19): siRNA sense strand
gcagcuacucugaucaaca

SEQ ID NO: 619131 - RNA, 19 nt, Homo sapiens
  misc_RNA (1)...(19): siRNA sense strand
aaaagugggucugguaaga

SEQ ID NO: 619132 - RNA, 19 nt, Homo sapiens
  misc_RNA (1)...(19): siRNA sense strand
cgugaugcccauagauuug

SEQ ID NO: 619133 - RNA, 19 nt, Homo sapiens
  misc_RNA (1)...(19): siRNA sense strand
gaauucuccagaugccaaa

SEQ ID NO: 619134 - RNA, 19 nt, Homo sapiens
  misc_RNA (1)...(19): siRNA sense strand
agagcgagaagaagauuug

SEQ ID NO: 619135 - RNA, 19 nt, Homo sapiens
  misc_RNA (1)...(19): siRNA sense strand
gguaaaagugggucuggua

SEQ ID NO: 619136 - RNA, 19 nt, Homo sapiens
  misc_RNA (1)...(19): siRNA sense strand
gaagaaucugacucugaga

SEQ ID NO: 619137 - RNA, 19 nt, Homo sapiens
  misc_RNA (1)...(19): siRNA sense strand
ucagcugauucccaauguu

SEQ ID NO: 619138 - RNA, 19 nt, Homo sapiens
  misc_RNA (1)...(19): siRNA sense strand
uugaaaagcuggaaagagu

SEQ ID NO: 619139 - RNA, 19 nt, Homo sapiens
  misc_RNA (1)...(19): siRNA sense strand
ccaggaaacacuuugaaaa

SEQ ID NO: 619140 - RNA, 19 nt, Homo sapiens
  misc_RNA (1)...(19): siRNA sense strand
ucugauccguccauuccuu

SEQ ID NO: 619141 - RNA, 19 nt, Homo sapiens
  misc_RNA (1)...(19): siRNA sense strand
agaaucugacucugagaaa

SEQ ID NO: 619142 - RNA, 19 nt, Homo sapiens
  misc_RNA (1)...(19): siRNA sense strand
guauggaagucaggaacuc

SEQ ID NO: 619143 - RNA, 19 nt, Homo sapiens
  misc_RNA (1)...(19): siRNA sense strand
uaccaaauacagccaugaa

SEQ ID NO: 619144 - RNA, 19 nt, Homo sapiens
  misc_RNA (1)...(19): siRNA sense strand
caaaauggaucugguacag

SEQ ID NO: 619145 - RNA, 19 nt, Homo sapiens
  misc_RNA (1)...(19): siRNA sense strand
ccaacgggacaacaucuuc

SEQ ID NO: 619146 - RNA, 19 nt, Homo sapiens
  misc_RNA (1)...(19): siRNA sense strand
gagcagcgugaugcccaua

SEQ ID NO: 619147 - RNA, 19 nt, Homo sapiens
  misc_RNA (1)...(19): siRNA sense strand
gaaaccugguauugaaccu

SEQ ID NO: 619148 - RNA, 19 nt, Homo sapiens
  misc_RNA (1)...(19): siRNA sense strand
gaaagaguggauggaccaa

SEQ ID NO: 619149 - RNA, 19 nt, Homo sapiens
  misc_RNA (1)...(19): siRNA sense strand
gaaaugaaccuaaggaauu

SEQ ID NO: 619150 - RNA, 19 nt, Homo sapiens
  misc_RNA (1)...(19): siRNA sense strand
uaucgaagcugaugaagua

SEQ ID NO: 619151 - RNA, 19 nt, Homo sapiens
  misc_RNA (1)...(19): siRNA sense strand
uaacuucgcugcuuucauu

SEQ ID NO: 619152 - RNA, 19 nt, Homo sapiens
  misc_RNA (1)...(19): siRNA sense strand
caaauuauauugccagaga

SEQ ID NO: 619153 - RNA, 19 nt, Homo sapiens
  misc_RNA (1)...(19): siRNA sense strand
gagaauggauccaccacua

SEQ ID NO: 619154 - RNA, 19 nt, Homo sapiens
  misc_RNA (1)...(19): siRNA sense strand
caagacaccuucauggaaa

SEQ ID NO: 619155 - RNA, 19 nt, Homo sapiens
  misc_RNA (1)...(19): siRNA sense strand
gacaacaucuuccgaaaug

SEQ ID NO: 619156 - RNA, 19 nt, Homo sapiens
  misc_RNA (1)...(19): siRNA sense strand
aaaaggacaugcacuauua

SEQ ID NO: 619157 - RNA, 19 nt, Homo sapiens
  misc_RNA (1)...(19): siRNA sense strand
caugaggucuauuaucuuu

SEQ ID NO: 619158 - RNA, 19 nt, Homo sapiens
  misc_RNA (1)...(19): siRNA sense strand
gggaugaaacccucuauaa

SEQ ID NO: 619159 - RNA, 19 nt, Homo sapiens
  misc_RNA (1)...(19): siRNA sense strand
gcaagacaccuucauggaa

SEQ ID NO: 619160 - RNA, 19 nt, Homo sapiens
  misc_RNA (1)...(19): siRNA sense strand
ccaaagcagugucuucuca

SEQ ID NO: 619161 - RNA, 19 nt, Homo sapiens
  misc_RNA (1)...(19): siRNA sense strand
caaauacagccaugaagaa

SEQ ID NO: 619162 - RNA, 19 nt, Homo sapiens
  misc_RNA (1)...(19): siRNA sense strand
gcaacauuauuaagcaguu

SEQ ID NO: 619163 - RNA, 19 nt, Homo sapiens
  misc_RNA (1)...(19): siRNA sense strand
ggacaugcacuauuaccaa

SEQ ID NO: 619164 - RNA, 19 nt, Homo sapiens
  misc_RNA (1)...(19): siRNA sense strand
gaugaaacccucuauaagg

SEQ ID NO: 619165 - RNA, 19 nt, Homo sapiens
  misc_RNA (1)...(19): siRNA sense strand
ggaaaugaaccuaaggaau

SEQ ID NO: 619166 - RNA, 19 nt, Homo sapiens
  misc_RNA (1)...(19): siRNA sense strand
ugggaaaccugguauugaa

SEQ ID NO: 619167 - RNA, 19 nt, Homo sapiens
  misc_RNA (1)...(19): siRNA sense strand
gaaauuaucgaagcugaug

SEQ ID NO: 619168 - RNA, 19 nt, Homo sapiens
  misc_RNA (1)...(19): siRNA sense strand
gggacaacaucuuccgaaa

SEQ ID NO: 619169 - RNA, 19 nt, Homo sapiens
  misc_RNA (1)...(19): siRNA sense strand
caagcuggcugccucuuuc

SEQ ID NO: 619170 - RNA, 19 nt, Homo sapiens
  misc_RNA (1)...(19): siRNA sense strand
ccaaauacagccaugaaga

SEQ ID NO: 619171 - RNA, 19 nt, Homo sapiens
  misc_RNA (1)...(19): siRNA sense strand
ggucuauuaucuuugcaaa

SEQ ID NO: 619172 - RNA, 19 nt, Homo sapiens
  misc_RNA (1)...(19): siRNA sense strand
ggacaacaucuuccgaaau

SEQ ID NO: 619173 - RNA, 19 nt, Homo sapiens
  misc_RNA (1)...(19): siRNA sense strand
acacuuaugugaugguugu

SEQ ID NO: 619174 - RNA, 19 nt, Homo sapiens
  misc_RNA (1)...(19): siRNA sense strand
cagcuacucugaucaacau

SEQ ID NO: 619175 - RNA, 19 nt, Homo sapiens
  misc_RNA (1)...(19): siRNA sense strand
gacaugcacuauuaccaau

SEQ ID NO: 619176 - RNA, 19 nt, Homo sapiens
  misc_RNA (1)...(19): siRNA sense strand
guauugaaccugugggauu

SEQ ID NO: 619177 - RNA, 19 nt, Homo sapiens
  misc_RNA (1)...(19): siRNA sense strand
ggaugaaacccucuauaag

SEQ ID NO: 619178 - RNA, 19 nt, Homo sapiens
  misc_RNA (1)...(19): siRNA sense strand
gcguuugucucgcccauug

SEQ ID NO: 619179 - RNA, 19 nt, Homo sapiens
  misc_RNA (1)...(19): siRNA sense strand
uuaaagagcgagaagaaga

SEQ ID NO: 619180 - RNA, 19 nt, Homo sapiens
  misc_RNA (1)...(19): siRNA sense strand
gcaagcuggcugccucuuu

SEQ ID NO: 619181 - RNA, 19 nt, Homo sapiens
  misc_RNA (1)...(19): siRNA sense strand
gaaaaggacaugcacuauu

SEQ ID NO: 619182 - RNA, 19 nt, Homo sapiens
  misc_RNA (1)...(19): siRNA sense strand
cgaagcugaugaaguacuu

SEQ ID NO: 619183 - RNA, 19 nt, Homo sapiens
  misc_RNA (1)...(19): siRNA sense strand
auguggagguucugauuua

SEQ ID NO: 619184 - RNA, 19 nt, Homo sapiens
  misc_RNA (1)...(19): siRNA sense strand
gcagcgugaugcccauaga

SEQ ID NO: 619185 - RNA, 19 nt, Homo sapiens
  misc_RNA (1)...(19): siRNA sense strand
ggagagccgcgaacuggaa

SEQ ID NO: 619186 - RNA, 19 nt, Homo sapiens
  misc_RNA (1)...(19): siRNA sense strand
ucauugacaucuuuacauc

SEQ ID NO: 619187 - RNA, 19 nt, Homo sapiens
  misc_RNA (1)...(19): siRNA sense strand
gguaauuucucacuaucag

SEQ ID NO: 619188 - RNA, 19 nt, Homo sapiens
  misc_RNA (1)...(19): siRNA sense strand
caacacuuaugugaugguu

SEQ ID NO: 619189 - RNA, 19 nt, Homo sapiens
  misc_RNA (1)...(19): siRNA sense strand
aagaagauuugaggcguuu

SEQ ID NO: 619190 - RNA, 19 nt, Homo sapiens
  misc_RNA (1)...(19): siRNA sense strand
gguccagcauaguuuauca

SEQ ID NO: 619191 - RNA, 19 nt, Homo sapiens
  misc_RNA (1)...(19): siRNA sense strand
uggagguucugauuuaugu

SEQ ID NO: 619192 - RNA, 19 nt, Homo sapiens
  misc_RNA (1)...(19): siRNA sense strand
ggaccaaagcagugucuuc

SEQ ID NO: 619193 - RNA, 19 nt, Homo sapiens
  misc_RNA (1)...(19): siRNA sense strand
gcccauagauuugagaaaa

SEQ ID NO: 619194 - RNA, 19 nt, Homo sapiens
  misc_RNA (1)...(19): siRNA sense strand
caugcacuauuaccaauca

SEQ ID NO: 619195 - RNA, 19 nt, Homo sapiens
  misc_RNA (1)...(19): siRNA sense strand
uauugaaccugugggauug

SEQ ID NO: 619196 - RNA, 19 nt, Homo sapiens
  misc_RNA (1)...(19): siRNA sense strand
gaagauuugaggcguuugu

SEQ ID NO: 619197 - RNA, 19 nt, Homo sapiens
  misc_RNA (1)...(19): siRNA sense strand
gguucugauuuaugucuuu

SEQ ID NO: 619198 - RNA, 19 nt, Homo sapiens
  misc_RNA (1)...(19): siRNA sense strand
gcgugaugcccauagauuu

SEQ ID NO: 619199 - RNA, 19 nt, Homo sapiens
  misc_RNA (1)...(19): siRNA sense strand
gcaaugccaggaaacacuu

SEQ ID NO: 619200 - RNA, 19 nt, Homo sapiens
  misc_RNA (1)...(19): siRNA sense strand
ggugggugcuaccaaauac

SEQ ID NO: 619201 - RNA, 19 nt, Homo sapiens
  misc_RNA (1)...(19): siRNA sense strand
aaagcagugucuucucaug

SEQ ID NO: 619202 - RNA, 19 nt, Homo sapiens
  misc_RNA (1)...(19): siRNA sense strand
gggugggugcuaccaaaua

SEQ ID NO: 619203 - RNA, 19 nt, Homo sapiens
  misc_RNA (1)...(19): siRNA sense strand
acucuaacuucgcugcuuu

SEQ ID NO: 619204 - RNA, 19 nt, Homo sapiens
  misc_RNA (1)...(19): siRNA sense strand
caacauuauuaagcaguuc

SEQ ID NO: 619205 - RNA, 19 nt, Homo sapiens
  misc_RNA (1)...(19): siRNA sense strand
ucugguaauuucucacuau

SEQ ID NO: 619206 - RNA, 19 nt, Homo sapiens
  misc_RNA (1)...(19): siRNA sense strand
cugcagaauucuccagaug

SEQ ID NO: 619207 - RNA, 19 nt, Homo sapiens
  misc_RNA (1)...(19): siRNA sense strand
gaaauguggagguucugau

SEQ ID NO: 619208 - RNA, 19 nt, Homo sapiens
  misc_RNA (1)...(19): siRNA sense strand
gccaggaaacacuuugaaa

SEQ ID NO: 619209 - RNA, 19 nt, Homo sapiens
  misc_RNA (1)...(19): siRNA sense strand
agcaugaggucuauuaucu

SEQ ID NO: 619210 - RNA, 19 nt, Homo sapiens
  misc_RNA (1)...(19): siRNA sense strand
cauccgcaaugccaggaaa

SEQ ID NO: 619211 - RNA, 19 nt, Homo sapiens
  misc_RNA (1)...(19): siRNA sense strand
aaauacagccaugaagaaa

SEQ ID NO: 619212 - RNA, 19 nt, Homo sapiens
  misc_RNA (1)...(19): siRNA sense strand
gagagcuacuuuucuggua

SEQ ID NO: 619213 - RNA, 19 nt, Homo sapiens
  misc_RNA (1)...(19): siRNA sense strand
ggcaagacaccuucaugga

SEQ ID NO: 619214 - RNA, 19 nt, Homo sapiens
  misc_RNA (1)...(19): siRNA sense strand
gcaugaggucuauuaucuu

SEQ ID NO: 619215 - RNA, 19 nt, Homo sapiens
  misc_RNA (1)...(19): siRNA sense strand
aagaguggauggaccaaag

SEQ ID NO: 619216 - RNA, 19 nt, Homo sapiens
  misc_RNA (1)...(19): siRNA sense strand
gaagucaggaacucuaacu

SEQ ID NO: 619217 - RNA, 19 nt, Homo sapiens
  misc_RNA (1)...(19): siRNA sense strand
gaaucugacucugagaaaa

SEQ ID NO: 619218 - RNA, 19 nt, Homo sapiens
  misc_RNA (1)...(19): siRNA sense strand
uaaagagcgagaagaagau

SEQ ID NO: 619219 - RNA, 19 nt, Homo sapiens
  misc_RNA (1)...(19): siRNA sense strand
acaccuucauggaaaauua

SEQ ID NO: 619220 - RNA, 19 nt, Homo sapiens
  misc_RNA (1)...(19): siRNA sense strand
ugaggucuauuaucuuugc

SEQ ID NO: 619221 - RNA, 19 nt, Homo sapiens
  misc_RNA (1)...(19): siRNA sense strand
gagagccgcgaacuggaaa

SEQ ID NO: 619222 - RNA, 19 nt, Homo sapiens
  misc_RNA (1)...(19): siRNA sense strand
auccaacacuuaugugaug

SEQ ID NO: 619223 - RNA, 19 nt, Homo sapiens
  misc_RNA (1)...(19): siRNA sense strand
cagcuggaaaugaaccuaa

SEQ ID NO: 619224 - RNA, 19 nt, Homo sapiens
  misc_RNA (1)...(19): siRNA sense strand
guucugauuuaugucuuug

SEQ ID NO: 619225 - RNA, 19 nt, Homo sapiens
  misc_RNA (1)...(19): siRNA sense strand
gaccaaagcagugucuucu

SEQ ID NO: 619226 - RNA, 19 nt, Homo sapiens
  misc_RNA (1)...(19): siRNA sense strand
ugagagagcuacuuuucug

SEQ ID NO: 619227 - RNA, 19 nt, Homo sapiens
  misc_RNA (1)...(19): siRNA sense strand
cagcugauucccaauguuc

SEQ ID NO: 619228 - RNA, 19 nt, Homo sapiens
  misc_RNA (1)...(19): siRNA sense strand
aaauguggagguucugauu

SEQ ID NO: 619229 - RNA, 19 nt, Homo sapiens
  misc_RNA (1)...(19): siRNA sense strand
gaaaacgacggagaaagaa

SEQ ID NO: 619230 - RNA, 19 nt, Homo sapiens
  misc_RNA (1)...(19): siRNA sense strand
gcagcuacucugaucaaca

SEQ ID NO: 619231 - RNA, 19 nt, Homo sapiens
  misc_RNA (1)...(19): siRNA sense strand
aaaagugggucugguaaga

SEQ ID NO: 619232 - RNA, 19 nt, Homo sapiens
  misc_RNA (1)...(19): siRNA sense strand
cgugaugcccauagauuug

SEQ ID NO: 619233 - RNA, 19 nt, Homo sapiens
  misc_RNA (1)...(19): siRNA sense strand
gaauucuccagaugccaaa

SEQ ID NO: 619234 - RNA, 19 nt, Homo sapiens
  misc_RNA (1)...(19): siRNA sense strand
agagcgagaagaagauuug

SEQ ID NO: 619235 - RNA, 19 nt, Homo sapiens
  misc_RNA (1)...(19): siRNA sense strand
gguaaaagugggucuggua

SEQ ID NO: 619236 - RNA, 19 nt, Homo sapiens
  misc_RNA (1)...(19): siRNA sense strand
gaagaaucugacucugaga

SEQ ID NO: 619237 - RNA, 19 nt, Homo sapiens
  misc_RNA (1)...(19): siRNA sense strand
ucagcugauucccaauguu

SEQ ID NO: 619238 - RNA, 19 nt, Homo sapiens
  misc_RNA (1)...(19): siRNA sense strand
uugaaaagcuggaaagagu

SEQ ID NO: 619239 - RNA, 19 nt, Homo sapiens
  misc_RNA (1)...(19): siRNA sense strand
ccaggaaacacuuugaaaa

SEQ ID NO: 619240 - RNA, 19 nt, Homo sapiens
  misc_RNA (1)...(19): siRNA sense strand
ucugauccguccauuccuu

SEQ ID NO: 619241 - RNA, 19 nt, Homo sapiens
  misc_RNA (1)...(19): siRNA sense strand
agaaucugacucugagaaa

SEQ ID NO: 619242 - RNA, 19 nt, Homo sapiens
  misc_RNA (1)...(19): siRNA sense strand
guauggaagucaggaacuc

SEQ ID NO: 619243 - RNA, 19 nt, Homo sapiens
  misc_RNA (1)...(19): siRNA sense strand
uaccaaauacagccaugaa

SEQ ID NO: 619244 - RNA, 19 nt, Homo sapiens
  misc_RNA (1)...(19): siRNA sense strand
caaaauggaucugguacag

SEQ ID NO: 619245 - RNA, 19 nt, Homo sapiens
  misc_RNA (1)...(19): siRNA sense strand
ccaacgggacaacaucuuc

SEQ ID NO: 619246 - RNA, 19 nt, Homo sapiens
  misc_RNA (1)...(19): siRNA sense strand
gagcagcgugaugcccaua

SEQ ID NO: 619247 - RNA, 19 nt, Homo sapiens
  misc_RNA (1)...(19): siRNA sense strand
gaaaccugguauugaaccu

SEQ ID NO: 619248 - RNA, 19 nt, Homo sapiens
  misc_RNA (1)...(19): siRNA sense strand
gaaagaguggauggaccaa

SEQ ID NO: 619249 - RNA, 19 nt, Homo sapiens
  misc_RNA (1)...(19): siRNA sense strand
gaccauaacuacucacuac

SEQ ID NO: 619250 - RNA, 19 nt, Homo sapiens
  misc_RNA (1)...(19): siRNA sense strand
caugauauaugggaaauuc

SEQ ID NO: 619251 - RNA, 19 nt, Homo sapiens
  misc_RNA (1)...(19): siRNA sense strand
gaagagccagauccuguuu

SEQ ID NO: 619252 - RNA, 19 nt, Homo sapiens
  misc_RNA (1)...(19): siRNA sense strand
gguaccagacugagaauuu

SEQ ID NO: 619253 - RNA, 19 nt, Homo sapiens
  misc_RNA (1)...(19): siRNA sense strand
agucgugucuggaguagua

SEQ ID NO: 619254 - RNA, 19 nt, Homo sapiens
  misc_RNA (1)...(19): siRNA sense strand
gagauccucuggacuuucu

SEQ ID NO: 619255 - RNA, 19 nt, Homo sapiens
  misc_RNA (1)...(19): siRNA sense strand
guaccagacugagaauuuc

SEQ ID NO: 619256 - RNA, 19 nt, Homo sapiens
  misc_RNA (1)...(19): siRNA sense strand
uggagaggcugagaccaua

SEQ ID NO: 619257 - RNA, 19 nt, Homo sapiens
  misc_RNA (1)...(19): siRNA sense strand
ggaagagccagauccuguu

SEQ ID NO: 619258 - RNA, 19 nt, Homo sapiens
  misc_RNA (1)...(19): siRNA sense strand
caguguacaugauauaugg

SEQ ID NO: 619259 - RNA, 19 nt, Homo sapiens
  misc_RNA (1)...(19): siRNA sense strand
guacaaaccaucuucuacu

SEQ ID NO: 619260 - RNA, 19 nt, Homo sapiens
  misc_RNA (1)...(19): siRNA sense strand
guacaugauauaugggaaa

SEQ ID NO: 619261 - RNA, 19 nt, Homo sapiens
  misc_RNA (1)...(19): siRNA sense strand
ccaacuucaucuccaucua

SEQ ID NO: 619262 - RNA, 19 nt, Homo sapiens
  misc_RNA (1)...(19): siRNA sense strand
uaacuacucacuaccuguu

SEQ ID NO: 619263 - RNA, 19 nt, Homo sapiens
  misc_RNA (1)...(19): siRNA sense strand
ggagaggcugagaccauaa

SEQ ID NO: 619264 - RNA, 19 nt, Homo sapiens
  misc_RNA (1)...(19): siRNA sense strand
uacaaaccaucuucuacug

SEQ ID NO: 619265 - RNA, 19 nt, Homo sapiens
  misc_RNA (1)...(19): siRNA sense strand
ccuguuugcucucgucuuc

SEQ ID NO: 619266 - RNA, 19 nt, Homo sapiens
  misc_RNA (1)...(19): siRNA sense strand
ccucuggacuuucucuauc

SEQ ID NO: 619267 - RNA, 19 nt, Homo sapiens
  misc_RNA (1)...(19): siRNA sense strand
cuaucuaucuggaaucagu

SEQ ID NO: 619268 - RNA, 19 nt, Homo sapiens
  misc_RNA (1)...(19): siRNA sense strand
aaaccaucuucuacuguga

SEQ ID NO: 619269 - RNA, 19 nt, Homo sapiens
  misc_RNA (1)...(19): siRNA sense strand
ugacuucuucuacuuguau

SEQ ID NO: 619270 - RNA, 19 nt, Homo sapiens
  misc_RNA (1)...(19): siRNA sense strand
cuacaacacaguaaugaag

SEQ ID NO: 619271 - RNA, 19 nt, Homo sapiens
  misc_RNA (1)...(19): siRNA sense strand
ccaaauugcagucgugucu

SEQ ID NO: 619272 - RNA, 19 nt, Homo sapiens
  misc_RNA (1)...(19): siRNA sense strand
gcugagaccauaacuacuc

SEQ ID NO: 619273 - RNA, 19 nt, Homo sapiens
  misc_RNA (1)...(19): siRNA sense strand
ggacuuucucuaucuaucu

SEQ ID NO: 619274 - RNA, 19 nt, Homo sapiens
  misc_RNA (1)...(19): siRNA sense strand
gcagucgugucuggaguag

SEQ ID NO: 619275 - RNA, 19 nt, Homo sapiens
  misc_RNA (1)...(19): siRNA sense strand
cuucuacugugacuucuuc

SEQ ID NO: 619276 - RNA, 19 nt, Homo sapiens
  misc_RNA (1)...(19): siRNA sense strand
caucuucuacugugacuuc

SEQ ID NO: 619277 - RNA, 19 nt, Homo sapiens
  misc_RNA (1)...(19): siRNA sense strand
caacuucaucuccaucuac

SEQ ID NO: 619278 - RNA, 19 nt, Homo sapiens
  misc_RNA (1)...(19): siRNA sense strand
uggagauccucuggacuuu

SEQ ID NO: 619279 - RNA, 19 nt, Homo sapiens
  misc_RNA (1)...(19): siRNA sense strand
caucuacaacacaguaaug

SEQ ID NO: 619280 - RNA, 19 nt, Homo sapiens
  misc_RNA (1)...(19): siRNA sense strand
gugacuucuucuacuugua

SEQ ID NO: 619281 - RNA, 19 nt, Homo sapiens
  misc_RNA (1)...(19): siRNA sense strand
ucaccaacuucaucuccau

SEQ ID NO: 619282 - RNA, 19 nt, Homo sapiens
  misc_RNA (1)...(19): siRNA sense strand
gacuuucucuaucuaucug

SEQ ID NO: 619283 - RNA, 19 nt, Homo sapiens
  misc_RNA (1)...(19): siRNA sense strand
gaggcugagaccauaacua

SEQ ID NO: 619284 - RNA, 19 nt, Homo sapiens
  misc_RNA (1)...(19): siRNA sense strand
ggaguaguacaaaccaucu

SEQ ID NO: 619285 - RNA, 19 nt, Homo sapiens
  misc_RNA (1)...(19): siRNA sense strand
ucuggacuuucucuaucua

SEQ ID NO: 619286 - RNA, 19 nt, Homo sapiens
  misc_RNA (1)...(19): siRNA sense strand
acugugacuucuucuacuu

SEQ ID NO: 619287 - RNA, 19 nt, Homo sapiens
  misc_RNA (1)...(19): siRNA sense strand
ggcgguaccagacugagaa

SEQ ID NO: 619288 - RNA, 19 nt, Homo sapiens
  misc_RNA (1)...(19): siRNA sense strand
uaguacaaaccaucuucua

SEQ ID NO: 619289 - RNA, 19 nt, Homo sapiens
  misc_RNA (1)...(19): siRNA sense strand
ucuccucugugccuauguu

SEQ ID NO: 619290 - RNA, 19 nt, Homo sapiens
  misc_RNA (1)...(19): siRNA sense strand
aagggcaucucugggaaga

SEQ ID NO: 619291 - RNA, 19 nt, Homo sapiens
  misc_RNA (1)...(19): siRNA sense strand
ggaccuguucaccaacuuc

SEQ ID NO: 619292 - RNA, 19 nt, Homo sapiens
  misc_RNA (1)...(19): siRNA sense strand
acacauuccgccuggaguu

SEQ ID NO: 619293 - RNA, 19 nt, Homo sapiens
  misc_RNA (1)...(19): siRNA sense strand
gaccauaacuacucacuac

SEQ ID NO: 619294 - RNA, 19 nt, Homo sapiens
  misc_RNA (1)...(19): siRNA sense strand
caugauauaugggaaauuc

SEQ ID NO: 619295 - RNA, 19 nt, Homo sapiens
  misc_RNA (1)...(19): siRNA sense strand
gaagagccagauccuguuu

SEQ ID NO: 619296 - RNA, 19 nt, Homo sapiens
  misc_RNA (1)...(19): siRNA sense strand
gguaccagacugagaauuu

SEQ ID NO: 619297 - RNA, 19 nt, Homo sapiens
  misc_RNA (1)...(19): siRNA sense strand
agucgugucuggaguagua

SEQ ID NO: 619298 - RNA, 19 nt, Homo sapiens
  misc_RNA (1)...(19): siRNA sense strand
gagauccucuggacuuucu

SEQ ID NO: 619299 - RNA, 19 nt, Homo sapiens
  misc_RNA (1)...(19): siRNA sense strand
guaccagacugagaauuuc

SEQ ID NO: 619300 - RNA, 19 nt, Homo sapiens
  misc_RNA (1)...(19): siRNA sense strand
uggagaggcugagaccaua

SEQ ID NO: 619301 - RNA, 19 nt, Homo sapiens
  misc_RNA (1)...(19): siRNA sense strand
ggaagagccagauccuguu

SEQ ID NO: 619302 - RNA, 19 nt, Homo sapiens
  misc_RNA (1)...(19): siRNA sense strand
caguguacaugauauaugg

SEQ ID NO: 619303 - RNA, 19 nt, Homo sapiens
  misc_RNA (1)...(19): siRNA sense strand
guacaaaccaucuucuacu

SEQ ID NO: 619304 - RNA, 19 nt, Homo sapiens
  misc_RNA (1)...(19): siRNA sense strand
guacaugauauaugggaaa

SEQ ID NO: 619305 - RNA, 19 nt, Homo sapiens
  misc_RNA (1)...(19): siRNA sense strand
ccaacuucaucuccaucua

SEQ ID NO: 619306 - RNA, 19 nt, Homo sapiens
  misc_RNA (1)...(19): siRNA sense strand
uaacuacucacuaccuguu

SEQ ID NO: 619307 - RNA, 19 nt, Homo sapiens
  misc_RNA (1)...(19): siRNA sense strand
ggagaggcugagaccauaa

SEQ ID NO: 619308 - RNA, 19 nt, Homo sapiens
  misc_RNA (1)...(19): siRNA sense strand
uacaaaccaucuucuacug

SEQ ID NO: 619309 - RNA, 19 nt, Homo sapiens
  misc_RNA (1)...(19): siRNA sense strand
ccuguuugcucucgucuuc

SEQ ID NO: 619310 - RNA, 19 nt, Homo sapiens
  misc_RNA (1)...(19): siRNA sense strand
ccucuggacuuucucuauc

SEQ ID NO: 619311 - RNA, 19 nt, Homo sapiens
  misc_RNA (1)...(19): siRNA sense strand
cuaucuaucuggaaucagu

SEQ ID NO: 619312 - RNA, 19 nt, Homo sapiens
  misc_RNA (1)...(19): siRNA sense strand
aaaccaucuucuacuguga

SEQ ID NO: 619313 - RNA, 19 nt, Homo sapiens
  misc_RNA (1)...(19): siRNA sense strand
ugacuucuucuacuuguau

SEQ ID NO: 619314 - RNA, 19 nt, Homo sapiens
  misc_RNA (1)...(19): siRNA sense strand
cuacaacacaguaaugaag

SEQ ID NO: 619315 - RNA, 19 nt, Homo sapiens
  misc_RNA (1)...(19): siRNA sense strand
ccaaauugcagucgugucu

SEQ ID NO: 619316 - RNA, 19 nt, Homo sapiens
  misc_RNA (1)...(19): siRNA sense strand
gcugagaccauaacuacuc

SEQ ID NO: 619317 - RNA, 19 nt, Homo sapiens
  misc_RNA (1)...(19): siRNA sense strand
ggacuuucucuaucuaucu

SEQ ID NO: 619318 - RNA, 19 nt, Homo sapiens
  misc_RNA (1)...(19): siRNA sense strand
gcagucgugucuggaguag

SEQ ID NO: 619319 - RNA, 19 nt, Homo sapiens
  misc_RNA (1)...(19): siRNA sense strand
cuucuacugugacuucuuc

SEQ ID NO: 619320 - RNA, 19 nt, Homo sapiens
  misc_RNA (1)...(19): siRNA sense strand
caucuucuacugugacuuc

SEQ ID NO: 619321 - RNA, 19 nt, Homo sapiens
  misc_RNA (1)...(19): siRNA sense strand
caacuucaucuccaucuac

SEQ ID NO: 619322 - RNA, 19 nt, Homo sapiens
  misc_RNA (1)...(19): siRNA sense strand
uggagauccucuggacuuu

SEQ ID NO: 619323 - RNA, 19 nt, Homo sapiens
  misc_RNA (1)...(19): siRNA sense strand
caucuacaacacaguaaug

SEQ ID NO: 619324 - RNA, 19 nt, Homo sapiens
  misc_RNA (1)...(19): siRNA sense strand
gugacuucuucuacuugua

SEQ ID NO: 619325 - RNA, 19 nt, Homo sapiens
  misc_RNA (1)...(19): siRNA sense strand
ucaccaacuucaucuccau

SEQ ID NO: 619326 - RNA, 19 nt, Homo sapiens
  misc_RNA (1)...(19): siRNA sense strand
gacuuucucuaucuaucug

SEQ ID NO: 619327 - RNA, 19 nt, Homo sapiens
  misc_RNA (1)...(19): siRNA sense strand
gaggcugagaccauaacua

SEQ ID NO: 619328 - RNA, 19 nt, Homo sapiens
  misc_RNA (1)...(19): siRNA sense strand
ggaguaguacaaaccaucu

SEQ ID NO: 619329 - RNA, 19 nt, Homo sapiens
  misc_RNA (1)...(19): siRNA sense strand
ucuggacuuucucuaucua

SEQ ID NO: 619330 - RNA, 19 nt, Homo sapiens
  misc_RNA (1)...(19): siRNA sense strand
acugugacuucuucuacuu

SEQ ID NO: 619331 - RNA, 19 nt, Homo sapiens
  misc_RNA (1)...(19): siRNA sense strand
ggcgguaccagacugagaa

SEQ ID NO: 619332 - RNA, 19 nt, Homo sapiens
  misc_RNA (1)...(19): siRNA sense strand
uaguacaaaccaucuucua

SEQ ID NO: 619333 - RNA, 19 nt, Homo sapiens
  misc_RNA (1)...(19): siRNA sense strand
ucuccucugugccuauguu

SEQ ID NO: 619334 - RNA, 19 nt, Homo sapiens
  misc_RNA (1)...(19): siRNA sense strand
aagggcaucucugggaaga

SEQ ID NO: 619335 - RNA, 19 nt, Homo sapiens
  misc_RNA (1)...(19): siRNA sense strand
ggaccuguucaccaacuuc

SEQ ID NO: 619336 - RNA, 19 nt, Homo sapiens
  misc_RNA (1)...(19): siRNA sense strand
acacauuccgccuggaguu

SEQ ID NO: 619337 - RNA, 19 nt, Homo sapiens
  misc_RNA (1)...(19): siRNA sense strand
cagagggaauugcagauug

SEQ ID NO: 619338 - RNA, 19 nt, Homo sapiens
  misc_RNA (1)...(19): siRNA sense strand
agagagaggucuguaaagu

SEQ ID NO: 619339 - RNA, 19 nt, Homo sapiens
  misc_RNA (1)...(19): siRNA sense strand
agagggaauugcagauuga

SEQ ID NO: 619340 - RNA, 19 nt, Homo sapiens
  misc_RNA (1)...(19): siRNA sense strand
gcagagggaauugcagauu

SEQ ID NO: 619341 - RNA, 19 nt, Homo sapiens
  misc_RNA (1)...(19): siRNA sense strand
gagagaggucuguaaagug

SEQ ID NO: 619342 - RNA, 19 nt, Homo sapiens
  misc_RNA (1)...(19): siRNA sense strand
gaaaggauuuugcuguauc

SEQ ID NO: 619343 - RNA, 19 nt, Homo sapiens
  misc_RNA (1)...(19): siRNA sense strand
gggccuucuugccguguua

SEQ ID NO: 619344 - RNA, 19 nt, Homo sapiens
  misc_RNA (1)...(19): siRNA sense strand
ggaaaggauuuugcuguau

SEQ ID NO: 619345 - RNA, 19 nt, Homo sapiens
  misc_RNA (1)...(19): siRNA sense strand
ggaaguggaagagcauugu

SEQ ID NO: 619346 - RNA, 19 nt, Homo sapiens
  misc_RNA (1)...(19): siRNA sense strand
cugaugcccugcacagaga

SEQ ID NO: 619347 - RNA, 19 nt, Homo sapiens
  misc_RNA (1)...(19): siRNA sense strand
gaaguggaagagcauugug

SEQ ID NO: 619348 - RNA, 19 nt, Homo sapiens
  misc_RNA (1)...(19): siRNA sense strand
uacaauggaggaaaggauu

SEQ ID NO: 619349 - RNA, 19 nt, Homo sapiens
  misc_RNA (1)...(19): siRNA sense strand
acaauggaggaaaggauuu

SEQ ID NO: 619350 - RNA, 19 nt, Homo sapiens
  misc_RNA (1)...(19): siRNA sense strand
gggaaguggaagagcauug

SEQ ID NO: 619351 - RNA, 19 nt, Homo sapiens
  misc_RNA (1)...(19): siRNA sense strand
ggauuuugcuguaucucuu

SEQ ID NO: 619352 - RNA, 19 nt, Homo sapiens
  misc_RNA (1)...(19): siRNA sense strand
aggaaaggauuuugcugua

SEQ ID NO: 619353 - RNA, 19 nt, Homo sapiens
  misc_RNA (1)...(19): siRNA sense strand
ggaaacggcaccaucaaug

SEQ ID NO: 619354 - RNA, 19 nt, Homo sapiens
  misc_RNA (1)...(19): siRNA sense strand
ggaggaggcccaguacaaa

SEQ ID NO: 619355 - RNA, 19 nt, Homo sapiens
  misc_RNA (1)...(19): siRNA sense strand
gaaacucaucuccgagguu

SEQ ID NO: 619356 - RNA, 19 nt, Homo sapiens
  misc_RNA (1)...(19): siRNA sense strand
gaaacggcaccaucaaugc

SEQ ID NO: 619357 - RNA, 19 nt, Homo sapiens
  misc_RNA (1)...(19): siRNA sense strand
gaugcucgcccaggaguga

SEQ ID NO: 619358 - RNA, 19 nt, Homo sapiens
  misc_RNA (1)...(19): siRNA sense strand
ggagcuggacgccaugauc

SEQ ID NO: 619359 - RNA, 19 nt, Homo sapiens
  misc_RNA (1)...(19): siRNA sense strand
ggaggcccagcuaaggaaa

SEQ ID NO: 619360 - RNA, 19 nt, Homo sapiens
  misc_RNA (1)...(19): siRNA sense strand
cugaggaggaggcccagua

SEQ ID NO: 619361 - RNA, 19 nt, Homo sapiens
  misc_RNA (1)...(19): siRNA sense strand
ggacauaucuaccgucuug

SEQ ID NO: 619362 - RNA, 19 nt, Homo sapiens
  misc_RNA (1)...(19): siRNA sense strand
caaaucaacucaugcagua

SEQ ID NO: 619363 - RNA, 19 nt, Homo sapiens
  misc_RNA (1)...(19): siRNA sense strand
gcagugugguggcaaauua

SEQ ID NO: 619364 - RNA, 19 nt, Homo sapiens
  misc_RNA (1)...(19): siRNA sense strand
gcacagauuuacucauauu

SEQ ID NO: 619365 - RNA, 19 nt, Homo sapiens
  misc_RNA (1)...(19): siRNA sense strand
ggcaguaucucacauuuaa

SEQ ID NO: 619366 - RNA, 19 nt, Homo sapiens
  misc_RNA (1)...(19): siRNA sense strand
ucaagaaccugcacagauu

SEQ ID NO: 619367 - RNA, 19 nt, Homo sapiens
  misc_RNA (1)...(19): siRNA sense strand
gcucagagguccugcauca

SEQ ID NO: 619368 - RNA, 19 nt, Homo sapiens
  misc_RNA (1)...(19): siRNA sense strand
caagaagaaugcaaguauu

SEQ ID NO: 619369 - RNA, 19 nt, Homo sapiens
  misc_RNA (1)...(19): siRNA sense strand
cuccaacucugaagaauua

SEQ ID NO: 619370 - RNA, 19 nt, Homo sapiens
  misc_RNA (1)...(19): siRNA sense strand
gcaauucaagccagcauua

SEQ ID NO: 619371 - RNA, 19 nt, Homo sapiens
  misc_RNA (1)...(19): siRNA sense strand
cugcacagauuuacucaua

SEQ ID NO: 619372 - RNA, 19 nt, Homo sapiens
  misc_RNA (1)...(19): siRNA sense strand
gaaagaagggaagguuuaa

SEQ ID NO: 619373 - RNA, 19 nt, Homo sapiens
  misc_RNA (1)...(19): siRNA sense strand
gggauuaugugccauugaa

SEQ ID NO: 619374 - RNA, 19 nt, Homo sapiens
  misc_RNA (1)...(19): siRNA sense strand
ggcaacacauaugaaauua

SEQ ID NO: 619375 - RNA, 19 nt, Homo sapiens
  misc_RNA (1)...(19): siRNA sense strand
gcaaguauuggcauuauga

SEQ ID NO: 619376 - RNA, 19 nt, Homo sapiens
  misc_RNA (1)...(19): siRNA sense strand
ugaauaacauccauagugu

SEQ ID NO: 619377 - RNA, 19 nt, Homo sapiens
  misc_RNA (1)...(19): siRNA sense strand
cgaaacugcuuacugcauu

SEQ ID NO: 619378 - RNA, 19 nt, Homo sapiens
  misc_RNA (1)...(19): siRNA sense strand
gaaaucagaggcuucgaaa

SEQ ID NO: 619379 - RNA, 19 nt, Homo sapiens
  misc_RNA (1)...(19): siRNA sense strand
ugaaagaagggaagguuua

SEQ ID NO: 619380 - RNA, 19 nt, Homo sapiens
  misc_RNA (1)...(19): siRNA sense strand
ggaaucagcuuuucagaau

SEQ ID NO: 619381 - RNA, 19 nt, Homo sapiens
  misc_RNA (1)...(19): siRNA sense strand
uggaagaaauagcuuauga

SEQ ID NO: 619382 - RNA, 19 nt, Homo sapiens
  misc_RNA (1)...(19): siRNA sense strand
ggagauucccagaaagaua

SEQ ID NO: 619383 - RNA, 19 nt, Homo sapiens
  misc_RNA (1)...(19): siRNA sense strand
ggaaaugaauaacauccau

SEQ ID NO: 619384 - RNA, 19 nt, Homo sapiens
  misc_RNA (1)...(19): siRNA sense strand
gaaacugcuuacugcauug

SEQ ID NO: 619385 - RNA, 19 nt, Homo sapiens
  misc_RNA (1)...(19): siRNA sense strand
gaggcaguaucucacauuu

SEQ ID NO: 619386 - RNA, 19 nt, Homo sapiens
  misc_RNA (1)...(19): siRNA sense strand
cagaaucaaugaagcaaau

SEQ ID NO: 619387 - RNA, 19 nt, Homo sapiens
  misc_RNA (1)...(19): siRNA sense strand
ggaauggccuagugaaggu

SEQ ID NO: 619388 - RNA, 19 nt, Homo sapiens
  misc_RNA (1)...(19): siRNA sense strand
ggacuccaaggaaauauuu

SEQ ID NO: 619389 - RNA, 19 nt, Homo sapiens
  misc_RNA (1)...(19): siRNA sense strand
gcccagggauccucgguaa

SEQ ID NO: 619390 - RNA, 19 nt, Homo sapiens
  misc_RNA (1)...(19): siRNA sense strand
gaagggaagguuuaauuca

SEQ ID NO: 619391 - RNA, 19 nt, Homo sapiens
  misc_RNA (1)...(19): siRNA sense strand
gauccaagucuccagauuu

SEQ ID NO: 619392 - RNA, 19 nt, Homo sapiens
  misc_RNA (1)...(19): siRNA sense strand
uggaggagauucccagaaa

SEQ ID NO: 619393 - RNA, 19 nt, Homo sapiens
  misc_RNA (1)...(19): siRNA sense strand
cgagaguucuucuuugaau

SEQ ID NO: 619394 - RNA, 19 nt, Homo sapiens
  misc_RNA (1)...(19): siRNA sense strand
ccaagaagaaugcaaguau

SEQ ID NO: 619395 - RNA, 19 nt, Homo sapiens
  misc_RNA (1)...(19): siRNA sense strand
gaagaucacaacugccaaa

SEQ ID NO: 619396 - RNA, 19 nt, Homo sapiens
  misc_RNA (1)...(19): siRNA sense strand
ucagaaggcuaaacuugga

SEQ ID NO: 619397 - RNA, 19 nt, Homo sapiens
  misc_RNA (1)...(19): siRNA sense strand
gagaguucuucuuugaauu

SEQ ID NO: 619398 - RNA, 19 nt, Homo sapiens
  misc_RNA (1)...(19): siRNA sense strand
gaauggcaguacuucaaga

SEQ ID NO: 619399 - RNA, 19 nt, Homo sapiens
  misc_RNA (1)...(19): siRNA sense strand
ugaagcaaaucaacucaug

SEQ ID NO: 619400 - RNA, 19 nt, Homo sapiens
  misc_RNA (1)...(19): siRNA sense strand
ggaccagaauucaaacaag

SEQ ID NO: 619401 - RNA, 19 nt, Homo sapiens
  misc_RNA (1)...(19): siRNA sense strand
gagaacaguccacagugua

SEQ ID NO: 619402 - RNA, 19 nt, Homo sapiens
  misc_RNA (1)...(19): siRNA sense strand
gcaccaugcuggaggagau

SEQ ID NO: 619403 - RNA, 19 nt, Homo sapiens
  misc_RNA (1)...(19): siRNA sense strand
aaagacuacuucuaugcua

SEQ ID NO: 619404 - RNA, 19 nt, Homo sapiens
  misc_RNA (1)...(19): siRNA sense strand
ugaauugggucucuaugau

SEQ ID NO: 619405 - RNA, 19 nt, Homo sapiens
  misc_RNA (1)...(19): siRNA sense strand
uaaaaggacuccaaggaaa

SEQ ID NO: 619406 - RNA, 19 nt, Homo sapiens
  misc_RNA (1)...(19): siRNA sense strand
gauccucgguaacuuugaa

SEQ ID NO: 619407 - RNA, 19 nt, Homo sapiens
  misc_RNA (1)...(19): siRNA sense strand
gagauucccagaaagauau

SEQ ID NO: 619408 - RNA, 19 nt, Homo sapiens
  misc_RNA (1)...(19): siRNA sense strand
gagagaaagccaagccauu

SEQ ID NO: 619409 - RNA, 19 nt, Homo sapiens
  misc_RNA (1)...(19): siRNA sense strand
guauucaucuccaauugug

SEQ ID NO: 619410 - RNA, 19 nt, Homo sapiens
  misc_RNA (1)...(19): siRNA sense strand
ggaugaauauaaagacuac

SEQ ID NO: 619411 - RNA, 19 nt, Homo sapiens
  misc_RNA (1)...(19): siRNA sense strand
uaaauggcaacacauauga

SEQ ID NO: 619412 - RNA, 19 nt, Homo sapiens
  misc_RNA (1)...(19): siRNA sense strand
ggucaacccucaugagaac

SEQ ID NO: 619413 - RNA, 19 nt, Homo sapiens
  misc_RNA (1)...(19): siRNA sense strand
cauuuaagccucagacauu

SEQ ID NO: 619414 - RNA, 19 nt, Homo sapiens
  misc_RNA (1)...(19): siRNA sense strand
ggauauaucggagcugaaa

SEQ ID NO: 619415 - RNA, 19 nt, Homo sapiens
  misc_RNA (1)...(19): siRNA sense strand
gcucagaaggcuaaacuug

SEQ ID NO: 619416 - RNA, 19 nt, Homo sapiens
  misc_RNA (1)...(19): siRNA sense strand
gaugaaaacuugcucacuu

SEQ ID NO: 619417 - RNA, 19 nt, Homo sapiens
  misc_RNA (1)...(19): siRNA sense strand
guauuggcauuaugaugaa

SEQ ID NO: 619418 - RNA, 19 nt, Homo sapiens
  misc_RNA (1)...(19): siRNA sense strand
ugacuuacgccaagaagaa

SEQ ID NO: 619419 - RNA, 19 nt, Homo sapiens
  misc_RNA (1)...(19): siRNA sense strand
ucaggaaaguguuuagauc

SEQ ID NO: 619420 - RNA, 19 nt, Homo sapiens
  misc_RNA (1)...(19): siRNA sense strand
gaggagauucccagaaaga

SEQ ID NO: 619421 - RNA, 19 nt, Homo sapiens
  misc_RNA (1)...(19): siRNA sense strand
caagagaagagacugagaa

SEQ ID NO: 619422 - RNA, 19 nt, Homo sapiens
  misc_RNA (1)...(19): siRNA sense strand
gguccugcaucaaguauuc

SEQ ID NO: 619423 - RNA, 19 nt, Homo sapiens
  misc_RNA (1)...(19): siRNA sense strand
ucauaaauggcaacacaua

SEQ ID NO: 619424 - RNA, 19 nt, Homo sapiens
  misc_RNA (1)...(19): siRNA sense strand
ugucauaaauggcaacaca

SEQ ID NO: 619425 - RNA, 19 nt, Homo sapiens
  misc_RNA (1)...(19): siRNA sense strand
ugagaacaguccacagugu

SEQ ID NO: 619426 - RNA, 19 nt, Homo sapiens
  misc_RNA (1)...(19): siRNA sense strand
ggguucaucuuacgcaguu

SEQ ID NO: 619427 - RNA, 19 nt, Homo sapiens
  misc_RNA (1)...(19): siRNA sense strand
aacgagaguucuucuuuga

SEQ ID NO: 619428 - RNA, 19 nt, Homo sapiens
  misc_RNA (1)...(19): siRNA sense strand
aagggaagguuuaauucaa

SEQ ID NO: 619429 - RNA, 19 nt, Homo sapiens
  misc_RNA (1)...(19): siRNA sense strand
uuaagugguucauggaaga

SEQ ID NO: 619430 - RNA, 19 nt, Homo sapiens
  misc_RNA (1)...(19): siRNA sense strand
ccaauugugacuccaguaa

SEQ ID NO: 619431 - RNA, 19 nt, Homo sapiens
  misc_RNA (1)...(19): siRNA sense strand
gcauuaaagaguuuggauu

SEQ ID NO: 619432 - RNA, 19 nt, Homo sapiens
  misc_RNA (1)...(19): siRNA sense strand
caagaaccugcacagauuu

SEQ ID NO: 619433 - RNA, 19 nt, Homo sapiens
  misc_RNA (1)...(19): siRNA sense strand
aagaagggaagguuuaauu

SEQ ID NO: 619434 - RNA, 19 nt, Homo sapiens
  misc_RNA (1)...(19): siRNA sense strand
uggcaacacauaugaaauu

SEQ ID NO: 619435 - RNA, 19 nt, Homo sapiens
  misc_RNA (1)...(19): siRNA sense strand
ggaagaaauagcuuaugau

SEQ ID NO: 619436 - RNA, 19 nt, Homo sapiens
  misc_RNA (1)...(19): siRNA sense strand
caaguauucaucuccaauu

SEQ ID NO: 619437 - RNA, 19 nt, Homo sapiens
  misc_RNA (1)...(19): siRNA sense strand
ggaggagauucccagaaag

SEQ ID NO: 619438 - RNA, 19 nt, Homo sapiens
  misc_RNA (1)...(19): siRNA sense strand
gaauuauguuagaguugug

SEQ ID NO: 619439 - RNA, 19 nt, Homo sapiens
  misc_RNA (1)...(19): siRNA sense strand
ucuaaggacagaaccauuu

SEQ ID NO: 619440 - RNA, 19 nt, Homo sapiens
  misc_RNA (1)...(19): siRNA sense strand
aaaggacuccaaggaaaua

SEQ ID NO: 619441 - RNA, 19 nt, Homo sapiens
  misc_RNA (1)...(19): siRNA sense strand
gcauugauagcaugggaaa

SEQ ID NO: 619442 - RNA, 19 nt, Homo sapiens
  misc_RNA (1)...(19): siRNA sense strand
uagugaagguauuucgaaa

SEQ ID NO: 619443 - RNA, 19 nt, Homo sapiens
  misc_RNA (1)...(19): siRNA sense strand
uauauuaagcuguggaaug

SEQ ID NO: 619444 - RNA, 19 nt, Homo sapiens
  misc_RNA (1)...(19): siRNA sense strand
caaccgaggcggcaaugga

SEQ ID NO: 619445 - RNA, 19 nt, Homo sapiens
  misc_RNA (1)...(19): siRNA sense strand
aaauggaggcuuuguugaa

SEQ ID NO: 619446 - RNA, 19 nt, Homo sapiens
  misc_RNA (1)...(19): siRNA sense strand
gggaugaauauaaagacua

SEQ ID NO: 619447 - RNA, 19 nt, Homo sapiens
  misc_RNA (1)...(19): siRNA sense strand
gagcaugggauuggaguau

SEQ ID NO: 619448 - RNA, 19 nt, Homo sapiens
  misc_RNA (1)...(19): siRNA sense strand
gcuguggaauggccuagug

SEQ ID NO: 619449 - RNA, 19 nt, Homo sapiens
  misc_RNA (1)...(19): siRNA sense strand
gaauugggucucuaugauc

SEQ ID NO: 619450 - RNA, 19 nt, Homo sapiens
  misc_RNA (1)...(19): siRNA sense strand
ucgcaggcauuaccauaug

SEQ ID NO: 619451 - RNA, 19 nt, Homo sapiens
  misc_RNA (1)...(19): siRNA sense strand
agagaaagccaagccauug

SEQ ID NO: 619452 - RNA, 19 nt, Homo sapiens
  misc_RNA (1)...(19): siRNA sense strand
gaaucaaugaagcaaauca

SEQ ID NO: 619453 - RNA, 19 nt, Homo sapiens
  misc_RNA (1)...(19): siRNA sense strand
ccauuuauguugggucuuc

SEQ ID NO: 619454 - RNA, 19 nt, Homo sapiens
  misc_RNA (1)...(19): siRNA sense strand
uuaauucaagcacgaagua

SEQ ID NO: 619455 - RNA, 19 nt, Homo sapiens
  misc_RNA (1)...(19): siRNA sense strand
aagaagaaugcaaguauug

SEQ ID NO: 619456 - RNA, 19 nt, Homo sapiens
  misc_RNA (1)...(19): siRNA sense strand
uuaacaugguggcaaguga

SEQ ID NO: 619457 - RNA, 19 nt, Homo sapiens
  misc_RNA (1)...(19): siRNA sense strand
uuggugggaugaauauaaa

SEQ ID NO: 619458 - RNA, 19 nt, Homo sapiens
  misc_RNA (1)...(19): siRNA sense strand
gaaguauuggugcucagaa

SEQ ID NO: 619459 - RNA, 19 nt, Homo sapiens
  misc_RNA (1)...(19): siRNA sense strand
gaacaguccacaguguaau

SEQ ID NO: 619460 - RNA, 19 nt, Homo sapiens
  misc_RNA (1)...(19): siRNA sense strand
gcauuaugaugaaaacuug

SEQ ID NO: 619461 - RNA, 19 nt, Homo sapiens
  misc_RNA (1)...(19): siRNA sense strand
ggaaguagcucagaaguuu

SEQ ID NO: 619462 - RNA, 19 nt, Homo sapiens
  misc_RNA (1)...(19): siRNA sense strand
ucaaacagcuggccaugaa

SEQ ID NO: 619463 - RNA, 19 nt, Homo sapiens
  misc_RNA (1)...(19): siRNA sense strand
ccaaaggcuuguccuauga

SEQ ID NO: 619464 - RNA, 19 nt, Homo sapiens
  misc_RNA (1)...(19): siRNA sense strand
gagaugggauaaguucaua

SEQ ID NO: 619465 - RNA, 19 nt, Homo sapiens
  misc_RNA (1)...(19): siRNA sense strand
caaggaagcucugaugauc

SEQ ID NO: 619466 - RNA, 19 nt, Homo sapiens
  misc_RNA (1)...(19): siRNA sense strand
gaagagaugggauaaguuc

SEQ ID NO: 619467 - RNA, 19 nt, Homo sapiens
  misc_RNA (1)...(19): siRNA sense strand
gaagaguggucagugaaga

SEQ ID NO: 619468 - RNA, 19 nt, Homo sapiens
  misc_RNA (1)...(19): siRNA sense strand
gcucagaaguuuguggaaa

SEQ ID NO: 619469 - RNA, 19 nt, Homo sapiens
  misc_RNA (1)...(19): siRNA sense strand
gccaaaggcuuguccuaug

SEQ ID NO: 619470 - RNA, 19 nt, Homo sapiens
  misc_RNA (1)...(19): siRNA sense strand
gccaugaacucuaucaagu

SEQ ID NO: 619471 - RNA, 19 nt, Homo sapiens
  misc_RNA (1)...(19): siRNA sense strand
gacgaagaguggucaguga

SEQ ID NO: 619472 - RNA, 19 nt, Homo sapiens
  misc_RNA (1)...(19): siRNA sense strand
ggaagaagagaugggauaa

SEQ ID NO: 619473 - RNA, 19 nt, Homo sapiens
  misc_RNA (1)...(19): siRNA sense strand
ggccauggauuugcuuuga

SEQ ID NO: 619474 - RNA, 19 nt, Homo sapiens
  misc_RNA (1)...(19): siRNA sense strand
ccaaagauguggcugucau

SEQ ID NO: 619475 - RNA, 19 nt, Homo sapiens
  misc_RNA (1)...(19): siRNA sense strand
gaaacuggugucugacuug

SEQ ID NO: 619476 - RNA, 19 nt, Homo sapiens
  misc_RNA (1)...(19): siRNA sense strand
gcucugaugcugaacacua

SEQ ID NO: 619477 - RNA, 19 nt, Homo sapiens
  misc_RNA (1)...(19): siRNA sense strand
aagaagagaugggauaagu

SEQ ID NO: 619478 - RNA, 19 nt, Homo sapiens
  misc_RNA (1)...(19): siRNA sense strand
gcugaacacuaccagaauc

SEQ ID NO: 619479 - RNA, 19 nt, Homo sapiens
  misc_RNA (1)...(19): siRNA sense strand
agauguggcuacaaaguga

SEQ ID NO: 619480 - RNA, 19 nt, Homo sapiens
  misc_RNA (1)...(19): siRNA sense strand
aguggucagugaagacuua

SEQ ID NO: 619481 - RNA, 19 nt, Homo sapiens
  misc_RNA (1)...(19): siRNA sense strand
ccaugaacucuaucaagua

SEQ ID NO: 619482 - RNA, 19 nt, Homo sapiens
  misc_RNA (1)...(19): siRNA sense strand
caugaacucuaucaaguac

SEQ ID NO: 619483 - RNA, 19 nt, Homo sapiens
  misc_RNA (1)...(19): siRNA sense strand
gcaggguacuuccauagac

SEQ ID NO: 619484 - RNA, 19 nt, Homo sapiens
  misc_RNA (1)...(19): siRNA sense strand
auggaaaucuggaagaaga

SEQ ID NO: 619485 - RNA, 19 nt, Homo sapiens
  misc_RNA (1)...(19): siRNA sense strand
gagagcaccaugacgaaga

SEQ ID NO: 619486 - RNA, 19 nt, Homo sapiens
  misc_RNA (1)...(19): siRNA sense strand
aaacuggugucugacuuga

SEQ ID NO: 619487 - RNA, 19 nt, Homo sapiens
  misc_RNA (1)...(19): siRNA sense strand
agugaagacuuaccaggaa

SEQ ID NO: 619488 - RNA, 19 nt, Homo sapiens
  misc_RNA (1)...(19): siRNA sense strand
gcagauguggcuacaaagu

SEQ ID NO: 619489 - RNA, 19 nt, Homo sapiens
  misc_RNA (1)...(19): siRNA sense strand
ucauggaaaucuggaagaa

SEQ ID NO: 619490 - RNA, 19 nt, Homo sapiens
  misc_RNA (1)...(19): siRNA sense strand
ugaaacuggugucugacuu

SEQ ID NO: 619491 - RNA, 19 nt, Homo sapiens
  misc_RNA (1)...(19): siRNA sense strand
gaaguagcucagaaguuug

SEQ ID NO: 619492 - RNA, 19 nt, Homo sapiens
  misc_RNA (1)...(19): siRNA sense strand
uggaugcucugaugcugaa

SEQ ID NO: 619493 - RNA, 19 nt, Homo sapiens
  misc_RNA (1)...(19): siRNA sense strand
uggaagaagagaugggaua

SEQ ID NO: 619494 - RNA, 19 nt, Homo sapiens
  misc_RNA (1)...(19): siRNA sense strand
cuacaaggaagcucugaug

SEQ ID NO: 619495 - RNA, 19 nt, Homo sapiens
  misc_RNA (1)...(19): siRNA sense strand
auagaagucugucccaucu

SEQ ID NO: 619496 - RNA, 19 nt, Homo sapiens
  misc_RNA (1)...(19): siRNA sense strand
aaaaggacauccccauaga

SEQ ID NO: 619497 - RNA, 19 nt, Homo sapiens
  misc_RNA (1)...(19): siRNA sense strand
aaaggcuuguccuaugauu

SEQ ID NO: 619498 - RNA, 19 nt, Homo sapiens
  misc_RNA (1)...(19): siRNA sense strand
guacccuguuggagaguga

SEQ ID NO: 619499 - RNA, 19 nt, Homo sapiens
  misc_RNA (1)...(19): siRNA sense strand
ugcugaaacuggugucuga

SEQ ID NO: 619500 - RNA, 19 nt, Homo sapiens
  misc_RNA (1)...(19): siRNA sense strand
gauaaguucauagcagaug

SEQ ID NO: 619501 - RNA, 19 nt, Homo sapiens
  misc_RNA (1)...(19): siRNA sense strand
ggaaaucuggaagaagaga

SEQ ID NO: 619502 - RNA, 19 nt, Homo sapiens
  misc_RNA (1)...(19): siRNA sense strand
caggguacuuccauagaca

SEQ ID NO: 619503 - RNA, 19 nt, Homo sapiens
  misc_RNA (1)...(19): siRNA sense strand
cuaaccaggugcugaaacu

SEQ ID NO: 619504 - RNA, 19 nt, Homo sapiens
  misc_RNA (1)...(19): siRNA sense strand
agaagucugucccaucucu

SEQ ID NO: 619505 - RNA, 19 nt, Homo sapiens
  misc_RNA (1)...(19): siRNA sense strand
cacccugaguuuauuggaa

SEQ ID NO: 619506 - RNA, 19 nt, Homo sapiens
  misc_RNA (1)...(19): siRNA sense strand
ugaugacccagcuauguuu

SEQ ID NO: 619507 - RNA, 19 nt, Homo sapiens
  misc_RNA (1)...(19): siRNA sense strand
gcucugaugacccagcuau

SEQ ID NO: 619508 - RNA, 19 nt, Homo sapiens
  misc_RNA (1)...(19): siRNA sense strand
gaagaagagaugggauaag

SEQ ID NO: 619509 - RNA, 19 nt, Homo sapiens
  misc_RNA (1)...(19): siRNA sense strand
ugaacucuaucaaguacag

SEQ ID NO: 619510 - RNA, 19 nt, Homo sapiens
  misc_RNA (1)...(19): siRNA sense strand
cauucuggaugcucugaug

SEQ ID NO: 619511 - RNA, 19 nt, Homo sapiens
  misc_RNA (1)...(19): siRNA sense strand
gaagucugucccaucucua

SEQ ID NO: 619512 - RNA, 19 nt, Homo sapiens
  misc_RNA (1)...(19): siRNA sense strand
acaaggaagcucugaugau

SEQ ID NO: 619513 - RNA, 19 nt, Homo sapiens
  misc_RNA (1)...(19): siRNA sense strand
uguccuaugauuucuauga

SEQ ID NO: 619514 - RNA, 19 nt, Homo sapiens
  misc_RNA (1)...(19): siRNA sense strand
gccacuccuugcaugacua

SEQ ID NO: 619515 - RNA, 19 nt, Homo sapiens
  misc_RNA (1)...(19): siRNA sense strand
gaugacccagcuauguuug

SEQ ID NO: 619516 - RNA, 19 nt, Homo sapiens
  misc_RNA (1)...(19): siRNA sense strand
cagauguggcuacaaagug

SEQ ID NO: 619517 - RNA, 19 nt, Homo sapiens
  misc_RNA (1)...(19): siRNA sense strand
ugauuucuaugaggucuuc

SEQ ID NO: 619518 - RNA, 19 nt, Homo sapiens
  misc_RNA (1)...(19): siRNA sense strand
cagcuggccaugaacucua

SEQ ID NO: 619519 - RNA, 19 nt, Homo sapiens
  misc_RNA (1)...(19): siRNA sense strand
ggccaugaacucuaucaag

SEQ ID NO: 619520 - RNA, 19 nt, Homo sapiens
  misc_RNA (1)...(19): siRNA sense strand
uacaaggaagcucugauga

SEQ ID NO: 619521 - RNA, 19 nt, Homo sapiens
  misc_RNA (1)...(19): siRNA sense strand
cuuguccuaugauuucuau

SEQ ID NO: 619522 - RNA, 19 nt, Homo sapiens
  misc_RNA (1)...(19): siRNA sense strand
ggacauccccauagaaguc

SEQ ID NO: 619523 - RNA, 19 nt, Homo sapiens
  misc_RNA (1)...(19): siRNA sense strand
acccugaguuuauuggaau

SEQ ID NO: 619524 - RNA, 19 nt, Homo sapiens
  misc_RNA (1)...(19): siRNA sense strand
ggcaggguacuuccauaga

SEQ ID NO: 619525 - RNA, 19 nt, Homo sapiens
  misc_RNA (1)...(19): siRNA sense strand
caaaggcuuguccuaugau

SEQ ID NO: 619526 - RNA, 19 nt, Homo sapiens
  misc_RNA (1)...(19): siRNA sense strand
ggaaguagcucagaaguuu

SEQ ID NO: 619527 - RNA, 19 nt, Homo sapiens
  misc_RNA (1)...(19): siRNA sense strand
ucaaacagcuggccaugaa

SEQ ID NO: 619528 - RNA, 19 nt, Homo sapiens
  misc_RNA (1)...(19): siRNA sense strand
ccaaaggcuuguccuauga

SEQ ID NO: 619529 - RNA, 19 nt, Homo sapiens
  misc_RNA (1)...(19): siRNA sense strand
gagaugggauaaguucaua

SEQ ID NO: 619530 - RNA, 19 nt, Homo sapiens
  misc_RNA (1)...(19): siRNA sense strand
caaggaagcucugaugauc

SEQ ID NO: 619531 - RNA, 19 nt, Homo sapiens
  misc_RNA (1)...(19): siRNA sense strand
gaagagaugggauaaguuc

SEQ ID NO: 619532 - RNA, 19 nt, Homo sapiens
  misc_RNA (1)...(19): siRNA sense strand
gaagaguggucagugaaga

SEQ ID NO: 619533 - RNA, 19 nt, Homo sapiens
  misc_RNA (1)...(19): siRNA sense strand
gcucagaaguuuguggaaa

SEQ ID NO: 619534 - RNA, 19 nt, Homo sapiens
  misc_RNA (1)...(19): siRNA sense strand
gccaaaggcuuguccuaug

SEQ ID NO: 619535 - RNA, 19 nt, Homo sapiens
  misc_RNA (1)...(19): siRNA sense strand
gccaugaacucuaucaagu

SEQ ID NO: 619536 - RNA, 19 nt, Homo sapiens
  misc_RNA (1)...(19): siRNA sense strand
gacgaagaguggucaguga

SEQ ID NO: 619537 - RNA, 19 nt, Homo sapiens
  misc_RNA (1)...(19): siRNA sense strand
ggaagaagagaugggauaa

SEQ ID NO: 619538 - RNA, 19 nt, Homo sapiens
  misc_RNA (1)...(19): siRNA sense strand
ggccauggauuugcuuuga

SEQ ID NO: 619539 - RNA, 19 nt, Homo sapiens
  misc_RNA (1)...(19): siRNA sense strand
ccaaagauguggcugucau

SEQ ID NO: 619540 - RNA, 19 nt, Homo sapiens
  misc_RNA (1)...(19): siRNA sense strand
gaaacuggugucugacuug

SEQ ID NO: 619541 - RNA, 19 nt, Homo sapiens
  misc_RNA (1)...(19): siRNA sense strand
gcucugaugcugaacacua

SEQ ID NO: 619542 - RNA, 19 nt, Homo sapiens
  misc_RNA (1)...(19): siRNA sense strand
aagaagagaugggauaagu

SEQ ID NO: 619543 - RNA, 19 nt, Homo sapiens
  misc_RNA (1)...(19): siRNA sense strand
gcugaacacuaccagaauc

SEQ ID NO: 619544 - RNA, 19 nt, Homo sapiens
  misc_RNA (1)...(19): siRNA sense strand
agauguggcuacaaaguga

SEQ ID NO: 619545 - RNA, 19 nt, Homo sapiens
  misc_RNA (1)...(19): siRNA sense strand
aguggucagugaagacuua

SEQ ID NO: 619546 - RNA, 19 nt, Homo sapiens
  misc_RNA (1)...(19): siRNA sense strand
ccaugaacucuaucaagua

SEQ ID NO: 619547 - RNA, 19 nt, Homo sapiens
  misc_RNA (1)...(19): siRNA sense strand
caugaacucuaucaaguac

SEQ ID NO: 619548 - RNA, 19 nt, Homo sapiens
  misc_RNA (1)...(19): siRNA sense strand
gcaggguacuuccauagac

SEQ ID NO: 619549 - RNA, 19 nt, Homo sapiens
  misc_RNA (1)...(19): siRNA sense strand
auggaaaucuggaagaaga

SEQ ID NO: 619550 - RNA, 19 nt, Homo sapiens
  misc_RNA (1)...(19): siRNA sense strand
gagagcaccaugacgaaga

SEQ ID NO: 619551 - RNA, 19 nt, Homo sapiens
  misc_RNA (1)...(19): siRNA sense strand
aaacuggugucugacuuga

SEQ ID NO: 619552 - RNA, 19 nt, Homo sapiens
  misc_RNA (1)...(19): siRNA sense strand
agugaagacuuaccaggaa

SEQ ID NO: 619553 - RNA, 19 nt, Homo sapiens
  misc_RNA (1)...(19): siRNA sense strand
gcagauguggcuacaaagu

SEQ ID NO: 619554 - RNA, 19 nt, Homo sapiens
  misc_RNA (1)...(19): siRNA sense strand
ucauggaaaucuggaagaa

SEQ ID NO: 619555 - RNA, 19 nt, Homo sapiens
  misc_RNA (1)...(19): siRNA sense strand
ugaaacuggugucugacuu

SEQ ID NO: 619556 - RNA, 19 nt, Homo sapiens
  misc_RNA (1)...(19): siRNA sense strand
gaaguagcucagaaguuug

SEQ ID NO: 619557 - RNA, 19 nt, Homo sapiens
  misc_RNA (1)...(19): siRNA sense strand
uggaugcucugaugcugaa

SEQ ID NO: 619558 - RNA, 19 nt, Homo sapiens
  misc_RNA (1)...(19): siRNA sense strand
uggaagaagagaugggaua

SEQ ID NO: 619559 - RNA, 19 nt, Homo sapiens
  misc_RNA (1)...(19): siRNA sense strand
cuacaaggaagcucugaug

SEQ ID NO: 619560 - RNA, 19 nt, Homo sapiens
  misc_RNA (1)...(19): siRNA sense strand
auagaagucugucccaucu

SEQ ID NO: 619561 - RNA, 19 nt, Homo sapiens
  misc_RNA (1)...(19): siRNA sense strand
aaaaggacauccccauaga

SEQ ID NO: 619562 - RNA, 19 nt, Homo sapiens
  misc_RNA (1)...(19): siRNA sense strand
aaaggcuuguccuaugauu

SEQ ID NO: 619563 - RNA, 19 nt, Homo sapiens
  misc_RNA (1)...(19): siRNA sense strand
guacccuguuggagaguga

SEQ ID NO: 619564 - RNA, 19 nt, Homo sapiens
  misc_RNA (1)...(19): siRNA sense strand
ugcugaaacuggugucuga

SEQ ID NO: 619565 - RNA, 19 nt, Homo sapiens
  misc_RNA (1)...(19): siRNA sense strand
gauaaguucauagcagaug

SEQ ID NO: 619566 - RNA, 19 nt, Homo sapiens
  misc_RNA (1)...(19): siRNA sense strand
ggaaaucuggaagaagaga

SEQ ID NO: 619567 - RNA, 19 nt, Homo sapiens
  misc_RNA (1)...(19): siRNA sense strand
caggguacuuccauagaca

SEQ ID NO: 619568 - RNA, 19 nt, Homo sapiens
  misc_RNA (1)...(19): siRNA sense strand
cuaaccaggugcugaaacu

SEQ ID NO: 619569 - RNA, 19 nt, Homo sapiens
  misc_RNA (1)...(19): siRNA sense strand
agaagucugucccaucucu

SEQ ID NO: 619570 - RNA, 19 nt, Homo sapiens
  misc_RNA (1)...(19): siRNA sense strand
cacccugaguuuauuggaa

SEQ ID NO: 619571 - RNA, 19 nt, Homo sapiens
  misc_RNA (1)...(19): siRNA sense strand
ugaugacccagcuauguuu

SEQ ID NO: 619572 - RNA, 19 nt, Homo sapiens
  misc_RNA (1)...(19): siRNA sense strand
gcucugaugacccagcuau

SEQ ID NO: 619573 - RNA, 19 nt, Homo sapiens
  misc_RNA (1)...(19): siRNA sense strand
gaagaagagaugggauaag

SEQ ID NO: 619574 - RNA, 19 nt, Homo sapiens
  misc_RNA (1)...(19): siRNA sense strand
ugaacucuaucaaguacag

SEQ ID NO: 619575 - RNA, 19 nt, Homo sapiens
  misc_RNA (1)...(19): siRNA sense strand
cauucuggaugcucugaug

SEQ ID NO: 619576 - RNA, 19 nt, Homo sapiens
  misc_RNA (1)...(19): siRNA sense strand
gaagucugucccaucucua

SEQ ID NO: 619577 - RNA, 19 nt, Homo sapiens
  misc_RNA (1)...(19): siRNA sense strand
acaaggaagcucugaugau

SEQ ID NO: 619578 - RNA, 19 nt, Homo sapiens
  misc_RNA (1)...(19): siRNA sense strand
uguccuaugauuucuauga

SEQ ID NO: 619579 - RNA, 19 nt, Homo sapiens
  misc_RNA (1)...(19): siRNA sense strand
gccacuccuugcaugacua

SEQ ID NO: 619580 - RNA, 19 nt, Homo sapiens
  misc_RNA (1)...(19): siRNA sense strand
gaugacccagcuauguuug

SEQ ID NO: 619581 - RNA, 19 nt, Homo sapiens
  misc_RNA (1)...(19): siRNA sense strand
cagauguggcuacaaagug

SEQ ID NO: 619582 - RNA, 19 nt, Homo sapiens
  misc_RNA (1)...(19): siRNA sense strand
ugauuucuaugaggucuuc

SEQ ID NO: 619583 - RNA, 19 nt, Homo sapiens
  misc_RNA (1)...(19): siRNA sense strand
cagcuggccaugaacucua

SEQ ID NO: 619584 - RNA, 19 nt, Homo sapiens
  misc_RNA (1)...(19): siRNA sense strand
ggccaugaacucuaucaag

SEQ ID NO: 619585 - RNA, 19 nt, Homo sapiens
  misc_RNA (1)...(19): siRNA sense strand
uacaaggaagcucugauga

SEQ ID NO: 619586 - RNA, 19 nt, Homo sapiens
  misc_RNA (1)...(19): siRNA sense strand
cuuguccuaugauuucuau

SEQ ID NO: 619587 - RNA, 19 nt, Homo sapiens
  misc_RNA (1)...(19): siRNA sense strand
ggacauccccauagaaguc

SEQ ID NO: 619588 - RNA, 19 nt, Homo sapiens
  misc_RNA (1)...(19): siRNA sense strand
acccugaguuuauuggaau

SEQ ID NO: 619589 - RNA, 19 nt, Homo sapiens
  misc_RNA (1)...(19): siRNA sense strand
ggcaggguacuuccauaga

SEQ ID NO: 619590 - RNA, 19 nt, Homo sapiens
  misc_RNA (1)...(19): siRNA sense strand
caaaggcuuguccuaugau

SEQ ID NO: 619591 - RNA, 19 nt, Homo sapiens
  misc_RNA (1)...(19): siRNA sense strand
gaagugggcacaaauuuaa

SEQ ID NO: 619592 - RNA, 19 nt, Homo sapiens
  misc_RNA (1)...(19): siRNA sense strand
guaaauacguggcgguaaa

SEQ ID NO: 619593 - RNA, 19 nt, Homo sapiens
  misc_RNA (1)...(19): siRNA sense strand
ggaagaagauggccaaguc

SEQ ID NO: 619594 - RNA, 19 nt, Homo sapiens
  misc_RNA (1)...(19): siRNA sense strand
uaagaucccugccacagua

SEQ ID NO: 619595 - RNA, 19 nt, Homo sapiens
  misc_RNA (1)...(19): siRNA sense strand
ggacaagaaugcagaagug

SEQ ID NO: 619596 - RNA, 19 nt, Homo sapiens
  misc_RNA (1)...(19): siRNA sense strand
gaagguugauuaucguaaa

SEQ ID NO: 619597 - RNA, 19 nt, Homo sapiens
  misc_RNA (1)...(19): siRNA sense strand
gggcacaaauuuaaucaaa

SEQ ID NO: 619598 - RNA, 19 nt, Homo sapiens
  misc_RNA (1)...(19): siRNA sense strand
ggaaagcaauaccgauaug

SEQ ID NO: 619599 - RNA, 19 nt, Homo sapiens
  misc_RNA (1)...(19): siRNA sense strand
ggaugaggaugacggagua

SEQ ID NO: 619600 - RNA, 19 nt, Homo sapiens
  misc_RNA (1)...(19): siRNA sense strand
gaagacaaaguaugugauu

SEQ ID NO: 619601 - RNA, 19 nt, Homo sapiens
  misc_RNA (1)...(19): siRNA sense strand
cuccauggauuauucauua

SEQ ID NO: 619602 - RNA, 19 nt, Homo sapiens
  misc_RNA (1)...(19): siRNA sense strand
gcauacauccggagaauga

SEQ ID NO: 619603 - RNA, 19 nt, Homo sapiens
  misc_RNA (1)...(19): siRNA sense strand
gcaggccgcuucugaggaa

SEQ ID NO: 619604 - RNA, 19 nt, Homo sapiens
  misc_RNA (1)...(19): siRNA sense strand
gcaauaccgauaugucuuu

SEQ ID NO: 619605 - RNA, 19 nt, Homo sapiens
  misc_RNA (1)...(19): siRNA sense strand
ggaugacggaguaaucuua

SEQ ID NO: 619606 - RNA, 19 nt, Homo sapiens
  misc_RNA (1)...(19): siRNA sense strand
cgagaacuaugucaucuuc

SEQ ID NO: 619607 - RNA, 19 nt, Homo sapiens
  misc_RNA (1)...(19): siRNA sense strand
ccacggcccugaaggaaga

SEQ ID NO: 619608 - RNA, 19 nt, Homo sapiens
  misc_RNA (1)...(19): siRNA sense strand
ccaaagcuuucuccuacuu

SEQ ID NO: 619609 - RNA, 19 nt, Homo sapiens
  misc_RNA (1)...(19): siRNA sense strand
gggaggagaagacuuauau

SEQ ID NO: 619610 - RNA, 19 nt, Homo sapiens
  misc_RNA (1)...(19): siRNA sense strand
caaagugacaggcaagauu

SEQ ID NO: 619611 - RNA, 19 nt, Homo sapiens
  misc_RNA (1)...(19): siRNA sense strand
gcagaagugggcacaaauu

SEQ ID NO: 619612 - RNA, 19 nt, Homo sapiens
  misc_RNA (1)...(19): siRNA sense strand
caauuaugcucacaaugga

SEQ ID NO: 619613 - RNA, 19 nt, Homo sapiens
  misc_RNA (1)...(19): siRNA sense strand
acagacaacugccugauca

SEQ ID NO: 619614 - RNA, 19 nt, Homo sapiens
  misc_RNA (1)...(19): siRNA sense strand
ucacaaagucauccuuaaa

SEQ ID NO: 619615 - RNA, 19 nt, Homo sapiens
  misc_RNA (1)...(19): siRNA sense strand
ugaugaggcuggaaauguu

SEQ ID NO: 619616 - RNA, 19 nt, Homo sapiens
  misc_RNA (1)...(19): siRNA sense strand
agaagugggcacaaauuua

SEQ ID NO: 619617 - RNA, 19 nt, Homo sapiens
  misc_RNA (1)...(19): siRNA sense strand
ggaucuccauggauuauuc

SEQ ID NO: 619618 - RNA, 19 nt, Homo sapiens
  misc_RNA (1)...(19): siRNA sense strand
gagaagcgauaccuacaac

SEQ ID NO: 619619 - RNA, 19 nt, Homo sapiens
  misc_RNA (1)...(19): siRNA sense strand
ggucaauuaugcucacaau

SEQ ID NO: 619620 - RNA, 19 nt, Homo sapiens
  misc_RNA (1)...(19): siRNA sense strand
caaaguggcaucuacaaca

SEQ ID NO: 619621 - RNA, 19 nt, Homo sapiens
  misc_RNA (1)...(19): siRNA sense strand
acaccaauauugaggcaaa

SEQ ID NO: 619622 - RNA, 19 nt, Homo sapiens
  misc_RNA (1)...(19): siRNA sense strand
acagggaggagaagacuua

SEQ ID NO: 619623 - RNA, 19 nt, Homo sapiens
  misc_RNA (1)...(19): siRNA sense strand
ggagaagguugauuaucgu

SEQ ID NO: 619624 - RNA, 19 nt, Homo sapiens
  misc_RNA (1)...(19): siRNA sense strand
ggauuguggugucugaguu

SEQ ID NO: 619625 - RNA, 19 nt, Homo sapiens
  misc_RNA (1)...(19): siRNA sense strand
ggacggcugcaucguguuu

SEQ ID NO: 619626 - RNA, 19 nt, Homo sapiens
  misc_RNA (1)...(19): siRNA sense strand
cgaccucagagaccaauua

SEQ ID NO: 619627 - RNA, 19 nt, Homo sapiens
  misc_RNA (1)...(19): siRNA sense strand
gguuggauauucucaagau

SEQ ID NO: 619628 - RNA, 19 nt, Homo sapiens
  misc_RNA (1)...(19): siRNA sense strand
gccauugucucuacugauc

SEQ ID NO: 619629 - RNA, 19 nt, Homo sapiens
  misc_RNA (1)...(19): siRNA sense strand
gaagacuuauauccacauc

SEQ ID NO: 619630 - RNA, 19 nt, Homo sapiens
  misc_RNA (1)...(19): siRNA sense strand
cagaagugggcacaaauuu

SEQ ID NO: 619631 - RNA, 19 nt, Homo sapiens
  misc_RNA (1)...(19): siRNA sense strand
caucguguuugacgucauu

SEQ ID NO: 619632 - RNA, 19 nt, Homo sapiens
  misc_RNA (1)...(19): siRNA sense strand
caucagagacggugaaguc

SEQ ID NO: 619633 - RNA, 19 nt, Homo sapiens
  misc_RNA (1)...(19): siRNA sense strand
gccaaaagcuuuacggaau

SEQ ID NO: 619634 - RNA, 19 nt, Homo sapiens
  misc_RNA (1)...(19): siRNA sense strand
ggaguccaaucccaaccaa

SEQ ID NO: 619635 - RNA, 19 nt, Homo sapiens
  misc_RNA (1)...(19): siRNA sense strand
agacuuauauccacaucau

SEQ ID NO: 619636 - RNA, 19 nt, Homo sapiens
  misc_RNA (1)...(19): siRNA sense strand
gggaagacaaaguauguga

SEQ ID NO: 619637 - RNA, 19 nt, Homo sapiens
  misc_RNA (1)...(19): siRNA sense strand
ucaauuaugcucacaaugg

SEQ ID NO: 619638 - RNA, 19 nt, Homo sapiens
  misc_RNA (1)...(19): siRNA sense strand
uaccacagcuuuggaguca

SEQ ID NO: 619639 - RNA, 19 nt, Homo sapiens
  misc_RNA (1)...(19): siRNA sense strand
gccggaauuucuuuaugaa

SEQ ID NO: 619640 - RNA, 19 nt, Homo sapiens
  misc_RNA (1)...(19): siRNA sense strand
uggagaagguugauuaucg

SEQ ID NO: 619641 - RNA, 19 nt, Homo sapiens
  misc_RNA (1)...(19): siRNA sense strand
gaacccugcuccgcaaugg

SEQ ID NO: 619642 - RNA, 19 nt, Homo sapiens
  misc_RNA (1)...(19): siRNA sense strand
gcaggaauaggaaagaaca

SEQ ID NO: 619643 - RNA, 19 nt, Homo sapiens
  misc_RNA (1)...(19): siRNA sense strand
cuccacagcuucaccauca

SEQ ID NO: 619644 - RNA, 19 nt, Homo sapiens
  misc_RNA (1)...(19): siRNA sense strand
caacgucacauccccauua

SEQ ID NO: 619645 - RNA, 19 nt, Homo sapiens
  misc_RNA (1)...(19): siRNA sense strand
gagaagguugauuaucgua

SEQ ID NO: 619646 - RNA, 19 nt, Homo sapiens
  misc_RNA (1)...(19): siRNA sense strand
uaucagccauugucucuac

SEQ ID NO: 619647 - RNA, 19 nt, Homo sapiens
  misc_RNA (1)...(19): siRNA sense strand
gacauggacugggacacaa

SEQ ID NO: 619648 - RNA, 19 nt, Homo sapiens
  misc_RNA (1)...(19): siRNA sense strand
ccucagagaccaauuacau

SEQ ID NO: 619649 - RNA, 19 nt, Homo sapiens
  misc_RNA (1)...(19): siRNA sense strand
cagccggaauuucuuuaug

SEQ ID NO: 619650 - RNA, 19 nt, Homo sapiens
  misc_RNA (1)...(19): siRNA sense strand
caacagccacggcccugaa

SEQ ID NO: 619651 - RNA, 19 nt, Homo sapiens
  misc_RNA (1)...(19): siRNA sense strand
ucagagaccaauuacauca

SEQ ID NO: 619652 - RNA, 19 nt, Homo sapiens
  misc_RNA (1)...(19): siRNA sense strand
ccaaaagcuuuacggaauu

SEQ ID NO: 619653 - RNA, 19 nt, Homo sapiens
  misc_RNA (1)...(19): siRNA sense strand
guaaucuuaucagccauug

SEQ ID NO: 619654 - RNA, 19 nt, Homo sapiens
  misc_RNA (1)...(19): siRNA sense strand
gaaagcaauaccgauaugu

SEQ ID NO: 619655 - RNA, 19 nt, Homo sapiens
  misc_RNA (1)...(19): siRNA sense strand
gaacuaugucaucuuccuu

SEQ ID NO: 619656 - RNA, 19 nt, Homo sapiens
  misc_RNA (1)...(19): siRNA sense strand
uggaaacccuggagaaggu

SEQ ID NO: 619657 - RNA, 19 nt, Homo sapiens
  misc_RNA (1)...(19): siRNA sense strand
acaacugccugaucaacau

SEQ ID NO: 619658 - RNA, 19 nt, Homo sapiens
  misc_RNA (1)...(19): siRNA sense strand
ucucacaaagucauccuua

SEQ ID NO: 619659 - RNA, 19 nt, Homo sapiens
  misc_RNA (1)...(19): siRNA sense strand
agccggaauuucuuuauga

SEQ ID NO: 619660 - RNA, 19 nt, Homo sapiens
  misc_RNA (1)...(19): siRNA sense strand
ccgcauacauccggagaau

SEQ ID NO: 619661 - RNA, 19 nt, Homo sapiens
  misc_RNA (1)...(19): siRNA sense strand
gaguccagauacaaccauu

SEQ ID NO: 619662 - RNA, 19 nt, Homo sapiens
  misc_RNA (1)...(19): siRNA sense strand
gaugacggaguaaucuuau

SEQ ID NO: 619663 - RNA, 19 nt, Homo sapiens
  misc_RNA (1)...(19): siRNA sense strand
ccaaucccaaccaagauaa

SEQ ID NO: 619664 - RNA, 19 nt, Homo sapiens
  misc_RNA (1)...(19): siRNA sense strand
caauaccgauaugucuuug

SEQ ID NO: 619665 - RNA, 19 nt, Homo sapiens
  misc_RNA (1)...(19): siRNA sense strand
uaaucaaaguggcaucuac

SEQ ID NO: 619666 - RNA, 19 nt, Homo sapiens
  misc_RNA (1)...(19): siRNA sense strand
gcaaugggccugggaugca

SEQ ID NO: 619667 - RNA, 19 nt, Homo sapiens
  misc_RNA (1)...(19): siRNA sense strand
ccaauuacaucaggaaaau

SEQ ID NO: 619668 - RNA, 19 nt, Homo sapiens
  misc_RNA (1)...(19): siRNA sense strand
ggccugggaugcacacagu

SEQ ID NO: 619669 - RNA, 19 nt, Homo sapiens
  misc_RNA (1)...(19): siRNA sense strand
ggcacaaauuuaaucaaag

SEQ ID NO: 619670 - RNA, 19 nt, Homo sapiens
  misc_RNA (1)...(19): siRNA sense strand
ggucuuccaucacgucaac

SEQ ID NO: 619671 - RNA, 19 nt, Homo sapiens
  misc_RNA (1)...(19): siRNA sense strand
caagauggcaaccgcauac

SEQ ID NO: 619672 - RNA, 19 nt, Homo sapiens
  misc_RNA (1)...(19): siRNA sense strand
gcuuuggagucaccgagaa

SEQ ID NO: 619673 - RNA, 19 nt, Homo sapiens
  misc_RNA (1)...(19): siRNA sense strand
gauuguggugucugaguuu

SEQ ID NO: 619674 - RNA, 19 nt, Homo sapiens
  misc_RNA (1)...(19): siRNA sense strand
cagccauugucucuacuga

SEQ ID NO: 619675 - RNA, 19 nt, Homo sapiens
  misc_RNA (1)...(19): siRNA sense strand
ugacggaguaaucuuauca

SEQ ID NO: 619676 - RNA, 19 nt, Homo sapiens
  misc_RNA (1)...(19): siRNA sense strand
ugucuuugcuacaggaguu

SEQ ID NO: 619677 - RNA, 19 nt, Homo sapiens
  misc_RNA (1)...(19): siRNA sense strand
ccuacaacaccaauauuga

SEQ ID NO: 619678 - RNA, 19 nt, Homo sapiens
  misc_RNA (1)...(19): siRNA sense strand
ggaagacaaaguaugugau

SEQ ID NO: 619679 - RNA, 19 nt, Homo sapiens
  misc_RNA (1)...(19): siRNA sense strand
acaggauuguggugucuga

SEQ ID NO: 619680 - RNA, 19 nt, Homo sapiens
  misc_RNA (1)...(19): siRNA sense strand
gcccgugccucuguugaug

SEQ ID NO: 619681 - RNA, 19 nt, Homo sapiens
  misc_RNA (1)...(19): siRNA sense strand
gagcuuccacgggucaauu

SEQ ID NO: 619682 - RNA, 19 nt, Homo sapiens
  misc_RNA (1)...(19): siRNA sense strand
gaagaagauggccaagucu

SEQ ID NO: 619683 - RNA, 19 nt, Homo sapiens
  misc_RNA (1)...(19): siRNA sense strand
cgucaacgccuacgaagag

SEQ ID NO: 619684 - RNA, 19 nt, Homo sapiens
  misc_RNA (1)...(19): siRNA sense strand
gacaacugccugaucaaca

SEQ ID NO: 619685 - RNA, 19 nt, Homo sapiens
  misc_RNA (1)...(19): siRNA sense strand
cucacaaagucauccuuaa

SEQ ID NO: 619686 - RNA, 19 nt, Homo sapiens
  misc_RNA (1)...(19): siRNA sense strand
gaagauggccaagucuacu

SEQ ID NO: 619687 - RNA, 19 nt, Homo sapiens
  misc_RNA (1)...(19): siRNA sense strand
cagguuggauauucucaag

SEQ ID NO: 619688 - RNA, 19 nt, Homo sapiens
  misc_RNA (1)...(19): siRNA sense strand
aaagugacaggcaagauuc

SEQ ID NO: 619689 - RNA, 19 nt, Homo sapiens
  misc_RNA (1)...(19): siRNA sense strand
cgauaugucuuugcuacag

SEQ ID NO: 619690 - RNA, 19 nt, Homo sapiens
  misc_RNA (1)...(19): siRNA sense strand
aaaguggcaucuacaacag

SEQ ID NO: 619691 - RNA, 19 nt, Homo sapiens
  misc_RNA (1)...(19): siRNA sense strand
ggaaagaacuugaagaaua

SEQ ID NO: 619692 - RNA, 19 nt, Homo sapiens
  misc_RNA (1)...(19): siRNA sense strand
ggacagauguucauguaug

SEQ ID NO: 619693 - RNA, 19 nt, Homo sapiens
  misc_RNA (1)...(19): siRNA sense strand
gaaagaacuugaagaauac

SEQ ID NO: 619694 - RNA, 19 nt, Homo sapiens
  misc_RNA (1)...(19): siRNA sense strand
uaugauagguggaacaaua

SEQ ID NO: 619695 - RNA, 19 nt, Homo sapiens
  misc_RNA (1)...(19): siRNA sense strand
caagggaucucuuuauuca

SEQ ID NO: 619696 - RNA, 19 nt, Homo sapiens
  misc_RNA (1)...(19): siRNA sense strand
gaucagauuuggaggacua

SEQ ID NO: 619697 - RNA, 19 nt, Homo sapiens
  misc_RNA (1)...(19): siRNA sense strand
ggcaaaagaugcugaauua

SEQ ID NO: 619698 - RNA, 19 nt, Homo sapiens
  misc_RNA (1)...(19): siRNA sense strand
ggaugaauauggagagauu

SEQ ID NO: 619699 - RNA, 19 nt, Homo sapiens
  misc_RNA (1)...(19): siRNA sense strand
gcacguuuccuaauugaua

SEQ ID NO: 619700 - RNA, 19 nt, Homo sapiens
  misc_RNA (1)...(19): siRNA sense strand
uaucugauguuccuacuaa

SEQ ID NO: 619701 - RNA, 19 nt, Homo sapiens
  misc_RNA (1)...(19): siRNA sense strand
caaauuaacuacccuuucu

SEQ ID NO: 619702 - RNA, 19 nt, Homo sapiens
  misc_RNA (1)...(19): siRNA sense strand
gacuaaagaugcaggauug

SEQ ID NO: 619703 - RNA, 19 nt, Homo sapiens
  misc_RNA (1)...(19): siRNA sense strand
gauggugucuuagauauga

SEQ ID NO: 619704 - RNA, 19 nt, Homo sapiens
  misc_RNA (1)...(19): siRNA sense strand
ugaauuagcuuggauagau

SEQ ID NO: 619705 - RNA, 19 nt, Homo sapiens
  misc_RNA (1)...(19): siRNA sense strand
ggaaacgugugaagcuuga

SEQ ID NO: 619706 - RNA, 19 nt, Homo sapiens
  misc_RNA (1)...(19): siRNA sense strand
gaacuacuccugggacuuu

SEQ ID NO: 619707 - RNA, 19 nt, Homo sapiens
  misc_RNA (1)...(19): siRNA sense strand
uaaaugggaugaauaugga

SEQ ID NO: 619708 - RNA, 19 nt, Homo sapiens
  misc_RNA (1)...(19): siRNA sense strand
uuggauagauggugucuua

SEQ ID NO: 619709 - RNA, 19 nt, Homo sapiens
  misc_RNA (1)...(19): siRNA sense strand
ucucucagauugugaauuu

SEQ ID NO: 619710 - RNA, 19 nt, Homo sapiens
  misc_RNA (1)...(19): siRNA sense strand
caacagagucuauugaaau

SEQ ID NO: 619711 - RNA, 19 nt, Homo sapiens
  misc_RNA (1)...(19): siRNA sense strand
gaaauagaguugaggaaac

SEQ ID NO: 619712 - RNA, 19 nt, Homo sapiens
  misc_RNA (1)...(19): siRNA sense strand
guaccuagcccuaaaguug

SEQ ID NO: 619713 - RNA, 19 nt, Homo sapiens
  misc_RNA (1)...(19): siRNA sense strand
agagggagauccauuuaaa

SEQ ID NO: 619714 - RNA, 19 nt, Homo sapiens
  misc_RNA (1)...(19): siRNA sense strand
ugucagcucucuucaguuu

SEQ ID NO: 619715 - RNA, 19 nt, Homo sapiens
  misc_RNA (1)...(19): siRNA sense strand
caaaccagaggauuucuua

SEQ ID NO: 619716 - RNA, 19 nt, Homo sapiens
  misc_RNA (1)...(19): siRNA sense strand
aagcaugacuugaugauga

SEQ ID NO: 619717 - RNA, 19 nt, Homo sapiens
  misc_RNA (1)...(19): siRNA sense strand
gaacugugcuaucuaugca

SEQ ID NO: 619718 - RNA, 19 nt, Homo sapiens
  misc_RNA (1)...(19): siRNA sense strand
gagaugaaccuauggauca

SEQ ID NO: 619719 - RNA, 19 nt, Homo sapiens
  misc_RNA (1)...(19): siRNA sense strand
uagaauggaugagugauaa

SEQ ID NO: 619720 - RNA, 19 nt, Homo sapiens
  misc_RNA (1)...(19): siRNA sense strand
cauuggcacuccuaaauaa

SEQ ID NO: 619721 - RNA, 19 nt, Homo sapiens
  misc_RNA (1)...(19): siRNA sense strand
ggacacagcaggcagaguu

SEQ ID NO: 619722 - RNA, 19 nt, Homo sapiens
  misc_RNA (1)...(19): siRNA sense strand
agucaaagauggagaagaa

SEQ ID NO: 619723 - RNA, 19 nt, Homo sapiens
  misc_RNA (1)...(19): siRNA sense strand
ggaacuugcucaacuucuu

SEQ ID NO: 619724 - RNA, 19 nt, Homo sapiens
  misc_RNA (1)...(19): siRNA sense strand
caaccauuccuguuuauaa

SEQ ID NO: 619725 - RNA, 19 nt, Homo sapiens
  misc_RNA (1)...(19): siRNA sense strand
ggaugcagccuuugauaaa

SEQ ID NO: 619726 - RNA, 19 nt, Homo sapiens
  misc_RNA (1)...(19): siRNA sense strand
gaaauuguuuaugcaguug

SEQ ID NO: 619727 - RNA, 19 nt, Homo sapiens
  misc_RNA (1)...(19): siRNA sense strand
agaaacaggugaagaaagu

SEQ ID NO: 619728 - RNA, 19 nt, Homo sapiens
  misc_RNA (1)...(19): siRNA sense strand
caagagggagauccauuua

SEQ ID NO: 619729 - RNA, 19 nt, Homo sapiens
  misc_RNA (1)...(19): siRNA sense strand
ggaagcauguucaccagau

SEQ ID NO: 619730 - RNA, 19 nt, Homo sapiens
  misc_RNA (1)...(19): siRNA sense strand
gaaagugagaucauuccua

SEQ ID NO: 619731 - RNA, 19 nt, Homo sapiens
  misc_RNA (1)...(19): siRNA sense strand
gaagcucccucagauucua

SEQ ID NO: 619732 - RNA, 19 nt, Homo sapiens
  misc_RNA (1)...(19): siRNA sense strand
gaugaaaccacgacaguug

SEQ ID NO: 619733 - RNA, 19 nt, Homo sapiens
  misc_RNA (1)...(19): siRNA sense strand
caagaagaaucugcccuuu

SEQ ID NO: 619734 - RNA, 19 nt, Homo sapiens
  misc_RNA (1)...(19): siRNA sense strand
ugaagaaagugagaucauu

SEQ ID NO: 619735 - RNA, 19 nt, Homo sapiens
  misc_RNA (1)...(19): siRNA sense strand
gauagauggugucuuagau

SEQ ID NO: 619736 - RNA, 19 nt, Homo sapiens
  misc_RNA (1)...(19): siRNA sense strand
gaccagccaucagcucaua

SEQ ID NO: 619737 - RNA, 19 nt, Homo sapiens
  misc_RNA (1)...(19): siRNA sense strand
gaagcauguucaccagauu

SEQ ID NO: 619738 - RNA, 19 nt, Homo sapiens
  misc_RNA (1)...(19): siRNA sense strand
gaagaaagugagaucauuc

SEQ ID NO: 619739 - RNA, 19 nt, Homo sapiens
  misc_RNA (1)...(19): siRNA sense strand
aaggagaacuaaaggauga

SEQ ID NO: 619740 - RNA, 19 nt, Homo sapiens
  misc_RNA (1)...(19): siRNA sense strand
gaauuagcuuggauagaug

SEQ ID NO: 619741 - RNA, 19 nt, Homo sapiens
  misc_RNA (1)...(19): siRNA sense strand
gauauagauuccagugaug

SEQ ID NO: 619742 - RNA, 19 nt, Homo sapiens
  misc_RNA (1)...(19): siRNA sense strand
gaugagugauaaauugaug

SEQ ID NO: 619743 - RNA, 19 nt, Homo sapiens
  misc_RNA (1)...(19): siRNA sense strand
ggacacagggguuauuuua

SEQ ID NO: 619744 - RNA, 19 nt, Homo sapiens
  misc_RNA (1)...(19): siRNA sense strand
ggagaagaagaaauuguuu

SEQ ID NO: 619745 - RNA, 19 nt, Homo sapiens
  misc_RNA (1)...(19): siRNA sense strand
ggacuaaagaugcaggauu

SEQ ID NO: 619746 - RNA, 19 nt, Homo sapiens
  misc_RNA (1)...(19): siRNA sense strand
gauuggguguuuacucauu

SEQ ID NO: 619747 - RNA, 19 nt, Homo sapiens
  misc_RNA (1)...(19): siRNA sense strand
uaugagaguuuccaaagug

SEQ ID NO: 619748 - RNA, 19 nt, Homo sapiens
  misc_RNA (1)...(19): siRNA sense strand
gaauauggagagauuauca

SEQ ID NO: 619749 - RNA, 19 nt, Homo sapiens
  misc_RNA (1)...(19): siRNA sense strand
aaaguccuauccuauguuu

SEQ ID NO: 619750 - RNA, 19 nt, Homo sapiens
  misc_RNA (1)...(19): siRNA sense strand
ggucugaacugugcuaucu

SEQ ID NO: 619751 - RNA, 19 nt, Homo sapiens
  misc_RNA (1)...(19): siRNA sense strand
ugggacagauguucaugua

SEQ ID NO: 619752 - RNA, 19 nt, Homo sapiens
  misc_RNA (1)...(19): siRNA sense strand
gaaggcagucguaaaggaa

SEQ ID NO: 619753 - RNA, 19 nt, Homo sapiens
  misc_RNA (1)...(19): siRNA sense strand
ggaaacacuucgaggugau

SEQ ID NO: 619754 - RNA, 19 nt, Homo sapiens
  misc_RNA (1)...(19): siRNA sense strand
ggaacaauauggaaaauag

SEQ ID NO: 619755 - RNA, 19 nt, Homo sapiens
  misc_RNA (1)...(19): siRNA sense strand
guagaauggaugagugaua

SEQ ID NO: 619756 - RNA, 19 nt, Homo sapiens
  misc_RNA (1)...(19): siRNA sense strand
uguaggagguguacuuguu

SEQ ID NO: 619757 - RNA, 19 nt, Homo sapiens
  misc_RNA (1)...(19): siRNA sense strand
aaagcuacaugaaacaguu

SEQ ID NO: 619758 - RNA, 19 nt, Homo sapiens
  misc_RNA (1)...(19): siRNA sense strand
agagugauauugaggaaga

SEQ ID NO: 619759 - RNA, 19 nt, Homo sapiens
  misc_RNA (1)...(19): siRNA sense strand
cagccaaccugaccuggaa

SEQ ID NO: 619760 - RNA, 19 nt, Homo sapiens
  misc_RNA (1)...(19): siRNA sense strand
gugauaaauugaugagaug

SEQ ID NO: 619761 - RNA, 19 nt, Homo sapiens
  misc_RNA (1)...(19): siRNA sense strand
gaacuugcucaacuucuug

SEQ ID NO: 619762 - RNA, 19 nt, Homo sapiens
  misc_RNA (1)...(19): siRNA sense strand
uagauggugucuuagauau

SEQ ID NO: 619763 - RNA, 19 nt, Homo sapiens
  misc_RNA (1)...(19): siRNA sense strand
aaauggagaugaaccuaug

SEQ ID NO: 619764 - RNA, 19 nt, Homo sapiens
  misc_RNA (1)...(19): siRNA sense strand
ucaagcuacugaagaagaa

SEQ ID NO: 619765 - RNA, 19 nt, Homo sapiens
  misc_RNA (1)...(19): siRNA sense strand
gacgaagcaugacuugaug

SEQ ID NO: 619766 - RNA, 19 nt, Homo sapiens
  misc_RNA (1)...(19): siRNA sense strand
gaugcaggauuggguguuu

SEQ ID NO: 619767 - RNA, 19 nt, Homo sapiens
  misc_RNA (1)...(19): siRNA sense strand
ucuccaaguugaugaguuu

SEQ ID NO: 619768 - RNA, 19 nt, Homo sapiens
  misc_RNA (1)...(19): siRNA sense strand
ugaaggcagucguaaagga

SEQ ID NO: 619769 - RNA, 19 nt, Homo sapiens
  misc_RNA (1)...(19): siRNA sense strand
gaggaaacgugugaagcuu

SEQ ID NO: 619770 - RNA, 19 nt, Homo sapiens
  misc_RNA (1)...(19): siRNA sense strand
aaagaaagaagcugccaaa

SEQ ID NO: 619771 - RNA, 19 nt, Homo sapiens
  misc_RNA (1)...(19): siRNA sense strand
gaaacuggacgcauuggau

SEQ ID NO: 619772 - RNA, 19 nt, Homo sapiens
  misc_RNA (1)...(19): siRNA sense strand
gagguguacuuguuugcaa

SEQ ID NO: 619773 - RNA, 19 nt, Homo sapiens
  misc_RNA (1)...(19): siRNA sense strand
gugagaucauuccuacuuu

SEQ ID NO: 619774 - RNA, 19 nt, Homo sapiens
  misc_RNA (1)...(19): siRNA sense strand
acuaaaggaugauggagaa

SEQ ID NO: 619775 - RNA, 19 nt, Homo sapiens
  misc_RNA (1)...(19): siRNA sense strand
gauaugagaguuuccaaag

SEQ ID NO: 619776 - RNA, 19 nt, Homo sapiens
  misc_RNA (1)...(19): siRNA sense strand
ugggaaagauauuaaagug

SEQ ID NO: 619777 - RNA, 19 nt, Homo sapiens
  misc_RNA (1)...(19): siRNA sense strand
acaacagagucuauugaaa

SEQ ID NO: 619778 - RNA, 19 nt, Homo sapiens
  misc_RNA (1)...(19): siRNA sense strand
aagcaggccuucccuacuu

SEQ ID NO: 619779 - RNA, 19 nt, Homo sapiens
  misc_RNA (1)...(19): siRNA sense strand
ugauguggaugcagccuuu

SEQ ID NO: 619780 - RNA, 19 nt, Homo sapiens
  misc_RNA (1)...(19): siRNA sense strand
gaaccaaggcugucagacu

SEQ ID NO: 619781 - RNA, 19 nt, Homo sapiens
  misc_RNA (1)...(19): siRNA sense strand
ggauagauggugucuuaga

SEQ ID NO: 619782 - RNA, 19 nt, Homo sapiens
  misc_RNA (1)...(19): siRNA sense strand
ggauuuaucugauguuccu

SEQ ID NO: 619783 - RNA, 19 nt, Homo sapiens
  misc_RNA (1)...(19): siRNA sense strand
gugaugagagugauauuga

SEQ ID NO: 619784 - RNA, 19 nt, Homo sapiens
  misc_RNA (1)...(19): siRNA sense strand
agaagaaucugcccuuugc

SEQ ID NO: 619785 - RNA, 19 nt, Homo sapiens
  misc_RNA (1)...(19): siRNA sense strand
caaauguccuggaaacacu

SEQ ID NO: 619786 - RNA, 19 nt, Homo sapiens
  misc_RNA (1)...(19): siRNA sense strand
gagcagcuucugacaaaug

SEQ ID NO: 619787 - RNA, 19 nt, Homo sapiens
  misc_RNA (1)...(19): siRNA sense strand
gccagcuggucauaugaua

SEQ ID NO: 619788 - RNA, 19 nt, Homo sapiens
  misc_RNA (1)...(19): siRNA sense strand
caaagauggagaagaagaa

SEQ ID NO: 619789 - RNA, 19 nt, Homo sapiens
  misc_RNA (1)...(19): siRNA sense strand
ugagaucauuccuacuuug

SEQ ID NO: 619790 - RNA, 19 nt, Homo sapiens
  misc_RNA (1)...(19): siRNA sense strand
gcuaucuucuccaaguuga

SEQ ID NO: 619791 - RNA, 19 nt, Homo sapiens
  misc_RNA (1)...(19): siRNA sense strand
acaauaagcuggaccucua

SEQ ID NO: 619792 - RNA, 19 nt, Homo sapiens
  misc_RNA (1)...(19): siRNA sense strand
gcaacuggcuguuccugaa

SEQ ID NO: 619793 - RNA, 19 nt, Homo sapiens
  misc_RNA (1)...(19): siRNA sense strand
gcaaugcacugggccauau

SEQ ID NO: 619794 - RNA, 19 nt, Homo sapiens
  misc_RNA (1)...(19): siRNA sense strand
ggacaaccaccacuucuau

SEQ ID NO: 619795 - RNA, 19 nt, Homo sapiens
  misc_RNA (1)...(19): siRNA sense strand
ugaaggagcuggacaugca

SEQ ID NO: 619796 - RNA, 19 nt, Homo sapiens
  misc_RNA (1)...(19): siRNA sense strand
acaauuaccuggccuucuu

SEQ ID NO: 619797 - RNA, 19 nt, Homo sapiens
  misc_RNA (1)...(19): siRNA sense strand
gcccugcgcuuccuauuca

SEQ ID NO: 619798 - RNA, 19 nt, Homo sapiens
  misc_RNA (1)...(19): siRNA sense strand
cuagaccugucccacaaua

SEQ ID NO: 619799 - RNA, 19 nt, Homo sapiens
  misc_RNA (1)...(19): siRNA sense strand
ugaaggcccugaccaaugg

SEQ ID NO: 619800 - RNA, 19 nt, Homo sapiens
  misc_RNA (1)...(19): siRNA sense strand
gacggcaacuguuauuaca

SEQ ID NO: 619801 - RNA, 19 nt, Homo sapiens
  misc_RNA (1)...(19): siRNA sense strand
acaacaacaucaugacugu

SEQ ID NO: 619802 - RNA, 19 nt, Homo sapiens
  misc_RNA (1)...(19): siRNA sense strand
gugagaacuuccucuacaa

SEQ ID NO: 619803 - RNA, 19 nt, Homo sapiens
  misc_RNA (1)...(19): siRNA sense strand
caacuguuauuacaagaac

SEQ ID NO: 619804 - RNA, 19 nt, Homo sapiens
  misc_RNA (1)...(19): siRNA sense strand
gacaaccaccacuucuaua

SEQ ID NO: 619805 - RNA, 19 nt, Homo sapiens
  misc_RNA (1)...(19): siRNA sense strand
gaacuuccucuacaaaugc

SEQ ID NO: 619806 - RNA, 19 nt, Homo sapiens
  misc_RNA (1)...(19): siRNA sense strand
agaacuuccucuacaaaug

SEQ ID NO: 619807 - RNA, 19 nt, Homo sapiens
  misc_RNA (1)...(19): siRNA sense strand
ggaccugagugagaacuuc

SEQ ID NO: 619808 - RNA, 19 nt, Homo sapiens
  misc_RNA (1)...(19): siRNA sense strand
cuacaaaugcaucacuaaa

SEQ ID NO: 619809 - RNA, 19 nt, Homo sapiens
  misc_RNA (1)...(19): siRNA sense strand
acaaccaccacuucuauaa

SEQ ID NO: 619810 - RNA, 19 nt, Homo sapiens
  misc_RNA (1)...(19): siRNA sense strand
ggacggcaacuguuauuac

SEQ ID NO: 619811 - RNA, 19 nt, Homo sapiens
  misc_RNA (1)...(19): siRNA sense strand
gcaaauacuagauguaagc

SEQ ID NO: 619812 - RNA, 19 nt, Homo sapiens
  misc_RNA (1)...(19): siRNA sense strand
ccaacgcccucaagacagu

SEQ ID NO: 619813 - RNA, 19 nt, Homo sapiens
  misc_RNA (1)...(19): siRNA sense strand
gagaacuuccucuacaaau

SEQ ID NO: 619814 - RNA, 19 nt, Homo sapiens
  misc_RNA (1)...(19): siRNA sense strand
gcaacuguuauuacaagaa

SEQ ID NO: 619815 - RNA, 19 nt, Homo sapiens
  misc_RNA (1)...(19): siRNA sense strand
caacauccacagccaagug

SEQ ID NO: 619816 - RNA, 19 nt, Homo sapiens
  misc_RNA (1)...(19): siRNA sense strand
cggcaacuguuauuacaag

SEQ ID NO: 619817 - RNA, 19 nt, Homo sapiens
  misc_RNA (1)...(19): siRNA sense strand
uaccuggccuucuuuaagu

SEQ ID NO: 619818 - RNA, 19 nt, Homo sapiens
  misc_RNA (1)...(19): siRNA sense strand
uugaaggccugguguugaa

SEQ ID NO: 619819 - RNA, 19 nt, Homo sapiens
  misc_RNA (1)...(19): siRNA sense strand
caaccucacccaccuguca

SEQ ID NO: 619820 - RNA, 19 nt, Homo sapiens
  misc_RNA (1)...(19): siRNA sense strand
aaccugagcuacaacaaca

SEQ ID NO: 619821 - RNA, 19 nt, Homo sapiens
  misc_RNA (1)...(19): siRNA sense strand
ugcgagagcucaaccuuag

SEQ ID NO: 619822 - RNA, 19 nt, Homo sapiens
  misc_RNA (1)...(19): siRNA sense strand
ggcaaugucaccagccuuu

SEQ ID NO: 619823 - RNA, 19 nt, Homo sapiens
  misc_RNA (1)...(19): siRNA sense strand
uggaguaucugcuguuguc

SEQ ID NO: 619824 - RNA, 19 nt, Homo sapiens
  misc_RNA (1)...(19): siRNA sense strand
ucauggacggcaacuguua

SEQ ID NO: 619825 - RNA, 19 nt, Homo sapiens
  misc_RNA (1)...(19): siRNA sense strand
cuuaaccuguccuucaauu

SEQ ID NO: 619826 - RNA, 19 nt, Homo sapiens
  misc_RNA (1)...(19): siRNA sense strand
cugaggaccuggccaaucu

SEQ ID NO: 619827 - RNA, 19 nt, Homo sapiens
  misc_RNA (1)...(19): siRNA sense strand
gggacaaccaccacuucua

SEQ ID NO: 619828 - RNA, 19 nt, Homo sapiens
  misc_RNA (1)...(19): siRNA sense strand
cagacuggguguacaacga

SEQ ID NO: 619829 - RNA, 19 nt, Homo sapiens
  misc_RNA (1)...(19): siRNA sense strand
gcugggaccucugguacug

SEQ ID NO: 619830 - RNA, 19 nt, Homo sapiens
  misc_RNA (1)...(19): siRNA sense strand
cgagugcccugcaaauacu

SEQ ID NO: 619831 - RNA, 19 nt, Homo sapiens
  misc_RNA (1)...(19): siRNA sense strand
gagcuacaacaacaucaug

SEQ ID NO: 619832 - RNA, 19 nt, Homo sapiens
  misc_RNA (1)...(19): siRNA sense strand
cugcaaauacuagauguaa

SEQ ID NO: 619833 - RNA, 19 nt, Homo sapiens
  misc_RNA (1)...(19): siRNA sense strand
gcgagugcccugcaaauac

SEQ ID NO: 619834 - RNA, 19 nt, Homo sapiens
  misc_RNA (1)...(19): siRNA sense strand
ggcgagugcccugcaaaua

SEQ ID NO: 619835 - RNA, 19 nt, Homo sapiens
  misc_RNA (1)...(19): siRNA sense strand
ucacccaccugucacucaa

SEQ ID NO: 619836 - RNA, 19 nt, Homo sapiens
  misc_RNA (1)...(19): siRNA sense strand
uaaccuguccuucaauuac

SEQ ID NO: 619837 - RNA, 19 nt, Homo sapiens
  misc_RNA (1)...(19): siRNA sense strand
ugagaacuuccucuacaaa

SEQ ID NO: 619838 - RNA, 19 nt, Homo sapiens
  misc_RNA (1)...(19): siRNA sense strand
agugagaacuuccucuaca

SEQ ID NO: 619839 - RNA, 19 nt, Homo sapiens
  misc_RNA (1)...(19): siRNA sense strand
ucaccagccuuuccuuguc

SEQ ID NO: 619840 - RNA, 19 nt, Homo sapiens
  misc_RNA (1)...(19): siRNA sense strand
ugagugagaacuuccucua

SEQ ID NO: 619841 - RNA, 19 nt, Homo sapiens
  misc_RNA (1)...(19): siRNA sense strand
ugccugcgcugcccaaauc

SEQ ID NO: 619842 - RNA, 19 nt, Homo sapiens
  misc_RNA (1)...(19): siRNA sense strand
ggacuucagcggcaaugca

SEQ ID NO: 619843 - RNA, 19 nt, Homo sapiens
  misc_RNA (1)...(19): siRNA sense strand
caccugagccgucuugaag

SEQ ID NO: 619844 - RNA, 19 nt, Homo sapiens
  misc_RNA (1)...(19): siRNA sense strand
cuacaaccgcaucgucaaa

SEQ ID NO: 619845 - RNA, 19 nt, Homo sapiens
  misc_RNA (1)...(19): siRNA sense strand
gcccaaaucccucauaucc

SEQ ID NO: 619846 - RNA, 19 nt, Homo sapiens
  misc_RNA (1)...(19): siRNA sense strand
aguaucugcuguuguccua

SEQ ID NO: 619847 - RNA, 19 nt, Homo sapiens
  misc_RNA (1)...(19): siRNA sense strand
aagcuuaaccuguccuuca

SEQ ID NO: 619848 - RNA, 19 nt, Homo sapiens
  misc_RNA (1)...(19): siRNA sense strand
gugcuggaccugagugaga

SEQ ID NO: 619849 - RNA, 19 nt, Homo sapiens
  misc_RNA (1)...(19): siRNA sense strand
caacuucaccuuggaucug

SEQ ID NO: 619850 - RNA, 19 nt, Homo sapiens
  misc_RNA (1)...(19): siRNA sense strand
ccgggucaguggucucuug

SEQ ID NO: 619851 - RNA, 19 nt, Homo sapiens
  misc_RNA (1)...(19): siRNA sense strand
ggccugagcgguuugaucu

SEQ ID NO: 619852 - RNA, 19 nt, Homo sapiens
  misc_RNA (1)...(19): siRNA sense strand
uaucugcuguuguccuaca

SEQ ID NO: 619853 - RNA, 19 nt, Homo sapiens
  misc_RNA (1)...(19): siRNA sense strand
uccaaggccugagcgguuu

SEQ ID NO: 619854 - RNA, 19 nt, Homo sapiens
  misc_RNA (1)...(19): siRNA sense strand
gcagcacccucaacuucac

SEQ ID NO: 619855 - RNA, 19 nt, Homo sapiens
  misc_RNA (1)...(19): siRNA sense strand
ggacacucccagcucugaa

SEQ ID NO: 619856 - RNA, 19 nt, Homo sapiens
  misc_RNA (1)...(19): siRNA sense strand
ccucagccauaccaacauc

SEQ ID NO: 619857 - RNA, 19 nt, Homo sapiens
  misc_RNA (1)...(19): siRNA sense strand
caauuaccuggccuucuuu

SEQ ID NO: 619858 - RNA, 19 nt, Homo sapiens
  misc_RNA (1)...(19): siRNA sense strand
uuaaccuguccuucaauua

SEQ ID NO: 619859 - RNA, 19 nt, Homo sapiens
  misc_RNA (1)...(19): siRNA sense strand
gaggaccuggccaaucuga

SEQ ID NO: 619860 - RNA, 19 nt, Homo sapiens
  misc_RNA (1)...(19): siRNA sense strand
ggcaacuguuauuacaaga

SEQ ID NO: 619861 - RNA, 19 nt, Homo sapiens
  misc_RNA (1)...(19): siRNA sense strand
uacaacagccagcccuuug

SEQ ID NO: 619862 - RNA, 19 nt, Homo sapiens
  misc_RNA (1)...(19): siRNA sense strand
cuacaacagccagcccuuu

SEQ ID NO: 619863 - RNA, 19 nt, Homo sapiens
  misc_RNA (1)...(19): siRNA sense strand
gcacuuccccugccacaug

SEQ ID NO: 619864 - RNA, 19 nt, Homo sapiens
  misc_RNA (1)...(19): siRNA sense strand
gcugaaggcccugaccaau

SEQ ID NO: 619865 - RNA, 19 nt, Homo sapiens
  misc_RNA (1)...(19): siRNA sense strand
ugaucuggcuggacuuguc

SEQ ID NO: 619866 - RNA, 19 nt, Homo sapiens
  misc_RNA (1)...(19): siRNA sense strand
ugcuagaccugucccacaa

SEQ ID NO: 619867 - RNA, 19 nt, Homo sapiens
  misc_RNA (1)...(19): siRNA sense strand
cugcgagagcucaaccuua

SEQ ID NO: 619868 - RNA, 19 nt, Homo sapiens
  misc_RNA (1)...(19): siRNA sense strand
ggcaaugcacugggccaua

SEQ ID NO: 619869 - RNA, 19 nt, Homo sapiens
  misc_RNA (1)...(19): siRNA sense strand
ccaccugagccgucuugaa

SEQ ID NO: 619870 - RNA, 19 nt, Homo sapiens
  misc_RNA (1)...(19): siRNA sense strand
aggaugcccugcccuacga

SEQ ID NO: 619871 - RNA, 19 nt, Homo sapiens
  misc_RNA (1)...(19): siRNA sense strand
cugaaggcccugaccaaug

SEQ ID NO: 619872 - RNA, 19 nt, Homo sapiens
  misc_RNA (1)...(19): siRNA sense strand
uuaccuggccuucuuuaag

SEQ ID NO: 619873 - RNA, 19 nt, Homo sapiens
  misc_RNA (1)...(19): siRNA sense strand
cugcagcacccucaacuuc

SEQ ID NO: 619874 - RNA, 19 nt, Homo sapiens
  misc_RNA (1)...(19): siRNA sense strand
ccuggaguaucugcuguug

SEQ ID NO: 619875 - RNA, 19 nt, Homo sapiens
  misc_RNA (1)...(19): siRNA sense strand
caaccaccacuucuauaac

SEQ ID NO: 619876 - RNA, 19 nt, Homo sapiens
  misc_RNA (1)...(19): siRNA sense strand
cgccaacgcccucaagaca

SEQ ID NO: 619877 - RNA, 19 nt, Homo sapiens
  misc_RNA (1)...(19): siRNA sense strand
gcaacagcaucagcuucgu

SEQ ID NO: 619878 - RNA, 19 nt, Homo sapiens
  misc_RNA (1)...(19): siRNA sense strand
cugcccaaaucccucauau

SEQ ID NO: 619879 - RNA, 19 nt, Homo sapiens
  misc_RNA (1)...(19): siRNA sense strand
gcacucauucacggagcua

SEQ ID NO: 619880 - RNA, 19 nt, Homo sapiens
  misc_RNA (1)...(19): siRNA sense strand
acaauaagcuggaccucua

SEQ ID NO: 619881 - RNA, 19 nt, Homo sapiens
  misc_RNA (1)...(19): siRNA sense strand
gcaaugcacugggccauau

SEQ ID NO: 619882 - RNA, 19 nt, Homo sapiens
  misc_RNA (1)...(19): siRNA sense strand
ggacaaccaccacuucuau

SEQ ID NO: 619883 - RNA, 19 nt, Homo sapiens
  misc_RNA (1)...(19): siRNA sense strand
ugaaggagcuggacaugca

SEQ ID NO: 619884 - RNA, 19 nt, Homo sapiens
  misc_RNA (1)...(19): siRNA sense strand
acaauuaccuggccuucuu

SEQ ID NO: 619885 - RNA, 19 nt, Homo sapiens
  misc_RNA (1)...(19): siRNA sense strand
gcccugcgcuuccuauuca

SEQ ID NO: 619886 - RNA, 19 nt, Homo sapiens
  misc_RNA (1)...(19): siRNA sense strand
cuagaccugucccacaaua

SEQ ID NO: 619887 - RNA, 19 nt, Homo sapiens
  misc_RNA (1)...(19): siRNA sense strand
ugaaggcccugaccaaugg

SEQ ID NO: 619888 - RNA, 19 nt, Homo sapiens
  misc_RNA (1)...(19): siRNA sense strand
gacggcaacuguuauuaca

SEQ ID NO: 619889 - RNA, 19 nt, Homo sapiens
  misc_RNA (1)...(19): siRNA sense strand
acaacaacaucaugacugu

SEQ ID NO: 619890 - RNA, 19 nt, Homo sapiens
  misc_RNA (1)...(19): siRNA sense strand
gugagaacuuccucuacaa

SEQ ID NO: 619891 - RNA, 19 nt, Homo sapiens
  misc_RNA (1)...(19): siRNA sense strand
caacuguuauuacaagaac

SEQ ID NO: 619892 - RNA, 19 nt, Homo sapiens
  misc_RNA (1)...(19): siRNA sense strand
gacaaccaccacuucuaua

SEQ ID NO: 619893 - RNA, 19 nt, Homo sapiens
  misc_RNA (1)...(19): siRNA sense strand
gaacuuccucuacaaaugc

SEQ ID NO: 619894 - RNA, 19 nt, Homo sapiens
  misc_RNA (1)...(19): siRNA sense strand
agaacuuccucuacaaaug

SEQ ID NO: 619895 - RNA, 19 nt, Homo sapiens
  misc_RNA (1)...(19): siRNA sense strand
ggaccugagugagaacuuc

SEQ ID NO: 619896 - RNA, 19 nt, Homo sapiens
  misc_RNA (1)...(19): siRNA sense strand
cuacaaaugcaucacuaaa

SEQ ID NO: 619897 - RNA, 19 nt, Homo sapiens
  misc_RNA (1)...(19): siRNA sense strand
acaaccaccacuucuauaa

SEQ ID NO: 619898 - RNA, 19 nt, Homo sapiens
  misc_RNA (1)...(19): siRNA sense strand
ggacggcaacuguuauuac

SEQ ID NO: 619899 - RNA, 19 nt, Homo sapiens
  misc_RNA (1)...(19): siRNA sense strand
gcaaauacuagauguaagc

SEQ ID NO: 619900 - RNA, 19 nt, Homo sapiens
  misc_RNA (1)...(19): siRNA sense strand
ccaacgcccucaagacagu

SEQ ID NO: 619901 - RNA, 19 nt, Homo sapiens
  misc_RNA (1)...(19): siRNA sense strand
gagaacuuccucuacaaau

SEQ ID NO: 619902 - RNA, 19 nt, Homo sapiens
  misc_RNA (1)...(19): siRNA sense strand
gcaacuguuauuacaagaa

SEQ ID NO: 619903 - RNA, 19 nt, Homo sapiens
  misc_RNA (1)...(19): siRNA sense strand
caacauccacagccaagug

SEQ ID NO: 619904 - RNA, 19 nt, Homo sapiens
  misc_RNA (1)...(19): siRNA sense strand
cggcaacuguuauuacaag

SEQ ID NO: 619905 - RNA, 19 nt, Homo sapiens
  misc_RNA (1)...(19): siRNA sense strand
uaccuggccuucuuuaagu

SEQ ID NO: 619906 - RNA, 19 nt, Homo sapiens
  misc_RNA (1)...(19): siRNA sense strand
uugaaggccugguguugaa

SEQ ID NO: 619907 - RNA, 19 nt, Homo sapiens
  misc_RNA (1)...(19): siRNA sense strand
caaccucacccaccuguca

SEQ ID NO: 619908 - RNA, 19 nt, Homo sapiens
  misc_RNA (1)...(19): siRNA sense strand
aaccugagcuacaacaaca

SEQ ID NO: 619909 - RNA, 19 nt, Homo sapiens
  misc_RNA (1)...(19): siRNA sense strand
ugcgagagcucaaccuuag

SEQ ID NO: 619910 - RNA, 19 nt, Homo sapiens
  misc_RNA (1)...(19): siRNA sense strand
ggcaaugucaccagccuuu

SEQ ID NO: 619911 - RNA, 19 nt, Homo sapiens
  misc_RNA (1)...(19): siRNA sense strand
uggaguaucugcuguuguc

SEQ ID NO: 619912 - RNA, 19 nt, Homo sapiens
  misc_RNA (1)...(19): siRNA sense strand
ucauggacggcaacuguua

SEQ ID NO: 619913 - RNA, 19 nt, Homo sapiens
  misc_RNA (1)...(19): siRNA sense strand
cuuaaccuguccuucaauu

SEQ ID NO: 619914 - RNA, 19 nt, Homo sapiens
  misc_RNA (1)...(19): siRNA sense strand
cugaggaccuggccaaucu

SEQ ID NO: 619915 - RNA, 19 nt, Homo sapiens
  misc_RNA (1)...(19): siRNA sense strand
gggacaaccaccacuucua

SEQ ID NO: 619916 - RNA, 19 nt, Homo sapiens
  misc_RNA (1)...(19): siRNA sense strand
cagacuggguguacaacga

SEQ ID NO: 619917 - RNA, 19 nt, Homo sapiens
  misc_RNA (1)...(19): siRNA sense strand
gcugggaccucugguacug

SEQ ID NO: 619918 - RNA, 19 nt, Homo sapiens
  misc_RNA (1)...(19): siRNA sense strand
cgagugcccugcaaauacu

SEQ ID NO: 619919 - RNA, 19 nt, Homo sapiens
  misc_RNA (1)...(19): siRNA sense strand
gagcuacaacaacaucaug

SEQ ID NO: 619920 - RNA, 19 nt, Homo sapiens
  misc_RNA (1)...(19): siRNA sense strand
cugcaaauacuagauguaa

SEQ ID NO: 619921 - RNA, 19 nt, Homo sapiens
  misc_RNA (1)...(19): siRNA sense strand
gcgagugcccugcaaauac

SEQ ID NO: 619922 - RNA, 19 nt, Homo sapiens
  misc_RNA (1)...(19): siRNA sense strand
ggcgagugcccugcaaaua

SEQ ID NO: 619923 - RNA, 19 nt, Homo sapiens
  misc_RNA (1)...(19): siRNA sense strand
ucacccaccugucacucaa

SEQ ID NO: 619924 - RNA, 19 nt, Homo sapiens
  misc_RNA (1)...(19): siRNA sense strand
uaaccuguccuucaauuac

SEQ ID NO: 619925 - RNA, 19 nt, Homo sapiens
  misc_RNA (1)...(19): siRNA sense strand
ugagaacuuccucuacaaa

SEQ ID NO: 619926 - RNA, 19 nt, Homo sapiens
  misc_RNA (1)...(19): siRNA sense strand
agugagaacuuccucuaca

SEQ ID NO: 619927 - RNA, 19 nt, Homo sapiens
  misc_RNA (1)...(19): siRNA sense strand
ucaccagccuuuccuuguc

SEQ ID NO: 619928 - RNA, 19 nt, Homo sapiens
  misc_RNA (1)...(19): siRNA sense strand
ugagugagaacuuccucua

SEQ ID NO: 619929 - RNA, 19 nt, Homo sapiens
  misc_RNA (1)...(19): siRNA sense strand
ugccugcgcugcccaaauc

SEQ ID NO: 619930 - RNA, 19 nt, Homo sapiens
  misc_RNA (1)...(19): siRNA sense strand
ggacuucagcggcaaugca

SEQ ID NO: 619931 - RNA, 19 nt, Homo sapiens
  misc_RNA (1)...(19): siRNA sense strand
caccugagccgucuugaag

SEQ ID NO: 619932 - RNA, 19 nt, Homo sapiens
  misc_RNA (1)...(19): siRNA sense strand
cuacaaccgcaucgucaaa

SEQ ID NO: 619933 - RNA, 19 nt, Homo sapiens
  misc_RNA (1)...(19): siRNA sense strand
gcccaaaucccucauaucc

SEQ ID NO: 619934 - RNA, 19 nt, Homo sapiens
  misc_RNA (1)...(19): siRNA sense strand
aguaucugcuguuguccua

SEQ ID NO: 619935 - RNA, 19 nt, Homo sapiens
  misc_RNA (1)...(19): siRNA sense strand
aagcuuaaccuguccuuca

SEQ ID NO: 619936 - RNA, 19 nt, Homo sapiens
  misc_RNA (1)...(19): siRNA sense strand
gugcuggaccugagugaga

SEQ ID NO: 619937 - RNA, 19 nt, Homo sapiens
  misc_RNA (1)...(19): siRNA sense strand
caacuucaccuuggaucug

SEQ ID NO: 619938 - RNA, 19 nt, Homo sapiens
  misc_RNA (1)...(19): siRNA sense strand
ccgggucaguggucucuug

SEQ ID NO: 619939 - RNA, 19 nt, Homo sapiens
  misc_RNA (1)...(19): siRNA sense strand
ggccugagcgguuugaucu

SEQ ID NO: 619940 - RNA, 19 nt, Homo sapiens
  misc_RNA (1)...(19): siRNA sense strand
uaucugcuguuguccuaca

SEQ ID NO: 619941 - RNA, 19 nt, Homo sapiens
  misc_RNA (1)...(19): siRNA sense strand
uccaaggccugagcgguuu

SEQ ID NO: 619942 - RNA, 19 nt, Homo sapiens
  misc_RNA (1)...(19): siRNA sense strand
gcagcacccucaacuucac

SEQ ID NO: 619943 - RNA, 19 nt, Homo sapiens
  misc_RNA (1)...(19): siRNA sense strand
ggacacucccagcucugaa

SEQ ID NO: 619944 - RNA, 19 nt, Homo sapiens
  misc_RNA (1)...(19): siRNA sense strand
ccucagccauaccaacauc

SEQ ID NO: 619945 - RNA, 19 nt, Homo sapiens
  misc_RNA (1)...(19): siRNA sense strand
caauuaccuggccuucuuu

SEQ ID NO: 619946 - RNA, 19 nt, Homo sapiens
  misc_RNA (1)...(19): siRNA sense strand
uuaaccuguccuucaauua

SEQ ID NO: 619947 - RNA, 19 nt, Homo sapiens
  misc_RNA (1)...(19): siRNA sense strand
gaggaccuggccaaucuga

SEQ ID NO: 619948 - RNA, 19 nt, Homo sapiens
  misc_RNA (1)...(19): siRNA sense strand
ggcaacuguuauuacaaga

SEQ ID NO: 619949 - RNA, 19 nt, Homo sapiens
  misc_RNA (1)...(19): siRNA sense strand
uacaacagccagcccuuug

SEQ ID NO: 619950 - RNA, 19 nt, Homo sapiens
  misc_RNA (1)...(19): siRNA sense strand
gcacuuccccugccacaug

SEQ ID NO: 619951 - RNA, 19 nt, Homo sapiens
  misc_RNA (1)...(19): siRNA sense strand
gcugaaggcccugaccaau

SEQ ID NO: 619952 - RNA, 19 nt, Homo sapiens
  misc_RNA (1)...(19): siRNA sense strand
ugaucuggcuggacuuguc

SEQ ID NO: 619953 - RNA, 19 nt, Homo sapiens
  misc_RNA (1)...(19): siRNA sense strand
cuacaacagccagcccuuu

SEQ ID NO: 619954 - RNA, 19 nt, Homo sapiens
  misc_RNA (1)...(19): siRNA sense strand
ugcuagaccugucccacaa

SEQ ID NO: 619955 - RNA, 19 nt, Homo sapiens
  misc_RNA (1)...(19): siRNA sense strand
cugcgagagcucaaccuua

SEQ ID NO: 619956 - RNA, 19 nt, Homo sapiens
  misc_RNA (1)...(19): siRNA sense strand
ggcaaugcacugggccaua

SEQ ID NO: 619957 - RNA, 19 nt, Homo sapiens
  misc_RNA (1)...(19): siRNA sense strand
ccaccugagccgucuugaa

SEQ ID NO: 619958 - RNA, 19 nt, Homo sapiens
  misc_RNA (1)...(19): siRNA sense strand
aggaugcccugcccuacga

SEQ ID NO: 619959 - RNA, 19 nt, Homo sapiens
  misc_RNA (1)...(19): siRNA sense strand
cugaaggcccugaccaaug

SEQ ID NO: 619960 - RNA, 19 nt, Homo sapiens
  misc_RNA (1)...(19): siRNA sense strand
uuaccuggccuucuuuaag

SEQ ID NO: 619961 - RNA, 19 nt, Homo sapiens
  misc_RNA (1)...(19): siRNA sense strand
cugcagcacccucaacuuc

SEQ ID NO: 619962 - RNA, 19 nt, Homo sapiens
  misc_RNA (1)...(19): siRNA sense strand
ccuggaguaucugcuguug

SEQ ID NO: 619963 - RNA, 19 nt, Homo sapiens
  misc_RNA (1)...(19): siRNA sense strand
caaccaccacuucuauaac

SEQ ID NO: 619964 - RNA, 19 nt, Homo sapiens
  misc_RNA (1)...(19): siRNA sense strand
cgccaacgcccucaagaca

SEQ ID NO: 619965 - RNA, 19 nt, Homo sapiens
  misc_RNA (1)...(19): siRNA sense strand
gcaacagcaucagcuucgu

SEQ ID NO: 619966 - RNA, 19 nt, Homo sapiens
  misc_RNA (1)...(19): siRNA sense strand
gcacucauucacggagcua

SEQ ID NO: 619967 - RNA, 19 nt, Homo sapiens
  misc_RNA (1)...(19): siRNA sense strand
cugcccaaaucccucauau

SEQ ID NO: 619968 - RNA, 19 nt, Homo sapiens
  misc_RNA (1)...(19): siRNA sense strand
ccagaagacucgcucaauu

SEQ ID NO: 619969 - RNA, 19 nt, Homo sapiens
  misc_RNA (1)...(19): siRNA sense strand
gggcaacucucccgucaaa

SEQ ID NO: 619970 - RNA, 19 nt, Homo sapiens
  misc_RNA (1)...(19): siRNA sense strand
gaacugcugcgacaacaga

SEQ ID NO: 619971 - RNA, 19 nt, Homo sapiens
  misc_RNA (1)...(19): siRNA sense strand
guaacaacauggaucaaag

SEQ ID NO: 619972 - RNA, 19 nt, Homo sapiens
  misc_RNA (1)...(19): siRNA sense strand
caacagagacgcuacaacu

SEQ ID NO: 619973 - RNA, 19 nt, Homo sapiens
  misc_RNA (1)...(19): siRNA sense strand
gcucaauucccucauuauu

SEQ ID NO: 619974 - RNA, 19 nt, Homo sapiens
  misc_RNA (1)...(19): siRNA sense strand
gcagggguauugaugauaa

SEQ ID NO: 619975 - RNA, 19 nt, Homo sapiens
  misc_RNA (1)...(19): siRNA sense strand
ugacuucagagaacaauaa

SEQ ID NO: 619976 - RNA, 19 nt, Homo sapiens
  misc_RNA (1)...(19): siRNA sense strand
ucgcucaauucccucauua

SEQ ID NO: 619977 - RNA, 19 nt, Homo sapiens
  misc_RNA (1)...(19): siRNA sense strand
cauccaagguaacaacaug

SEQ ID NO: 619978 - RNA, 19 nt, Homo sapiens
  misc_RNA (1)...(19): siRNA sense strand
gcaacucucccgucaaaca

SEQ ID NO: 619979 - RNA, 19 nt, Homo sapiens
  misc_RNA (1)...(19): siRNA sense strand
cucaauucccucauuauua

SEQ ID NO: 619980 - RNA, 19 nt, Homo sapiens
  misc_RNA (1)...(19): siRNA sense strand
gaugguggacguuaaggaa

SEQ ID NO: 619981 - RNA, 19 nt, Homo sapiens
  misc_RNA (1)...(19): siRNA sense strand
gguaacaacauggaucaaa

SEQ ID NO: 619982 - RNA, 19 nt, Homo sapiens
  misc_RNA (1)...(19): siRNA sense strand
cagaagacucgcucaauuc

SEQ ID NO: 619983 - RNA, 19 nt, Homo sapiens
  misc_RNA (1)...(19): siRNA sense strand
gggaguacucgguauguga

SEQ ID NO: 619984 - RNA, 19 nt, Homo sapiens
  misc_RNA (1)...(19): siRNA sense strand
uguaucucauggaggauua

SEQ ID NO: 619985 - RNA, 19 nt, Homo sapiens
  misc_RNA (1)...(19): siRNA sense strand
aaaggaguuugccagaaga

SEQ ID NO: 619986 - RNA, 19 nt, Homo sapiens
  misc_RNA (1)...(19): siRNA sense strand
ugugauauuucucgcuuau

SEQ ID NO: 619987 - RNA, 19 nt, Homo sapiens
  misc_RNA (1)...(19): siRNA sense strand
aaaacaagcucuccaagca

SEQ ID NO: 619988 - RNA, 19 nt, Homo sapiens
  misc_RNA (1)...(19): siRNA sense strand
acucucccgucaaacaaua

SEQ ID NO: 619989 - RNA, 19 nt, Homo sapiens
  misc_RNA (1)...(19): siRNA sense strand
caacucucccgucaaacaa

SEQ ID NO: 619990 - RNA, 19 nt, Homo sapiens
  misc_RNA (1)...(19): siRNA sense strand
acagagacgcuacaacuca

SEQ ID NO: 619991 - RNA, 19 nt, Homo sapiens
  misc_RNA (1)...(19): siRNA sense strand
gugugugccuugucgagaa

SEQ ID NO: 619992 - RNA, 19 nt, Homo sapiens
  misc_RNA (1)...(19): siRNA sense strand
gaacaucacggcggaaacg

SEQ ID NO: 619993 - RNA, 19 nt, Homo sapiens
  misc_RNA (1)...(19): siRNA sense strand
gcugauccaggcagauauu

SEQ ID NO: 619994 - RNA, 19 nt, Homo sapiens
  misc_RNA (1)...(19): siRNA sense strand
ccaggcagauauuuugaaa

SEQ ID NO: 619995 - RNA, 19 nt, Homo sapiens
  misc_RNA (1)...(19): siRNA sense strand
gcagaugguggacguuaag

SEQ ID NO: 619996 - RNA, 19 nt, Homo sapiens
  misc_RNA (1)...(19): siRNA sense strand
gaugauaaacacuggaacu

SEQ ID NO: 619997 - RNA, 19 nt, Homo sapiens
  misc_RNA (1)...(19): siRNA sense strand
aagcugauccaggcagaua

SEQ ID NO: 619998 - RNA, 19 nt, Homo sapiens
  misc_RNA (1)...(19): siRNA sense strand
gcaaaacaucccaaaccua

SEQ ID NO: 619999 - RNA, 19 nt, Homo sapiens
  misc_RNA (1)...(19): siRNA sense strand
aagcagaugguggacguua

SEQ ID NO: 620000 - RNA, 19 nt, Homo sapiens
  misc_RNA (1)...(19): siRNA sense strand
ccagagcacccugcccaaa

SEQ ID NO: 620001 - RNA, 19 nt, Homo sapiens
  misc_RNA (1)...(19): siRNA sense strand
cuggaacucucagugcaaa

SEQ ID NO: 620002 - RNA, 19 nt, Homo sapiens
  misc_RNA (1)...(19): siRNA sense strand
uaacaacauggaucaaagg

SEQ ID NO: 620003 - RNA, 19 nt, Homo sapiens
  misc_RNA (1)...(19): siRNA sense strand
acgcggagcauaagaguca

SEQ ID NO: 620004 - RNA, 19 nt, Homo sapiens
  misc_RNA (1)...(19): siRNA sense strand
ugaaacgcgauguaaggaa

SEQ ID NO: 620005 - RNA, 19 nt, Homo sapiens
  misc_RNA (1)...(19): siRNA sense strand
uaugaaacgcgauguaagg

SEQ ID NO: 620006 - RNA, 19 nt, Homo sapiens
  misc_RNA (1)...(19): siRNA sense strand
gauccaggcagauauuuug

SEQ ID NO: 620007 - RNA, 19 nt, Homo sapiens
  misc_RNA (1)...(19): siRNA sense strand
cuucagagaacaauaaacu

SEQ ID NO: 620008 - RNA, 19 nt, Homo sapiens
  misc_RNA (1)...(19): siRNA sense strand
ggguauugaugauaaacac

SEQ ID NO: 620009 - RNA, 19 nt, Homo sapiens
  misc_RNA (1)...(19): siRNA sense strand
gccagaagacucgcucaau

SEQ ID NO: 620010 - RNA, 19 nt, Homo sapiens
  misc_RNA (1)...(19): siRNA sense strand
cagaacaucacggcggaaa

SEQ ID NO: 620011 - RNA, 19 nt, Homo sapiens
  misc_RNA (1)...(19): siRNA sense strand
ugugugccuugucgagaaa

SEQ ID NO: 620012 - RNA, 19 nt, Homo sapiens
  misc_RNA (1)...(19): siRNA sense strand
gaucaaaacgggcaacucu

SEQ ID NO: 620013 - RNA, 19 nt, Homo sapiens
  misc_RNA (1)...(19): siRNA sense strand
caucggccaucgacauucg

SEQ ID NO: 620014 - RNA, 19 nt, Homo sapiens
  misc_RNA (1)...(19): siRNA sense strand
uuuaugaaacgcgauguaa

SEQ ID NO: 620015 - RNA, 19 nt, Homo sapiens
  misc_RNA (1)...(19): siRNA sense strand
gacuucagagaacaauaaa

SEQ ID NO: 620016 - RNA, 19 nt, Homo sapiens
  misc_RNA (1)...(19): siRNA sense strand
caaagugccuaugaaauua

SEQ ID NO: 620017 - RNA, 19 nt, Homo sapiens
  misc_RNA (1)...(19): siRNA sense strand
gcagaaacacuuuggaaua

SEQ ID NO: 620018 - RNA, 19 nt, Homo sapiens
  misc_RNA (1)...(19): siRNA sense strand
ggauuuggcugaugaacuu

SEQ ID NO: 620019 - RNA, 19 nt, Homo sapiens
  misc_RNA (1)...(19): siRNA sense strand
gaaacacuuuggaauauuc

SEQ ID NO: 620020 - RNA, 19 nt, Homo sapiens
  misc_RNA (1)...(19): siRNA sense strand
ggaagugguuguaaucuag

SEQ ID NO: 620021 - RNA, 19 nt, Homo sapiens
  misc_RNA (1)...(19): siRNA sense strand
guuaagggauuauauggaa

SEQ ID NO: 620022 - RNA, 19 nt, Homo sapiens
  misc_RNA (1)...(19): siRNA sense strand
cagaaacacuuuggaauau

SEQ ID NO: 620023 - RNA, 19 nt, Homo sapiens
  misc_RNA (1)...(19): siRNA sense strand
ugaagacucuggacccuaa

SEQ ID NO: 620024 - RNA, 19 nt, Homo sapiens
  misc_RNA (1)...(19): siRNA sense strand
ggaauggugucucagaugu

SEQ ID NO: 620025 - RNA, 19 nt, Homo sapiens
  misc_RNA (1)...(19): siRNA sense strand
ugacauauauagucuggaa

SEQ ID NO: 620026 - RNA, 19 nt, Homo sapiens
  misc_RNA (1)...(19): siRNA sense strand
ucaaagugccuaugaaauu

SEQ ID NO: 620027 - RNA, 19 nt, Homo sapiens
  misc_RNA (1)...(19): siRNA sense strand
caagaagagugcagaaaca

SEQ ID NO: 620028 - RNA, 19 nt, Homo sapiens
  misc_RNA (1)...(19): siRNA sense strand
gagaaaugauggaucuuca

SEQ ID NO: 620029 - RNA, 19 nt, Homo sapiens
  misc_RNA (1)...(19): siRNA sense strand
ugaaggauuuggcugauga

SEQ ID NO: 620030 - RNA, 19 nt, Homo sapiens
  misc_RNA (1)...(19): siRNA sense strand
gaugaaaacucccagugua

SEQ ID NO: 620031 - RNA, 19 nt, Homo sapiens
  misc_RNA (1)...(19): siRNA sense strand
gaacuugcccuuguugaug

SEQ ID NO: 620032 - RNA, 19 nt, Homo sapiens
  misc_RNA (1)...(19): siRNA sense strand
gaacggauucagauaagga

SEQ ID NO: 620033 - RNA, 19 nt, Homo sapiens
  misc_RNA (1)...(19): siRNA sense strand
caguaucccuugugucuug

SEQ ID NO: 620034 - RNA, 19 nt, Homo sapiens
  misc_RNA (1)...(19): siRNA sense strand
guaucuuacugaaggauuu

SEQ ID NO: 620035 - RNA, 19 nt, Homo sapiens
  misc_RNA (1)...(19): siRNA sense strand
ugucucagauguugugaaa

SEQ ID NO: 620036 - RNA, 19 nt, Homo sapiens
  misc_RNA (1)...(19): siRNA sense strand
gaacauggugauucuagug

SEQ ID NO: 620037 - RNA, 19 nt, Homo sapiens
  misc_RNA (1)...(19): siRNA sense strand
aggcauggcuugugcuauu

SEQ ID NO: 620038 - RNA, 19 nt, Homo sapiens
  misc_RNA (1)...(19): siRNA sense strand
gcuauuggacugucuguga

SEQ ID NO: 620039 - RNA, 19 nt, Homo sapiens
  misc_RNA (1)...(19): siRNA sense strand
ggcauggcuugugcuauua

SEQ ID NO: 620040 - RNA, 19 nt, Homo sapiens
  misc_RNA (1)...(19): siRNA sense strand
caacguaauguggcuauaa

SEQ ID NO: 620041 - RNA, 19 nt, Homo sapiens
  misc_RNA (1)...(19): siRNA sense strand
guaauguggcuauaaugaa

SEQ ID NO: 620042 - RNA, 19 nt, Homo sapiens
  misc_RNA (1)...(19): siRNA sense strand
caccaugguuaagggauua

SEQ ID NO: 620043 - RNA, 19 nt, Homo sapiens
  misc_RNA (1)...(19): siRNA sense strand
gacucuggacccuaaauua

SEQ ID NO: 620044 - RNA, 19 nt, Homo sapiens
  misc_RNA (1)...(19): siRNA sense strand
uggaagugguuguaaucua

SEQ ID NO: 620045 - RNA, 19 nt, Homo sapiens
  misc_RNA (1)...(19): siRNA sense strand
ugccaugguuggauuauug

SEQ ID NO: 620046 - RNA, 19 nt, Homo sapiens
  misc_RNA (1)...(19): siRNA sense strand
caaagauuacuucuggaaa

SEQ ID NO: 620047 - RNA, 19 nt, Homo sapiens
  misc_RNA (1)...(19): siRNA sense strand
gaagcuaauugaggaugau

SEQ ID NO: 620048 - RNA, 19 nt, Homo sapiens
  misc_RNA (1)...(19): siRNA sense strand
ccaccaugguuaagggauu

SEQ ID NO: 620049 - RNA, 19 nt, Homo sapiens
  misc_RNA (1)...(19): siRNA sense strand
gaauguugcugguguugcu

SEQ ID NO: 620050 - RNA, 19 nt, Homo sapiens
  misc_RNA (1)...(19): siRNA sense strand
guaauuggaagugguugua

SEQ ID NO: 620051 - RNA, 19 nt, Homo sapiens
  misc_RNA (1)...(19): siRNA sense strand
ggagaaaugauggaucuuc

SEQ ID NO: 620052 - RNA, 19 nt, Homo sapiens
  misc_RNA (1)...(19): siRNA sense strand
cccacaagcugccaugguu

SEQ ID NO: 620053 - RNA, 19 nt, Homo sapiens
  misc_RNA (1)...(19): siRNA sense strand
guacuucaaagauuacuuc

SEQ ID NO: 620054 - RNA, 19 nt, Homo sapiens
  misc_RNA (1)...(19): siRNA sense strand
aaacugaagggagaaauga

SEQ ID NO: 620055 - RNA, 19 nt, Homo sapiens
  misc_RNA (1)...(19): siRNA sense strand
uaggaacggauucagauaa

SEQ ID NO: 620056 - RNA, 19 nt, Homo sapiens
  misc_RNA (1)...(19): siRNA sense strand
ucaaagauuacuucuggaa

SEQ ID NO: 620057 - RNA, 19 nt, Homo sapiens
  misc_RNA (1)...(19): siRNA sense strand
gcauggcagucuuuucuuu

SEQ ID NO: 620058 - RNA, 19 nt, Homo sapiens
  misc_RNA (1)...(19): siRNA sense strand
aggagcagcuaauugagaa

SEQ ID NO: 620059 - RNA, 19 nt, Homo sapiens
  misc_RNA (1)...(19): siRNA sense strand
guauaccucuugggcuauu

SEQ ID NO: 620060 - RNA, 19 nt, Homo sapiens
  misc_RNA (1)...(19): siRNA sense strand
cguaauguggcuauaauga

SEQ ID NO: 620061 - RNA, 19 nt, Homo sapiens
  misc_RNA (1)...(19): siRNA sense strand
cugaugaacuugcccuugu

SEQ ID NO: 620062 - RNA, 19 nt, Homo sapiens
  misc_RNA (1)...(19): siRNA sense strand
ggagagugcacccaguuuc

SEQ ID NO: 620063 - RNA, 19 nt, Homo sapiens
  misc_RNA (1)...(19): siRNA sense strand
ccuaugaaauuaucaagcu

SEQ ID NO: 620064 - RNA, 19 nt, Homo sapiens
  misc_RNA (1)...(19): siRNA sense strand
ccaguuuccaccaugguua

SEQ ID NO: 620065 - RNA, 19 nt, Homo sapiens
  misc_RNA (1)...(19): siRNA sense strand
gcuaauugaggaugaugaa

SEQ ID NO: 620066 - RNA, 19 nt, Homo sapiens
  misc_RNA (1)...(19): siRNA sense strand
gcggaauggugucucagau

SEQ ID NO: 620067 - RNA, 19 nt, Homo sapiens
  misc_RNA (1)...(19): siRNA sense strand
caaacugaagggagaaaug

SEQ ID NO: 620068 - RNA, 19 nt, Homo sapiens
  misc_RNA (1)...(19): siRNA sense strand
accuguaacucguguaauu

SEQ ID NO: 620069 - RNA, 19 nt, Homo sapiens
  misc_RNA (1)...(19): siRNA sense strand
aaucauuccugccauaguc

SEQ ID NO: 620070 - RNA, 19 nt, Homo sapiens
  misc_RNA (1)...(19): siRNA sense strand
gaaaacucccaguguaaaa

SEQ ID NO: 620071 - RNA, 19 nt, Homo sapiens
  misc_RNA (1)...(19): siRNA sense strand
agaagcuaauugaggauga

SEQ ID NO: 620072 - RNA, 19 nt, Homo sapiens
  misc_RNA (1)...(19): siRNA sense strand
gugcagaaacacuuuggaa

SEQ ID NO: 620073 - RNA, 19 nt, Homo sapiens
  misc_RNA (1)...(19): siRNA sense strand
ccguuuccguuaccuaauu

SEQ ID NO: 620074 - RNA, 19 nt, Homo sapiens
  misc_RNA (1)...(19): siRNA sense strand
gaagugguuguaaucuaga

SEQ ID NO: 620075 - RNA, 19 nt, Homo sapiens
  misc_RNA (1)...(19): siRNA sense strand
ugaugaacuugcccuuguu

SEQ ID NO: 620076 - RNA, 19 nt, Homo sapiens
  misc_RNA (1)...(19): siRNA sense strand
ggugaauguugcugguguu

SEQ ID NO: 620077 - RNA, 19 nt, Homo sapiens
  misc_RNA (1)...(19): siRNA sense strand
caguggauauuuugacaua

SEQ ID NO: 620078 - RNA, 19 nt, Homo sapiens
  misc_RNA (1)...(19): siRNA sense strand
ccaacguaauguggcuaua

SEQ ID NO: 620079 - RNA, 19 nt, Homo sapiens
  misc_RNA (1)...(19): siRNA sense strand
aagcugccaugguuggauu

SEQ ID NO: 620080 - RNA, 19 nt, Homo sapiens
  misc_RNA (1)...(19): siRNA sense strand
gaugaacuugcccuuguug

SEQ ID NO: 620081 - RNA, 19 nt, Homo sapiens
  misc_RNA (1)...(19): siRNA sense strand
aauggugucucagauguug

SEQ ID NO: 620082 - RNA, 19 nt, Homo sapiens
  misc_RNA (1)...(19): siRNA sense strand
gaauggugucucagauguu

SEQ ID NO: 620083 - RNA, 19 nt, Homo sapiens
  misc_RNA (1)...(19): siRNA sense strand
ucuagacucugcccguuuc

SEQ ID NO: 620084 - RNA, 19 nt, Homo sapiens
  misc_RNA (1)...(19): siRNA sense strand
cauuauaguccugauugua

SEQ ID NO: 620085 - RNA, 19 nt, Homo sapiens
  misc_RNA (1)...(19): siRNA sense strand
gaagggagaaaugauggau

SEQ ID NO: 620086 - RNA, 19 nt, Homo sapiens
  misc_RNA (1)...(19): siRNA sense strand
cagauaaggaacacuggaa

SEQ ID NO: 620087 - RNA, 19 nt, Homo sapiens
  misc_RNA (1)...(19): siRNA sense strand
uaaauuaggaacggauuca

SEQ ID NO: 620088 - RNA, 19 nt, Homo sapiens
  misc_RNA (1)...(19): siRNA sense strand
aaugauggaucuucagcau

SEQ ID NO: 620089 - RNA, 19 nt, Homo sapiens
  misc_RNA (1)...(19): siRNA sense strand
ggacaaacugaagggagaa

SEQ ID NO: 620090 - RNA, 19 nt, Homo sapiens
  misc_RNA (1)...(19): siRNA sense strand
ucucagauguugugaaaau

SEQ ID NO: 620091 - RNA, 19 nt, Homo sapiens
  misc_RNA (1)...(19): siRNA sense strand
guaacucguguaauuggaa

SEQ ID NO: 620092 - RNA, 19 nt, Homo sapiens
  misc_RNA (1)...(19): siRNA sense strand
aacguaauguggcuauaau

SEQ ID NO: 620093 - RNA, 19 nt, Homo sapiens
  misc_RNA (1)...(19): siRNA sense strand
ccauuauaguccugauugu

SEQ ID NO: 620094 - RNA, 19 nt, Homo sapiens
  misc_RNA (1)...(19): siRNA sense strand
gguaggauccauuuugaaa

SEQ ID NO: 620095 - RNA, 19 nt, Homo sapiens
  misc_RNA (1)...(19): siRNA sense strand
ggaacggauucagauaagg

SEQ ID NO: 620096 - RNA, 19 nt, Homo sapiens
  misc_RNA (1)...(19): siRNA sense strand
gcccguuuccguuaccuaa

SEQ ID NO: 620097 - RNA, 19 nt, Homo sapiens
  misc_RNA (1)...(19): siRNA sense strand
ggcagucuuuucuuuagua

SEQ ID NO: 620098 - RNA, 19 nt, Homo sapiens
  misc_RNA (1)...(19): siRNA sense strand
ucaagaagagugcagaaac

SEQ ID NO: 620099 - RNA, 19 nt, Homo sapiens
  misc_RNA (1)...(19): siRNA sense strand
ccuuguugauguugcauug

SEQ ID NO: 620100 - RNA, 19 nt, Homo sapiens
  misc_RNA (1)...(19): siRNA sense strand
ugugauggaucugguagga

SEQ ID NO: 620101 - RNA, 19 nt, Homo sapiens
  misc_RNA (1)...(19): siRNA sense strand
uuccugccauaguccauua

SEQ ID NO: 620102 - RNA, 19 nt, Homo sapiens
  misc_RNA (1)...(19): siRNA sense strand
gaaggauuuggcugaugaa

SEQ ID NO: 620103 - RNA, 19 nt, Homo sapiens
  misc_RNA (1)...(19): siRNA sense strand
uuaggaacggauucagaua

SEQ ID NO: 620104 - RNA, 19 nt, Homo sapiens
  misc_RNA (1)...(19): siRNA sense strand
guaggcauggcuugugcua

SEQ ID NO: 620105 - RNA, 19 nt, Homo sapiens
  misc_RNA (1)...(19): siRNA sense strand
acauauauagucuggaaga

SEQ ID NO: 620106 - RNA, 19 nt, Homo sapiens
  misc_RNA (1)...(19): siRNA sense strand
agggagaaaugauggaucu

SEQ ID NO: 620107 - RNA, 19 nt, Homo sapiens
  misc_RNA (1)...(19): siRNA sense strand
gcccugguccaacguaaug

SEQ ID NO: 620108 - RNA, 19 nt, Homo sapiens
  misc_RNA (1)...(19): siRNA sense strand
gauguugcauuggacaaac

SEQ ID NO: 620109 - RNA, 19 nt, Homo sapiens
  misc_RNA (1)...(19): siRNA sense strand
cauauauagucuggaagau

SEQ ID NO: 620110 - RNA, 19 nt, Homo sapiens
  misc_RNA (1)...(19): siRNA sense strand
gucaaggagcagcuaauug

SEQ ID NO: 620111 - RNA, 19 nt, Homo sapiens
  misc_RNA (1)...(19): siRNA sense strand
gguuaagggauuauaugga

SEQ ID NO: 620112 - RNA, 19 nt, Homo sapiens
  misc_RNA (1)...(19): siRNA sense strand
cuauuggacugucugugau

SEQ ID NO: 620113 - RNA, 19 nt, Homo sapiens
  misc_RNA (1)...(19): siRNA sense strand
aggaacggauucagauaag

SEQ ID NO: 620114 - RNA, 19 nt, Homo sapiens
  misc_RNA (1)...(19): siRNA sense strand
acucugcccguuuccguua

SEQ ID NO: 620115 - RNA, 19 nt, Homo sapiens
  misc_RNA (1)...(19): siRNA sense strand
gauaaggaacacuggaaaa

SEQ ID NO: 620116 - RNA, 19 nt, Homo sapiens
  misc_RNA (1)...(19): siRNA sense strand
caaagugccuaugaaauua

SEQ ID NO: 620117 - RNA, 19 nt, Homo sapiens
  misc_RNA (1)...(19): siRNA sense strand
gcagaaacacuuuggaaua

SEQ ID NO: 620118 - RNA, 19 nt, Homo sapiens
  misc_RNA (1)...(19): siRNA sense strand
ggauuuggcugaugaacuu

SEQ ID NO: 620119 - RNA, 19 nt, Homo sapiens
  misc_RNA (1)...(19): siRNA sense strand
gaaacacuuuggaauauuc

SEQ ID NO: 620120 - RNA, 19 nt, Homo sapiens
  misc_RNA (1)...(19): siRNA sense strand
ggaagugguuguaaucuag

SEQ ID NO: 620121 - RNA, 19 nt, Homo sapiens
  misc_RNA (1)...(19): siRNA sense strand
guuaagggauuauauggaa

SEQ ID NO: 620122 - RNA, 19 nt, Homo sapiens
  misc_RNA (1)...(19): siRNA sense strand
cagaaacacuuuggaauau

SEQ ID NO: 620123 - RNA, 19 nt, Homo sapiens
  misc_RNA (1)...(19): siRNA sense strand
ugaagacucuggacccuaa

SEQ ID NO: 620124 - RNA, 19 nt, Homo sapiens
  misc_RNA (1)...(19): siRNA sense strand
ggaauggugucucagaugu

SEQ ID NO: 620125 - RNA, 19 nt, Homo sapiens
  misc_RNA (1)...(19): siRNA sense strand
ugacauauauagucuggaa

SEQ ID NO: 620126 - RNA, 19 nt, Homo sapiens
  misc_RNA (1)...(19): siRNA sense strand
ucaaagugccuaugaaauu

SEQ ID NO: 620127 - RNA, 19 nt, Homo sapiens
  misc_RNA (1)...(19): siRNA sense strand
caagaagagugcagaaaca

SEQ ID NO: 620128 - RNA, 19 nt, Homo sapiens
  misc_RNA (1)...(19): siRNA sense strand
gagaaaugauggaucuuca

SEQ ID NO: 620129 - RNA, 19 nt, Homo sapiens
  misc_RNA (1)...(19): siRNA sense strand
ugaaggauuuggcugauga

SEQ ID NO: 620130 - RNA, 19 nt, Homo sapiens
  misc_RNA (1)...(19): siRNA sense strand
gaugaaaacucccagugua

SEQ ID NO: 620131 - RNA, 19 nt, Homo sapiens
  misc_RNA (1)...(19): siRNA sense strand
gaacuugcccuuguugaug

SEQ ID NO: 620132 - RNA, 19 nt, Homo sapiens
  misc_RNA (1)...(19): siRNA sense strand
gaacggauucagauaagga

SEQ ID NO: 620133 - RNA, 19 nt, Homo sapiens
  misc_RNA (1)...(19): siRNA sense strand
caguaucccuugugucuug

SEQ ID NO: 620134 - RNA, 19 nt, Homo sapiens
  misc_RNA (1)...(19): siRNA sense strand
guaucuuacugaaggauuu

SEQ ID NO: 620135 - RNA, 19 nt, Homo sapiens
  misc_RNA (1)...(19): siRNA sense strand
ugucucagauguugugaaa

SEQ ID NO: 620136 - RNA, 19 nt, Homo sapiens
  misc_RNA (1)...(19): siRNA sense strand
gaacauggugauucuagug

SEQ ID NO: 620137 - RNA, 19 nt, Homo sapiens
  misc_RNA (1)...(19): siRNA sense strand
aggcauggcuugugcuauu

SEQ ID NO: 620138 - RNA, 19 nt, Homo sapiens
  misc_RNA (1)...(19): siRNA sense strand
gcuauuggacugucuguga

SEQ ID NO: 620139 - RNA, 19 nt, Homo sapiens
  misc_RNA (1)...(19): siRNA sense strand
ggcauggcuugugcuauua

SEQ ID NO: 620140 - RNA, 19 nt, Homo sapiens
  misc_RNA (1)...(19): siRNA sense strand
caacguaauguggcuauaa

SEQ ID NO: 620141 - RNA, 19 nt, Homo sapiens
  misc_RNA (1)...(19): siRNA sense strand
guaauguggcuauaaugaa

SEQ ID NO: 620142 - RNA, 19 nt, Homo sapiens
  misc_RNA (1)...(19): siRNA sense strand
caccaugguuaagggauua

SEQ ID NO: 620143 - RNA, 19 nt, Homo sapiens
  misc_RNA (1)...(19): siRNA sense strand
gacucuggacccuaaauua

SEQ ID NO: 620144 - RNA, 19 nt, Homo sapiens
  misc_RNA (1)...(19): siRNA sense strand
uggaagugguuguaaucua

SEQ ID NO: 620145 - RNA, 19 nt, Homo sapiens
  misc_RNA (1)...(19): siRNA sense strand
ugccaugguuggauuauug

SEQ ID NO: 620146 - RNA, 19 nt, Homo sapiens
  misc_RNA (1)...(19): siRNA sense strand
caaagauuacuucuggaaa

SEQ ID NO: 620147 - RNA, 19 nt, Homo sapiens
  misc_RNA (1)...(19): siRNA sense strand
gaagcuaauugaggaugau

SEQ ID NO: 620148 - RNA, 19 nt, Homo sapiens
  misc_RNA (1)...(19): siRNA sense strand
ccaccaugguuaagggauu

SEQ ID NO: 620149 - RNA, 19 nt, Homo sapiens
  misc_RNA (1)...(19): siRNA sense strand
gaauguugcugguguugcu

SEQ ID NO: 620150 - RNA, 19 nt, Homo sapiens
  misc_RNA (1)...(19): siRNA sense strand
guaauuggaagugguugua

SEQ ID NO: 620151 - RNA, 19 nt, Homo sapiens
  misc_RNA (1)...(19): siRNA sense strand
ggagaaaugauggaucuuc

SEQ ID NO: 620152 - RNA, 19 nt, Homo sapiens
  misc_RNA (1)...(19): siRNA sense strand
cccacaagcugccaugguu

SEQ ID NO: 620153 - RNA, 19 nt, Homo sapiens
  misc_RNA (1)...(19): siRNA sense strand
guacuucaaagauuacuuc

SEQ ID NO: 620154 - RNA, 19 nt, Homo sapiens
  misc_RNA (1)...(19): siRNA sense strand
aaacugaagggagaaauga

SEQ ID NO: 620155 - RNA, 19 nt, Homo sapiens
  misc_RNA (1)...(19): siRNA sense strand
uaggaacggauucagauaa

SEQ ID NO: 620156 - RNA, 19 nt, Homo sapiens
  misc_RNA (1)...(19): siRNA sense strand
ucaaagauuacuucuggaa

SEQ ID NO: 620157 - RNA, 19 nt, Homo sapiens
  misc_RNA (1)...(19): siRNA sense strand
gcauggcagucuuuucuuu

SEQ ID NO: 620158 - RNA, 19 nt, Homo sapiens
  misc_RNA (1)...(19): siRNA sense strand
aggagcagcuaauugagaa

SEQ ID NO: 620159 - RNA, 19 nt, Homo sapiens
  misc_RNA (1)...(19): siRNA sense strand
guauaccucuugggcuauu

SEQ ID NO: 620160 - RNA, 19 nt, Homo sapiens
  misc_RNA (1)...(19): siRNA sense strand
cguaauguggcuauaauga

SEQ ID NO: 620161 - RNA, 19 nt, Homo sapiens
  misc_RNA (1)...(19): siRNA sense strand
cugaugaacuugcccuugu

SEQ ID NO: 620162 - RNA, 19 nt, Homo sapiens
  misc_RNA (1)...(19): siRNA sense strand
ggagagugcacccaguuuc

SEQ ID NO: 620163 - RNA, 19 nt, Homo sapiens
  misc_RNA (1)...(19): siRNA sense strand
ccuaugaaauuaucaagcu

SEQ ID NO: 620164 - RNA, 19 nt, Homo sapiens
  misc_RNA (1)...(19): siRNA sense strand
ccaguuuccaccaugguua

SEQ ID NO: 620165 - RNA, 19 nt, Homo sapiens
  misc_RNA (1)...(19): siRNA sense strand
gcuaauugaggaugaugaa

SEQ ID NO: 620166 - RNA, 19 nt, Homo sapiens
  misc_RNA (1)...(19): siRNA sense strand
gcggaauggugucucagau

SEQ ID NO: 620167 - RNA, 19 nt, Homo sapiens
  misc_RNA (1)...(19): siRNA sense strand
caaacugaagggagaaaug

SEQ ID NO: 620168 - RNA, 19 nt, Homo sapiens
  misc_RNA (1)...(19): siRNA sense strand
accuguaacucguguaauu

SEQ ID NO: 620169 - RNA, 19 nt, Homo sapiens
  misc_RNA (1)...(19): siRNA sense strand
aaucauuccugccauaguc

SEQ ID NO: 620170 - RNA, 19 nt, Homo sapiens
  misc_RNA (1)...(19): siRNA sense strand
gaaaacucccaguguaaaa

SEQ ID NO: 620171 - RNA, 19 nt, Homo sapiens
  misc_RNA (1)...(19): siRNA sense strand
agaagcuaauugaggauga

SEQ ID NO: 620172 - RNA, 19 nt, Homo sapiens
  misc_RNA (1)...(19): siRNA sense strand
gugcagaaacacuuuggaa

SEQ ID NO: 620173 - RNA, 19 nt, Homo sapiens
  misc_RNA (1)...(19): siRNA sense strand
ccguuuccguuaccuaauu

SEQ ID NO: 620174 - RNA, 19 nt, Homo sapiens
  misc_RNA (1)...(19): siRNA sense strand
gaagugguuguaaucuaga

SEQ ID NO: 620175 - RNA, 19 nt, Homo sapiens
  misc_RNA (1)...(19): siRNA sense strand
ugaugaacuugcccuuguu

SEQ ID NO: 620176 - RNA, 19 nt, Homo sapiens
  misc_RNA (1)...(19): siRNA sense strand
ggugaauguugcugguguu

SEQ ID NO: 620177 - RNA, 19 nt, Homo sapiens
  misc_RNA (1)...(19): siRNA sense strand
caguggauauuuugacaua

SEQ ID NO: 620178 - RNA, 19 nt, Homo sapiens
  misc_RNA (1)...(19): siRNA sense strand
ccaacguaauguggcuaua

SEQ ID NO: 620179 - RNA, 19 nt, Homo sapiens
  misc_RNA (1)...(19): siRNA sense strand
aagcugccaugguuggauu

SEQ ID NO: 620180 - RNA, 19 nt, Homo sapiens
  misc_RNA (1)...(19): siRNA sense strand
gaugaacuugcccuuguug

SEQ ID NO: 620181 - RNA, 19 nt, Homo sapiens
  misc_RNA (1)...(19): siRNA sense strand
aauggugucucagauguug

SEQ ID NO: 620182 - RNA, 19 nt, Homo sapiens
  misc_RNA (1)...(19): siRNA sense strand
gaauggugucucagauguu

SEQ ID NO: 620183 - RNA, 19 nt, Homo sapiens
  misc_RNA (1)...(19): siRNA sense strand
ucuagacucugcccguuuc

SEQ ID NO: 620184 - RNA, 19 nt, Homo sapiens
  misc_RNA (1)...(19): siRNA sense strand
cauuauaguccugauugua

SEQ ID NO: 620185 - RNA, 19 nt, Homo sapiens
  misc_RNA (1)...(19): siRNA sense strand
gaagggagaaaugauggau

SEQ ID NO: 620186 - RNA, 19 nt, Homo sapiens
  misc_RNA (1)...(19): siRNA sense strand
cagauaaggaacacuggaa

SEQ ID NO: 620187 - RNA, 19 nt, Homo sapiens
  misc_RNA (1)...(19): siRNA sense strand
uaaauuaggaacggauuca

SEQ ID NO: 620188 - RNA, 19 nt, Homo sapiens
  misc_RNA (1)...(19): siRNA sense strand
aaugauggaucuucagcau

SEQ ID NO: 620189 - RNA, 19 nt, Homo sapiens
  misc_RNA (1)...(19): siRNA sense strand
ggacaaacugaagggagaa

SEQ ID NO: 620190 - RNA, 19 nt, Homo sapiens
  misc_RNA (1)...(19): siRNA sense strand
ucucagauguugugaaaau

SEQ ID NO: 620191 - RNA, 19 nt, Homo sapiens
  misc_RNA (1)...(19): siRNA sense strand
guaacucguguaauuggaa

SEQ ID NO: 620192 - RNA, 19 nt, Homo sapiens
  misc_RNA (1)...(19): siRNA sense strand
aacguaauguggcuauaau

SEQ ID NO: 620193 - RNA, 19 nt, Homo sapiens
  misc_RNA (1)...(19): siRNA sense strand
ccauuauaguccugauugu

SEQ ID NO: 620194 - RNA, 19 nt, Homo sapiens
  misc_RNA (1)...(19): siRNA sense strand
gguaggauccauuuugaaa

SEQ ID NO: 620195 - RNA, 19 nt, Homo sapiens
  misc_RNA (1)...(19): siRNA sense strand
ggaacggauucagauaagg

SEQ ID NO: 620196 - RNA, 19 nt, Homo sapiens
  misc_RNA (1)...(19): siRNA sense strand
gcccguuuccguuaccuaa

SEQ ID NO: 620197 - RNA, 19 nt, Homo sapiens
  misc_RNA (1)...(19): siRNA sense strand
ggcagucuuuucuuuagua

SEQ ID NO: 620198 - RNA, 19 nt, Homo sapiens
  misc_RNA (1)...(19): siRNA sense strand
ucaagaagagugcagaaac

SEQ ID NO: 620199 - RNA, 19 nt, Homo sapiens
  misc_RNA (1)...(19): siRNA sense strand
ccuuguugauguugcauug

SEQ ID NO: 620200 - RNA, 19 nt, Homo sapiens
  misc_RNA (1)...(19): siRNA sense strand
ugugauggaucugguagga

SEQ ID NO: 620201 - RNA, 19 nt, Homo sapiens
  misc_RNA (1)...(19): siRNA sense strand
uuccugccauaguccauua

SEQ ID NO: 620202 - RNA, 19 nt, Homo sapiens
  misc_RNA (1)...(19): siRNA sense strand
gaaggauuuggcugaugaa

SEQ ID NO: 620203 - RNA, 19 nt, Homo sapiens
  misc_RNA (1)...(19): siRNA sense strand
uuaggaacggauucagaua

SEQ ID NO: 620204 - RNA, 19 nt, Homo sapiens
  misc_RNA (1)...(19): siRNA sense strand
guaggcauggcuugugcua

SEQ ID NO: 620205 - RNA, 19 nt, Homo sapiens
  misc_RNA (1)...(19): siRNA sense strand
acauauauagucuggaaga

SEQ ID NO: 620206 - RNA, 19 nt, Homo sapiens
  misc_RNA (1)...(19): siRNA sense strand
agggagaaaugauggaucu

SEQ ID NO: 620207 - RNA, 19 nt, Homo sapiens
  misc_RNA (1)...(19): siRNA sense strand
gcccugguccaacguaaug

SEQ ID NO: 620208 - RNA, 19 nt, Homo sapiens
  misc_RNA (1)...(19): siRNA sense strand
gauguugcauuggacaaac

SEQ ID NO: 620209 - RNA, 19 nt, Homo sapiens
  misc_RNA (1)...(19): siRNA sense strand
cauauauagucuggaagau

SEQ ID NO: 620210 - RNA, 19 nt, Homo sapiens
  misc_RNA (1)...(19): siRNA sense strand
gucaaggagcagcuaauug

SEQ ID NO: 620211 - RNA, 19 nt, Homo sapiens
  misc_RNA (1)...(19): siRNA sense strand
gguuaagggauuauaugga

SEQ ID NO: 620212 - RNA, 19 nt, Homo sapiens
  misc_RNA (1)...(19): siRNA sense strand
cuauuggacugucugugau

SEQ ID NO: 620213 - RNA, 19 nt, Homo sapiens
  misc_RNA (1)...(19): siRNA sense strand
aggaacggauucagauaag

SEQ ID NO: 620214 - RNA, 19 nt, Homo sapiens
  misc_RNA (1)...(19): siRNA sense strand
acucugcccguuuccguua

SEQ ID NO: 620215 - RNA, 19 nt, Homo sapiens
  misc_RNA (1)...(19): siRNA sense strand
gauaaggaacacuggaaaa

SEQ ID NO: 620216 - RNA, 19 nt, Homo sapiens
  misc_RNA (1)...(19): siRNA sense strand
ccaucaagcucuacuguaa

SEQ ID NO: 620217 - RNA, 19 nt, Homo sapiens
  misc_RNA (1)...(19): siRNA sense strand
acuaugagcugcaguacua

SEQ ID NO: 620218 - RNA, 19 nt, Homo sapiens
  misc_RNA (1)...(19): siRNA sense strand
guacaacgccacagccaua

SEQ ID NO: 620219 - RNA, 19 nt, Homo sapiens
  misc_RNA (1)...(19): siRNA sense strand
gagcgaagccuccaucaug

SEQ ID NO: 620220 - RNA, 19 nt, Homo sapiens
  misc_RNA (1)...(19): siRNA sense strand
caaccaggauguaaucaau

SEQ ID NO: 620221 - RNA, 19 nt, Homo sapiens
  misc_RNA (1)...(19): siRNA sense strand
gcaugaagaucuacaucga

SEQ ID NO: 620222 - RNA, 19 nt, Homo sapiens
  misc_RNA (1)...(19): siRNA sense strand
cggacaagcugcaacacua

SEQ ID NO: 620223 - RNA, 19 nt, Homo sapiens
  misc_RNA (1)...(19): siRNA sense strand
gaagguggauaccauugca

SEQ ID NO: 620224 - RNA, 19 nt, Homo sapiens
  misc_RNA (1)...(19): siRNA sense strand
ggccuggucuuccucauug

SEQ ID NO: 620225 - RNA, 19 nt, Homo sapiens
  misc_RNA (1)...(19): siRNA sense strand
ugaaguaccuggcagacau

SEQ ID NO: 620226 - RNA, 19 nt, Homo sapiens
  misc_RNA (1)...(19): siRNA sense strand
gagcugcaguacuaugaga

SEQ ID NO: 620227 - RNA, 19 nt, Homo sapiens
  misc_RNA (1)...(19): siRNA sense strand
caggagaaguugccacuca

SEQ ID NO: 620228 - RNA, 19 nt, Homo sapiens
  misc_RNA (1)...(19): siRNA sense strand
agacaagcauccaggagaa

SEQ ID NO: 620229 - RNA, 19 nt, Homo sapiens
  misc_RNA (1)...(19): siRNA sense strand
ucaccgaguucauggagaa

SEQ ID NO: 620230 - RNA, 19 nt, Homo sapiens
  misc_RNA (1)...(19): siRNA sense strand
caucgcagcuggcaugaag

SEQ ID NO: 620231 - RNA, 19 nt, Homo sapiens
  misc_RNA (1)...(19): siRNA sense strand
gaugggcaguucacaguca

SEQ ID NO: 620232 - RNA, 19 nt, Homo sapiens
  misc_RNA (1)...(19): siRNA sense strand
ccaaggaaauugacaucuc

SEQ ID NO: 620233 - RNA, 19 nt, Homo sapiens
  misc_RNA (1)...(19): siRNA sense strand
ucaacacgcuagacaagau

SEQ ID NO: 620234 - RNA, 19 nt, Homo sapiens
  misc_RNA (1)...(19): siRNA sense strand
ggacaugaccaaccaggau

SEQ ID NO: 620235 - RNA, 19 nt, Homo sapiens
  misc_RNA (1)...(19): siRNA sense strand
ccuucaaccucuauuacua

SEQ ID NO: 620236 - RNA, 19 nt, Homo sapiens
  misc_RNA (1)...(19): siRNA sense strand
gaucaucaccgaguucaug

SEQ ID NO: 620237 - RNA, 19 nt, Homo sapiens
  misc_RNA (1)...(19): siRNA sense strand
gaaguugccacucaucauc

SEQ ID NO: 620238 - RNA, 19 nt, Homo sapiens
  misc_RNA (1)...(19): siRNA sense strand
ugaccgagccacgcauuua

SEQ ID NO: 620239 - RNA, 19 nt, Homo sapiens
  misc_RNA (1)...(19): siRNA sense strand
gggcgcagaugaaccagau

SEQ ID NO: 620240 - RNA, 19 nt, Homo sapiens
  misc_RNA (1)...(19): siRNA sense strand
aaggagagcuucgccaaug

SEQ ID NO: 620241 - RNA, 19 nt, Homo sapiens
  misc_RNA (1)...(19): siRNA sense strand
aaauugacaucuccugugu

SEQ ID NO: 620242 - RNA, 19 nt, Homo sapiens
  misc_RNA (1)...(19): siRNA sense strand
gcugugauuuccaguguca

SEQ ID NO: 620243 - RNA, 19 nt, Homo sapiens
  misc_RNA (1)...(19): siRNA sense strand
ccagugauguguggagcua

SEQ ID NO: 620244 - RNA, 19 nt, Homo sapiens
  misc_RNA (1)...(19): siRNA sense strand
gcgugauccuggacuauga

SEQ ID NO: 620245 - RNA, 19 nt, Homo sapiens
  misc_RNA (1)...(19): siRNA sense strand
caaccucuauuacuaugag

SEQ ID NO: 620246 - RNA, 19 nt, Homo sapiens
  misc_RNA (1)...(19): siRNA sense strand
ugugggaggugauguccua

SEQ ID NO: 620247 - RNA, 19 nt, Homo sapiens
  misc_RNA (1)...(19): siRNA sense strand
ggaguuugccaaggaaauu

SEQ ID NO: 620248 - RNA, 19 nt, Homo sapiens
  misc_RNA (1)...(19): siRNA sense strand
gagccacgcauuuacauca

SEQ ID NO: 620249 - RNA, 19 nt, Homo sapiens
  misc_RNA (1)...(19): siRNA sense strand
ugaacacgauccgcacgua

SEQ ID NO: 620250 - RNA, 19 nt, Homo sapiens
  misc_RNA (1)...(19): siRNA sense strand
gacaugcccugcacaacca

SEQ ID NO: 620251 - RNA, 19 nt, Homo sapiens
  misc_RNA (1)...(19): siRNA sense strand
gggaggugauguccuaugg

SEQ ID NO: 620252 - RNA, 19 nt, Homo sapiens
  misc_RNA (1)...(19): siRNA sense strand
gcaaaacgaugggcaguuc

SEQ ID NO: 620253 - RNA, 19 nt, Homo sapiens
  misc_RNA (1)...(19): siRNA sense strand
gaccucgucuacaacauca

SEQ ID NO: 620254 - RNA, 19 nt, Homo sapiens
  misc_RNA (1)...(19): siRNA sense strand
gcaacauccucgucaacag

SEQ ID NO: 620255 - RNA, 19 nt, Homo sapiens
  misc_RNA (1)...(19): siRNA sense strand
guacgcaccacgccagcua

SEQ ID NO: 620256 - RNA, 19 nt, Homo sapiens
  misc_RNA (1)...(19): siRNA sense strand
gacgucgugucucagauga

SEQ ID NO: 620257 - RNA, 19 nt, Homo sapiens
  misc_RNA (1)...(19): siRNA sense strand
gagcuacggcauugucaug

SEQ ID NO: 620258 - RNA, 19 nt, Homo sapiens
  misc_RNA (1)...(19): siRNA sense strand
gagaaguugccacucauca

SEQ ID NO: 620259 - RNA, 19 nt, Homo sapiens
  misc_RNA (1)...(19): siRNA sense strand
ugucucagaugaugaugga

SEQ ID NO: 620260 - RNA, 19 nt, Homo sapiens
  misc_RNA (1)...(19): siRNA sense strand
acagcaaccuggucugcaa

SEQ ID NO: 620261 - RNA, 19 nt, Homo sapiens
  misc_RNA (1)...(19): siRNA sense strand
cuacaccaguggccacaug

SEQ ID NO: 620262 - RNA, 19 nt, Homo sapiens
  misc_RNA (1)...(19): siRNA sense strand
gugaguggcuacgaugaga

SEQ ID NO: 620263 - RNA, 19 nt, Homo sapiens
  misc_RNA (1)...(19): siRNA sense strand
acuaugaggcugacuuuga

SEQ ID NO: 620264 - RNA, 19 nt, Homo sapiens
  misc_RNA (1)...(19): siRNA sense strand
ucaucgccaucguguguaa

SEQ ID NO: 620265 - RNA, 19 nt, Homo sapiens
  misc_RNA (1)...(19): siRNA sense strand
gggugaagguggauaccau

SEQ ID NO: 620266 - RNA, 19 nt, Homo sapiens
  misc_RNA (1)...(19): siRNA sense strand
gacaagaugauccgcaauc

SEQ ID NO: 620267 - RNA, 19 nt, Homo sapiens
  misc_RNA (1)...(19): siRNA sense strand
gcuacggcauugucaugug

SEQ ID NO: 620268 - RNA, 19 nt, Homo sapiens
  misc_RNA (1)...(19): siRNA sense strand
gaacaguauccaggugaug

SEQ ID NO: 620269 - RNA, 19 nt, Homo sapiens
  misc_RNA (1)...(19): siRNA sense strand
ggaccucgucuacaacauc

SEQ ID NO: 620270 - RNA, 19 nt, Homo sapiens
  misc_RNA (1)...(19): siRNA sense strand
cgucgugucucagaugaug

SEQ ID NO: 620271 - RNA, 19 nt, Homo sapiens
  misc_RNA (1)...(19): siRNA sense strand
caaguucggccaaauuguc

SEQ ID NO: 620272 - RNA, 19 nt, Homo sapiens
  misc_RNA (1)...(19): siRNA sense strand
gcccaaguucggccaaauu

SEQ ID NO: 620273 - RNA, 19 nt, Homo sapiens
  misc_RNA (1)...(19): siRNA sense strand
gaaguaccuggcagacaug

SEQ ID NO: 620274 - RNA, 19 nt, Homo sapiens
  misc_RNA (1)...(19): siRNA sense strand
gagggugucgugaccaaga

SEQ ID NO: 620275 - RNA, 19 nt, Homo sapiens
  misc_RNA (1)...(19): siRNA sense strand
gaagccgaguaccagacaa

SEQ ID NO: 620276 - RNA, 19 nt, Homo sapiens
  misc_RNA (1)...(19): siRNA sense strand
ucuacaacaucaucugcaa

SEQ ID NO: 620277 - RNA, 19 nt, Homo sapiens
  misc_RNA (1)...(19): siRNA sense strand
gaccaaccaggauguaauc

SEQ ID NO: 620278 - RNA, 19 nt, Homo sapiens
  misc_RNA (1)...(19): siRNA sense strand
guguggagcuacggcauug

SEQ ID NO: 620279 - RNA, 19 nt, Homo sapiens
  misc_RNA (1)...(19): siRNA sense strand
gcgggaguuugccaaggaa

SEQ ID NO: 620280 - RNA, 19 nt, Homo sapiens
  misc_RNA (1)...(19): siRNA sense strand
ccaguacaccuucgagauc

SEQ ID NO: 620281 - RNA, 19 nt, Homo sapiens
  misc_RNA (1)...(19): siRNA sense strand
gcgcagaugaaccagauuc

SEQ ID NO: 620282 - RNA, 19 nt, Homo sapiens
  misc_RNA (1)...(19): siRNA sense strand
ggacaagcugcaacacuac

SEQ ID NO: 620283 - RNA, 19 nt, Homo sapiens
  misc_RNA (1)...(19): siRNA sense strand
ugacagaagccgaguacca

SEQ ID NO: 620284 - RNA, 19 nt, Homo sapiens
  misc_RNA (1)...(19): siRNA sense strand
ccaggugugcaacguguuu

SEQ ID NO: 620285 - RNA, 19 nt, Homo sapiens
  misc_RNA (1)...(19): siRNA sense strand
agaccuucaaccucuauua

SEQ ID NO: 620286 - RNA, 19 nt, Homo sapiens
  misc_RNA (1)...(19): siRNA sense strand
uggcuacggaccaaguuua

SEQ ID NO: 620287 - RNA, 19 nt, Homo sapiens
  misc_RNA (1)...(19): siRNA sense strand
gcggcaagauguacuucca

SEQ ID NO: 620288 - RNA, 19 nt, Homo sapiens
  misc_RNA (1)...(19): siRNA sense strand
gcuacgaugagaacaugaa

SEQ ID NO: 620289 - RNA, 19 nt, Homo sapiens
  misc_RNA (1)...(19): siRNA sense strand
uacaacaucaucugcaaga

SEQ ID NO: 620290 - RNA, 19 nt, Homo sapiens
  misc_RNA (1)...(19): siRNA sense strand
uggaagaaacgcuaaugga

SEQ ID NO: 620291 - RNA, 19 nt, Homo sapiens
  misc_RNA (1)...(19): siRNA sense strand
ccacguggagaugaaguuu

SEQ ID NO: 620292 - RNA, 19 nt, Homo sapiens
  misc_RNA (1)...(19): siRNA sense strand
uuacuaugaggcugacuuu

SEQ ID NO: 620293 - RNA, 19 nt, Homo sapiens
  misc_RNA (1)...(19): siRNA sense strand
caguguccaucaugcauca

SEQ ID NO: 620294 - RNA, 19 nt, Homo sapiens
  misc_RNA (1)...(19): siRNA sense strand
gcagcuccaucggcagugu

SEQ ID NO: 620295 - RNA, 19 nt, Homo sapiens
  misc_RNA (1)...(19): siRNA sense strand
ggugaagguggauaccauu

SEQ ID NO: 620296 - RNA, 19 nt, Homo sapiens
  misc_RNA (1)...(19): siRNA sense strand
ccuuugacgucgugucuca

SEQ ID NO: 620297 - RNA, 19 nt, Homo sapiens
  misc_RNA (1)...(19): siRNA sense strand
ggagaccuucaaccucuau

SEQ ID NO: 620298 - RNA, 19 nt, Homo sapiens
  misc_RNA (1)...(19): siRNA sense strand
ucgcagcuggcaugaagua

SEQ ID NO: 620299 - RNA, 19 nt, Homo sapiens
  misc_RNA (1)...(19): siRNA sense strand
gaucggagcaggggaguuu

SEQ ID NO: 620300 - RNA, 19 nt, Homo sapiens
  misc_RNA (1)...(19): siRNA sense strand
uggcuacgaugagaacaug

SEQ ID NO: 620301 - RNA, 19 nt, Homo sapiens
  misc_RNA (1)...(19): siRNA sense strand
gacuauggcggcugcaugu

SEQ ID NO: 620302 - RNA, 19 nt, Homo sapiens
  misc_RNA (1)...(19): siRNA sense strand
ugaacaguauccaggugau

SEQ ID NO: 620303 - RNA, 19 nt, Homo sapiens
  misc_RNA (1)...(19): siRNA sense strand
gacuacaccagcuuuaaca

SEQ ID NO: 620304 - RNA, 19 nt, Homo sapiens
  misc_RNA (1)...(19): siRNA sense strand
caacacgcuagacaagaug

SEQ ID NO: 620305 - RNA, 19 nt, Homo sapiens
  misc_RNA (1)...(19): siRNA sense strand
ccauugagcaggacuaucg

SEQ ID NO: 620306 - RNA, 19 nt, Homo sapiens
  misc_RNA (1)...(19): siRNA sense strand
ggagaaguugccacucauc

SEQ ID NO: 620307 - RNA, 19 nt, Homo sapiens
  misc_RNA (1)...(19): siRNA sense strand
caucggcaguguccaucau

SEQ ID NO: 620308 - RNA, 19 nt, Homo sapiens
  misc_RNA (1)...(19): siRNA sense strand
cugcugagcugggcuggau

SEQ ID NO: 620309 - RNA, 19 nt, Homo sapiens
  misc_RNA (1)...(19): siRNA sense strand
caaggagagcuucgccaau

SEQ ID NO: 620310 - RNA, 19 nt, Homo sapiens
  misc_RNA (1)...(19): siRNA sense strand
caacucaugcuggacuguu

SEQ ID NO: 620311 - RNA, 19 nt, Homo sapiens
  misc_RNA (1)...(19): siRNA sense strand
ugaccaaccaggauguaau

SEQ ID NO: 620312 - RNA, 19 nt, Homo sapiens
  misc_RNA (1)...(19): siRNA sense strand
gcaaggugucggacuuugg

SEQ ID NO: 620313 - RNA, 19 nt, Homo sapiens
  misc_RNA (1)...(19): siRNA sense strand
gaccuucaaccucuauuac

SEQ ID NO: 620314 - RNA, 19 nt, Homo sapiens
  misc_RNA (1)...(19): siRNA sense strand
caucuccugugucaaaauu

SEQ ID NO: 620315 - RNA, 19 nt, Homo sapiens
  misc_RNA (1)...(19): siRNA sense strand
acaucgauccuuucaccua

SEQ ID NO: 620316 - RNA, 19 nt, Homo sapiens
  misc_RNA (1)...(19): siRNA sense strand
ccaucaagcucuacuguaa

SEQ ID NO: 620317 - RNA, 19 nt, Homo sapiens
  misc_RNA (1)...(19): siRNA sense strand
acuaugagcugcaguacua

SEQ ID NO: 620318 - RNA, 19 nt, Homo sapiens
  misc_RNA (1)...(19): siRNA sense strand
guacaacgccacagccaua

SEQ ID NO: 620319 - RNA, 19 nt, Homo sapiens
  misc_RNA (1)...(19): siRNA sense strand
gagcgaagccuccaucaug

SEQ ID NO: 620320 - RNA, 19 nt, Homo sapiens
  misc_RNA (1)...(19): siRNA sense strand
caaccaggauguaaucaau

SEQ ID NO: 620321 - RNA, 19 nt, Homo sapiens
  misc_RNA (1)...(19): siRNA sense strand
uaaagaggauucucauaag

SEQ ID NO: 620322 - RNA, 19 nt, Homo sapiens
  misc_RNA (1)...(19): siRNA sense strand
ggaaagcaaugacuguucu

SEQ ID NO: 620323 - RNA, 19 nt, Homo sapiens
  misc_RNA (1)...(19): siRNA sense strand
gcaugaagaucuacaucga

SEQ ID NO: 620324 - RNA, 19 nt, Homo sapiens
  misc_RNA (1)...(19): siRNA sense strand
cggacaagcugcaacacua

SEQ ID NO: 620325 - RNA, 19 nt, Homo sapiens
  misc_RNA (1)...(19): siRNA sense strand
gaagguggauaccauugca

SEQ ID NO: 620326 - RNA, 19 nt, Homo sapiens
  misc_RNA (1)...(19): siRNA sense strand
ggccuggucuuccucauug

SEQ ID NO: 620327 - RNA, 19 nt, Homo sapiens
  misc_RNA (1)...(19): siRNA sense strand
ugaaguaccuggcagacau

SEQ ID NO: 620328 - RNA, 19 nt, Homo sapiens
  misc_RNA (1)...(19): siRNA sense strand
gagcugcaguacuaugaga

SEQ ID NO: 620329 - RNA, 19 nt, Homo sapiens
  misc_RNA (1)...(19): siRNA sense strand
caggagaaguugccacuca

SEQ ID NO: 620330 - RNA, 19 nt, Homo sapiens
  misc_RNA (1)...(19): siRNA sense strand
agacaagcauccaggagaa

SEQ ID NO: 620331 - RNA, 19 nt, Homo sapiens
  misc_RNA (1)...(19): siRNA sense strand
ucaccgaguucauggagaa

SEQ ID NO: 620332 - RNA, 19 nt, Homo sapiens
  misc_RNA (1)...(19): siRNA sense strand
cacgagacgucaccaagaa

SEQ ID NO: 620333 - RNA, 19 nt, Homo sapiens
  misc_RNA (1)...(19): siRNA sense strand
caucgcagcuggcaugaag

SEQ ID NO: 620334 - RNA, 19 nt, Homo sapiens
  misc_RNA (1)...(19): siRNA sense strand
gaugggcaguucacaguca

SEQ ID NO: 620335 - RNA, 19 nt, Homo sapiens
  misc_RNA (1)...(19): siRNA sense strand
ccaaggaaauugacaucuc

SEQ ID NO: 620336 - RNA, 19 nt, Homo sapiens
  misc_RNA (1)...(19): siRNA sense strand
ucaacacgcuagacaagau

SEQ ID NO: 620337 - RNA, 19 nt, Homo sapiens
  misc_RNA (1)...(19): siRNA sense strand
ggacaugaccaaccaggau

SEQ ID NO: 620338 - RNA, 19 nt, Homo sapiens
  misc_RNA (1)...(19): siRNA sense strand
ccuucaaccucuauuacua

SEQ ID NO: 620339 - RNA, 19 nt, Homo sapiens
  misc_RNA (1)...(19): siRNA sense strand
gaucaucaccgaguucaug

SEQ ID NO: 620340 - RNA, 19 nt, Homo sapiens
  misc_RNA (1)...(19): siRNA sense strand
gaaguugccacucaucauc

SEQ ID NO: 620341 - RNA, 19 nt, Homo sapiens
  misc_RNA (1)...(19): siRNA sense strand
ugaccgagccacgcauuua

SEQ ID NO: 620342 - RNA, 19 nt, Homo sapiens
  misc_RNA (1)...(19): siRNA sense strand
gggcgcagaugaaccagau

SEQ ID NO: 620343 - RNA, 19 nt, Homo sapiens
  misc_RNA (1)...(19): siRNA sense strand
aaggagagcuucgccaaug

SEQ ID NO: 620344 - RNA, 19 nt, Homo sapiens
  misc_RNA (1)...(19): siRNA sense strand
aaauugacaucuccugugu

SEQ ID NO: 620345 - RNA, 19 nt, Homo sapiens
  misc_RNA (1)...(19): siRNA sense strand
gcugugauuuccaguguca

SEQ ID NO: 620346 - RNA, 19 nt, Homo sapiens
  misc_RNA (1)...(19): siRNA sense strand
ccagugauguguggagcua

SEQ ID NO: 620347 - RNA, 19 nt, Homo sapiens
  misc_RNA (1)...(19): siRNA sense strand
gcgugauccuggacuauga

SEQ ID NO: 620348 - RNA, 19 nt, Homo sapiens
  misc_RNA (1)...(19): siRNA sense strand
caaccucuauuacuaugag

SEQ ID NO: 620349 - RNA, 19 nt, Homo sapiens
  misc_RNA (1)...(19): siRNA sense strand
ugugggaggugauguccua

SEQ ID NO: 620350 - RNA, 19 nt, Homo sapiens
  misc_RNA (1)...(19): siRNA sense strand
ggaguuugccaaggaaauu

SEQ ID NO: 620351 - RNA, 19 nt, Homo sapiens
  misc_RNA (1)...(19): siRNA sense strand
gagccacgcauuuacauca

SEQ ID NO: 620352 - RNA, 19 nt, Homo sapiens
  misc_RNA (1)...(19): siRNA sense strand
ugaacacgauccgcacgua

SEQ ID NO: 620353 - RNA, 19 nt, Homo sapiens
  misc_RNA (1)...(19): siRNA sense strand
gacaugcccugcacaacca

SEQ ID NO: 620354 - RNA, 19 nt, Homo sapiens
  misc_RNA (1)...(19): siRNA sense strand
agaggauucucauaaggaa

SEQ ID NO: 620355 - RNA, 19 nt, Homo sapiens
  misc_RNA (1)...(19): siRNA sense strand
gggaggugauguccuaugg

SEQ ID NO: 620356 - RNA, 19 nt, Homo sapiens
  misc_RNA (1)...(19): siRNA sense strand
gcaaaacgaugggcaguuc

SEQ ID NO: 620357 - RNA, 19 nt, Homo sapiens
  misc_RNA (1)...(19): siRNA sense strand
gaccucgucuacaacauca

SEQ ID NO: 620358 - RNA, 19 nt, Homo sapiens
  misc_RNA (1)...(19): siRNA sense strand
gcaacauccucgucaacag

SEQ ID NO: 620359 - RNA, 19 nt, Homo sapiens
  misc_RNA (1)...(19): siRNA sense strand
guacgcaccacgccagcua

SEQ ID NO: 620360 - RNA, 19 nt, Homo sapiens
  misc_RNA (1)...(19): siRNA sense strand
aaagaggauucucauaagg

SEQ ID NO: 620361 - RNA, 19 nt, Homo sapiens
  misc_RNA (1)...(19): siRNA sense strand
gcgggaaauacaaggaaua

SEQ ID NO: 620362 - RNA, 19 nt, Homo sapiens
  misc_RNA (1)...(19): siRNA sense strand
gacgucgugucucagauga

SEQ ID NO: 620363 - RNA, 19 nt, Homo sapiens
  misc_RNA (1)...(19): siRNA sense strand
gagcuacggcauugucaug

SEQ ID NO: 620364 - RNA, 19 nt, Homo sapiens
  misc_RNA (1)...(19): siRNA sense strand
gagaaguugccacucauca

SEQ ID NO: 620365 - RNA, 19 nt, Homo sapiens
  misc_RNA (1)...(19): siRNA sense strand
ugucucagaugaugaugga

SEQ ID NO: 620366 - RNA, 19 nt, Homo sapiens
  misc_RNA (1)...(19): siRNA sense strand
acagcaaccuggucugcaa

SEQ ID NO: 620367 - RNA, 19 nt, Homo sapiens
  misc_RNA (1)...(19): siRNA sense strand
cuacaccaguggccacaug

SEQ ID NO: 620368 - RNA, 19 nt, Homo sapiens
  misc_RNA (1)...(19): siRNA sense strand
gugaguggcuacgaugaga

SEQ ID NO: 620369 - RNA, 19 nt, Homo sapiens
  misc_RNA (1)...(19): siRNA sense strand
acuaugaggcugacuuuga

SEQ ID NO: 620370 - RNA, 19 nt, Homo sapiens
  misc_RNA (1)...(19): siRNA sense strand
ccacgagacgucaccaaga

SEQ ID NO: 620371 - RNA, 19 nt, Homo sapiens
  misc_RNA (1)...(19): siRNA sense strand
ucaucgccaucguguguaa

SEQ ID NO: 620372 - RNA, 19 nt, Homo sapiens
  misc_RNA (1)...(19): siRNA sense strand
gggugaagguggauaccau

SEQ ID NO: 620373 - RNA, 19 nt, Homo sapiens
  misc_RNA (1)...(19): siRNA sense strand
gcaacucaaacgacggaaa

SEQ ID NO: 620374 - RNA, 19 nt, Homo sapiens
  misc_RNA (1)...(19): siRNA sense strand
gacaagaugauccgcaauc

SEQ ID NO: 620375 - RNA, 19 nt, Homo sapiens
  misc_RNA (1)...(19): siRNA sense strand
gcuacggcauugucaugug

SEQ ID NO: 620376 - RNA, 19 nt, Homo sapiens
  misc_RNA (1)...(19): siRNA sense strand
uaaggaaagcaaugacugu

SEQ ID NO: 620377 - RNA, 19 nt, Homo sapiens
  misc_RNA (1)...(19): siRNA sense strand
gaacaguauccaggugaug

SEQ ID NO: 620378 - RNA, 19 nt, Homo sapiens
  misc_RNA (1)...(19): siRNA sense strand
ggaccucgucuacaacauc

SEQ ID NO: 620379 - RNA, 19 nt, Homo sapiens
  misc_RNA (1)...(19): siRNA sense strand
caagaaaacaugcaacuca

SEQ ID NO: 620380 - RNA, 19 nt, Homo sapiens
  misc_RNA (1)...(19): siRNA sense strand
cgucgugucucagaugaug

SEQ ID NO: 620381 - RNA, 19 nt, Homo sapiens
  misc_RNA (1)...(19): siRNA sense strand
caaguucggccaaauuguc

SEQ ID NO: 620382 - RNA, 19 nt, Homo sapiens
  misc_RNA (1)...(19): siRNA sense strand
gcccaaguucggccaaauu

SEQ ID NO: 620383 - RNA, 19 nt, Homo sapiens
  misc_RNA (1)...(19): siRNA sense strand
gaaguaccuggcagacaug

SEQ ID NO: 620384 - RNA, 19 nt, Homo sapiens
  misc_RNA (1)...(19): siRNA sense strand
gagggugucgugaccaaga

SEQ ID NO: 620385 - RNA, 19 nt, Homo sapiens
  misc_RNA (1)...(19): siRNA sense strand
gaagccgaguaccagacaa

SEQ ID NO: 620386 - RNA, 19 nt, Homo sapiens
  misc_RNA (1)...(19): siRNA sense strand
ucuacaacaucaucugcaa

SEQ ID NO: 620387 - RNA, 19 nt, Homo sapiens
  misc_RNA (1)...(19): siRNA sense strand
gaaagcaaugacuguucuu

SEQ ID NO: 620388 - RNA, 19 nt, Homo sapiens
  misc_RNA (1)...(19): siRNA sense strand
aaacaugcaacucaaacga

SEQ ID NO: 620389 - RNA, 19 nt, Homo sapiens
  misc_RNA (1)...(19): siRNA sense strand
gaccaaccaggauguaauc

SEQ ID NO: 620390 - RNA, 19 nt, Homo sapiens
  misc_RNA (1)...(19): siRNA sense strand
guguggagcuacggcauug

SEQ ID NO: 620391 - RNA, 19 nt, Homo sapiens
  misc_RNA (1)...(19): siRNA sense strand
gcgggaguuugccaaggaa

SEQ ID NO: 620392 - RNA, 19 nt, Homo sapiens
  misc_RNA (1)...(19): siRNA sense strand
ccaguacaccuucgagauc

SEQ ID NO: 620393 - RNA, 19 nt, Homo sapiens
  misc_RNA (1)...(19): siRNA sense strand
gcgcagaugaaccagauuc

SEQ ID NO: 620394 - RNA, 19 nt, Homo sapiens
  misc_RNA (1)...(19): siRNA sense strand
ggacaagcugcaacacuac

SEQ ID NO: 620395 - RNA, 19 nt, Homo sapiens
  misc_RNA (1)...(19): siRNA sense strand
ugacagaagccgaguacca

SEQ ID NO: 620396 - RNA, 19 nt, Homo sapiens
  misc_RNA (1)...(19): siRNA sense strand
ccaggugugcaacguguuu

SEQ ID NO: 620397 - RNA, 19 nt, Homo sapiens
  misc_RNA (1)...(19): siRNA sense strand
uggcuacggaccaaguuua

SEQ ID NO: 620398 - RNA, 19 nt, Homo sapiens
  misc_RNA (1)...(19): siRNA sense strand
agaccuucaaccucuauua

SEQ ID NO: 620399 - RNA, 19 nt, Homo sapiens
  misc_RNA (1)...(19): siRNA sense strand
gcggcaagauguacuucca

SEQ ID NO: 620400 - RNA, 19 nt, Homo sapiens
  misc_RNA (1)...(19): siRNA sense strand
gcuacgaugagaacaugaa

SEQ ID NO: 620401 - RNA, 19 nt, Homo sapiens
  misc_RNA (1)...(19): siRNA sense strand
uacaacaucaucugcaaga

SEQ ID NO: 620402 - RNA, 19 nt, Homo sapiens
  misc_RNA (1)...(19): siRNA sense strand
ccacguggagaugaaguuu

SEQ ID NO: 620403 - RNA, 19 nt, Homo sapiens
  misc_RNA (1)...(19): siRNA sense strand
uggaagaaacgcuaaugga

SEQ ID NO: 620404 - RNA, 19 nt, Homo sapiens
  misc_RNA (1)...(19): siRNA sense strand
uuacuaugaggcugacuuu

SEQ ID NO: 620405 - RNA, 19 nt, Homo sapiens
  misc_RNA (1)...(19): siRNA sense strand
caguguccaucaugcauca

SEQ ID NO: 620406 - RNA, 19 nt, Homo sapiens
  misc_RNA (1)...(19): siRNA sense strand
gcagcuccaucggcagugu

SEQ ID NO: 620407 - RNA, 19 nt, Homo sapiens
  misc_RNA (1)...(19): siRNA sense strand
ggugaagguggauaccauu

SEQ ID NO: 620408 - RNA, 19 nt, Homo sapiens
  misc_RNA (1)...(19): siRNA sense strand
ccuuugacgucgugucuca

SEQ ID NO: 620409 - RNA, 19 nt, Homo sapiens
  misc_RNA (1)...(19): siRNA sense strand
uggcuacgaugagaacaug

SEQ ID NO: 620410 - RNA, 19 nt, Homo sapiens
  misc_RNA (1)...(19): siRNA sense strand
ucgcagcuggcaugaagua

SEQ ID NO: 620411 - RNA, 19 nt, Homo sapiens
  misc_RNA (1)...(19): siRNA sense strand
gaucggagcaggggaguuu

SEQ ID NO: 620412 - RNA, 19 nt, Homo sapiens
  misc_RNA (1)...(19): siRNA sense strand
ggagaccuucaaccucuau

SEQ ID NO: 620413 - RNA, 19 nt, Homo sapiens
  misc_RNA (1)...(19): siRNA sense strand
ugaacaguauccaggugau

SEQ ID NO: 620414 - RNA, 19 nt, Homo sapiens
  misc_RNA (1)...(19): siRNA sense strand
ggcgggaaauacaaggaau

SEQ ID NO: 620415 - RNA, 19 nt, Homo sapiens
  misc_RNA (1)...(19): siRNA sense strand
caacucaaacgacggaaaa

SEQ ID NO: 620416 - RNA, 19 nt, Homo sapiens
  misc_RNA (1)...(19): siRNA sense strand
gcaagaauccucagaagua

SEQ ID NO: 620417 - RNA, 19 nt, Homo sapiens
  misc_RNA (1)...(19): siRNA sense strand
gugcugcgcugaagaaaua

SEQ ID NO: 620418 - RNA, 19 nt, Homo sapiens
  misc_RNA (1)...(19): siRNA sense strand
agaaucagcuggaagaaau

SEQ ID NO: 620419 - RNA, 19 nt, Homo sapiens
  misc_RNA (1)...(19): siRNA sense strand
agggcgagcuggagaauua

SEQ ID NO: 620420 - RNA, 19 nt, Homo sapiens
  misc_RNA (1)...(19): siRNA sense strand
acaaggagcugcaguacau

SEQ ID NO: 620421 - RNA, 19 nt, Homo sapiens
  misc_RNA (1)...(19): siRNA sense strand
uuacgcagcuggagcagaa

SEQ ID NO: 620422 - RNA, 19 nt, Homo sapiens
  misc_RNA (1)...(19): siRNA sense strand
acaggcagauccagaauca

SEQ ID NO: 620423 - RNA, 19 nt, Homo sapiens
  misc_RNA (1)...(19): siRNA sense strand
ggagagcacacccaucaug

SEQ ID NO: 620424 - RNA, 19 nt, Homo sapiens
  misc_RNA (1)...(19): siRNA sense strand
gagagcacacccaucauga

SEQ ID NO: 620425 - RNA, 19 nt, Homo sapiens
  misc_RNA (1)...(19): siRNA sense strand
caaagaacucggagacguu

SEQ ID NO: 620426 - RNA, 19 nt, Homo sapiens
  misc_RNA (1)...(19): siRNA sense strand
uggaagaaaugcugaaguc

SEQ ID NO: 620427 - RNA, 19 nt, Homo sapiens
  misc_RNA (1)...(19): siRNA sense strand
gcagcaagaauccucagaa

SEQ ID NO: 620428 - RNA, 19 nt, Homo sapiens
  misc_RNA (1)...(19): siRNA sense strand
cagcaagaauccucagaag

SEQ ID NO: 620429 - RNA, 19 nt, Homo sapiens
  misc_RNA (1)...(19): siRNA sense strand
caagaauccucagaaguac

SEQ ID NO: 620430 - RNA, 19 nt, Homo sapiens
  misc_RNA (1)...(19): siRNA sense strand
caggagagcacacccauca

SEQ ID NO: 620431 - RNA, 19 nt, Homo sapiens
  misc_RNA (1)...(19): siRNA sense strand
gggccuggaugacuaugga

SEQ ID NO: 620432 - RNA, 19 nt, Homo sapiens
  misc_RNA (1)...(19): siRNA sense strand
gaaauaccagacugagcaa

SEQ ID NO: 620433 - RNA, 19 nt, Homo sapiens
  misc_RNA (1)...(19): siRNA sense strand
ggagcgcaauggccguaug

SEQ ID NO: 620434 - RNA, 19 nt, Homo sapiens
  misc_RNA (1)...(19): siRNA sense strand
ugaagaaauaccagacuga

SEQ ID NO: 620435 - RNA, 19 nt, Homo sapiens
  misc_RNA (1)...(19): siRNA sense strand
gcaagagcgugaccccaaa

SEQ ID NO: 620436 - RNA, 19 nt, Homo sapiens
  misc_RNA (1)...(19): siRNA sense strand
aguccaaccuggucauuuc

SEQ ID NO: 620437 - RNA, 19 nt, Homo sapiens
  misc_RNA (1)...(19): siRNA sense strand
cuacaagaccgcacugaca

SEQ ID NO: 620438 - RNA, 19 nt, Homo sapiens
  misc_RNA (1)...(19): siRNA sense strand
gcacaugagccugcagcaa

SEQ ID NO: 620439 - RNA, 19 nt, Homo sapiens
  misc_RNA (1)...(19): siRNA sense strand
cagaaucagcuggaagaaa

SEQ ID NO: 620440 - RNA, 19 nt, Homo sapiens
  misc_RNA (1)...(19): siRNA sense strand
gagcacacccaucaugaac

SEQ ID NO: 620441 - RNA, 19 nt, Homo sapiens
  misc_RNA (1)...(19): siRNA sense strand
ggacaaggagcugcaguac

SEQ ID NO: 620442 - RNA, 19 nt, Homo sapiens
  misc_RNA (1)...(19): siRNA sense strand
ucacggaaaaugucuauaa

SEQ ID NO: 620443 - RNA, 19 nt, Homo sapiens
  misc_RNA (1)...(19): siRNA sense strand
gcuaugccaccaccgagaa

SEQ ID NO: 620444 - RNA, 19 nt, Homo sapiens
  misc_RNA (1)...(19): siRNA sense strand
gugacaggcugcacaugag

SEQ ID NO: 620445 - RNA, 19 nt, Homo sapiens
  misc_RNA (1)...(19): siRNA sense strand
gagagagugagaagaccaa

SEQ ID NO: 620446 - RNA, 19 nt, Homo sapiens
  misc_RNA (1)...(19): siRNA sense strand
ugagugcugcgcugaagaa

SEQ ID NO: 620447 - RNA, 19 nt, Homo sapiens
  misc_RNA (1)...(19): siRNA sense strand
cgggcaaccuccuggacaa

SEQ ID NO: 620448 - RNA, 19 nt, Homo sapiens
  misc_RNA (1)...(19): siRNA sense strand
gcugguuucccuucuccua

SEQ ID NO: 620449 - RNA, 19 nt, Homo sapiens
  misc_RNA (1)...(19): siRNA sense strand
agaaguacucggacaagga

SEQ ID NO: 620450 - RNA, 19 nt, Homo sapiens
  misc_RNA (1)...(19): siRNA sense strand
agagugagaagaccaagau

SEQ ID NO: 620451 - RNA, 19 nt, Homo sapiens
  misc_RNA (1)...(19): siRNA sense strand
gaaucagcuggaagaaaug

SEQ ID NO: 620452 - RNA, 19 nt, Homo sapiens
  misc_RNA (1)...(19): siRNA sense strand
gagagugagaagaccaaga

SEQ ID NO: 620453 - RNA, 19 nt, Homo sapiens
  misc_RNA (1)...(19): siRNA sense strand
caucaugaacggcgucaca

SEQ ID NO: 620454 - RNA, 19 nt, Homo sapiens
  misc_RNA (1)...(19): siRNA sense strand
cggacaaggagcugcagua

SEQ ID NO: 620455 - RNA, 19 nt, Homo sapiens
  misc_RNA (1)...(19): siRNA sense strand
uuucacaacgagcugcuua

SEQ ID NO: 620456 - RNA, 19 nt, Homo sapiens
  misc_RNA (1)...(19): siRNA sense strand
uggcaggugugacguaugc

SEQ ID NO: 620457 - RNA, 19 nt, Homo sapiens
  misc_RNA (1)...(19): siRNA sense strand
gcacccuccugagcuucaa

SEQ ID NO: 620458 - RNA, 19 nt, Homo sapiens
  misc_RNA (1)...(19): siRNA sense strand
acagcacccuccugagcuu

SEQ ID NO: 620459 - RNA, 19 nt, Homo sapiens
  misc_RNA (1)...(19): siRNA sense strand
ggaagaaaugcugaagucu

SEQ ID NO: 620460 - RNA, 19 nt, Homo sapiens
  misc_RNA (1)...(19): siRNA sense strand
ccaccgagaacaagacucu

SEQ ID NO: 620461 - RNA, 19 nt, Homo sapiens
  misc_RNA (1)...(19): siRNA sense strand
gacaaggagcugcaguaca

SEQ ID NO: 620462 - RNA, 19 nt, Homo sapiens
  misc_RNA (1)...(19): siRNA sense strand
ugugacguaugcagccaaa

SEQ ID NO: 620463 - RNA, 19 nt, Homo sapiens
  misc_RNA (1)...(19): siRNA sense strand
gagccagggcagcaagaau

SEQ ID NO: 620464 - RNA, 19 nt, Homo sapiens
  misc_RNA (1)...(19): siRNA sense strand
ccacaggcagauccagaau

SEQ ID NO: 620465 - RNA, 19 nt, Homo sapiens
  misc_RNA (1)...(19): siRNA sense strand
agugacaggcugcacauga

SEQ ID NO: 620466 - RNA, 19 nt, Homo sapiens
  misc_RNA (1)...(19): siRNA sense strand
gcaagcucagcgacuccua

SEQ ID NO: 620467 - RNA, 19 nt, Homo sapiens
  misc_RNA (1)...(19): siRNA sense strand
gcaagaauccucagaagua

SEQ ID NO: 620468 - RNA, 19 nt, Homo sapiens
  misc_RNA (1)...(19): siRNA sense strand
gugcugcgcugaagaaaua

SEQ ID NO: 620469 - RNA, 19 nt, Homo sapiens
  misc_RNA (1)...(19): siRNA sense strand
agaaucagcuggaagaaau

SEQ ID NO: 620470 - RNA, 19 nt, Homo sapiens
  misc_RNA (1)...(19): siRNA sense strand
agggcgagcuggagaauua

SEQ ID NO: 620471 - RNA, 19 nt, Homo sapiens
  misc_RNA (1)...(19): siRNA sense strand
acaaggagcugcaguacau

SEQ ID NO: 620472 - RNA, 19 nt, Homo sapiens
  misc_RNA (1)...(19): siRNA sense strand
uuacgcagcuggagcagaa

SEQ ID NO: 620473 - RNA, 19 nt, Homo sapiens
  misc_RNA (1)...(19): siRNA sense strand
acaggcagauccagaauca

SEQ ID NO: 620474 - RNA, 19 nt, Homo sapiens
  misc_RNA (1)...(19): siRNA sense strand
ggagagcacacccaucaug

SEQ ID NO: 620475 - RNA, 19 nt, Homo sapiens
  misc_RNA (1)...(19): siRNA sense strand
gagagcacacccaucauga

SEQ ID NO: 620476 - RNA, 19 nt, Homo sapiens
  misc_RNA (1)...(19): siRNA sense strand
caaagaacucggagacguu

SEQ ID NO: 620477 - RNA, 19 nt, Homo sapiens
  misc_RNA (1)...(19): siRNA sense strand
uggaagaaaugcugaaguc

SEQ ID NO: 620478 - RNA, 19 nt, Homo sapiens
  misc_RNA (1)...(19): siRNA sense strand
gcagcaagaauccucagaa

SEQ ID NO: 620479 - RNA, 19 nt, Homo sapiens
  misc_RNA (1)...(19): siRNA sense strand
cagcaagaauccucagaag

SEQ ID NO: 620480 - RNA, 19 nt, Homo sapiens
  misc_RNA (1)...(19): siRNA sense strand
caagaauccucagaaguac

SEQ ID NO: 620481 - RNA, 19 nt, Homo sapiens
  misc_RNA (1)...(19): siRNA sense strand
caggagagcacacccauca

SEQ ID NO: 620482 - RNA, 19 nt, Homo sapiens
  misc_RNA (1)...(19): siRNA sense strand
gggccuggaugacuaugga

SEQ ID NO: 620483 - RNA, 19 nt, Homo sapiens
  misc_RNA (1)...(19): siRNA sense strand
gaaauaccagacugagcaa

SEQ ID NO: 620484 - RNA, 19 nt, Homo sapiens
  misc_RNA (1)...(19): siRNA sense strand
ggagcgcaauggccguaug

SEQ ID NO: 620485 - RNA, 19 nt, Homo sapiens
  misc_RNA (1)...(19): siRNA sense strand
ugaagaaauaccagacuga

SEQ ID NO: 620486 - RNA, 19 nt, Homo sapiens
  misc_RNA (1)...(19): siRNA sense strand
gcaagagcgugaccccaaa

SEQ ID NO: 620487 - RNA, 19 nt, Homo sapiens
  misc_RNA (1)...(19): siRNA sense strand
aguccaaccuggucauuuc

SEQ ID NO: 620488 - RNA, 19 nt, Homo sapiens
  misc_RNA (1)...(19): siRNA sense strand
cuacaagaccgcacugaca

SEQ ID NO: 620489 - RNA, 19 nt, Homo sapiens
  misc_RNA (1)...(19): siRNA sense strand
gcacaugagccugcagcaa

SEQ ID NO: 620490 - RNA, 19 nt, Homo sapiens
  misc_RNA (1)...(19): siRNA sense strand
cagaaucagcuggaagaaa

SEQ ID NO: 620491 - RNA, 19 nt, Homo sapiens
  misc_RNA (1)...(19): siRNA sense strand
gagcacacccaucaugaac

SEQ ID NO: 620492 - RNA, 19 nt, Homo sapiens
  misc_RNA (1)...(19): siRNA sense strand
ggacaaggagcugcaguac

SEQ ID NO: 620493 - RNA, 19 nt, Homo sapiens
  misc_RNA (1)...(19): siRNA sense strand
ucacggaaaaugucuauaa

SEQ ID NO: 620494 - RNA, 19 nt, Homo sapiens
  misc_RNA (1)...(19): siRNA sense strand
gcuaugccaccaccgagaa

SEQ ID NO: 620495 - RNA, 19 nt, Homo sapiens
  misc_RNA (1)...(19): siRNA sense strand
gugacaggcugcacaugag

SEQ ID NO: 620496 - RNA, 19 nt, Homo sapiens
  misc_RNA (1)...(19): siRNA sense strand
gagagagugagaagaccaa

SEQ ID NO: 620497 - RNA, 19 nt, Homo sapiens
  misc_RNA (1)...(19): siRNA sense strand
ugagugcugcgcugaagaa

SEQ ID NO: 620498 - RNA, 19 nt, Homo sapiens
  misc_RNA (1)...(19): siRNA sense strand
cgggcaaccuccuggacaa

SEQ ID NO: 620499 - RNA, 19 nt, Homo sapiens
  misc_RNA (1)...(19): siRNA sense strand
gcugguuucccuucuccua

SEQ ID NO: 620500 - RNA, 19 nt, Homo sapiens
  misc_RNA (1)...(19): siRNA sense strand
agaaguacucggacaagga

SEQ ID NO: 620501 - RNA, 19 nt, Homo sapiens
  misc_RNA (1)...(19): siRNA sense strand
agagugagaagaccaagau

SEQ ID NO: 620502 - RNA, 19 nt, Homo sapiens
  misc_RNA (1)...(19): siRNA sense strand
gaaucagcuggaagaaaug

SEQ ID NO: 620503 - RNA, 19 nt, Homo sapiens
  misc_RNA (1)...(19): siRNA sense strand
gagagugagaagaccaaga

SEQ ID NO: 620504 - RNA, 19 nt, Homo sapiens
  misc_RNA (1)...(19): siRNA sense strand
caucaugaacggcgucaca

SEQ ID NO: 620505 - RNA, 19 nt, Homo sapiens
  misc_RNA (1)...(19): siRNA sense strand
cggacaaggagcugcagua

SEQ ID NO: 620506 - RNA, 19 nt, Homo sapiens
  misc_RNA (1)...(19): siRNA sense strand
uuucacaacgagcugcuua

SEQ ID NO: 620507 - RNA, 19 nt, Homo sapiens
  misc_RNA (1)...(19): siRNA sense strand
uggcaggugugacguaugc

SEQ ID NO: 620508 - RNA, 19 nt, Homo sapiens
  misc_RNA (1)...(19): siRNA sense strand
gcacccuccugagcuucaa

SEQ ID NO: 620509 - RNA, 19 nt, Homo sapiens
  misc_RNA (1)...(19): siRNA sense strand
acagcacccuccugagcuu

SEQ ID NO: 620510 - RNA, 19 nt, Homo sapiens
  misc_RNA (1)...(19): siRNA sense strand
ggaagaaaugcugaagucu

SEQ ID NO: 620511 - RNA, 19 nt, Homo sapiens
  misc_RNA (1)...(19): siRNA sense strand
ccaccgagaacaagacucu

SEQ ID NO: 620512 - RNA, 19 nt, Homo sapiens
  misc_RNA (1)...(19): siRNA sense strand
gacaaggagcugcaguaca

SEQ ID NO: 620513 - RNA, 19 nt, Homo sapiens
  misc_RNA (1)...(19): siRNA sense strand
ugugacguaugcagccaaa

SEQ ID NO: 620514 - RNA, 19 nt, Homo sapiens
  misc_RNA (1)...(19): siRNA sense strand
gagccagggcagcaagaau

SEQ ID NO: 620515 - RNA, 19 nt, Homo sapiens
  misc_RNA (1)...(19): siRNA sense strand
ccacaggcagauccagaau

SEQ ID NO: 620516 - RNA, 19 nt, Homo sapiens
  misc_RNA (1)...(19): siRNA sense strand
agugacaggcugcacauga

SEQ ID NO: 620517 - RNA, 19 nt, Homo sapiens
  misc_RNA (1)...(19): siRNA sense strand
gcaagcucagcgacuccua

SEQ ID NO: 620518 - RNA, 19 nt, Homo sapiens
  misc_RNA (1)...(19): siRNA sense strand
gcaagaauccucagaagua

SEQ ID NO: 620519 - RNA, 19 nt, Homo sapiens
  misc_RNA (1)...(19): siRNA sense strand
gugcugcgcugaagaaaua

SEQ ID NO: 620520 - RNA, 19 nt, Homo sapiens
  misc_RNA (1)...(19): siRNA sense strand
agaaucagcuggaagaaau

SEQ ID NO: 620521 - RNA, 19 nt, Homo sapiens
  misc_RNA (1)...(19): siRNA sense strand
agggcgagcuggagaauua

SEQ ID NO: 620522 - RNA, 19 nt, Homo sapiens
  misc_RNA (1)...(19): siRNA sense strand
acaaggagcugcaguacau

SEQ ID NO: 620523 - RNA, 19 nt, Homo sapiens
  misc_RNA (1)...(19): siRNA sense strand
uuacgcagcuggagcagaa

SEQ ID NO: 620524 - RNA, 19 nt, Homo sapiens
  misc_RNA (1)...(19): siRNA sense strand
acaggcagauccagaauca

SEQ ID NO: 620525 - RNA, 19 nt, Homo sapiens
  misc_RNA (1)...(19): siRNA sense strand
ggagagcacacccaucaug

SEQ ID NO: 620526 - RNA, 19 nt, Homo sapiens
  misc_RNA (1)...(19): siRNA sense strand
gagagcacacccaucauga

SEQ ID NO: 620527 - RNA, 19 nt, Homo sapiens
  misc_RNA (1)...(19): siRNA sense strand
caaagaacucggagacguu

SEQ ID NO: 620528 - RNA, 19 nt, Homo sapiens
  misc_RNA (1)...(19): siRNA sense strand
uggaagaaaugcugaaguc

SEQ ID NO: 620529 - RNA, 19 nt, Homo sapiens
  misc_RNA (1)...(19): siRNA sense strand
gcagcaagaauccucagaa

SEQ ID NO: 620530 - RNA, 19 nt, Homo sapiens
  misc_RNA (1)...(19): siRNA sense strand
cagcaagaauccucagaag

SEQ ID NO: 620531 - RNA, 19 nt, Homo sapiens
  misc_RNA (1)...(19): siRNA sense strand
caagaauccucagaaguac

SEQ ID NO: 620532 - RNA, 19 nt, Homo sapiens
  misc_RNA (1)...(19): siRNA sense strand
caggagagcacacccauca

SEQ ID NO: 620533 - RNA, 19 nt, Homo sapiens
  misc_RNA (1)...(19): siRNA sense strand
gggccuggaugacuaugga

SEQ ID NO: 620534 - RNA, 19 nt, Homo sapiens
  misc_RNA (1)...(19): siRNA sense strand
gaaauaccagacugagcaa

SEQ ID NO: 620535 - RNA, 19 nt, Homo sapiens
  misc_RNA (1)...(19): siRNA sense strand
ggagcgcaauggccguaug

SEQ ID NO: 620536 - RNA, 19 nt, Homo sapiens
  misc_RNA (1)...(19): siRNA sense strand
ugaagaaauaccagacuga

SEQ ID NO: 620537 - RNA, 19 nt, Homo sapiens
  misc_RNA (1)...(19): siRNA sense strand
gcaagagcgugaccccaaa

SEQ ID NO: 620538 - RNA, 19 nt, Homo sapiens
  misc_RNA (1)...(19): siRNA sense strand
aguccaaccuggucauuuc

SEQ ID NO: 620539 - RNA, 19 nt, Homo sapiens
  misc_RNA (1)...(19): siRNA sense strand
cuacaagaccgcacugaca

SEQ ID NO: 620540 - RNA, 19 nt, Homo sapiens
  misc_RNA (1)...(19): siRNA sense strand
gcacaugagccugcagcaa

SEQ ID NO: 620541 - RNA, 19 nt, Homo sapiens
  misc_RNA (1)...(19): siRNA sense strand
cagaaucagcuggaagaaa

SEQ ID NO: 620542 - RNA, 19 nt, Homo sapiens
  misc_RNA (1)...(19): siRNA sense strand
gagcacacccaucaugaac

SEQ ID NO: 620543 - RNA, 19 nt, Homo sapiens
  misc_RNA (1)...(19): siRNA sense strand
ggacaaggagcugcaguac

SEQ ID NO: 620544 - RNA, 19 nt, Homo sapiens
  misc_RNA (1)...(19): siRNA sense strand
ucacggaaaaugucuauaa

SEQ ID NO: 620545 - RNA, 19 nt, Homo sapiens
  misc_RNA (1)...(19): siRNA sense strand
gcuaugccaccaccgagaa

SEQ ID NO: 620546 - RNA, 19 nt, Homo sapiens
  misc_RNA (1)...(19): siRNA sense strand
gugacaggcugcacaugag

SEQ ID NO: 620547 - RNA, 19 nt, Homo sapiens
  misc_RNA (1)...(19): siRNA sense strand
gagagagugagaagaccaa

SEQ ID NO: 620548 - RNA, 19 nt, Homo sapiens
  misc_RNA (1)...(19): siRNA sense strand
ugagugcugcgcugaagaa

SEQ ID NO: 620549 - RNA, 19 nt, Homo sapiens
  misc_RNA (1)...(19): siRNA sense strand
cgggcaaccuccuggacaa

SEQ ID NO: 620550 - RNA, 19 nt, Homo sapiens
  misc_RNA (1)...(19): siRNA sense strand
gcugguuucccuucuccua

SEQ ID NO: 620551 - RNA, 19 nt, Homo sapiens
  misc_RNA (1)...(19): siRNA sense strand
agaaguacucggacaagga

SEQ ID NO: 620552 - RNA, 19 nt, Homo sapiens
  misc_RNA (1)...(19): siRNA sense strand
agagugagaagaccaagau

SEQ ID NO: 620553 - RNA, 19 nt, Homo sapiens
  misc_RNA (1)...(19): siRNA sense strand
gaaucagcuggaagaaaug

SEQ ID NO: 620554 - RNA, 19 nt, Homo sapiens
  misc_RNA (1)...(19): siRNA sense strand
gagagugagaagaccaaga

SEQ ID NO: 620555 - RNA, 19 nt, Homo sapiens
  misc_RNA (1)...(19): siRNA sense strand
caucaugaacggcgucaca

SEQ ID NO: 620556 - RNA, 19 nt, Homo sapiens
  misc_RNA (1)...(19): siRNA sense strand
cggacaaggagcugcagua

SEQ ID NO: 620557 - RNA, 19 nt, Homo sapiens
  misc_RNA (1)...(19): siRNA sense strand
uuucacaacgagcugcuua

SEQ ID NO: 620558 - RNA, 19 nt, Homo sapiens
  misc_RNA (1)...(19): siRNA sense strand
uggcaggugugacguaugc

SEQ ID NO: 620559 - RNA, 19 nt, Homo sapiens
  misc_RNA (1)...(19): siRNA sense strand
gcacccuccugagcuucaa

SEQ ID NO: 620560 - RNA, 19 nt, Homo sapiens
  misc_RNA (1)...(19): siRNA sense strand
acagcacccuccugagcuu

SEQ ID NO: 620561 - RNA, 19 nt, Homo sapiens
  misc_RNA (1)...(19): siRNA sense strand
ggaagaaaugcugaagucu

SEQ ID NO: 620562 - RNA, 19 nt, Homo sapiens
  misc_RNA (1)...(19): siRNA sense strand
ccaccgagaacaagacucu

SEQ ID NO: 620563 - RNA, 19 nt, Homo sapiens
  misc_RNA (1)...(19): siRNA sense strand
gacaaggagcugcaguaca

SEQ ID NO: 620564 - RNA, 19 nt, Homo sapiens
  misc_RNA (1)...(19): siRNA sense strand
ugugacguaugcagccaaa

SEQ ID NO: 620565 - RNA, 19 nt, Homo sapiens
  misc_RNA (1)...(19): siRNA sense strand
gagccagggcagcaagaau

SEQ ID NO: 620566 - RNA, 19 nt, Homo sapiens
  misc_RNA (1)...(19): siRNA sense strand
ccacaggcagauccagaau

SEQ ID NO: 620567 - RNA, 19 nt, Homo sapiens
  misc_RNA (1)...(19): siRNA sense strand
agugacaggcugcacauga

SEQ ID NO: 620568 - RNA, 19 nt, Homo sapiens
  misc_RNA (1)...(19): siRNA sense strand
gcaagcucagcgacuccua

SEQ ID NO: 620569 - RNA, 19 nt, Homo sapiens
  misc_RNA (1)...(19): siRNA sense strand
gcaagaauccucagaagua

SEQ ID NO: 620570 - RNA, 19 nt, Homo sapiens
  misc_RNA (1)...(19): siRNA sense strand
gugcugcgcugaagaaaua

SEQ ID NO: 620571 - RNA, 19 nt, Homo sapiens
  misc_RNA (1)...(19): siRNA sense strand
agaaucagcuggaagaaau

SEQ ID NO: 620572 - RNA, 19 nt, Homo sapiens
  misc_RNA (1)...(19): siRNA sense strand
agggcgagcuggagaauua

SEQ ID NO: 620573 - RNA, 19 nt, Homo sapiens
  misc_RNA (1)...(19): siRNA sense strand
acaaggagcugcaguacau

SEQ ID NO: 620574 - RNA, 19 nt, Homo sapiens
  misc_RNA (1)...(19): siRNA sense strand
uuacgcagcuggagcagaa

SEQ ID NO: 620575 - RNA, 19 nt, Homo sapiens
  misc_RNA (1)...(19): siRNA sense strand
acaggcagauccagaauca

SEQ ID NO: 620576 - RNA, 19 nt, Homo sapiens
  misc_RNA (1)...(19): siRNA sense strand
ggagagcacacccaucaug

SEQ ID NO: 620577 - RNA, 19 nt, Homo sapiens
  misc_RNA (1)...(19): siRNA sense strand
gagagcacacccaucauga

SEQ ID NO: 620578 - RNA, 19 nt, Homo sapiens
  misc_RNA (1)...(19): siRNA sense strand
caaagaacucggagacguu

SEQ ID NO: 620579 - RNA, 19 nt, Homo sapiens
  misc_RNA (1)...(19): siRNA sense strand
uggaagaaaugcugaaguc

SEQ ID NO: 620580 - RNA, 19 nt, Homo sapiens
  misc_RNA (1)...(19): siRNA sense strand
gcagcaagaauccucagaa

SEQ ID NO: 620581 - RNA, 19 nt, Homo sapiens
  misc_RNA (1)...(19): siRNA sense strand
cagcaagaauccucagaag

SEQ ID NO: 620582 - RNA, 19 nt, Homo sapiens
  misc_RNA (1)...(19): siRNA sense strand
caagaauccucagaaguac

SEQ ID NO: 620583 - RNA, 19 nt, Homo sapiens
  misc_RNA (1)...(19): siRNA sense strand
caggagagcacacccauca

SEQ ID NO: 620584 - RNA, 19 nt, Homo sapiens
  misc_RNA (1)...(19): siRNA sense strand
gggccuggaugacuaugga

SEQ ID NO: 620585 - RNA, 19 nt, Homo sapiens
  misc_RNA (1)...(19): siRNA sense strand
gaaauaccagacugagcaa

SEQ ID NO: 620586 - RNA, 19 nt, Homo sapiens
  misc_RNA (1)...(19): siRNA sense strand
ggagcgcaauggccguaug

SEQ ID NO: 620587 - RNA, 19 nt, Homo sapiens
  misc_RNA (1)...(19): siRNA sense strand
ugaagaaauaccagacuga

SEQ ID NO: 620588 - RNA, 19 nt, Homo sapiens
  misc_RNA (1)...(19): siRNA sense strand
gcaagagcgugaccccaaa

SEQ ID NO: 620589 - RNA, 19 nt, Homo sapiens
  misc_RNA (1)...(19): siRNA sense strand
aguccaaccuggucauuuc

SEQ ID NO: 620590 - RNA, 19 nt, Homo sapiens
  misc_RNA (1)...(19): siRNA sense strand
cuacaagaccgcacugaca

SEQ ID NO: 620591 - RNA, 19 nt, Homo sapiens
  misc_RNA (1)...(19): siRNA sense strand
gcacaugagccugcagcaa

SEQ ID NO: 620592 - RNA, 19 nt, Homo sapiens
  misc_RNA (1)...(19): siRNA sense strand
cagaaucagcuggaagaaa

SEQ ID NO: 620593 - RNA, 19 nt, Homo sapiens
  misc_RNA (1)...(19): siRNA sense strand
gagcacacccaucaugaac

SEQ ID NO: 620594 - RNA, 19 nt, Homo sapiens
  misc_RNA (1)...(19): siRNA sense strand
ggacaaggagcugcaguac

SEQ ID NO: 620595 - RNA, 19 nt, Homo sapiens
  misc_RNA (1)...(19): siRNA sense strand
ucacggaaaaugucuauaa

SEQ ID NO: 620596 - RNA, 19 nt, Homo sapiens
  misc_RNA (1)...(19): siRNA sense strand
gcuaugccaccaccgagaa

SEQ ID NO: 620597 - RNA, 19 nt, Homo sapiens
  misc_RNA (1)...(19): siRNA sense strand
gugacaggcugcacaugag

SEQ ID NO: 620598 - RNA, 19 nt, Homo sapiens
  misc_RNA (1)...(19): siRNA sense strand
gagagagugagaagaccaa

SEQ ID NO: 620599 - RNA, 19 nt, Homo sapiens
  misc_RNA (1)...(19): siRNA sense strand
ugagugcugcgcugaagaa

SEQ ID NO: 620600 - RNA, 19 nt, Homo sapiens
  misc_RNA (1)...(19): siRNA sense strand
cgggcaaccuccuggacaa

SEQ ID NO: 620601 - RNA, 19 nt, Homo sapiens
  misc_RNA (1)...(19): siRNA sense strand
gcugguuucccuucuccua

SEQ ID NO: 620602 - RNA, 19 nt, Homo sapiens
  misc_RNA (1)...(19): siRNA sense strand
agaaguacucggacaagga

SEQ ID NO: 620603 - RNA, 19 nt, Homo sapiens
  misc_RNA (1)...(19): siRNA sense strand
agagugagaagaccaagau

SEQ ID NO: 620604 - RNA, 19 nt, Homo sapiens
  misc_RNA (1)...(19): siRNA sense strand
gaaucagcuggaagaaaug

SEQ ID NO: 620605 - RNA, 19 nt, Homo sapiens
  misc_RNA (1)...(19): siRNA sense strand
gagagugagaagaccaaga

SEQ ID NO: 620606 - RNA, 19 nt, Homo sapiens
  misc_RNA (1)...(19): siRNA sense strand
caucaugaacggcgucaca

SEQ ID NO: 620607 - RNA, 19 nt, Homo sapiens
  misc_RNA (1)...(19): siRNA sense strand
cggacaaggagcugcagua

SEQ ID NO: 620608 - RNA, 19 nt, Homo sapiens
  misc_RNA (1)...(19): siRNA sense strand
uuucacaacgagcugcuua

SEQ ID NO: 620609 - RNA, 19 nt, Homo sapiens
  misc_RNA (1)...(19): siRNA sense strand
uggcaggugugacguaugc

SEQ ID NO: 620610 - RNA, 19 nt, Homo sapiens
  misc_RNA (1)...(19): siRNA sense strand
gcacccuccugagcuucaa

SEQ ID NO: 620611 - RNA, 19 nt, Homo sapiens
  misc_RNA (1)...(19): siRNA sense strand
acagcacccuccugagcuu

SEQ ID NO: 620612 - RNA, 19 nt, Homo sapiens
  misc_RNA (1)...(19): siRNA sense strand
ggaagaaaugcugaagucu

SEQ ID NO: 620613 - RNA, 19 nt, Homo sapiens
  misc_RNA (1)...(19): siRNA sense strand
ccaccgagaacaagacucu

SEQ ID NO: 620614 - RNA, 19 nt, Homo sapiens
  misc_RNA (1)...(19): siRNA sense strand
gacaaggagcugcaguaca

SEQ ID NO: 620615 - RNA, 19 nt, Homo sapiens
  misc_RNA (1)...(19): siRNA sense strand
ugugacguaugcagccaaa

SEQ ID NO: 620616 - RNA, 19 nt, Homo sapiens
  misc_RNA (1)...(19): siRNA sense strand
gagccagggcagcaagaau

SEQ ID NO: 620617 - RNA, 19 nt, Homo sapiens
  misc_RNA (1)...(19): siRNA sense strand
ccacaggcagauccagaau

SEQ ID NO: 620618 - RNA, 19 nt, Homo sapiens
  misc_RNA (1)...(19): siRNA sense strand
agugacaggcugcacauga

SEQ ID NO: 620619 - RNA, 19 nt, Homo sapiens
  misc_RNA (1)...(19): siRNA sense strand
gcaagcucagcgacuccua

SEQ ID NO: 620620 - RNA, 19 nt, Homo sapiens
  misc_RNA (1)...(19): siRNA sense strand
gcaagaauccucagaagua

SEQ ID NO: 620621 - RNA, 19 nt, Homo sapiens
  misc_RNA (1)...(19): siRNA sense strand
gugcugcgcugaagaaaua

SEQ ID NO: 620622 - RNA, 19 nt, Homo sapiens
  misc_RNA (1)...(19): siRNA sense strand
agaaucagcuggaagaaau

SEQ ID NO: 620623 - RNA, 19 nt, Homo sapiens
  misc_RNA (1)...(19): siRNA sense strand
agggcgagcuggagaauua

SEQ ID NO: 620624 - RNA, 19 nt, Homo sapiens
  misc_RNA (1)...(19): siRNA sense strand
acaaggagcugcaguacau

SEQ ID NO: 620625 - RNA, 19 nt, Homo sapiens
  misc_RNA (1)...(19): siRNA sense strand
uuacgcagcuggagcagaa

SEQ ID NO: 620626 - RNA, 19 nt, Homo sapiens
  misc_RNA (1)...(19): siRNA sense strand
acaggcagauccagaauca

SEQ ID NO: 620627 - RNA, 19 nt, Homo sapiens
  misc_RNA (1)...(19): siRNA sense strand
ggagagcacacccaucaug

SEQ ID NO: 620628 - RNA, 19 nt, Homo sapiens
  misc_RNA (1)...(19): siRNA sense strand
gagagcacacccaucauga

SEQ ID NO: 620629 - RNA, 19 nt, Homo sapiens
  misc_RNA (1)...(19): siRNA sense strand
caaagaacucggagacguu

SEQ ID NO: 620630 - RNA, 19 nt, Homo sapiens
  misc_RNA (1)...(19): siRNA sense strand
uggaagaaaugcugaaguc

SEQ ID NO: 620631 - RNA, 19 nt, Homo sapiens
  misc_RNA (1)...(19): siRNA sense strand
gcagcaagaauccucagaa

SEQ ID NO: 620632 - RNA, 19 nt, Homo sapiens
  misc_RNA (1)...(19): siRNA sense strand
cagcaagaauccucagaag

SEQ ID NO: 620633 - RNA, 19 nt, Homo sapiens
  misc_RNA (1)...(19): siRNA sense strand
caagaauccucagaaguac

SEQ ID NO: 620634 - RNA, 19 nt, Homo sapiens
  misc_RNA (1)...(19): siRNA sense strand
caggagagcacacccauca

SEQ ID NO: 620635 - RNA, 19 nt, Homo sapiens
  misc_RNA (1)...(19): siRNA sense strand
gggccuggaugacuaugga

SEQ ID NO: 620636 - RNA, 19 nt, Homo sapiens
  misc_RNA (1)...(19): siRNA sense strand
gaaauaccagacugagcaa

SEQ ID NO: 620637 - RNA, 19 nt, Homo sapiens
  misc_RNA (1)...(19): siRNA sense strand
ggagcgcaauggccguaug

SEQ ID NO: 620638 - RNA, 19 nt, Homo sapiens
  misc_RNA (1)...(19): siRNA sense strand
ugaagaaauaccagacuga

SEQ ID NO: 620639 - RNA, 19 nt, Homo sapiens
  misc_RNA (1)...(19): siRNA sense strand
gcaagagcgugaccccaaa

SEQ ID NO: 620640 - RNA, 19 nt, Homo sapiens
  misc_RNA (1)...(19): siRNA sense strand
aguccaaccuggucauuuc

SEQ ID NO: 620641 - RNA, 19 nt, Homo sapiens
  misc_RNA (1)...(19): siRNA sense strand
cuacaagaccgcacugaca

SEQ ID NO: 620642 - RNA, 19 nt, Homo sapiens
  misc_RNA (1)...(19): siRNA sense strand
gcacaugagccugcagcaa

SEQ ID NO: 620643 - RNA, 19 nt, Homo sapiens
  misc_RNA (1)...(19): siRNA sense strand
cagaaucagcuggaagaaa

SEQ ID NO: 620644 - RNA, 19 nt, Homo sapiens
  misc_RNA (1)...(19): siRNA sense strand
gagcacacccaucaugaac

SEQ ID NO: 620645 - RNA, 19 nt, Homo sapiens
  misc_RNA (1)...(19): siRNA sense strand
ggacaaggagcugcaguac

SEQ ID NO: 620646 - RNA, 19 nt, Homo sapiens
  misc_RNA (1)...(19): siRNA sense strand
ucacggaaaaugucuauaa

SEQ ID NO: 620647 - RNA, 19 nt, Homo sapiens
  misc_RNA (1)...(19): siRNA sense strand
gcuaugccaccaccgagaa

SEQ ID NO: 620648 - RNA, 19 nt, Homo sapiens
  misc_RNA (1)...(19): siRNA sense strand
gugacaggcugcacaugag

SEQ ID NO: 620649 - RNA, 19 nt, Homo sapiens
  misc_RNA (1)...(19): siRNA sense strand
gagagagugagaagaccaa

SEQ ID NO: 620650 - RNA, 19 nt, Homo sapiens
  misc_RNA (1)...(19): siRNA sense strand
ugagugcugcgcugaagaa

SEQ ID NO: 620651 - RNA, 19 nt, Homo sapiens
  misc_RNA (1)...(19): siRNA sense strand
cgggcaaccuccuggacaa

SEQ ID NO: 620652 - RNA, 19 nt, Homo sapiens
  misc_RNA (1)...(19): siRNA sense strand
gcugguuucccuucuccua

SEQ ID NO: 620653 - RNA, 19 nt, Homo sapiens
  misc_RNA (1)...(19): siRNA sense strand
agaaguacucggacaagga

SEQ ID NO: 620654 - RNA, 19 nt, Homo sapiens
  misc_RNA (1)...(19): siRNA sense strand
agagugagaagaccaagau

SEQ ID NO: 620655 - RNA, 19 nt, Homo sapiens
  misc_RNA (1)...(19): siRNA sense strand
gaaucagcuggaagaaaug

SEQ ID NO: 620656 - RNA, 19 nt, Homo sapiens
  misc_RNA (1)...(19): siRNA sense strand
gagagugagaagaccaaga

SEQ ID NO: 620657 - RNA, 19 nt, Homo sapiens
  misc_RNA (1)...(19): siRNA sense strand
caucaugaacggcgucaca

SEQ ID NO: 620658 - RNA, 19 nt, Homo sapiens
  misc_RNA (1)...(19): siRNA sense strand
cggacaaggagcugcagua

SEQ ID NO: 620659 - RNA, 19 nt, Homo sapiens
  misc_RNA (1)...(19): siRNA sense strand
uuucacaacgagcugcuua

SEQ ID NO: 620660 - RNA, 19 nt, Homo sapiens
  misc_RNA (1)...(19): siRNA sense strand
uggcaggugugacguaugc

SEQ ID NO: 620661 - RNA, 19 nt, Homo sapiens
  misc_RNA (1)...(19): siRNA sense strand
gcacccuccugagcuucaa

SEQ ID NO: 620662 - RNA, 19 nt, Homo sapiens
  misc_RNA (1)...(19): siRNA sense strand
acagcacccuccugagcuu

SEQ ID NO: 620663 - RNA, 19 nt, Homo sapiens
  misc_RNA (1)...(19): siRNA sense strand
ggaagaaaugcugaagucu

SEQ ID NO: 620664 - RNA, 19 nt, Homo sapiens
  misc_RNA (1)...(19): siRNA sense strand
ccaccgagaacaagacucu

SEQ ID NO: 620665 - RNA, 19 nt, Homo sapiens
  misc_RNA (1)...(19): siRNA sense strand
gacaaggagcugcaguaca

SEQ ID NO: 620666 - RNA, 19 nt, Homo sapiens
  misc_RNA (1)...(19): siRNA sense strand
ugugacguaugcagccaaa

SEQ ID NO: 620667 - RNA, 19 nt, Homo sapiens
  misc_RNA (1)...(19): siRNA sense strand
gagccagggcagcaagaau

SEQ ID NO: 620668 - RNA, 19 nt, Homo sapiens
  misc_RNA (1)...(19): siRNA sense strand
ccacaggcagauccagaau

SEQ ID NO: 620669 - RNA, 19 nt, Homo sapiens
  misc_RNA (1)...(19): siRNA sense strand
agugacaggcugcacauga

SEQ ID NO: 620670 - RNA, 19 nt, Homo sapiens
  misc_RNA (1)...(19): siRNA sense strand
gcaagcucagcgacuccua

SEQ ID NO: 620671 - RNA, 19 nt, Homo sapiens
  misc_RNA (1)...(19): siRNA sense strand
gcaagaauccucagaagua

SEQ ID NO: 620672 - RNA, 19 nt, Homo sapiens
  misc_RNA (1)...(19): siRNA sense strand
gugcugcgcugaagaaaua

SEQ ID NO: 620673 - RNA, 19 nt, Homo sapiens
  misc_RNA (1)...(19): siRNA sense strand
agaaucagcuggaagaaau

SEQ ID NO: 620674 - RNA, 19 nt, Homo sapiens
  misc_RNA (1)...(19): siRNA sense strand
agggcgagcuggagaauua

SEQ ID NO: 620675 - RNA, 19 nt, Homo sapiens
  misc_RNA (1)...(19): siRNA sense strand
acaaggagcugcaguacau

SEQ ID NO: 620676 - RNA, 19 nt, Homo sapiens
  misc_RNA (1)...(19): siRNA sense strand
uuacgcagcuggagcagaa

SEQ ID NO: 620677 - RNA, 19 nt, Homo sapiens
  misc_RNA (1)...(19): siRNA sense strand
acaggcagauccagaauca

SEQ ID NO: 620678 - RNA, 19 nt, Homo sapiens
  misc_RNA (1)...(19): siRNA sense strand
ggagagcacacccaucaug

SEQ ID NO: 620679 - RNA, 19 nt, Homo sapiens
  misc_RNA (1)...(19): siRNA sense strand
gagagcacacccaucauga

SEQ ID NO: 620680 - RNA, 19 nt, Homo sapiens
  misc_RNA (1)...(19): siRNA sense strand
caaagaacucggagacguu

SEQ ID NO: 620681 - RNA, 19 nt, Homo sapiens
  misc_RNA (1)...(19): siRNA sense strand
uggaagaaaugcugaaguc

SEQ ID NO: 620682 - RNA, 19 nt, Homo sapiens
  misc_RNA (1)...(19): siRNA sense strand
gcagcaagaauccucagaa

SEQ ID NO: 620683 - RNA, 19 nt, Homo sapiens
  misc_RNA (1)...(19): siRNA sense strand
cagcaagaauccucagaag

SEQ ID NO: 620684 - RNA, 19 nt, Homo sapiens
  misc_RNA (1)...(19): siRNA sense strand
caagaauccucagaaguac

SEQ ID NO: 620685 - RNA, 19 nt, Homo sapiens
  misc_RNA (1)...(19): siRNA sense strand
caggagagcacacccauca

SEQ ID NO: 620686 - RNA, 19 nt, Homo sapiens
  misc_RNA (1)...(19): siRNA sense strand
gggccuggaugacuaugga

SEQ ID NO: 620687 - RNA, 19 nt, Homo sapiens
  misc_RNA (1)...(19): siRNA sense strand
gaaauaccagacugagcaa

SEQ ID NO: 620688 - RNA, 19 nt, Homo sapiens
  misc_RNA (1)...(19): siRNA sense strand
ggagcgcaauggccguaug

SEQ ID NO: 620689 - RNA, 19 nt, Homo sapiens
  misc_RNA (1)...(19): siRNA sense strand
ugaagaaauaccagacuga

SEQ ID NO: 620690 - RNA, 19 nt, Homo sapiens
  misc_RNA (1)...(19): siRNA sense strand
gcaagagcgugaccccaaa

SEQ ID NO: 620691 - RNA, 19 nt, Homo sapiens
  misc_RNA (1)...(19): siRNA sense strand
aguccaaccuggucauuuc

SEQ ID NO: 620692 - RNA, 19 nt, Homo sapiens
  misc_RNA (1)...(19): siRNA sense strand
cuacaagaccgcacugaca

SEQ ID NO: 620693 - RNA, 19 nt, Homo sapiens
  misc_RNA (1)...(19): siRNA sense strand
gcacaugagccugcagcaa

SEQ ID NO: 620694 - RNA, 19 nt, Homo sapiens
  misc_RNA (1)...(19): siRNA sense strand
cagaaucagcuggaagaaa

SEQ ID NO: 620695 - RNA, 19 nt, Homo sapiens
  misc_RNA (1)...(19): siRNA sense strand
gagcacacccaucaugaac

SEQ ID NO: 620696 - RNA, 19 nt, Homo sapiens
  misc_RNA (1)...(19): siRNA sense strand
ggacaaggagcugcaguac

SEQ ID NO: 620697 - RNA, 19 nt, Homo sapiens
  misc_RNA (1)...(19): siRNA sense strand
ucacggaaaaugucuauaa

SEQ ID NO: 620698 - RNA, 19 nt, Homo sapiens
  misc_RNA (1)...(19): siRNA sense strand
gcuaugccaccaccgagaa

SEQ ID NO: 620699 - RNA, 19 nt, Homo sapiens
  misc_RNA (1)...(19): siRNA sense strand
gugacaggcugcacaugag

SEQ ID NO: 620700 - RNA, 19 nt, Homo sapiens
  misc_RNA (1)...(19): siRNA sense strand
gagagagugagaagaccaa

SEQ ID NO: 620701 - RNA, 19 nt, Homo sapiens
  misc_RNA (1)...(19): siRNA sense strand
ugagugcugcgcugaagaa

SEQ ID NO: 620702 - RNA, 19 nt, Homo sapiens
  misc_RNA (1)...(19): siRNA sense strand
cgggcaaccuccuggacaa

SEQ ID NO: 620703 - RNA, 19 nt, Homo sapiens
  misc_RNA (1)...(19): siRNA sense strand
gcugguuucccuucuccua

SEQ ID NO: 620704 - RNA, 19 nt, Homo sapiens
  misc_RNA (1)...(19): siRNA sense strand
agaaguacucggacaagga

SEQ ID NO: 620705 - RNA, 19 nt, Homo sapiens
  misc_RNA (1)...(19): siRNA sense strand
agagugagaagaccaagau

SEQ ID NO: 620706 - RNA, 19 nt, Homo sapiens
  misc_RNA (1)...(19): siRNA sense strand
gaaucagcuggaagaaaug

SEQ ID NO: 620707 - RNA, 19 nt, Homo sapiens
  misc_RNA (1)...(19): siRNA sense strand
gagagugagaagaccaaga

SEQ ID NO: 620708 - RNA, 19 nt, Homo sapiens
  misc_RNA (1)...(19): siRNA sense strand
caucaugaacggcgucaca

SEQ ID NO: 620709 - RNA, 19 nt, Homo sapiens
  misc_RNA (1)...(19): siRNA sense strand
cggacaaggagcugcagua

SEQ ID NO: 620710 - RNA, 19 nt, Homo sapiens
  misc_RNA (1)...(19): siRNA sense strand
uuucacaacgagcugcuua

SEQ ID NO: 620711 - RNA, 19 nt, Homo sapiens
  misc_RNA (1)...(19): siRNA sense strand
uggcaggugugacguaugc

SEQ ID NO: 620712 - RNA, 19 nt, Homo sapiens
  misc_RNA (1)...(19): siRNA sense strand
gcacccuccugagcuucaa

SEQ ID NO: 620713 - RNA, 19 nt, Homo sapiens
  misc_RNA (1)...(19): siRNA sense strand
acagcacccuccugagcuu

SEQ ID NO: 620714 - RNA, 19 nt, Homo sapiens
  misc_RNA (1)...(19): siRNA sense strand
ggaagaaaugcugaagucu

SEQ ID NO: 620715 - RNA, 19 nt, Homo sapiens
  misc_RNA (1)...(19): siRNA sense strand
ccaccgagaacaagacucu

SEQ ID NO: 620716 - RNA, 19 nt, Homo sapiens
  misc_RNA (1)...(19): siRNA sense strand
gacaaggagcugcaguaca

SEQ ID NO: 620717 - RNA, 19 nt, Homo sapiens
  misc_RNA (1)...(19): siRNA sense strand
ugugacguaugcagccaaa

SEQ ID NO: 620718 - RNA, 19 nt, Homo sapiens
  misc_RNA (1)...(19): siRNA sense strand
gagccagggcagcaagaau

SEQ ID NO: 620719 - RNA, 19 nt, Homo sapiens
  misc_RNA (1)...(19): siRNA sense strand
ccacaggcagauccagaau

SEQ ID NO: 620720 - RNA, 19 nt, Homo sapiens
  misc_RNA (1)...(19): siRNA sense strand
agugacaggcugcacauga

SEQ ID NO: 620721 - RNA, 19 nt, Homo sapiens
  misc_RNA (1)...(19): siRNA sense strand
gcaagcucagcgacuccua

SEQ ID NO: 620722 - RNA, 19 nt, Homo sapiens
  misc_RNA (1)...(19): siRNA sense strand
gcaagaagauuucaaagaa

SEQ ID NO: 620723 - RNA, 19 nt, Homo sapiens
  misc_RNA (1)...(19): siRNA sense strand
aaacggaacuugccuguga

SEQ ID NO: 620724 - RNA, 19 nt, Homo sapiens
  misc_RNA (1)...(19): siRNA sense strand
gaacuugccugugaauuuc

SEQ ID NO: 620725 - RNA, 19 nt, Homo sapiens
  misc_RNA (1)...(19): siRNA sense strand
gaacgaauuuguaucucuu

SEQ ID NO: 620726 - RNA, 19 nt, Homo sapiens
  misc_RNA (1)...(19): siRNA sense strand
gaagacacccauaaagaaa

SEQ ID NO: 620727 - RNA, 19 nt, Homo sapiens
  misc_RNA (1)...(19): siRNA sense strand
ggaacuugccugugaauuu

SEQ ID NO: 620728 - RNA, 19 nt, Homo sapiens
  misc_RNA (1)...(19): siRNA sense strand
ggagauccuugguuucaaa

SEQ ID NO: 620729 - RNA, 19 nt, Homo sapiens
  misc_RNA (1)...(19): siRNA sense strand
ggacaucacaccaaagauu

SEQ ID NO: 620730 - RNA, 19 nt, Homo sapiens
  misc_RNA (1)...(19): siRNA sense strand
uaaaguugcugucugaguu

SEQ ID NO: 620731 - RNA, 19 nt, Homo sapiens
  misc_RNA (1)...(19): siRNA sense strand
gagaagacacccauaaaga

SEQ ID NO: 620732 - RNA, 19 nt, Homo sapiens
  misc_RNA (1)...(19): siRNA sense strand
guacagagaugccaagaac

SEQ ID NO: 620733 - RNA, 19 nt, Homo sapiens
  misc_RNA (1)...(19): siRNA sense strand
gaaaaugggacuaguaaua

SEQ ID NO: 620734 - RNA, 19 nt, Homo sapiens
  misc_RNA (1)...(19): siRNA sense strand
gcaauuuaauggcaaagga

SEQ ID NO: 620735 - RNA, 19 nt, Homo sapiens
  misc_RNA (1)...(19): siRNA sense strand
cacgguaacugccaugaua

SEQ ID NO: 620736 - RNA, 19 nt, Homo sapiens
  misc_RNA (1)...(19): siRNA sense strand
gaagagaauccgaagaaga

SEQ ID NO: 620737 - RNA, 19 nt, Homo sapiens
  misc_RNA (1)...(19): siRNA sense strand
ggaggugaauggaagagaa

SEQ ID NO: 620738 - RNA, 19 nt, Homo sapiens
  misc_RNA (1)...(19): siRNA sense strand
gaacgggcaccaacaagaa

SEQ ID NO: 620739 - RNA, 19 nt, Homo sapiens
  misc_RNA (1)...(19): siRNA sense strand
ucaaggacaucacaccaaa

SEQ ID NO: 620740 - RNA, 19 nt, Homo sapiens
  misc_RNA (1)...(19): siRNA sense strand
caugauagcccgagaguug

SEQ ID NO: 620741 - RNA, 19 nt, Homo sapiens
  misc_RNA (1)...(19): siRNA sense strand
uugaggagcugaagaaguu

SEQ ID NO: 620742 - RNA, 19 nt, Homo sapiens
  misc_RNA (1)...(19): siRNA sense strand
gaggagaagacacccauaa

SEQ ID NO: 620743 - RNA, 19 nt, Homo sapiens
  misc_RNA (1)...(19): siRNA sense strand
gaaauaagucaaguguuug

SEQ ID NO: 620744 - RNA, 19 nt, Homo sapiens
  misc_RNA (1)...(19): siRNA sense strand
guggaguccugccaugaua

SEQ ID NO: 620745 - RNA, 19 nt, Homo sapiens
  misc_RNA (1)...(19): siRNA sense strand
gcagggaguuugugaugca

SEQ ID NO: 620746 - RNA, 19 nt, Homo sapiens
  misc_RNA (1)...(19): siRNA sense strand
ugaggauccugcagaauga

SEQ ID NO: 620747 - RNA, 19 nt, Homo sapiens
  misc_RNA (1)...(19): siRNA sense strand
ggaugcaguccaccuauaa

SEQ ID NO: 620748 - RNA, 19 nt, Homo sapiens
  misc_RNA (1)...(19): siRNA sense strand
cagagaggcuggaggugaa

SEQ ID NO: 620749 - RNA, 19 nt, Homo sapiens
  misc_RNA (1)...(19): siRNA sense strand
aaaccacacugcagaagga

SEQ ID NO: 620750 - RNA, 19 nt, Homo sapiens
  misc_RNA (1)...(19): siRNA sense strand
gaacgaguaaagccuagaa

SEQ ID NO: 620751 - RNA, 19 nt, Homo sapiens
  misc_RNA (1)...(19): siRNA sense strand
gacaucacaccaaagauuu

SEQ ID NO: 620752 - RNA, 19 nt, Homo sapiens
  misc_RNA (1)...(19): siRNA sense strand
guaauaaagaggaugaguu

SEQ ID NO: 620753 - RNA, 19 nt, Homo sapiens
  misc_RNA (1)...(19): siRNA sense strand
ugaagaacuuugugaccaa

SEQ ID NO: 620754 - RNA, 19 nt, Homo sapiens
  misc_RNA (1)...(19): siRNA sense strand
ggagaagacacccauaaag

SEQ ID NO: 620755 - RNA, 19 nt, Homo sapiens
  misc_RNA (1)...(19): siRNA sense strand
aguaaagccuagaaucaaa

SEQ ID NO: 620756 - RNA, 19 nt, Homo sapiens
  misc_RNA (1)...(19): siRNA sense strand
caagacaggcugcgaaaca

SEQ ID NO: 620757 - RNA, 19 nt, Homo sapiens
  misc_RNA (1)...(19): siRNA sense strand
ccaacaaaguacagagaug

SEQ ID NO: 620758 - RNA, 19 nt, Homo sapiens
  misc_RNA (1)...(19): siRNA sense strand
acacgaugcugcugccaaa

SEQ ID NO: 620759 - RNA, 19 nt, Homo sapiens
  misc_RNA (1)...(19): siRNA sense strand
aagagaauccgaagaagaa

SEQ ID NO: 620760 - RNA, 19 nt, Homo sapiens
  misc_RNA (1)...(19): siRNA sense strand
gaaacggaccaaugucugu

SEQ ID NO: 620761 - RNA, 19 nt, Homo sapiens
  misc_RNA (1)...(19): siRNA sense strand
caagaacgaauuuguaucu

SEQ ID NO: 620762 - RNA, 19 nt, Homo sapiens
  misc_RNA (1)...(19): siRNA sense strand
gagcaacuggacuaucuuu

SEQ ID NO: 620763 - RNA, 19 nt, Homo sapiens
  misc_RNA (1)...(19): siRNA sense strand
uaauaaagaggaugaguuc

SEQ ID NO: 620764 - RNA, 19 nt, Homo sapiens
  misc_RNA (1)...(19): siRNA sense strand
agaagacacccauaaagaa

SEQ ID NO: 620765 - RNA, 19 nt, Homo sapiens
  misc_RNA (1)...(19): siRNA sense strand
ggaacgggcaccaacaaga

SEQ ID NO: 620766 - RNA, 19 nt, Homo sapiens
  misc_RNA (1)...(19): siRNA sense strand
uguuugagauugcacuuaa

SEQ ID NO: 620767 - RNA, 19 nt, Homo sapiens
  misc_RNA (1)...(19): siRNA sense strand
ggaagagaauccgaagaag

SEQ ID NO: 620768 - RNA, 19 nt, Homo sapiens
  misc_RNA (1)...(19): siRNA sense strand
gaguaaagccuagaaucaa

SEQ ID NO: 620769 - RNA, 19 nt, Homo sapiens
  misc_RNA (1)...(19): siRNA sense strand
cgaguaaagccuagaauca

SEQ ID NO: 620770 - RNA, 19 nt, Homo sapiens
  misc_RNA (1)...(19): siRNA sense strand
gcaaaggaaagacaagaca

SEQ ID NO: 620771 - RNA, 19 nt, Homo sapiens
  misc_RNA (1)...(19): siRNA sense strand
cgccauagcuguucuugag

SEQ ID NO: 620772 - RNA, 19 nt, Homo sapiens
  misc_RNA (1)...(19): siRNA sense strand
cggaugcaguccaccuaua

SEQ ID NO: 620773 - RNA, 19 nt, Homo sapiens
  misc_RNA (1)...(19): siRNA sense strand
ucuuaaaguugcugucuga

SEQ ID NO: 620774 - RNA, 19 nt, Homo sapiens
  misc_RNA (1)...(19): siRNA sense strand
gcgcugaacaucuuaaagu

SEQ ID NO: 620775 - RNA, 19 nt, Homo sapiens
  misc_RNA (1)...(19): siRNA sense strand
ccaguuccaccuuuacuuu

SEQ ID NO: 620776 - RNA, 19 nt, Homo sapiens
  misc_RNA (1)...(19): siRNA sense strand
gauccuugguuucaaaguc

SEQ ID NO: 620777 - RNA, 19 nt, Homo sapiens
  misc_RNA (1)...(19): siRNA sense strand
gaggacagcaauuuaaugg

SEQ ID NO: 620778 - RNA, 19 nt, Homo sapiens
  misc_RNA (1)...(19): siRNA sense strand
ggaggacagcaauuuaaug

SEQ ID NO: 620779 - RNA, 19 nt, Homo sapiens
  misc_RNA (1)...(19): siRNA sense strand
gggaaaagcaagaagauuu

SEQ ID NO: 620780 - RNA, 19 nt, Homo sapiens
  misc_RNA (1)...(19): siRNA sense strand
gacaagacaggcugcgaaa

SEQ ID NO: 620781 - RNA, 19 nt, Homo sapiens
  misc_RNA (1)...(19): siRNA sense strand
uggcugcgcugaacaucuu

SEQ ID NO: 620782 - RNA, 19 nt, Homo sapiens
  misc_RNA (1)...(19): siRNA sense strand
gaaggaacgggcaccaaca

SEQ ID NO: 620783 - RNA, 19 nt, Homo sapiens
  misc_RNA (1)...(19): siRNA sense strand
uggaagagaauccgaagaa

SEQ ID NO: 620784 - RNA, 19 nt, Homo sapiens
  misc_RNA (1)...(19): siRNA sense strand
ccacagacaagcccagaau

SEQ ID NO: 620785 - RNA, 19 nt, Homo sapiens
  misc_RNA (1)...(19): siRNA sense strand
ccucugaucagccauggua

SEQ ID NO: 620786 - RNA, 19 nt, Homo sapiens
  misc_RNA (1)...(19): siRNA sense strand
gcaaugcagccgagaacau

SEQ ID NO: 620787 - RNA, 19 nt, Homo sapiens
  misc_RNA (1)...(19): siRNA sense strand
gcugaacaucuuaaaguug

SEQ ID NO: 620788 - RNA, 19 nt, Homo sapiens
  misc_RNA (1)...(19): siRNA sense strand
gugggaggacagcaauuua

SEQ ID NO: 620789 - RNA, 19 nt, Homo sapiens
  misc_RNA (1)...(19): siRNA sense strand
ggagaaggagccagaguac

SEQ ID NO: 620790 - RNA, 19 nt, Homo sapiens
  misc_RNA (1)...(19): siRNA sense strand
acagacaagcccagaauau

SEQ ID NO: 620791 - RNA, 19 nt, Homo sapiens
  misc_RNA (1)...(19): siRNA sense strand
caauguauaagccuguuga

SEQ ID NO: 620792 - RNA, 19 nt, Homo sapiens
  misc_RNA (1)...(19): siRNA sense strand
gaacaggaaacggaccaau

SEQ ID NO: 620793 - RNA, 19 nt, Homo sapiens
  misc_RNA (1)...(19): siRNA sense strand
gaccaacaaaguacagaga

SEQ ID NO: 620794 - RNA, 19 nt, Homo sapiens
  misc_RNA (1)...(19): siRNA sense strand
uguaggaguuagucaagga

SEQ ID NO: 620795 - RNA, 19 nt, Homo sapiens
  misc_RNA (1)...(19): siRNA sense strand
ccgagaacaugcuggagau

SEQ ID NO: 620796 - RNA, 19 nt, Homo sapiens
  misc_RNA (1)...(19): siRNA sense strand
gcaguccaccuauaacuac

SEQ ID NO: 620797 - RNA, 19 nt, Homo sapiens
  misc_RNA (1)...(19): siRNA sense strand
gggaggacagcaauuuaau

SEQ ID NO: 620798 - RNA, 19 nt, Homo sapiens
  misc_RNA (1)...(19): siRNA sense strand
gagaugccaagaacaggaa

SEQ ID NO: 620799 - RNA, 19 nt, Homo sapiens
  misc_RNA (1)...(19): siRNA sense strand
gaacuuugugaccaagguu

SEQ ID NO: 620800 - RNA, 19 nt, Homo sapiens
  misc_RNA (1)...(19): siRNA sense strand
gcccgagaguuguuguaug

SEQ ID NO: 620801 - RNA, 19 nt, Homo sapiens
  misc_RNA (1)...(19): siRNA sense strand
caguuccaccuuuacuuua

SEQ ID NO: 620802 - RNA, 19 nt, Homo sapiens
  misc_RNA (1)...(19): siRNA sense strand
caugagaggaggugcuuau

SEQ ID NO: 620803 - RNA, 19 nt, Homo sapiens
  misc_RNA (1)...(19): siRNA sense strand
accuauaacuacaacauga

SEQ ID NO: 620804 - RNA, 19 nt, Homo sapiens
  misc_RNA (1)...(19): siRNA sense strand
aguacacgcuccucacaga

SEQ ID NO: 620805 - RNA, 19 nt, Homo sapiens
  misc_RNA (1)...(19): siRNA sense strand
gccugcaguugaacgagua

SEQ ID NO: 620806 - RNA, 19 nt, Homo sapiens
  misc_RNA (1)...(19): siRNA sense strand
cagacaagcccagaauaug

SEQ ID NO: 620807 - RNA, 19 nt, Homo sapiens
  misc_RNA (1)...(19): siRNA sense strand
acaggaaacggaccaaugu

SEQ ID NO: 620808 - RNA, 19 nt, Homo sapiens
  misc_RNA (1)...(19): siRNA sense strand
cgcugaacaucuuaaaguu

SEQ ID NO: 620809 - RNA, 19 nt, Homo sapiens
  misc_RNA (1)...(19): siRNA sense strand
cugagcaacuggacuaucu

SEQ ID NO: 620810 - RNA, 19 nt, Homo sapiens
  misc_RNA (1)...(19): siRNA sense strand
cccgagaguuguuguaugg

SEQ ID NO: 620811 - RNA, 19 nt, Homo sapiens
  misc_RNA (1)...(19): siRNA sense strand
caaacccgcacucaaguca

SEQ ID NO: 620812 - RNA, 19 nt, Homo sapiens
  misc_RNA (1)...(19): siRNA sense strand
gaagguggccaagcgcaau

SEQ ID NO: 620813 - RNA, 19 nt, Homo sapiens
  misc_RNA (1)...(19): siRNA sense strand
ccucugagcaacuggacua

SEQ ID NO: 620814 - RNA, 19 nt, Homo sapiens
  misc_RNA (1)...(19): siRNA sense strand
agaacgaauuuguaucucu

SEQ ID NO: 620815 - RNA, 19 nt, Homo sapiens
  misc_RNA (1)...(19): siRNA sense strand
uacaaagacuuccccaaaa

SEQ ID NO: 620816 - RNA, 19 nt, Homo sapiens
  misc_RNA (1)...(19): siRNA sense strand
agacaagcccagaauaugg

SEQ ID NO: 620817 - RNA, 19 nt, Homo sapiens
  misc_RNA (1)...(19): siRNA sense strand
ggaguccugccaugauaug

SEQ ID NO: 620818 - RNA, 19 nt, Homo sapiens
  misc_RNA (1)...(19): siRNA sense strand
caccaaacccgcacucaag

SEQ ID NO: 620819 - RNA, 19 nt, Homo sapiens
  misc_RNA (1)...(19): siRNA sense strand
gaacaugcuggagauccuu

SEQ ID NO: 620820 - RNA, 19 nt, Homo sapiens
  misc_RNA (1)...(19): siRNA sense strand
caaugcagccgagaacaug

SEQ ID NO: 620821 - RNA, 19 nt, Homo sapiens
  misc_RNA (1)...(19): siRNA sense strand
ugggaggacagcaauuuaa

SEQ ID NO: 620822 - RNA, 19 nt, Homo sapiens
  misc_RNA (1)...(19): siRNA sense strand
gcaagaagauuucaaagaa

SEQ ID NO: 620823 - RNA, 19 nt, Homo sapiens
  misc_RNA (1)...(19): siRNA sense strand
aaacggaacuugccuguga

SEQ ID NO: 620824 - RNA, 19 nt, Homo sapiens
  misc_RNA (1)...(19): siRNA sense strand
gaacuugccugugaauuuc

SEQ ID NO: 620825 - RNA, 19 nt, Homo sapiens
  misc_RNA (1)...(19): siRNA sense strand
gaacgaauuuguaucucuu

SEQ ID NO: 620826 - RNA, 19 nt, Homo sapiens
  misc_RNA (1)...(19): siRNA sense strand
gaagacacccauaaagaaa

SEQ ID NO: 620827 - RNA, 19 nt, Homo sapiens
  misc_RNA (1)...(19): siRNA sense strand
ggaacuugccugugaauuu

SEQ ID NO: 620828 - RNA, 19 nt, Homo sapiens
  misc_RNA (1)...(19): siRNA sense strand
ggagauccuugguuucaaa

SEQ ID NO: 620829 - RNA, 19 nt, Homo sapiens
  misc_RNA (1)...(19): siRNA sense strand
ggacaucacaccaaagauu

SEQ ID NO: 620830 - RNA, 19 nt, Homo sapiens
  misc_RNA (1)...(19): siRNA sense strand
uaaaguugcugucugaguu

SEQ ID NO: 620831 - RNA, 19 nt, Homo sapiens
  misc_RNA (1)...(19): siRNA sense strand
gagaagacacccauaaaga

SEQ ID NO: 620832 - RNA, 19 nt, Homo sapiens
  misc_RNA (1)...(19): siRNA sense strand
guacagagaugccaagaac

SEQ ID NO: 620833 - RNA, 19 nt, Homo sapiens
  misc_RNA (1)...(19): siRNA sense strand
gaaaaugggacuaguaaua

SEQ ID NO: 620834 - RNA, 19 nt, Homo sapiens
  misc_RNA (1)...(19): siRNA sense strand
gcaauuuaauggcaaagga

SEQ ID NO: 620835 - RNA, 19 nt, Homo sapiens
  misc_RNA (1)...(19): siRNA sense strand
cacgguaacugccaugaua

SEQ ID NO: 620836 - RNA, 19 nt, Homo sapiens
  misc_RNA (1)...(19): siRNA sense strand
gaagagaauccgaagaaga

SEQ ID NO: 620837 - RNA, 19 nt, Homo sapiens
  misc_RNA (1)...(19): siRNA sense strand
ggaggugaauggaagagaa

SEQ ID NO: 620838 - RNA, 19 nt, Homo sapiens
  misc_RNA (1)...(19): siRNA sense strand
gaacgggcaccaacaagaa

SEQ ID NO: 620839 - RNA, 19 nt, Homo sapiens
  misc_RNA (1)...(19): siRNA sense strand
ucaaggacaucacaccaaa

SEQ ID NO: 620840 - RNA, 19 nt, Homo sapiens
  misc_RNA (1)...(19): siRNA sense strand
caugauagcccgagaguug

SEQ ID NO: 620841 - RNA, 19 nt, Homo sapiens
  misc_RNA (1)...(19): siRNA sense strand
uugaggagcugaagaaguu

SEQ ID NO: 620842 - RNA, 19 nt, Homo sapiens
  misc_RNA (1)...(19): siRNA sense strand
gaggagaagacacccauaa

SEQ ID NO: 620843 - RNA, 19 nt, Homo sapiens
  misc_RNA (1)...(19): siRNA sense strand
gaaauaagucaaguguuug

SEQ ID NO: 620844 - RNA, 19 nt, Homo sapiens
  misc_RNA (1)...(19): siRNA sense strand
guggaguccugccaugaua

SEQ ID NO: 620845 - RNA, 19 nt, Homo sapiens
  misc_RNA (1)...(19): siRNA sense strand
gcagggaguuugugaugca

SEQ ID NO: 620846 - RNA, 19 nt, Homo sapiens
  misc_RNA (1)...(19): siRNA sense strand
ugaggauccugcagaauga

SEQ ID NO: 620847 - RNA, 19 nt, Homo sapiens
  misc_RNA (1)...(19): siRNA sense strand
ggaugcaguccaccuauaa

SEQ ID NO: 620848 - RNA, 19 nt, Homo sapiens
  misc_RNA (1)...(19): siRNA sense strand
cagagaggcuggaggugaa

SEQ ID NO: 620849 - RNA, 19 nt, Homo sapiens
  misc_RNA (1)...(19): siRNA sense strand
aaaccacacugcagaagga

SEQ ID NO: 620850 - RNA, 19 nt, Homo sapiens
  misc_RNA (1)...(19): siRNA sense strand
gaacgaguaaagccuagaa

SEQ ID NO: 620851 - RNA, 19 nt, Homo sapiens
  misc_RNA (1)...(19): siRNA sense strand
gacaucacaccaaagauuu

SEQ ID NO: 620852 - RNA, 19 nt, Homo sapiens
  misc_RNA (1)...(19): siRNA sense strand
guaauaaagaggaugaguu

SEQ ID NO: 620853 - RNA, 19 nt, Homo sapiens
  misc_RNA (1)...(19): siRNA sense strand
ugaagaacuuugugaccaa

SEQ ID NO: 620854 - RNA, 19 nt, Homo sapiens
  misc_RNA (1)...(19): siRNA sense strand
ggagaagacacccauaaag

SEQ ID NO: 620855 - RNA, 19 nt, Homo sapiens
  misc_RNA (1)...(19): siRNA sense strand
aguaaagccuagaaucaaa

SEQ ID NO: 620856 - RNA, 19 nt, Homo sapiens
  misc_RNA (1)...(19): siRNA sense strand
caagacaggcugcgaaaca

SEQ ID NO: 620857 - RNA, 19 nt, Homo sapiens
  misc_RNA (1)...(19): siRNA sense strand
ccaacaaaguacagagaug

SEQ ID NO: 620858 - RNA, 19 nt, Homo sapiens
  misc_RNA (1)...(19): siRNA sense strand
acacgaugcugcugccaaa

SEQ ID NO: 620859 - RNA, 19 nt, Homo sapiens
  misc_RNA (1)...(19): siRNA sense strand
aagagaauccgaagaagaa

SEQ ID NO: 620860 - RNA, 19 nt, Homo sapiens
  misc_RNA (1)...(19): siRNA sense strand
gaaacggaccaaugucugu

SEQ ID NO: 620861 - RNA, 19 nt, Homo sapiens
  misc_RNA (1)...(19): siRNA sense strand
caagaacgaauuuguaucu

SEQ ID NO: 620862 - RNA, 19 nt, Homo sapiens
  misc_RNA (1)...(19): siRNA sense strand
gagcaacuggacuaucuuu

SEQ ID NO: 620863 - RNA, 19 nt, Homo sapiens
  misc_RNA (1)...(19): siRNA sense strand
uaauaaagaggaugaguuc

SEQ ID NO: 620864 - RNA, 19 nt, Homo sapiens
  misc_RNA (1)...(19): siRNA sense strand
agaagacacccauaaagaa

SEQ ID NO: 620865 - RNA, 19 nt, Homo sapiens
  misc_RNA (1)...(19): siRNA sense strand
ggaacgggcaccaacaaga

SEQ ID NO: 620866 - RNA, 19 nt, Homo sapiens
  misc_RNA (1)...(19): siRNA sense strand
uguuugagauugcacuuaa

SEQ ID NO: 620867 - RNA, 19 nt, Homo sapiens
  misc_RNA (1)...(19): siRNA sense strand
ggaagagaauccgaagaag

SEQ ID NO: 620868 - RNA, 19 nt, Homo sapiens
  misc_RNA (1)...(19): siRNA sense strand
gaguaaagccuagaaucaa

SEQ ID NO: 620869 - RNA, 19 nt, Homo sapiens
  misc_RNA (1)...(19): siRNA sense strand
cgaguaaagccuagaauca

SEQ ID NO: 620870 - RNA, 19 nt, Homo sapiens
  misc_RNA (1)...(19): siRNA sense strand
gcaaaggaaagacaagaca

SEQ ID NO: 620871 - RNA, 19 nt, Homo sapiens
  misc_RNA (1)...(19): siRNA sense strand
cgccauagcuguucuugag

SEQ ID NO: 620872 - RNA, 19 nt, Homo sapiens
  misc_RNA (1)...(19): siRNA sense strand
cggaugcaguccaccuaua

SEQ ID NO: 620873 - RNA, 19 nt, Homo sapiens
  misc_RNA (1)...(19): siRNA sense strand
ucuuaaaguugcugucuga

SEQ ID NO: 620874 - RNA, 19 nt, Homo sapiens
  misc_RNA (1)...(19): siRNA sense strand
gcgcugaacaucuuaaagu

SEQ ID NO: 620875 - RNA, 19 nt, Homo sapiens
  misc_RNA (1)...(19): siRNA sense strand
ccaguuccaccuuuacuuu

SEQ ID NO: 620876 - RNA, 19 nt, Homo sapiens
  misc_RNA (1)...(19): siRNA sense strand
gauccuugguuucaaaguc

SEQ ID NO: 620877 - RNA, 19 nt, Homo sapiens
  misc_RNA (1)...(19): siRNA sense strand
gaggacagcaauuuaaugg

SEQ ID NO: 620878 - RNA, 19 nt, Homo sapiens
  misc_RNA (1)...(19): siRNA sense strand
ggaggacagcaauuuaaug

SEQ ID NO: 620879 - RNA, 19 nt, Homo sapiens
  misc_RNA (1)...(19): siRNA sense strand
gggaaaagcaagaagauuu

SEQ ID NO: 620880 - RNA, 19 nt, Homo sapiens
  misc_RNA (1)...(19): siRNA sense strand
gacaagacaggcugcgaaa

SEQ ID NO: 620881 - RNA, 19 nt, Homo sapiens
  misc_RNA (1)...(19): siRNA sense strand
uggcugcgcugaacaucuu

SEQ ID NO: 620882 - RNA, 19 nt, Homo sapiens
  misc_RNA (1)...(19): siRNA sense strand
gaaggaacgggcaccaaca

SEQ ID NO: 620883 - RNA, 19 nt, Homo sapiens
  misc_RNA (1)...(19): siRNA sense strand
uggaagagaauccgaagaa

SEQ ID NO: 620884 - RNA, 19 nt, Homo sapiens
  misc_RNA (1)...(19): siRNA sense strand
ccacagacaagcccagaau

SEQ ID NO: 620885 - RNA, 19 nt, Homo sapiens
  misc_RNA (1)...(19): siRNA sense strand
ccucugaucagccauggua

SEQ ID NO: 620886 - RNA, 19 nt, Homo sapiens
  misc_RNA (1)...(19): siRNA sense strand
gcaaugcagccgagaacau

SEQ ID NO: 620887 - RNA, 19 nt, Homo sapiens
  misc_RNA (1)...(19): siRNA sense strand
gcugaacaucuuaaaguug

SEQ ID NO: 620888 - RNA, 19 nt, Homo sapiens
  misc_RNA (1)...(19): siRNA sense strand
gugggaggacagcaauuua

SEQ ID NO: 620889 - RNA, 19 nt, Homo sapiens
  misc_RNA (1)...(19): siRNA sense strand
ggagaaggagccagaguac

SEQ ID NO: 620890 - RNA, 19 nt, Homo sapiens
  misc_RNA (1)...(19): siRNA sense strand
acagacaagcccagaauau

SEQ ID NO: 620891 - RNA, 19 nt, Homo sapiens
  misc_RNA (1)...(19): siRNA sense strand
caauguauaagccuguuga

SEQ ID NO: 620892 - RNA, 19 nt, Homo sapiens
  misc_RNA (1)...(19): siRNA sense strand
gaacaggaaacggaccaau

SEQ ID NO: 620893 - RNA, 19 nt, Homo sapiens
  misc_RNA (1)...(19): siRNA sense strand
gaccaacaaaguacagaga

SEQ ID NO: 620894 - RNA, 19 nt, Homo sapiens
  misc_RNA (1)...(19): siRNA sense strand
uguaggaguuagucaagga

SEQ ID NO: 620895 - RNA, 19 nt, Homo sapiens
  misc_RNA (1)...(19): siRNA sense strand
ccgagaacaugcuggagau

SEQ ID NO: 620896 - RNA, 19 nt, Homo sapiens
  misc_RNA (1)...(19): siRNA sense strand
gcaguccaccuauaacuac

SEQ ID NO: 620897 - RNA, 19 nt, Homo sapiens
  misc_RNA (1)...(19): siRNA sense strand
gggaggacagcaauuuaau

SEQ ID NO: 620898 - RNA, 19 nt, Homo sapiens
  misc_RNA (1)...(19): siRNA sense strand
gagaugccaagaacaggaa

SEQ ID NO: 620899 - RNA, 19 nt, Homo sapiens
  misc_RNA (1)...(19): siRNA sense strand
gaacuuugugaccaagguu

SEQ ID NO: 620900 - RNA, 19 nt, Homo sapiens
  misc_RNA (1)...(19): siRNA sense strand
gcccgagaguuguuguaug

SEQ ID NO: 620901 - RNA, 19 nt, Homo sapiens
  misc_RNA (1)...(19): siRNA sense strand
caguuccaccuuuacuuua

SEQ ID NO: 620902 - RNA, 19 nt, Homo sapiens
  misc_RNA (1)...(19): siRNA sense strand
caugagaggaggugcuuau

SEQ ID NO: 620903 - RNA, 19 nt, Homo sapiens
  misc_RNA (1)...(19): siRNA sense strand
accuauaacuacaacauga

SEQ ID NO: 620904 - RNA, 19 nt, Homo sapiens
  misc_RNA (1)...(19): siRNA sense strand
aguacacgcuccucacaga

SEQ ID NO: 620905 - RNA, 19 nt, Homo sapiens
  misc_RNA (1)...(19): siRNA sense strand
gccugcaguugaacgagua

SEQ ID NO: 620906 - RNA, 19 nt, Homo sapiens
  misc_RNA (1)...(19): siRNA sense strand
cagacaagcccagaauaug

SEQ ID NO: 620907 - RNA, 19 nt, Homo sapiens
  misc_RNA (1)...(19): siRNA sense strand
acaggaaacggaccaaugu

SEQ ID NO: 620908 - RNA, 19 nt, Homo sapiens
  misc_RNA (1)...(19): siRNA sense strand
cgcugaacaucuuaaaguu

SEQ ID NO: 620909 - RNA, 19 nt, Homo sapiens
  misc_RNA (1)...(19): siRNA sense strand
cugagcaacuggacuaucu

SEQ ID NO: 620910 - RNA, 19 nt, Homo sapiens
  misc_RNA (1)...(19): siRNA sense strand
cccgagaguuguuguaugg

SEQ ID NO: 620911 - RNA, 19 nt, Homo sapiens
  misc_RNA (1)...(19): siRNA sense strand
caaacccgcacucaaguca

SEQ ID NO: 620912 - RNA, 19 nt, Homo sapiens
  misc_RNA (1)...(19): siRNA sense strand
gaagguggccaagcgcaau

SEQ ID NO: 620913 - RNA, 19 nt, Homo sapiens
  misc_RNA (1)...(19): siRNA sense strand
ccucugagcaacuggacua

SEQ ID NO: 620914 - RNA, 19 nt, Homo sapiens
  misc_RNA (1)...(19): siRNA sense strand
agaacgaauuuguaucucu

SEQ ID NO: 620915 - RNA, 19 nt, Homo sapiens
  misc_RNA (1)...(19): siRNA sense strand
uacaaagacuuccccaaaa

SEQ ID NO: 620916 - RNA, 19 nt, Homo sapiens
  misc_RNA (1)...(19): siRNA sense strand
agacaagcccagaauaugg

SEQ ID NO: 620917 - RNA, 19 nt, Homo sapiens
  misc_RNA (1)...(19): siRNA sense strand
ggaguccugccaugauaug

SEQ ID NO: 620918 - RNA, 19 nt, Homo sapiens
  misc_RNA (1)...(19): siRNA sense strand
caccaaacccgcacucaag

SEQ ID NO: 620919 - RNA, 19 nt, Homo sapiens
  misc_RNA (1)...(19): siRNA sense strand
gaacaugcuggagauccuu

SEQ ID NO: 620920 - RNA, 19 nt, Homo sapiens
  misc_RNA (1)...(19): siRNA sense strand
caaugcagccgagaacaug

SEQ ID NO: 620921 - RNA, 19 nt, Homo sapiens
  misc_RNA (1)...(19): siRNA sense strand
ugggaggacagcaauuuaa

SEQ ID NO: 620922 - RNA, 19 nt, Homo sapiens
  misc_RNA (1)...(19): siRNA sense strand
gcaagaagauuucaaagaa

SEQ ID NO: 620923 - RNA, 19 nt, Homo sapiens
  misc_RNA (1)...(19): siRNA sense strand
aaacggaacuugccuguga

SEQ ID NO: 620924 - RNA, 19 nt, Homo sapiens
  misc_RNA (1)...(19): siRNA sense strand
gaacuugccugugaauuuc

SEQ ID NO: 620925 - RNA, 19 nt, Homo sapiens
  misc_RNA (1)...(19): siRNA sense strand
gaacgaauuuguaucucuu

SEQ ID NO: 620926 - RNA, 19 nt, Homo sapiens
  misc_RNA (1)...(19): siRNA sense strand
gaagacacccauaaagaaa

SEQ ID NO: 620927 - RNA, 19 nt, Homo sapiens
  misc_RNA (1)...(19): siRNA sense strand
ggaacuugccugugaauuu

SEQ ID NO: 620928 - RNA, 19 nt, Homo sapiens
  misc_RNA (1)...(19): siRNA sense strand
ggagauccuugguuucaaa

SEQ ID NO: 620929 - RNA, 19 nt, Homo sapiens
  misc_RNA (1)...(19): siRNA sense strand
ggacaucacaccaaagauu

SEQ ID NO: 620930 - RNA, 19 nt, Homo sapiens
  misc_RNA (1)...(19): siRNA sense strand
uaaaguugcugucugaguu

SEQ ID NO: 620931 - RNA, 19 nt, Homo sapiens
  misc_RNA (1)...(19): siRNA sense strand
gagaagacacccauaaaga

SEQ ID NO: 620932 - RNA, 19 nt, Homo sapiens
  misc_RNA (1)...(19): siRNA sense strand
guacagagaugccaagaac

SEQ ID NO: 620933 - RNA, 19 nt, Homo sapiens
  misc_RNA (1)...(19): siRNA sense strand
gaaaaugggacuaguaaua

SEQ ID NO: 620934 - RNA, 19 nt, Homo sapiens
  misc_RNA (1)...(19): siRNA sense strand
gcaauuuaauggcaaagga

SEQ ID NO: 620935 - RNA, 19 nt, Homo sapiens
  misc_RNA (1)...(19): siRNA sense strand
cacgguaacugccaugaua

SEQ ID NO: 620936 - RNA, 19 nt, Homo sapiens
  misc_RNA (1)...(19): siRNA sense strand
gaagagaauccgaagaaga

SEQ ID NO: 620937 - RNA, 19 nt, Homo sapiens
  misc_RNA (1)...(19): siRNA sense strand
ggaggugaauggaagagaa

SEQ ID NO: 620938 - RNA, 19 nt, Homo sapiens
  misc_RNA (1)...(19): siRNA sense strand
gaacgggcaccaacaagaa

SEQ ID NO: 620939 - RNA, 19 nt, Homo sapiens
  misc_RNA (1)...(19): siRNA sense strand
ucaaggacaucacaccaaa

SEQ ID NO: 620940 - RNA, 19 nt, Homo sapiens
  misc_RNA (1)...(19): siRNA sense strand
caugauagcccgagaguug

SEQ ID NO: 620941 - RNA, 19 nt, Homo sapiens
  misc_RNA (1)...(19): siRNA sense strand
uugaggagcugaagaaguu

SEQ ID NO: 620942 - RNA, 19 nt, Homo sapiens
  misc_RNA (1)...(19): siRNA sense strand
gaggagaagacacccauaa

SEQ ID NO: 620943 - RNA, 19 nt, Homo sapiens
  misc_RNA (1)...(19): siRNA sense strand
gaaauaagucaaguguuug

SEQ ID NO: 620944 - RNA, 19 nt, Homo sapiens
  misc_RNA (1)...(19): siRNA sense strand
guggaguccugccaugaua

SEQ ID NO: 620945 - RNA, 19 nt, Homo sapiens
  misc_RNA (1)...(19): siRNA sense strand
gcagggaguuugugaugca

SEQ ID NO: 620946 - RNA, 19 nt, Homo sapiens
  misc_RNA (1)...(19): siRNA sense strand
ugaggauccugcagaauga

SEQ ID NO: 620947 - RNA, 19 nt, Homo sapiens
  misc_RNA (1)...(19): siRNA sense strand
ggaugcaguccaccuauaa

SEQ ID NO: 620948 - RNA, 19 nt, Homo sapiens
  misc_RNA (1)...(19): siRNA sense strand
cagagaggcuggaggugaa

SEQ ID NO: 620949 - RNA, 19 nt, Homo sapiens
  misc_RNA (1)...(19): siRNA sense strand
aaaccacacugcagaagga

SEQ ID NO: 620950 - RNA, 19 nt, Homo sapiens
  misc_RNA (1)...(19): siRNA sense strand
gaacgaguaaagccuagaa

SEQ ID NO: 620951 - RNA, 19 nt, Homo sapiens
  misc_RNA (1)...(19): siRNA sense strand
gacaucacaccaaagauuu

SEQ ID NO: 620952 - RNA, 19 nt, Homo sapiens
  misc_RNA (1)...(19): siRNA sense strand
guaauaaagaggaugaguu

SEQ ID NO: 620953 - RNA, 19 nt, Homo sapiens
  misc_RNA (1)...(19): siRNA sense strand
ugaagaacuuugugaccaa

SEQ ID NO: 620954 - RNA, 19 nt, Homo sapiens
  misc_RNA (1)...(19): siRNA sense strand
ggagaagacacccauaaag

SEQ ID NO: 620955 - RNA, 19 nt, Homo sapiens
  misc_RNA (1)...(19): siRNA sense strand
aguaaagccuagaaucaaa

SEQ ID NO: 620956 - RNA, 19 nt, Homo sapiens
  misc_RNA (1)...(19): siRNA sense strand
caagacaggcugcgaaaca

SEQ ID NO: 620957 - RNA, 19 nt, Homo sapiens
  misc_RNA (1)...(19): siRNA sense strand
ccaacaaaguacagagaug

SEQ ID NO: 620958 - RNA, 19 nt, Homo sapiens
  misc_RNA (1)...(19): siRNA sense strand
acacgaugcugcugccaaa

SEQ ID NO: 620959 - RNA, 19 nt, Homo sapiens
  misc_RNA (1)...(19): siRNA sense strand
aagagaauccgaagaagaa

SEQ ID NO: 620960 - RNA, 19 nt, Homo sapiens
  misc_RNA (1)...(19): siRNA sense strand
gaaacggaccaaugucugu

SEQ ID NO: 620961 - RNA, 19 nt, Homo sapiens
  misc_RNA (1)...(19): siRNA sense strand
caagaacgaauuuguaucu

SEQ ID NO: 620962 - RNA, 19 nt, Homo sapiens
  misc_RNA (1)...(19): siRNA sense strand
gagcaacuggacuaucuuu

SEQ ID NO: 620963 - RNA, 19 nt, Homo sapiens
  misc_RNA (1)...(19): siRNA sense strand
uaauaaagaggaugaguuc

SEQ ID NO: 620964 - RNA, 19 nt, Homo sapiens
  misc_RNA (1)...(19): siRNA sense strand
agaagacacccauaaagaa

SEQ ID NO: 620965 - RNA, 19 nt, Homo sapiens
  misc_RNA (1)...(19): siRNA sense strand
ggaacgggcaccaacaaga

SEQ ID NO: 620966 - RNA, 19 nt, Homo sapiens
  misc_RNA (1)...(19): siRNA sense strand
uguuugagauugcacuuaa

SEQ ID NO: 620967 - RNA, 19 nt, Homo sapiens
  misc_RNA (1)...(19): siRNA sense strand
ggaagagaauccgaagaag

SEQ ID NO: 620968 - RNA, 19 nt, Homo sapiens
  misc_RNA (1)...(19): siRNA sense strand
gaguaaagccuagaaucaa

SEQ ID NO: 620969 - RNA, 19 nt, Homo sapiens
  misc_RNA (1)...(19): siRNA sense strand
cgaguaaagccuagaauca

SEQ ID NO: 620970 - RNA, 19 nt, Homo sapiens
  misc_RNA (1)...(19): siRNA sense strand
gcaaaggaaagacaagaca

SEQ ID NO: 620971 - RNA, 19 nt, Homo sapiens
  misc_RNA (1)...(19): siRNA sense strand
cgccauagcuguucuugag

SEQ ID NO: 620972 - RNA, 19 nt, Homo sapiens
  misc_RNA (1)...(19): siRNA sense strand
cggaugcaguccaccuaua

SEQ ID NO: 620973 - RNA, 19 nt, Homo sapiens
  misc_RNA (1)...(19): siRNA sense strand
ucuuaaaguugcugucuga

SEQ ID NO: 620974 - RNA, 19 nt, Homo sapiens
  misc_RNA (1)...(19): siRNA sense strand
ccaguuccaccuuuacuuu

SEQ ID NO: 620975 - RNA, 19 nt, Homo sapiens
  misc_RNA (1)...(19): siRNA sense strand
gcgcugaacaucuuaaagu

SEQ ID NO: 620976 - RNA, 19 nt, Homo sapiens
  misc_RNA (1)...(19): siRNA sense strand
gauccuugguuucaaaguc

SEQ ID NO: 620977 - RNA, 19 nt, Homo sapiens
  misc_RNA (1)...(19): siRNA sense strand
ggaggacagcaauuuaaug

SEQ ID NO: 620978 - RNA, 19 nt, Homo sapiens
  misc_RNA (1)...(19): siRNA sense strand
gaggacagcaauuuaaugg

SEQ ID NO: 620979 - RNA, 19 nt, Homo sapiens
  misc_RNA (1)...(19): siRNA sense strand
gggaaaagcaagaagauuu

SEQ ID NO: 620980 - RNA, 19 nt, Homo sapiens
  misc_RNA (1)...(19): siRNA sense strand
gacaagacaggcugcgaaa

SEQ ID NO: 620981 - RNA, 19 nt, Homo sapiens
  misc_RNA (1)...(19): siRNA sense strand
uggcugcgcugaacaucuu

SEQ ID NO: 620982 - RNA, 19 nt, Homo sapiens
  misc_RNA (1)...(19): siRNA sense strand
gaaggaacgggcaccaaca

SEQ ID NO: 620983 - RNA, 19 nt, Homo sapiens
  misc_RNA (1)...(19): siRNA sense strand
uggaagagaauccgaagaa

SEQ ID NO: 620984 - RNA, 19 nt, Homo sapiens
  misc_RNA (1)...(19): siRNA sense strand
ccacagacaagcccagaau

SEQ ID NO: 620985 - RNA, 19 nt, Homo sapiens
  misc_RNA (1)...(19): siRNA sense strand
ccucugaucagccauggua

SEQ ID NO: 620986 - RNA, 19 nt, Homo sapiens
  misc_RNA (1)...(19): siRNA sense strand
gcaaugcagccgagaacau

SEQ ID NO: 620987 - RNA, 19 nt, Homo sapiens
  misc_RNA (1)...(19): siRNA sense strand
gcugaacaucuuaaaguug

SEQ ID NO: 620988 - RNA, 19 nt, Homo sapiens
  misc_RNA (1)...(19): siRNA sense strand
ggagaaggagccagaguac

SEQ ID NO: 620989 - RNA, 19 nt, Homo sapiens
  misc_RNA (1)...(19): siRNA sense strand
gugggaggacagcaauuua

SEQ ID NO: 620990 - RNA, 19 nt, Homo sapiens
  misc_RNA (1)...(19): siRNA sense strand
acagacaagcccagaauau

SEQ ID NO: 620991 - RNA, 19 nt, Homo sapiens
  misc_RNA (1)...(19): siRNA sense strand
gcaguccaccuauaacuac

SEQ ID NO: 620992 - RNA, 19 nt, Homo sapiens
  misc_RNA (1)...(19): siRNA sense strand
gaacaggaaacggaccaau

SEQ ID NO: 620993 - RNA, 19 nt, Homo sapiens
  misc_RNA (1)...(19): siRNA sense strand
gaccaacaaaguacagaga

SEQ ID NO: 620994 - RNA, 19 nt, Homo sapiens
  misc_RNA (1)...(19): siRNA sense strand
caauguauaagccuguuga

SEQ ID NO: 620995 - RNA, 19 nt, Homo sapiens
  misc_RNA (1)...(19): siRNA sense strand
uguaggaguuagucaagga

SEQ ID NO: 620996 - RNA, 19 nt, Homo sapiens
  misc_RNA (1)...(19): siRNA sense strand
ccgagaacaugcuggagau

SEQ ID NO: 620997 - RNA, 19 nt, Homo sapiens
  misc_RNA (1)...(19): siRNA sense strand
gggaggacagcaauuuaau

SEQ ID NO: 620998 - RNA, 19 nt, Homo sapiens
  misc_RNA (1)...(19): siRNA sense strand
gagaugccaagaacaggaa

SEQ ID NO: 620999 - RNA, 19 nt, Homo sapiens
  misc_RNA (1)...(19): siRNA sense strand
gaacuuugugaccaagguu

SEQ ID NO: 621000 - RNA, 19 nt, Homo sapiens
  misc_RNA (1)...(19): siRNA sense strand
caugagaggaggugcuuau

SEQ ID NO: 621001 - RNA, 19 nt, Homo sapiens
  misc_RNA (1)...(19): siRNA sense strand
caguuccaccuuuacuuua

SEQ ID NO: 621002 - RNA, 19 nt, Homo sapiens
  misc_RNA (1)...(19): siRNA sense strand
gcccgagaguuguuguaug

SEQ ID NO: 621003 - RNA, 19 nt, Homo sapiens
  misc_RNA (1)...(19): siRNA sense strand
aguacacgcuccucacaga

SEQ ID NO: 621004 - RNA, 19 nt, Homo sapiens
  misc_RNA (1)...(19): siRNA sense strand
accuauaacuacaacauga

SEQ ID NO: 621005 - RNA, 19 nt, Homo sapiens
  misc_RNA (1)...(19): siRNA sense strand
gccugcaguugaacgagua

SEQ ID NO: 621006 - RNA, 19 nt, Homo sapiens
  misc_RNA (1)...(19): siRNA sense strand
cagacaagcccagaauaug

SEQ ID NO: 621007 - RNA, 19 nt, Homo sapiens
  misc_RNA (1)...(19): siRNA sense strand
acaggaaacggaccaaugu

SEQ ID NO: 621008 - RNA, 19 nt, Homo sapiens
  misc_RNA (1)...(19): siRNA sense strand
cgcugaacaucuuaaaguu

SEQ ID NO: 621009 - RNA, 19 nt, Homo sapiens
  misc_RNA (1)...(19): siRNA sense strand
cugagcaacuggacuaucu

SEQ ID NO: 621010 - RNA, 19 nt, Homo sapiens
  misc_RNA (1)...(19): siRNA sense strand
cccgagaguuguuguaugg

SEQ ID NO: 621011 - RNA, 19 nt, Homo sapiens
  misc_RNA (1)...(19): siRNA sense strand
caaacccgcacucaaguca

SEQ ID NO: 621012 - RNA, 19 nt, Homo sapiens
  misc_RNA (1)...(19): siRNA sense strand
gaagguggccaagcgcaau

SEQ ID NO: 621013 - RNA, 19 nt, Homo sapiens
  misc_RNA (1)...(19): siRNA sense strand
ccucugagcaacuggacua

SEQ ID NO: 621014 - RNA, 19 nt, Homo sapiens
  misc_RNA (1)...(19): siRNA sense strand
agaacgaauuuguaucucu

SEQ ID NO: 621015 - RNA, 19 nt, Homo sapiens
  misc_RNA (1)...(19): siRNA sense strand
uacaaagacuuccccaaaa

SEQ ID NO: 621016 - RNA, 19 nt, Homo sapiens
  misc_RNA (1)...(19): siRNA sense strand
caauuuaauggcaaaggaa

SEQ ID NO: 621017 - RNA, 19 nt, Homo sapiens
  misc_RNA (1)...(19): siRNA sense strand
ggaguccugccaugauaug

SEQ ID NO: 621018 - RNA, 19 nt, Homo sapiens
  misc_RNA (1)...(19): siRNA sense strand
caccaaacccgcacucaag

SEQ ID NO: 621019 - RNA, 19 nt, Homo sapiens
  misc_RNA (1)...(19): siRNA sense strand
gaacaugcuggagauccuu

SEQ ID NO: 621020 - RNA, 19 nt, Homo sapiens
  misc_RNA (1)...(19): siRNA sense strand
caaugcagccgagaacaug

SEQ ID NO: 621021 - RNA, 19 nt, Homo sapiens
  misc_RNA (1)...(19): siRNA sense strand
ugggaggacagcaauuuaa

SEQ ID NO: 621022 - RNA, 19 nt, Homo sapiens
  misc_RNA (1)...(19): siRNA sense strand
gcaagaagauuucaaagaa

SEQ ID NO: 621023 - RNA, 19 nt, Homo sapiens
  misc_RNA (1)...(19): siRNA sense strand
aaacggaacuugccuguga

SEQ ID NO: 621024 - RNA, 19 nt, Homo sapiens
  misc_RNA (1)...(19): siRNA sense strand
gaacuugccugugaauuuc

SEQ ID NO: 621025 - RNA, 19 nt, Homo sapiens
  misc_RNA (1)...(19): siRNA sense strand
gaacgaauuuguaucucuu

SEQ ID NO: 621026 - RNA, 19 nt, Homo sapiens
  misc_RNA (1)...(19): siRNA sense strand
gaagacacccauaaagaaa

SEQ ID NO: 621027 - RNA, 19 nt, Homo sapiens
  misc_RNA (1)...(19): siRNA sense strand
ggaacuugccugugaauuu

SEQ ID NO: 621028 - RNA, 19 nt, Homo sapiens
  misc_RNA (1)...(19): siRNA sense strand
ggagauccuugguuucaaa

SEQ ID NO: 621029 - RNA, 19 nt, Homo sapiens
  misc_RNA (1)...(19): siRNA sense strand
ggacaucacaccaaagauu

SEQ ID NO: 621030 - RNA, 19 nt, Homo sapiens
  misc_RNA (1)...(19): siRNA sense strand
uaaaguugcugucugaguu

SEQ ID NO: 621031 - RNA, 19 nt, Homo sapiens
  misc_RNA (1)...(19): siRNA sense strand
gagaagacacccauaaaga

SEQ ID NO: 621032 - RNA, 19 nt, Homo sapiens
  misc_RNA (1)...(19): siRNA sense strand
guacagagaugccaagaac

SEQ ID NO: 621033 - RNA, 19 nt, Homo sapiens
  misc_RNA (1)...(19): siRNA sense strand
gaaaaugggacuaguaaua

SEQ ID NO: 621034 - RNA, 19 nt, Homo sapiens
  misc_RNA (1)...(19): siRNA sense strand
gcaauuuaauggcaaagga

SEQ ID NO: 621035 - RNA, 19 nt, Homo sapiens
  misc_RNA (1)...(19): siRNA sense strand
cacgguaacugccaugaua

SEQ ID NO: 621036 - RNA, 19 nt, Homo sapiens
  misc_RNA (1)...(19): siRNA sense strand
gaagagaauccgaagaaga

SEQ ID NO: 621037 - RNA, 19 nt, Homo sapiens
  misc_RNA (1)...(19): siRNA sense strand
ggaggugaauggaagagaa

SEQ ID NO: 621038 - RNA, 19 nt, Homo sapiens
  misc_RNA (1)...(19): siRNA sense strand
gaacgggcaccaacaagaa

SEQ ID NO: 621039 - RNA, 19 nt, Homo sapiens
  misc_RNA (1)...(19): siRNA sense strand
ucaaggacaucacaccaaa

SEQ ID NO: 621040 - RNA, 19 nt, Homo sapiens
  misc_RNA (1)...(19): siRNA sense strand
caugauagcccgagaguug

SEQ ID NO: 621041 - RNA, 19 nt, Homo sapiens
  misc_RNA (1)...(19): siRNA sense strand
uugaggagcugaagaaguu

SEQ ID NO: 621042 - RNA, 19 nt, Homo sapiens
  misc_RNA (1)...(19): siRNA sense strand
gaggagaagacacccauaa

SEQ ID NO: 621043 - RNA, 19 nt, Homo sapiens
  misc_RNA (1)...(19): siRNA sense strand
gaaauaagucaaguguuug

SEQ ID NO: 621044 - RNA, 19 nt, Homo sapiens
  misc_RNA (1)...(19): siRNA sense strand
guggaguccugccaugaua

SEQ ID NO: 621045 - RNA, 19 nt, Homo sapiens
  misc_RNA (1)...(19): siRNA sense strand
gcagggaguuugugaugca

SEQ ID NO: 621046 - RNA, 19 nt, Homo sapiens
  misc_RNA (1)...(19): siRNA sense strand
ugaggauccugcagaauga

SEQ ID NO: 621047 - RNA, 19 nt, Homo sapiens
  misc_RNA (1)...(19): siRNA sense strand
ggaugcaguccaccuauaa

SEQ ID NO: 621048 - RNA, 19 nt, Homo sapiens
  misc_RNA (1)...(19): siRNA sense strand
cagagaggcuggaggugaa

SEQ ID NO: 621049 - RNA, 19 nt, Homo sapiens
  misc_RNA (1)...(19): siRNA sense strand
aaaccacacugcagaagga

SEQ ID NO: 621050 - RNA, 19 nt, Homo sapiens
  misc_RNA (1)...(19): siRNA sense strand
gaacgaguaaagccuagaa

SEQ ID NO: 621051 - RNA, 19 nt, Homo sapiens
  misc_RNA (1)...(19): siRNA sense strand
gacaucacaccaaagauuu

SEQ ID NO: 621052 - RNA, 19 nt, Homo sapiens
  misc_RNA (1)...(19): siRNA sense strand
guaauaaagaggaugaguu

SEQ ID NO: 621053 - RNA, 19 nt, Homo sapiens
  misc_RNA (1)...(19): siRNA sense strand
ugaagaacuuugugaccaa

SEQ ID NO: 621054 - RNA, 19 nt, Homo sapiens
  misc_RNA (1)...(19): siRNA sense strand
ggagaagacacccauaaag

SEQ ID NO: 621055 - RNA, 19 nt, Homo sapiens
  misc_RNA (1)...(19): siRNA sense strand
aguaaagccuagaaucaaa

SEQ ID NO: 621056 - RNA, 19 nt, Homo sapiens
  misc_RNA (1)...(19): siRNA sense strand
caagacaggcugcgaaaca

SEQ ID NO: 621057 - RNA, 19 nt, Homo sapiens
  misc_RNA (1)...(19): siRNA sense strand
ccaacaaaguacagagaug

SEQ ID NO: 621058 - RNA, 19 nt, Homo sapiens
  misc_RNA (1)...(19): siRNA sense strand
acacgaugcugcugccaaa

SEQ ID NO: 621059 - RNA, 19 nt, Homo sapiens
  misc_RNA (1)...(19): siRNA sense strand
aagagaauccgaagaagaa

SEQ ID NO: 621060 - RNA, 19 nt, Homo sapiens
  misc_RNA (1)...(19): siRNA sense strand
gaaacggaccaaugucugu

SEQ ID NO: 621061 - RNA, 19 nt, Homo sapiens
  misc_RNA (1)...(19): siRNA sense strand
caagaacgaauuuguaucu

SEQ ID NO: 621062 - RNA, 19 nt, Homo sapiens
  misc_RNA (1)...(19): siRNA sense strand
gagcaacuggacuaucuuu

SEQ ID NO: 621063 - RNA, 19 nt, Homo sapiens
  misc_RNA (1)...(19): siRNA sense strand
uaauaaagaggaugaguuc

SEQ ID NO: 621064 - RNA, 19 nt, Homo sapiens
  misc_RNA (1)...(19): siRNA sense strand
agaagacacccauaaagaa

SEQ ID NO: 621065 - RNA, 19 nt, Homo sapiens
  misc_RNA (1)...(19): siRNA sense strand
ggaacgggcaccaacaaga

SEQ ID NO: 621066 - RNA, 19 nt, Homo sapiens
  misc_RNA (1)...(19): siRNA sense strand
uguuugagauugcacuuaa

SEQ ID NO: 621067 - RNA, 19 nt, Homo sapiens
  misc_RNA (1)...(19): siRNA sense strand
ggaagagaauccgaagaag

SEQ ID NO: 621068 - RNA, 19 nt, Homo sapiens
  misc_RNA (1)...(19): siRNA sense strand
gaguaaagccuagaaucaa

SEQ ID NO: 621069 - RNA, 19 nt, Homo sapiens
  misc_RNA (1)...(19): siRNA sense strand
cgaguaaagccuagaauca

SEQ ID NO: 621070 - RNA, 19 nt, Homo sapiens
  misc_RNA (1)...(19): siRNA sense strand
gcaaaggaaagacaagaca

SEQ ID NO: 621071 - RNA, 19 nt, Homo sapiens
  misc_RNA (1)...(19): siRNA sense strand
cgccauagcuguucuugag

SEQ ID NO: 621072 - RNA, 19 nt, Homo sapiens
  misc_RNA (1)...(19): siRNA sense strand
cggaugcaguccaccuaua

SEQ ID NO: 621073 - RNA, 19 nt, Homo sapiens
  misc_RNA (1)...(19): siRNA sense strand
ucuuaaaguugcugucuga

SEQ ID NO: 621074 - RNA, 19 nt, Homo sapiens
  misc_RNA (1)...(19): siRNA sense strand
gcgcugaacaucuuaaagu

SEQ ID NO: 621075 - RNA, 19 nt, Homo sapiens
  misc_RNA (1)...(19): siRNA sense strand
ccaguuccaccuuuacuuu

SEQ ID NO: 621076 - RNA, 19 nt, Homo sapiens
  misc_RNA (1)...(19): siRNA sense strand
gauccuugguuucaaaguc

SEQ ID NO: 621077 - RNA, 19 nt, Homo sapiens
  misc_RNA (1)...(19): siRNA sense strand
gaggacagcaauuuaaugg

SEQ ID NO: 621078 - RNA, 19 nt, Homo sapiens
  misc_RNA (1)...(19): siRNA sense strand
ggaggacagcaauuuaaug

SEQ ID NO: 621079 - RNA, 19 nt, Homo sapiens
  misc_RNA (1)...(19): siRNA sense strand
gggaaaagcaagaagauuu

SEQ ID NO: 621080 - RNA, 19 nt, Homo sapiens
  misc_RNA (1)...(19): siRNA sense strand
gacaagacaggcugcgaaa

SEQ ID NO: 621081 - RNA, 19 nt, Homo sapiens
  misc_RNA (1)...(19): siRNA sense strand
uggcugcgcugaacaucuu

SEQ ID NO: 621082 - RNA, 19 nt, Homo sapiens
  misc_RNA (1)...(19): siRNA sense strand
gaaggaacgggcaccaaca

SEQ ID NO: 621083 - RNA, 19 nt, Homo sapiens
  misc_RNA (1)...(19): siRNA sense strand
uggaagagaauccgaagaa

SEQ ID NO: 621084 - RNA, 19 nt, Homo sapiens
  misc_RNA (1)...(19): siRNA sense strand
ccacagacaagcccagaau

SEQ ID NO: 621085 - RNA, 19 nt, Homo sapiens
  misc_RNA (1)...(19): siRNA sense strand
ccucugaucagccauggua

SEQ ID NO: 621086 - RNA, 19 nt, Homo sapiens
  misc_RNA (1)...(19): siRNA sense strand
gcaaugcagccgagaacau

SEQ ID NO: 621087 - RNA, 19 nt, Homo sapiens
  misc_RNA (1)...(19): siRNA sense strand
gcugaacaucuuaaaguug

SEQ ID NO: 621088 - RNA, 19 nt, Homo sapiens
  misc_RNA (1)...(19): siRNA sense strand
gugggaggacagcaauuua

SEQ ID NO: 621089 - RNA, 19 nt, Homo sapiens
  misc_RNA (1)...(19): siRNA sense strand
ggagaaggagccagaguac

SEQ ID NO: 621090 - RNA, 19 nt, Homo sapiens
  misc_RNA (1)...(19): siRNA sense strand
acagacaagcccagaauau

SEQ ID NO: 621091 - RNA, 19 nt, Homo sapiens
  misc_RNA (1)...(19): siRNA sense strand
caauguauaagccuguuga

SEQ ID NO: 621092 - RNA, 19 nt, Homo sapiens
  misc_RNA (1)...(19): siRNA sense strand
gaacaggaaacggaccaau

SEQ ID NO: 621093 - RNA, 19 nt, Homo sapiens
  misc_RNA (1)...(19): siRNA sense strand
gaccaacaaaguacagaga

SEQ ID NO: 621094 - RNA, 19 nt, Homo sapiens
  misc_RNA (1)...(19): siRNA sense strand
uguaggaguuagucaagga

SEQ ID NO: 621095 - RNA, 19 nt, Homo sapiens
  misc_RNA (1)...(19): siRNA sense strand
ccgagaacaugcuggagau

SEQ ID NO: 621096 - RNA, 19 nt, Homo sapiens
  misc_RNA (1)...(19): siRNA sense strand
gcaguccaccuauaacuac

SEQ ID NO: 621097 - RNA, 19 nt, Homo sapiens
  misc_RNA (1)...(19): siRNA sense strand
gggaggacagcaauuuaau

SEQ ID NO: 621098 - RNA, 19 nt, Homo sapiens
  misc_RNA (1)...(19): siRNA sense strand
gagaugccaagaacaggaa

SEQ ID NO: 621099 - RNA, 19 nt, Homo sapiens
  misc_RNA (1)...(19): siRNA sense strand
gaacuuugugaccaagguu

SEQ ID NO: 621100 - RNA, 19 nt, Homo sapiens
  misc_RNA (1)...(19): siRNA sense strand
gcccgagaguuguuguaug

SEQ ID NO: 621101 - RNA, 19 nt, Homo sapiens
  misc_RNA (1)...(19): siRNA sense strand
caguuccaccuuuacuuua

SEQ ID NO: 621102 - RNA, 19 nt, Homo sapiens
  misc_RNA (1)...(19): siRNA sense strand
caugagaggaggugcuuau

SEQ ID NO: 621103 - RNA, 19 nt, Homo sapiens
  misc_RNA (1)...(19): siRNA sense strand
accuauaacuacaacauga

SEQ ID NO: 621104 - RNA, 19 nt, Homo sapiens
  misc_RNA (1)...(19): siRNA sense strand
aguacacgcuccucacaga

SEQ ID NO: 621105 - RNA, 19 nt, Homo sapiens
  misc_RNA (1)...(19): siRNA sense strand
gccugcaguugaacgagua

SEQ ID NO: 621106 - RNA, 19 nt, Homo sapiens
  misc_RNA (1)...(19): siRNA sense strand
cagacaagcccagaauaug

SEQ ID NO: 621107 - RNA, 19 nt, Homo sapiens
  misc_RNA (1)...(19): siRNA sense strand
acaggaaacggaccaaugu

SEQ ID NO: 621108 - RNA, 19 nt, Homo sapiens
  misc_RNA (1)...(19): siRNA sense strand
cgcugaacaucuuaaaguu

SEQ ID NO: 621109 - RNA, 19 nt, Homo sapiens
  misc_RNA (1)...(19): siRNA sense strand
cugagcaacuggacuaucu

SEQ ID NO: 621110 - RNA, 19 nt, Homo sapiens
  misc_RNA (1)...(19): siRNA sense strand
cccgagaguuguuguaugg

SEQ ID NO: 621111 - RNA, 19 nt, Homo sapiens
  misc_RNA (1)...(19): siRNA sense strand
caaacccgcacucaaguca

SEQ ID NO: 621112 - RNA, 19 nt, Homo sapiens
  misc_RNA (1)...(19): siRNA sense strand
gaagguggccaagcgcaau

SEQ ID NO: 621113 - RNA, 19 nt, Homo sapiens
  misc_RNA (1)...(19): siRNA sense strand
ccucugagcaacuggacua

SEQ ID NO: 621114 - RNA, 19 nt, Homo sapiens
  misc_RNA (1)...(19): siRNA sense strand
agaacgaauuuguaucucu

SEQ ID NO: 621115 - RNA, 19 nt, Homo sapiens
  misc_RNA (1)...(19): siRNA sense strand
uacaaagacuuccccaaaa

SEQ ID NO: 621116 - RNA, 19 nt, Homo sapiens
  misc_RNA (1)...(19): siRNA sense strand
agacaagcccagaauaugg

SEQ ID NO: 621117 - RNA, 19 nt, Homo sapiens
  misc_RNA (1)...(19): siRNA sense strand
ggaguccugccaugauaug

SEQ ID NO: 621118 - RNA, 19 nt, Homo sapiens
  misc_RNA (1)...(19): siRNA sense strand
caccaaacccgcacucaag

SEQ ID NO: 621119 - RNA, 19 nt, Homo sapiens
  misc_RNA (1)...(19): siRNA sense strand
gaacaugcuggagauccuu

SEQ ID NO: 621120 - RNA, 19 nt, Homo sapiens
  misc_RNA (1)...(19): siRNA sense strand
caaugcagccgagaacaug

SEQ ID NO: 621121 - RNA, 19 nt, Homo sapiens
  misc_RNA (1)...(19): siRNA sense strand
ugggaggacagcaauuuaa

SEQ ID NO: 621122 - RNA, 19 nt, Homo sapiens
  misc_RNA (1)...(19): siRNA sense strand
gcaagaagauuucaaagaa

SEQ ID NO: 621123 - RNA, 19 nt, Homo sapiens
  misc_RNA (1)...(19): siRNA sense strand
aaacggaacuugccuguga

SEQ ID NO: 621124 - RNA, 19 nt, Homo sapiens
  misc_RNA (1)...(19): siRNA sense strand
gaacuugccugugaauuuc

SEQ ID NO: 621125 - RNA, 19 nt, Homo sapiens
  misc_RNA (1)...(19): siRNA sense strand
gaacgaauuuguaucucuu

SEQ ID NO: 621126 - RNA, 19 nt, Homo sapiens
  misc_RNA (1)...(19): siRNA sense strand
gaagacacccauaaagaaa

SEQ ID NO: 621127 - RNA, 19 nt, Homo sapiens
  misc_RNA (1)...(19): siRNA sense strand
ggaacuugccugugaauuu

SEQ ID NO: 621128 - RNA, 19 nt, Homo sapiens
  misc_RNA (1)...(19): siRNA sense strand
ggagauccuugguuucaaa

SEQ ID NO: 621129 - RNA, 19 nt, Homo sapiens
  misc_RNA (1)...(19): siRNA sense strand
ggacaucacaccaaagauu

SEQ ID NO: 621130 - RNA, 19 nt, Homo sapiens
  misc_RNA (1)...(19): siRNA sense strand
uaaaguugcugucugaguu

SEQ ID NO: 621131 - RNA, 19 nt, Homo sapiens
  misc_RNA (1)...(19): siRNA sense strand
gagaagacacccauaaaga

SEQ ID NO: 621132 - RNA, 19 nt, Homo sapiens
  misc_RNA (1)...(19): siRNA sense strand
guacagagaugccaagaac

SEQ ID NO: 621133 - RNA, 19 nt, Homo sapiens
  misc_RNA (1)...(19): siRNA sense strand
gaaaaugggacuaguaaua

SEQ ID NO: 621134 - RNA, 19 nt, Homo sapiens
  misc_RNA (1)...(19): siRNA sense strand
gcaauuuaauggcaaagga

SEQ ID NO: 621135 - RNA, 19 nt, Homo sapiens
  misc_RNA (1)...(19): siRNA sense strand
cacgguaacugccaugaua

SEQ ID NO: 621136 - RNA, 19 nt, Homo sapiens
  misc_RNA (1)...(19): siRNA sense strand
gaagagaauccgaagaaga

SEQ ID NO: 621137 - RNA, 19 nt, Homo sapiens
  misc_RNA (1)...(19): siRNA sense strand
ggaggugaauggaagagaa

SEQ ID NO: 621138 - RNA, 19 nt, Homo sapiens
  misc_RNA (1)...(19): siRNA sense strand
gaacgggcaccaacaagaa

SEQ ID NO: 621139 - RNA, 19 nt, Homo sapiens
  misc_RNA (1)...(19): siRNA sense strand
ucaaggacaucacaccaaa

SEQ ID NO: 621140 - RNA, 19 nt, Homo sapiens
  misc_RNA (1)...(19): siRNA sense strand
caugauagcccgagaguug

SEQ ID NO: 621141 - RNA, 19 nt, Homo sapiens
  misc_RNA (1)...(19): siRNA sense strand
uugaggagcugaagaaguu

SEQ ID NO: 621142 - RNA, 19 nt, Homo sapiens
  misc_RNA (1)...(19): siRNA sense strand
gaggagaagacacccauaa

SEQ ID NO: 621143 - RNA, 19 nt, Homo sapiens
  misc_RNA (1)...(19): siRNA sense strand
gaaauaagucaaguguuug

SEQ ID NO: 621144 - RNA, 19 nt, Homo sapiens
  misc_RNA (1)...(19): siRNA sense strand
guggaguccugccaugaua

SEQ ID NO: 621145 - RNA, 19 nt, Homo sapiens
  misc_RNA (1)...(19): siRNA sense strand
gcagggaguuugugaugca

SEQ ID NO: 621146 - RNA, 19 nt, Homo sapiens
  misc_RNA (1)...(19): siRNA sense strand
ugaggauccugcagaauga

SEQ ID NO: 621147 - RNA, 19 nt, Homo sapiens
  misc_RNA (1)...(19): siRNA sense strand
ggaugcaguccaccuauaa

SEQ ID NO: 621148 - RNA, 19 nt, Homo sapiens
  misc_RNA (1)...(19): siRNA sense strand
cagagaggcuggaggugaa

SEQ ID NO: 621149 - RNA, 19 nt, Homo sapiens
  misc_RNA (1)...(19): siRNA sense strand
aaaccacacugcagaagga

SEQ ID NO: 621150 - RNA, 19 nt, Homo sapiens
  misc_RNA (1)...(19): siRNA sense strand
gaacgaguaaagccuagaa

SEQ ID NO: 621151 - RNA, 19 nt, Homo sapiens
  misc_RNA (1)...(19): siRNA sense strand
gacaucacaccaaagauuu

SEQ ID NO: 621152 - RNA, 19 nt, Homo sapiens
  misc_RNA (1)...(19): siRNA sense strand
guaauaaagaggaugaguu

SEQ ID NO: 621153 - RNA, 19 nt, Homo sapiens
  misc_RNA (1)...(19): siRNA sense strand
ugaagaacuuugugaccaa

SEQ ID NO: 621154 - RNA, 19 nt, Homo sapiens
  misc_RNA (1)...(19): siRNA sense strand
ggagaagacacccauaaag

SEQ ID NO: 621155 - RNA, 19 nt, Homo sapiens
  misc_RNA (1)...(19): siRNA sense strand
aguaaagccuagaaucaaa

SEQ ID NO: 621156 - RNA, 19 nt, Homo sapiens
  misc_RNA (1)...(19): siRNA sense strand
caagacaggcugcgaaaca

SEQ ID NO: 621157 - RNA, 19 nt, Homo sapiens
  misc_RNA (1)...(19): siRNA sense strand
ccaacaaaguacagagaug

SEQ ID NO: 621158 - RNA, 19 nt, Homo sapiens
  misc_RNA (1)...(19): siRNA sense strand
acacgaugcugcugccaaa

SEQ ID NO: 621159 - RNA, 19 nt, Homo sapiens
  misc_RNA (1)...(19): siRNA sense strand
aagagaauccgaagaagaa

SEQ ID NO: 621160 - RNA, 19 nt, Homo sapiens
  misc_RNA (1)...(19): siRNA sense strand
gaaacggaccaaugucugu

SEQ ID NO: 621161 - RNA, 19 nt, Homo sapiens
  misc_RNA (1)...(19): siRNA sense strand
caagaacgaauuuguaucu

SEQ ID NO: 621162 - RNA, 19 nt, Homo sapiens
  misc_RNA (1)...(19): siRNA sense strand
gagcaacuggacuaucuuu

SEQ ID NO: 621163 - RNA, 19 nt, Homo sapiens
  misc_RNA (1)...(19): siRNA sense strand
uaauaaagaggaugaguuc

SEQ ID NO: 621164 - RNA, 19 nt, Homo sapiens
  misc_RNA (1)...(19): siRNA sense strand
agaagacacccauaaagaa

SEQ ID NO: 621165 - RNA, 19 nt, Homo sapiens
  misc_RNA (1)...(19): siRNA sense strand
ggaacgggcaccaacaaga

SEQ ID NO: 621166 - RNA, 19 nt, Homo sapiens
  misc_RNA (1)...(19): siRNA sense strand
uguuugagauugcacuuaa

SEQ ID NO: 621167 - RNA, 19 nt, Homo sapiens
  misc_RNA (1)...(19): siRNA sense strand
ggaagagaauccgaagaag

SEQ ID NO: 621168 - RNA, 19 nt, Homo sapiens
  misc_RNA (1)...(19): siRNA sense strand
gaguaaagccuagaaucaa

SEQ ID NO: 621169 - RNA, 19 nt, Homo sapiens
  misc_RNA (1)...(19): siRNA sense strand
cgaguaaagccuagaauca

SEQ ID NO: 621170 - RNA, 19 nt, Homo sapiens
  misc_RNA (1)...(19): siRNA sense strand
gcaaaggaaagacaagaca

SEQ ID NO: 621171 - RNA, 19 nt, Homo sapiens
  misc_RNA (1)...(19): siRNA sense strand
cgccauagcuguucuugag

SEQ ID NO: 621172 - RNA, 19 nt, Homo sapiens
  misc_RNA (1)...(19): siRNA sense strand
cggaugcaguccaccuaua

SEQ ID NO: 621173 - RNA, 19 nt, Homo sapiens
  misc_RNA (1)...(19): siRNA sense strand
ucuuaaaguugcugucuga

SEQ ID NO: 621174 - RNA, 19 nt, Homo sapiens
  misc_RNA (1)...(19): siRNA sense strand
gcgcugaacaucuuaaagu

SEQ ID NO: 621175 - RNA, 19 nt, Homo sapiens
  misc_RNA (1)...(19): siRNA sense strand
ccaguuccaccuuuacuuu

SEQ ID NO: 621176 - RNA, 19 nt, Homo sapiens
  misc_RNA (1)...(19): siRNA sense strand
gauccuugguuucaaaguc

SEQ ID NO: 621177 - RNA, 19 nt, Homo sapiens
  misc_RNA (1)...(19): siRNA sense strand
gaggacagcaauuuaaugg

SEQ ID NO: 621178 - RNA, 19 nt, Homo sapiens
  misc_RNA (1)...(19): siRNA sense strand
ggaggacagcaauuuaaug

SEQ ID NO: 621179 - RNA, 19 nt, Homo sapiens
  misc_RNA (1)...(19): siRNA sense strand
gggaaaagcaagaagauuu

SEQ ID NO: 621180 - RNA, 19 nt, Homo sapiens
  misc_RNA (1)...(19): siRNA sense strand
gacaagacaggcugcgaaa

SEQ ID NO: 621181 - RNA, 19 nt, Homo sapiens
  misc_RNA (1)...(19): siRNA sense strand
uggcugcgcugaacaucuu

SEQ ID NO: 621182 - RNA, 19 nt, Homo sapiens
  misc_RNA (1)...(19): siRNA sense strand
gaaggaacgggcaccaaca

SEQ ID NO: 621183 - RNA, 19 nt, Homo sapiens
  misc_RNA (1)...(19): siRNA sense strand
uggaagagaauccgaagaa

SEQ ID NO: 621184 - RNA, 19 nt, Homo sapiens
  misc_RNA (1)...(19): siRNA sense strand
ccacagacaagcccagaau

SEQ ID NO: 621185 - RNA, 19 nt, Homo sapiens
  misc_RNA (1)...(19): siRNA sense strand
ccucugaucagccauggua

SEQ ID NO: 621186 - RNA, 19 nt, Homo sapiens
  misc_RNA (1)...(19): siRNA sense strand
gcaaugcagccgagaacau

SEQ ID NO: 621187 - RNA, 19 nt, Homo sapiens
  misc_RNA (1)...(19): siRNA sense strand
gcugaacaucuuaaaguug

SEQ ID NO: 621188 - RNA, 19 nt, Homo sapiens
  misc_RNA (1)...(19): siRNA sense strand
gugggaggacagcaauuua

SEQ ID NO: 621189 - RNA, 19 nt, Homo sapiens
  misc_RNA (1)...(19): siRNA sense strand
ggagaaggagccagaguac

SEQ ID NO: 621190 - RNA, 19 nt, Homo sapiens
  misc_RNA (1)...(19): siRNA sense strand
acagacaagcccagaauau

SEQ ID NO: 621191 - RNA, 19 nt, Homo sapiens
  misc_RNA (1)...(19): siRNA sense strand
caauguauaagccuguuga

SEQ ID NO: 621192 - RNA, 19 nt, Homo sapiens
  misc_RNA (1)...(19): siRNA sense strand
gaacaggaaacggaccaau

SEQ ID NO: 621193 - RNA, 19 nt, Homo sapiens
  misc_RNA (1)...(19): siRNA sense strand
gaccaacaaaguacagaga

SEQ ID NO: 621194 - RNA, 19 nt, Homo sapiens
  misc_RNA (1)...(19): siRNA sense strand
uguaggaguuagucaagga

SEQ ID NO: 621195 - RNA, 19 nt, Homo sapiens
  misc_RNA (1)...(19): siRNA sense strand
ccgagaacaugcuggagau

SEQ ID NO: 621196 - RNA, 19 nt, Homo sapiens
  misc_RNA (1)...(19): siRNA sense strand
gcaguccaccuauaacuac

SEQ ID NO: 621197 - RNA, 19 nt, Homo sapiens
  misc_RNA (1)...(19): siRNA sense strand
gggaggacagcaauuuaau

SEQ ID NO: 621198 - RNA, 19 nt, Homo sapiens
  misc_RNA (1)...(19): siRNA sense strand
gagaugccaagaacaggaa

SEQ ID NO: 621199 - RNA, 19 nt, Homo sapiens
  misc_RNA (1)...(19): siRNA sense strand
gaacuuugugaccaagguu

SEQ ID NO: 621200 - RNA, 19 nt, Homo sapiens
  misc_RNA (1)...(19): siRNA sense strand
gcccgagaguuguuguaug

SEQ ID NO: 621201 - RNA, 19 nt, Homo sapiens
  misc_RNA (1)...(19): siRNA sense strand
caguuccaccuuuacuuua

SEQ ID NO: 621202 - RNA, 19 nt, Homo sapiens
  misc_RNA (1)...(19): siRNA sense strand
caugagaggaggugcuuau

SEQ ID NO: 621203 - RNA, 19 nt, Homo sapiens
  misc_RNA (1)...(19): siRNA sense strand
accuauaacuacaacauga

SEQ ID NO: 621204 - RNA, 19 nt, Homo sapiens
  misc_RNA (1)...(19): siRNA sense strand
aguacacgcuccucacaga

SEQ ID NO: 621205 - RNA, 19 nt, Homo sapiens
  misc_RNA (1)...(19): siRNA sense strand
gccugcaguugaacgagua

SEQ ID NO: 621206 - RNA, 19 nt, Homo sapiens
  misc_RNA (1)...(19): siRNA sense strand
cagacaagcccagaauaug

SEQ ID NO: 621207 - RNA, 19 nt, Homo sapiens
  misc_RNA (1)...(19): siRNA sense strand
acaggaaacggaccaaugu

SEQ ID NO: 621208 - RNA, 19 nt, Homo sapiens
  misc_RNA (1)...(19): siRNA sense strand
cgcugaacaucuuaaaguu

SEQ ID NO: 621209 - RNA, 19 nt, Homo sapiens
  misc_RNA (1)...(19): siRNA sense strand
cugagcaacuggacuaucu

SEQ ID NO: 621210 - RNA, 19 nt, Homo sapiens
  misc_RNA (1)...(19): siRNA sense strand
cccgagaguuguuguaugg

SEQ ID NO: 621211 - RNA, 19 nt, Homo sapiens
  misc_RNA (1)...(19): siRNA sense strand
caaacccgcacucaaguca

SEQ ID NO: 621212 - RNA, 19 nt, Homo sapiens
  misc_RNA (1)...(19): siRNA sense strand
gaagguggccaagcgcaau

SEQ ID NO: 621213 - RNA, 19 nt, Homo sapiens
  misc_RNA (1)...(19): siRNA sense strand
ccucugagcaacuggacua

SEQ ID NO: 621214 - RNA, 19 nt, Homo sapiens
  misc_RNA (1)...(19): siRNA sense strand
agaacgaauuuguaucucu

SEQ ID NO: 621215 - RNA, 19 nt, Homo sapiens
  misc_RNA (1)...(19): siRNA sense strand
uacaaagacuuccccaaaa

SEQ ID NO: 621216 - RNA, 19 nt, Homo sapiens
  misc_RNA (1)...(19): siRNA sense strand
agacaagcccagaauaugg

SEQ ID NO: 621217 - RNA, 19 nt, Homo sapiens
  misc_RNA (1)...(19): siRNA sense strand
ggaguccugccaugauaug

SEQ ID NO: 621218 - RNA, 19 nt, Homo sapiens
  misc_RNA (1)...(19): siRNA sense strand
caccaaacccgcacucaag

SEQ ID NO: 621219 - RNA, 19 nt, Homo sapiens
  misc_RNA (1)...(19): siRNA sense strand
gaacaugcuggagauccuu

SEQ ID NO: 621220 - RNA, 19 nt, Homo sapiens
  misc_RNA (1)...(19): siRNA sense strand
caaugcagccgagaacaug

SEQ ID NO: 621221 - RNA, 19 nt, Homo sapiens
  misc_RNA (1)...(19): siRNA sense strand
ugggaggacagcaauuuaa

SEQ ID NO: 621222 - RNA, 19 nt, Homo sapiens
  misc_RNA (1)...(19): siRNA sense strand
gcaagaagauuucaaagaa

SEQ ID NO: 621223 - RNA, 19 nt, Homo sapiens
  misc_RNA (1)...(19): siRNA sense strand
aaacggaacuugccuguga

SEQ ID NO: 621224 - RNA, 19 nt, Homo sapiens
  misc_RNA (1)...(19): siRNA sense strand
gaacuugccugugaauuuc

SEQ ID NO: 621225 - RNA, 19 nt, Homo sapiens
  misc_RNA (1)...(19): siRNA sense strand
gaacgaauuuguaucucuu

SEQ ID NO: 621226 - RNA, 19 nt, Homo sapiens
  misc_RNA (1)...(19): siRNA sense strand
gaagacacccauaaagaaa

SEQ ID NO: 621227 - RNA, 19 nt, Homo sapiens
  misc_RNA (1)...(19): siRNA sense strand
ggaacuugccugugaauuu

SEQ ID NO: 621228 - RNA, 19 nt, Homo sapiens
  misc_RNA (1)...(19): siRNA sense strand
ggagauccuugguuucaaa

SEQ ID NO: 621229 - RNA, 19 nt, Homo sapiens
  misc_RNA (1)...(19): siRNA sense strand
ggacaucacaccaaagauu

SEQ ID NO: 621230 - RNA, 19 nt, Homo sapiens
  misc_RNA (1)...(19): siRNA sense strand
uaaaguugcugucugaguu

SEQ ID NO: 621231 - RNA, 19 nt, Homo sapiens
  misc_RNA (1)...(19): siRNA sense strand
gagaagacacccauaaaga

SEQ ID NO: 621232 - RNA, 19 nt, Homo sapiens
  misc_RNA (1)...(19): siRNA sense strand
guacagagaugccaagaac

SEQ ID NO: 621233 - RNA, 19 nt, Homo sapiens
  misc_RNA (1)...(19): siRNA sense strand
gaaaaugggacuaguaaua

SEQ ID NO: 621234 - RNA, 19 nt, Homo sapiens
  misc_RNA (1)...(19): siRNA sense strand
gcaauuuaauggcaaagga

SEQ ID NO: 621235 - RNA, 19 nt, Homo sapiens
  misc_RNA (1)...(19): siRNA sense strand
cacgguaacugccaugaua

SEQ ID NO: 621236 - RNA, 19 nt, Homo sapiens
  misc_RNA (1)...(19): siRNA sense strand
gaagagaauccgaagaaga

SEQ ID NO: 621237 - RNA, 19 nt, Homo sapiens
  misc_RNA (1)...(19): siRNA sense strand
ggaggugaauggaagagaa

SEQ ID NO: 621238 - RNA, 19 nt, Homo sapiens
  misc_RNA (1)...(19): siRNA sense strand
gaacgggcaccaacaagaa

SEQ ID NO: 621239 - RNA, 19 nt, Homo sapiens
  misc_RNA (1)...(19): siRNA sense strand
ucaaggacaucacaccaaa

SEQ ID NO: 621240 - RNA, 19 nt, Homo sapiens
  misc_RNA (1)...(19): siRNA sense strand
caugauagcccgagaguug

SEQ ID NO: 621241 - RNA, 19 nt, Homo sapiens
  misc_RNA (1)...(19): siRNA sense strand
uugaggagcugaagaaguu

SEQ ID NO: 621242 - RNA, 19 nt, Homo sapiens
  misc_RNA (1)...(19): siRNA sense strand
gaggagaagacacccauaa

SEQ ID NO: 621243 - RNA, 19 nt, Homo sapiens
  misc_RNA (1)...(19): siRNA sense strand
gaaauaagucaaguguuug

SEQ ID NO: 621244 - RNA, 19 nt, Homo sapiens
  misc_RNA (1)...(19): siRNA sense strand
guggaguccugccaugaua

SEQ ID NO: 621245 - RNA, 19 nt, Homo sapiens
  misc_RNA (1)...(19): siRNA sense strand
gcagggaguuugugaugca

SEQ ID NO: 621246 - RNA, 19 nt, Homo sapiens
  misc_RNA (1)...(19): siRNA sense strand
ugaggauccugcagaauga

SEQ ID NO: 621247 - RNA, 19 nt, Homo sapiens
  misc_RNA (1)...(19): siRNA sense strand
ggaugcaguccaccuauaa

SEQ ID NO: 621248 - RNA, 19 nt, Homo sapiens
  misc_RNA (1)...(19): siRNA sense strand
cagagaggcuggaggugaa

SEQ ID NO: 621249 - RNA, 19 nt, Homo sapiens
  misc_RNA (1)...(19): siRNA sense strand
aaaccacacugcagaagga

SEQ ID NO: 621250 - RNA, 19 nt, Homo sapiens
  misc_RNA (1)...(19): siRNA sense strand
gaacgaguaaagccuagaa

SEQ ID NO: 621251 - RNA, 19 nt, Homo sapiens
  misc_RNA (1)...(19): siRNA sense strand
gacaucacaccaaagauuu

SEQ ID NO: 621252 - RNA, 19 nt, Homo sapiens
  misc_RNA (1)...(19): siRNA sense strand
guaauaaagaggaugaguu

SEQ ID NO: 621253 - RNA, 19 nt, Homo sapiens
  misc_RNA (1)...(19): siRNA sense strand
ugaagaacuuugugaccaa

SEQ ID NO: 621254 - RNA, 19 nt, Homo sapiens
  misc_RNA (1)...(19): siRNA sense strand
ggagaagacacccauaaag

SEQ ID NO: 621255 - RNA, 19 nt, Homo sapiens
  misc_RNA (1)...(19): siRNA sense strand
aguaaagccuagaaucaaa

SEQ ID NO: 621256 - RNA, 19 nt, Homo sapiens
  misc_RNA (1)...(19): siRNA sense strand
caagacaggcugcgaaaca

SEQ ID NO: 621257 - RNA, 19 nt, Homo sapiens
  misc_RNA (1)...(19): siRNA sense strand
ccaacaaaguacagagaug

SEQ ID NO: 621258 - RNA, 19 nt, Homo sapiens
  misc_RNA (1)...(19): siRNA sense strand
acacgaugcugcugccaaa

SEQ ID NO: 621259 - RNA, 19 nt, Homo sapiens
  misc_RNA (1)...(19): siRNA sense strand
aagagaauccgaagaagaa

SEQ ID NO: 621260 - RNA, 19 nt, Homo sapiens
  misc_RNA (1)...(19): siRNA sense strand
gaaacggaccaaugucugu

SEQ ID NO: 621261 - RNA, 19 nt, Homo sapiens
  misc_RNA (1)...(19): siRNA sense strand
caagaacgaauuuguaucu

SEQ ID NO: 621262 - RNA, 19 nt, Homo sapiens
  misc_RNA (1)...(19): siRNA sense strand
gagcaacuggacuaucuuu

SEQ ID NO: 621263 - RNA, 19 nt, Homo sapiens
  misc_RNA (1)...(19): siRNA sense strand
uaauaaagaggaugaguuc

SEQ ID NO: 621264 - RNA, 19 nt, Homo sapiens
  misc_RNA (1)...(19): siRNA sense strand
agaagacacccauaaagaa

SEQ ID NO: 621265 - RNA, 19 nt, Homo sapiens
  misc_RNA (1)...(19): siRNA sense strand
ggaacgggcaccaacaaga

SEQ ID NO: 621266 - RNA, 19 nt, Homo sapiens
  misc_RNA (1)...(19): siRNA sense strand
uguuugagauugcacuuaa

SEQ ID NO: 621267 - RNA, 19 nt, Homo sapiens
  misc_RNA (1)...(19): siRNA sense strand
ggaagagaauccgaagaag

SEQ ID NO: 621268 - RNA, 19 nt, Homo sapiens
  misc_RNA (1)...(19): siRNA sense strand
gaguaaagccuagaaucaa

SEQ ID NO: 621269 - RNA, 19 nt, Homo sapiens
  misc_RNA (1)...(19): siRNA sense strand
cgaguaaagccuagaauca

SEQ ID NO: 621270 - RNA, 19 nt, Homo sapiens
  misc_RNA (1)...(19): siRNA sense strand
gcaaaggaaagacaagaca

SEQ ID NO: 621271 - RNA, 19 nt, Homo sapiens
  misc_RNA (1)...(19): siRNA sense strand
cgccauagcuguucuugag

SEQ ID NO: 621272 - RNA, 19 nt, Homo sapiens
  misc_RNA (1)...(19): siRNA sense strand
cggaugcaguccaccuaua

SEQ ID NO: 621273 - RNA, 19 nt, Homo sapiens
  misc_RNA (1)...(19): siRNA sense strand
ucuuaaaguugcugucuga

SEQ ID NO: 621274 - RNA, 19 nt, Homo sapiens
  misc_RNA (1)...(19): siRNA sense strand
gcgcugaacaucuuaaagu

SEQ ID NO: 621275 - RNA, 19 nt, Homo sapiens
  misc_RNA (1)...(19): siRNA sense strand
ccaguuccaccuuuacuuu

SEQ ID NO: 621276 - RNA, 19 nt, Homo sapiens
  misc_RNA (1)...(19): siRNA sense strand
gauccuugguuucaaaguc

SEQ ID NO: 621277 - RNA, 19 nt, Homo sapiens
  misc_RNA (1)...(19): siRNA sense strand
gaggacagcaauuuaaugg

SEQ ID NO: 621278 - RNA, 19 nt, Homo sapiens
  misc_RNA (1)...(19): siRNA sense strand
ggaggacagcaauuuaaug

SEQ ID NO: 621279 - RNA, 19 nt, Homo sapiens
  misc_RNA (1)...(19): siRNA sense strand
gggaaaagcaagaagauuu

SEQ ID NO: 621280 - RNA, 19 nt, Homo sapiens
  misc_RNA (1)...(19): siRNA sense strand
gacaagacaggcugcgaaa

SEQ ID NO: 621281 - RNA, 19 nt, Homo sapiens
  misc_RNA (1)...(19): siRNA sense strand
uggcugcgcugaacaucuu

SEQ ID NO: 621282 - RNA, 19 nt, Homo sapiens
  misc_RNA (1)...(19): siRNA sense strand
gaaggaacgggcaccaaca

SEQ ID NO: 621283 - RNA, 19 nt, Homo sapiens
  misc_RNA (1)...(19): siRNA sense strand
uggaagagaauccgaagaa

SEQ ID NO: 621284 - RNA, 19 nt, Homo sapiens
  misc_RNA (1)...(19): siRNA sense strand
ccacagacaagcccagaau

SEQ ID NO: 621285 - RNA, 19 nt, Homo sapiens
  misc_RNA (1)...(19): siRNA sense strand
ccucugaucagccauggua

SEQ ID NO: 621286 - RNA, 19 nt, Homo sapiens
  misc_RNA (1)...(19): siRNA sense strand
gcaaugcagccgagaacau

SEQ ID NO: 621287 - RNA, 19 nt, Homo sapiens
  misc_RNA (1)...(19): siRNA sense strand
gcugaacaucuuaaaguug

SEQ ID NO: 621288 - RNA, 19 nt, Homo sapiens
  misc_RNA (1)...(19): siRNA sense strand
gugggaggacagcaauuua

SEQ ID NO: 621289 - RNA, 19 nt, Homo sapiens
  misc_RNA (1)...(19): siRNA sense strand
ggagaaggagccagaguac

SEQ ID NO: 621290 - RNA, 19 nt, Homo sapiens
  misc_RNA (1)...(19): siRNA sense strand
acagacaagcccagaauau

SEQ ID NO: 621291 - RNA, 19 nt, Homo sapiens
  misc_RNA (1)...(19): siRNA sense strand
caauguauaagccuguuga

SEQ ID NO: 621292 - RNA, 19 nt, Homo sapiens
  misc_RNA (1)...(19): siRNA sense strand
gaacaggaaacggaccaau

SEQ ID NO: 621293 - RNA, 19 nt, Homo sapiens
  misc_RNA (1)...(19): siRNA sense strand
gaccaacaaaguacagaga

SEQ ID NO: 621294 - RNA, 19 nt, Homo sapiens
  misc_RNA (1)...(19): siRNA sense strand
uguaggaguuagucaagga

SEQ ID NO: 621295 - RNA, 19 nt, Homo sapiens
  misc_RNA (1)...(19): siRNA sense strand
ccgagaacaugcuggagau

SEQ ID NO: 621296 - RNA, 19 nt, Homo sapiens
  misc_RNA (1)...(19): siRNA sense strand
gcaguccaccuauaacuac

SEQ ID NO: 621297 - RNA, 19 nt, Homo sapiens
  misc_RNA (1)...(19): siRNA sense strand
gggaggacagcaauuuaau

SEQ ID NO: 621298 - RNA, 19 nt, Homo sapiens
  misc_RNA (1)...(19): siRNA sense strand
gagaugccaagaacaggaa

SEQ ID NO: 621299 - RNA, 19 nt, Homo sapiens
  misc_RNA (1)...(19): siRNA sense strand
gaacuuugugaccaagguu

SEQ ID NO: 621300 - RNA, 19 nt, Homo sapiens
  misc_RNA (1)...(19): siRNA sense strand
gcccgagaguuguuguaug

SEQ ID NO: 621301 - RNA, 19 nt, Homo sapiens
  misc_RNA (1)...(19): siRNA sense strand
caguuccaccuuuacuuua

SEQ ID NO: 621302 - RNA, 19 nt, Homo sapiens
  misc_RNA (1)...(19): siRNA sense strand
caugagaggaggugcuuau

SEQ ID NO: 621303 - RNA, 19 nt, Homo sapiens
  misc_RNA (1)...(19): siRNA sense strand
accuauaacuacaacauga

SEQ ID NO: 621304 - RNA, 19 nt, Homo sapiens
  misc_RNA (1)...(19): siRNA sense strand
aguacacgcuccucacaga

SEQ ID NO: 621305 - RNA, 19 nt, Homo sapiens
  misc_RNA (1)...(19): siRNA sense strand
gccugcaguugaacgagua

SEQ ID NO: 621306 - RNA, 19 nt, Homo sapiens
  misc_RNA (1)...(19): siRNA sense strand
cagacaagcccagaauaug

SEQ ID NO: 621307 - RNA, 19 nt, Homo sapiens
  misc_RNA (1)...(19): siRNA sense strand
acaggaaacggaccaaugu

SEQ ID NO: 621308 - RNA, 19 nt, Homo sapiens
  misc_RNA (1)...(19): siRNA sense strand
cgcugaacaucuuaaaguu

SEQ ID NO: 621309 - RNA, 19 nt, Homo sapiens
  misc_RNA (1)...(19): siRNA sense strand
cugagcaacuggacuaucu

SEQ ID NO: 621310 - RNA, 19 nt, Homo sapiens
  misc_RNA (1)...(19): siRNA sense strand
cccgagaguuguuguaugg

SEQ ID NO: 621311 - RNA, 19 nt, Homo sapiens
  misc_RNA (1)...(19): siRNA sense strand
caaacccgcacucaaguca

SEQ ID NO: 621312 - RNA, 19 nt, Homo sapiens
  misc_RNA (1)...(19): siRNA sense strand
gaagguggccaagcgcaau

SEQ ID NO: 621313 - RNA, 19 nt, Homo sapiens
  misc_RNA (1)...(19): siRNA sense strand
ccucugagcaacuggacua

SEQ ID NO: 621314 - RNA, 19 nt, Homo sapiens
  misc_RNA (1)...(19): siRNA sense strand
agaacgaauuuguaucucu

SEQ ID NO: 621315 - RNA, 19 nt, Homo sapiens
  misc_RNA (1)...(19): siRNA sense strand
uacaaagacuuccccaaaa

SEQ ID NO: 621316 - RNA, 19 nt, Homo sapiens
  misc_RNA (1)...(19): siRNA sense strand
agacaagcccagaauaugg

SEQ ID NO: 621317 - RNA, 19 nt, Homo sapiens
  misc_RNA (1)...(19): siRNA sense strand
ggaguccugccaugauaug

SEQ ID NO: 621318 - RNA, 19 nt, Homo sapiens
  misc_RNA (1)...(19): siRNA sense strand
caccaaacccgcacucaag

SEQ ID NO: 621319 - RNA, 19 nt, Homo sapiens
  misc_RNA (1)...(19): siRNA sense strand
gaacaugcuggagauccuu

SEQ ID NO: 621320 - RNA, 19 nt, Homo sapiens
  misc_RNA (1)...(19): siRNA sense strand
caaugcagccgagaacaug

SEQ ID NO: 621321 - RNA, 19 nt, Homo sapiens
  misc_RNA (1)...(19): siRNA sense strand
ugggaggacagcaauuuaa

SEQ ID NO: 621322 - RNA, 19 nt, Homo sapiens
  misc_RNA (1)...(19): siRNA sense strand
gcaagaagauuucaaagaa

SEQ ID NO: 621323 - RNA, 19 nt, Homo sapiens
  misc_RNA (1)...(19): siRNA sense strand
aaacggaacuugccuguga

SEQ ID NO: 621324 - RNA, 19 nt, Homo sapiens
  misc_RNA (1)...(19): siRNA sense strand
gaacuugccugugaauuuc

SEQ ID NO: 621325 - RNA, 19 nt, Homo sapiens
  misc_RNA (1)...(19): siRNA sense strand
gaacgaauuuguaucucuu

SEQ ID NO: 621326 - RNA, 19 nt, Homo sapiens
  misc_RNA (1)...(19): siRNA sense strand
gaagacacccauaaagaaa

SEQ ID NO: 621327 - RNA, 19 nt, Homo sapiens
  misc_RNA (1)...(19): siRNA sense strand
ggaacuugccugugaauuu

SEQ ID NO: 621328 - RNA, 19 nt, Homo sapiens
  misc_RNA (1)...(19): siRNA sense strand
ggagauccuugguuucaaa

SEQ ID NO: 621329 - RNA, 19 nt, Homo sapiens
  misc_RNA (1)...(19): siRNA sense strand
ggacaucacaccaaagauu

SEQ ID NO: 621330 - RNA, 19 nt, Homo sapiens
  misc_RNA (1)...(19): siRNA sense strand
uaaaguugcugucugaguu

SEQ ID NO: 621331 - RNA, 19 nt, Homo sapiens
  misc_RNA (1)...(19): siRNA sense strand
gagaagacacccauaaaga

SEQ ID NO: 621332 - RNA, 19 nt, Homo sapiens
  misc_RNA (1)...(19): siRNA sense strand
guacagagaugccaagaac

SEQ ID NO: 621333 - RNA, 19 nt, Homo sapiens
  misc_RNA (1)...(19): siRNA sense strand
gaaaaugggacuaguaaua

SEQ ID NO: 621334 - RNA, 19 nt, Homo sapiens
  misc_RNA (1)...(19): siRNA sense strand
gcaauuuaauggcaaagga

SEQ ID NO: 621335 - RNA, 19 nt, Homo sapiens
  misc_RNA (1)...(19): siRNA sense strand
cacgguaacugccaugaua

SEQ ID NO: 621336 - RNA, 19 nt, Homo sapiens
  misc_RNA (1)...(19): siRNA sense strand
gaagagaauccgaagaaga

SEQ ID NO: 621337 - RNA, 19 nt, Homo sapiens
  misc_RNA (1)...(19): siRNA sense strand
ggaggugaauggaagagaa

SEQ ID NO: 621338 - RNA, 19 nt, Homo sapiens
  misc_RNA (1)...(19): siRNA sense strand
gaacgggcaccaacaagaa

SEQ ID NO: 621339 - RNA, 19 nt, Homo sapiens
  misc_RNA (1)...(19): siRNA sense strand
ucaaggacaucacaccaaa

SEQ ID NO: 621340 - RNA, 19 nt, Homo sapiens
  misc_RNA (1)...(19): siRNA sense strand
caugauagcccgagaguug

SEQ ID NO: 621341 - RNA, 19 nt, Homo sapiens
  misc_RNA (1)...(19): siRNA sense strand
uugaggagcugaagaaguu

SEQ ID NO: 621342 - RNA, 19 nt, Homo sapiens
  misc_RNA (1)...(19): siRNA sense strand
gaggagaagacacccauaa

SEQ ID NO: 621343 - RNA, 19 nt, Homo sapiens
  misc_RNA (1)...(19): siRNA sense strand
gaaauaagucaaguguuug

SEQ ID NO: 621344 - RNA, 19 nt, Homo sapiens
  misc_RNA (1)...(19): siRNA sense strand
guggaguccugccaugaua

SEQ ID NO: 621345 - RNA, 19 nt, Homo sapiens
  misc_RNA (1)...(19): siRNA sense strand
gcagggaguuugugaugca

SEQ ID NO: 621346 - RNA, 19 nt, Homo sapiens
  misc_RNA (1)...(19): siRNA sense strand
ugaggauccugcagaauga

SEQ ID NO: 621347 - RNA, 19 nt, Homo sapiens
  misc_RNA (1)...(19): siRNA sense strand
ggaugcaguccaccuauaa

SEQ ID NO: 621348 - RNA, 19 nt, Homo sapiens
  misc_RNA (1)...(19): siRNA sense strand
cagagaggcuggaggugaa

SEQ ID NO: 621349 - RNA, 19 nt, Homo sapiens
  misc_RNA (1)...(19): siRNA sense strand
aaaccacacugcagaagga

SEQ ID NO: 621350 - RNA, 19 nt, Homo sapiens
  misc_RNA (1)...(19): siRNA sense strand
gaacgaguaaagccuagaa

SEQ ID NO: 621351 - RNA, 19 nt, Homo sapiens
  misc_RNA (1)...(19): siRNA sense strand
gacaucacaccaaagauuu

SEQ ID NO: 621352 - RNA, 19 nt, Homo sapiens
  misc_RNA (1)...(19): siRNA sense strand
guaauaaagaggaugaguu

SEQ ID NO: 621353 - RNA, 19 nt, Homo sapiens
  misc_RNA (1)...(19): siRNA sense strand
ugaagaacuuugugaccaa

SEQ ID NO: 621354 - RNA, 19 nt, Homo sapiens
  misc_RNA (1)...(19): siRNA sense strand
ggagaagacacccauaaag

SEQ ID NO: 621355 - RNA, 19 nt, Homo sapiens
  misc_RNA (1)...(19): siRNA sense strand
aguaaagccuagaaucaaa

SEQ ID NO: 621356 - RNA, 19 nt, Homo sapiens
  misc_RNA (1)...(19): siRNA sense strand
caagacaggcugcgaaaca

SEQ ID NO: 621357 - RNA, 19 nt, Homo sapiens
  misc_RNA (1)...(19): siRNA sense strand
ccaacaaaguacagagaug

SEQ ID NO: 621358 - RNA, 19 nt, Homo sapiens
  misc_RNA (1)...(19): siRNA sense strand
acacgaugcugcugccaaa

SEQ ID NO: 621359 - RNA, 19 nt, Homo sapiens
  misc_RNA (1)...(19): siRNA sense strand
aagagaauccgaagaagaa

SEQ ID NO: 621360 - RNA, 19 nt, Homo sapiens
  misc_RNA (1)...(19): siRNA sense strand
gaaacggaccaaugucugu

SEQ ID NO: 621361 - RNA, 19 nt, Homo sapiens
  misc_RNA (1)...(19): siRNA sense strand
caagaacgaauuuguaucu

SEQ ID NO: 621362 - RNA, 19 nt, Homo sapiens
  misc_RNA (1)...(19): siRNA sense strand
gagcaacuggacuaucuuu

SEQ ID NO: 621363 - RNA, 19 nt, Homo sapiens
  misc_RNA (1)...(19): siRNA sense strand
uaauaaagaggaugaguuc

SEQ ID NO: 621364 - RNA, 19 nt, Homo sapiens
  misc_RNA (1)...(19): siRNA sense strand
agaagacacccauaaagaa

SEQ ID NO: 621365 - RNA, 19 nt, Homo sapiens
  misc_RNA (1)...(19): siRNA sense strand
ggaacgggcaccaacaaga

SEQ ID NO: 621366 - RNA, 19 nt, Homo sapiens
  misc_RNA (1)...(19): siRNA sense strand
uguuugagauugcacuuaa

SEQ ID NO: 621367 - RNA, 19 nt, Homo sapiens
  misc_RNA (1)...(19): siRNA sense strand
ggaagagaauccgaagaag

SEQ ID NO: 621368 - RNA, 19 nt, Homo sapiens
  misc_RNA (1)...(19): siRNA sense strand
gaguaaagccuagaaucaa

SEQ ID NO: 621369 - RNA, 19 nt, Homo sapiens
  misc_RNA (1)...(19): siRNA sense strand
cgaguaaagccuagaauca

SEQ ID NO: 621370 - RNA, 19 nt, Homo sapiens
  misc_RNA (1)...(19): siRNA sense strand
gcaaaggaaagacaagaca

SEQ ID NO: 621371 - RNA, 19 nt, Homo sapiens
  misc_RNA (1)...(19): siRNA sense strand
cgccauagcuguucuugag

SEQ ID NO: 621372 - RNA, 19 nt, Homo sapiens
  misc_RNA (1)...(19): siRNA sense strand
cggaugcaguccaccuaua

SEQ ID NO: 621373 - RNA, 19 nt, Homo sapiens
  misc_RNA (1)...(19): siRNA sense strand
ucuuaaaguugcugucuga

SEQ ID NO: 621374 - RNA, 19 nt, Homo sapiens
  misc_RNA (1)...(19): siRNA sense strand
ccaguuccaccuuuacuuu

SEQ ID NO: 621375 - RNA, 19 nt, Homo sapiens
  misc_RNA (1)...(19): siRNA sense strand
gcgcugaacaucuuaaagu

SEQ ID NO: 621376 - RNA, 19 nt, Homo sapiens
  misc_RNA (1)...(19): siRNA sense strand
gauccuugguuucaaaguc

SEQ ID NO: 621377 - RNA, 19 nt, Homo sapiens
  misc_RNA (1)...(19): siRNA sense strand
ggaggacagcaauuuaaug

SEQ ID NO: 621378 - RNA, 19 nt, Homo sapiens
  misc_RNA (1)...(19): siRNA sense strand
gaggacagcaauuuaaugg

SEQ ID NO: 621379 - RNA, 19 nt, Homo sapiens
  misc_RNA (1)...(19): siRNA sense strand
gggaaaagcaagaagauuu

SEQ ID NO: 621380 - RNA, 19 nt, Homo sapiens
  misc_RNA (1)...(19): siRNA sense strand
gacaagacaggcugcgaaa

SEQ ID NO: 621381 - RNA, 19 nt, Homo sapiens
  misc_RNA (1)...(19): siRNA sense strand
uggcugcgcugaacaucuu

SEQ ID NO: 621382 - RNA, 19 nt, Homo sapiens
  misc_RNA (1)...(19): siRNA sense strand
gaaggaacgggcaccaaca

SEQ ID NO: 621383 - RNA, 19 nt, Homo sapiens
  misc_RNA (1)...(19): siRNA sense strand
uggaagagaauccgaagaa

SEQ ID NO: 621384 - RNA, 19 nt, Homo sapiens
  misc_RNA (1)...(19): siRNA sense strand
ccacagacaagcccagaau

SEQ ID NO: 621385 - RNA, 19 nt, Homo sapiens
  misc_RNA (1)...(19): siRNA sense strand
ccucugaucagccauggua

SEQ ID NO: 621386 - RNA, 19 nt, Homo sapiens
  misc_RNA (1)...(19): siRNA sense strand
gcaaugcagccgagaacau

SEQ ID NO: 621387 - RNA, 19 nt, Homo sapiens
  misc_RNA (1)...(19): siRNA sense strand
gcugaacaucuuaaaguug

SEQ ID NO: 621388 - RNA, 19 nt, Homo sapiens
  misc_RNA (1)...(19): siRNA sense strand
ggagaaggagccagaguac

SEQ ID NO: 621389 - RNA, 19 nt, Homo sapiens
  misc_RNA (1)...(19): siRNA sense strand
gugggaggacagcaauuua

SEQ ID NO: 621390 - RNA, 19 nt, Homo sapiens
  misc_RNA (1)...(19): siRNA sense strand
acagacaagcccagaauau

SEQ ID NO: 621391 - RNA, 19 nt, Homo sapiens
  misc_RNA (1)...(19): siRNA sense strand
gcaguccaccuauaacuac

SEQ ID NO: 621392 - RNA, 19 nt, Homo sapiens
  misc_RNA (1)...(19): siRNA sense strand
gaacaggaaacggaccaau

SEQ ID NO: 621393 - RNA, 19 nt, Homo sapiens
  misc_RNA (1)...(19): siRNA sense strand
gaccaacaaaguacagaga

SEQ ID NO: 621394 - RNA, 19 nt, Homo sapiens
  misc_RNA (1)...(19): siRNA sense strand
caauguauaagccuguuga

SEQ ID NO: 621395 - RNA, 19 nt, Homo sapiens
  misc_RNA (1)...(19): siRNA sense strand
uguaggaguuagucaagga

SEQ ID NO: 621396 - RNA, 19 nt, Homo sapiens
  misc_RNA (1)...(19): siRNA sense strand
ccgagaacaugcuggagau

SEQ ID NO: 621397 - RNA, 19 nt, Homo sapiens
  misc_RNA (1)...(19): siRNA sense strand
gggaggacagcaauuuaau

SEQ ID NO: 621398 - RNA, 19 nt, Homo sapiens
  misc_RNA (1)...(19): siRNA sense strand
gagaugccaagaacaggaa

SEQ ID NO: 621399 - RNA, 19 nt, Homo sapiens
  misc_RNA (1)...(19): siRNA sense strand
gaacuuugugaccaagguu

SEQ ID NO: 621400 - RNA, 19 nt, Homo sapiens
  misc_RNA (1)...(19): siRNA sense strand
caugagaggaggugcuuau

SEQ ID NO: 621401 - RNA, 19 nt, Homo sapiens
  misc_RNA (1)...(19): siRNA sense strand
caguuccaccuuuacuuua

SEQ ID NO: 621402 - RNA, 19 nt, Homo sapiens
  misc_RNA (1)...(19): siRNA sense strand
gcccgagaguuguuguaug

SEQ ID NO: 621403 - RNA, 19 nt, Homo sapiens
  misc_RNA (1)...(19): siRNA sense strand
aguacacgcuccucacaga

SEQ ID NO: 621404 - RNA, 19 nt, Homo sapiens
  misc_RNA (1)...(19): siRNA sense strand
accuauaacuacaacauga

SEQ ID NO: 621405 - RNA, 19 nt, Homo sapiens
  misc_RNA (1)...(19): siRNA sense strand
gccugcaguugaacgagua

SEQ ID NO: 621406 - RNA, 19 nt, Homo sapiens
  misc_RNA (1)...(19): siRNA sense strand
cagacaagcccagaauaug

SEQ ID NO: 621407 - RNA, 19 nt, Homo sapiens
  misc_RNA (1)...(19): siRNA sense strand
acaggaaacggaccaaugu

SEQ ID NO: 621408 - RNA, 19 nt, Homo sapiens
  misc_RNA (1)...(19): siRNA sense strand
cgcugaacaucuuaaaguu

SEQ ID NO: 621409 - RNA, 19 nt, Homo sapiens
  misc_RNA (1)...(19): siRNA sense strand
cugagcaacuggacuaucu

SEQ ID NO: 621410 - RNA, 19 nt, Homo sapiens
  misc_RNA (1)...(19): siRNA sense strand
cccgagaguuguuguaugg

SEQ ID NO: 621411 - RNA, 19 nt, Homo sapiens
  misc_RNA (1)...(19): siRNA sense strand
caaacccgcacucaaguca

SEQ ID NO: 621412 - RNA, 19 nt, Homo sapiens
  misc_RNA (1)...(19): siRNA sense strand
gaagguggccaagcgcaau

SEQ ID NO: 621413 - RNA, 19 nt, Homo sapiens
  misc_RNA (1)...(19): siRNA sense strand
ccucugagcaacuggacua

SEQ ID NO: 621414 - RNA, 19 nt, Homo sapiens
  misc_RNA (1)...(19): siRNA sense strand
agaacgaauuuguaucucu

SEQ ID NO: 621415 - RNA, 19 nt, Homo sapiens
  misc_RNA (1)...(19): siRNA sense strand
uacaaagacuuccccaaaa

SEQ ID NO: 621416 - RNA, 19 nt, Homo sapiens
  misc_RNA (1)...(19): siRNA sense strand
caauuuaauggcaaaggaa

SEQ ID NO: 621417 - RNA, 19 nt, Homo sapiens
  misc_RNA (1)...(19): siRNA sense strand
ggaguccugccaugauaug

SEQ ID NO: 621418 - RNA, 19 nt, Homo sapiens
  misc_RNA (1)...(19): siRNA sense strand
caccaaacccgcacucaag

SEQ ID NO: 621419 - RNA, 19 nt, Homo sapiens
  misc_RNA (1)...(19): siRNA sense strand
gaacaugcuggagauccuu

SEQ ID NO: 621420 - RNA, 19 nt, Homo sapiens
  misc_RNA (1)...(19): siRNA sense strand
caaugcagccgagaacaug

SEQ ID NO: 621421 - RNA, 19 nt, Homo sapiens
  misc_RNA (1)...(19): siRNA sense strand
ugggaggacagcaauuuaa

SEQ ID NO: 621422 - RNA, 19 nt, Homo sapiens
  misc_RNA (1)...(19): siRNA sense strand
gcaagaagauuucaaagaa

SEQ ID NO: 621423 - RNA, 19 nt, Homo sapiens
  misc_RNA (1)...(19): siRNA sense strand
aaacggaacuugccuguga

SEQ ID NO: 621424 - RNA, 19 nt, Homo sapiens
  misc_RNA (1)...(19): siRNA sense strand
gaacuugccugugaauuuc

SEQ ID NO: 621425 - RNA, 19 nt, Homo sapiens
  misc_RNA (1)...(19): siRNA sense strand
gaacgaauuuguaucucuu

SEQ ID NO: 621426 - RNA, 19 nt, Homo sapiens
  misc_RNA (1)...(19): siRNA sense strand
gaagacacccauaaagaaa

SEQ ID NO: 621427 - RNA, 19 nt, Homo sapiens
  misc_RNA (1)...(19): siRNA sense strand
ggaacuugccugugaauuu

SEQ ID NO: 621428 - RNA, 19 nt, Homo sapiens
  misc_RNA (1)...(19): siRNA sense strand
ggagauccuugguuucaaa

SEQ ID NO: 621429 - RNA, 19 nt, Homo sapiens
  misc_RNA (1)...(19): siRNA sense strand
ggacaucacaccaaagauu

SEQ ID NO: 621430 - RNA, 19 nt, Homo sapiens
  misc_RNA (1)...(19): siRNA sense strand
uaaaguugcugucugaguu

SEQ ID NO: 621431 - RNA, 19 nt, Homo sapiens
  misc_RNA (1)...(19): siRNA sense strand
gagaagacacccauaaaga

SEQ ID NO: 621432 - RNA, 19 nt, Homo sapiens
  misc_RNA (1)...(19): siRNA sense strand
guacagagaugccaagaac

SEQ ID NO: 621433 - RNA, 19 nt, Homo sapiens
  misc_RNA (1)...(19): siRNA sense strand
gaaaaugggacuaguaaua

SEQ ID NO: 621434 - RNA, 19 nt, Homo sapiens
  misc_RNA (1)...(19): siRNA sense strand
gcaauuuaauggcaaagga

SEQ ID NO: 621435 - RNA, 19 nt, Homo sapiens
  misc_RNA (1)...(19): siRNA sense strand
cacgguaacugccaugaua

SEQ ID NO: 621436 - RNA, 19 nt, Homo sapiens
  misc_RNA (1)...(19): siRNA sense strand
gaagagaauccgaagaaga

SEQ ID NO: 621437 - RNA, 19 nt, Homo sapiens
  misc_RNA (1)...(19): siRNA sense strand
ggaggugaauggaagagaa

SEQ ID NO: 621438 - RNA, 19 nt, Homo sapiens
  misc_RNA (1)...(19): siRNA sense strand
gaacgggcaccaacaagaa

SEQ ID NO: 621439 - RNA, 19 nt, Homo sapiens
  misc_RNA (1)...(19): siRNA sense strand
ucaaggacaucacaccaaa

SEQ ID NO: 621440 - RNA, 19 nt, Homo sapiens
  misc_RNA (1)...(19): siRNA sense strand
caugauagcccgagaguug

SEQ ID NO: 621441 - RNA, 19 nt, Homo sapiens
  misc_RNA (1)...(19): siRNA sense strand
uugaggagcugaagaaguu

SEQ ID NO: 621442 - RNA, 19 nt, Homo sapiens
  misc_RNA (1)...(19): siRNA sense strand
gaggagaagacacccauaa

SEQ ID NO: 621443 - RNA, 19 nt, Homo sapiens
  misc_RNA (1)...(19): siRNA sense strand
gaaauaagucaaguguuug

SEQ ID NO: 621444 - RNA, 19 nt, Homo sapiens
  misc_RNA (1)...(19): siRNA sense strand
guggaguccugccaugaua

SEQ ID NO: 621445 - RNA, 19 nt, Homo sapiens
  misc_RNA (1)...(19): siRNA sense strand
gcagggaguuugugaugca

SEQ ID NO: 621446 - RNA, 19 nt, Homo sapiens
  misc_RNA (1)...(19): siRNA sense strand
ugaggauccugcagaauga

SEQ ID NO: 621447 - RNA, 19 nt, Homo sapiens
  misc_RNA (1)...(19): siRNA sense strand
ggaugcaguccaccuauaa

SEQ ID NO: 621448 - RNA, 19 nt, Homo sapiens
  misc_RNA (1)...(19): siRNA sense strand
cagagaggcuggaggugaa

SEQ ID NO: 621449 - RNA, 19 nt, Homo sapiens
  misc_RNA (1)...(19): siRNA sense strand
aaaccacacugcagaagga

SEQ ID NO: 621450 - RNA, 19 nt, Homo sapiens
  misc_RNA (1)...(19): siRNA sense strand
gaacgaguaaagccuagaa

SEQ ID NO: 621451 - RNA, 19 nt, Homo sapiens
  misc_RNA (1)...(19): siRNA sense strand
gacaucacaccaaagauuu

SEQ ID NO: 621452 - RNA, 19 nt, Homo sapiens
  misc_RNA (1)...(19): siRNA sense strand
guaauaaagaggaugaguu

SEQ ID NO: 621453 - RNA, 19 nt, Homo sapiens
  misc_RNA (1)...(19): siRNA sense strand
ugaagaacuuugugaccaa

SEQ ID NO: 621454 - RNA, 19 nt, Homo sapiens
  misc_RNA (1)...(19): siRNA sense strand
ggagaagacacccauaaag

SEQ ID NO: 621455 - RNA, 19 nt, Homo sapiens
  misc_RNA (1)...(19): siRNA sense strand
aguaaagccuagaaucaaa

SEQ ID NO: 621456 - RNA, 19 nt, Homo sapiens
  misc_RNA (1)...(19): siRNA sense strand
caagacaggcugcgaaaca

SEQ ID NO: 621457 - RNA, 19 nt, Homo sapiens
  misc_RNA (1)...(19): siRNA sense strand
ccaacaaaguacagagaug

SEQ ID NO: 621458 - RNA, 19 nt, Homo sapiens
  misc_RNA (1)...(19): siRNA sense strand
acacgaugcugcugccaaa

SEQ ID NO: 621459 - RNA, 19 nt, Homo sapiens
  misc_RNA (1)...(19): siRNA sense strand
aagagaauccgaagaagaa

SEQ ID NO: 621460 - RNA, 19 nt, Homo sapiens
  misc_RNA (1)...(19): siRNA sense strand
gaaacggaccaaugucugu

SEQ ID NO: 621461 - RNA, 19 nt, Homo sapiens
  misc_RNA (1)...(19): siRNA sense strand
caagaacgaauuuguaucu

SEQ ID NO: 621462 - RNA, 19 nt, Homo sapiens
  misc_RNA (1)...(19): siRNA sense strand
gagcaacuggacuaucuuu

SEQ ID NO: 621463 - RNA, 19 nt, Homo sapiens
  misc_RNA (1)...(19): siRNA sense strand
uaauaaagaggaugaguuc

SEQ ID NO: 621464 - RNA, 19 nt, Homo sapiens
  misc_RNA (1)...(19): siRNA sense strand
agaagacacccauaaagaa

SEQ ID NO: 621465 - RNA, 19 nt, Homo sapiens
  misc_RNA (1)...(19): siRNA sense strand
ggaacgggcaccaacaaga

SEQ ID NO: 621466 - RNA, 19 nt, Homo sapiens
  misc_RNA (1)...(19): siRNA sense strand
uguuugagauugcacuuaa

SEQ ID NO: 621467 - RNA, 19 nt, Homo sapiens
  misc_RNA (1)...(19): siRNA sense strand
ggaagagaauccgaagaag

SEQ ID NO: 621468 - RNA, 19 nt, Homo sapiens
  misc_RNA (1)...(19): siRNA sense strand
gaguaaagccuagaaucaa

SEQ ID NO: 621469 - RNA, 19 nt, Homo sapiens
  misc_RNA (1)...(19): siRNA sense strand
cgaguaaagccuagaauca

SEQ ID NO: 621470 - RNA, 19 nt, Homo sapiens
  misc_RNA (1)...(19): siRNA sense strand
gcaaaggaaagacaagaca

SEQ ID NO: 621471 - RNA, 19 nt, Homo sapiens
  misc_RNA (1)...(19): siRNA sense strand
cgccauagcuguucuugag

SEQ ID NO: 621472 - RNA, 19 nt, Homo sapiens
  misc_RNA (1)...(19): siRNA sense strand
cggaugcaguccaccuaua

SEQ ID NO: 621473 - RNA, 19 nt, Homo sapiens
  misc_RNA (1)...(19): siRNA sense strand
ucuuaaaguugcugucuga

SEQ ID NO: 621474 - RNA, 19 nt, Homo sapiens
  misc_RNA (1)...(19): siRNA sense strand
gcgcugaacaucuuaaagu

SEQ ID NO: 621475 - RNA, 19 nt, Homo sapiens
  misc_RNA (1)...(19): siRNA sense strand
ccaguuccaccuuuacuuu

SEQ ID NO: 621476 - RNA, 19 nt, Homo sapiens
  misc_RNA (1)...(19): siRNA sense strand
gauccuugguuucaaaguc

SEQ ID NO: 621477 - RNA, 19 nt, Homo sapiens
  misc_RNA (1)...(19): siRNA sense strand
gaggacagcaauuuaaugg

SEQ ID NO: 621478 - RNA, 19 nt, Homo sapiens
  misc_RNA (1)...(19): siRNA sense strand
ggaggacagcaauuuaaug

SEQ ID NO: 621479 - RNA, 19 nt, Homo sapiens
  misc_RNA (1)...(19): siRNA sense strand
gggaaaagcaagaagauuu

SEQ ID NO: 621480 - RNA, 19 nt, Homo sapiens
  misc_RNA (1)...(19): siRNA sense strand
gacaagacaggcugcgaaa

SEQ ID NO: 621481 - RNA, 19 nt, Homo sapiens
  misc_RNA (1)...(19): siRNA sense strand
uggcugcgcugaacaucuu

SEQ ID NO: 621482 - RNA, 19 nt, Homo sapiens
  misc_RNA (1)...(19): siRNA sense strand
gaaggaacgggcaccaaca

SEQ ID NO: 621483 - RNA, 19 nt, Homo sapiens
  misc_RNA (1)...(19): siRNA sense strand
uggaagagaauccgaagaa

SEQ ID NO: 621484 - RNA, 19 nt, Homo sapiens
  misc_RNA (1)...(19): siRNA sense strand
ccacagacaagcccagaau

SEQ ID NO: 621485 - RNA, 19 nt, Homo sapiens
  misc_RNA (1)...(19): siRNA sense strand
ccucugaucagccauggua

SEQ ID NO: 621486 - RNA, 19 nt, Homo sapiens
  misc_RNA (1)...(19): siRNA sense strand
gcaaugcagccgagaacau

SEQ ID NO: 621487 - RNA, 19 nt, Homo sapiens
  misc_RNA (1)...(19): siRNA sense strand
gcugaacaucuuaaaguug

SEQ ID NO: 621488 - RNA, 19 nt, Homo sapiens
  misc_RNA (1)...(19): siRNA sense strand
gugggaggacagcaauuua

SEQ ID NO: 621489 - RNA, 19 nt, Homo sapiens
  misc_RNA (1)...(19): siRNA sense strand
ggagaaggagccagaguac

SEQ ID NO: 621490 - RNA, 19 nt, Homo sapiens
  misc_RNA (1)...(19): siRNA sense strand
acagacaagcccagaauau

SEQ ID NO: 621491 - RNA, 19 nt, Homo sapiens
  misc_RNA (1)...(19): siRNA sense strand
caauguauaagccuguuga

SEQ ID NO: 621492 - RNA, 19 nt, Homo sapiens
  misc_RNA (1)...(19): siRNA sense strand
gaacaggaaacggaccaau

SEQ ID NO: 621493 - RNA, 19 nt, Homo sapiens
  misc_RNA (1)...(19): siRNA sense strand
gaccaacaaaguacagaga

SEQ ID NO: 621494 - RNA, 19 nt, Homo sapiens
  misc_RNA (1)...(19): siRNA sense strand
uguaggaguuagucaagga

SEQ ID NO: 621495 - RNA, 19 nt, Homo sapiens
  misc_RNA (1)...(19): siRNA sense strand
ccgagaacaugcuggagau

SEQ ID NO: 621496 - RNA, 19 nt, Homo sapiens
  misc_RNA (1)...(19): siRNA sense strand
gcaguccaccuauaacuac

SEQ ID NO: 621497 - RNA, 19 nt, Homo sapiens
  misc_RNA (1)...(19): siRNA sense strand
gggaggacagcaauuuaau

SEQ ID NO: 621498 - RNA, 19 nt, Homo sapiens
  misc_RNA (1)...(19): siRNA sense strand
gagaugccaagaacaggaa

SEQ ID NO: 621499 - RNA, 19 nt, Homo sapiens
  misc_RNA (1)...(19): siRNA sense strand
gaacuuugugaccaagguu

SEQ ID NO: 621500 - RNA, 19 nt, Homo sapiens
  misc_RNA (1)...(19): siRNA sense strand
gcccgagaguuguuguaug

SEQ ID NO: 621501 - RNA, 19 nt, Homo sapiens
  misc_RNA (1)...(19): siRNA sense strand
caguuccaccuuuacuuua

SEQ ID NO: 621502 - RNA, 19 nt, Homo sapiens
  misc_RNA (1)...(19): siRNA sense strand
caugagaggaggugcuuau

SEQ ID NO: 621503 - RNA, 19 nt, Homo sapiens
  misc_RNA (1)...(19): siRNA sense strand
accuauaacuacaacauga

SEQ ID NO: 621504 - RNA, 19 nt, Homo sapiens
  misc_RNA (1)...(19): siRNA sense strand
aguacacgcuccucacaga

SEQ ID NO: 621505 - RNA, 19 nt, Homo sapiens
  misc_RNA (1)...(19): siRNA sense strand
gccugcaguugaacgagua

SEQ ID NO: 621506 - RNA, 19 nt, Homo sapiens
  misc_RNA (1)...(19): siRNA sense strand
cagacaagcccagaauaug

SEQ ID NO: 621507 - RNA, 19 nt, Homo sapiens
  misc_RNA (1)...(19): siRNA sense strand
acaggaaacggaccaaugu

SEQ ID NO: 621508 - RNA, 19 nt, Homo sapiens
  misc_RNA (1)...(19): siRNA sense strand
cgcugaacaucuuaaaguu

SEQ ID NO: 621509 - RNA, 19 nt, Homo sapiens
  misc_RNA (1)...(19): siRNA sense strand
cugagcaacuggacuaucu

SEQ ID NO: 621510 - RNA, 19 nt, Homo sapiens
  misc_RNA (1)...(19): siRNA sense strand
cccgagaguuguuguaugg

SEQ ID NO: 621511 - RNA, 19 nt, Homo sapiens
  misc_RNA (1)...(19): siRNA sense strand
caaacccgcacucaaguca

SEQ ID NO: 621512 - RNA, 19 nt, Homo sapiens
  misc_RNA (1)...(19): siRNA sense strand
gaagguggccaagcgcaau

SEQ ID NO: 621513 - RNA, 19 nt, Homo sapiens
  misc_RNA (1)...(19): siRNA sense strand
ccucugagcaacuggacua

SEQ ID NO: 621514 - RNA, 19 nt, Homo sapiens
  misc_RNA (1)...(19): siRNA sense strand
agaacgaauuuguaucucu

SEQ ID NO: 621515 - RNA, 19 nt, Homo sapiens
  misc_RNA (1)...(19): siRNA sense strand
uacaaagacuuccccaaaa

SEQ ID NO: 621516 - RNA, 19 nt, Homo sapiens
  misc_RNA (1)...(19): siRNA sense strand
agacaagcccagaauaugg

SEQ ID NO: 621517 - RNA, 19 nt, Homo sapiens
  misc_RNA (1)...(19): siRNA sense strand
ggaguccugccaugauaug

SEQ ID NO: 621518 - RNA, 19 nt, Homo sapiens
  misc_RNA (1)...(19): siRNA sense strand
caccaaacccgcacucaag

SEQ ID NO: 621519 - RNA, 19 nt, Homo sapiens
  misc_RNA (1)...(19): siRNA sense strand
gaacaugcuggagauccuu

SEQ ID NO: 621520 - RNA, 19 nt, Homo sapiens
  misc_RNA (1)...(19): siRNA sense strand
caaugcagccgagaacaug

SEQ ID NO: 621521 - RNA, 19 nt, Homo sapiens
  misc_RNA (1)...(19): siRNA sense strand
ugggaggacagcaauuuaa

SEQ ID NO: 621522 - RNA, 19 nt, Homo sapiens
  misc_RNA (1)...(19): siRNA sense strand
gaucagagcuggcgcaaag

SEQ ID NO: 621523 - RNA, 19 nt, Homo sapiens
  misc_RNA (1)...(19): siRNA sense strand
gcaaagagcggguacugaa

SEQ ID NO: 621524 - RNA, 19 nt, Homo sapiens
  misc_RNA (1)...(19): siRNA sense strand
gcaaugaaaucuggacuca

SEQ ID NO: 621525 - RNA, 19 nt, Homo sapiens
  misc_RNA (1)...(19): siRNA sense strand
gauguuuccuaccuauaua

SEQ ID NO: 621526 - RNA, 19 nt, Homo sapiens
  misc_RNA (1)...(19): siRNA sense strand
gagcaauggugggaagauu

SEQ ID NO: 621527 - RNA, 19 nt, Homo sapiens
  misc_RNA (1)...(19): siRNA sense strand
ccacuguucugugcaauga

SEQ ID NO: 621528 - RNA, 19 nt, Homo sapiens
  misc_RNA (1)...(19): siRNA sense strand
ggauguuuccuaccuauau

SEQ ID NO: 621529 - RNA, 19 nt, Homo sapiens
  misc_RNA (1)...(19): siRNA sense strand
ggagcugccugccaaccuu

SEQ ID NO: 621530 - RNA, 19 nt, Homo sapiens
  misc_RNA (1)...(19): siRNA sense strand
caaagaggacugugagcaa

SEQ ID NO: 621531 - RNA, 19 nt, Homo sapiens
  misc_RNA (1)...(19): siRNA sense strand
ggacuucaggguuuaacaa

SEQ ID NO: 621532 - RNA, 19 nt, Homo sapiens
  misc_RNA (1)...(19): siRNA sense strand
ccaggaagcccauaaggau

SEQ ID NO: 621533 - RNA, 19 nt, Homo sapiens
  misc_RNA (1)...(19): siRNA sense strand
ggaagaaugccugcuguuc

SEQ ID NO: 621534 - RNA, 19 nt, Homo sapiens
  misc_RNA (1)...(19): siRNA sense strand
ccuacaaggucagcaacua

SEQ ID NO: 621535 - RNA, 19 nt, Homo sapiens
  misc_RNA (1)...(19): siRNA sense strand
aaagaggacugugagcaau

SEQ ID NO: 621536 - RNA, 19 nt, Homo sapiens
  misc_RNA (1)...(19): siRNA sense strand
aaugaaaucuggacucacu

SEQ ID NO: 621537 - RNA, 19 nt, Homo sapiens
  misc_RNA (1)...(19): siRNA sense strand
caaguugcaugagcagugu

SEQ ID NO: 621538 - RNA, 19 nt, Homo sapiens
  misc_RNA (1)...(19): siRNA sense strand
gcaaacggcauuucaucca

SEQ ID NO: 621539 - RNA, 19 nt, Homo sapiens
  misc_RNA (1)...(19): siRNA sense strand
cuucaggguuuaacaagug

SEQ ID NO: 621540 - RNA, 19 nt, Homo sapiens
  misc_RNA (1)...(19): siRNA sense strand
gccaaccuuuccauuucua

SEQ ID NO: 621541 - RNA, 19 nt, Homo sapiens
  misc_RNA (1)...(19): siRNA sense strand
ugucgacccuggaggaaga

SEQ ID NO: 621542 - RNA, 19 nt, Homo sapiens
  misc_RNA (1)...(19): siRNA sense strand
cugccaaccuuuccauuuc

SEQ ID NO: 621543 - RNA, 19 nt, Homo sapiens
  misc_RNA (1)...(19): siRNA sense strand
ggaagcccauaaggauguu

SEQ ID NO: 621544 - RNA, 19 nt, Homo sapiens
  misc_RNA (1)...(19): siRNA sense strand
gccaagcaccacaaggaaa

SEQ ID NO: 621545 - RNA, 19 nt, Homo sapiens
  misc_RNA (1)...(19): siRNA sense strand
acuguucugugcaaugaaa

SEQ ID NO: 621546 - RNA, 19 nt, Homo sapiens
  misc_RNA (1)...(19): siRNA sense strand
ggacucacuccuacaaggu

SEQ ID NO: 621547 - RNA, 19 nt, Homo sapiens
  misc_RNA (1)...(19): siRNA sense strand
gccaggaagcccauaagga

SEQ ID NO: 621548 - RNA, 19 nt, Homo sapiens
  misc_RNA (1)...(19): siRNA sense strand
ggagguggcgagguucuau

SEQ ID NO: 621549 - RNA, 19 nt, Homo sapiens
  misc_RNA (1)...(19): siRNA sense strand
gccuggccuuuccugcuua

SEQ ID NO: 621550 - RNA, 19 nt, Homo sapiens
  misc_RNA (1)...(19): siRNA sense strand
cuaccuauauagauucaac

SEQ ID NO: 621551 - RNA, 19 nt, Homo sapiens
  misc_RNA (1)...(19): siRNA sense strand
augaggagguggcgagguu

SEQ ID NO: 621552 - RNA, 19 nt, Homo sapiens
  misc_RNA (1)...(19): siRNA sense strand
gaacgccaagcaccacaag

SEQ ID NO: 621553 - RNA, 19 nt, Homo sapiens
  misc_RNA (1)...(19): siRNA sense strand
gagcugccugccaaccuuu

SEQ ID NO: 621554 - RNA, 19 nt, Homo sapiens
  misc_RNA (1)...(19): siRNA sense strand
gcucagacaaggauugcau

SEQ ID NO: 621555 - RNA, 19 nt, Homo sapiens
  misc_RNA (1)...(19): siRNA sense strand
ccgaggacaaguugcauga

SEQ ID NO: 621556 - RNA, 19 nt, Homo sapiens
  misc_RNA (1)...(19): siRNA sense strand
ccugccaaccuuuccauuu

SEQ ID NO: 621557 - RNA, 19 nt, Homo sapiens
  misc_RNA (1)...(19): siRNA sense strand
gcgcaaagagcggguacug

SEQ ID NO: 621558 - RNA, 19 nt, Homo sapiens
  misc_RNA (1)...(19): siRNA sense strand
gaacgugccccugugcaaa

SEQ ID NO: 621559 - RNA, 19 nt, Homo sapiens
  misc_RNA (1)...(19): siRNA sense strand
aagauugucgcaccuccua

SEQ ID NO: 621560 - RNA, 19 nt, Homo sapiens
  misc_RNA (1)...(19): siRNA sense strand
gggaggcucagacaaggau

SEQ ID NO: 621561 - RNA, 19 nt, Homo sapiens
  misc_RNA (1)...(19): siRNA sense strand
aaaucuggacucacuccua

SEQ ID NO: 621562 - RNA, 19 nt, Homo sapiens
  misc_RNA (1)...(19): siRNA sense strand
gcaagagcaacuggcacaa

SEQ ID NO: 621563 - RNA, 19 nt, Homo sapiens
  misc_RNA (1)...(19): siRNA sense strand
gaucagagcuggcgcaaag

SEQ ID NO: 621564 - RNA, 19 nt, Homo sapiens
  misc_RNA (1)...(19): siRNA sense strand
gcaaagagcggguacugaa

SEQ ID NO: 621565 - RNA, 19 nt, Homo sapiens
  misc_RNA (1)...(19): siRNA sense strand
gcaaugaaaucuggacuca

SEQ ID NO: 621566 - RNA, 19 nt, Homo sapiens
  misc_RNA (1)...(19): siRNA sense strand
gauguuuccuaccuauaua

SEQ ID NO: 621567 - RNA, 19 nt, Homo sapiens
  misc_RNA (1)...(19): siRNA sense strand
gagcaauggugggaagauu

SEQ ID NO: 621568 - RNA, 19 nt, Homo sapiens
  misc_RNA (1)...(19): siRNA sense strand
ccacuguucugugcaauga

SEQ ID NO: 621569 - RNA, 19 nt, Homo sapiens
  misc_RNA (1)...(19): siRNA sense strand
ggauguuuccuaccuauau

SEQ ID NO: 621570 - RNA, 19 nt, Homo sapiens
  misc_RNA (1)...(19): siRNA sense strand
ggagcugccugccaaccuu

SEQ ID NO: 621571 - RNA, 19 nt, Homo sapiens
  misc_RNA (1)...(19): siRNA sense strand
caaagaggacugugagcaa

SEQ ID NO: 621572 - RNA, 19 nt, Homo sapiens
  misc_RNA (1)...(19): siRNA sense strand
ggacuucaggguuuaacaa

SEQ ID NO: 621573 - RNA, 19 nt, Homo sapiens
  misc_RNA (1)...(19): siRNA sense strand
ccaggaagcccauaaggau

SEQ ID NO: 621574 - RNA, 19 nt, Homo sapiens
  misc_RNA (1)...(19): siRNA sense strand
ggaagaaugccugcuguuc

SEQ ID NO: 621575 - RNA, 19 nt, Homo sapiens
  misc_RNA (1)...(19): siRNA sense strand
ccuacaaggucagcaacua

SEQ ID NO: 621576 - RNA, 19 nt, Homo sapiens
  misc_RNA (1)...(19): siRNA sense strand
aaagaggacugugagcaau

SEQ ID NO: 621577 - RNA, 19 nt, Homo sapiens
  misc_RNA (1)...(19): siRNA sense strand
aaugaaaucuggacucacu

SEQ ID NO: 621578 - RNA, 19 nt, Homo sapiens
  misc_RNA (1)...(19): siRNA sense strand
caaguugcaugagcagugu

SEQ ID NO: 621579 - RNA, 19 nt, Homo sapiens
  misc_RNA (1)...(19): siRNA sense strand
gcaaacggcauuucaucca

SEQ ID NO: 621580 - RNA, 19 nt, Homo sapiens
  misc_RNA (1)...(19): siRNA sense strand
cuucaggguuuaacaagug

SEQ ID NO: 621581 - RNA, 19 nt, Homo sapiens
  misc_RNA (1)...(19): siRNA sense strand
gccaaccuuuccauuucua

SEQ ID NO: 621582 - RNA, 19 nt, Homo sapiens
  misc_RNA (1)...(19): siRNA sense strand
ugucgacccuggaggaaga

SEQ ID NO: 621583 - RNA, 19 nt, Homo sapiens
  misc_RNA (1)...(19): siRNA sense strand
cugccaaccuuuccauuuc

SEQ ID NO: 621584 - RNA, 19 nt, Homo sapiens
  misc_RNA (1)...(19): siRNA sense strand
ggaagcccauaaggauguu

SEQ ID NO: 621585 - RNA, 19 nt, Homo sapiens
  misc_RNA (1)...(19): siRNA sense strand
gccaagcaccacaaggaaa

SEQ ID NO: 621586 - RNA, 19 nt, Homo sapiens
  misc_RNA (1)...(19): siRNA sense strand
acuguucugugcaaugaaa

SEQ ID NO: 621587 - RNA, 19 nt, Homo sapiens
  misc_RNA (1)...(19): siRNA sense strand
ggacucacuccuacaaggu

SEQ ID NO: 621588 - RNA, 19 nt, Homo sapiens
  misc_RNA (1)...(19): siRNA sense strand
gccaggaagcccauaagga

SEQ ID NO: 621589 - RNA, 19 nt, Homo sapiens
  misc_RNA (1)...(19): siRNA sense strand
ggagguggcgagguucuau

SEQ ID NO: 621590 - RNA, 19 nt, Homo sapiens
  misc_RNA (1)...(19): siRNA sense strand
gccuggccuuuccugcuua

SEQ ID NO: 621591 - RNA, 19 nt, Homo sapiens
  misc_RNA (1)...(19): siRNA sense strand
cuaccuauauagauucaac

SEQ ID NO: 621592 - RNA, 19 nt, Homo sapiens
  misc_RNA (1)...(19): siRNA sense strand
augaggagguggcgagguu

SEQ ID NO: 621593 - RNA, 19 nt, Homo sapiens
  misc_RNA (1)...(19): siRNA sense strand
gaacgccaagcaccacaag

SEQ ID NO: 621594 - RNA, 19 nt, Homo sapiens
  misc_RNA (1)...(19): siRNA sense strand
gagcugccugccaaccuuu

SEQ ID NO: 621595 - RNA, 19 nt, Homo sapiens
  misc_RNA (1)...(19): siRNA sense strand
gcucagacaaggauugcau

SEQ ID NO: 621596 - RNA, 19 nt, Homo sapiens
  misc_RNA (1)...(19): siRNA sense strand
ccgaggacaaguugcauga

SEQ ID NO: 621597 - RNA, 19 nt, Homo sapiens
  misc_RNA (1)...(19): siRNA sense strand
ccugccaaccuuuccauuu

SEQ ID NO: 621598 - RNA, 19 nt, Homo sapiens
  misc_RNA (1)...(19): siRNA sense strand
gcgcaaagagcggguacug

SEQ ID NO: 621599 - RNA, 19 nt, Homo sapiens
  misc_RNA (1)...(19): siRNA sense strand
gaacgugccccugugcaaa

SEQ ID NO: 621600 - RNA, 19 nt, Homo sapiens
  misc_RNA (1)...(19): siRNA sense strand
aagauugucgcaccuccua

SEQ ID NO: 621601 - RNA, 19 nt, Homo sapiens
  misc_RNA (1)...(19): siRNA sense strand
gggaggcucagacaaggau

SEQ ID NO: 621602 - RNA, 19 nt, Homo sapiens
  misc_RNA (1)...(19): siRNA sense strand
aaaucuggacucacuccua

SEQ ID NO: 621603 - RNA, 19 nt, Homo sapiens
  misc_RNA (1)...(19): siRNA sense strand
gcaagagcaacuggcacaa

SEQ ID NO: 621604 - RNA, 19 nt, Homo sapiens
  misc_RNA (1)...(19): siRNA sense strand
gaucagagcuggcgcaaag

SEQ ID NO: 621605 - RNA, 19 nt, Homo sapiens
  misc_RNA (1)...(19): siRNA sense strand
gcaaagagcggguacugaa

SEQ ID NO: 621606 - RNA, 19 nt, Homo sapiens
  misc_RNA (1)...(19): siRNA sense strand
gcaaugaaaucuggacuca

SEQ ID NO: 621607 - RNA, 19 nt, Homo sapiens
  misc_RNA (1)...(19): siRNA sense strand
gauguuuccuaccuauaua

SEQ ID NO: 621608 - RNA, 19 nt, Homo sapiens
  misc_RNA (1)...(19): siRNA sense strand
gagcaauggugggaagauu

SEQ ID NO: 621609 - RNA, 19 nt, Homo sapiens
  misc_RNA (1)...(19): siRNA sense strand
ccacuguucugugcaauga

SEQ ID NO: 621610 - RNA, 19 nt, Homo sapiens
  misc_RNA (1)...(19): siRNA sense strand
ggauguuuccuaccuauau

SEQ ID NO: 621611 - RNA, 19 nt, Homo sapiens
  misc_RNA (1)...(19): siRNA sense strand
ggagcugccugccaaccuu

SEQ ID NO: 621612 - RNA, 19 nt, Homo sapiens
  misc_RNA (1)...(19): siRNA sense strand
caaagaggacugugagcaa

SEQ ID NO: 621613 - RNA, 19 nt, Homo sapiens
  misc_RNA (1)...(19): siRNA sense strand
ggacuucaggguuuaacaa

SEQ ID NO: 621614 - RNA, 19 nt, Homo sapiens
  misc_RNA (1)...(19): siRNA sense strand
ccaggaagcccauaaggau

SEQ ID NO: 621615 - RNA, 19 nt, Homo sapiens
  misc_RNA (1)...(19): siRNA sense strand
ggaagaaugccugcuguuc

SEQ ID NO: 621616 - RNA, 19 nt, Homo sapiens
  misc_RNA (1)...(19): siRNA sense strand
ccuacaaggucagcaacua

SEQ ID NO: 621617 - RNA, 19 nt, Homo sapiens
  misc_RNA (1)...(19): siRNA sense strand
aaagaggacugugagcaau

SEQ ID NO: 621618 - RNA, 19 nt, Homo sapiens
  misc_RNA (1)...(19): siRNA sense strand
aaugaaaucuggacucacu

SEQ ID NO: 621619 - RNA, 19 nt, Homo sapiens
  misc_RNA (1)...(19): siRNA sense strand
caaguugcaugagcagugu

SEQ ID NO: 621620 - RNA, 19 nt, Homo sapiens
  misc_RNA (1)...(19): siRNA sense strand
gcaaacggcauuucaucca

SEQ ID NO: 621621 - RNA, 19 nt, Homo sapiens
  misc_RNA (1)...(19): siRNA sense strand
cuucaggguuuaacaagug

SEQ ID NO: 621622 - RNA, 19 nt, Homo sapiens
  misc_RNA (1)...(19): siRNA sense strand
gccaaccuuuccauuucua

SEQ ID NO: 621623 - RNA, 19 nt, Homo sapiens
  misc_RNA (1)...(19): siRNA sense strand
ugucgacccuggaggaaga

SEQ ID NO: 621624 - RNA, 19 nt, Homo sapiens
  misc_RNA (1)...(19): siRNA sense strand
cugccaaccuuuccauuuc

SEQ ID NO: 621625 - RNA, 19 nt, Homo sapiens
  misc_RNA (1)...(19): siRNA sense strand
ggaagcccauaaggauguu

SEQ ID NO: 621626 - RNA, 19 nt, Homo sapiens
  misc_RNA (1)...(19): siRNA sense strand
gccaagcaccacaaggaaa

SEQ ID NO: 621627 - RNA, 19 nt, Homo sapiens
  misc_RNA (1)...(19): siRNA sense strand
acuguucugugcaaugaaa

SEQ ID NO: 621628 - RNA, 19 nt, Homo sapiens
  misc_RNA (1)...(19): siRNA sense strand
ggacucacuccuacaaggu

SEQ ID NO: 621629 - RNA, 19 nt, Homo sapiens
  misc_RNA (1)...(19): siRNA sense strand
gccaggaagcccauaagga

SEQ ID NO: 621630 - RNA, 19 nt, Homo sapiens
  misc_RNA (1)...(19): siRNA sense strand
ggagguggcgagguucuau

SEQ ID NO: 621631 - RNA, 19 nt, Homo sapiens
  misc_RNA (1)...(19): siRNA sense strand
gccuggccuuuccugcuua

SEQ ID NO: 621632 - RNA, 19 nt, Homo sapiens
  misc_RNA (1)...(19): siRNA sense strand
cuaccuauauagauucaac

SEQ ID NO: 621633 - RNA, 19 nt, Homo sapiens
  misc_RNA (1)...(19): siRNA sense strand
augaggagguggcgagguu

SEQ ID NO: 621634 - RNA, 19 nt, Homo sapiens
  misc_RNA (1)...(19): siRNA sense strand
gaacgccaagcaccacaag

SEQ ID NO: 621635 - RNA, 19 nt, Homo sapiens
  misc_RNA (1)...(19): siRNA sense strand
gagcugccugccaaccuuu

SEQ ID NO: 621636 - RNA, 19 nt, Homo sapiens
  misc_RNA (1)...(19): siRNA sense strand
gcucagacaaggauugcau

SEQ ID NO: 621637 - RNA, 19 nt, Homo sapiens
  misc_RNA (1)...(19): siRNA sense strand
ccgaggacaaguugcauga

SEQ ID NO: 621638 - RNA, 19 nt, Homo sapiens
  misc_RNA (1)...(19): siRNA sense strand
ccugccaaccuuuccauuu

SEQ ID NO: 621639 - RNA, 19 nt, Homo sapiens
  misc_RNA (1)...(19): siRNA sense strand
gcgcaaagagcggguacug

SEQ ID NO: 621640 - RNA, 19 nt, Homo sapiens
  misc_RNA (1)...(19): siRNA sense strand
gaacgugccccugugcaaa

SEQ ID NO: 621641 - RNA, 19 nt, Homo sapiens
  misc_RNA (1)...(19): siRNA sense strand
aagauugucgcaccuccua

SEQ ID NO: 621642 - RNA, 19 nt, Homo sapiens
  misc_RNA (1)...(19): siRNA sense strand
gggaggcucagacaaggau

SEQ ID NO: 621643 - RNA, 19 nt, Homo sapiens
  misc_RNA (1)...(19): siRNA sense strand
aaaucuggacucacuccua

SEQ ID NO: 621644 - RNA, 19 nt, Homo sapiens
  misc_RNA (1)...(19): siRNA sense strand
gcaagagcaacuggcacaa

SEQ ID NO: 621645 - RNA, 19 nt, Homo sapiens
  misc_RNA (1)...(19): siRNA sense strand
gaucagagcuggcgcaaag

SEQ ID NO: 621646 - RNA, 19 nt, Homo sapiens
  misc_RNA (1)...(19): siRNA sense strand
gcaaagagcggguacugaa

SEQ ID NO: 621647 - RNA, 19 nt, Homo sapiens
  misc_RNA (1)...(19): siRNA sense strand
gcaaugaaaucuggacuca

SEQ ID NO: 621648 - RNA, 19 nt, Homo sapiens
  misc_RNA (1)...(19): siRNA sense strand
gauguuuccuaccuauaua

SEQ ID NO: 621649 - RNA, 19 nt, Homo sapiens
  misc_RNA (1)...(19): siRNA sense strand
gagcaauggugggaagauu

SEQ ID NO: 621650 - RNA, 19 nt, Homo sapiens
  misc_RNA (1)...(19): siRNA sense strand
ccacuguucugugcaauga

SEQ ID NO: 621651 - RNA, 19 nt, Homo sapiens
  misc_RNA (1)...(19): siRNA sense strand
ggauguuuccuaccuauau

SEQ ID NO: 621652 - RNA, 19 nt, Homo sapiens
  misc_RNA (1)...(19): siRNA sense strand
ggagcugccugccaaccuu

SEQ ID NO: 621653 - RNA, 19 nt, Homo sapiens
  misc_RNA (1)...(19): siRNA sense strand
caaagaggacugugagcaa

SEQ ID NO: 621654 - RNA, 19 nt, Homo sapiens
  misc_RNA (1)...(19): siRNA sense strand
ggacuucaggguuuaacaa

SEQ ID NO: 621655 - RNA, 19 nt, Homo sapiens
  misc_RNA (1)...(19): siRNA sense strand
ccaggaagcccauaaggau

SEQ ID NO: 621656 - RNA, 19 nt, Homo sapiens
  misc_RNA (1)...(19): siRNA sense strand
ggaagaaugccugcuguuc

SEQ ID NO: 621657 - RNA, 19 nt, Homo sapiens
  misc_RNA (1)...(19): siRNA sense strand
ccuacaaggucagcaacua

SEQ ID NO: 621658 - RNA, 19 nt, Homo sapiens
  misc_RNA (1)...(19): siRNA sense strand
aaagaggacugugagcaau

SEQ ID NO: 621659 - RNA, 19 nt, Homo sapiens
  misc_RNA (1)...(19): siRNA sense strand
aaugaaaucuggacucacu

SEQ ID NO: 621660 - RNA, 19 nt, Homo sapiens
  misc_RNA (1)...(19): siRNA sense strand
caaguugcaugagcagugu

SEQ ID NO: 621661 - RNA, 19 nt, Homo sapiens
  misc_RNA (1)...(19): siRNA sense strand
gcaaacggcauuucaucca

SEQ ID NO: 621662 - RNA, 19 nt, Homo sapiens
  misc_RNA (1)...(19): siRNA sense strand
cuucaggguuuaacaagug

SEQ ID NO: 621663 - RNA, 19 nt, Homo sapiens
  misc_RNA (1)...(19): siRNA sense strand
gccaaccuuuccauuucua

SEQ ID NO: 621664 - RNA, 19 nt, Homo sapiens
  misc_RNA (1)...(19): siRNA sense strand
ugucgacccuggaggaaga

SEQ ID NO: 621665 - RNA, 19 nt, Homo sapiens
  misc_RNA (1)...(19): siRNA sense strand
cugccaaccuuuccauuuc

SEQ ID NO: 621666 - RNA, 19 nt, Homo sapiens
  misc_RNA (1)...(19): siRNA sense strand
ggaagcccauaaggauguu

SEQ ID NO: 621667 - RNA, 19 nt, Homo sapiens
  misc_RNA (1)...(19): siRNA sense strand
gccaagcaccacaaggaaa

SEQ ID NO: 621668 - RNA, 19 nt, Homo sapiens
  misc_RNA (1)...(19): siRNA sense strand
acuguucugugcaaugaaa

SEQ ID NO: 621669 - RNA, 19 nt, Homo sapiens
  misc_RNA (1)...(19): siRNA sense strand
ggacucacuccuacaaggu

SEQ ID NO: 621670 - RNA, 19 nt, Homo sapiens
  misc_RNA (1)...(19): siRNA sense strand
gccaggaagcccauaagga

SEQ ID NO: 621671 - RNA, 19 nt, Homo sapiens
  misc_RNA (1)...(19): siRNA sense strand
ggagguggcgagguucuau

SEQ ID NO: 621672 - RNA, 19 nt, Homo sapiens
  misc_RNA (1)...(19): siRNA sense strand
gccuggccuuuccugcuua

SEQ ID NO: 621673 - RNA, 19 nt, Homo sapiens
  misc_RNA (1)...(19): siRNA sense strand
cuaccuauauagauucaac

SEQ ID NO: 621674 - RNA, 19 nt, Homo sapiens
  misc_RNA (1)...(19): siRNA sense strand
augaggagguggcgagguu

SEQ ID NO: 621675 - RNA, 19 nt, Homo sapiens
  misc_RNA (1)...(19): siRNA sense strand
gaacgccaagcaccacaag

SEQ ID NO: 621676 - RNA, 19 nt, Homo sapiens
  misc_RNA (1)...(19): siRNA sense strand
gagcugccugccaaccuuu

SEQ ID NO: 621677 - RNA, 19 nt, Homo sapiens
  misc_RNA (1)...(19): siRNA sense strand
gcucagacaaggauugcau

SEQ ID NO: 621678 - RNA, 19 nt, Homo sapiens
  misc_RNA (1)...(19): siRNA sense strand
ccgaggacaaguugcauga

SEQ ID NO: 621679 - RNA, 19 nt, Homo sapiens
  misc_RNA (1)...(19): siRNA sense strand
ccugccaaccuuuccauuu

SEQ ID NO: 621680 - RNA, 19 nt, Homo sapiens
  misc_RNA (1)...(19): siRNA sense strand
gcgcaaagagcggguacug

SEQ ID NO: 621681 - RNA, 19 nt, Homo sapiens
  misc_RNA (1)...(19): siRNA sense strand
gaacgugccccugugcaaa

SEQ ID NO: 621682 - RNA, 19 nt, Homo sapiens
  misc_RNA (1)...(19): siRNA sense strand
aagauugucgcaccuccua

SEQ ID NO: 621683 - RNA, 19 nt, Homo sapiens
  misc_RNA (1)...(19): siRNA sense strand
gggaggcucagacaaggau

SEQ ID NO: 621684 - RNA, 19 nt, Homo sapiens
  misc_RNA (1)...(19): siRNA sense strand
aaaucuggacucacuccua

SEQ ID NO: 621685 - RNA, 19 nt, Homo sapiens
  misc_RNA (1)...(19): siRNA sense strand
gcaagagcaacuggcacaa

SEQ ID NO: 621686 - RNA, 19 nt, Homo sapiens
  misc_RNA (1)...(19): siRNA sense strand
gaucagagcuggcgcaaag

SEQ ID NO: 621687 - RNA, 19 nt, Homo sapiens
  misc_RNA (1)...(19): siRNA sense strand
gcaaagagcggguacugaa

SEQ ID NO: 621688 - RNA, 19 nt, Homo sapiens
  misc_RNA (1)...(19): siRNA sense strand
gcaaugaaaucuggacuca

SEQ ID NO: 621689 - RNA, 19 nt, Homo sapiens
  misc_RNA (1)...(19): siRNA sense strand
gauguuuccuaccuauaua

SEQ ID NO: 621690 - RNA, 19 nt, Homo sapiens
  misc_RNA (1)...(19): siRNA sense strand
gagcaauggugggaagauu

SEQ ID NO: 621691 - RNA, 19 nt, Homo sapiens
  misc_RNA (1)...(19): siRNA sense strand
ccacuguucugugcaauga

SEQ ID NO: 621692 - RNA, 19 nt, Homo sapiens
  misc_RNA (1)...(19): siRNA sense strand
ggauguuuccuaccuauau

SEQ ID NO: 621693 - RNA, 19 nt, Homo sapiens
  misc_RNA (1)...(19): siRNA sense strand
ggagcugccugccaaccuu

SEQ ID NO: 621694 - RNA, 19 nt, Homo sapiens
  misc_RNA (1)...(19): siRNA sense strand
caaagaggacugugagcaa

SEQ ID NO: 621695 - RNA, 19 nt, Homo sapiens
  misc_RNA (1)...(19): siRNA sense strand
ggacuucaggguuuaacaa

SEQ ID NO: 621696 - RNA, 19 nt, Homo sapiens
  misc_RNA (1)...(19): siRNA sense strand
ccaggaagcccauaaggau

SEQ ID NO: 621697 - RNA, 19 nt, Homo sapiens
  misc_RNA (1)...(19): siRNA sense strand
ggaagaaugccugcuguuc

SEQ ID NO: 621698 - RNA, 19 nt, Homo sapiens
  misc_RNA (1)...(19): siRNA sense strand
ccuacaaggucagcaacua

SEQ ID NO: 621699 - RNA, 19 nt, Homo sapiens
  misc_RNA (1)...(19): siRNA sense strand
aaagaggacugugagcaau

SEQ ID NO: 621700 - RNA, 19 nt, Homo sapiens
  misc_RNA (1)...(19): siRNA sense strand
aaugaaaucuggacucacu

SEQ ID NO: 621701 - RNA, 19 nt, Homo sapiens
  misc_RNA (1)...(19): siRNA sense strand
caaguugcaugagcagugu

SEQ ID NO: 621702 - RNA, 19 nt, Homo sapiens
  misc_RNA (1)...(19): siRNA sense strand
gcaaacggcauuucaucca

SEQ ID NO: 621703 - RNA, 19 nt, Homo sapiens
  misc_RNA (1)...(19): siRNA sense strand
cuucaggguuuaacaagug

SEQ ID NO: 621704 - RNA, 19 nt, Homo sapiens
  misc_RNA (1)...(19): siRNA sense strand
gccaaccuuuccauuucua

SEQ ID NO: 621705 - RNA, 19 nt, Homo sapiens
  misc_RNA (1)...(19): siRNA sense strand
ugucgacccuggaggaaga

SEQ ID NO: 621706 - RNA, 19 nt, Homo sapiens
  misc_RNA (1)...(19): siRNA sense strand
cugccaaccuuuccauuuc

SEQ ID NO: 621707 - RNA, 19 nt, Homo sapiens
  misc_RNA (1)...(19): siRNA sense strand
ggaagcccauaaggauguu

SEQ ID NO: 621708 - RNA, 19 nt, Homo sapiens
  misc_RNA (1)...(19): siRNA sense strand
gccaagcaccacaaggaaa

SEQ ID NO: 621709 - RNA, 19 nt, Homo sapiens
  misc_RNA (1)...(19): siRNA sense strand
acuguucugugcaaugaaa

SEQ ID NO: 621710 - RNA, 19 nt, Homo sapiens
  misc_RNA (1)...(19): siRNA sense strand
ggacucacuccuacaaggu

SEQ ID NO: 621711 - RNA, 19 nt, Homo sapiens
  misc_RNA (1)...(19): siRNA sense strand
gccaggaagcccauaagga

SEQ ID NO: 621712 - RNA, 19 nt, Homo sapiens
  misc_RNA (1)...(19): siRNA sense strand
ggagguggcgagguucuau

SEQ ID NO: 621713 - RNA, 19 nt, Homo sapiens
  misc_RNA (1)...(19): siRNA sense strand
gccuggccuuuccugcuua

SEQ ID NO: 621714 - RNA, 19 nt, Homo sapiens
  misc_RNA (1)...(19): siRNA sense strand
cuaccuauauagauucaac

SEQ ID NO: 621715 - RNA, 19 nt, Homo sapiens
  misc_RNA (1)...(19): siRNA sense strand
augaggagguggcgagguu

SEQ ID NO: 621716 - RNA, 19 nt, Homo sapiens
  misc_RNA (1)...(19): siRNA sense strand
gaacgccaagcaccacaag

SEQ ID NO: 621717 - RNA, 19 nt, Homo sapiens
  misc_RNA (1)...(19): siRNA sense strand
gagcugccugccaaccuuu

SEQ ID NO: 621718 - RNA, 19 nt, Homo sapiens
  misc_RNA (1)...(19): siRNA sense strand
gcucagacaaggauugcau

SEQ ID NO: 621719 - RNA, 19 nt, Homo sapiens
  misc_RNA (1)...(19): siRNA sense strand
ccgaggacaaguugcauga

SEQ ID NO: 621720 - RNA, 19 nt, Homo sapiens
  misc_RNA (1)...(19): siRNA sense strand
ccugccaaccuuuccauuu

SEQ ID NO: 621721 - RNA, 19 nt, Homo sapiens
  misc_RNA (1)...(19): siRNA sense strand
gcgcaaagagcggguacug

SEQ ID NO: 621722 - RNA, 19 nt, Homo sapiens
  misc_RNA (1)...(19): siRNA sense strand
gaacgugccccugugcaaa

SEQ ID NO: 621723 - RNA, 19 nt, Homo sapiens
  misc_RNA (1)...(19): siRNA sense strand
aagauugucgcaccuccua

SEQ ID NO: 621724 - RNA, 19 nt, Homo sapiens
  misc_RNA (1)...(19): siRNA sense strand
gggaggcucagacaaggau

SEQ ID NO: 621725 - RNA, 19 nt, Homo sapiens
  misc_RNA (1)...(19): siRNA sense strand
aaaucuggacucacuccua

SEQ ID NO: 621726 - RNA, 19 nt, Homo sapiens
  misc_RNA (1)...(19): siRNA sense strand
gcaagagcaacuggcacaa

SEQ ID NO: 621727 - RNA, 19 nt, Homo sapiens
  misc_RNA (1)...(19): siRNA sense strand
gaucagagcuggcgcaaag

SEQ ID NO: 621728 - RNA, 19 nt, Homo sapiens
  misc_RNA (1)...(19): siRNA sense strand
gcaaagagcggguacugaa

SEQ ID NO: 621729 - RNA, 19 nt, Homo sapiens
  misc_RNA (1)...(19): siRNA sense strand
gcaaugaaaucuggacuca

SEQ ID NO: 621730 - RNA, 19 nt, Homo sapiens
  misc_RNA (1)...(19): siRNA sense strand
gauguuuccuaccuauaua

SEQ ID NO: 621731 - RNA, 19 nt, Homo sapiens
  misc_RNA (1)...(19): siRNA sense strand
gagcaauggugggaagauu

SEQ ID NO: 621732 - RNA, 19 nt, Homo sapiens
  misc_RNA (1)...(19): siRNA sense strand
ccacuguucugugcaauga

SEQ ID NO: 621733 - RNA, 19 nt, Homo sapiens
  misc_RNA (1)...(19): siRNA sense strand
ggauguuuccuaccuauau

SEQ ID NO: 621734 - RNA, 19 nt, Homo sapiens
  misc_RNA (1)...(19): siRNA sense strand
ggagcugccugccaaccuu

SEQ ID NO: 621735 - RNA, 19 nt, Homo sapiens
  misc_RNA (1)...(19): siRNA sense strand
caaagaggacugugagcaa

SEQ ID NO: 621736 - RNA, 19 nt, Homo sapiens
  misc_RNA (1)...(19): siRNA sense strand
ggacuucaggguuuaacaa

SEQ ID NO: 621737 - RNA, 19 nt, Homo sapiens
  misc_RNA (1)...(19): siRNA sense strand
ccaggaagcccauaaggau

SEQ ID NO: 621738 - RNA, 19 nt, Homo sapiens
  misc_RNA (1)...(19): siRNA sense strand
ggaagaaugccugcuguuc

SEQ ID NO: 621739 - RNA, 19 nt, Homo sapiens
  misc_RNA (1)...(19): siRNA sense strand
ccuacaaggucagcaacua

SEQ ID NO: 621740 - RNA, 19 nt, Homo sapiens
  misc_RNA (1)...(19): siRNA sense strand
aaagaggacugugagcaau

SEQ ID NO: 621741 - RNA, 19 nt, Homo sapiens
  misc_RNA (1)...(19): siRNA sense strand
aaugaaaucuggacucacu

SEQ ID NO: 621742 - RNA, 19 nt, Homo sapiens
  misc_RNA (1)...(19): siRNA sense strand
caaguugcaugagcagugu

SEQ ID NO: 621743 - RNA, 19 nt, Homo sapiens
  misc_RNA (1)...(19): siRNA sense strand
gcaaacggcauuucaucca

SEQ ID NO: 621744 - RNA, 19 nt, Homo sapiens
  misc_RNA (1)...(19): siRNA sense strand
cuucaggguuuaacaagug

SEQ ID NO: 621745 - RNA, 19 nt, Homo sapiens
  misc_RNA (1)...(19): siRNA sense strand
gccaaccuuuccauuucua

SEQ ID NO: 621746 - RNA, 19 nt, Homo sapiens
  misc_RNA (1)...(19): siRNA sense strand
ugucgacccuggaggaaga

SEQ ID NO: 621747 - RNA, 19 nt, Homo sapiens
  misc_RNA (1)...(19): siRNA sense strand
cugccaaccuuuccauuuc

SEQ ID NO: 621748 - RNA, 19 nt, Homo sapiens
  misc_RNA (1)...(19): siRNA sense strand
ggaagcccauaaggauguu

SEQ ID NO: 621749 - RNA, 19 nt, Homo sapiens
  misc_RNA (1)...(19): siRNA sense strand
gccaagcaccacaaggaaa

SEQ ID NO: 621750 - RNA, 19 nt, Homo sapiens
  misc_RNA (1)...(19): siRNA sense strand
acuguucugugcaaugaaa

SEQ ID NO: 621751 - RNA, 19 nt, Homo sapiens
  misc_RNA (1)...(19): siRNA sense strand
ggacucacuccuacaaggu

SEQ ID NO: 621752 - RNA, 19 nt, Homo sapiens
  misc_RNA (1)...(19): siRNA sense strand
gccaggaagcccauaagga

SEQ ID NO: 621753 - RNA, 19 nt, Homo sapiens
  misc_RNA (1)...(19): siRNA sense strand
ggagguggcgagguucuau

SEQ ID NO: 621754 - RNA, 19 nt, Homo sapiens
  misc_RNA (1)...(19): siRNA sense strand
gccuggccuuuccugcuua

SEQ ID NO: 621755 - RNA, 19 nt, Homo sapiens
  misc_RNA (1)...(19): siRNA sense strand
cuaccuauauagauucaac

SEQ ID NO: 621756 - RNA, 19 nt, Homo sapiens
  misc_RNA (1)...(19): siRNA sense strand
augaggagguggcgagguu

SEQ ID NO: 621757 - RNA, 19 nt, Homo sapiens
  misc_RNA (1)...(19): siRNA sense strand
gaacgccaagcaccacaag

SEQ ID NO: 621758 - RNA, 19 nt, Homo sapiens
  misc_RNA (1)...(19): siRNA sense strand
gagcugccugccaaccuuu

SEQ ID NO: 621759 - RNA, 19 nt, Homo sapiens
  misc_RNA (1)...(19): siRNA sense strand
gcucagacaaggauugcau

SEQ ID NO: 621760 - RNA, 19 nt, Homo sapiens
  misc_RNA (1)...(19): siRNA sense strand
ccgaggacaaguugcauga

SEQ ID NO: 621761 - RNA, 19 nt, Homo sapiens
  misc_RNA (1)...(19): siRNA sense strand
ccugccaaccuuuccauuu

SEQ ID NO: 621762 - RNA, 19 nt, Homo sapiens
  misc_RNA (1)...(19): siRNA sense strand
gcgcaaagagcggguacug

SEQ ID NO: 621763 - RNA, 19 nt, Homo sapiens
  misc_RNA (1)...(19): siRNA sense strand
gaacgugccccugugcaaa

SEQ ID NO: 621764 - RNA, 19 nt, Homo sapiens
  misc_RNA (1)...(19): siRNA sense strand
aagauugucgcaccuccua

SEQ ID NO: 621765 - RNA, 19 nt, Homo sapiens
  misc_RNA (1)...(19): siRNA sense strand
gggaggcucagacaaggau

SEQ ID NO: 621766 - RNA, 19 nt, Homo sapiens
  misc_RNA (1)...(19): siRNA sense strand
aaaucuggacucacuccua

SEQ ID NO: 621767 - RNA, 19 nt, Homo sapiens
  misc_RNA (1)...(19): siRNA sense strand
gcaagagcaacuggcacaa

SEQ ID NO: 621768 - RNA, 19 nt, Homo sapiens
  misc_RNA (1)...(19): siRNA sense strand
gaucagagcuggcgcaaag

SEQ ID NO: 621769 - RNA, 19 nt, Homo sapiens
  misc_RNA (1)...(19): siRNA sense strand
gcaaagagcggguacugaa

SEQ ID NO: 621770 - RNA, 19 nt, Homo sapiens
  misc_RNA (1)...(19): siRNA sense strand
gcaaugaaaucuggacuca

SEQ ID NO: 621771 - RNA, 19 nt, Homo sapiens
  misc_RNA (1)...(19): siRNA sense strand
gauguuuccuaccuauaua

SEQ ID NO: 621772 - RNA, 19 nt, Homo sapiens
  misc_RNA (1)...(19): siRNA sense strand
gagcaauggugggaagauu

SEQ ID NO: 621773 - RNA, 19 nt, Homo sapiens
  misc_RNA (1)...(19): siRNA sense strand
ccacuguucugugcaauga

SEQ ID NO: 621774 - RNA, 19 nt, Homo sapiens
  misc_RNA (1)...(19): siRNA sense strand
ggauguuuccuaccuauau

SEQ ID NO: 621775 - RNA, 19 nt, Homo sapiens
  misc_RNA (1)...(19): siRNA sense strand
ggagcugccugccaaccuu

SEQ ID NO: 621776 - RNA, 19 nt, Homo sapiens
  misc_RNA (1)...(19): siRNA sense strand
caaagaggacugugagcaa

SEQ ID NO: 621777 - RNA, 19 nt, Homo sapiens
  misc_RNA (1)...(19): siRNA sense strand
ggacuucaggguuuaacaa

SEQ ID NO: 621778 - RNA, 19 nt, Homo sapiens
  misc_RNA (1)...(19): siRNA sense strand
ccaggaagcccauaaggau

SEQ ID NO: 621779 - RNA, 19 nt, Homo sapiens
  misc_RNA (1)...(19): siRNA sense strand
ggaagaaugccugcuguuc

SEQ ID NO: 621780 - RNA, 19 nt, Homo sapiens
  misc_RNA (1)...(19): siRNA sense strand
ccuacaaggucagcaacua

SEQ ID NO: 621781 - RNA, 19 nt, Homo sapiens
  misc_RNA (1)...(19): siRNA sense strand
aaagaggacugugagcaau

SEQ ID NO: 621782 - RNA, 19 nt, Homo sapiens
  misc_RNA (1)...(19): siRNA sense strand
aaugaaaucuggacucacu

SEQ ID NO: 621783 - RNA, 19 nt, Homo sapiens
  misc_RNA (1)...(19): siRNA sense strand
caaguugcaugagcagugu

SEQ ID NO: 621784 - RNA, 19 nt, Homo sapiens
  misc_RNA (1)...(19): siRNA sense strand
gcaaacggcauuucaucca

SEQ ID NO: 621785 - RNA, 19 nt, Homo sapiens
  misc_RNA (1)...(19): siRNA sense strand
cuucaggguuuaacaagug

SEQ ID NO: 621786 - RNA, 19 nt, Homo sapiens
  misc_RNA (1)...(19): siRNA sense strand
gccaaccuuuccauuucua

SEQ ID NO: 621787 - RNA, 19 nt, Homo sapiens
  misc_RNA (1)...(19): siRNA sense strand
ugucgacccuggaggaaga

SEQ ID NO: 621788 - RNA, 19 nt, Homo sapiens
  misc_RNA (1)...(19): siRNA sense strand
cugccaaccuuuccauuuc

SEQ ID NO: 621789 - RNA, 19 nt, Homo sapiens
  misc_RNA (1)...(19): siRNA sense strand
ggaagcccauaaggauguu

SEQ ID NO: 621790 - RNA, 19 nt, Homo sapiens
  misc_RNA (1)...(19): siRNA sense strand
gccaagcaccacaaggaaa

SEQ ID NO: 621791 - RNA, 19 nt, Homo sapiens
  misc_RNA (1)...(19): siRNA sense strand
acuguucugugcaaugaaa

SEQ ID NO: 621792 - RNA, 19 nt, Homo sapiens
  misc_RNA (1)...(19): siRNA sense strand
ggacucacuccuacaaggu

SEQ ID NO: 621793 - RNA, 19 nt, Homo sapiens
  misc_RNA (1)...(19): siRNA sense strand
gccaggaagcccauaagga

SEQ ID NO: 621794 - RNA, 19 nt, Homo sapiens
  misc_RNA (1)...(19): siRNA sense strand
ggagguggcgagguucuau

SEQ ID NO: 621795 - RNA, 19 nt, Homo sapiens
  misc_RNA (1)...(19): siRNA sense strand
gccuggccuuuccugcuua

SEQ ID NO: 621796 - RNA, 19 nt, Homo sapiens
  misc_RNA (1)...(19): siRNA sense strand
cuaccuauauagauucaac

SEQ ID NO: 621797 - RNA, 19 nt, Homo sapiens
  misc_RNA (1)...(19): siRNA sense strand
augaggagguggcgagguu

SEQ ID NO: 621798 - RNA, 19 nt, Homo sapiens
  misc_RNA (1)...(19): siRNA sense strand
gaacgccaagcaccacaag

SEQ ID NO: 621799 - RNA, 19 nt, Homo sapiens
  misc_RNA (1)...(19): siRNA sense strand
gagcugccugccaaccuuu

SEQ ID NO: 621800 - RNA, 19 nt, Homo sapiens
  misc_RNA (1)...(19): siRNA sense strand
gcucagacaaggauugcau

SEQ ID NO: 621801 - RNA, 19 nt, Homo sapiens
  misc_RNA (1)...(19): siRNA sense strand
ccgaggacaaguugcauga

SEQ ID NO: 621802 - RNA, 19 nt, Homo sapiens
  misc_RNA (1)...(19): siRNA sense strand
ccugccaaccuuuccauuu

SEQ ID NO: 621803 - RNA, 19 nt, Homo sapiens
  misc_RNA (1)...(19): siRNA sense strand
gcgcaaagagcggguacug

SEQ ID NO: 621804 - RNA, 19 nt, Homo sapiens
  misc_RNA (1)...(19): siRNA sense strand
gaacgugccccugugcaaa

SEQ ID NO: 621805 - RNA, 19 nt, Homo sapiens
  misc_RNA (1)...(19): siRNA sense strand
aagauugucgcaccuccua

SEQ ID NO: 621806 - RNA, 19 nt, Homo sapiens
  misc_RNA (1)...(19): siRNA sense strand
gggaggcucagacaaggau

SEQ ID NO: 621807 - RNA, 19 nt, Homo sapiens
  misc_RNA (1)...(19): siRNA sense strand
aaaucuggacucacuccua

SEQ ID NO: 621808 - RNA, 19 nt, Homo sapiens
  misc_RNA (1)...(19): siRNA sense strand
gcaagagcaacuggcacaa

SEQ ID NO: 621809 - RNA, 19 nt, Homo sapiens
  misc_RNA (1)...(19): siRNA sense strand
gaucagagcuggcgcaaag

SEQ ID NO: 621810 - RNA, 19 nt, Homo sapiens
  misc_RNA (1)...(19): siRNA sense strand
gcaaagagcggguacugaa

SEQ ID NO: 621811 - RNA, 19 nt, Homo sapiens
  misc_RNA (1)...(19): siRNA sense strand
gcaaugaaaucuggacuca

SEQ ID NO: 621812 - RNA, 19 nt, Homo sapiens
  misc_RNA (1)...(19): siRNA sense strand
gauguuuccuaccuauaua

SEQ ID NO: 621813 - RNA, 19 nt, Homo sapiens
  misc_RNA (1)...(19): siRNA sense strand
gagcaauggugggaagauu

SEQ ID NO: 621814 - RNA, 19 nt, Homo sapiens
  misc_RNA (1)...(19): siRNA sense strand
ccacuguucugugcaauga

SEQ ID NO: 621815 - RNA, 19 nt, Homo sapiens
  misc_RNA (1)...(19): siRNA sense strand
ggauguuuccuaccuauau

SEQ ID NO: 621816 - RNA, 19 nt, Homo sapiens
  misc_RNA (1)...(19): siRNA sense strand
ggagcugccugccaaccuu

SEQ ID NO: 621817 - RNA, 19 nt, Homo sapiens
  misc_RNA (1)...(19): siRNA sense strand
caaagaggacugugagcaa

SEQ ID NO: 621818 - RNA, 19 nt, Homo sapiens
  misc_RNA (1)...(19): siRNA sense strand
ggacuucaggguuuaacaa

SEQ ID NO: 621819 - RNA, 19 nt, Homo sapiens
  misc_RNA (1)...(19): siRNA sense strand
ccaggaagcccauaaggau

SEQ ID NO: 621820 - RNA, 19 nt, Homo sapiens
  misc_RNA (1)...(19): siRNA sense strand
ggaagaaugccugcuguuc

SEQ ID NO: 621821 - RNA, 19 nt, Homo sapiens
  misc_RNA (1)...(19): siRNA sense strand
ccuacaaggucagcaacua

SEQ ID NO: 621822 - RNA, 19 nt, Homo sapiens
  misc_RNA (1)...(19): siRNA sense strand
aaagaggacugugagcaau

SEQ ID NO: 621823 - RNA, 19 nt, Homo sapiens
  misc_RNA (1)...(19): siRNA sense strand
aaugaaaucuggacucacu

SEQ ID NO: 621824 - RNA, 19 nt, Homo sapiens
  misc_RNA (1)...(19): siRNA sense strand
caaguugcaugagcagugu

SEQ ID NO: 621825 - RNA, 19 nt, Homo sapiens
  misc_RNA (1)...(19): siRNA sense strand
gcaaacggcauuucaucca

SEQ ID NO: 621826 - RNA, 19 nt, Homo sapiens
  misc_RNA (1)...(19): siRNA sense strand
cuucaggguuuaacaagug

SEQ ID NO: 621827 - RNA, 19 nt, Homo sapiens
  misc_RNA (1)...(19): siRNA sense strand
gccaaccuuuccauuucua

SEQ ID NO: 621828 - RNA, 19 nt, Homo sapiens
  misc_RNA (1)...(19): siRNA sense strand
ugucgacccuggaggaaga

SEQ ID NO: 621829 - RNA, 19 nt, Homo sapiens
  misc_RNA (1)...(19): siRNA sense strand
cugccaaccuuuccauuuc

SEQ ID NO: 621830 - RNA, 19 nt, Homo sapiens
  misc_RNA (1)...(19): siRNA sense strand
ggaagcccauaaggauguu

SEQ ID NO: 621831 - RNA, 19 nt, Homo sapiens
  misc_RNA (1)...(19): siRNA sense strand
gccaagcaccacaaggaaa

SEQ ID NO: 621832 - RNA, 19 nt, Homo sapiens
  misc_RNA (1)...(19): siRNA sense strand
acuguucugugcaaugaaa

SEQ ID NO: 621833 - RNA, 19 nt, Homo sapiens
  misc_RNA (1)...(19): siRNA sense strand
ggacucacuccuacaaggu

SEQ ID NO: 621834 - RNA, 19 nt, Homo sapiens
  misc_RNA (1)...(19): siRNA sense strand
gccaggaagcccauaagga

SEQ ID NO: 621835 - RNA, 19 nt, Homo sapiens
  misc_RNA (1)...(19): siRNA sense strand
ggagguggcgagguucuau

SEQ ID NO: 621836 - RNA, 19 nt, Homo sapiens
  misc_RNA (1)...(19): siRNA sense strand
gccuggccuuuccugcuua

SEQ ID NO: 621837 - RNA, 19 nt, Homo sapiens
  misc_RNA (1)...(19): siRNA sense strand
cuaccuauauagauucaac

SEQ ID NO: 621838 - RNA, 19 nt, Homo sapiens
  misc_RNA (1)...(19): siRNA sense strand
augaggagguggcgagguu

SEQ ID NO: 621839 - RNA, 19 nt, Homo sapiens
  misc_RNA (1)...(19): siRNA sense strand
gaacgccaagcaccacaag

SEQ ID NO: 621840 - RNA, 19 nt, Homo sapiens
  misc_RNA (1)...(19): siRNA sense strand
gagcugccugccaaccuuu

SEQ ID NO: 621841 - RNA, 19 nt, Homo sapiens
  misc_RNA (1)...(19): siRNA sense strand
gcucagacaaggauugcau

SEQ ID NO: 621842 - RNA, 19 nt, Homo sapiens
  misc_RNA (1)...(19): siRNA sense strand
ccgaggacaaguugcauga

SEQ ID NO: 621843 - RNA, 19 nt, Homo sapiens
  misc_RNA (1)...(19): siRNA sense strand
ccugccaaccuuuccauuu

SEQ ID NO: 621844 - RNA, 19 nt, Homo sapiens
  misc_RNA (1)...(19): siRNA sense strand
gcgcaaagagcggguacug

SEQ ID NO: 621845 - RNA, 19 nt, Homo sapiens
  misc_RNA (1)...(19): siRNA sense strand
gaacgugccccugugcaaa

SEQ ID NO: 621846 - RNA, 19 nt, Homo sapiens
  misc_RNA (1)...(19): siRNA sense strand
aagauugucgcaccuccua

SEQ ID NO: 621847 - RNA, 19 nt, Homo sapiens
  misc_RNA (1)...(19): siRNA sense strand
gggaggcucagacaaggau

SEQ ID NO: 621848 - RNA, 19 nt, Homo sapiens
  misc_RNA (1)...(19): siRNA sense strand
aaaucuggacucacuccua

SEQ ID NO: 621849 - RNA, 19 nt, Homo sapiens
  misc_RNA (1)...(19): siRNA sense strand
gcaagagcaacuggcacaa

SEQ ID NO: 621850 - RNA, 19 nt, Homo sapiens
  misc_RNA (1)...(19): siRNA sense strand
gaucagagcuggcgcaaag

SEQ ID NO: 621851 - RNA, 19 nt, Homo sapiens
  misc_RNA (1)...(19): siRNA sense strand
gcaaagagcggguacugaa

SEQ ID NO: 621852 - RNA, 19 nt, Homo sapiens
  misc_RNA (1)...(19): siRNA sense strand
gcaaugaaaucuggacuca

SEQ ID NO: 621853 - RNA, 19 nt, Homo sapiens
  misc_RNA (1)...(19): siRNA sense strand
gauguuuccuaccuauaua

SEQ ID NO: 621854 - RNA, 19 nt, Homo sapiens
  misc_RNA (1)...(19): siRNA sense strand
gagcaauggugggaagauu

SEQ ID NO: 621855 - RNA, 19 nt, Homo sapiens
  misc_RNA (1)...(19): siRNA sense strand
ccacuguucugugcaauga

SEQ ID NO: 621856 - RNA, 19 nt, Homo sapiens
  misc_RNA (1)...(19): siRNA sense strand
ggauguuuccuaccuauau

SEQ ID NO: 621857 - RNA, 19 nt, Homo sapiens
  misc_RNA (1)...(19): siRNA sense strand
ggagcugccugccaaccuu

SEQ ID NO: 621858 - RNA, 19 nt, Homo sapiens
  misc_RNA (1)...(19): siRNA sense strand
caaagaggacugugagcaa

SEQ ID NO: 621859 - RNA, 19 nt, Homo sapiens
  misc_RNA (1)...(19): siRNA sense strand
ggacuucaggguuuaacaa

SEQ ID NO: 621860 - RNA, 19 nt, Homo sapiens
  misc_RNA (1)...(19): siRNA sense strand
ccaggaagcccauaaggau

SEQ ID NO: 621861 - RNA, 19 nt, Homo sapiens
  misc_RNA (1)...(19): siRNA sense strand
ggaagaaugccugcuguuc

SEQ ID NO: 621862 - RNA, 19 nt, Homo sapiens
  misc_RNA (1)...(19): siRNA sense strand
ccuacaaggucagcaacua

SEQ ID NO: 621863 - RNA, 19 nt, Homo sapiens
  misc_RNA (1)...(19): siRNA sense strand
aaagaggacugugagcaau

SEQ ID NO: 621864 - RNA, 19 nt, Homo sapiens
  misc_RNA (1)...(19): siRNA sense strand
aaugaaaucuggacucacu

SEQ ID NO: 621865 - RNA, 19 nt, Homo sapiens
  misc_RNA (1)...(19): siRNA sense strand
caaguugcaugagcagugu

SEQ ID NO: 621866 - RNA, 19 nt, Homo sapiens
  misc_RNA (1)...(19): siRNA sense strand
gcaaacggcauuucaucca

SEQ ID NO: 621867 - RNA, 19 nt, Homo sapiens
  misc_RNA (1)...(19): siRNA sense strand
cuucaggguuuaacaagug

SEQ ID NO: 621868 - RNA, 19 nt, Homo sapiens
  misc_RNA (1)...(19): siRNA sense strand
gccaaccuuuccauuucua

SEQ ID NO: 621869 - RNA, 19 nt, Homo sapiens
  misc_RNA (1)...(19): siRNA sense strand
ugucgacccuggaggaaga

SEQ ID NO: 621870 - RNA, 19 nt, Homo sapiens
  misc_RNA (1)...(19): siRNA sense strand
cugccaaccuuuccauuuc

SEQ ID NO: 621871 - RNA, 19 nt, Homo sapiens
  misc_RNA (1)...(19): siRNA sense strand
ggaagcccauaaggauguu

SEQ ID NO: 621872 - RNA, 19 nt, Homo sapiens
  misc_RNA (1)...(19): siRNA sense strand
gccaagcaccacaaggaaa

SEQ ID NO: 621873 - RNA, 19 nt, Homo sapiens
  misc_RNA (1)...(19): siRNA sense strand
acuguucugugcaaugaaa

SEQ ID NO: 621874 - RNA, 19 nt, Homo sapiens
  misc_RNA (1)...(19): siRNA sense strand
ggacucacuccuacaaggu

SEQ ID NO: 621875 - RNA, 19 nt, Homo sapiens
  misc_RNA (1)...(19): siRNA sense strand
gccaggaagcccauaagga

SEQ ID NO: 621876 - RNA, 19 nt, Homo sapiens
  misc_RNA (1)...(19): siRNA sense strand
ggagguggcgagguucuau

SEQ ID NO: 621877 - RNA, 19 nt, Homo sapiens
  misc_RNA (1)...(19): siRNA sense strand
gccuggccuuuccugcuua

SEQ ID NO: 621878 - RNA, 19 nt, Homo sapiens
  misc_RNA (1)...(19): siRNA sense strand
cuaccuauauagauucaac

SEQ ID NO: 621879 - RNA, 19 nt, Homo sapiens
  misc_RNA (1)...(19): siRNA sense strand
augaggagguggcgagguu

SEQ ID NO: 621880 - RNA, 19 nt, Homo sapiens
  misc_RNA (1)...(19): siRNA sense strand
gaacgccaagcaccacaag

SEQ ID NO: 621881 - RNA, 19 nt, Homo sapiens
  misc_RNA (1)...(19): siRNA sense strand
gagcugccugccaaccuuu

SEQ ID NO: 621882 - RNA, 19 nt, Homo sapiens
  misc_RNA (1)...(19): siRNA sense strand
gcucagacaaggauugcau

SEQ ID NO: 621883 - RNA, 19 nt, Homo sapiens
  misc_RNA (1)...(19): siRNA sense strand
ccgaggacaaguugcauga

SEQ ID NO: 621884 - RNA, 19 nt, Homo sapiens
  misc_RNA (1)...(19): siRNA sense strand
ccugccaaccuuuccauuu

SEQ ID NO: 621885 - RNA, 19 nt, Homo sapiens
  misc_RNA (1)...(19): siRNA sense strand
gcgcaaagagcggguacug

SEQ ID NO: 621886 - RNA, 19 nt, Homo sapiens
  misc_RNA (1)...(19): siRNA sense strand
gaacgugccccugugcaaa

SEQ ID NO: 621887 - RNA, 19 nt, Homo sapiens
  misc_RNA (1)...(19): siRNA sense strand
aagauugucgcaccuccua

SEQ ID NO: 621888 - RNA, 19 nt, Homo sapiens
  misc_RNA (1)...(19): siRNA sense strand
gggaggcucagacaaggau

SEQ ID NO: 621889 - RNA, 19 nt, Homo sapiens
  misc_RNA (1)...(19): siRNA sense strand
aaaucuggacucacuccua

SEQ ID NO: 621890 - RNA, 19 nt, Homo sapiens
  misc_RNA (1)...(19): siRNA sense strand
gcaagagcaacuggcacaa

SEQ ID NO: 621891 - RNA, 19 nt, Homo sapiens
  misc_RNA (1)...(19): siRNA sense strand
gaucagagcuggcgcaaag

SEQ ID NO: 621892 - RNA, 19 nt, Homo sapiens
  misc_RNA (1)...(19): siRNA sense strand
gcaaagagcggguacugaa

SEQ ID NO: 621893 - RNA, 19 nt, Homo sapiens
  misc_RNA (1)...(19): siRNA sense strand
gcaaugaaaucuggacuca

SEQ ID NO: 621894 - RNA, 19 nt, Homo sapiens
  misc_RNA (1)...(19): siRNA sense strand
gauguuuccuaccuauaua

SEQ ID NO: 621895 - RNA, 19 nt, Homo sapiens
  misc_RNA (1)...(19): siRNA sense strand
gagcaauggugggaagauu

SEQ ID NO: 621896 - RNA, 19 nt, Homo sapiens
  misc_RNA (1)...(19): siRNA sense strand
ccacuguucugugcaauga

SEQ ID NO: 621897 - RNA, 19 nt, Homo sapiens
  misc_RNA (1)...(19): siRNA sense strand
ggauguuuccuaccuauau

SEQ ID NO: 621898 - RNA, 19 nt, Homo sapiens
  misc_RNA (1)...(19): siRNA sense strand
ggagcugccugccaaccuu

SEQ ID NO: 621899 - RNA, 19 nt, Homo sapiens
  misc_RNA (1)...(19): siRNA sense strand
caaagaggacugugagcaa

SEQ ID NO: 621900 - RNA, 19 nt, Homo sapiens
  misc_RNA (1)...(19): siRNA sense strand
ggacuucaggguuuaacaa

SEQ ID NO: 621901 - RNA, 19 nt, Homo sapiens
  misc_RNA (1)...(19): siRNA sense strand
ccaggaagcccauaaggau

SEQ ID NO: 621902 - RNA, 19 nt, Homo sapiens
  misc_RNA (1)...(19): siRNA sense strand
ggaagaaugccugcuguuc

SEQ ID NO: 621903 - RNA, 19 nt, Homo sapiens
  misc_RNA (1)...(19): siRNA sense strand
ccuacaaggucagcaacua

SEQ ID NO: 621904 - RNA, 19 nt, Homo sapiens
  misc_RNA (1)...(19): siRNA sense strand
aaagaggacugugagcaau

SEQ ID NO: 621905 - RNA, 19 nt, Homo sapiens
  misc_RNA (1)...(19): siRNA sense strand
aaugaaaucuggacucacu

SEQ ID NO: 621906 - RNA, 19 nt, Homo sapiens
  misc_RNA (1)...(19): siRNA sense strand
caaguugcaugagcagugu

SEQ ID NO: 621907 - RNA, 19 nt, Homo sapiens
  misc_RNA (1)...(19): siRNA sense strand
gcaaacggcauuucaucca

SEQ ID NO: 621908 - RNA, 19 nt, Homo sapiens
  misc_RNA (1)...(19): siRNA sense strand
cuucaggguuuaacaagug

SEQ ID NO: 621909 - RNA, 19 nt, Homo sapiens
  misc_RNA (1)...(19): siRNA sense strand
gccaaccuuuccauuucua

SEQ ID NO: 621910 - RNA, 19 nt, Homo sapiens
  misc_RNA (1)...(19): siRNA sense strand
ugucgacccuggaggaaga

SEQ ID NO: 621911 - RNA, 19 nt, Homo sapiens
  misc_RNA (1)...(19): siRNA sense strand
cugccaaccuuuccauuuc

SEQ ID NO: 621912 - RNA, 19 nt, Homo sapiens
  misc_RNA (1)...(19): siRNA sense strand
ggaagcccauaaggauguu

SEQ ID NO: 621913 - RNA, 19 nt, Homo sapiens
  misc_RNA (1)...(19): siRNA sense strand
gccaagcaccacaaggaaa

SEQ ID NO: 621914 - RNA, 19 nt, Homo sapiens
  misc_RNA (1)...(19): siRNA sense strand
acuguucugugcaaugaaa

SEQ ID NO: 621915 - RNA, 19 nt, Homo sapiens
  misc_RNA (1)...(19): siRNA sense strand
ggacucacuccuacaaggu

SEQ ID NO: 621916 - RNA, 19 nt, Homo sapiens
  misc_RNA (1)...(19): siRNA sense strand
gccaggaagcccauaagga

SEQ ID NO: 621917 - RNA, 19 nt, Homo sapiens
  misc_RNA (1)...(19): siRNA sense strand
ggagguggcgagguucuau

SEQ ID NO: 621918 - RNA, 19 nt, Homo sapiens
  misc_RNA (1)...(19): siRNA sense strand
gccuggccuuuccugcuua

SEQ ID NO: 621919 - RNA, 19 nt, Homo sapiens
  misc_RNA (1)...(19): siRNA sense strand
cuaccuauauagauucaac

SEQ ID NO: 621920 - RNA, 19 nt, Homo sapiens
  misc_RNA (1)...(19): siRNA sense strand
augaggagguggcgagguu

SEQ ID NO: 621921 - RNA, 19 nt, Homo sapiens
  misc_RNA (1)...(19): siRNA sense strand
gaacgccaagcaccacaag

SEQ ID NO: 621922 - RNA, 19 nt, Homo sapiens
  misc_RNA (1)...(19): siRNA sense strand
gagcugccugccaaccuuu

SEQ ID NO: 621923 - RNA, 19 nt, Homo sapiens
  misc_RNA (1)...(19): siRNA sense strand
gcucagacaaggauugcau

SEQ ID NO: 621924 - RNA, 19 nt, Homo sapiens
  misc_RNA (1)...(19): siRNA sense strand
ccgaggacaaguugcauga

SEQ ID NO: 621925 - RNA, 19 nt, Homo sapiens
  misc_RNA (1)...(19): siRNA sense strand
ccugccaaccuuuccauuu

SEQ ID NO: 621926 - RNA, 19 nt, Homo sapiens
  misc_RNA (1)...(19): siRNA sense strand
gcgcaaagagcggguacug

SEQ ID NO: 621927 - RNA, 19 nt, Homo sapiens
  misc_RNA (1)...(19): siRNA sense strand
gaacgugccccugugcaaa

SEQ ID NO: 621928 - RNA, 19 nt, Homo sapiens
  misc_RNA (1)...(19): siRNA sense strand
aagauugucgcaccuccua

SEQ ID NO: 621929 - RNA, 19 nt, Homo sapiens
  misc_RNA (1)...(19): siRNA sense strand
gggaggcucagacaaggau

SEQ ID NO: 621930 - RNA, 19 nt, Homo sapiens
  misc_RNA (1)...(19): siRNA sense strand
aaaucuggacucacuccua

SEQ ID NO: 621931 - RNA, 19 nt, Homo sapiens
  misc_RNA (1)...(19): siRNA sense strand
gcaagagcaacuggcacaa

SEQ ID NO: 621932 - RNA, 19 nt, Homo sapiens
  misc_RNA (1)...(19): siRNA sense strand
gaucagagcuggcgcaaag

SEQ ID NO: 621933 - RNA, 19 nt, Homo sapiens
  misc_RNA (1)...(19): siRNA sense strand
gcaaagagcggguacugaa

SEQ ID NO: 621934 - RNA, 19 nt, Homo sapiens
  misc_RNA (1)...(19): siRNA sense strand
gcaaugaaaucuggacuca

SEQ ID NO: 621935 - RNA, 19 nt, Homo sapiens
  misc_RNA (1)...(19): siRNA sense strand
gauguuuccuaccuauaua

SEQ ID NO: 621936 - RNA, 19 nt, Homo sapiens
  misc_RNA (1)...(19): siRNA sense strand
gagcaauggugggaagauu

SEQ ID NO: 621937 - RNA, 19 nt, Homo sapiens
  misc_RNA (1)...(19): siRNA sense strand
ccacuguucugugcaauga

SEQ ID NO: 621938 - RNA, 19 nt, Homo sapiens
  misc_RNA (1)...(19): siRNA sense strand
ggauguuuccuaccuauau

SEQ ID NO: 621939 - RNA, 19 nt, Homo sapiens
  misc_RNA (1)...(19): siRNA sense strand
ggagcugccugccaaccuu

SEQ ID NO: 621940 - RNA, 19 nt, Homo sapiens
  misc_RNA (1)...(19): siRNA sense strand
caaagaggacugugagcaa

SEQ ID NO: 621941 - RNA, 19 nt, Homo sapiens
  misc_RNA (1)...(19): siRNA sense strand
ggacuucaggguuuaacaa

SEQ ID NO: 621942 - RNA, 19 nt, Homo sapiens
  misc_RNA (1)...(19): siRNA sense strand
ccaggaagcccauaaggau

SEQ ID NO: 621943 - RNA, 19 nt, Homo sapiens
  misc_RNA (1)...(19): siRNA sense strand
ggaagaaugccugcuguuc

SEQ ID NO: 621944 - RNA, 19 nt, Homo sapiens
  misc_RNA (1)...(19): siRNA sense strand
ccuacaaggucagcaacua

SEQ ID NO: 621945 - RNA, 19 nt, Homo sapiens
  misc_RNA (1)...(19): siRNA sense strand
aaagaggacugugagcaau

SEQ ID NO: 621946 - RNA, 19 nt, Homo sapiens
  misc_RNA (1)...(19): siRNA sense strand
aaugaaaucuggacucacu

SEQ ID NO: 621947 - RNA, 19 nt, Homo sapiens
  misc_RNA (1)...(19): siRNA sense strand
caaguugcaugagcagugu

SEQ ID NO: 621948 - RNA, 19 nt, Homo sapiens
  misc_RNA (1)...(19): siRNA sense strand
gcaaacggcauuucaucca

SEQ ID NO: 621949 - RNA, 19 nt, Homo sapiens
  misc_RNA (1)...(19): siRNA sense strand
cuucaggguuuaacaagug

SEQ ID NO: 621950 - RNA, 19 nt, Homo sapiens
  misc_RNA (1)...(19): siRNA sense strand
gccaaccuuuccauuucua

SEQ ID NO: 621951 - RNA, 19 nt, Homo sapiens
  misc_RNA (1)...(19): siRNA sense strand
ugucgacccuggaggaaga

SEQ ID NO: 621952 - RNA, 19 nt, Homo sapiens
  misc_RNA (1)...(19): siRNA sense strand
cugccaaccuuuccauuuc

SEQ ID NO: 621953 - RNA, 19 nt, Homo sapiens
  misc_RNA (1)...(19): siRNA sense strand
ggaagcccauaaggauguu

SEQ ID NO: 621954 - RNA, 19 nt, Homo sapiens
  misc_RNA (1)...(19): siRNA sense strand
gccaagcaccacaaggaaa

SEQ ID NO: 621955 - RNA, 19 nt, Homo sapiens
  misc_RNA (1)...(19): siRNA sense strand
acuguucugugcaaugaaa

SEQ ID NO: 621956 - RNA, 19 nt, Homo sapiens
  misc_RNA (1)...(19): siRNA sense strand
ggacucacuccuacaaggu

SEQ ID NO: 621957 - RNA, 19 nt, Homo sapiens
  misc_RNA (1)...(19): siRNA sense strand
gccaggaagcccauaagga

SEQ ID NO: 621958 - RNA, 19 nt, Homo sapiens
  misc_RNA (1)...(19): siRNA sense strand
ggagguggcgagguucuau

SEQ ID NO: 621959 - RNA, 19 nt, Homo sapiens
  misc_RNA (1)...(19): siRNA sense strand
gccuggccuuuccugcuua

SEQ ID NO: 621960 - RNA, 19 nt, Homo sapiens
  misc_RNA (1)...(19): siRNA sense strand
cuaccuauauagauucaac

SEQ ID NO: 621961 - RNA, 19 nt, Homo sapiens
  misc_RNA (1)...(19): siRNA sense strand
augaggagguggcgagguu

SEQ ID NO: 621962 - RNA, 19 nt, Homo sapiens
  misc_RNA (1)...(19): siRNA sense strand
gaacgccaagcaccacaag

SEQ ID NO: 621963 - RNA, 19 nt, Homo sapiens
  misc_RNA (1)...(19): siRNA sense strand
gagcugccugccaaccuuu

SEQ ID NO: 621964 - RNA, 19 nt, Homo sapiens
  misc_RNA (1)...(19): siRNA sense strand
gcucagacaaggauugcau

SEQ ID NO: 621965 - RNA, 19 nt, Homo sapiens
  misc_RNA (1)...(19): siRNA sense strand
ccgaggacaaguugcauga

SEQ ID NO: 621966 - RNA, 19 nt, Homo sapiens
  misc_RNA (1)...(19): siRNA sense strand
ccugccaaccuuuccauuu

SEQ ID NO: 621967 - RNA, 19 nt, Homo sapiens
  misc_RNA (1)...(19): siRNA sense strand
gcgcaaagagcggguacug

SEQ ID NO: 621968 - RNA, 19 nt, Homo sapiens
  misc_RNA (1)...(19): siRNA sense strand
gaacgugccccugugcaaa

SEQ ID NO: 621969 - RNA, 19 nt, Homo sapiens
  misc_RNA (1)...(19): siRNA sense strand
aagauugucgcaccuccua

SEQ ID NO: 621970 - RNA, 19 nt, Homo sapiens
  misc_RNA (1)...(19): siRNA sense strand
gggaggcucagacaaggau

SEQ ID NO: 621971 - RNA, 19 nt, Homo sapiens
  misc_RNA (1)...(19): siRNA sense strand
aaaucuggacucacuccua

SEQ ID NO: 621972 - RNA, 19 nt, Homo sapiens
  misc_RNA (1)...(19): siRNA sense strand
gcaagagcaacuggcacaa

SEQ ID NO: 621973 - RNA, 19 nt, Homo sapiens
  misc_RNA (1)...(19): siRNA sense strand
gaucagagcuggcgcaaag

SEQ ID NO: 621974 - RNA, 19 nt, Homo sapiens
  misc_RNA (1)...(19): siRNA sense strand
gcaaagagcggguacugaa

SEQ ID NO: 621975 - RNA, 19 nt, Homo sapiens
  misc_RNA (1)...(19): siRNA sense strand
gcaaugaaaucuggacuca

SEQ ID NO: 621976 - RNA, 19 nt, Homo sapiens
  misc_RNA (1)...(19): siRNA sense strand
gauguuuccuaccuauaua

SEQ ID NO: 621977 - RNA, 19 nt, Homo sapiens
  misc_RNA (1)...(19): siRNA sense strand
gagcaauggugggaagauu

SEQ ID NO: 621978 - RNA, 19 nt, Homo sapiens
  misc_RNA (1)...(19): siRNA sense strand
ccacuguucugugcaauga

SEQ ID NO: 621979 - RNA, 19 nt, Homo sapiens
  misc_RNA (1)...(19): siRNA sense strand
ggauguuuccuaccuauau

SEQ ID NO: 621980 - RNA, 19 nt, Homo sapiens
  misc_RNA (1)...(19): siRNA sense strand
ggagcugccugccaaccuu

SEQ ID NO: 621981 - RNA, 19 nt, Homo sapiens
  misc_RNA (1)...(19): siRNA sense strand
caaagaggacugugagcaa

SEQ ID NO: 621982 - RNA, 19 nt, Homo sapiens
  misc_RNA (1)...(19): siRNA sense strand
ggacuucaggguuuaacaa

SEQ ID NO: 621983 - RNA, 19 nt, Homo sapiens
  misc_RNA (1)...(19): siRNA sense strand
ccaggaagcccauaaggau

SEQ ID NO: 621984 - RNA, 19 nt, Homo sapiens
  misc_RNA (1)...(19): siRNA sense strand
ggaagaaugccugcuguuc

SEQ ID NO: 621985 - RNA, 19 nt, Homo sapiens
  misc_RNA (1)...(19): siRNA sense strand
ccuacaaggucagcaacua

SEQ ID NO: 621986 - RNA, 19 nt, Homo sapiens
  misc_RNA (1)...(19): siRNA sense strand
aaagaggacugugagcaau

SEQ ID NO: 621987 - RNA, 19 nt, Homo sapiens
  misc_RNA (1)...(19): siRNA sense strand
aaugaaaucuggacucacu

SEQ ID NO: 621988 - RNA, 19 nt, Homo sapiens
  misc_RNA (1)...(19): siRNA sense strand
caaguugcaugagcagugu

SEQ ID NO: 621989 - RNA, 19 nt, Homo sapiens
  misc_RNA (1)...(19): siRNA sense strand
gcaaacggcauuucaucca

SEQ ID NO: 621990 - RNA, 19 nt, Homo sapiens
  misc_RNA (1)...(19): siRNA sense strand
cuucaggguuuaacaagug

SEQ ID NO: 621991 - RNA, 19 nt, Homo sapiens
  misc_RNA (1)...(19): siRNA sense strand
gccaaccuuuccauuucua

SEQ ID NO: 621992 - RNA, 19 nt, Homo sapiens
  misc_RNA (1)...(19): siRNA sense strand
ugucgacccuggaggaaga

SEQ ID NO: 621993 - RNA, 19 nt, Homo sapiens
  misc_RNA (1)...(19): siRNA sense strand
cugccaaccuuuccauuuc

SEQ ID NO: 621994 - RNA, 19 nt, Homo sapiens
  misc_RNA (1)...(19): siRNA sense strand
ggaagcccauaaggauguu

SEQ ID NO: 621995 - RNA, 19 nt, Homo sapiens
  misc_RNA (1)...(19): siRNA sense strand
gccaagcaccacaaggaaa

SEQ ID NO: 621996 - RNA, 19 nt, Homo sapiens
  misc_RNA (1)...(19): siRNA sense strand
acuguucugugcaaugaaa

SEQ ID NO: 621997 - RNA, 19 nt, Homo sapiens
  misc_RNA (1)...(19): siRNA sense strand
ggacucacuccuacaaggu

SEQ ID NO: 621998 - RNA, 19 nt, Homo sapiens
  misc_RNA (1)...(19): siRNA sense strand
gccaggaagcccauaagga

SEQ ID NO: 621999 - RNA, 19 nt, Homo sapiens
  misc_RNA (1)...(19): siRNA sense strand
ggagguggcgagguucuau

SEQ ID NO: 622000 - RNA, 19 nt, Homo sapiens
  misc_RNA (1)...(19): siRNA sense strand
gccuggccuuuccugcuua

SEQ ID NO: 622001 - RNA, 19 nt, Homo sapiens
  misc_RNA (1)...(19): siRNA sense strand
cuaccuauauagauucaac

SEQ ID NO: 622002 - RNA, 19 nt, Homo sapiens
  misc_RNA (1)...(19): siRNA sense strand
augaggagguggcgagguu

SEQ ID NO: 622003 - RNA, 19 nt, Homo sapiens
  misc_RNA (1)...(19): siRNA sense strand
gaacgccaagcaccacaag

SEQ ID NO: 622004 - RNA, 19 nt, Homo sapiens
  misc_RNA (1)...(19): siRNA sense strand
gagcugccugccaaccuuu

SEQ ID NO: 622005 - RNA, 19 nt, Homo sapiens
  misc_RNA (1)...(19): siRNA sense strand
gcucagacaaggauugcau

SEQ ID NO: 622006 - RNA, 19 nt, Homo sapiens
  misc_RNA (1)...(19): siRNA sense strand
ccgaggacaaguugcauga

SEQ ID NO: 622007 - RNA, 19 nt, Homo sapiens
  misc_RNA (1)...(19): siRNA sense strand
ccugccaaccuuuccauuu

SEQ ID NO: 622008 - RNA, 19 nt, Homo sapiens
  misc_RNA (1)...(19): siRNA sense strand
gcgcaaagagcggguacug

SEQ ID NO: 622009 - RNA, 19 nt, Homo sapiens
  misc_RNA (1)...(19): siRNA sense strand
gaacgugccccugugcaaa

SEQ ID NO: 622010 - RNA, 19 nt, Homo sapiens
  misc_RNA (1)...(19): siRNA sense strand
aagauugucgcaccuccua

SEQ ID NO: 622011 - RNA, 19 nt, Homo sapiens
  misc_RNA (1)...(19): siRNA sense strand
gggaggcucagacaaggau

SEQ ID NO: 622012 - RNA, 19 nt, Homo sapiens
  misc_RNA (1)...(19): siRNA sense strand
aaaucuggacucacuccua

SEQ ID NO: 622013 - RNA, 19 nt, Homo sapiens
  misc_RNA (1)...(19): siRNA sense strand
gcaagagcaacuggcacaa

SEQ ID NO: 622014 - RNA, 19 nt, Homo sapiens
  misc_RNA (1)...(19): siRNA sense strand
gagcgaugauucugacauu

SEQ ID NO: 622015 - RNA, 19 nt, Homo sapiens
  misc_RNA (1)...(19): siRNA sense strand
gaugauacagcacugauaa

SEQ ID NO: 622016 - RNA, 19 nt, Homo sapiens
  misc_RNA (1)...(19): siRNA sense strand
gaauacugcagcuuccuua

SEQ ID NO: 622017 - RNA, 19 nt, Homo sapiens
  misc_RNA (1)...(19): siRNA sense strand
gagagaaaccuguguugug

SEQ ID NO: 622018 - RNA, 19 nt, Homo sapiens
  misc_RNA (1)...(19): siRNA sense strand
gcuaucauacuggcuauua

SEQ ID NO: 622019 - RNA, 19 nt, Homo sapiens
  misc_RNA (1)...(19): siRNA sense strand
uaagcaugcucuaaagaau

SEQ ID NO: 622020 - RNA, 19 nt, Homo sapiens
  misc_RNA (1)...(19): siRNA sense strand
ucugugaaguagcuaauaa

SEQ ID NO: 622021 - RNA, 19 nt, Homo sapiens
  misc_RNA (1)...(19): siRNA sense strand
ggaaauagagaggagcaaa

SEQ ID NO: 622022 - RNA, 19 nt, Homo sapiens
  misc_RNA (1)...(19): siRNA sense strand
gaaaaugaaagccaaguuu

SEQ ID NO: 622023 - RNA, 19 nt, Homo sapiens
  misc_RNA (1)...(19): siRNA sense strand
ucagaagacgguugcauuu

SEQ ID NO: 622024 - RNA, 19 nt, Homo sapiens
  misc_RNA (1)...(19): siRNA sense strand
cagaagacgguugcauuua

SEQ ID NO: 622025 - RNA, 19 nt, Homo sapiens
  misc_RNA (1)...(19): siRNA sense strand
gcacaggccagagcgauga

SEQ ID NO: 622026 - RNA, 19 nt, Homo sapiens
  misc_RNA (1)...(19): siRNA sense strand
gcugaugcuuugggaagua

SEQ ID NO: 622027 - RNA, 19 nt, Homo sapiens
  misc_RNA (1)...(19): siRNA sense strand
ccaaaucugcuccauggaa

SEQ ID NO: 622028 - RNA, 19 nt, Homo sapiens
  misc_RNA (1)...(19): siRNA sense strand
ggaugauacagcacugaua

SEQ ID NO: 622029 - RNA, 19 nt, Homo sapiens
  misc_RNA (1)...(19): siRNA sense strand
gauaacaucaagcccaaau

SEQ ID NO: 622030 - RNA, 19 nt, Homo sapiens
  misc_RNA (1)...(19): siRNA sense strand
gcgaugauucugacauuug

SEQ ID NO: 622031 - RNA, 19 nt, Homo sapiens
  misc_RNA (1)...(19): siRNA sense strand
agaagacgguugcauuuac

SEQ ID NO: 622032 - RNA, 19 nt, Homo sapiens
  misc_RNA (1)...(19): siRNA sense strand
gguuuacacuggauaugga

SEQ ID NO: 622033 - RNA, 19 nt, Homo sapiens
  misc_RNA (1)...(19): siRNA sense strand
gcagcuuccuuacaacagu

SEQ ID NO: 622034 - RNA, 19 nt, Homo sapiens
  misc_RNA (1)...(19): siRNA sense strand
ugaugaugcugaugcuuug

SEQ ID NO: 622035 - RNA, 19 nt, Homo sapiens
  misc_RNA (1)...(19): siRNA sense strand
gaaaaccugcuaagaagaa

SEQ ID NO: 622036 - RNA, 19 nt, Homo sapiens
  misc_RNA (1)...(19): siRNA sense strand
aaacuucggguaaaccaaa

SEQ ID NO: 622037 - RNA, 19 nt, Homo sapiens
  misc_RNA (1)...(19): siRNA sense strand
aaagccaaguuucaacaga

SEQ ID NO: 622038 - RNA, 19 nt, Homo sapiens
  misc_RNA (1)...(19): siRNA sense strand
aaagaaaaccugcuaagaa

SEQ ID NO: 622039 - RNA, 19 nt, Homo sapiens
  misc_RNA (1)...(19): siRNA sense strand
ugggaaguauguuaauuuc

SEQ ID NO: 622040 - RNA, 19 nt, Homo sapiens
  misc_RNA (1)...(19): siRNA sense strand
uaacaucaagcccaaaucu

SEQ ID NO: 622041 - RNA, 19 nt, Homo sapiens
  misc_RNA (1)...(19): siRNA sense strand
uaagagagaaaccuguguu

SEQ ID NO: 622042 - RNA, 19 nt, Homo sapiens
  misc_RNA (1)...(19): siRNA sense strand
caacagaugaaagugagaa

SEQ ID NO: 622043 - RNA, 19 nt, Homo sapiens
  misc_RNA (1)...(19): siRNA sense strand
gaagacgguugcauuuacc

SEQ ID NO: 622044 - RNA, 19 nt, Homo sapiens
  misc_RNA (1)...(19): siRNA sense strand
uacacuggauauggaaaua

SEQ ID NO: 622045 - RNA, 19 nt, Homo sapiens
  misc_RNA (1)...(19): siRNA sense strand
uuaagcaugcucuaaagaa

SEQ ID NO: 622046 - RNA, 19 nt, Homo sapiens
  misc_RNA (1)...(19): siRNA sense strand
ggugacauuugugaaacuu

SEQ ID NO: 622047 - RNA, 19 nt, Homo sapiens
  misc_RNA (1)...(19): siRNA sense strand
uacugcagcuuccuuacaa

SEQ ID NO: 622048 - RNA, 19 nt, Homo sapiens
  misc_RNA (1)...(19): siRNA sense strand
ccucccauauguccagauu

SEQ ID NO: 622049 - RNA, 19 nt, Homo sapiens
  misc_RNA (1)...(19): siRNA sense strand
gaaauagagaggagcaaaa

SEQ ID NO: 622050 - RNA, 19 nt, Homo sapiens
  misc_RNA (1)...(19): siRNA sense strand
cacuggauauggaaauaga

SEQ ID NO: 622051 - RNA, 19 nt, Homo sapiens
  misc_RNA (1)...(19): siRNA sense strand
guccagauucucuugauga

SEQ ID NO: 622052 - RNA, 19 nt, Homo sapiens
  misc_RNA (1)...(19): siRNA sense strand
gucagaagacgguugcauu

SEQ ID NO: 622053 - RNA, 19 nt, Homo sapiens
  misc_RNA (1)...(19): siRNA sense strand
ucugacauuugggaugaua

SEQ ID NO: 622054 - RNA, 19 nt, Homo sapiens
  misc_RNA (1)...(19): siRNA sense strand
cgaugauucugacauuugg

SEQ ID NO: 622055 - RNA, 19 nt, Homo sapiens
  misc_RNA (1)...(19): siRNA sense strand
gaauaaaagccaaaagaag

SEQ ID NO: 622056 - RNA, 19 nt, Homo sapiens
  misc_RNA (1)...(19): siRNA sense strand
gcuuugggaaguauguuaa

SEQ ID NO: 622057 - RNA, 19 nt, Homo sapiens
  misc_RNA (1)...(19): siRNA sense strand
ucccauauguccagauucu

SEQ ID NO: 622058 - RNA, 19 nt, Homo sapiens
  misc_RNA (1)...(19): siRNA sense strand
aagccaaguuucaacagau

SEQ ID NO: 622059 - RNA, 19 nt, Homo sapiens
  misc_RNA (1)...(19): siRNA sense strand
aagaaaaccugcuaagaag

SEQ ID NO: 622060 - RNA, 19 nt, Homo sapiens
  misc_RNA (1)...(19): siRNA sense strand
gcauuuacccagcuaccau

SEQ ID NO: 622061 - RNA, 19 nt, Homo sapiens
  misc_RNA (1)...(19): siRNA sense strand
gaaacuucggguaaaccaa

SEQ ID NO: 622062 - RNA, 19 nt, Homo sapiens
  misc_RNA (1)...(19): siRNA sense strand
cuaucauacuggcuauuau

SEQ ID NO: 622063 - RNA, 19 nt, Homo sapiens
  misc_RNA (1)...(19): siRNA sense strand
cccaccaccucccauaugu

SEQ ID NO: 622064 - RNA, 19 nt, Homo sapiens
  misc_RNA (1)...(19): siRNA sense strand
gaaaguuggggacaaaugu

SEQ ID NO: 622065 - RNA, 19 nt, Homo sapiens
  misc_RNA (1)...(19): siRNA sense strand
aaccugcuaagaagaauaa

SEQ ID NO: 622066 - RNA, 19 nt, Homo sapiens
  misc_RNA (1)...(19): siRNA sense strand
uugaugaugcugaugcuuu

SEQ ID NO: 622067 - RNA, 19 nt, Homo sapiens
  misc_RNA (1)...(19): siRNA sense strand
auucugacauuugggauga

SEQ ID NO: 622068 - RNA, 19 nt, Homo sapiens
  misc_RNA (1)...(19): siRNA sense strand
ggaggauuccgugcuguuc

SEQ ID NO: 622069 - RNA, 19 nt, Homo sapiens
  misc_RNA (1)...(19): siRNA sense strand
ucauuuaagcaugcucuaa

SEQ ID NO: 622070 - RNA, 19 nt, Homo sapiens
  misc_RNA (1)...(19): siRNA sense strand
caaaaucuguccgaucuac

SEQ ID NO: 622071 - RNA, 19 nt, Homo sapiens
  misc_RNA (1)...(19): siRNA sense strand
aaaccugcuaagaagaaua

SEQ ID NO: 622072 - RNA, 19 nt, Homo sapiens
  misc_RNA (1)...(19): siRNA sense strand
gggaaguauguuaauuuca

SEQ ID NO: 622073 - RNA, 19 nt, Homo sapiens
  misc_RNA (1)...(19): siRNA sense strand
aaaucuguccgaucuacuu

SEQ ID NO: 622074 - RNA, 19 nt, Homo sapiens
  misc_RNA (1)...(19): siRNA sense strand
gguugcauuuacccagcua

SEQ ID NO: 622075 - RNA, 19 nt, Homo sapiens
  misc_RNA (1)...(19): siRNA sense strand
gagcgaugauucugacauu

SEQ ID NO: 622076 - RNA, 19 nt, Homo sapiens
  misc_RNA (1)...(19): siRNA sense strand
gaugauacagcacugauaa

SEQ ID NO: 622077 - RNA, 19 nt, Homo sapiens
  misc_RNA (1)...(19): siRNA sense strand
gaauacugcagcuuccuua

SEQ ID NO: 622078 - RNA, 19 nt, Homo sapiens
  misc_RNA (1)...(19): siRNA sense strand
gagagaaaccuguguugug

SEQ ID NO: 622079 - RNA, 19 nt, Homo sapiens
  misc_RNA (1)...(19): siRNA sense strand
gcuaucauacuggcuauua

SEQ ID NO: 622080 - RNA, 19 nt, Homo sapiens
  misc_RNA (1)...(19): siRNA sense strand
uaagcaugcucuaaagaau

SEQ ID NO: 622081 - RNA, 19 nt, Homo sapiens
  misc_RNA (1)...(19): siRNA sense strand
ucugugaaguagcuaauaa

SEQ ID NO: 622082 - RNA, 19 nt, Homo sapiens
  misc_RNA (1)...(19): siRNA sense strand
ggaaauagagaggagcaaa

SEQ ID NO: 622083 - RNA, 19 nt, Homo sapiens
  misc_RNA (1)...(19): siRNA sense strand
gaaaaugaaagccaaguuu

SEQ ID NO: 622084 - RNA, 19 nt, Homo sapiens
  misc_RNA (1)...(19): siRNA sense strand
ucagaagacgguugcauuu

SEQ ID NO: 622085 - RNA, 19 nt, Homo sapiens
  misc_RNA (1)...(19): siRNA sense strand
cagaagacgguugcauuua

SEQ ID NO: 622086 - RNA, 19 nt, Homo sapiens
  misc_RNA (1)...(19): siRNA sense strand
gcacaggccagagcgauga

SEQ ID NO: 622087 - RNA, 19 nt, Homo sapiens
  misc_RNA (1)...(19): siRNA sense strand
gcugaugcuuugggaagua

SEQ ID NO: 622088 - RNA, 19 nt, Homo sapiens
  misc_RNA (1)...(19): siRNA sense strand
ccaaaucugcuccauggaa

SEQ ID NO: 622089 - RNA, 19 nt, Homo sapiens
  misc_RNA (1)...(19): siRNA sense strand
ggaugauacagcacugaua

SEQ ID NO: 622090 - RNA, 19 nt, Homo sapiens
  misc_RNA (1)...(19): siRNA sense strand
gauaacaucaagcccaaau

SEQ ID NO: 622091 - RNA, 19 nt, Homo sapiens
  misc_RNA (1)...(19): siRNA sense strand
gcgaugauucugacauuug

SEQ ID NO: 622092 - RNA, 19 nt, Homo sapiens
  misc_RNA (1)...(19): siRNA sense strand
agaagacgguugcauuuac

SEQ ID NO: 622093 - RNA, 19 nt, Homo sapiens
  misc_RNA (1)...(19): siRNA sense strand
gguuuacacuggauaugga

SEQ ID NO: 622094 - RNA, 19 nt, Homo sapiens
  misc_RNA (1)...(19): siRNA sense strand
gcagcuuccuuacaacagu

SEQ ID NO: 622095 - RNA, 19 nt, Homo sapiens
  misc_RNA (1)...(19): siRNA sense strand
ugaugaugcugaugcuuug

SEQ ID NO: 622096 - RNA, 19 nt, Homo sapiens
  misc_RNA (1)...(19): siRNA sense strand
gaaaaccugcuaagaagaa

SEQ ID NO: 622097 - RNA, 19 nt, Homo sapiens
  misc_RNA (1)...(19): siRNA sense strand
aaacuucggguaaaccaaa

SEQ ID NO: 622098 - RNA, 19 nt, Homo sapiens
  misc_RNA (1)...(19): siRNA sense strand
aaagccaaguuucaacaga

SEQ ID NO: 622099 - RNA, 19 nt, Homo sapiens
  misc_RNA (1)...(19): siRNA sense strand
aaagaaaaccugcuaagaa

SEQ ID NO: 622100 - RNA, 19 nt, Homo sapiens
  misc_RNA (1)...(19): siRNA sense strand
ugggaaguauguuaauuuc

SEQ ID NO: 622101 - RNA, 19 nt, Homo sapiens
  misc_RNA (1)...(19): siRNA sense strand
uaacaucaagcccaaaucu

SEQ ID NO: 622102 - RNA, 19 nt, Homo sapiens
  misc_RNA (1)...(19): siRNA sense strand
uaagagagaaaccuguguu

SEQ ID NO: 622103 - RNA, 19 nt, Homo sapiens
  misc_RNA (1)...(19): siRNA sense strand
caacagaugaaagugagaa

SEQ ID NO: 622104 - RNA, 19 nt, Homo sapiens
  misc_RNA (1)...(19): siRNA sense strand
gaagacgguugcauuuacc

SEQ ID NO: 622105 - RNA, 19 nt, Homo sapiens
  misc_RNA (1)...(19): siRNA sense strand
uacacuggauauggaaaua

SEQ ID NO: 622106 - RNA, 19 nt, Homo sapiens
  misc_RNA (1)...(19): siRNA sense strand
uuaagcaugcucuaaagaa

SEQ ID NO: 622107 - RNA, 19 nt, Homo sapiens
  misc_RNA (1)...(19): siRNA sense strand
ggugacauuugugaaacuu

SEQ ID NO: 622108 - RNA, 19 nt, Homo sapiens
  misc_RNA (1)...(19): siRNA sense strand
uacugcagcuuccuuacaa

SEQ ID NO: 622109 - RNA, 19 nt, Homo sapiens
  misc_RNA (1)...(19): siRNA sense strand
ccucccauauguccagauu

SEQ ID NO: 622110 - RNA, 19 nt, Homo sapiens
  misc_RNA (1)...(19): siRNA sense strand
gaaauagagaggagcaaaa

SEQ ID NO: 622111 - RNA, 19 nt, Homo sapiens
  misc_RNA (1)...(19): siRNA sense strand
cacuggauauggaaauaga

SEQ ID NO: 622112 - RNA, 19 nt, Homo sapiens
  misc_RNA (1)...(19): siRNA sense strand
guccagauucucuugauga

SEQ ID NO: 622113 - RNA, 19 nt, Homo sapiens
  misc_RNA (1)...(19): siRNA sense strand
gucagaagacgguugcauu

SEQ ID NO: 622114 - RNA, 19 nt, Homo sapiens
  misc_RNA (1)...(19): siRNA sense strand
ucugacauuugggaugaua

SEQ ID NO: 622115 - RNA, 19 nt, Homo sapiens
  misc_RNA (1)...(19): siRNA sense strand
cgaugauucugacauuugg

SEQ ID NO: 622116 - RNA, 19 nt, Homo sapiens
  misc_RNA (1)...(19): siRNA sense strand
gaauaaaagccaaaagaag

SEQ ID NO: 622117 - RNA, 19 nt, Homo sapiens
  misc_RNA (1)...(19): siRNA sense strand
gcuuugggaaguauguuaa

SEQ ID NO: 622118 - RNA, 19 nt, Homo sapiens
  misc_RNA (1)...(19): siRNA sense strand
ucccauauguccagauucu

SEQ ID NO: 622119 - RNA, 19 nt, Homo sapiens
  misc_RNA (1)...(19): siRNA sense strand
aagccaaguuucaacagau

SEQ ID NO: 622120 - RNA, 19 nt, Homo sapiens
  misc_RNA (1)...(19): siRNA sense strand
aagaaaaccugcuaagaag

SEQ ID NO: 622121 - RNA, 19 nt, Homo sapiens
  misc_RNA (1)...(19): siRNA sense strand
gcauuuacccagcuaccau

SEQ ID NO: 622122 - RNA, 19 nt, Homo sapiens
  misc_RNA (1)...(19): siRNA sense strand
gaaacuucggguaaaccaa

SEQ ID NO: 622123 - RNA, 19 nt, Homo sapiens
  misc_RNA (1)...(19): siRNA sense strand
cuaucauacuggcuauuau

SEQ ID NO: 622124 - RNA, 19 nt, Homo sapiens
  misc_RNA (1)...(19): siRNA sense strand
cccaccaccucccauaugu

SEQ ID NO: 622125 - RNA, 19 nt, Homo sapiens
  misc_RNA (1)...(19): siRNA sense strand
gaaaguuggggacaaaugu

SEQ ID NO: 622126 - RNA, 19 nt, Homo sapiens
  misc_RNA (1)...(19): siRNA sense strand
aaccugcuaagaagaauaa

SEQ ID NO: 622127 - RNA, 19 nt, Homo sapiens
  misc_RNA (1)...(19): siRNA sense strand
uugaugaugcugaugcuuu

SEQ ID NO: 622128 - RNA, 19 nt, Homo sapiens
  misc_RNA (1)...(19): siRNA sense strand
auucugacauuugggauga

SEQ ID NO: 622129 - RNA, 19 nt, Homo sapiens
  misc_RNA (1)...(19): siRNA sense strand
ggaggauuccgugcuguuc

SEQ ID NO: 622130 - RNA, 19 nt, Homo sapiens
  misc_RNA (1)...(19): siRNA sense strand
ucauuuaagcaugcucuaa

SEQ ID NO: 622131 - RNA, 19 nt, Homo sapiens
  misc_RNA (1)...(19): siRNA sense strand
caaaaucuguccgaucuac

SEQ ID NO: 622132 - RNA, 19 nt, Homo sapiens
  misc_RNA (1)...(19): siRNA sense strand
aaaccugcuaagaagaaua

SEQ ID NO: 622133 - RNA, 19 nt, Homo sapiens
  misc_RNA (1)...(19): siRNA sense strand
gggaaguauguuaauuuca

SEQ ID NO: 622134 - RNA, 19 nt, Homo sapiens
  misc_RNA (1)...(19): siRNA sense strand
aaaucuguccgaucuacuu

SEQ ID NO: 622135 - RNA, 19 nt, Homo sapiens
  misc_RNA (1)...(19): siRNA sense strand
gguugcauuuacccagcua

SEQ ID NO: 622136 - RNA, 19 nt, Homo sapiens
  misc_RNA (1)...(19): siRNA sense strand
gagcgaugauucugacauu

SEQ ID NO: 622137 - RNA, 19 nt, Homo sapiens
  misc_RNA (1)...(19): siRNA sense strand
gaugauacagcacugauaa

SEQ ID NO: 622138 - RNA, 19 nt, Homo sapiens
  misc_RNA (1)...(19): siRNA sense strand
gaauacugcagcuuccuua

SEQ ID NO: 622139 - RNA, 19 nt, Homo sapiens
  misc_RNA (1)...(19): siRNA sense strand
gagagaaaccuguguugug

SEQ ID NO: 622140 - RNA, 19 nt, Homo sapiens
  misc_RNA (1)...(19): siRNA sense strand
gcuaucauacuggcuauua

SEQ ID NO: 622141 - RNA, 19 nt, Homo sapiens
  misc_RNA (1)...(19): siRNA sense strand
uaagcaugcucuaaagaau

SEQ ID NO: 622142 - RNA, 19 nt, Homo sapiens
  misc_RNA (1)...(19): siRNA sense strand
ucugugaaguagcuaauaa

SEQ ID NO: 622143 - RNA, 19 nt, Homo sapiens
  misc_RNA (1)...(19): siRNA sense strand
ggaaauagagaggagcaaa

SEQ ID NO: 622144 - RNA, 19 nt, Homo sapiens
  misc_RNA (1)...(19): siRNA sense strand
gaaaaugaaagccaaguuu

SEQ ID NO: 622145 - RNA, 19 nt, Homo sapiens
  misc_RNA (1)...(19): siRNA sense strand
ucagaagacgguugcauuu

SEQ ID NO: 622146 - RNA, 19 nt, Homo sapiens
  misc_RNA (1)...(19): siRNA sense strand
cagaagacgguugcauuua

SEQ ID NO: 622147 - RNA, 19 nt, Homo sapiens
  misc_RNA (1)...(19): siRNA sense strand
gcacaggccagagcgauga

SEQ ID NO: 622148 - RNA, 19 nt, Homo sapiens
  misc_RNA (1)...(19): siRNA sense strand
gcugaugcuuugggaagua

SEQ ID NO: 622149 - RNA, 19 nt, Homo sapiens
  misc_RNA (1)...(19): siRNA sense strand
ccaaaucugcuccauggaa

SEQ ID NO: 622150 - RNA, 19 nt, Homo sapiens
  misc_RNA (1)...(19): siRNA sense strand
ggaugauacagcacugaua

SEQ ID NO: 622151 - RNA, 19 nt, Homo sapiens
  misc_RNA (1)...(19): siRNA sense strand
gauaacaucaagcccaaau

SEQ ID NO: 622152 - RNA, 19 nt, Homo sapiens
  misc_RNA (1)...(19): siRNA sense strand
gcgaugauucugacauuug

SEQ ID NO: 622153 - RNA, 19 nt, Homo sapiens
  misc_RNA (1)...(19): siRNA sense strand
agaagacgguugcauuuac

SEQ ID NO: 622154 - RNA, 19 nt, Homo sapiens
  misc_RNA (1)...(19): siRNA sense strand
gguuuacacuggauaugga

SEQ ID NO: 622155 - RNA, 19 nt, Homo sapiens
  misc_RNA (1)...(19): siRNA sense strand
gcagcuuccuuacaacagu

SEQ ID NO: 622156 - RNA, 19 nt, Homo sapiens
  misc_RNA (1)...(19): siRNA sense strand
ugaugaugcugaugcuuug

SEQ ID NO: 622157 - RNA, 19 nt, Homo sapiens
  misc_RNA (1)...(19): siRNA sense strand
gaaaaccugcuaagaagaa

SEQ ID NO: 622158 - RNA, 19 nt, Homo sapiens
  misc_RNA (1)...(19): siRNA sense strand
aaacuucggguaaaccaaa

SEQ ID NO: 622159 - RNA, 19 nt, Homo sapiens
  misc_RNA (1)...(19): siRNA sense strand
aaagccaaguuucaacaga

SEQ ID NO: 622160 - RNA, 19 nt, Homo sapiens
  misc_RNA (1)...(19): siRNA sense strand
aaagaaaaccugcuaagaa

SEQ ID NO: 622161 - RNA, 19 nt, Homo sapiens
  misc_RNA (1)...(19): siRNA sense strand
ugggaaguauguuaauuuc

SEQ ID NO: 622162 - RNA, 19 nt, Homo sapiens
  misc_RNA (1)...(19): siRNA sense strand
uaacaucaagcccaaaucu

SEQ ID NO: 622163 - RNA, 19 nt, Homo sapiens
  misc_RNA (1)...(19): siRNA sense strand
uaagagagaaaccuguguu

SEQ ID NO: 622164 - RNA, 19 nt, Homo sapiens
  misc_RNA (1)...(19): siRNA sense strand
caacagaugaaagugagaa

SEQ ID NO: 622165 - RNA, 19 nt, Homo sapiens
  misc_RNA (1)...(19): siRNA sense strand
gaagacgguugcauuuacc

SEQ ID NO: 622166 - RNA, 19 nt, Homo sapiens
  misc_RNA (1)...(19): siRNA sense strand
uacacuggauauggaaaua

SEQ ID NO: 622167 - RNA, 19 nt, Homo sapiens
  misc_RNA (1)...(19): siRNA sense strand
uuaagcaugcucuaaagaa

SEQ ID NO: 622168 - RNA, 19 nt, Homo sapiens
  misc_RNA (1)...(19): siRNA sense strand
ggugacauuugugaaacuu

SEQ ID NO: 622169 - RNA, 19 nt, Homo sapiens
  misc_RNA (1)...(19): siRNA sense strand
uacugcagcuuccuuacaa

SEQ ID NO: 622170 - RNA, 19 nt, Homo sapiens
  misc_RNA (1)...(19): siRNA sense strand
ccucccauauguccagauu

SEQ ID NO: 622171 - RNA, 19 nt, Homo sapiens
  misc_RNA (1)...(19): siRNA sense strand
gaaauagagaggagcaaaa

SEQ ID NO: 622172 - RNA, 19 nt, Homo sapiens
  misc_RNA (1)...(19): siRNA sense strand
cacuggauauggaaauaga

SEQ ID NO: 622173 - RNA, 19 nt, Homo sapiens
  misc_RNA (1)...(19): siRNA sense strand
guccagauucucuugauga

SEQ ID NO: 622174 - RNA, 19 nt, Homo sapiens
  misc_RNA (1)...(19): siRNA sense strand
gucagaagacgguugcauu

SEQ ID NO: 622175 - RNA, 19 nt, Homo sapiens
  misc_RNA (1)...(19): siRNA sense strand
ucugacauuugggaugaua

SEQ ID NO: 622176 - RNA, 19 nt, Homo sapiens
  misc_RNA (1)...(19): siRNA sense strand
cgaugauucugacauuugg

SEQ ID NO: 622177 - RNA, 19 nt, Homo sapiens
  misc_RNA (1)...(19): siRNA sense strand
gaauaaaagccaaaagaag

SEQ ID NO: 622178 - RNA, 19 nt, Homo sapiens
  misc_RNA (1)...(19): siRNA sense strand
gcuuugggaaguauguuaa

SEQ ID NO: 622179 - RNA, 19 nt, Homo sapiens
  misc_RNA (1)...(19): siRNA sense strand
ucccauauguccagauucu

SEQ ID NO: 622180 - RNA, 19 nt, Homo sapiens
  misc_RNA (1)...(19): siRNA sense strand
aagccaaguuucaacagau

SEQ ID NO: 622181 - RNA, 19 nt, Homo sapiens
  misc_RNA (1)...(19): siRNA sense strand
aagaaaaccugcuaagaag

SEQ ID NO: 622182 - RNA, 19 nt, Homo sapiens
  misc_RNA (1)...(19): siRNA sense strand
gcauuuacccagcuaccau

SEQ ID NO: 622183 - RNA, 19 nt, Homo sapiens
  misc_RNA (1)...(19): siRNA sense strand
gaaacuucggguaaaccaa

SEQ ID NO: 622184 - RNA, 19 nt, Homo sapiens
  misc_RNA (1)...(19): siRNA sense strand
cuaucauacuggcuauuau

SEQ ID NO: 622185 - RNA, 19 nt, Homo sapiens
  misc_RNA (1)...(19): siRNA sense strand
cccaccaccucccauaugu

SEQ ID NO: 622186 - RNA, 19 nt, Homo sapiens
  misc_RNA (1)...(19): siRNA sense strand
gaaaguuggggacaaaugu

SEQ ID NO: 622187 - RNA, 19 nt, Homo sapiens
  misc_RNA (1)...(19): siRNA sense strand
aaccugcuaagaagaauaa

SEQ ID NO: 622188 - RNA, 19 nt, Homo sapiens
  misc_RNA (1)...(19): siRNA sense strand
uugaugaugcugaugcuuu

SEQ ID NO: 622189 - RNA, 19 nt, Homo sapiens
  misc_RNA (1)...(19): siRNA sense strand
auucugacauuugggauga

SEQ ID NO: 622190 - RNA, 19 nt, Homo sapiens
  misc_RNA (1)...(19): siRNA sense strand
ggaggauuccgugcuguuc

SEQ ID NO: 622191 - RNA, 19 nt, Homo sapiens
  misc_RNA (1)...(19): siRNA sense strand
ucauuuaagcaugcucuaa

SEQ ID NO: 622192 - RNA, 19 nt, Homo sapiens
  misc_RNA (1)...(19): siRNA sense strand
caaaaucuguccgaucuac

SEQ ID NO: 622193 - RNA, 19 nt, Homo sapiens
  misc_RNA (1)...(19): siRNA sense strand
aaaccugcuaagaagaaua

SEQ ID NO: 622194 - RNA, 19 nt, Homo sapiens
  misc_RNA (1)...(19): siRNA sense strand
gggaaguauguuaauuuca

SEQ ID NO: 622195 - RNA, 19 nt, Homo sapiens
  misc_RNA (1)...(19): siRNA sense strand
aaaucuguccgaucuacuu

SEQ ID NO: 622196 - RNA, 19 nt, Homo sapiens
  misc_RNA (1)...(19): siRNA sense strand
gguugcauuuacccagcua

SEQ ID NO: 622197 - RNA, 19 nt, Homo sapiens
  misc_RNA (1)...(19): siRNA sense strand
gagcgaugauucugacauu

SEQ ID NO: 622198 - RNA, 19 nt, Homo sapiens
  misc_RNA (1)...(19): siRNA sense strand
gaugauacagcacugauaa

SEQ ID NO: 622199 - RNA, 19 nt, Homo sapiens
  misc_RNA (1)...(19): siRNA sense strand
gaauacugcagcuuccuua

SEQ ID NO: 622200 - RNA, 19 nt, Homo sapiens
  misc_RNA (1)...(19): siRNA sense strand
gagagaaaccuguguugug

SEQ ID NO: 622201 - RNA, 19 nt, Homo sapiens
  misc_RNA (1)...(19): siRNA sense strand
gcuaucauacuggcuauua

SEQ ID NO: 622202 - RNA, 19 nt, Homo sapiens
  misc_RNA (1)...(19): siRNA sense strand
uaagcaugcucuaaagaau

SEQ ID NO: 622203 - RNA, 19 nt, Homo sapiens
  misc_RNA (1)...(19): siRNA sense strand
ucugugaaguagcuaauaa

SEQ ID NO: 622204 - RNA, 19 nt, Homo sapiens
  misc_RNA (1)...(19): siRNA sense strand
ggaaauagagaggagcaaa

SEQ ID NO: 622205 - RNA, 19 nt, Homo sapiens
  misc_RNA (1)...(19): siRNA sense strand
gaaaaugaaagccaaguuu

SEQ ID NO: 622206 - RNA, 19 nt, Homo sapiens
  misc_RNA (1)...(19): siRNA sense strand
ucagaagacgguugcauuu

SEQ ID NO: 622207 - RNA, 19 nt, Homo sapiens
  misc_RNA (1)...(19): siRNA sense strand
cagaagacgguugcauuua

SEQ ID NO: 622208 - RNA, 19 nt, Homo sapiens
  misc_RNA (1)...(19): siRNA sense strand
gcacaggccagagcgauga

SEQ ID NO: 622209 - RNA, 19 nt, Homo sapiens
  misc_RNA (1)...(19): siRNA sense strand
gcugaugcuuugggaagua

SEQ ID NO: 622210 - RNA, 19 nt, Homo sapiens
  misc_RNA (1)...(19): siRNA sense strand
ccaaaucugcuccauggaa

SEQ ID NO: 622211 - RNA, 19 nt, Homo sapiens
  misc_RNA (1)...(19): siRNA sense strand
ggaugauacagcacugaua

SEQ ID NO: 622212 - RNA, 19 nt, Homo sapiens
  misc_RNA (1)...(19): siRNA sense strand
gauaacaucaagcccaaau

SEQ ID NO: 622213 - RNA, 19 nt, Homo sapiens
  misc_RNA (1)...(19): siRNA sense strand
gcgaugauucugacauuug

SEQ ID NO: 622214 - RNA, 19 nt, Homo sapiens
  misc_RNA (1)...(19): siRNA sense strand
agaagacgguugcauuuac

SEQ ID NO: 622215 - RNA, 19 nt, Homo sapiens
  misc_RNA (1)...(19): siRNA sense strand
gguuuacacuggauaugga

SEQ ID NO: 622216 - RNA, 19 nt, Homo sapiens
  misc_RNA (1)...(19): siRNA sense strand
gcagcuuccuuacaacagu

SEQ ID NO: 622217 - RNA, 19 nt, Homo sapiens
  misc_RNA (1)...(19): siRNA sense strand
ugaugaugcugaugcuuug

SEQ ID NO: 622218 - RNA, 19 nt, Homo sapiens
  misc_RNA (1)...(19): siRNA sense strand
gaaaaccugcuaagaagaa

SEQ ID NO: 622219 - RNA, 19 nt, Homo sapiens
  misc_RNA (1)...(19): siRNA sense strand
aaacuucggguaaaccaaa

SEQ ID NO: 622220 - RNA, 19 nt, Homo sapiens
  misc_RNA (1)...(19): siRNA sense strand
aaagccaaguuucaacaga

SEQ ID NO: 622221 - RNA, 19 nt, Homo sapiens
  misc_RNA (1)...(19): siRNA sense strand
aaagaaaaccugcuaagaa

SEQ ID NO: 622222 - RNA, 19 nt, Homo sapiens
  misc_RNA (1)...(19): siRNA sense strand
ugggaaguauguuaauuuc

SEQ ID NO: 622223 - RNA, 19 nt, Homo sapiens
  misc_RNA (1)...(19): siRNA sense strand
uaacaucaagcccaaaucu

SEQ ID NO: 622224 - RNA, 19 nt, Homo sapiens
  misc_RNA (1)...(19): siRNA sense strand
uaagagagaaaccuguguu

SEQ ID NO: 622225 - RNA, 19 nt, Homo sapiens
  misc_RNA (1)...(19): siRNA sense strand
caacagaugaaagugagaa

SEQ ID NO: 622226 - RNA, 19 nt, Homo sapiens
  misc_RNA (1)...(19): siRNA sense strand
gaagacgguugcauuuacc

SEQ ID NO: 622227 - RNA, 19 nt, Homo sapiens
  misc_RNA (1)...(19): siRNA sense strand
uacacuggauauggaaaua

SEQ ID NO: 622228 - RNA, 19 nt, Homo sapiens
  misc_RNA (1)...(19): siRNA sense strand
uuaagcaugcucuaaagaa

SEQ ID NO: 622229 - RNA, 19 nt, Homo sapiens
  misc_RNA (1)...(19): siRNA sense strand
ggugacauuugugaaacuu

SEQ ID NO: 622230 - RNA, 19 nt, Homo sapiens
  misc_RNA (1)...(19): siRNA sense strand
uacugcagcuuccuuacaa

SEQ ID NO: 622231 - RNA, 19 nt, Homo sapiens
  misc_RNA (1)...(19): siRNA sense strand
ccucccauauguccagauu

SEQ ID NO: 622232 - RNA, 19 nt, Homo sapiens
  misc_RNA (1)...(19): siRNA sense strand
gaaauagagaggagcaaaa

SEQ ID NO: 622233 - RNA, 19 nt, Homo sapiens
  misc_RNA (1)...(19): siRNA sense strand
cacuggauauggaaauaga

SEQ ID NO: 622234 - RNA, 19 nt, Homo sapiens
  misc_RNA (1)...(19): siRNA sense strand
guccagauucucuugauga

SEQ ID NO: 622235 - RNA, 19 nt, Homo sapiens
  misc_RNA (1)...(19): siRNA sense strand
gucagaagacgguugcauu

SEQ ID NO: 622236 - RNA, 19 nt, Homo sapiens
  misc_RNA (1)...(19): siRNA sense strand
ucugacauuugggaugaua

SEQ ID NO: 622237 - RNA, 19 nt, Homo sapiens
  misc_RNA (1)...(19): siRNA sense strand
cgaugauucugacauuugg

SEQ ID NO: 622238 - RNA, 19 nt, Homo sapiens
  misc_RNA (1)...(19): siRNA sense strand
gaauaaaagccaaaagaag

SEQ ID NO: 622239 - RNA, 19 nt, Homo sapiens
  misc_RNA (1)...(19): siRNA sense strand
gcuuugggaaguauguuaa

SEQ ID NO: 622240 - RNA, 19 nt, Homo sapiens
  misc_RNA (1)...(19): siRNA sense strand
ucccauauguccagauucu

SEQ ID NO: 622241 - RNA, 19 nt, Homo sapiens
  misc_RNA (1)...(19): siRNA sense strand
aagccaaguuucaacagau

SEQ ID NO: 622242 - RNA, 19 nt, Homo sapiens
  misc_RNA (1)...(19): siRNA sense strand
aagaaaaccugcuaagaag

SEQ ID NO: 622243 - RNA, 19 nt, Homo sapiens
  misc_RNA (1)...(19): siRNA sense strand
gcauuuacccagcuaccau

SEQ ID NO: 622244 - RNA, 19 nt, Homo sapiens
  misc_RNA (1)...(19): siRNA sense strand
gaaacuucggguaaaccaa

SEQ ID NO: 622245 - RNA, 19 nt, Homo sapiens
  misc_RNA (1)...(19): siRNA sense strand
cuaucauacuggcuauuau

SEQ ID NO: 622246 - RNA, 19 nt, Homo sapiens
  misc_RNA (1)...(19): siRNA sense strand
cccaccaccucccauaugu

SEQ ID NO: 622247 - RNA, 19 nt, Homo sapiens
  misc_RNA (1)...(19): siRNA sense strand
gaaaguuggggacaaaugu

SEQ ID NO: 622248 - RNA, 19 nt, Homo sapiens
  misc_RNA (1)...(19): siRNA sense strand
aaccugcuaagaagaauaa

SEQ ID NO: 622249 - RNA, 19 nt, Homo sapiens
  misc_RNA (1)...(19): siRNA sense strand
uugaugaugcugaugcuuu

SEQ ID NO: 622250 - RNA, 19 nt, Homo sapiens
  misc_RNA (1)...(19): siRNA sense strand
auucugacauuugggauga

SEQ ID NO: 622251 - RNA, 19 nt, Homo sapiens
  misc_RNA (1)...(19): siRNA sense strand
ggaggauuccgugcuguuc

SEQ ID NO: 622252 - RNA, 19 nt, Homo sapiens
  misc_RNA (1)...(19): siRNA sense strand
ucauuuaagcaugcucuaa

SEQ ID NO: 622253 - RNA, 19 nt, Homo sapiens
  misc_RNA (1)...(19): siRNA sense strand
caaaaucuguccgaucuac

SEQ ID NO: 622254 - RNA, 19 nt, Homo sapiens
  misc_RNA (1)...(19): siRNA sense strand
aaaccugcuaagaagaaua

SEQ ID NO: 622255 - RNA, 19 nt, Homo sapiens
  misc_RNA (1)...(19): siRNA sense strand
gggaaguauguuaauuuca

SEQ ID NO: 622256 - RNA, 19 nt, Homo sapiens
  misc_RNA (1)...(19): siRNA sense strand
aaaucuguccgaucuacuu

SEQ ID NO: 622257 - RNA, 19 nt, Homo sapiens
  misc_RNA (1)...(19): siRNA sense strand
gguugcauuuacccagcua

SEQ ID NO: 622258 - RNA, 19 nt, Homo sapiens
  misc_RNA (1)...(19): siRNA sense strand
acacaaggaucucauaaua

SEQ ID NO: 622259 - RNA, 19 nt, Homo sapiens
  misc_RNA (1)...(19): siRNA sense strand
ccucuuagcuggcauuaua

SEQ ID NO: 622260 - RNA, 19 nt, Homo sapiens
  misc_RNA (1)...(19): siRNA sense strand
gaaccaagauaaauuagug

SEQ ID NO: 622261 - RNA, 19 nt, Homo sapiens
  misc_RNA (1)...(19): siRNA sense strand
ucagagaucucaguaauaa

SEQ ID NO: 622262 - RNA, 19 nt, Homo sapiens
  misc_RNA (1)...(19): siRNA sense strand
ggagaaccaagauaaauua

SEQ ID NO: 622263 - RNA, 19 nt, Homo sapiens
  misc_RNA (1)...(19): siRNA sense strand
caagaacgcugcagagaau

SEQ ID NO: 622264 - RNA, 19 nt, Homo sapiens
  misc_RNA (1)...(19): siRNA sense strand
gccaagauuugccuuauaa

SEQ ID NO: 622265 - RNA, 19 nt, Homo sapiens
  misc_RNA (1)...(19): siRNA sense strand
gagaagaacugucauuugc

SEQ ID NO: 622266 - RNA, 19 nt, Homo sapiens
  misc_RNA (1)...(19): siRNA sense strand
ccaaauauguacuucagaa

SEQ ID NO: 622267 - RNA, 19 nt, Homo sapiens
  misc_RNA (1)...(19): siRNA sense strand
gaaacaacguggauacaag

SEQ ID NO: 622268 - RNA, 19 nt, Homo sapiens
  misc_RNA (1)...(19): siRNA sense strand
gaagauauggaaugcagua

SEQ ID NO: 622269 - RNA, 19 nt, Homo sapiens
  misc_RNA (1)...(19): siRNA sense strand
ccaaauacuccuaucauaa

SEQ ID NO: 622270 - RNA, 19 nt, Homo sapiens
  misc_RNA (1)...(19): siRNA sense strand
caucagagaucucaguaau

SEQ ID NO: 622271 - RNA, 19 nt, Homo sapiens
  misc_RNA (1)...(19): siRNA sense strand
gcaguagguucccagauug

SEQ ID NO: 622272 - RNA, 19 nt, Homo sapiens
  misc_RNA (1)...(19): siRNA sense strand
guaauaaucccaugacuca

SEQ ID NO: 622273 - RNA, 19 nt, Homo sapiens
  misc_RNA (1)...(19): siRNA sense strand
acagaucacuccaggcaua

SEQ ID NO: 622274 - RNA, 19 nt, Homo sapiens
  misc_RNA (1)...(19): siRNA sense strand
ccugauggcucucauaguu

SEQ ID NO: 622275 - RNA, 19 nt, Homo sapiens
  misc_RNA (1)...(19): siRNA sense strand
caacucagcuggcuauggu

SEQ ID NO: 622276 - RNA, 19 nt, Homo sapiens
  misc_RNA (1)...(19): siRNA sense strand
gaagagaagaacugucauu

SEQ ID NO: 622277 - RNA, 19 nt, Homo sapiens
  misc_RNA (1)...(19): siRNA sense strand
gugaagcuauugagaagaa

SEQ ID NO: 622278 - RNA, 19 nt, Homo sapiens
  misc_RNA (1)...(19): siRNA sense strand
guucgaagcucauggagau

SEQ ID NO: 622279 - RNA, 19 nt, Homo sapiens
  misc_RNA (1)...(19): siRNA sense strand
uggauugucuucucucuuu

SEQ ID NO: 622280 - RNA, 19 nt, Homo sapiens
  misc_RNA (1)...(19): siRNA sense strand
cauaucagguuacucaaau

SEQ ID NO: 622281 - RNA, 19 nt, Homo sapiens
  misc_RNA (1)...(19): siRNA sense strand
ccuauuaccuugaggaugu

SEQ ID NO: 622282 - RNA, 19 nt, Homo sapiens
  misc_RNA (1)...(19): siRNA sense strand
aaacagaguucgaauugag

SEQ ID NO: 622283 - RNA, 19 nt, Homo sapiens
  misc_RNA (1)...(19): siRNA sense strand
ggcauuauaucccuaaaca

SEQ ID NO: 622284 - RNA, 19 nt, Homo sapiens
  misc_RNA (1)...(19): siRNA sense strand
gcaugaaucggguuauuga

SEQ ID NO: 622285 - RNA, 19 nt, Homo sapiens
  misc_RNA (1)...(19): siRNA sense strand
ucaccuccuuguccaaaua

SEQ ID NO: 622286 - RNA, 19 nt, Homo sapiens
  misc_RNA (1)...(19): siRNA sense strand
aaugaacagucacgacaua

SEQ ID NO: 622287 - RNA, 19 nt, Homo sapiens
  misc_RNA (1)...(19): siRNA sense strand
guugaugcauugagauauu

SEQ ID NO: 622288 - RNA, 19 nt, Homo sapiens
  misc_RNA (1)...(19): siRNA sense strand
ugauugaugucacaagauu

SEQ ID NO: 622289 - RNA, 19 nt, Homo sapiens
  misc_RNA (1)...(19): siRNA sense strand
ugaaucggguuauugaaga

SEQ ID NO: 622290 - RNA, 19 nt, Homo sapiens
  misc_RNA (1)...(19): siRNA sense strand
gacagcagcuuuggcaaug

SEQ ID NO: 622291 - RNA, 19 nt, Homo sapiens
  misc_RNA (1)...(19): siRNA sense strand
gaaucggguuauugaagaa

SEQ ID NO: 622292 - RNA, 19 nt, Homo sapiens
  misc_RNA (1)...(19): siRNA sense strand
ggcagcaugucacgacuaa

SEQ ID NO: 622293 - RNA, 19 nt, Homo sapiens
  misc_RNA (1)...(19): siRNA sense strand
caaauacuccuaucauaag

SEQ ID NO: 622294 - RNA, 19 nt, Homo sapiens
  misc_RNA (1)...(19): siRNA sense strand
uccaaauacuccuaucaua

SEQ ID NO: 622295 - RNA, 19 nt, Homo sapiens
  misc_RNA (1)...(19): siRNA sense strand
guaauuggaugcuacuuuu

SEQ ID NO: 622296 - RNA, 19 nt, Homo sapiens
  misc_RNA (1)...(19): siRNA sense strand
cuaaacagaguucgaauug

SEQ ID NO: 622297 - RNA, 19 nt, Homo sapiens
  misc_RNA (1)...(19): siRNA sense strand
gauauggaaugcaguaggu

SEQ ID NO: 622298 - RNA, 19 nt, Homo sapiens
  misc_RNA (1)...(19): siRNA sense strand
ugccuaaucuucugaauca

SEQ ID NO: 622299 - RNA, 19 nt, Homo sapiens
  misc_RNA (1)...(19): siRNA sense strand
gaagauggaaccagugcuu

SEQ ID NO: 622300 - RNA, 19 nt, Homo sapiens
  misc_RNA (1)...(19): siRNA sense strand
uaugguggaugaucaaaga

SEQ ID NO: 622301 - RNA, 19 nt, Homo sapiens
  misc_RNA (1)...(19): siRNA sense strand
gcauauaggugggcacagu

SEQ ID NO: 622302 - RNA, 19 nt, Homo sapiens
  misc_RNA (1)...(19): siRNA sense strand
ccugaaaggccuauuauau

SEQ ID NO: 622303 - RNA, 19 nt, Homo sapiens
  misc_RNA (1)...(19): siRNA sense strand
gcacucuacgcuccuauuu

SEQ ID NO: 622304 - RNA, 19 nt, Homo sapiens
  misc_RNA (1)...(19): siRNA sense strand
ggaaacaacguggauacaa

SEQ ID NO: 622305 - RNA, 19 nt, Homo sapiens
  misc_RNA (1)...(19): siRNA sense strand
gcagagagacuaugguuuu

SEQ ID NO: 622306 - RNA, 19 nt, Homo sapiens
  misc_RNA (1)...(19): siRNA sense strand
gaaugagagccgacaggua

SEQ ID NO: 622307 - RNA, 19 nt, Homo sapiens
  misc_RNA (1)...(19): siRNA sense strand
cagcauucuuuaucucgua

SEQ ID NO: 622308 - RNA, 19 nt, Homo sapiens
  misc_RNA (1)...(19): siRNA sense strand
gaaggugacaauauuagug

SEQ ID NO: 622309 - RNA, 19 nt, Homo sapiens
  misc_RNA (1)...(19): siRNA sense strand
guagugaagcuauugagaa

SEQ ID NO: 622310 - RNA, 19 nt, Homo sapiens
  misc_RNA (1)...(19): siRNA sense strand
cugaaaggccuauuauauu

SEQ ID NO: 622311 - RNA, 19 nt, Homo sapiens
  misc_RNA (1)...(19): siRNA sense strand
uauaaggcuuccacaguga

SEQ ID NO: 622312 - RNA, 19 nt, Homo sapiens
  misc_RNA (1)...(19): siRNA sense strand
ccauguccauaucagguua

SEQ ID NO: 622313 - RNA, 19 nt, Homo sapiens
  misc_RNA (1)...(19): siRNA sense strand
uaaacagaguucgaauuga

SEQ ID NO: 622314 - RNA, 19 nt, Homo sapiens
  misc_RNA (1)...(19): siRNA sense strand
ggcaguguaugguggguaa

SEQ ID NO: 622315 - RNA, 19 nt, Homo sapiens
  misc_RNA (1)...(19): siRNA sense strand
cagcaugaaucggguuauu

SEQ ID NO: 622316 - RNA, 19 nt, Homo sapiens
  misc_RNA (1)...(19): siRNA sense strand
gaacagucacgacauagca

SEQ ID NO: 622317 - RNA, 19 nt, Homo sapiens
  misc_RNA (1)...(19): siRNA sense strand
gguacacgcccugcaguua

SEQ ID NO: 622318 - RNA, 19 nt, Homo sapiens
  misc_RNA (1)...(19): siRNA sense strand
uugauucucuuucugauga

SEQ ID NO: 622319 - RNA, 19 nt, Homo sapiens
  misc_RNA (1)...(19): siRNA sense strand
gaggaugugccaagauuug

SEQ ID NO: 622320 - RNA, 19 nt, Homo sapiens
  misc_RNA (1)...(19): siRNA sense strand
cauuauaucccuaaacaga

SEQ ID NO: 622321 - RNA, 19 nt, Homo sapiens
  misc_RNA (1)...(19): siRNA sense strand
cagaagagaagaacuguca

SEQ ID NO: 622322 - RNA, 19 nt, Homo sapiens
  misc_RNA (1)...(19): siRNA sense strand
gaucacuccaggcauagua

SEQ ID NO: 622323 - RNA, 19 nt, Homo sapiens
  misc_RNA (1)...(19): siRNA sense strand
ugcaguagguucccagauu

SEQ ID NO: 622324 - RNA, 19 nt, Homo sapiens
  misc_RNA (1)...(19): siRNA sense strand
caaagaagcaaagcaggaa

SEQ ID NO: 622325 - RNA, 19 nt, Homo sapiens
  misc_RNA (1)...(19): siRNA sense strand
gcaugugcgugauuguuca

SEQ ID NO: 622326 - RNA, 19 nt, Homo sapiens
  misc_RNA (1)...(19): siRNA sense strand
gcuaugacuuggauugucu

SEQ ID NO: 622327 - RNA, 19 nt, Homo sapiens
  misc_RNA (1)...(19): siRNA sense strand
cacaaggaucucauaauaa

SEQ ID NO: 622328 - RNA, 19 nt, Homo sapiens
  misc_RNA (1)...(19): siRNA sense strand
acucuacgcuccuauuugu

SEQ ID NO: 622329 - RNA, 19 nt, Homo sapiens
  misc_RNA (1)...(19): siRNA sense strand
aaagagauagugaaugaga

SEQ ID NO: 622330 - RNA, 19 nt, Homo sapiens
  misc_RNA (1)...(19): siRNA sense strand
uagcagcugugccaaagug

SEQ ID NO: 622331 - RNA, 19 nt, Homo sapiens
  misc_RNA (1)...(19): siRNA sense strand
uacuauggcuggcagugua

SEQ ID NO: 622332 - RNA, 19 nt, Homo sapiens
  misc_RNA (1)...(19): siRNA sense strand
cuacgauguugaugcauug

SEQ ID NO: 622333 - RNA, 19 nt, Homo sapiens
  misc_RNA (1)...(19): siRNA sense strand
gucauuugcucgcuauuuc

SEQ ID NO: 622334 - RNA, 19 nt, Homo sapiens
  misc_RNA (1)...(19): siRNA sense strand
ugccaagauuugccuuaua

SEQ ID NO: 622335 - RNA, 19 nt, Homo sapiens
  misc_RNA (1)...(19): siRNA sense strand
gaaaaggagaaccaagaua

SEQ ID NO: 622336 - RNA, 19 nt, Homo sapiens
  misc_RNA (1)...(19): siRNA sense strand
caauauuaguggcgugugu

SEQ ID NO: 622337 - RNA, 19 nt, Homo sapiens
  misc_RNA (1)...(19): siRNA sense strand
guaugguggguaauucuua

SEQ ID NO: 622338 - RNA, 19 nt, Homo sapiens
  misc_RNA (1)...(19): siRNA sense strand
cuacaugaugguauccuua

SEQ ID NO: 622339 - RNA, 19 nt, Homo sapiens
  misc_RNA (1)...(19): siRNA sense strand
uggcauucccucuguauuu

SEQ ID NO: 622340 - RNA, 19 nt, Homo sapiens
  misc_RNA (1)...(19): siRNA sense strand
gcauugagauauuuuguuc

SEQ ID NO: 622341 - RNA, 19 nt, Homo sapiens
  misc_RNA (1)...(19): siRNA sense strand
gcuccuauuuguauggaau

SEQ ID NO: 622342 - RNA, 19 nt, Homo sapiens
  misc_RNA (1)...(19): siRNA sense strand
ggaagcauccacagcaaag

SEQ ID NO: 622343 - RNA, 19 nt, Homo sapiens
  misc_RNA (1)...(19): siRNA sense strand
ugacuuggauugucuucuc

SEQ ID NO: 622344 - RNA, 19 nt, Homo sapiens
  misc_RNA (1)...(19): siRNA sense strand
ugacacaaggaucucauaa

SEQ ID NO: 622345 - RNA, 19 nt, Homo sapiens
  misc_RNA (1)...(19): siRNA sense strand
caugaugguauccuuaauu

SEQ ID NO: 622346 - RNA, 19 nt, Homo sapiens
  misc_RNA (1)...(19): siRNA sense strand
uugaggaugugccaagauu

SEQ ID NO: 622347 - RNA, 19 nt, Homo sapiens
  misc_RNA (1)...(19): siRNA sense strand
aaacaacguggauacaaga

SEQ ID NO: 622348 - RNA, 19 nt, Homo sapiens
  misc_RNA (1)...(19): siRNA sense strand
aaaggagaaccaagauaaa

SEQ ID NO: 622349 - RNA, 19 nt, Homo sapiens
  misc_RNA (1)...(19): siRNA sense strand
cgauguugaugcauugaga

SEQ ID NO: 622350 - RNA, 19 nt, Homo sapiens
  misc_RNA (1)...(19): siRNA sense strand
cugcagagaauaucacauu

SEQ ID NO: 622351 - RNA, 19 nt, Homo sapiens
  misc_RNA (1)...(19): siRNA sense strand
auacuaccuucaugccuaa

SEQ ID NO: 622352 - RNA, 19 nt, Homo sapiens
  misc_RNA (1)...(19): siRNA sense strand
caggaagcauccacagcaa

SEQ ID NO: 622353 - RNA, 19 nt, Homo sapiens
  misc_RNA (1)...(19): siRNA sense strand
gcccuugacuguguucaug

SEQ ID NO: 622354 - RNA, 19 nt, Homo sapiens
  misc_RNA (1)...(19): siRNA sense strand
ucuacgauguugaugcauu

SEQ ID NO: 622355 - RNA, 19 nt, Homo sapiens
  misc_RNA (1)...(19): siRNA sense strand
uagugaagcuauugagaag

SEQ ID NO: 622356 - RNA, 19 nt, Homo sapiens
  misc_RNA (1)...(19): siRNA sense strand
ggauuguucucgggauuuc

SEQ ID NO: 622357 - RNA, 19 nt, Homo sapiens
  misc_RNA (1)...(19): siRNA sense strand
uauccugaaaggccuauua

SEQ ID NO: 622358 - RNA, 19 nt, Homo sapiens
  misc_RNA (1)...(19): siRNA sense strand
gaacaaagcagaagacuua

SEQ ID NO: 622359 - RNA, 19 nt, Homo sapiens
  misc_RNA (1)...(19): siRNA sense strand
gcaguuugcucuugaagua

SEQ ID NO: 622360 - RNA, 19 nt, Homo sapiens
  misc_RNA (1)...(19): siRNA sense strand
gaacauacauggaagaucu

SEQ ID NO: 622361 - RNA, 19 nt, Homo sapiens
  misc_RNA (1)...(19): siRNA sense strand
aagcugaccuggcgaauua

SEQ ID NO: 622362 - RNA, 19 nt, Homo sapiens
  misc_RNA (1)...(19): siRNA sense strand
caaagcagaagacuuauua

SEQ ID NO: 622363 - RNA, 19 nt, Homo sapiens
  misc_RNA (1)...(19): siRNA sense strand
gaaagugaauugccaggaa

SEQ ID NO: 622364 - RNA, 19 nt, Homo sapiens
  misc_RNA (1)...(19): siRNA sense strand
ccaagaaguucaagaagaa

SEQ ID NO: 622365 - RNA, 19 nt, Homo sapiens
  misc_RNA (1)...(19): siRNA sense strand
gaaaggaaaugcucuucug

SEQ ID NO: 622366 - RNA, 19 nt, Homo sapiens
  misc_RNA (1)...(19): siRNA sense strand
ccaaugaucuacuggauga

SEQ ID NO: 622367 - RNA, 19 nt, Homo sapiens
  misc_RNA (1)...(19): siRNA sense strand
gagaaucagccaaguguua

SEQ ID NO: 622368 - RNA, 19 nt, Homo sapiens
  misc_RNA (1)...(19): siRNA sense strand
aaauaaggcuucucaaaga

SEQ ID NO: 622369 - RNA, 19 nt, Homo sapiens
  misc_RNA (1)...(19): siRNA sense strand
gaacuggcaggucacauua

SEQ ID NO: 622370 - RNA, 19 nt, Homo sapiens
  misc_RNA (1)...(19): siRNA sense strand
agacauggaugacuuuaaa

SEQ ID NO: 622371 - RNA, 19 nt, Homo sapiens
  misc_RNA (1)...(19): siRNA sense strand
gaaauaaggcuucucaaag

SEQ ID NO: 622372 - RNA, 19 nt, Homo sapiens
  misc_RNA (1)...(19): siRNA sense strand
gcaaagcauucuucggauu

SEQ ID NO: 622373 - RNA, 19 nt, Homo sapiens
  misc_RNA (1)...(19): siRNA sense strand
gauugaguguacagaauua

SEQ ID NO: 622374 - RNA, 19 nt, Homo sapiens
  misc_RNA (1)...(19): siRNA sense strand
ggaagcacuuaguauauga

SEQ ID NO: 622375 - RNA, 19 nt, Homo sapiens
  misc_RNA (1)...(19): siRNA sense strand
caaagaggaagauucaaua

SEQ ID NO: 622376 - RNA, 19 nt, Homo sapiens
  misc_RNA (1)...(19): siRNA sense strand
gaaaugcucuucugaucca

SEQ ID NO: 622377 - RNA, 19 nt, Homo sapiens
  misc_RNA (1)...(19): siRNA sense strand
gaaagcagacuccauaaca

SEQ ID NO: 622378 - RNA, 19 nt, Homo sapiens
  misc_RNA (1)...(19): siRNA sense strand
gaaagauacccaggaauuu

SEQ ID NO: 622379 - RNA, 19 nt, Homo sapiens
  misc_RNA (1)...(19): siRNA sense strand
caguggaucucaagacaua

SEQ ID NO: 622380 - RNA, 19 nt, Homo sapiens
  misc_RNA (1)...(19): siRNA sense strand
caaggaauaugaugccuau

SEQ ID NO: 622381 - RNA, 19 nt, Homo sapiens
  misc_RNA (1)...(19): siRNA sense strand
gaaagagaccugauuccaa

SEQ ID NO: 622382 - RNA, 19 nt, Homo sapiens
  misc_RNA (1)...(19): siRNA sense strand
gcacuuaguauaugaaaug

SEQ ID NO: 622383 - RNA, 19 nt, Homo sapiens
  misc_RNA (1)...(19): siRNA sense strand
gcacugggcucaggcuuau

SEQ ID NO: 622384 - RNA, 19 nt, Homo sapiens
  misc_RNA (1)...(19): siRNA sense strand
agaagaagauggaggaaau

SEQ ID NO: 622385 - RNA, 19 nt, Homo sapiens
  misc_RNA (1)...(19): siRNA sense strand
gcagaagacuuauuaucgu

SEQ ID NO: 622386 - RNA, 19 nt, Homo sapiens
  misc_RNA (1)...(19): siRNA sense strand
gagcaaagaggaagauuca

SEQ ID NO: 622387 - RNA, 19 nt, Homo sapiens
  misc_RNA (1)...(19): siRNA sense strand
gcaaagaggaagauucaau

SEQ ID NO: 622388 - RNA, 19 nt, Homo sapiens
  misc_RNA (1)...(19): siRNA sense strand
ggagaagcauaauaauaca

SEQ ID NO: 622389 - RNA, 19 nt, Homo sapiens
  misc_RNA (1)...(19): siRNA sense strand
cauggaagaucucacaaga

SEQ ID NO: 622390 - RNA, 19 nt, Homo sapiens
  misc_RNA (1)...(19): siRNA sense strand
acgaacaacugaauugaaa

SEQ ID NO: 622391 - RNA, 19 nt, Homo sapiens
  misc_RNA (1)...(19): siRNA sense strand
ugaaagauacccaggaauu

SEQ ID NO: 622392 - RNA, 19 nt, Homo sapiens
  misc_RNA (1)...(19): siRNA sense strand
gcaaccaccauacuuauug

SEQ ID NO: 622393 - RNA, 19 nt, Homo sapiens
  misc_RNA (1)...(19): siRNA sense strand
ugaauuggcacucaucuuu

SEQ ID NO: 622394 - RNA, 19 nt, Homo sapiens
  misc_RNA (1)...(19): siRNA sense strand
cauuagagaaggugaaaua

SEQ ID NO: 622395 - RNA, 19 nt, Homo sapiens
  misc_RNA (1)...(19): siRNA sense strand
aauaacacccugaaagaua

SEQ ID NO: 622396 - RNA, 19 nt, Homo sapiens
  misc_RNA (1)...(19): siRNA sense strand
gaaguugaauuggcacuca

SEQ ID NO: 622397 - RNA, 19 nt, Homo sapiens
  misc_RNA (1)...(19): siRNA sense strand
gcaugaaggugucaauguc

SEQ ID NO: 622398 - RNA, 19 nt, Homo sapiens
  misc_RNA (1)...(19): siRNA sense strand
ccaagauacuuuagacugu

SEQ ID NO: 622399 - RNA, 19 nt, Homo sapiens
  misc_RNA (1)...(19): siRNA sense strand
gaagauggaggaaauuaca

SEQ ID NO: 622400 - RNA, 19 nt, Homo sapiens
  misc_RNA (1)...(19): siRNA sense strand
agaggaagauucaauaugg

SEQ ID NO: 622401 - RNA, 19 nt, Homo sapiens
  misc_RNA (1)...(19): siRNA sense strand
aauuauaccugccauguug

SEQ ID NO: 622402 - RNA, 19 nt, Homo sapiens
  misc_RNA (1)...(19): siRNA sense strand
ugaaauaaggcuucucaaa

SEQ ID NO: 622403 - RNA, 19 nt, Homo sapiens
  misc_RNA (1)...(19): siRNA sense strand
gaagauggugucaaagaga

SEQ ID NO: 622404 - RNA, 19 nt, Homo sapiens
  misc_RNA (1)...(19): siRNA sense strand
ggaccaagauacuuuagac

SEQ ID NO: 622405 - RNA, 19 nt, Homo sapiens
  misc_RNA (1)...(19): siRNA sense strand
guggagaagcauaauaaua

SEQ ID NO: 622406 - RNA, 19 nt, Homo sapiens
  misc_RNA (1)...(19): siRNA sense strand
aaaccgaaauggacggaaa

SEQ ID NO: 622407 - RNA, 19 nt, Homo sapiens
  misc_RNA (1)...(19): siRNA sense strand
gauccaagaaguucaagaa

SEQ ID NO: 622408 - RNA, 19 nt, Homo sapiens
  misc_RNA (1)...(19): siRNA sense strand
gaacaacugaauugaaagu

SEQ ID NO: 622409 - RNA, 19 nt, Homo sapiens
  misc_RNA (1)...(19): siRNA sense strand
cgaaauggacggaaacaug

SEQ ID NO: 622410 - RNA, 19 nt, Homo sapiens
  misc_RNA (1)...(19): siRNA sense strand
uagagaaggugaaauaagg

SEQ ID NO: 622411 - RNA, 19 nt, Homo sapiens
  misc_RNA (1)...(19): siRNA sense strand
cuacaacauugaauugaug

SEQ ID NO: 622412 - RNA, 19 nt, Homo sapiens
  misc_RNA (1)...(19): siRNA sense strand
ggacagcuaccccuuaaua

SEQ ID NO: 622413 - RNA, 19 nt, Homo sapiens
  misc_RNA (1)...(19): siRNA sense strand
aaacuucugucccugauca

SEQ ID NO: 622414 - RNA, 19 nt, Homo sapiens
  misc_RNA (1)...(19): siRNA sense strand
gagcugaugaaacuaauga

SEQ ID NO: 622415 - RNA, 19 nt, Homo sapiens
  misc_RNA (1)...(19): siRNA sense strand
gcuagucaguggagaaauc

SEQ ID NO: 622416 - RNA, 19 nt, Homo sapiens
  misc_RNA (1)...(19): siRNA sense strand
gaauuccacccuucagauu

SEQ ID NO: 622417 - RNA, 19 nt, Homo sapiens
  misc_RNA (1)...(19): siRNA sense strand
aggcugaucucccugaauu

SEQ ID NO: 622418 - RNA, 19 nt, Homo sapiens
  misc_RNA (1)...(19): siRNA sense strand
ugaaaugcccaucaagaaa

SEQ ID NO: 622419 - RNA, 19 nt, Homo sapiens
  misc_RNA (1)...(19): siRNA sense strand
gcuacaacauugaauugau

SEQ ID NO: 622420 - RNA, 19 nt, Homo sapiens
  misc_RNA (1)...(19): siRNA sense strand
cgagugaaaugugcccuuu

SEQ ID NO: 622421 - RNA, 19 nt, Homo sapiens
  misc_RNA (1)...(19): siRNA sense strand
uauaugaaaugcccaucaa

SEQ ID NO: 622422 - RNA, 19 nt, Homo sapiens
  misc_RNA (1)...(19): siRNA sense strand
ggaggaaauuacacaugug

SEQ ID NO: 622423 - RNA, 19 nt, Homo sapiens
  misc_RNA (1)...(19): siRNA sense strand
gaauuucacaggaacaguu

SEQ ID NO: 622424 - RNA, 19 nt, Homo sapiens
  misc_RNA (1)...(19): siRNA sense strand
ggaauaugaugccuaucuc

SEQ ID NO: 622425 - RNA, 19 nt, Homo sapiens
  misc_RNA (1)...(19): siRNA sense strand
ggagaaaaguuuauugaag

SEQ ID NO: 622426 - RNA, 19 nt, Homo sapiens
  misc_RNA (1)...(19): siRNA sense strand
cagcaggauccgcuauuua

SEQ ID NO: 622427 - RNA, 19 nt, Homo sapiens
  misc_RNA (1)...(19): siRNA sense strand
ugacaauccugaagaagag

SEQ ID NO: 622428 - RNA, 19 nt, Homo sapiens
  misc_RNA (1)...(19): siRNA sense strand
ggaagauucaauaugguuu

SEQ ID NO: 622429 - RNA, 19 nt, Homo sapiens
  misc_RNA (1)...(19): siRNA sense strand
gcagagguuauaaacauga

SEQ ID NO: 622430 - RNA, 19 nt, Homo sapiens
  misc_RNA (1)...(19): siRNA sense strand
ggacuccgcagaacaagga

SEQ ID NO: 622431 - RNA, 19 nt, Homo sapiens
  misc_RNA (1)...(19): siRNA sense strand
gaggaaauuacacauguga

SEQ ID NO: 622432 - RNA, 19 nt, Homo sapiens
  misc_RNA (1)...(19): siRNA sense strand
gaagaagauggaggaaauu

SEQ ID NO: 622433 - RNA, 19 nt, Homo sapiens
  misc_RNA (1)...(19): siRNA sense strand
gauguugugugguauaagg

SEQ ID NO: 622434 - RNA, 19 nt, Homo sapiens
  misc_RNA (1)...(19): siRNA sense strand
caaccaccauacuuauugu

SEQ ID NO: 622435 - RNA, 19 nt, Homo sapiens
  misc_RNA (1)...(19): siRNA sense strand
gaauuauaccugccauguu

SEQ ID NO: 622436 - RNA, 19 nt, Homo sapiens
  misc_RNA (1)...(19): siRNA sense strand
gaaucagccaaguguuaua

SEQ ID NO: 622437 - RNA, 19 nt, Homo sapiens
  misc_RNA (1)...(19): siRNA sense strand
gaauugaaaguuacagcuu

SEQ ID NO: 622438 - RNA, 19 nt, Homo sapiens
  misc_RNA (1)...(19): siRNA sense strand
uccaagaaguucaagaaga

SEQ ID NO: 622439 - RNA, 19 nt, Homo sapiens
  misc_RNA (1)...(19): siRNA sense strand
gaauuggcacucaucuuug

SEQ ID NO: 622440 - RNA, 19 nt, Homo sapiens
  misc_RNA (1)...(19): siRNA sense strand
guucuuugcugccuuuauc

SEQ ID NO: 622441 - RNA, 19 nt, Homo sapiens
  misc_RNA (1)...(19): siRNA sense strand
uuaauaacacccugaaaga

SEQ ID NO: 622442 - RNA, 19 nt, Homo sapiens
  misc_RNA (1)...(19): siRNA sense strand
uugcagagguuauaaacau

SEQ ID NO: 622443 - RNA, 19 nt, Homo sapiens
  misc_RNA (1)...(19): siRNA sense strand
gaaaugcccaucaagaaaa

SEQ ID NO: 622444 - RNA, 19 nt, Homo sapiens
  misc_RNA (1)...(19): siRNA sense strand
uggaggaaauuacacaugu

SEQ ID NO: 622445 - RNA, 19 nt, Homo sapiens
  misc_RNA (1)...(19): siRNA sense strand
cgugcuaacuccagacuau

SEQ ID NO: 622446 - RNA, 19 nt, Homo sapiens
  misc_RNA (1)...(19): siRNA sense strand
gaugaaaggagaaaaguuu

SEQ ID NO: 622447 - RNA, 19 nt, Homo sapiens
  misc_RNA (1)...(19): siRNA sense strand
ggcucaggcuuauguggua

SEQ ID NO: 622448 - RNA, 19 nt, Homo sapiens
  misc_RNA (1)...(19): siRNA sense strand
gaaccaguccgagugaaau

SEQ ID NO: 622449 - RNA, 19 nt, Homo sapiens
  misc_RNA (1)...(19): siRNA sense strand
gaauugaugcucuucuaca

SEQ ID NO: 622450 - RNA, 19 nt, Homo sapiens
  misc_RNA (1)...(19): siRNA sense strand
guaagacgaacaacugaau

SEQ ID NO: 622451 - RNA, 19 nt, Homo sapiens
  misc_RNA (1)...(19): siRNA sense strand
caacauauugcaugaaggu

SEQ ID NO: 622452 - RNA, 19 nt, Homo sapiens
  misc_RNA (1)...(19): siRNA sense strand
ucacuaaagcguagcauca

SEQ ID NO: 622453 - RNA, 19 nt, Homo sapiens
  misc_RNA (1)...(19): siRNA sense strand
gaagcugaccuggcgaauu

SEQ ID NO: 622454 - RNA, 19 nt, Homo sapiens
  misc_RNA (1)...(19): siRNA sense strand
cagcuuuacucacagacaa

SEQ ID NO: 622455 - RNA, 19 nt, Homo sapiens
  misc_RNA (1)...(19): siRNA sense strand
agacggggauggaguauuu

SEQ ID NO: 622456 - RNA, 19 nt, Homo sapiens
  misc_RNA (1)...(19): siRNA sense strand
uaggcaaccaccauacuua

SEQ ID NO: 622457 - RNA, 19 nt, Homo sapiens
  misc_RNA (1)...(19): siRNA sense strand
uggaagcacuuaguauaug

SEQ ID NO: 622458 - RNA, 19 nt, Homo sapiens
  misc_RNA (1)...(19): siRNA sense strand
gaacauaccucuccagaac

SEQ ID NO: 622459 - RNA, 19 nt, Homo sapiens
  misc_RNA (1)...(19): siRNA sense strand
ggauugaucugcaugaugu

SEQ ID NO: 622460 - RNA, 19 nt, Homo sapiens
  misc_RNA (1)...(19): siRNA sense strand
gauugugucuccuguguuu

SEQ ID NO: 622461 - RNA, 19 nt, Homo sapiens
  misc_RNA (1)...(19): siRNA sense strand
gggaggagcugucauaaac

SEQ ID NO: 622462 - RNA, 19 nt, Homo sapiens
  misc_RNA (1)...(19): siRNA sense strand
ggagagaacguggagcuua

SEQ ID NO: 622463 - RNA, 19 nt, Homo sapiens
  misc_RNA (1)...(19): siRNA sense strand
ccacaagccuggauugauc

SEQ ID NO: 622464 - RNA, 19 nt, Homo sapiens
  misc_RNA (1)...(19): siRNA sense strand
gcacaaaacccaaaugaaa

SEQ ID NO: 622465 - RNA, 19 nt, Homo sapiens
  misc_RNA (1)...(19): siRNA sense strand
gagcuuccuuuacaucuga

SEQ ID NO: 622466 - RNA, 19 nt, Homo sapiens
  misc_RNA (1)...(19): siRNA sense strand
gaagagggcgaaagaugaa

SEQ ID NO: 622467 - RNA, 19 nt, Homo sapiens
  misc_RNA (1)...(19): siRNA sense strand
gcaaccagcugccucucaa

SEQ ID NO: 622468 - RNA, 19 nt, Homo sapiens
  misc_RNA (1)...(19): siRNA sense strand
ccacagggagcuuccuuua

SEQ ID NO: 622469 - RNA, 19 nt, Homo sapiens
  misc_RNA (1)...(19): siRNA sense strand
ccagaaguauccaggacua

SEQ ID NO: 622470 - RNA, 19 nt, Homo sapiens
  misc_RNA (1)...(19): siRNA sense strand
gaagcucuguccauuauac

SEQ ID NO: 622471 - RNA, 19 nt, Homo sapiens
  misc_RNA (1)...(19): siRNA sense strand
cagcucaaauggagaacua

SEQ ID NO: 622472 - RNA, 19 nt, Homo sapiens
  misc_RNA (1)...(19): siRNA sense strand
gaugagaagauuaagcuuu

SEQ ID NO: 622473 - RNA, 19 nt, Homo sapiens
  misc_RNA (1)...(19): siRNA sense strand
gagagaacguggagcuuag

SEQ ID NO: 622474 - RNA, 19 nt, Homo sapiens
  misc_RNA (1)...(19): siRNA sense strand
gaucugaaagaaaguauga

SEQ ID NO: 622475 - RNA, 19 nt, Homo sapiens
  misc_RNA (1)...(19): siRNA sense strand
ggagaagcccaccuuagaa

SEQ ID NO: 622476 - RNA, 19 nt, Homo sapiens
  misc_RNA (1)...(19): siRNA sense strand
cacagaaugucuacuauca

SEQ ID NO: 622477 - RNA, 19 nt, Homo sapiens
  misc_RNA (1)...(19): siRNA sense strand
uaaaggcaauggaaaccaa

SEQ ID NO: 622478 - RNA, 19 nt, Homo sapiens
  misc_RNA (1)...(19): siRNA sense strand
acagggagcuuccuuuaca

SEQ ID NO: 622479 - RNA, 19 nt, Homo sapiens
  misc_RNA (1)...(19): siRNA sense strand
acaaacacauggucuacuu

SEQ ID NO: 622480 - RNA, 19 nt, Homo sapiens
  misc_RNA (1)...(19): siRNA sense strand
gcucacagaaugucuacua

SEQ ID NO: 622481 - RNA, 19 nt, Homo sapiens
  misc_RNA (1)...(19): siRNA sense strand
caaggcagcuaagaauaga

SEQ ID NO: 622482 - RNA, 19 nt, Homo sapiens
  misc_RNA (1)...(19): siRNA sense strand
ggaauugcaggaucugaaa

SEQ ID NO: 622483 - RNA, 19 nt, Homo sapiens
  misc_RNA (1)...(19): siRNA sense strand
gagggaaggucgagauuuu

SEQ ID NO: 622484 - RNA, 19 nt, Homo sapiens
  misc_RNA (1)...(19): siRNA sense strand
ccuucaaacuggauaagua

SEQ ID NO: 622485 - RNA, 19 nt, Homo sapiens
  misc_RNA (1)...(19): siRNA sense strand
caacgggccaucaccagua

SEQ ID NO: 622486 - RNA, 19 nt, Homo sapiens
  misc_RNA (1)...(19): siRNA sense strand
gaaugucuacuaucaccua

SEQ ID NO: 622487 - RNA, 19 nt, Homo sapiens
  misc_RNA (1)...(19): siRNA sense strand
gcuaagaauagacugcaua

SEQ ID NO: 622488 - RNA, 19 nt, Homo sapiens
  misc_RNA (1)...(19): siRNA sense strand
gcucugaggcaacaagaaa

SEQ ID NO: 622489 - RNA, 19 nt, Homo sapiens
  misc_RNA (1)...(19): siRNA sense strand
gcacgcaagugugggaaau

SEQ ID NO: 622490 - RNA, 19 nt, Homo sapiens
  misc_RNA (1)...(19): siRNA sense strand
acacuuggaugagaagauu

SEQ ID NO: 622491 - RNA, 19 nt, Homo sapiens
  misc_RNA (1)...(19): siRNA sense strand
agauuaagcuuuacaacca

SEQ ID NO: 622492 - RNA, 19 nt, Homo sapiens
  misc_RNA (1)...(19): siRNA sense strand
cuacuuggccuggaacaua

SEQ ID NO: 622493 - RNA, 19 nt, Homo sapiens
  misc_RNA (1)...(19): siRNA sense strand
ugaaggaaaucaucuuggu

SEQ ID NO: 622494 - RNA, 19 nt, Homo sapiens
  misc_RNA (1)...(19): siRNA sense strand
caaacuggauaaguaugaa

SEQ ID NO: 622495 - RNA, 19 nt, Homo sapiens
  misc_RNA (1)...(19): siRNA sense strand
ugaagagggcgaaagauga

SEQ ID NO: 622496 - RNA, 19 nt, Homo sapiens
  misc_RNA (1)...(19): siRNA sense strand
guggaaugcucaucuaugg

SEQ ID NO: 622497 - RNA, 19 nt, Homo sapiens
  misc_RNA (1)...(19): siRNA sense strand
gaaaccaaggugaaugaga

SEQ ID NO: 622498 - RNA, 19 nt, Homo sapiens
  misc_RNA (1)...(19): siRNA sense strand
ggaccgcacugugauugug

SEQ ID NO: 622499 - RNA, 19 nt, Homo sapiens
  misc_RNA (1)...(19): siRNA sense strand
aaauggagaacuaaaggua

SEQ ID NO: 622500 - RNA, 19 nt, Homo sapiens
  misc_RNA (1)...(19): siRNA sense strand
cugcauauauauugggauu

SEQ ID NO: 622501 - RNA, 19 nt, Homo sapiens
  misc_RNA (1)...(19): siRNA sense strand
gugaacagcacacugaaga

SEQ ID NO: 622502 - RNA, 19 nt, Homo sapiens
  misc_RNA (1)...(19): siRNA sense strand
cggagaagcccaccuuaga

SEQ ID NO: 622503 - RNA, 19 nt, Homo sapiens
  misc_RNA (1)...(19): siRNA sense strand
ucagugucauucucauauu

SEQ ID NO: 622504 - RNA, 19 nt, Homo sapiens
  misc_RNA (1)...(19): siRNA sense strand
ucaaucuccuucugguauu

SEQ ID NO: 622505 - RNA, 19 nt, Homo sapiens
  misc_RNA (1)...(19): siRNA sense strand
uaaagguacacuuggauga

SEQ ID NO: 622506 - RNA, 19 nt, Homo sapiens
  misc_RNA (1)...(19): siRNA sense strand
ggaacauaccucuccagaa

SEQ ID NO: 622507 - RNA, 19 nt, Homo sapiens
  misc_RNA (1)...(19): siRNA sense strand
ggagggaaggucgagauuu

SEQ ID NO: 622508 - RNA, 19 nt, Homo sapiens
  misc_RNA (1)...(19): siRNA sense strand
aaggaaaggucuugcucaa

SEQ ID NO: 622509 - RNA, 19 nt, Homo sapiens
  misc_RNA (1)...(19): siRNA sense strand
augaagcucuguccauuau

SEQ ID NO: 622510 - RNA, 19 nt, Homo sapiens
  misc_RNA (1)...(19): siRNA sense strand
gcaaggggacuuuacaaaa

SEQ ID NO: 622511 - RNA, 19 nt, Homo sapiens
  misc_RNA (1)...(19): siRNA sense strand
gaaacucuucccacacuca

SEQ ID NO: 622512 - RNA, 19 nt, Homo sapiens
  misc_RNA (1)...(19): siRNA sense strand
ccaaggcagcuaagaauag

SEQ ID NO: 622513 - RNA, 19 nt, Homo sapiens
  misc_RNA (1)...(19): siRNA sense strand
gcucaaauggagaacuaaa

SEQ ID NO: 622514 - RNA, 19 nt, Homo sapiens
  misc_RNA (1)...(19): siRNA sense strand
gugauugugucuccugugu

SEQ ID NO: 622515 - RNA, 19 nt, Homo sapiens
  misc_RNA (1)...(19): siRNA sense strand
gaaauccagcacacuguca

SEQ ID NO: 622516 - RNA, 19 nt, Homo sapiens
  misc_RNA (1)...(19): siRNA sense strand
ucaaacuggauaaguauga

SEQ ID NO: 622517 - RNA, 19 nt, Homo sapiens
  misc_RNA (1)...(19): siRNA sense strand
caaucuccuucugguauuu

SEQ ID NO: 622518 - RNA, 19 nt, Homo sapiens
  misc_RNA (1)...(19): siRNA sense strand
ggagcuuccuuuacaucug

SEQ ID NO: 622519 - RNA, 19 nt, Homo sapiens
  misc_RNA (1)...(19): siRNA sense strand
aguaugaaauuagcucuga

SEQ ID NO: 622520 - RNA, 19 nt, Homo sapiens
  misc_RNA (1)...(19): siRNA sense strand
ugaaugagacaaagaagca

SEQ ID NO: 622521 - RNA, 19 nt, Homo sapiens
  misc_RNA (1)...(19): siRNA sense strand
gcuccaaggcagcuaagaa

SEQ ID NO: 622522 - RNA, 19 nt, Homo sapiens
  misc_RNA (1)...(19): siRNA sense strand
aaauguuuauccacucuug

SEQ ID NO: 622523 - RNA, 19 nt, Homo sapiens
  misc_RNA (1)...(19): siRNA sense strand
caggaggaccgcacuguga

SEQ ID NO: 622524 - RNA, 19 nt, Homo sapiens
  misc_RNA (1)...(19): siRNA sense strand
agacauauccuucccaacu

SEQ ID NO: 622525 - RNA, 19 nt, Homo sapiens
  misc_RNA (1)...(19): siRNA sense strand
aaacccaaaugaaacucuu

SEQ ID NO: 622526 - RNA, 19 nt, Homo sapiens
  misc_RNA (1)...(19): siRNA sense strand
gcacaaacacauggucuac

SEQ ID NO: 622527 - RNA, 19 nt, Homo sapiens
  misc_RNA (1)...(19): siRNA sense strand
gacauauccuucccaacuc

SEQ ID NO: 622528 - RNA, 19 nt, Homo sapiens
  misc_RNA (1)...(19): siRNA sense strand
ccaaggugaaugagacaaa

SEQ ID NO: 622529 - RNA, 19 nt, Homo sapiens
  misc_RNA (1)...(19): siRNA sense strand
guauuacugccaugaauuc

SEQ ID NO: 622530 - RNA, 19 nt, Homo sapiens
  misc_RNA (1)...(19): siRNA sense strand
gaucgggucucuggauggu

SEQ ID NO: 622531 - RNA, 19 nt, Homo sapiens
  misc_RNA (1)...(19): siRNA sense strand
gacgcccucucgauuguug

SEQ ID NO: 622532 - RNA, 19 nt, Homo sapiens
  misc_RNA (1)...(19): siRNA sense strand
caaggugaaugagacaaag

SEQ ID NO: 622533 - RNA, 19 nt, Homo sapiens
  misc_RNA (1)...(19): siRNA sense strand
ugcaggaucugaaagaaag

SEQ ID NO: 622534 - RNA, 19 nt, Homo sapiens
  misc_RNA (1)...(19): siRNA sense strand
caauggaaaccaaggugaa

SEQ ID NO: 622535 - RNA, 19 nt, Homo sapiens
  misc_RNA (1)...(19): siRNA sense strand
gucuggagaugaagaagga

SEQ ID NO: 622536 - RNA, 19 nt, Homo sapiens
  misc_RNA (1)...(19): siRNA sense strand
caucgugggcuauggaaga

SEQ ID NO: 622537 - RNA, 19 nt, Homo sapiens
  misc_RNA (1)...(19): siRNA sense strand
ggaggaccgcacugugauu

SEQ ID NO: 622538 - RNA, 19 nt, Homo sapiens
  misc_RNA (1)...(19): siRNA sense strand
ucucaccgcugccuugaag

SEQ ID NO: 622539 - RNA, 19 nt, Homo sapiens
  misc_RNA (1)...(19): siRNA sense strand
ggauggaugagcacaaaca

SEQ ID NO: 622540 - RNA, 19 nt, Homo sapiens
  misc_RNA (1)...(19): siRNA sense strand
gagggcgaaagaugaagua

SEQ ID NO: 622541 - RNA, 19 nt, Homo sapiens
  misc_RNA (1)...(19): siRNA sense strand
gagaagcccaccuuagaac

SEQ ID NO: 622542 - RNA, 19 nt, Homo sapiens
  misc_RNA (1)...(19): siRNA sense strand
gucaaucuccuucugguau

SEQ ID NO: 622543 - RNA, 19 nt, Homo sapiens
  misc_RNA (1)...(19): siRNA sense strand
gaauggcacuccgggaaaa

SEQ ID NO: 622544 - RNA, 19 nt, Homo sapiens
  misc_RNA (1)...(19): siRNA sense strand
cccaaagcccucuucauug

SEQ ID NO: 622545 - RNA, 19 nt, Homo sapiens
  misc_RNA (1)...(19): siRNA sense strand
gaagauuaagcuuuacaac

SEQ ID NO: 622546 - RNA, 19 nt, Homo sapiens
  misc_RNA (1)...(19): siRNA sense strand
gagaagauuaagcuuuaca

SEQ ID NO: 622547 - RNA, 19 nt, Homo sapiens
  misc_RNA (1)...(19): siRNA sense strand
cagugucauucucauauuc

SEQ ID NO: 622548 - RNA, 19 nt, Homo sapiens
  misc_RNA (1)...(19): siRNA sense strand
gcagaggccagugcuagug

SEQ ID NO: 622549 - RNA, 19 nt, Homo sapiens
  misc_RNA (1)...(19): siRNA sense strand
uggaugauuucagcucaaa

SEQ ID NO: 622550 - RNA, 19 nt, Homo sapiens
  misc_RNA (1)...(19): siRNA sense strand
ggaaaucaucuugguggau

SEQ ID NO: 622551 - RNA, 19 nt, Homo sapiens
  misc_RNA (1)...(19): siRNA sense strand
cuaagaauagacugcauau

SEQ ID NO: 622552 - RNA, 19 nt, Homo sapiens
  misc_RNA (1)...(19): siRNA sense strand
ggagcucuaugugggacaa

SEQ ID NO: 622553 - RNA, 19 nt, Homo sapiens
  misc_RNA (1)...(19): siRNA sense strand
ugaagccacuccacaccau

SEQ ID NO: 622554 - RNA, 19 nt, Homo sapiens
  misc_RNA (1)...(19): siRNA sense strand
ggguuuaacugggaacucu

SEQ ID NO: 622555 - RNA, 19 nt, Homo sapiens
  misc_RNA (1)...(19): siRNA sense strand
gaggaccgcacugugauug

SEQ ID NO: 622556 - RNA, 19 nt, Homo sapiens
  misc_RNA (1)...(19): siRNA sense strand
cuuggaugcucacauugaa

SEQ ID NO: 622557 - RNA, 19 nt, Homo sapiens
  misc_RNA (1)...(19): siRNA sense strand
cuggauggaugagcacaaa

SEQ ID NO: 622558 - RNA, 19 nt, Homo sapiens
  misc_RNA (1)...(19): siRNA sense strand
gaagaagugucccaugauu

SEQ ID NO: 622559 - RNA, 19 nt, Homo sapiens
  misc_RNA (1)...(19): siRNA sense strand
uaaagaaucucauggaaga

SEQ ID NO: 622560 - RNA, 19 nt, Homo sapiens
  misc_RNA (1)...(19): siRNA sense strand
caaaggagaauguggauua

SEQ ID NO: 622561 - RNA, 19 nt, Homo sapiens
  misc_RNA (1)...(19): siRNA sense strand
gggaaucaguaaagacuua

SEQ ID NO: 622562 - RNA, 19 nt, Homo sapiens
  misc_RNA (1)...(19): siRNA sense strand
gaaaguacuucucauggau

SEQ ID NO: 622563 - RNA, 19 nt, Homo sapiens
  misc_RNA (1)...(19): siRNA sense strand
gaaggaaguguaccucuuu

SEQ ID NO: 622564 - RNA, 19 nt, Homo sapiens
  misc_RNA (1)...(19): siRNA sense strand
ggaauaaagguguuucuga

SEQ ID NO: 622565 - RNA, 19 nt, Homo sapiens
  misc_RNA (1)...(19): siRNA sense strand
ggauugaucuuuccagagu

SEQ ID NO: 622566 - RNA, 19 nt, Homo sapiens
  misc_RNA (1)...(19): siRNA sense strand
ggugaugcuuuaugcuuua

SEQ ID NO: 622567 - RNA, 19 nt, Homo sapiens
  misc_RNA (1)...(19): siRNA sense strand
guuaucagcucucaucaga

SEQ ID NO: 622568 - RNA, 19 nt, Homo sapiens
  misc_RNA (1)...(19): siRNA sense strand
gaacuggccugucaaaaug

SEQ ID NO: 622569 - RNA, 19 nt, Homo sapiens
  misc_RNA (1)...(19): siRNA sense strand
ugaaacaccugaaggcaau

SEQ ID NO: 622570 - RNA, 19 nt, Homo sapiens
  misc_RNA (1)...(19): siRNA sense strand
ugauggaccucaggaauaa

SEQ ID NO: 622571 - RNA, 19 nt, Homo sapiens
  misc_RNA (1)...(19): siRNA sense strand
cuagugcucuccagaauau

SEQ ID NO: 622572 - RNA, 19 nt, Homo sapiens
  misc_RNA (1)...(19): siRNA sense strand
gcucgugucugcaguuguu

SEQ ID NO: 622573 - RNA, 19 nt, Homo sapiens
  misc_RNA (1)...(19): siRNA sense strand
gcuuacagcucuccuuuua

SEQ ID NO: 622574 - RNA, 19 nt, Homo sapiens
  misc_RNA (1)...(19): siRNA sense strand
gaucaucucaucaaaggaa

SEQ ID NO: 622575 - RNA, 19 nt, Homo sapiens
  misc_RNA (1)...(19): siRNA sense strand
ggaaucugcuggagguuuc

SEQ ID NO: 622576 - RNA, 19 nt, Homo sapiens
  misc_RNA (1)...(19): siRNA sense strand
gaacuuugcugagauuggu

SEQ ID NO: 622577 - RNA, 19 nt, Homo sapiens
  misc_RNA (1)...(19): siRNA sense strand
gagcgacacagcagcaaua

SEQ ID NO: 622578 - RNA, 19 nt, Homo sapiens
  misc_RNA (1)...(19): siRNA sense strand
ggauaucauuguguuugua

SEQ ID NO: 622579 - RNA, 19 nt, Homo sapiens
  misc_RNA (1)...(19): siRNA sense strand
gaacuacuaggcauaaaca

SEQ ID NO: 622580 - RNA, 19 nt, Homo sapiens
  misc_RNA (1)...(19): siRNA sense strand
ugaaaguacuucucaugga

SEQ ID NO: 622581 - RNA, 19 nt, Homo sapiens
  misc_RNA (1)...(19): siRNA sense strand
gcaucaaccuuuccuacau

SEQ ID NO: 622582 - RNA, 19 nt, Homo sapiens
  misc_RNA (1)...(19): siRNA sense strand
uaagagaagugguccuauc

SEQ ID NO: 622583 - RNA, 19 nt, Homo sapiens
  misc_RNA (1)...(19): siRNA sense strand
ggaaguguaccucuuugaa

SEQ ID NO: 622584 - RNA, 19 nt, Homo sapiens
  misc_RNA (1)...(19): siRNA sense strand
ugucugcaguuguugaaua

SEQ ID NO: 622585 - RNA, 19 nt, Homo sapiens
  misc_RNA (1)...(19): siRNA sense strand
aggagaauguggauuauau

SEQ ID NO: 622586 - RNA, 19 nt, Homo sapiens
  misc_RNA (1)...(19): siRNA sense strand
ugaaggcguuuguugagaa

SEQ ID NO: 622587 - RNA, 19 nt, Homo sapiens
  misc_RNA (1)...(19): siRNA sense strand
cugaagaagugucccauga

SEQ ID NO: 622588 - RNA, 19 nt, Homo sapiens
  misc_RNA (1)...(19): siRNA sense strand
gugauuacauugcugugaa

SEQ ID NO: 622589 - RNA, 19 nt, Homo sapiens
  misc_RNA (1)...(19): siRNA sense strand
ccaaagaugcuguggcuau

SEQ ID NO: 622590 - RNA, 19 nt, Homo sapiens
  misc_RNA (1)...(19): siRNA sense strand
ggacauaucaggccauggu

SEQ ID NO: 622591 - RNA, 19 nt, Homo sapiens
  misc_RNA (1)...(19): siRNA sense strand
ucaguaaugugaucagcaa

SEQ ID NO: 622592 - RNA, 19 nt, Homo sapiens
  misc_RNA (1)...(19): siRNA sense strand
caaaggaaggcuuaaggaa

SEQ ID NO: 622593 - RNA, 19 nt, Homo sapiens
  misc_RNA (1)...(19): siRNA sense strand
uuucagagguugagcaaga

SEQ ID NO: 622594 - RNA, 19 nt, Homo sapiens
  misc_RNA (1)...(19): siRNA sense strand
gaaggcguuuguugagaau

SEQ ID NO: 622595 - RNA, 19 nt, Homo sapiens
  misc_RNA (1)...(19): siRNA sense strand
gcccagcuaucuagaacaa

SEQ ID NO: 622596 - RNA, 19 nt, Homo sapiens
  misc_RNA (1)...(19): siRNA sense strand
guuccuccauugcuccuua

SEQ ID NO: 622597 - RNA, 19 nt, Homo sapiens
  misc_RNA (1)...(19): siRNA sense strand
agacagaccucaggauauc

SEQ ID NO: 622598 - RNA, 19 nt, Homo sapiens
  misc_RNA (1)...(19): siRNA sense strand
aaaggaaggcuuaaggaaa

SEQ ID NO: 622599 - RNA, 19 nt, Homo sapiens
  misc_RNA (1)...(19): siRNA sense strand
gaaaaugucugggacuguu

SEQ ID NO: 622600 - RNA, 19 nt, Homo sapiens
  misc_RNA (1)...(19): siRNA sense strand
aggcguuuguugagaauua

SEQ ID NO: 622601 - RNA, 19 nt, Homo sapiens
  misc_RNA (1)...(19): siRNA sense strand
cgacuggcauagugaguau

SEQ ID NO: 622602 - RNA, 19 nt, Homo sapiens
  misc_RNA (1)...(19): siRNA sense strand
ccaaacaauuccucaaagg

SEQ ID NO: 622603 - RNA, 19 nt, Homo sapiens
  misc_RNA (1)...(19): siRNA sense strand
caucaaccuuuccuacaug

SEQ ID NO: 622604 - RNA, 19 nt, Homo sapiens
  misc_RNA (1)...(19): siRNA sense strand
uuagaucgcugugaugaug

SEQ ID NO: 622605 - RNA, 19 nt, Homo sapiens
  misc_RNA (1)...(19): siRNA sense strand
ggacugaagggaguagaaa

SEQ ID NO: 622606 - RNA, 19 nt, Homo sapiens
  misc_RNA (1)...(19): siRNA sense strand
ggagaauguggauuauauu

SEQ ID NO: 622607 - RNA, 19 nt, Homo sapiens
  misc_RNA (1)...(19): siRNA sense strand
gagacagaccucaggauau

SEQ ID NO: 622608 - RNA, 19 nt, Homo sapiens
  misc_RNA (1)...(19): siRNA sense strand
ugaauauggugguaaacga

SEQ ID NO: 622609 - RNA, 19 nt, Homo sapiens
  misc_RNA (1)...(19): siRNA sense strand
caguaaagacuuaagagaa

SEQ ID NO: 622610 - RNA, 19 nt, Homo sapiens
  misc_RNA (1)...(19): siRNA sense strand
uaaagagacgacuggcaua

SEQ ID NO: 622611 - RNA, 19 nt, Homo sapiens
  misc_RNA (1)...(19): siRNA sense strand
auacacagcaucaaccuuu

SEQ ID NO: 622612 - RNA, 19 nt, Homo sapiens
  misc_RNA (1)...(19): siRNA sense strand
caagaacuggccugucaaa

SEQ ID NO: 622613 - RNA, 19 nt, Homo sapiens
  misc_RNA (1)...(19): siRNA sense strand
agagacagaccucaggaua

SEQ ID NO: 622614 - RNA, 19 nt, Homo sapiens
  misc_RNA (1)...(19): siRNA sense strand
guaccucuuugaacgcauu

SEQ ID NO: 622615 - RNA, 19 nt, Homo sapiens
  misc_RNA (1)...(19): siRNA sense strand
caaagaugcuguggcuauc

SEQ ID NO: 622616 - RNA, 19 nt, Homo sapiens
  misc_RNA (1)...(19): siRNA sense strand
gguaaacgagucagaggaa

SEQ ID NO: 622617 - RNA, 19 nt, Homo sapiens
  misc_RNA (1)...(19): siRNA sense strand
aguaaagacuuaagagaag

SEQ ID NO: 622618 - RNA, 19 nt, Homo sapiens
  misc_RNA (1)...(19): siRNA sense strand
gcucucaagucacaucaag

SEQ ID NO: 622619 - RNA, 19 nt, Homo sapiens
  misc_RNA (1)...(19): siRNA sense strand
ugagaauuauccacaguuc

SEQ ID NO: 622620 - RNA, 19 nt, Homo sapiens
  misc_RNA (1)...(19): siRNA sense strand
gcugugaagcaguacauuu

SEQ ID NO: 622621 - RNA, 19 nt, Homo sapiens
  misc_RNA (1)...(19): siRNA sense strand
ccacagugcacaacacgaa

SEQ ID NO: 622622 - RNA, 19 nt, Homo sapiens
  misc_RNA (1)...(19): siRNA sense strand
agaaggaaguguaccucuu

SEQ ID NO: 622623 - RNA, 19 nt, Homo sapiens
  misc_RNA (1)...(19): siRNA sense strand
gcuggagguuucagagguu

SEQ ID NO: 622624 - RNA, 19 nt, Homo sapiens
  misc_RNA (1)...(19): siRNA sense strand
agacccaaauacacuauau

SEQ ID NO: 622625 - RNA, 19 nt, Homo sapiens
  misc_RNA (1)...(19): siRNA sense strand
agagacgacuggcauagug

SEQ ID NO: 622626 - RNA, 19 nt, Homo sapiens
  misc_RNA (1)...(19): siRNA sense strand
gguaugaaaguacuucuca

SEQ ID NO: 622627 - RNA, 19 nt, Homo sapiens
  misc_RNA (1)...(19): siRNA sense strand
gacaugaaggcguuuguug

SEQ ID NO: 622628 - RNA, 19 nt, Homo sapiens
  misc_RNA (1)...(19): siRNA sense strand
cagcaagagugacgugaag

SEQ ID NO: 622629 - RNA, 19 nt, Homo sapiens
  misc_RNA (1)...(19): siRNA sense strand
aaaggagaauguggauuau

SEQ ID NO: 622630 - RNA, 19 nt, Homo sapiens
  misc_RNA (1)...(19): siRNA sense strand
gaggagccaccuaugaaga

SEQ ID NO: 622631 - RNA, 19 nt, Homo sapiens
  misc_RNA (1)...(19): siRNA sense strand
agcaagaacuggccuguca

SEQ ID NO: 622632 - RNA, 19 nt, Homo sapiens
  misc_RNA (1)...(19): siRNA sense strand
uaccugaacuuugcugaga

SEQ ID NO: 622633 - RNA, 19 nt, Homo sapiens
  misc_RNA (1)...(19): siRNA sense strand
ccacgaacuacuaggcaua

SEQ ID NO: 622634 - RNA, 19 nt, Homo sapiens
  misc_RNA (1)...(19): siRNA sense strand
gcaagugauaacuaaagaa

SEQ ID NO: 622635 - RNA, 19 nt, Homo sapiens
  misc_RNA (1)...(19): siRNA sense strand
gggcuuacagcucuccuuu

SEQ ID NO: 622636 - RNA, 19 nt, Homo sapiens
  misc_RNA (1)...(19): siRNA sense strand
ugaagcugaugaacaggaa

SEQ ID NO: 622637 - RNA, 19 nt, Homo sapiens
  misc_RNA (1)...(19): siRNA sense strand
gaagacccaaauacacuau

SEQ ID NO: 622638 - RNA, 19 nt, Homo sapiens
  misc_RNA (1)...(19): siRNA sense strand
gacccaaauacacuauaua

SEQ ID NO: 622639 - RNA, 19 nt, Homo sapiens
  misc_RNA (1)...(19): siRNA sense strand
gaagggaguagaaaaugua

SEQ ID NO: 622640 - RNA, 19 nt, Homo sapiens
  misc_RNA (1)...(19): siRNA sense strand
caccaaacaauuccucaaa

SEQ ID NO: 622641 - RNA, 19 nt, Homo sapiens
  misc_RNA (1)...(19): siRNA sense strand
gaagcaguacauuuccaaa

SEQ ID NO: 622642 - RNA, 19 nt, Homo sapiens
  misc_RNA (1)...(19): siRNA sense strand
gguccuaucugcugaaaau

SEQ ID NO: 622643 - RNA, 19 nt, Homo sapiens
  misc_RNA (1)...(19): siRNA sense strand
cuaaaccaguggacauauc

SEQ ID NO: 622644 - RNA, 19 nt, Homo sapiens
  misc_RNA (1)...(19): siRNA sense strand
ccugaacuuugcugagauu

SEQ ID NO: 622645 - RNA, 19 nt, Homo sapiens
  misc_RNA (1)...(19): siRNA sense strand
gaagaagaaaccaaaagaa

SEQ ID NO: 622646 - RNA, 19 nt, Homo sapiens
  misc_RNA (1)...(19): siRNA sense strand
ggacugcacagccgaagca

SEQ ID NO: 622647 - RNA, 19 nt, Homo sapiens
  misc_RNA (1)...(19): siRNA sense strand
gaaguguaccucuuugaac

SEQ ID NO: 622648 - RNA, 19 nt, Homo sapiens
  misc_RNA (1)...(19): siRNA sense strand
agaauuauccacaguucaa

SEQ ID NO: 622649 - RNA, 19 nt, Homo sapiens
  misc_RNA (1)...(19): siRNA sense strand
cgaagacccaaauacacua

SEQ ID NO: 622650 - RNA, 19 nt, Homo sapiens
  misc_RNA (1)...(19): siRNA sense strand
aaggaaggcuuaaggaaaa

SEQ ID NO: 622651 - RNA, 19 nt, Homo sapiens
  misc_RNA (1)...(19): siRNA sense strand
ggccaugguccacgaacua

SEQ ID NO: 622652 - RNA, 19 nt, Homo sapiens
  misc_RNA (1)...(19): siRNA sense strand
cagagugcguuaagcaagu

SEQ ID NO: 622653 - RNA, 19 nt, Homo sapiens
  misc_RNA (1)...(19): siRNA sense strand
guaaugugaucagcaagag

SEQ ID NO: 622654 - RNA, 19 nt, Homo sapiens
  misc_RNA (1)...(19): siRNA sense strand
cuacuaggcauaaacaaca

SEQ ID NO: 622655 - RNA, 19 nt, Homo sapiens
  misc_RNA (1)...(19): siRNA sense strand
uggaucaucucaucaaagg

SEQ ID NO: 622656 - RNA, 19 nt, Homo sapiens
  misc_RNA (1)...(19): siRNA sense strand
aaaguacuucucauggaua

SEQ ID NO: 622657 - RNA, 19 nt, Homo sapiens
  misc_RNA (1)...(19): siRNA sense strand
ggaaucaguaaagacuuaa

SEQ ID NO: 622658 - RNA, 19 nt, Homo sapiens
  misc_RNA (1)...(19): siRNA sense strand
ggagagugcugccaaguug

SEQ ID NO: 622659 - RNA, 19 nt, Homo sapiens
  misc_RNA (1)...(19): siRNA sense strand
caagaugaaugaacuaaug

SEQ ID NO: 622660 - RNA, 19 nt, Homo sapiens
  misc_RNA (1)...(19): siRNA sense strand
ugaaugaacuaauggagaa

SEQ ID NO: 622661 - RNA, 19 nt, Homo sapiens
  misc_RNA (1)...(19): siRNA sense strand
caacagaggugaagaucca

SEQ ID NO: 622662 - RNA, 19 nt, Homo sapiens
  misc_RNA (1)...(19): siRNA sense strand
ucacagagccaaagacaau

SEQ ID NO: 622663 - RNA, 19 nt, Homo sapiens
  misc_RNA (1)...(19): siRNA sense strand
gagucuagcuaccaagaug

SEQ ID NO: 622664 - RNA, 19 nt, Homo sapiens
  misc_RNA (1)...(19): siRNA sense strand
caaagacaauucaggaacu

SEQ ID NO: 622665 - RNA, 19 nt, Homo sapiens
  misc_RNA (1)...(19): siRNA sense strand
gugaagauccaagaaauga

SEQ ID NO: 622666 - RNA, 19 nt, Homo sapiens
  misc_RNA (1)...(19): siRNA sense strand
ggcagcagcuccgucauga

SEQ ID NO: 622667 - RNA, 19 nt, Homo sapiens
  misc_RNA (1)...(19): siRNA sense strand
gaggugaagauccaagaaa

SEQ ID NO: 622668 - RNA, 19 nt, Homo sapiens
  misc_RNA (1)...(19): siRNA sense strand
cuaccaagaugaaugaacu

SEQ ID NO: 622669 - RNA, 19 nt, Homo sapiens
  misc_RNA (1)...(19): siRNA sense strand
ucaacaagcagagugauga

SEQ ID NO: 622670 - RNA, 19 nt, Homo sapiens
  misc_RNA (1)...(19): siRNA sense strand
gcagcuccgucaugagucu

SEQ ID NO: 622671 - RNA, 19 nt, Homo sapiens
  misc_RNA (1)...(19): siRNA sense strand
ugaaaggggucccaacaga

SEQ ID NO: 622672 - RNA, 19 nt, Homo sapiens
  misc_RNA (1)...(19): siRNA sense strand
ggugaagauccaagaaaug

SEQ ID NO: 622673 - RNA, 19 nt, Homo sapiens
  misc_RNA (1)...(19): siRNA sense strand
uagcuaccaagaugaauga

SEQ ID NO: 622674 - RNA, 19 nt, Homo sapiens
  misc_RNA (1)...(19): siRNA sense strand
ggaagcugaaggaccuaaa

SEQ ID NO: 622675 - RNA, 19 nt, Homo sapiens
  misc_RNA (1)...(19): siRNA sense strand
cagcagcuccgucaugagu

SEQ ID NO: 622676 - RNA, 19 nt, Homo sapiens
  misc_RNA (1)...(19): siRNA sense strand
caaguggucauggcaguug

SEQ ID NO: 622677 - RNA, 19 nt, Homo sapiens
  misc_RNA (1)...(19): siRNA sense strand
ucaugagucuagcuaccaa

SEQ ID NO: 622678 - RNA, 19 nt, Homo sapiens
  misc_RNA (1)...(19): siRNA sense strand
gccaaagacaauucaggaa

SEQ ID NO: 622679 - RNA, 19 nt, Homo sapiens
  misc_RNA (1)...(19): siRNA sense strand
aggugaagauccaagaaau

SEQ ID NO: 622680 - RNA, 19 nt, Homo sapiens
  misc_RNA (1)...(19): siRNA sense strand
aaagacaauucaggaacug

SEQ ID NO: 622681 - RNA, 19 nt, Homo sapiens
  misc_RNA (1)...(19): siRNA sense strand
cagaguaccgcuuggagau

SEQ ID NO: 622682 - RNA, 19 nt, Homo sapiens
  misc_RNA (1)...(19): siRNA sense strand
gaaugaacuaauggagaaa

SEQ ID NO: 622683 - RNA, 19 nt, Homo sapiens
  misc_RNA (1)...(19): siRNA sense strand
gcaaguggucauggcaguu

SEQ ID NO: 622684 - RNA, 19 nt, Homo sapiens
  misc_RNA (1)...(19): siRNA sense strand
uaucacagagccaaagaca

SEQ ID NO: 622685 - RNA, 19 nt, Homo sapiens
  misc_RNA (1)...(19): siRNA sense strand
gaagcugaaggaccuaaac

SEQ ID NO: 622686 - RNA, 19 nt, Homo sapiens
  misc_RNA (1)...(19): siRNA sense strand
ccaagaugaaugaacuaau

SEQ ID NO: 622687 - RNA, 19 nt, Homo sapiens
  misc_RNA (1)...(19): siRNA sense strand
gcagcaaggcgagcagauc

SEQ ID NO: 622688 - RNA, 19 nt, Homo sapiens
  misc_RNA (1)...(19): siRNA sense strand
uccaagaaaugacgaagcu

SEQ ID NO: 622689 - RNA, 19 nt, Homo sapiens
  misc_RNA (1)...(19): siRNA sense strand
ccucgagggucuguauauc

SEQ ID NO: 622690 - RNA, 19 nt, Homo sapiens
  misc_RNA (1)...(19): siRNA sense strand
accauugggugcuccaguu

SEQ ID NO: 622691 - RNA, 19 nt, Homo sapiens
  misc_RNA (1)...(19): siRNA sense strand
ccguggagaccgugaagaa

SEQ ID NO: 622692 - RNA, 19 nt, Homo sapiens
  misc_RNA (1)...(19): siRNA sense strand
gccagugccucugccaagu

SEQ ID NO: 622693 - RNA, 19 nt, Homo sapiens
  misc_RNA (1)...(19): siRNA sense strand
cccagaagcagcuacacuu

SEQ ID NO: 622694 - RNA, 19 nt, Homo sapiens
  misc_RNA (1)...(19): siRNA sense strand
uggagaccgugaagaagca

SEQ ID NO: 622695 - RNA, 19 nt, Homo sapiens
  misc_RNA (1)...(19): siRNA sense strand
caaguugcacgcgcuuaga

SEQ ID NO: 622696 - RNA, 19 nt, Homo sapiens
  misc_RNA (1)...(19): siRNA sense strand
ccaaguugcacgcgcuuag

SEQ ID NO: 622697 - RNA, 19 nt, Homo sapiens
  misc_RNA (1)...(19): siRNA sense strand
ggccgaggauggaugauug

SEQ ID NO: 622698 - RNA, 19 nt, Homo sapiens
  misc_RNA (1)...(19): siRNA sense strand
gaagcccucucccaagauc

SEQ ID NO: 622699 - RNA, 19 nt, Homo sapiens
  misc_RNA (1)...(19): siRNA sense strand
aggaagcccucucccaaga

SEQ ID NO: 622700 - RNA, 19 nt, Homo sapiens
  misc_RNA (1)...(19): siRNA sense strand
ggaagcccucucccaagau

SEQ ID NO: 622701 - RNA, 19 nt, Homo sapiens
  misc_RNA (1)...(19): siRNA sense strand
gaugauuguggcagcagaa

SEQ ID NO: 622702 - RNA, 19 nt, Homo sapiens
  misc_RNA (1)...(19): siRNA sense strand
cgaguuggccgaggaugga

SEQ ID NO: 622703 - RNA, 19 nt, Homo sapiens
  misc_RNA (1)...(19): siRNA sense strand
ggccgaggauggaugauug

SEQ ID NO: 622704 - RNA, 19 nt, Homo sapiens
  misc_RNA (1)...(19): siRNA sense strand
gaagcccucucccaagauc

SEQ ID NO: 622705 - RNA, 19 nt, Homo sapiens
  misc_RNA (1)...(19): siRNA sense strand
aggaagcccucucccaaga

SEQ ID NO: 622706 - RNA, 19 nt, Homo sapiens
  misc_RNA (1)...(19): siRNA sense strand
ggaagcccucucccaagau

SEQ ID NO: 622707 - RNA, 19 nt, Homo sapiens
  misc_RNA (1)...(19): siRNA sense strand
gaugauuguggcagcagaa

SEQ ID NO: 622708 - RNA, 19 nt, Homo sapiens
  misc_RNA (1)...(19): siRNA sense strand
cgaguuggccgaggaugga

SEQ ID NO: 622709 - RNA, 19 nt, Homo sapiens
  misc_RNA (1)...(19): siRNA sense strand
ggagagugcugccaaguug

SEQ ID NO: 622710 - RNA, 19 nt, Homo sapiens
  misc_RNA (1)...(19): siRNA sense strand
caagaugaaugaacuaaug

SEQ ID NO: 622711 - RNA, 19 nt, Homo sapiens
  misc_RNA (1)...(19): siRNA sense strand
ugaaugaacuaauggagaa

SEQ ID NO: 622712 - RNA, 19 nt, Homo sapiens
  misc_RNA (1)...(19): siRNA sense strand
caacagaggugaagaucca

SEQ ID NO: 622713 - RNA, 19 nt, Homo sapiens
  misc_RNA (1)...(19): siRNA sense strand
ucacagagccaaagacaau

SEQ ID NO: 622714 - RNA, 19 nt, Homo sapiens
  misc_RNA (1)...(19): siRNA sense strand
gagucuagcuaccaagaug

SEQ ID NO: 622715 - RNA, 19 nt, Homo sapiens
  misc_RNA (1)...(19): siRNA sense strand
caaagacaauucaggaacu

SEQ ID NO: 622716 - RNA, 19 nt, Homo sapiens
  misc_RNA (1)...(19): siRNA sense strand
gugaagauccaagaaauga

SEQ ID NO: 622717 - RNA, 19 nt, Homo sapiens
  misc_RNA (1)...(19): siRNA sense strand
ggcagcagcuccgucauga

SEQ ID NO: 622718 - RNA, 19 nt, Homo sapiens
  misc_RNA (1)...(19): siRNA sense strand
gaggugaagauccaagaaa

SEQ ID NO: 622719 - RNA, 19 nt, Homo sapiens
  misc_RNA (1)...(19): siRNA sense strand
cuaccaagaugaaugaacu

SEQ ID NO: 622720 - RNA, 19 nt, Homo sapiens
  misc_RNA (1)...(19): siRNA sense strand
ucaacaagcagagugauga

SEQ ID NO: 622721 - RNA, 19 nt, Homo sapiens
  misc_RNA (1)...(19): siRNA sense strand
gcagcuccgucaugagucu

SEQ ID NO: 622722 - RNA, 19 nt, Homo sapiens
  misc_RNA (1)...(19): siRNA sense strand
ugaaaggggucccaacaga

SEQ ID NO: 622723 - RNA, 19 nt, Homo sapiens
  misc_RNA (1)...(19): siRNA sense strand
ggugaagauccaagaaaug

SEQ ID NO: 622724 - RNA, 19 nt, Homo sapiens
  misc_RNA (1)...(19): siRNA sense strand
uagcuaccaagaugaauga

SEQ ID NO: 622725 - RNA, 19 nt, Homo sapiens
  misc_RNA (1)...(19): siRNA sense strand
ggaagcugaaggaccuaaa

SEQ ID NO: 622726 - RNA, 19 nt, Homo sapiens
  misc_RNA (1)...(19): siRNA sense strand
cagcagcuccgucaugagu

SEQ ID NO: 622727 - RNA, 19 nt, Homo sapiens
  misc_RNA (1)...(19): siRNA sense strand
caaguggucauggcaguug

SEQ ID NO: 622728 - RNA, 19 nt, Homo sapiens
  misc_RNA (1)...(19): siRNA sense strand
ucaugagucuagcuaccaa

SEQ ID NO: 622729 - RNA, 19 nt, Homo sapiens
  misc_RNA (1)...(19): siRNA sense strand
gccaaagacaauucaggaa

SEQ ID NO: 622730 - RNA, 19 nt, Homo sapiens
  misc_RNA (1)...(19): siRNA sense strand
aggugaagauccaagaaau

SEQ ID NO: 622731 - RNA, 19 nt, Homo sapiens
  misc_RNA (1)...(19): siRNA sense strand
aaagacaauucaggaacug

SEQ ID NO: 622732 - RNA, 19 nt, Homo sapiens
  misc_RNA (1)...(19): siRNA sense strand
cagaguaccgcuuggagau

SEQ ID NO: 622733 - RNA, 19 nt, Homo sapiens
  misc_RNA (1)...(19): siRNA sense strand
gaaugaacuaauggagaaa

SEQ ID NO: 622734 - RNA, 19 nt, Homo sapiens
  misc_RNA (1)...(19): siRNA sense strand
gcaaguggucauggcaguu

SEQ ID NO: 622735 - RNA, 19 nt, Homo sapiens
  misc_RNA (1)...(19): siRNA sense strand
uaucacagagccaaagaca

SEQ ID NO: 622736 - RNA, 19 nt, Homo sapiens
  misc_RNA (1)...(19): siRNA sense strand
gaagcugaaggaccuaaac

SEQ ID NO: 622737 - RNA, 19 nt, Homo sapiens
  misc_RNA (1)...(19): siRNA sense strand
ccaagaugaaugaacuaau

SEQ ID NO: 622738 - RNA, 19 nt, Homo sapiens
  misc_RNA (1)...(19): siRNA sense strand
gcagcaaggcgagcagauc

SEQ ID NO: 622739 - RNA, 19 nt, Homo sapiens
  misc_RNA (1)...(19): siRNA sense strand
uccaagaaaugacgaagcu

SEQ ID NO: 622740 - RNA, 19 nt, Homo sapiens
  misc_RNA (1)...(19): siRNA sense strand
ccucgagggucuguauauc

SEQ ID NO: 622741 - RNA, 19 nt, Homo sapiens
  misc_RNA (1)...(19): siRNA sense strand
accauugggugcuccaguu

SEQ ID NO: 622742 - RNA, 19 nt, Homo sapiens
  misc_RNA (1)...(19): siRNA sense strand
ccguggagaccgugaagaa

SEQ ID NO: 622743 - RNA, 19 nt, Homo sapiens
  misc_RNA (1)...(19): siRNA sense strand
gccagugccucugccaagu

SEQ ID NO: 622744 - RNA, 19 nt, Homo sapiens
  misc_RNA (1)...(19): siRNA sense strand
cccagaagcagcuacacuu

SEQ ID NO: 622745 - RNA, 19 nt, Homo sapiens
  misc_RNA (1)...(19): siRNA sense strand
uggagaccgugaagaagca

SEQ ID NO: 622746 - RNA, 19 nt, Homo sapiens
  misc_RNA (1)...(19): siRNA sense strand
caaguugcacgcgcuuaga

SEQ ID NO: 622747 - RNA, 19 nt, Homo sapiens
  misc_RNA (1)...(19): siRNA sense strand
ccaaguugcacgcgcuuag

SEQ ID NO: 622748 - RNA, 19 nt, Homo sapiens
  misc_RNA (1)...(19): siRNA sense strand
ggccgaggauggaugauug

SEQ ID NO: 622749 - RNA, 19 nt, Homo sapiens
  misc_RNA (1)...(19): siRNA sense strand
gaagcccucucccaagauc

SEQ ID NO: 622750 - RNA, 19 nt, Homo sapiens
  misc_RNA (1)...(19): siRNA sense strand
aggaagcccucucccaaga

SEQ ID NO: 622751 - RNA, 19 nt, Homo sapiens
  misc_RNA (1)...(19): siRNA sense strand
ggaagcccucucccaagau

SEQ ID NO: 622752 - RNA, 19 nt, Homo sapiens
  misc_RNA (1)...(19): siRNA sense strand
gaugauuguggcagcagaa

SEQ ID NO: 622753 - RNA, 19 nt, Homo sapiens
  misc_RNA (1)...(19): siRNA sense strand
cgaguuggccgaggaugga

SEQ ID NO: 622754 - RNA, 19 nt, Homo sapiens
  misc_RNA (1)...(19): siRNA sense strand
ggccgaggauggaugauug

SEQ ID NO: 622755 - RNA, 19 nt, Homo sapiens
  misc_RNA (1)...(19): siRNA sense strand
gaagcccucucccaagauc

SEQ ID NO: 622756 - RNA, 19 nt, Homo sapiens
  misc_RNA (1)...(19): siRNA sense strand
aggaagcccucucccaaga

SEQ ID NO: 622757 - RNA, 19 nt, Homo sapiens
  misc_RNA (1)...(19): siRNA sense strand
ggaagcccucucccaagau

SEQ ID NO: 622758 - RNA, 19 nt, Homo sapiens
  misc_RNA (1)...(19): siRNA sense strand
gaugauuguggcagcagaa

SEQ ID NO: 622759 - RNA, 19 nt, Homo sapiens
  misc_RNA (1)...(19): siRNA sense strand
cgaguuggccgaggaugga

SEQ ID NO: 622760 - RNA, 19 nt, Homo sapiens
  misc_RNA (1)...(19): siRNA sense strand
ggagagugcugccaaguug

SEQ ID NO: 622761 - RNA, 19 nt, Homo sapiens
  misc_RNA (1)...(19): siRNA sense strand
caagaugaaugaacuaaug

SEQ ID NO: 622762 - RNA, 19 nt, Homo sapiens
  misc_RNA (1)...(19): siRNA sense strand
ugaaugaacuaauggagaa

SEQ ID NO: 622763 - RNA, 19 nt, Homo sapiens
  misc_RNA (1)...(19): siRNA sense strand
caacagaggugaagaucca

SEQ ID NO: 622764 - RNA, 19 nt, Homo sapiens
  misc_RNA (1)...(19): siRNA sense strand
ucacagagccaaagacaau

SEQ ID NO: 622765 - RNA, 19 nt, Homo sapiens
  misc_RNA (1)...(19): siRNA sense strand
gagucuagcuaccaagaug

SEQ ID NO: 622766 - RNA, 19 nt, Homo sapiens
  misc_RNA (1)...(19): siRNA sense strand
caaagacaauucaggaacu

SEQ ID NO: 622767 - RNA, 19 nt, Homo sapiens
  misc_RNA (1)...(19): siRNA sense strand
gugaagauccaagaaauga

SEQ ID NO: 622768 - RNA, 19 nt, Homo sapiens
  misc_RNA (1)...(19): siRNA sense strand
ggcagcagcuccgucauga

SEQ ID NO: 622769 - RNA, 19 nt, Homo sapiens
  misc_RNA (1)...(19): siRNA sense strand
gaggugaagauccaagaaa

SEQ ID NO: 622770 - RNA, 19 nt, Homo sapiens
  misc_RNA (1)...(19): siRNA sense strand
cuaccaagaugaaugaacu

SEQ ID NO: 622771 - RNA, 19 nt, Homo sapiens
  misc_RNA (1)...(19): siRNA sense strand
ucaacaagcagagugauga

SEQ ID NO: 622772 - RNA, 19 nt, Homo sapiens
  misc_RNA (1)...(19): siRNA sense strand
gcagcuccgucaugagucu

SEQ ID NO: 622773 - RNA, 19 nt, Homo sapiens
  misc_RNA (1)...(19): siRNA sense strand
ugaaaggggucccaacaga

SEQ ID NO: 622774 - RNA, 19 nt, Homo sapiens
  misc_RNA (1)...(19): siRNA sense strand
ggugaagauccaagaaaug

SEQ ID NO: 622775 - RNA, 19 nt, Homo sapiens
  misc_RNA (1)...(19): siRNA sense strand
uagcuaccaagaugaauga

SEQ ID NO: 622776 - RNA, 19 nt, Homo sapiens
  misc_RNA (1)...(19): siRNA sense strand
ggaagcugaaggaccuaaa

SEQ ID NO: 622777 - RNA, 19 nt, Homo sapiens
  misc_RNA (1)...(19): siRNA sense strand
cagcagcuccgucaugagu

SEQ ID NO: 622778 - RNA, 19 nt, Homo sapiens
  misc_RNA (1)...(19): siRNA sense strand
caaguggucauggcaguug

SEQ ID NO: 622779 - RNA, 19 nt, Homo sapiens
  misc_RNA (1)...(19): siRNA sense strand
ucaugagucuagcuaccaa

SEQ ID NO: 622780 - RNA, 19 nt, Homo sapiens
  misc_RNA (1)...(19): siRNA sense strand
gccaaagacaauucaggaa

SEQ ID NO: 622781 - RNA, 19 nt, Homo sapiens
  misc_RNA (1)...(19): siRNA sense strand
aggugaagauccaagaaau

SEQ ID NO: 622782 - RNA, 19 nt, Homo sapiens
  misc_RNA (1)...(19): siRNA sense strand
aaagacaauucaggaacug

SEQ ID NO: 622783 - RNA, 19 nt, Homo sapiens
  misc_RNA (1)...(19): siRNA sense strand
cagaguaccgcuuggagau

SEQ ID NO: 622784 - RNA, 19 nt, Homo sapiens
  misc_RNA (1)...(19): siRNA sense strand
gaaugaacuaauggagaaa

SEQ ID NO: 622785 - RNA, 19 nt, Homo sapiens
  misc_RNA (1)...(19): siRNA sense strand
gcaaguggucauggcaguu

SEQ ID NO: 622786 - RNA, 19 nt, Homo sapiens
  misc_RNA (1)...(19): siRNA sense strand
uaucacagagccaaagaca

SEQ ID NO: 622787 - RNA, 19 nt, Homo sapiens
  misc_RNA (1)...(19): siRNA sense strand
gaagcugaaggaccuaaac

SEQ ID NO: 622788 - RNA, 19 nt, Homo sapiens
  misc_RNA (1)...(19): siRNA sense strand
ccaagaugaaugaacuaau

SEQ ID NO: 622789 - RNA, 19 nt, Homo sapiens
  misc_RNA (1)...(19): siRNA sense strand
gcagcaaggcgagcagauc

SEQ ID NO: 622790 - RNA, 19 nt, Homo sapiens
  misc_RNA (1)...(19): siRNA sense strand
uccaagaaaugacgaagcu

SEQ ID NO: 622791 - RNA, 19 nt, Homo sapiens
  misc_RNA (1)...(19): siRNA sense strand
ccucgagggucuguauauc

SEQ ID NO: 622792 - RNA, 19 nt, Homo sapiens
  misc_RNA (1)...(19): siRNA sense strand
accauugggugcuccaguu

SEQ ID NO: 622793 - RNA, 19 nt, Homo sapiens
  misc_RNA (1)...(19): siRNA sense strand
ccguggagaccgugaagaa

SEQ ID NO: 622794 - RNA, 19 nt, Homo sapiens
  misc_RNA (1)...(19): siRNA sense strand
gccagugccucugccaagu

SEQ ID NO: 622795 - RNA, 19 nt, Homo sapiens
  misc_RNA (1)...(19): siRNA sense strand
cccagaagcagcuacacuu

SEQ ID NO: 622796 - RNA, 19 nt, Homo sapiens
  misc_RNA (1)...(19): siRNA sense strand
uggagaccgugaagaagca

SEQ ID NO: 622797 - RNA, 19 nt, Homo sapiens
  misc_RNA (1)...(19): siRNA sense strand
caaguugcacgcgcuuaga

SEQ ID NO: 622798 - RNA, 19 nt, Homo sapiens
  misc_RNA (1)...(19): siRNA sense strand
ccaaguugcacgcgcuuag

SEQ ID NO: 622799 - RNA, 19 nt, Homo sapiens
  misc_RNA (1)...(19): siRNA sense strand
ggccgaggauggaugauug

SEQ ID NO: 622800 - RNA, 19 nt, Homo sapiens
  misc_RNA (1)...(19): siRNA sense strand
gaagcccucucccaagauc

SEQ ID NO: 622801 - RNA, 19 nt, Homo sapiens
  misc_RNA (1)...(19): siRNA sense strand
aggaagcccucucccaaga

SEQ ID NO: 622802 - RNA, 19 nt, Homo sapiens
  misc_RNA (1)...(19): siRNA sense strand
ggaagcccucucccaagau

SEQ ID NO: 622803 - RNA, 19 nt, Homo sapiens
  misc_RNA (1)...(19): siRNA sense strand
gaugauuguggcagcagaa

SEQ ID NO: 622804 - RNA, 19 nt, Homo sapiens
  misc_RNA (1)...(19): siRNA sense strand
cgaguuggccgaggaugga

SEQ ID NO: 622805 - RNA, 19 nt, Homo sapiens
  misc_RNA (1)...(19): siRNA sense strand
ggccgaggauggaugauug

SEQ ID NO: 622806 - RNA, 19 nt, Homo sapiens
  misc_RNA (1)...(19): siRNA sense strand
gaagcccucucccaagauc

SEQ ID NO: 622807 - RNA, 19 nt, Homo sapiens
  misc_RNA (1)...(19): siRNA sense strand
aggaagcccucucccaaga

SEQ ID NO: 622808 - RNA, 19 nt, Homo sapiens
  misc_RNA (1)...(19): siRNA sense strand
ggaagcccucucccaagau

SEQ ID NO: 622809 - RNA, 19 nt, Homo sapiens
  misc_RNA (1)...(19): siRNA sense strand
gaugauuguggcagcagaa

SEQ ID NO: 622810 - RNA, 19 nt, Homo sapiens
  misc_RNA (1)...(19): siRNA sense strand
cgaguuggccgaggaugga

SEQ ID NO: 622811 - RNA, 19 nt, Homo sapiens
  misc_RNA (1)...(19): siRNA sense strand
ggagagugcugccaaguug

SEQ ID NO: 622812 - RNA, 19 nt, Homo sapiens
  misc_RNA (1)...(19): siRNA sense strand
caagaugaaugaacuaaug

SEQ ID NO: 622813 - RNA, 19 nt, Homo sapiens
  misc_RNA (1)...(19): siRNA sense strand
ugaaugaacuaauggagaa

SEQ ID NO: 622814 - RNA, 19 nt, Homo sapiens
  misc_RNA (1)...(19): siRNA sense strand
caacagaggugaagaucca

SEQ ID NO: 622815 - RNA, 19 nt, Homo sapiens
  misc_RNA (1)...(19): siRNA sense strand
ucacagagccaaagacaau

SEQ ID NO: 622816 - RNA, 19 nt, Homo sapiens
  misc_RNA (1)...(19): siRNA sense strand
gagucuagcuaccaagaug

SEQ ID NO: 622817 - RNA, 19 nt, Homo sapiens
  misc_RNA (1)...(19): siRNA sense strand
caaagacaauucaggaacu

SEQ ID NO: 622818 - RNA, 19 nt, Homo sapiens
  misc_RNA (1)...(19): siRNA sense strand
gugaagauccaagaaauga

SEQ ID NO: 622819 - RNA, 19 nt, Homo sapiens
  misc_RNA (1)...(19): siRNA sense strand
ggcagcagcuccgucauga

SEQ ID NO: 622820 - RNA, 19 nt, Homo sapiens
  misc_RNA (1)...(19): siRNA sense strand
gaggugaagauccaagaaa

SEQ ID NO: 622821 - RNA, 19 nt, Homo sapiens
  misc_RNA (1)...(19): siRNA sense strand
cuaccaagaugaaugaacu

SEQ ID NO: 622822 - RNA, 19 nt, Homo sapiens
  misc_RNA (1)...(19): siRNA sense strand
ucaacaagcagagugauga

SEQ ID NO: 622823 - RNA, 19 nt, Homo sapiens
  misc_RNA (1)...(19): siRNA sense strand
gcagcuccgucaugagucu

SEQ ID NO: 622824 - RNA, 19 nt, Homo sapiens
  misc_RNA (1)...(19): siRNA sense strand
ugaaaggggucccaacaga

SEQ ID NO: 622825 - RNA, 19 nt, Homo sapiens
  misc_RNA (1)...(19): siRNA sense strand
ggugaagauccaagaaaug

SEQ ID NO: 622826 - RNA, 19 nt, Homo sapiens
  misc_RNA (1)...(19): siRNA sense strand
uagcuaccaagaugaauga

SEQ ID NO: 622827 - RNA, 19 nt, Homo sapiens
  misc_RNA (1)...(19): siRNA sense strand
ggaagcugaaggaccuaaa

SEQ ID NO: 622828 - RNA, 19 nt, Homo sapiens
  misc_RNA (1)...(19): siRNA sense strand
cagcagcuccgucaugagu

SEQ ID NO: 622829 - RNA, 19 nt, Homo sapiens
  misc_RNA (1)...(19): siRNA sense strand
caaguggucauggcaguug

SEQ ID NO: 622830 - RNA, 19 nt, Homo sapiens
  misc_RNA (1)...(19): siRNA sense strand
ucaugagucuagcuaccaa

SEQ ID NO: 622831 - RNA, 19 nt, Homo sapiens
  misc_RNA (1)...(19): siRNA sense strand
gccaaagacaauucaggaa

SEQ ID NO: 622832 - RNA, 19 nt, Homo sapiens
  misc_RNA (1)...(19): siRNA sense strand
aggugaagauccaagaaau

SEQ ID NO: 622833 - RNA, 19 nt, Homo sapiens
  misc_RNA (1)...(19): siRNA sense strand
aaagacaauucaggaacug

SEQ ID NO: 622834 - RNA, 19 nt, Homo sapiens
  misc_RNA (1)...(19): siRNA sense strand
cagaguaccgcuuggagau

SEQ ID NO: 622835 - RNA, 19 nt, Homo sapiens
  misc_RNA (1)...(19): siRNA sense strand
gaaugaacuaauggagaaa

SEQ ID NO: 622836 - RNA, 19 nt, Homo sapiens
  misc_RNA (1)...(19): siRNA sense strand
gcaaguggucauggcaguu

SEQ ID NO: 622837 - RNA, 19 nt, Homo sapiens
  misc_RNA (1)...(19): siRNA sense strand
uaucacagagccaaagaca

SEQ ID NO: 622838 - RNA, 19 nt, Homo sapiens
  misc_RNA (1)...(19): siRNA sense strand
gaagcugaaggaccuaaac

SEQ ID NO: 622839 - RNA, 19 nt, Homo sapiens
  misc_RNA (1)...(19): siRNA sense strand
ccaagaugaaugaacuaau

SEQ ID NO: 622840 - RNA, 19 nt, Homo sapiens
  misc_RNA (1)...(19): siRNA sense strand
gcagcaaggcgagcagauc

SEQ ID NO: 622841 - RNA, 19 nt, Homo sapiens
  misc_RNA (1)...(19): siRNA sense strand
uccaagaaaugacgaagcu

SEQ ID NO: 622842 - RNA, 19 nt, Homo sapiens
  misc_RNA (1)...(19): siRNA sense strand
ccucgagggucuguauauc

SEQ ID NO: 622843 - RNA, 19 nt, Homo sapiens
  misc_RNA (1)...(19): siRNA sense strand
accauugggugcuccaguu

SEQ ID NO: 622844 - RNA, 19 nt, Homo sapiens
  misc_RNA (1)...(19): siRNA sense strand
ccguggagaccgugaagaa

SEQ ID NO: 622845 - RNA, 19 nt, Homo sapiens
  misc_RNA (1)...(19): siRNA sense strand
gccagugccucugccaagu

SEQ ID NO: 622846 - RNA, 19 nt, Homo sapiens
  misc_RNA (1)...(19): siRNA sense strand
cccagaagcagcuacacuu

SEQ ID NO: 622847 - RNA, 19 nt, Homo sapiens
  misc_RNA (1)...(19): siRNA sense strand
uggagaccgugaagaagca

SEQ ID NO: 622848 - RNA, 19 nt, Homo sapiens
  misc_RNA (1)...(19): siRNA sense strand
caaguugcacgcgcuuaga

SEQ ID NO: 622849 - RNA, 19 nt, Homo sapiens
  misc_RNA (1)...(19): siRNA sense strand
ccaaguugcacgcgcuuag

SEQ ID NO: 622850 - RNA, 19 nt, Homo sapiens
  misc_RNA (1)...(19): siRNA sense strand
ggccgaggauggaugauug

SEQ ID NO: 622851 - RNA, 19 nt, Homo sapiens
  misc_RNA (1)...(19): siRNA sense strand
gaagcccucucccaagauc

SEQ ID NO: 622852 - RNA, 19 nt, Homo sapiens
  misc_RNA (1)...(19): siRNA sense strand
aggaagcccucucccaaga

SEQ ID NO: 622853 - RNA, 19 nt, Homo sapiens
  misc_RNA (1)...(19): siRNA sense strand
ggaagcccucucccaagau

SEQ ID NO: 622854 - RNA, 19 nt, Homo sapiens
  misc_RNA (1)...(19): siRNA sense strand
gaugauuguggcagcagaa

SEQ ID NO: 622855 - RNA, 19 nt, Homo sapiens
  misc_RNA (1)...(19): siRNA sense strand
cgaguuggccgaggaugga

SEQ ID NO: 622856 - RNA, 19 nt, Homo sapiens
  misc_RNA (1)...(19): siRNA sense strand
ggccgaggauggaugauug

SEQ ID NO: 622857 - RNA, 19 nt, Homo sapiens
  misc_RNA (1)...(19): siRNA sense strand
gaagcccucucccaagauc

SEQ ID NO: 622858 - RNA, 19 nt, Homo sapiens
  misc_RNA (1)...(19): siRNA sense strand
aggaagcccucucccaaga

SEQ ID NO: 622859 - RNA, 19 nt, Homo sapiens
  misc_RNA (1)...(19): siRNA sense strand
ggaagcccucucccaagau

SEQ ID NO: 622860 - RNA, 19 nt, Homo sapiens
  misc_RNA (1)...(19): siRNA sense strand
gaugauuguggcagcagaa

SEQ ID NO: 622861 - RNA, 19 nt, Homo sapiens
  misc_RNA (1)...(19): siRNA sense strand
cgaguuggccgaggaugga

SEQ ID NO: 622862 - RNA, 19 nt, Homo sapiens
  misc_RNA (1)...(19): siRNA sense strand
ggagagugcugccaaguug

SEQ ID NO: 622863 - RNA, 19 nt, Homo sapiens
  misc_RNA (1)...(19): siRNA sense strand
caagaugaaugaacuaaug

SEQ ID NO: 622864 - RNA, 19 nt, Homo sapiens
  misc_RNA (1)...(19): siRNA sense strand
ugaaugaacuaauggagaa

SEQ ID NO: 622865 - RNA, 19 nt, Homo sapiens
  misc_RNA (1)...(19): siRNA sense strand
caacagaggugaagaucca

SEQ ID NO: 622866 - RNA, 19 nt, Homo sapiens
  misc_RNA (1)...(19): siRNA sense strand
ucacagagccaaagacaau

SEQ ID NO: 622867 - RNA, 19 nt, Homo sapiens
  misc_RNA (1)...(19): siRNA sense strand
gagucuagcuaccaagaug

SEQ ID NO: 622868 - RNA, 19 nt, Homo sapiens
  misc_RNA (1)...(19): siRNA sense strand
caaagacaauucaggaacu

SEQ ID NO: 622869 - RNA, 19 nt, Homo sapiens
  misc_RNA (1)...(19): siRNA sense strand
gugaagauccaagaaauga

SEQ ID NO: 622870 - RNA, 19 nt, Homo sapiens
  misc_RNA (1)...(19): siRNA sense strand
ggcagcagcuccgucauga

SEQ ID NO: 622871 - RNA, 19 nt, Homo sapiens
  misc_RNA (1)...(19): siRNA sense strand
gaggugaagauccaagaaa

SEQ ID NO: 622872 - RNA, 19 nt, Homo sapiens
  misc_RNA (1)...(19): siRNA sense strand
cuaccaagaugaaugaacu

SEQ ID NO: 622873 - RNA, 19 nt, Homo sapiens
  misc_RNA (1)...(19): siRNA sense strand
ucaacaagcagagugauga

SEQ ID NO: 622874 - RNA, 19 nt, Homo sapiens
  misc_RNA (1)...(19): siRNA sense strand
gcagcuccgucaugagucu

SEQ ID NO: 622875 - RNA, 19 nt, Homo sapiens
  misc_RNA (1)...(19): siRNA sense strand
ugaaaggggucccaacaga

SEQ ID NO: 622876 - RNA, 19 nt, Homo sapiens
  misc_RNA (1)...(19): siRNA sense strand
ggugaagauccaagaaaug

SEQ ID NO: 622877 - RNA, 19 nt, Homo sapiens
  misc_RNA (1)...(19): siRNA sense strand
uagcuaccaagaugaauga

SEQ ID NO: 622878 - RNA, 19 nt, Homo sapiens
  misc_RNA (1)...(19): siRNA sense strand
ggaagcugaaggaccuaaa

SEQ ID NO: 622879 - RNA, 19 nt, Homo sapiens
  misc_RNA (1)...(19): siRNA sense strand
cagcagcuccgucaugagu

SEQ ID NO: 622880 - RNA, 19 nt, Homo sapiens
  misc_RNA (1)...(19): siRNA sense strand
caaguggucauggcaguug

SEQ ID NO: 622881 - RNA, 19 nt, Homo sapiens
  misc_RNA (1)...(19): siRNA sense strand
ucaugagucuagcuaccaa

SEQ ID NO: 622882 - RNA, 19 nt, Homo sapiens
  misc_RNA (1)...(19): siRNA sense strand
gccaaagacaauucaggaa

SEQ ID NO: 622883 - RNA, 19 nt, Homo sapiens
  misc_RNA (1)...(19): siRNA sense strand
aggugaagauccaagaaau

SEQ ID NO: 622884 - RNA, 19 nt, Homo sapiens
  misc_RNA (1)...(19): siRNA sense strand
aaagacaauucaggaacug

SEQ ID NO: 622885 - RNA, 19 nt, Homo sapiens
  misc_RNA (1)...(19): siRNA sense strand
cagaguaccgcuuggagau

SEQ ID NO: 622886 - RNA, 19 nt, Homo sapiens
  misc_RNA (1)...(19): siRNA sense strand
gaaugaacuaauggagaaa

SEQ ID NO: 622887 - RNA, 19 nt, Homo sapiens
  misc_RNA (1)...(19): siRNA sense strand
gcaaguggucauggcaguu

SEQ ID NO: 622888 - RNA, 19 nt, Homo sapiens
  misc_RNA (1)...(19): siRNA sense strand
uaucacagagccaaagaca

SEQ ID NO: 622889 - RNA, 19 nt, Homo sapiens
  misc_RNA (1)...(19): siRNA sense strand
gaagcugaaggaccuaaac

SEQ ID NO: 622890 - RNA, 19 nt, Homo sapiens
  misc_RNA (1)...(19): siRNA sense strand
ccaagaugaaugaacuaau

SEQ ID NO: 622891 - RNA, 19 nt, Homo sapiens
  misc_RNA (1)...(19): siRNA sense strand
gcagcaaggcgagcagauc

SEQ ID NO: 622892 - RNA, 19 nt, Homo sapiens
  misc_RNA (1)...(19): siRNA sense strand
uccaagaaaugacgaagcu

SEQ ID NO: 622893 - RNA, 19 nt, Homo sapiens
  misc_RNA (1)...(19): siRNA sense strand
ccucgagggucuguauauc

SEQ ID NO: 622894 - RNA, 19 nt, Homo sapiens
  misc_RNA (1)...(19): siRNA sense strand
accauugggugcuccaguu

SEQ ID NO: 622895 - RNA, 19 nt, Homo sapiens
  misc_RNA (1)...(19): siRNA sense strand
ccguggagaccgugaagaa

SEQ ID NO: 622896 - RNA, 19 nt, Homo sapiens
  misc_RNA (1)...(19): siRNA sense strand
gccagugccucugccaagu

SEQ ID NO: 622897 - RNA, 19 nt, Homo sapiens
  misc_RNA (1)...(19): siRNA sense strand
cccagaagcagcuacacuu

SEQ ID NO: 622898 - RNA, 19 nt, Homo sapiens
  misc_RNA (1)...(19): siRNA sense strand
uggagaccgugaagaagca

SEQ ID NO: 622899 - RNA, 19 nt, Homo sapiens
  misc_RNA (1)...(19): siRNA sense strand
caaguugcacgcgcuuaga

SEQ ID NO: 622900 - RNA, 19 nt, Homo sapiens
  misc_RNA (1)...(19): siRNA sense strand
ccaaguugcacgcgcuuag

SEQ ID NO: 622901 - RNA, 19 nt, Homo sapiens
  misc_RNA (1)...(19): siRNA sense strand
ggccgaggauggaugauug

SEQ ID NO: 622902 - RNA, 19 nt, Homo sapiens
  misc_RNA (1)...(19): siRNA sense strand
gaagcccucucccaagauc

SEQ ID NO: 622903 - RNA, 19 nt, Homo sapiens
  misc_RNA (1)...(19): siRNA sense strand
aggaagcccucucccaaga

SEQ ID NO: 622904 - RNA, 19 nt, Homo sapiens
  misc_RNA (1)...(19): siRNA sense strand
ggaagcccucucccaagau

SEQ ID NO: 622905 - RNA, 19 nt, Homo sapiens
  misc_RNA (1)...(19): siRNA sense strand
gaugauuguggcagcagaa

SEQ ID NO: 622906 - RNA, 19 nt, Homo sapiens
  misc_RNA (1)...(19): siRNA sense strand
cgaguuggccgaggaugga

SEQ ID NO: 622907 - RNA, 19 nt, Homo sapiens
  misc_RNA (1)...(19): siRNA sense strand
ggccgaggauggaugauug

SEQ ID NO: 622908 - RNA, 19 nt, Homo sapiens
  misc_RNA (1)...(19): siRNA sense strand
gaagcccucucccaagauc

SEQ ID NO: 622909 - RNA, 19 nt, Homo sapiens
  misc_RNA (1)...(19): siRNA sense strand
aggaagcccucucccaaga

SEQ ID NO: 622910 - RNA, 19 nt, Homo sapiens
  misc_RNA (1)...(19): siRNA sense strand
ggaagcccucucccaagau

SEQ ID NO: 622911 - RNA, 19 nt, Homo sapiens
  misc_RNA (1)...(19): siRNA sense strand
gaugauuguggcagcagaa

SEQ ID NO: 622912 - RNA, 19 nt, Homo sapiens
  misc_RNA (1)...(19): siRNA sense strand
cgaguuggccgaggaugga

SEQ ID NO: 622913 - RNA, 19 nt, Homo sapiens
  misc_RNA (1)...(19): siRNA sense strand
ggacaaaccuggaauuucu

SEQ ID NO: 622914 - RNA, 19 nt, Homo sapiens
  misc_RNA (1)...(19): siRNA sense strand
auaagaagcuucaggaaua

SEQ ID NO: 622915 - RNA, 19 nt, Homo sapiens
  misc_RNA (1)...(19): siRNA sense strand
caacagcuaugucaugguu

SEQ ID NO: 622916 - RNA, 19 nt, Homo sapiens
  misc_RNA (1)...(19): siRNA sense strand
cagaaugggucccuauuau

SEQ ID NO: 622917 - RNA, 19 nt, Homo sapiens
  misc_RNA (1)...(19): siRNA sense strand
caagagcaguuuaauagca

SEQ ID NO: 622918 - RNA, 19 nt, Homo sapiens
  misc_RNA (1)...(19): siRNA sense strand
gcaggcagccauucccaua

SEQ ID NO: 622919 - RNA, 19 nt, Homo sapiens
  misc_RNA (1)...(19): siRNA sense strand
gacgaguucugcaagauga

SEQ ID NO: 622920 - RNA, 19 nt, Homo sapiens
  misc_RNA (1)...(19): siRNA sense strand
guuggaaccuucaaucuuc

SEQ ID NO: 622921 - RNA, 19 nt, Homo sapiens
  misc_RNA (1)...(19): siRNA sense strand
cagcagcuccggucugaua

SEQ ID NO: 622922 - RNA, 19 nt, Homo sapiens
  misc_RNA (1)...(19): siRNA sense strand
gauaagaagcuucaggaau

SEQ ID NO: 622923 - RNA, 19 nt, Homo sapiens
  misc_RNA (1)...(19): siRNA sense strand
ccagaaugggucccuauua

SEQ ID NO: 622924 - RNA, 19 nt, Homo sapiens
  misc_RNA (1)...(19): siRNA sense strand
cagaaccaguugaaaguga

SEQ ID NO: 622925 - RNA, 19 nt, Homo sapiens
  misc_RNA (1)...(19): siRNA sense strand
aaguauugcugccuucaua

SEQ ID NO: 622926 - RNA, 19 nt, Homo sapiens
  misc_RNA (1)...(19): siRNA sense strand
gcuccggucugauauacaa

SEQ ID NO: 622927 - RNA, 19 nt, Homo sapiens
  misc_RNA (1)...(19): siRNA sense strand
ggugauggcucagcacaug

SEQ ID NO: 622928 - RNA, 19 nt, Homo sapiens
  misc_RNA (1)...(19): siRNA sense strand
gggcccagaugaauguaaa

SEQ ID NO: 622929 - RNA, 19 nt, Homo sapiens
  misc_RNA (1)...(19): siRNA sense strand
aggcaugacugacuucuug

SEQ ID NO: 622930 - RNA, 19 nt, Homo sapiens
  misc_RNA (1)...(19): siRNA sense strand
ugagcuggcugaccacuau

SEQ ID NO: 622931 - RNA, 19 nt, Homo sapiens
  misc_RNA (1)...(19): siRNA sense strand
ggauauacagaccuuacua

SEQ ID NO: 622932 - RNA, 19 nt, Homo sapiens
  misc_RNA (1)...(19): siRNA sense strand
ggagcuugcugcuguuauc

SEQ ID NO: 622933 - RNA, 19 nt, Homo sapiens
  misc_RNA (1)...(19): siRNA sense strand
gauggcaacccacacauug

SEQ ID NO: 622934 - RNA, 19 nt, Homo sapiens
  misc_RNA (1)...(19): siRNA sense strand
ccaccacggacuacaauaa

SEQ ID NO: 622935 - RNA, 19 nt, Homo sapiens
  misc_RNA (1)...(19): siRNA sense strand
gcacaugaucagggauaua

SEQ ID NO: 622936 - RNA, 19 nt, Homo sapiens
  misc_RNA (1)...(19): siRNA sense strand
uugcacagauaguggauuu

SEQ ID NO: 622937 - RNA, 19 nt, Homo sapiens
  misc_RNA (1)...(19): siRNA sense strand
ucaaacaucagaaccaguu

SEQ ID NO: 622938 - RNA, 19 nt, Homo sapiens
  misc_RNA (1)...(19): siRNA sense strand
caaacucguaccuuuauug

SEQ ID NO: 622939 - RNA, 19 nt, Homo sapiens
  misc_RNA (1)...(19): siRNA sense strand
gcuuggagguguuggugaa

SEQ ID NO: 622940 - RNA, 19 nt, Homo sapiens
  misc_RNA (1)...(19): siRNA sense strand
gauauacagaccuuacuau

SEQ ID NO: 622941 - RNA, 19 nt, Homo sapiens
  misc_RNA (1)...(19): siRNA sense strand
ugacggcucugcuguggau

SEQ ID NO: 622942 - RNA, 19 nt, Homo sapiens
  misc_RNA (1)...(19): siRNA sense strand
ucucaaacucguaccuuua

SEQ ID NO: 622943 - RNA, 19 nt, Homo sapiens
  misc_RNA (1)...(19): siRNA sense strand
gcaagaugauaagaagcuu

SEQ ID NO: 622944 - RNA, 19 nt, Homo sapiens
  misc_RNA (1)...(19): siRNA sense strand
gaacgggcuccuccucaga

SEQ ID NO: 622945 - RNA, 19 nt, Homo sapiens
  misc_RNA (1)...(19): siRNA sense strand
ccuucaaucuuccuaguga

SEQ ID NO: 622946 - RNA, 19 nt, Homo sapiens
  misc_RNA (1)...(19): siRNA sense strand
gaaccacugugaccaugac

SEQ ID NO: 622947 - RNA, 19 nt, Homo sapiens
  misc_RNA (1)...(19): siRNA sense strand
gcucugcuguggauguuca

SEQ ID NO: 622948 - RNA, 19 nt, Homo sapiens
  misc_RNA (1)...(19): siRNA sense strand
uggcagcagugaaaguauu

SEQ ID NO: 622949 - RNA, 19 nt, Homo sapiens
  misc_RNA (1)...(19): siRNA sense strand
ggacgaguucugcaagaug

SEQ ID NO: 622950 - RNA, 19 nt, Homo sapiens
  misc_RNA (1)...(19): siRNA sense strand
uccaagagcaguuuaauag

SEQ ID NO: 622951 - RNA, 19 nt, Homo sapiens
  misc_RNA (1)...(19): siRNA sense strand
ugaagaccuuggacucuca

SEQ ID NO: 622952 - RNA, 19 nt, Homo sapiens
  misc_RNA (1)...(19): siRNA sense strand
gcagcuccggucugauaua

SEQ ID NO: 622953 - RNA, 19 nt, Homo sapiens
  misc_RNA (1)...(19): siRNA sense strand
uguaggcccugaugccauu

SEQ ID NO: 622954 - RNA, 19 nt, Homo sapiens
  misc_RNA (1)...(19): siRNA sense strand
uugaaugccuggcccuaaa

SEQ ID NO: 622955 - RNA, 19 nt, Homo sapiens
  misc_RNA (1)...(19): siRNA sense strand
caucagaaccaguugaaag

SEQ ID NO: 622956 - RNA, 19 nt, Homo sapiens
  misc_RNA (1)...(19): siRNA sense strand
ucaaacucguaccuuuauu

SEQ ID NO: 622957 - RNA, 19 nt, Homo sapiens
  misc_RNA (1)...(19): siRNA sense strand
cuucaggaauacaauguug

SEQ ID NO: 622958 - RNA, 19 nt, Homo sapiens
  misc_RNA (1)...(19): siRNA sense strand
gcacagauaguggauuugg

SEQ ID NO: 622959 - RNA, 19 nt, Homo sapiens
  misc_RNA (1)...(19): siRNA sense strand
cagcacaugaucagggaua

SEQ ID NO: 622960 - RNA, 19 nt, Homo sapiens
  misc_RNA (1)...(19): siRNA sense strand
gaaguucagggagcagaaa

SEQ ID NO: 622961 - RNA, 19 nt, Homo sapiens
  misc_RNA (1)...(19): siRNA sense strand
ucacggggcuagaagagua

SEQ ID NO: 622962 - RNA, 19 nt, Homo sapiens
  misc_RNA (1)...(19): siRNA sense strand
ggauggcaacccacacauu

SEQ ID NO: 622963 - RNA, 19 nt, Homo sapiens
  misc_RNA (1)...(19): siRNA sense strand
ucagggauauacagaccuu

SEQ ID NO: 622964 - RNA, 19 nt, Homo sapiens
  misc_RNA (1)...(19): siRNA sense strand
uaagaagcuucaggaauac

SEQ ID NO: 622965 - RNA, 19 nt, Homo sapiens
  misc_RNA (1)...(19): siRNA sense strand
uaaccaaggccuguuugaa

SEQ ID NO: 622966 - RNA, 19 nt, Homo sapiens
  misc_RNA (1)...(19): siRNA sense strand
ggacuacaauaacaaucac

SEQ ID NO: 622967 - RNA, 19 nt, Homo sapiens
  misc_RNA (1)...(19): siRNA sense strand
gcccauggaggcagaagaa

SEQ ID NO: 622968 - RNA, 19 nt, Homo sapiens
  misc_RNA (1)...(19): siRNA sense strand
gaaugggucccuauuaucc

SEQ ID NO: 622969 - RNA, 19 nt, Homo sapiens
  misc_RNA (1)...(19): siRNA sense strand
gauggagcuugcugcuguu

SEQ ID NO: 622970 - RNA, 19 nt, Homo sapiens
  misc_RNA (1)...(19): siRNA sense strand
accaaggccuguuugaaug

SEQ ID NO: 622971 - RNA, 19 nt, Homo sapiens
  misc_RNA (1)...(19): siRNA sense strand
gaaaguauugcugccuuca

SEQ ID NO: 622972 - RNA, 19 nt, Homo sapiens
  misc_RNA (1)...(19): siRNA sense strand
agaaccaguugaaagugaa

SEQ ID NO: 622973 - RNA, 19 nt, Homo sapiens
  misc_RNA (1)...(19): siRNA sense strand
uguuaucaauggccgaauu

SEQ ID NO: 622974 - RNA, 19 nt, Homo sapiens
  misc_RNA (1)...(19): siRNA sense strand
gcaacccacacauugauca

SEQ ID NO: 622975 - RNA, 19 nt, Homo sapiens
  misc_RNA (1)...(19): siRNA sense strand
gauccagcaacaucuuuga

SEQ ID NO: 622976 - RNA, 19 nt, Homo sapiens
  misc_RNA (1)...(19): siRNA sense strand
ggaaugccaacagcuaugu

SEQ ID NO: 622977 - RNA, 19 nt, Homo sapiens
  misc_RNA (1)...(19): siRNA sense strand
gcuugcugcuguuaucaau

SEQ ID NO: 622978 - RNA, 19 nt, Homo sapiens
  misc_RNA (1)...(19): siRNA sense strand
gggacgaguucugcaagau

SEQ ID NO: 622979 - RNA, 19 nt, Homo sapiens
  misc_RNA (1)...(19): siRNA sense strand
ccacggacuacaauaacaa

SEQ ID NO: 622980 - RNA, 19 nt, Homo sapiens
  misc_RNA (1)...(19): siRNA sense strand
auacaacgccucaguggau

SEQ ID NO: 622981 - RNA, 19 nt, Homo sapiens
  misc_RNA (1)...(19): siRNA sense strand
aaccaaggccuguuugaau

SEQ ID NO: 622982 - RNA, 19 nt, Homo sapiens
  misc_RNA (1)...(19): siRNA sense strand
caggagcccacacccagua

SEQ ID NO: 622983 - RNA, 19 nt, Homo sapiens
  misc_RNA (1)...(19): siRNA sense strand
ggaaccacugugaccauga

SEQ ID NO: 622984 - RNA, 19 nt, Homo sapiens
  misc_RNA (1)...(19): siRNA sense strand
ugguaugccugccaagaga

SEQ ID NO: 622985 - RNA, 19 nt, Homo sapiens
  misc_RNA (1)...(19): siRNA sense strand
ggaaguucagggagcagaa

SEQ ID NO: 622986 - RNA, 19 nt, Homo sapiens
  misc_RNA (1)...(19): siRNA sense strand
guaaccaaggccuguuuga

SEQ ID NO: 622987 - RNA, 19 nt, Homo sapiens
  misc_RNA (1)...(19): siRNA sense strand
ggauuucccaccagagugu

SEQ ID NO: 622988 - RNA, 19 nt, Homo sapiens
  misc_RNA (1)...(19): siRNA sense strand
gggccuugcuuucucuucu

SEQ ID NO: 622989 - RNA, 19 nt, Homo sapiens
  misc_RNA (1)...(19): siRNA sense strand
uggaggagccugacagcuu

SEQ ID NO: 622990 - RNA, 19 nt, Homo sapiens
  misc_RNA (1)...(19): siRNA sense strand
aacaacggcucauuuacca

SEQ ID NO: 622991 - RNA, 19 nt, Homo sapiens
  misc_RNA (1)...(19): siRNA sense strand
cccuaaaccugcacugcuu

SEQ ID NO: 622992 - RNA, 19 nt, Homo sapiens
  misc_RNA (1)...(19): siRNA sense strand
aaacaucagaaccaguuga

SEQ ID NO: 622993 - RNA, 19 nt, Homo sapiens
  misc_RNA (1)...(19): siRNA sense strand
gaccuuggacucucaaacu

SEQ ID NO: 622994 - RNA, 19 nt, Homo sapiens
  misc_RNA (1)...(19): siRNA sense strand
cugcgcaugugcugcauug

SEQ ID NO: 622995 - RNA, 19 nt, Homo sapiens
  misc_RNA (1)...(19): siRNA sense strand
ucugcaagaugauaagaag

SEQ ID NO: 622996 - RNA, 19 nt, Homo sapiens
  misc_RNA (1)...(19): siRNA sense strand
ccgagggucauccggauuu

SEQ ID NO: 622997 - RNA, 19 nt, Homo sapiens
  misc_RNA (1)...(19): siRNA sense strand
gcagcgcuacuacgagguu

SEQ ID NO: 622998 - RNA, 19 nt, Homo sapiens
  misc_RNA (1)...(19): siRNA sense strand
aaacaaaugcacccaacca

SEQ ID NO: 622999 - RNA, 19 nt, Homo sapiens
  misc_RNA (1)...(19): siRNA sense strand
aaacucguaccuuuauugu

SEQ ID NO: 623000 - RNA, 19 nt, Homo sapiens
  misc_RNA (1)...(19): siRNA sense strand
ccaagagacgcaagacgau

SEQ ID NO: 623001 - RNA, 19 nt, Homo sapiens
  misc_RNA (1)...(19): siRNA sense strand
gagccugucaccggaguuu

SEQ ID NO: 623002 - RNA, 19 nt, Homo sapiens
  misc_RNA (1)...(19): siRNA sense strand
caacccggguggugauugc

SEQ ID NO: 623003 - RNA, 19 nt, Homo sapiens
  misc_RNA (1)...(19): siRNA sense strand
caugugguccggccuaugu

SEQ ID NO: 623004 - RNA, 19 nt, Homo sapiens
  misc_RNA (1)...(19): siRNA sense strand
cauggaggcagaagaagug

SEQ ID NO: 623005 - RNA, 19 nt, Homo sapiens
  misc_RNA (1)...(19): siRNA sense strand
ugucugaccugcgcugcaa

SEQ ID NO: 623006 - RNA, 19 nt, Homo sapiens
  misc_RNA (1)...(19): siRNA sense strand
gaguuuaaggagcacauug

SEQ ID NO: 623007 - RNA, 19 nt, Homo sapiens
  misc_RNA (1)...(19): siRNA sense strand
ccuaaugauaguaccagua

SEQ ID NO: 623008 - RNA, 19 nt, Homo sapiens
  misc_RNA (1)...(19): siRNA sense strand
gcauuuccagccacuacaa

SEQ ID NO: 623009 - RNA, 19 nt, Homo sapiens
  misc_RNA (1)...(19): siRNA sense strand
gugccaggcuucccaacag

SEQ ID NO: 623010 - RNA, 19 nt, Homo sapiens
  misc_RNA (1)...(19): siRNA sense strand
aagagcaguuuaauagcau

SEQ ID NO: 623011 - RNA, 19 nt, Homo sapiens
  misc_RNA (1)...(19): siRNA sense strand
ggccgaauucgucguaugu

SEQ ID NO: 623012 - RNA, 19 nt, Homo sapiens
  misc_RNA (1)...(19): siRNA sense strand
cgaguucugcaagaugaua

SEQ ID NO: 623013 - RNA, 19 nt, Homo sapiens
  misc_RNA (1)...(19): siRNA sense strand
ggacaaaccuggaauuucu

SEQ ID NO: 623014 - RNA, 19 nt, Homo sapiens
  misc_RNA (1)...(19): siRNA sense strand
auaagaagcuucaggaaua

SEQ ID NO: 623015 - RNA, 19 nt, Homo sapiens
  misc_RNA (1)...(19): siRNA sense strand
caacagcuaugucaugguu

SEQ ID NO: 623016 - RNA, 19 nt, Homo sapiens
  misc_RNA (1)...(19): siRNA sense strand
cagaaugggucccuauuau

SEQ ID NO: 623017 - RNA, 19 nt, Homo sapiens
  misc_RNA (1)...(19): siRNA sense strand
caagagcaguuuaauagca

SEQ ID NO: 623018 - RNA, 19 nt, Homo sapiens
  misc_RNA (1)...(19): siRNA sense strand
gcaggcagccauucccaua

SEQ ID NO: 623019 - RNA, 19 nt, Homo sapiens
  misc_RNA (1)...(19): siRNA sense strand
gacgaguucugcaagauga

SEQ ID NO: 623020 - RNA, 19 nt, Homo sapiens
  misc_RNA (1)...(19): siRNA sense strand
guuggaaccuucaaucuuc

SEQ ID NO: 623021 - RNA, 19 nt, Homo sapiens
  misc_RNA (1)...(19): siRNA sense strand
cagcagcuccggucugaua

SEQ ID NO: 623022 - RNA, 19 nt, Homo sapiens
  misc_RNA (1)...(19): siRNA sense strand
gauaagaagcuucaggaau

SEQ ID NO: 623023 - RNA, 19 nt, Homo sapiens
  misc_RNA (1)...(19): siRNA sense strand
ccagaaugggucccuauua

SEQ ID NO: 623024 - RNA, 19 nt, Homo sapiens
  misc_RNA (1)...(19): siRNA sense strand
cagaaccaguugaaaguga

SEQ ID NO: 623025 - RNA, 19 nt, Homo sapiens
  misc_RNA (1)...(19): siRNA sense strand
aaguauugcugccuucaua

SEQ ID NO: 623026 - RNA, 19 nt, Homo sapiens
  misc_RNA (1)...(19): siRNA sense strand
gcuccggucugauauacaa

SEQ ID NO: 623027 - RNA, 19 nt, Homo sapiens
  misc_RNA (1)...(19): siRNA sense strand
ggugauggcucagcacaug

SEQ ID NO: 623028 - RNA, 19 nt, Homo sapiens
  misc_RNA (1)...(19): siRNA sense strand
gggcccagaugaauguaaa

SEQ ID NO: 623029 - RNA, 19 nt, Homo sapiens
  misc_RNA (1)...(19): siRNA sense strand
aggcaugacugacuucuug

SEQ ID NO: 623030 - RNA, 19 nt, Homo sapiens
  misc_RNA (1)...(19): siRNA sense strand
ugagcuggcugaccacuau

SEQ ID NO: 623031 - RNA, 19 nt, Homo sapiens
  misc_RNA (1)...(19): siRNA sense strand
ggauauacagaccuuacua

SEQ ID NO: 623032 - RNA, 19 nt, Homo sapiens
  misc_RNA (1)...(19): siRNA sense strand
ggagcuugcugcuguuauc

SEQ ID NO: 623033 - RNA, 19 nt, Homo sapiens
  misc_RNA (1)...(19): siRNA sense strand
gauggcaacccacacauug

SEQ ID NO: 623034 - RNA, 19 nt, Homo sapiens
  misc_RNA (1)...(19): siRNA sense strand
ccaccacggacuacaauaa

SEQ ID NO: 623035 - RNA, 19 nt, Homo sapiens
  misc_RNA (1)...(19): siRNA sense strand
gcacaugaucagggauaua

SEQ ID NO: 623036 - RNA, 19 nt, Homo sapiens
  misc_RNA (1)...(19): siRNA sense strand
uugcacagauaguggauuu

SEQ ID NO: 623037 - RNA, 19 nt, Homo sapiens
  misc_RNA (1)...(19): siRNA sense strand
ucaaacaucagaaccaguu

SEQ ID NO: 623038 - RNA, 19 nt, Homo sapiens
  misc_RNA (1)...(19): siRNA sense strand
caaacucguaccuuuauug

SEQ ID NO: 623039 - RNA, 19 nt, Homo sapiens
  misc_RNA (1)...(19): siRNA sense strand
gcuuggagguguuggugaa

SEQ ID NO: 623040 - RNA, 19 nt, Homo sapiens
  misc_RNA (1)...(19): siRNA sense strand
gauauacagaccuuacuau

SEQ ID NO: 623041 - RNA, 19 nt, Homo sapiens
  misc_RNA (1)...(19): siRNA sense strand
ugacggcucugcuguggau

SEQ ID NO: 623042 - RNA, 19 nt, Homo sapiens
  misc_RNA (1)...(19): siRNA sense strand
ucucaaacucguaccuuua

SEQ ID NO: 623043 - RNA, 19 nt, Homo sapiens
  misc_RNA (1)...(19): siRNA sense strand
gcaagaugauaagaagcuu

SEQ ID NO: 623044 - RNA, 19 nt, Homo sapiens
  misc_RNA (1)...(19): siRNA sense strand
gaacgggcuccuccucaga

SEQ ID NO: 623045 - RNA, 19 nt, Homo sapiens
  misc_RNA (1)...(19): siRNA sense strand
ccuucaaucuuccuaguga

SEQ ID NO: 623046 - RNA, 19 nt, Homo sapiens
  misc_RNA (1)...(19): siRNA sense strand
gaaccacugugaccaugac

SEQ ID NO: 623047 - RNA, 19 nt, Homo sapiens
  misc_RNA (1)...(19): siRNA sense strand
gcucugcuguggauguuca

SEQ ID NO: 623048 - RNA, 19 nt, Homo sapiens
  misc_RNA (1)...(19): siRNA sense strand
uggcagcagugaaaguauu

SEQ ID NO: 623049 - RNA, 19 nt, Homo sapiens
  misc_RNA (1)...(19): siRNA sense strand
ggacgaguucugcaagaug

SEQ ID NO: 623050 - RNA, 19 nt, Homo sapiens
  misc_RNA (1)...(19): siRNA sense strand
uccaagagcaguuuaauag

SEQ ID NO: 623051 - RNA, 19 nt, Homo sapiens
  misc_RNA (1)...(19): siRNA sense strand
ugaagaccuuggacucuca

SEQ ID NO: 623052 - RNA, 19 nt, Homo sapiens
  misc_RNA (1)...(19): siRNA sense strand
gcagcuccggucugauaua

SEQ ID NO: 623053 - RNA, 19 nt, Homo sapiens
  misc_RNA (1)...(19): siRNA sense strand
uguaggcccugaugccauu

SEQ ID NO: 623054 - RNA, 19 nt, Homo sapiens
  misc_RNA (1)...(19): siRNA sense strand
uugaaugccuggcccuaaa

SEQ ID NO: 623055 - RNA, 19 nt, Homo sapiens
  misc_RNA (1)...(19): siRNA sense strand
caucagaaccaguugaaag

SEQ ID NO: 623056 - RNA, 19 nt, Homo sapiens
  misc_RNA (1)...(19): siRNA sense strand
ucaaacucguaccuuuauu

SEQ ID NO: 623057 - RNA, 19 nt, Homo sapiens
  misc_RNA (1)...(19): siRNA sense strand
cuucaggaauacaauguug

SEQ ID NO: 623058 - RNA, 19 nt, Homo sapiens
  misc_RNA (1)...(19): siRNA sense strand
gcacagauaguggauuugg

SEQ ID NO: 623059 - RNA, 19 nt, Homo sapiens
  misc_RNA (1)...(19): siRNA sense strand
cagcacaugaucagggaua

SEQ ID NO: 623060 - RNA, 19 nt, Homo sapiens
  misc_RNA (1)...(19): siRNA sense strand
gaaguucagggagcagaaa

SEQ ID NO: 623061 - RNA, 19 nt, Homo sapiens
  misc_RNA (1)...(19): siRNA sense strand
ucacggggcuagaagagua

SEQ ID NO: 623062 - RNA, 19 nt, Homo sapiens
  misc_RNA (1)...(19): siRNA sense strand
ggauggcaacccacacauu

SEQ ID NO: 623063 - RNA, 19 nt, Homo sapiens
  misc_RNA (1)...(19): siRNA sense strand
ucagggauauacagaccuu

SEQ ID NO: 623064 - RNA, 19 nt, Homo sapiens
  misc_RNA (1)...(19): siRNA sense strand
uaagaagcuucaggaauac

SEQ ID NO: 623065 - RNA, 19 nt, Homo sapiens
  misc_RNA (1)...(19): siRNA sense strand
uaaccaaggccuguuugaa

SEQ ID NO: 623066 - RNA, 19 nt, Homo sapiens
  misc_RNA (1)...(19): siRNA sense strand
ggacuacaauaacaaucac

SEQ ID NO: 623067 - RNA, 19 nt, Homo sapiens
  misc_RNA (1)...(19): siRNA sense strand
gcccauggaggcagaagaa

SEQ ID NO: 623068 - RNA, 19 nt, Homo sapiens
  misc_RNA (1)...(19): siRNA sense strand
gaaugggucccuauuaucc

SEQ ID NO: 623069 - RNA, 19 nt, Homo sapiens
  misc_RNA (1)...(19): siRNA sense strand
gauggagcuugcugcuguu

SEQ ID NO: 623070 - RNA, 19 nt, Homo sapiens
  misc_RNA (1)...(19): siRNA sense strand
accaaggccuguuugaaug

SEQ ID NO: 623071 - RNA, 19 nt, Homo sapiens
  misc_RNA (1)...(19): siRNA sense strand
gaaaguauugcugccuuca

SEQ ID NO: 623072 - RNA, 19 nt, Homo sapiens
  misc_RNA (1)...(19): siRNA sense strand
agaaccaguugaaagugaa

SEQ ID NO: 623073 - RNA, 19 nt, Homo sapiens
  misc_RNA (1)...(19): siRNA sense strand
uguuaucaauggccgaauu

SEQ ID NO: 623074 - RNA, 19 nt, Homo sapiens
  misc_RNA (1)...(19): siRNA sense strand
gcaacccacacauugauca

SEQ ID NO: 623075 - RNA, 19 nt, Homo sapiens
  misc_RNA (1)...(19): siRNA sense strand
gauccagcaacaucuuuga

SEQ ID NO: 623076 - RNA, 19 nt, Homo sapiens
  misc_RNA (1)...(19): siRNA sense strand
ggaaugccaacagcuaugu

SEQ ID NO: 623077 - RNA, 19 nt, Homo sapiens
  misc_RNA (1)...(19): siRNA sense strand
gcuugcugcuguuaucaau

SEQ ID NO: 623078 - RNA, 19 nt, Homo sapiens
  misc_RNA (1)...(19): siRNA sense strand
gggacgaguucugcaagau

SEQ ID NO: 623079 - RNA, 19 nt, Homo sapiens
  misc_RNA (1)...(19): siRNA sense strand
ccacggacuacaauaacaa

SEQ ID NO: 623080 - RNA, 19 nt, Homo sapiens
  misc_RNA (1)...(19): siRNA sense strand
auacaacgccucaguggau

SEQ ID NO: 623081 - RNA, 19 nt, Homo sapiens
  misc_RNA (1)...(19): siRNA sense strand
aaccaaggccuguuugaau

SEQ ID NO: 623082 - RNA, 19 nt, Homo sapiens
  misc_RNA (1)...(19): siRNA sense strand
caggagcccacacccagua

SEQ ID NO: 623083 - RNA, 19 nt, Homo sapiens
  misc_RNA (1)...(19): siRNA sense strand
ggaaccacugugaccauga

SEQ ID NO: 623084 - RNA, 19 nt, Homo sapiens
  misc_RNA (1)...(19): siRNA sense strand
ugguaugccugccaagaga

SEQ ID NO: 623085 - RNA, 19 nt, Homo sapiens
  misc_RNA (1)...(19): siRNA sense strand
ggaaguucagggagcagaa

SEQ ID NO: 623086 - RNA, 19 nt, Homo sapiens
  misc_RNA (1)...(19): siRNA sense strand
guaaccaaggccuguuuga

SEQ ID NO: 623087 - RNA, 19 nt, Homo sapiens
  misc_RNA (1)...(19): siRNA sense strand
ggauuucccaccagagugu

SEQ ID NO: 623088 - RNA, 19 nt, Homo sapiens
  misc_RNA (1)...(19): siRNA sense strand
gggccuugcuuucucuucu

SEQ ID NO: 623089 - RNA, 19 nt, Homo sapiens
  misc_RNA (1)...(19): siRNA sense strand
uggaggagccugacagcuu

SEQ ID NO: 623090 - RNA, 19 nt, Homo sapiens
  misc_RNA (1)...(19): siRNA sense strand
aacaacggcucauuuacca

SEQ ID NO: 623091 - RNA, 19 nt, Homo sapiens
  misc_RNA (1)...(19): siRNA sense strand
cccuaaaccugcacugcuu

SEQ ID NO: 623092 - RNA, 19 nt, Homo sapiens
  misc_RNA (1)...(19): siRNA sense strand
aaacaucagaaccaguuga

SEQ ID NO: 623093 - RNA, 19 nt, Homo sapiens
  misc_RNA (1)...(19): siRNA sense strand
gaccuuggacucucaaacu

SEQ ID NO: 623094 - RNA, 19 nt, Homo sapiens
  misc_RNA (1)...(19): siRNA sense strand
cugcgcaugugcugcauug

SEQ ID NO: 623095 - RNA, 19 nt, Homo sapiens
  misc_RNA (1)...(19): siRNA sense strand
ucugcaagaugauaagaag

SEQ ID NO: 623096 - RNA, 19 nt, Homo sapiens
  misc_RNA (1)...(19): siRNA sense strand
ccgagggucauccggauuu

SEQ ID NO: 623097 - RNA, 19 nt, Homo sapiens
  misc_RNA (1)...(19): siRNA sense strand
gcagcgcuacuacgagguu

SEQ ID NO: 623098 - RNA, 19 nt, Homo sapiens
  misc_RNA (1)...(19): siRNA sense strand
aaacaaaugcacccaacca

SEQ ID NO: 623099 - RNA, 19 nt, Homo sapiens
  misc_RNA (1)...(19): siRNA sense strand
aaacucguaccuuuauugu

SEQ ID NO: 623100 - RNA, 19 nt, Homo sapiens
  misc_RNA (1)...(19): siRNA sense strand
ccaagagacgcaagacgau

SEQ ID NO: 623101 - RNA, 19 nt, Homo sapiens
  misc_RNA (1)...(19): siRNA sense strand
gagccugucaccggaguuu

SEQ ID NO: 623102 - RNA, 19 nt, Homo sapiens
  misc_RNA (1)...(19): siRNA sense strand
caacccggguggugauugc

SEQ ID NO: 623103 - RNA, 19 nt, Homo sapiens
  misc_RNA (1)...(19): siRNA sense strand
caugugguccggccuaugu

SEQ ID NO: 623104 - RNA, 19 nt, Homo sapiens
  misc_RNA (1)...(19): siRNA sense strand
cauggaggcagaagaagug

SEQ ID NO: 623105 - RNA, 19 nt, Homo sapiens
  misc_RNA (1)...(19): siRNA sense strand
ugucugaccugcgcugcaa

SEQ ID NO: 623106 - RNA, 19 nt, Homo sapiens
  misc_RNA (1)...(19): siRNA sense strand
gaguuuaaggagcacauug

SEQ ID NO: 623107 - RNA, 19 nt, Homo sapiens
  misc_RNA (1)...(19): siRNA sense strand
ccuaaugauaguaccagua

SEQ ID NO: 623108 - RNA, 19 nt, Homo sapiens
  misc_RNA (1)...(19): siRNA sense strand
gcauuuccagccacuacaa

SEQ ID NO: 623109 - RNA, 19 nt, Homo sapiens
  misc_RNA (1)...(19): siRNA sense strand
gugccaggcuucccaacag

SEQ ID NO: 623110 - RNA, 19 nt, Homo sapiens
  misc_RNA (1)...(19): siRNA sense strand
aagagcaguuuaauagcau

SEQ ID NO: 623111 - RNA, 19 nt, Homo sapiens
  misc_RNA (1)...(19): siRNA sense strand
ggccgaauucgucguaugu

SEQ ID NO: 623112 - RNA, 19 nt, Homo sapiens
  misc_RNA (1)...(19): siRNA sense strand
cgaguucugcaagaugaua

SEQ ID NO: 623113 - RNA, 19 nt, Homo sapiens
  misc_RNA (1)...(19): siRNA sense strand
ggacaaaccuggaauuucu

SEQ ID NO: 623114 - RNA, 19 nt, Homo sapiens
  misc_RNA (1)...(19): siRNA sense strand
auaagaagcuucaggaaua

SEQ ID NO: 623115 - RNA, 19 nt, Homo sapiens
  misc_RNA (1)...(19): siRNA sense strand
caacagcuaugucaugguu

SEQ ID NO: 623116 - RNA, 19 nt, Homo sapiens
  misc_RNA (1)...(19): siRNA sense strand
cagaaugggucccuauuau

SEQ ID NO: 623117 - RNA, 19 nt, Homo sapiens
  misc_RNA (1)...(19): siRNA sense strand
caagagcaguuuaauagca

SEQ ID NO: 623118 - RNA, 19 nt, Homo sapiens
  misc_RNA (1)...(19): siRNA sense strand
gcaggcagccauucccaua

SEQ ID NO: 623119 - RNA, 19 nt, Homo sapiens
  misc_RNA (1)...(19): siRNA sense strand
gacgaguucugcaagauga

SEQ ID NO: 623120 - RNA, 19 nt, Homo sapiens
  misc_RNA (1)...(19): siRNA sense strand
guuggaaccuucaaucuuc

SEQ ID NO: 623121 - RNA, 19 nt, Homo sapiens
  misc_RNA (1)...(19): siRNA sense strand
cagcagcuccggucugaua

SEQ ID NO: 623122 - RNA, 19 nt, Homo sapiens
  misc_RNA (1)...(19): siRNA sense strand
gauaagaagcuucaggaau

SEQ ID NO: 623123 - RNA, 19 nt, Homo sapiens
  misc_RNA (1)...(19): siRNA sense strand
ccagaaugggucccuauua

SEQ ID NO: 623124 - RNA, 19 nt, Homo sapiens
  misc_RNA (1)...(19): siRNA sense strand
cagaaccaguugaaaguga

SEQ ID NO: 623125 - RNA, 19 nt, Homo sapiens
  misc_RNA (1)...(19): siRNA sense strand
aaguauugcugccuucaua

SEQ ID NO: 623126 - RNA, 19 nt, Homo sapiens
  misc_RNA (1)...(19): siRNA sense strand
gcuccggucugauauacaa

SEQ ID NO: 623127 - RNA, 19 nt, Homo sapiens
  misc_RNA (1)...(19): siRNA sense strand
ggugauggcucagcacaug

SEQ ID NO: 623128 - RNA, 19 nt, Homo sapiens
  misc_RNA (1)...(19): siRNA sense strand
gggcccagaugaauguaaa

SEQ ID NO: 623129 - RNA, 19 nt, Homo sapiens
  misc_RNA (1)...(19): siRNA sense strand
aggcaugacugacuucuug

SEQ ID NO: 623130 - RNA, 19 nt, Homo sapiens
  misc_RNA (1)...(19): siRNA sense strand
ugagcuggcugaccacuau

SEQ ID NO: 623131 - RNA, 19 nt, Homo sapiens
  misc_RNA (1)...(19): siRNA sense strand
ggauauacagaccuuacua

SEQ ID NO: 623132 - RNA, 19 nt, Homo sapiens
  misc_RNA (1)...(19): siRNA sense strand
ggagcuugcugcuguuauc

SEQ ID NO: 623133 - RNA, 19 nt, Homo sapiens
  misc_RNA (1)...(19): siRNA sense strand
gauggcaacccacacauug

SEQ ID NO: 623134 - RNA, 19 nt, Homo sapiens
  misc_RNA (1)...(19): siRNA sense strand
ccaccacggacuacaauaa

SEQ ID NO: 623135 - RNA, 19 nt, Homo sapiens
  misc_RNA (1)...(19): siRNA sense strand
gcacaugaucagggauaua

SEQ ID NO: 623136 - RNA, 19 nt, Homo sapiens
  misc_RNA (1)...(19): siRNA sense strand
uugcacagauaguggauuu

SEQ ID NO: 623137 - RNA, 19 nt, Homo sapiens
  misc_RNA (1)...(19): siRNA sense strand
ucaaacaucagaaccaguu

SEQ ID NO: 623138 - RNA, 19 nt, Homo sapiens
  misc_RNA (1)...(19): siRNA sense strand
caaacucguaccuuuauug

SEQ ID NO: 623139 - RNA, 19 nt, Homo sapiens
  misc_RNA (1)...(19): siRNA sense strand
gcuuggagguguuggugaa

SEQ ID NO: 623140 - RNA, 19 nt, Homo sapiens
  misc_RNA (1)...(19): siRNA sense strand
gauauacagaccuuacuau

SEQ ID NO: 623141 - RNA, 19 nt, Homo sapiens
  misc_RNA (1)...(19): siRNA sense strand
ugacggcucugcuguggau

SEQ ID NO: 623142 - RNA, 19 nt, Homo sapiens
  misc_RNA (1)...(19): siRNA sense strand
ucucaaacucguaccuuua

SEQ ID NO: 623143 - RNA, 19 nt, Homo sapiens
  misc_RNA (1)...(19): siRNA sense strand
gcaagaugauaagaagcuu

SEQ ID NO: 623144 - RNA, 19 nt, Homo sapiens
  misc_RNA (1)...(19): siRNA sense strand
gaacgggcuccuccucaga

SEQ ID NO: 623145 - RNA, 19 nt, Homo sapiens
  misc_RNA (1)...(19): siRNA sense strand
ccuucaaucuuccuaguga

SEQ ID NO: 623146 - RNA, 19 nt, Homo sapiens
  misc_RNA (1)...(19): siRNA sense strand
gaaccacugugaccaugac

SEQ ID NO: 623147 - RNA, 19 nt, Homo sapiens
  misc_RNA (1)...(19): siRNA sense strand
gcucugcuguggauguuca

SEQ ID NO: 623148 - RNA, 19 nt, Homo sapiens
  misc_RNA (1)...(19): siRNA sense strand
uggcagcagugaaaguauu

SEQ ID NO: 623149 - RNA, 19 nt, Homo sapiens
  misc_RNA (1)...(19): siRNA sense strand
ggacgaguucugcaagaug

SEQ ID NO: 623150 - RNA, 19 nt, Homo sapiens
  misc_RNA (1)...(19): siRNA sense strand
uccaagagcaguuuaauag

SEQ ID NO: 623151 - RNA, 19 nt, Homo sapiens
  misc_RNA (1)...(19): siRNA sense strand
ugaagaccuuggacucuca

SEQ ID NO: 623152 - RNA, 19 nt, Homo sapiens
  misc_RNA (1)...(19): siRNA sense strand
gcagcuccggucugauaua

SEQ ID NO: 623153 - RNA, 19 nt, Homo sapiens
  misc_RNA (1)...(19): siRNA sense strand
uguaggcccugaugccauu

SEQ ID NO: 623154 - RNA, 19 nt, Homo sapiens
  misc_RNA (1)...(19): siRNA sense strand
uugaaugccuggcccuaaa

SEQ ID NO: 623155 - RNA, 19 nt, Homo sapiens
  misc_RNA (1)...(19): siRNA sense strand
caucagaaccaguugaaag

SEQ ID NO: 623156 - RNA, 19 nt, Homo sapiens
  misc_RNA (1)...(19): siRNA sense strand
ucaaacucguaccuuuauu

SEQ ID NO: 623157 - RNA, 19 nt, Homo sapiens
  misc_RNA (1)...(19): siRNA sense strand
cuucaggaauacaauguug

SEQ ID NO: 623158 - RNA, 19 nt, Homo sapiens
  misc_RNA (1)...(19): siRNA sense strand
gcacagauaguggauuugg

SEQ ID NO: 623159 - RNA, 19 nt, Homo sapiens
  misc_RNA (1)...(19): siRNA sense strand
cagcacaugaucagggaua

SEQ ID NO: 623160 - RNA, 19 nt, Homo sapiens
  misc_RNA (1)...(19): siRNA sense strand
gaaguucagggagcagaaa

SEQ ID NO: 623161 - RNA, 19 nt, Homo sapiens
  misc_RNA (1)...(19): siRNA sense strand
ucacggggcuagaagagua

SEQ ID NO: 623162 - RNA, 19 nt, Homo sapiens
  misc_RNA (1)...(19): siRNA sense strand
ggauggcaacccacacauu

SEQ ID NO: 623163 - RNA, 19 nt, Homo sapiens
  misc_RNA (1)...(19): siRNA sense strand
ucagggauauacagaccuu

SEQ ID NO: 623164 - RNA, 19 nt, Homo sapiens
  misc_RNA (1)...(19): siRNA sense strand
uaagaagcuucaggaauac

SEQ ID NO: 623165 - RNA, 19 nt, Homo sapiens
  misc_RNA (1)...(19): siRNA sense strand
uaaccaaggccuguuugaa

SEQ ID NO: 623166 - RNA, 19 nt, Homo sapiens
  misc_RNA (1)...(19): siRNA sense strand
ggacuacaauaacaaucac

SEQ ID NO: 623167 - RNA, 19 nt, Homo sapiens
  misc_RNA (1)...(19): siRNA sense strand
gcccauggaggcagaagaa

SEQ ID NO: 623168 - RNA, 19 nt, Homo sapiens
  misc_RNA (1)...(19): siRNA sense strand
gaaugggucccuauuaucc

SEQ ID NO: 623169 - RNA, 19 nt, Homo sapiens
  misc_RNA (1)...(19): siRNA sense strand
gauggagcuugcugcuguu

SEQ ID NO: 623170 - RNA, 19 nt, Homo sapiens
  misc_RNA (1)...(19): siRNA sense strand
accaaggccuguuugaaug

SEQ ID NO: 623171 - RNA, 19 nt, Homo sapiens
  misc_RNA (1)...(19): siRNA sense strand
gaaaguauugcugccuuca

SEQ ID NO: 623172 - RNA, 19 nt, Homo sapiens
  misc_RNA (1)...(19): siRNA sense strand
agaaccaguugaaagugaa

SEQ ID NO: 623173 - RNA, 19 nt, Homo sapiens
  misc_RNA (1)...(19): siRNA sense strand
uguuaucaauggccgaauu

SEQ ID NO: 623174 - RNA, 19 nt, Homo sapiens
  misc_RNA (1)...(19): siRNA sense strand
gcaacccacacauugauca

SEQ ID NO: 623175 - RNA, 19 nt, Homo sapiens
  misc_RNA (1)...(19): siRNA sense strand
gauccagcaacaucuuuga

SEQ ID NO: 623176 - RNA, 19 nt, Homo sapiens
  misc_RNA (1)...(19): siRNA sense strand
ggaaugccaacagcuaugu

SEQ ID NO: 623177 - RNA, 19 nt, Homo sapiens
  misc_RNA (1)...(19): siRNA sense strand
gcuugcugcuguuaucaau

SEQ ID NO: 623178 - RNA, 19 nt, Homo sapiens
  misc_RNA (1)...(19): siRNA sense strand
gggacgaguucugcaagau

SEQ ID NO: 623179 - RNA, 19 nt, Homo sapiens
  misc_RNA (1)...(19): siRNA sense strand
ccacggacuacaauaacaa

SEQ ID NO: 623180 - RNA, 19 nt, Homo sapiens
  misc_RNA (1)...(19): siRNA sense strand
auacaacgccucaguggau

SEQ ID NO: 623181 - RNA, 19 nt, Homo sapiens
  misc_RNA (1)...(19): siRNA sense strand
aaccaaggccuguuugaau

SEQ ID NO: 623182 - RNA, 19 nt, Homo sapiens
  misc_RNA (1)...(19): siRNA sense strand
caggagcccacacccagua

SEQ ID NO: 623183 - RNA, 19 nt, Homo sapiens
  misc_RNA (1)...(19): siRNA sense strand
ggaaccacugugaccauga

SEQ ID NO: 623184 - RNA, 19 nt, Homo sapiens
  misc_RNA (1)...(19): siRNA sense strand
ugguaugccugccaagaga

SEQ ID NO: 623185 - RNA, 19 nt, Homo sapiens
  misc_RNA (1)...(19): siRNA sense strand
ggaaguucagggagcagaa

SEQ ID NO: 623186 - RNA, 19 nt, Homo sapiens
  misc_RNA (1)...(19): siRNA sense strand
guaaccaaggccuguuuga

SEQ ID NO: 623187 - RNA, 19 nt, Homo sapiens
  misc_RNA (1)...(19): siRNA sense strand
ggauuucccaccagagugu

SEQ ID NO: 623188 - RNA, 19 nt, Homo sapiens
  misc_RNA (1)...(19): siRNA sense strand
gggccuugcuuucucuucu

SEQ ID NO: 623189 - RNA, 19 nt, Homo sapiens
  misc_RNA (1)...(19): siRNA sense strand
uggaggagccugacagcuu

SEQ ID NO: 623190 - RNA, 19 nt, Homo sapiens
  misc_RNA (1)...(19): siRNA sense strand
aacaacggcucauuuacca

SEQ ID NO: 623191 - RNA, 19 nt, Homo sapiens
  misc_RNA (1)...(19): siRNA sense strand
cccuaaaccugcacugcuu

SEQ ID NO: 623192 - RNA, 19 nt, Homo sapiens
  misc_RNA (1)...(19): siRNA sense strand
aaacaucagaaccaguuga

SEQ ID NO: 623193 - RNA, 19 nt, Homo sapiens
  misc_RNA (1)...(19): siRNA sense strand
gaccuuggacucucaaacu

SEQ ID NO: 623194 - RNA, 19 nt, Homo sapiens
  misc_RNA (1)...(19): siRNA sense strand
cugcgcaugugcugcauug

SEQ ID NO: 623195 - RNA, 19 nt, Homo sapiens
  misc_RNA (1)...(19): siRNA sense strand
ucugcaagaugauaagaag

SEQ ID NO: 623196 - RNA, 19 nt, Homo sapiens
  misc_RNA (1)...(19): siRNA sense strand
ccgagggucauccggauuu

SEQ ID NO: 623197 - RNA, 19 nt, Homo sapiens
  misc_RNA (1)...(19): siRNA sense strand
gcagcgcuacuacgagguu

SEQ ID NO: 623198 - RNA, 19 nt, Homo sapiens
  misc_RNA (1)...(19): siRNA sense strand
aaacaaaugcacccaacca

SEQ ID NO: 623199 - RNA, 19 nt, Homo sapiens
  misc_RNA (1)...(19): siRNA sense strand
aaacucguaccuuuauugu

SEQ ID NO: 623200 - RNA, 19 nt, Homo sapiens
  misc_RNA (1)...(19): siRNA sense strand
ccaagagacgcaagacgau

SEQ ID NO: 623201 - RNA, 19 nt, Homo sapiens
  misc_RNA (1)...(19): siRNA sense strand
gagccugucaccggaguuu

SEQ ID NO: 623202 - RNA, 19 nt, Homo sapiens
  misc_RNA (1)...(19): siRNA sense strand
caacccggguggugauugc

SEQ ID NO: 623203 - RNA, 19 nt, Homo sapiens
  misc_RNA (1)...(19): siRNA sense strand
caugugguccggccuaugu

SEQ ID NO: 623204 - RNA, 19 nt, Homo sapiens
  misc_RNA (1)...(19): siRNA sense strand
cauggaggcagaagaagug

SEQ ID NO: 623205 - RNA, 19 nt, Homo sapiens
  misc_RNA (1)...(19): siRNA sense strand
ugucugaccugcgcugcaa

SEQ ID NO: 623206 - RNA, 19 nt, Homo sapiens
  misc_RNA (1)...(19): siRNA sense strand
gaguuuaaggagcacauug

SEQ ID NO: 623207 - RNA, 19 nt, Homo sapiens
  misc_RNA (1)...(19): siRNA sense strand
ccuaaugauaguaccagua

SEQ ID NO: 623208 - RNA, 19 nt, Homo sapiens
  misc_RNA (1)...(19): siRNA sense strand
gcauuuccagccacuacaa

SEQ ID NO: 623209 - RNA, 19 nt, Homo sapiens
  misc_RNA (1)...(19): siRNA sense strand
gugccaggcuucccaacag

SEQ ID NO: 623210 - RNA, 19 nt, Homo sapiens
  misc_RNA (1)...(19): siRNA sense strand
aagagcaguuuaauagcau

SEQ ID NO: 623211 - RNA, 19 nt, Homo sapiens
  misc_RNA (1)...(19): siRNA sense strand
ggccgaauucgucguaugu

SEQ ID NO: 623212 - RNA, 19 nt, Homo sapiens
  misc_RNA (1)...(19): siRNA sense strand
cgaguucugcaagaugaua

SEQ ID NO: 623213 - RNA, 19 nt, Homo sapiens
  misc_RNA (1)...(19): siRNA sense strand
ggacaaaccuggaauuucu

SEQ ID NO: 623214 - RNA, 19 nt, Homo sapiens
  misc_RNA (1)...(19): siRNA sense strand
auaagaagcuucaggaaua

SEQ ID NO: 623215 - RNA, 19 nt, Homo sapiens
  misc_RNA (1)...(19): siRNA sense strand
caacagcuaugucaugguu

SEQ ID NO: 623216 - RNA, 19 nt, Homo sapiens
  misc_RNA (1)...(19): siRNA sense strand
cagaaugggucccuauuau

SEQ ID NO: 623217 - RNA, 19 nt, Homo sapiens
  misc_RNA (1)...(19): siRNA sense strand
caagagcaguuuaauagca

SEQ ID NO: 623218 - RNA, 19 nt, Homo sapiens
  misc_RNA (1)...(19): siRNA sense strand
gcaggcagccauucccaua

SEQ ID NO: 623219 - RNA, 19 nt, Homo sapiens
  misc_RNA (1)...(19): siRNA sense strand
gacgaguucugcaagauga

SEQ ID NO: 623220 - RNA, 19 nt, Homo sapiens
  misc_RNA (1)...(19): siRNA sense strand
guuggaaccuucaaucuuc

SEQ ID NO: 623221 - RNA, 19 nt, Homo sapiens
  misc_RNA (1)...(19): siRNA sense strand
cagcagcuccggucugaua

SEQ ID NO: 623222 - RNA, 19 nt, Homo sapiens
  misc_RNA (1)...(19): siRNA sense strand
gauaagaagcuucaggaau

SEQ ID NO: 623223 - RNA, 19 nt, Homo sapiens
  misc_RNA (1)...(19): siRNA sense strand
ccagaaugggucccuauua

SEQ ID NO: 623224 - RNA, 19 nt, Homo sapiens
  misc_RNA (1)...(19): siRNA sense strand
cagaaccaguugaaaguga

SEQ ID NO: 623225 - RNA, 19 nt, Homo sapiens
  misc_RNA (1)...(19): siRNA sense strand
aaguauugcugccuucaua

SEQ ID NO: 623226 - RNA, 19 nt, Homo sapiens
  misc_RNA (1)...(19): siRNA sense strand
gcuccggucugauauacaa

SEQ ID NO: 623227 - RNA, 19 nt, Homo sapiens
  misc_RNA (1)...(19): siRNA sense strand
ggugauggcucagcacaug

SEQ ID NO: 623228 - RNA, 19 nt, Homo sapiens
  misc_RNA (1)...(19): siRNA sense strand
gggcccagaugaauguaaa

SEQ ID NO: 623229 - RNA, 19 nt, Homo sapiens
  misc_RNA (1)...(19): siRNA sense strand
aggcaugacugacuucuug

SEQ ID NO: 623230 - RNA, 19 nt, Homo sapiens
  misc_RNA (1)...(19): siRNA sense strand
ugagcuggcugaccacuau

SEQ ID NO: 623231 - RNA, 19 nt, Homo sapiens
  misc_RNA (1)...(19): siRNA sense strand
ggauauacagaccuuacua

SEQ ID NO: 623232 - RNA, 19 nt, Homo sapiens
  misc_RNA (1)...(19): siRNA sense strand
ggagcuugcugcuguuauc

SEQ ID NO: 623233 - RNA, 19 nt, Homo sapiens
  misc_RNA (1)...(19): siRNA sense strand
gauggcaacccacacauug

SEQ ID NO: 623234 - RNA, 19 nt, Homo sapiens
  misc_RNA (1)...(19): siRNA sense strand
ccaccacggacuacaauaa

SEQ ID NO: 623235 - RNA, 19 nt, Homo sapiens
  misc_RNA (1)...(19): siRNA sense strand
gcacaugaucagggauaua

SEQ ID NO: 623236 - RNA, 19 nt, Homo sapiens
  misc_RNA (1)...(19): siRNA sense strand
uugcacagauaguggauuu

SEQ ID NO: 623237 - RNA, 19 nt, Homo sapiens
  misc_RNA (1)...(19): siRNA sense strand
ucaaacaucagaaccaguu

SEQ ID NO: 623238 - RNA, 19 nt, Homo sapiens
  misc_RNA (1)...(19): siRNA sense strand
caaacucguaccuuuauug

SEQ ID NO: 623239 - RNA, 19 nt, Homo sapiens
  misc_RNA (1)...(19): siRNA sense strand
gcuuggagguguuggugaa

SEQ ID NO: 623240 - RNA, 19 nt, Homo sapiens
  misc_RNA (1)...(19): siRNA sense strand
gauauacagaccuuacuau

SEQ ID NO: 623241 - RNA, 19 nt, Homo sapiens
  misc_RNA (1)...(19): siRNA sense strand
ugacggcucugcuguggau

SEQ ID NO: 623242 - RNA, 19 nt, Homo sapiens
  misc_RNA (1)...(19): siRNA sense strand
ucucaaacucguaccuuua

SEQ ID NO: 623243 - RNA, 19 nt, Homo sapiens
  misc_RNA (1)...(19): siRNA sense strand
gcaagaugauaagaagcuu

SEQ ID NO: 623244 - RNA, 19 nt, Homo sapiens
  misc_RNA (1)...(19): siRNA sense strand
gaacgggcuccuccucaga

SEQ ID NO: 623245 - RNA, 19 nt, Homo sapiens
  misc_RNA (1)...(19): siRNA sense strand
ccuucaaucuuccuaguga

SEQ ID NO: 623246 - RNA, 19 nt, Homo sapiens
  misc_RNA (1)...(19): siRNA sense strand
gaaccacugugaccaugac

SEQ ID NO: 623247 - RNA, 19 nt, Homo sapiens
  misc_RNA (1)...(19): siRNA sense strand
gcucugcuguggauguuca

SEQ ID NO: 623248 - RNA, 19 nt, Homo sapiens
  misc_RNA (1)...(19): siRNA sense strand
uggcagcagugaaaguauu

SEQ ID NO: 623249 - RNA, 19 nt, Homo sapiens
  misc_RNA (1)...(19): siRNA sense strand
ggacgaguucugcaagaug

SEQ ID NO: 623250 - RNA, 19 nt, Homo sapiens
  misc_RNA (1)...(19): siRNA sense strand
uccaagagcaguuuaauag

SEQ ID NO: 623251 - RNA, 19 nt, Homo sapiens
  misc_RNA (1)...(19): siRNA sense strand
ugaagaccuuggacucuca

SEQ ID NO: 623252 - RNA, 19 nt, Homo sapiens
  misc_RNA (1)...(19): siRNA sense strand
gcagcuccggucugauaua

SEQ ID NO: 623253 - RNA, 19 nt, Homo sapiens
  misc_RNA (1)...(19): siRNA sense strand
uguaggcccugaugccauu

SEQ ID NO: 623254 - RNA, 19 nt, Homo sapiens
  misc_RNA (1)...(19): siRNA sense strand
uugaaugccuggcccuaaa

SEQ ID NO: 623255 - RNA, 19 nt, Homo sapiens
  misc_RNA (1)...(19): siRNA sense strand
caucagaaccaguugaaag

SEQ ID NO: 623256 - RNA, 19 nt, Homo sapiens
  misc_RNA (1)...(19): siRNA sense strand
ucaaacucguaccuuuauu

SEQ ID NO: 623257 - RNA, 19 nt, Homo sapiens
  misc_RNA (1)...(19): siRNA sense strand
cuucaggaauacaauguug

SEQ ID NO: 623258 - RNA, 19 nt, Homo sapiens
  misc_RNA (1)...(19): siRNA sense strand
gcacagauaguggauuugg

SEQ ID NO: 623259 - RNA, 19 nt, Homo sapiens
  misc_RNA (1)...(19): siRNA sense strand
cagcacaugaucagggaua

SEQ ID NO: 623260 - RNA, 19 nt, Homo sapiens
  misc_RNA (1)...(19): siRNA sense strand
gaaguucagggagcagaaa

SEQ ID NO: 623261 - RNA, 19 nt, Homo sapiens
  misc_RNA (1)...(19): siRNA sense strand
ucacggggcuagaagagua

SEQ ID NO: 623262 - RNA, 19 nt, Homo sapiens
  misc_RNA (1)...(19): siRNA sense strand
ggauggcaacccacacauu

SEQ ID NO: 623263 - RNA, 19 nt, Homo sapiens
  misc_RNA (1)...(19): siRNA sense strand
ucagggauauacagaccuu

SEQ ID NO: 623264 - RNA, 19 nt, Homo sapiens
  misc_RNA (1)...(19): siRNA sense strand
uaagaagcuucaggaauac

SEQ ID NO: 623265 - RNA, 19 nt, Homo sapiens
  misc_RNA (1)...(19): siRNA sense strand
uaaccaaggccuguuugaa

SEQ ID NO: 623266 - RNA, 19 nt, Homo sapiens
  misc_RNA (1)...(19): siRNA sense strand
ggacuacaauaacaaucac

SEQ ID NO: 623267 - RNA, 19 nt, Homo sapiens
  misc_RNA (1)...(19): siRNA sense strand
gcccauggaggcagaagaa

SEQ ID NO: 623268 - RNA, 19 nt, Homo sapiens
  misc_RNA (1)...(19): siRNA sense strand
gaaugggucccuauuaucc

SEQ ID NO: 623269 - RNA, 19 nt, Homo sapiens
  misc_RNA (1)...(19): siRNA sense strand
gauggagcuugcugcuguu

SEQ ID NO: 623270 - RNA, 19 nt, Homo sapiens
  misc_RNA (1)...(19): siRNA sense strand
accaaggccuguuugaaug

SEQ ID NO: 623271 - RNA, 19 nt, Homo sapiens
  misc_RNA (1)...(19): siRNA sense strand
gaaaguauugcugccuuca

SEQ ID NO: 623272 - RNA, 19 nt, Homo sapiens
  misc_RNA (1)...(19): siRNA sense strand
agaaccaguugaaagugaa

SEQ ID NO: 623273 - RNA, 19 nt, Homo sapiens
  misc_RNA (1)...(19): siRNA sense strand
uguuaucaauggccgaauu

SEQ ID NO: 623274 - RNA, 19 nt, Homo sapiens
  misc_RNA (1)...(19): siRNA sense strand
gcaacccacacauugauca

SEQ ID NO: 623275 - RNA, 19 nt, Homo sapiens
  misc_RNA (1)...(19): siRNA sense strand
gauccagcaacaucuuuga

SEQ ID NO: 623276 - RNA, 19 nt, Homo sapiens
  misc_RNA (1)...(19): siRNA sense strand
ggaaugccaacagcuaugu

SEQ ID NO: 623277 - RNA, 19 nt, Homo sapiens
  misc_RNA (1)...(19): siRNA sense strand
gcuugcugcuguuaucaau

SEQ ID NO: 623278 - RNA, 19 nt, Homo sapiens
  misc_RNA (1)...(19): siRNA sense strand
gggacgaguucugcaagau

SEQ ID NO: 623279 - RNA, 19 nt, Homo sapiens
  misc_RNA (1)...(19): siRNA sense strand
ccacggacuacaauaacaa

SEQ ID NO: 623280 - RNA, 19 nt, Homo sapiens
  misc_RNA (1)...(19): siRNA sense strand
auacaacgccucaguggau

SEQ ID NO: 623281 - RNA, 19 nt, Homo sapiens
  misc_RNA (1)...(19): siRNA sense strand
aaccaaggccuguuugaau

SEQ ID NO: 623282 - RNA, 19 nt, Homo sapiens
  misc_RNA (1)...(19): siRNA sense strand
caggagcccacacccagua

SEQ ID NO: 623283 - RNA, 19 nt, Homo sapiens
  misc_RNA (1)...(19): siRNA sense strand
ggaaccacugugaccauga

SEQ ID NO: 623284 - RNA, 19 nt, Homo sapiens
  misc_RNA (1)...(19): siRNA sense strand
ugguaugccugccaagaga

SEQ ID NO: 623285 - RNA, 19 nt, Homo sapiens
  misc_RNA (1)...(19): siRNA sense strand
ggaaguucagggagcagaa

SEQ ID NO: 623286 - RNA, 19 nt, Homo sapiens
  misc_RNA (1)...(19): siRNA sense strand
guaaccaaggccuguuuga

SEQ ID NO: 623287 - RNA, 19 nt, Homo sapiens
  misc_RNA (1)...(19): siRNA sense strand
ggauuucccaccagagugu

SEQ ID NO: 623288 - RNA, 19 nt, Homo sapiens
  misc_RNA (1)...(19): siRNA sense strand
gggccuugcuuucucuucu

SEQ ID NO: 623289 - RNA, 19 nt, Homo sapiens
  misc_RNA (1)...(19): siRNA sense strand
uggaggagccugacagcuu

SEQ ID NO: 623290 - RNA, 19 nt, Homo sapiens
  misc_RNA (1)...(19): siRNA sense strand
aacaacggcucauuuacca

SEQ ID NO: 623291 - RNA, 19 nt, Homo sapiens
  misc_RNA (1)...(19): siRNA sense strand
cccuaaaccugcacugcuu

SEQ ID NO: 623292 - RNA, 19 nt, Homo sapiens
  misc_RNA (1)...(19): siRNA sense strand
aaacaucagaaccaguuga

SEQ ID NO: 623293 - RNA, 19 nt, Homo sapiens
  misc_RNA (1)...(19): siRNA sense strand
gaccuuggacucucaaacu

SEQ ID NO: 623294 - RNA, 19 nt, Homo sapiens
  misc_RNA (1)...(19): siRNA sense strand
cugcgcaugugcugcauug

SEQ ID NO: 623295 - RNA, 19 nt, Homo sapiens
  misc_RNA (1)...(19): siRNA sense strand
ucugcaagaugauaagaag

SEQ ID NO: 623296 - RNA, 19 nt, Homo sapiens
  misc_RNA (1)...(19): siRNA sense strand
ccgagggucauccggauuu

SEQ ID NO: 623297 - RNA, 19 nt, Homo sapiens
  misc_RNA (1)...(19): siRNA sense strand
gcagcgcuacuacgagguu

SEQ ID NO: 623298 - RNA, 19 nt, Homo sapiens
  misc_RNA (1)...(19): siRNA sense strand
aaacaaaugcacccaacca

SEQ ID NO: 623299 - RNA, 19 nt, Homo sapiens
  misc_RNA (1)...(19): siRNA sense strand
aaacucguaccuuuauugu

SEQ ID NO: 623300 - RNA, 19 nt, Homo sapiens
  misc_RNA (1)...(19): siRNA sense strand
ccaagagacgcaagacgau

SEQ ID NO: 623301 - RNA, 19 nt, Homo sapiens
  misc_RNA (1)...(19): siRNA sense strand
gagccugucaccggaguuu

SEQ ID NO: 623302 - RNA, 19 nt, Homo sapiens
  misc_RNA (1)...(19): siRNA sense strand
caacccggguggugauugc

SEQ ID NO: 623303 - RNA, 19 nt, Homo sapiens
  misc_RNA (1)...(19): siRNA sense strand
caugugguccggccuaugu

SEQ ID NO: 623304 - RNA, 19 nt, Homo sapiens
  misc_RNA (1)...(19): siRNA sense strand
cauggaggcagaagaagug

SEQ ID NO: 623305 - RNA, 19 nt, Homo sapiens
  misc_RNA (1)...(19): siRNA sense strand
ugucugaccugcgcugcaa

SEQ ID NO: 623306 - RNA, 19 nt, Homo sapiens
  misc_RNA (1)...(19): siRNA sense strand
gaguuuaaggagcacauug

SEQ ID NO: 623307 - RNA, 19 nt, Homo sapiens
  misc_RNA (1)...(19): siRNA sense strand
ccuaaugauaguaccagua

SEQ ID NO: 623308 - RNA, 19 nt, Homo sapiens
  misc_RNA (1)...(19): siRNA sense strand
gcauuuccagccacuacaa

SEQ ID NO: 623309 - RNA, 19 nt, Homo sapiens
  misc_RNA (1)...(19): siRNA sense strand
gugccaggcuucccaacag

SEQ ID NO: 623310 - RNA, 19 nt, Homo sapiens
  misc_RNA (1)...(19): siRNA sense strand
aagagcaguuuaauagcau

SEQ ID NO: 623311 - RNA, 19 nt, Homo sapiens
  misc_RNA (1)...(19): siRNA sense strand
ggccgaauucgucguaugu

SEQ ID NO: 623312 - RNA, 19 nt, Homo sapiens
  misc_RNA (1)...(19): siRNA sense strand
cgaguucugcaagaugaua

SEQ ID NO: 623313 - RNA, 19 nt, Homo sapiens
  misc_RNA (1)...(19): siRNA sense strand
ggacaaaccuggaauuucu

SEQ ID NO: 623314 - RNA, 19 nt, Homo sapiens
  misc_RNA (1)...(19): siRNA sense strand
auaagaagcuucaggaaua

SEQ ID NO: 623315 - RNA, 19 nt, Homo sapiens
  misc_RNA (1)...(19): siRNA sense strand
caacagcuaugucaugguu

SEQ ID NO: 623316 - RNA, 19 nt, Homo sapiens
  misc_RNA (1)...(19): siRNA sense strand
cagaaugggucccuauuau

SEQ ID NO: 623317 - RNA, 19 nt, Homo sapiens
  misc_RNA (1)...(19): siRNA sense strand
caagagcaguuuaauagca

SEQ ID NO: 623318 - RNA, 19 nt, Homo sapiens
  misc_RNA (1)...(19): siRNA sense strand
gcaggcagccauucccaua

SEQ ID NO: 623319 - RNA, 19 nt, Homo sapiens
  misc_RNA (1)...(19): siRNA sense strand
gacgaguucugcaagauga

SEQ ID NO: 623320 - RNA, 19 nt, Homo sapiens
  misc_RNA (1)...(19): siRNA sense strand
guuggaaccuucaaucuuc

SEQ ID NO: 623321 - RNA, 19 nt, Homo sapiens
  misc_RNA (1)...(19): siRNA sense strand
cagcagcuccggucugaua

SEQ ID NO: 623322 - RNA, 19 nt, Homo sapiens
  misc_RNA (1)...(19): siRNA sense strand
gauaagaagcuucaggaau

SEQ ID NO: 623323 - RNA, 19 nt, Homo sapiens
  misc_RNA (1)...(19): siRNA sense strand
ccagaaugggucccuauua

SEQ ID NO: 623324 - RNA, 19 nt, Homo sapiens
  misc_RNA (1)...(19): siRNA sense strand
cagaaccaguugaaaguga

SEQ ID NO: 623325 - RNA, 19 nt, Homo sapiens
  misc_RNA (1)...(19): siRNA sense strand
aaguauugcugccuucaua

SEQ ID NO: 623326 - RNA, 19 nt, Homo sapiens
  misc_RNA (1)...(19): siRNA sense strand
gcuccggucugauauacaa

SEQ ID NO: 623327 - RNA, 19 nt, Homo sapiens
  misc_RNA (1)...(19): siRNA sense strand
ggugauggcucagcacaug

SEQ ID NO: 623328 - RNA, 19 nt, Homo sapiens
  misc_RNA (1)...(19): siRNA sense strand
gggcccagaugaauguaaa

SEQ ID NO: 623329 - RNA, 19 nt, Homo sapiens
  misc_RNA (1)...(19): siRNA sense strand
aggcaugacugacuucuug

SEQ ID NO: 623330 - RNA, 19 nt, Homo sapiens
  misc_RNA (1)...(19): siRNA sense strand
ugagcuggcugaccacuau

SEQ ID NO: 623331 - RNA, 19 nt, Homo sapiens
  misc_RNA (1)...(19): siRNA sense strand
ggauauacagaccuuacua

SEQ ID NO: 623332 - RNA, 19 nt, Homo sapiens
  misc_RNA (1)...(19): siRNA sense strand
ggagcuugcugcuguuauc

SEQ ID NO: 623333 - RNA, 19 nt, Homo sapiens
  misc_RNA (1)...(19): siRNA sense strand
gauggcaacccacacauug

SEQ ID NO: 623334 - RNA, 19 nt, Homo sapiens
  misc_RNA (1)...(19): siRNA sense strand
ccaccacggacuacaauaa

SEQ ID NO: 623335 - RNA, 19 nt, Homo sapiens
  misc_RNA (1)...(19): siRNA sense strand
gcacaugaucagggauaua

SEQ ID NO: 623336 - RNA, 19 nt, Homo sapiens
  misc_RNA (1)...(19): siRNA sense strand
uugcacagauaguggauuu

SEQ ID NO: 623337 - RNA, 19 nt, Homo sapiens
  misc_RNA (1)...(19): siRNA sense strand
ucaaacaucagaaccaguu

SEQ ID NO: 623338 - RNA, 19 nt, Homo sapiens
  misc_RNA (1)...(19): siRNA sense strand
caaacucguaccuuuauug

SEQ ID NO: 623339 - RNA, 19 nt, Homo sapiens
  misc_RNA (1)...(19): siRNA sense strand
gcuuggagguguuggugaa

SEQ ID NO: 623340 - RNA, 19 nt, Homo sapiens
  misc_RNA (1)...(19): siRNA sense strand
gauauacagaccuuacuau

SEQ ID NO: 623341 - RNA, 19 nt, Homo sapiens
  misc_RNA (1)...(19): siRNA sense strand
ugacggcucugcuguggau

SEQ ID NO: 623342 - RNA, 19 nt, Homo sapiens
  misc_RNA (1)...(19): siRNA sense strand
ucucaaacucguaccuuua

SEQ ID NO: 623343 - RNA, 19 nt, Homo sapiens
  misc_RNA (1)...(19): siRNA sense strand
gcaagaugauaagaagcuu

SEQ ID NO: 623344 - RNA, 19 nt, Homo sapiens
  misc_RNA (1)...(19): siRNA sense strand
gaacgggcuccuccucaga

SEQ ID NO: 623345 - RNA, 19 nt, Homo sapiens
  misc_RNA (1)...(19): siRNA sense strand
ccuucaaucuuccuaguga

SEQ ID NO: 623346 - RNA, 19 nt, Homo sapiens
  misc_RNA (1)...(19): siRNA sense strand
gaaccacugugaccaugac

SEQ ID NO: 623347 - RNA, 19 nt, Homo sapiens
  misc_RNA (1)...(19): siRNA sense strand
gcucugcuguggauguuca

SEQ ID NO: 623348 - RNA, 19 nt, Homo sapiens
  misc_RNA (1)...(19): siRNA sense strand
uggcagcagugaaaguauu

SEQ ID NO: 623349 - RNA, 19 nt, Homo sapiens
  misc_RNA (1)...(19): siRNA sense strand
ggacgaguucugcaagaug

SEQ ID NO: 623350 - RNA, 19 nt, Homo sapiens
  misc_RNA (1)...(19): siRNA sense strand
uccaagagcaguuuaauag

SEQ ID NO: 623351 - RNA, 19 nt, Homo sapiens
  misc_RNA (1)...(19): siRNA sense strand
ugaagaccuuggacucuca

SEQ ID NO: 623352 - RNA, 19 nt, Homo sapiens
  misc_RNA (1)...(19): siRNA sense strand
gcagcuccggucugauaua

SEQ ID NO: 623353 - RNA, 19 nt, Homo sapiens
  misc_RNA (1)...(19): siRNA sense strand
uguaggcccugaugccauu

SEQ ID NO: 623354 - RNA, 19 nt, Homo sapiens
  misc_RNA (1)...(19): siRNA sense strand
uugaaugccuggcccuaaa

SEQ ID NO: 623355 - RNA, 19 nt, Homo sapiens
  misc_RNA (1)...(19): siRNA sense strand
caucagaaccaguugaaag

SEQ ID NO: 623356 - RNA, 19 nt, Homo sapiens
  misc_RNA (1)...(19): siRNA sense strand
ucaaacucguaccuuuauu

SEQ ID NO: 623357 - RNA, 19 nt, Homo sapiens
  misc_RNA (1)...(19): siRNA sense strand
cuucaggaauacaauguug

SEQ ID NO: 623358 - RNA, 19 nt, Homo sapiens
  misc_RNA (1)...(19): siRNA sense strand
gcacagauaguggauuugg

SEQ ID NO: 623359 - RNA, 19 nt, Homo sapiens
  misc_RNA (1)...(19): siRNA sense strand
cagcacaugaucagggaua

SEQ ID NO: 623360 - RNA, 19 nt, Homo sapiens
  misc_RNA (1)...(19): siRNA sense strand
gaaguucagggagcagaaa

SEQ ID NO: 623361 - RNA, 19 nt, Homo sapiens
  misc_RNA (1)...(19): siRNA sense strand
ucacggggcuagaagagua

SEQ ID NO: 623362 - RNA, 19 nt, Homo sapiens
  misc_RNA (1)...(19): siRNA sense strand
ggauggcaacccacacauu

SEQ ID NO: 623363 - RNA, 19 nt, Homo sapiens
  misc_RNA (1)...(19): siRNA sense strand
ucagggauauacagaccuu

SEQ ID NO: 623364 - RNA, 19 nt, Homo sapiens
  misc_RNA (1)...(19): siRNA sense strand
uaagaagcuucaggaauac

SEQ ID NO: 623365 - RNA, 19 nt, Homo sapiens
  misc_RNA (1)...(19): siRNA sense strand
uaaccaaggccuguuugaa

SEQ ID NO: 623366 - RNA, 19 nt, Homo sapiens
  misc_RNA (1)...(19): siRNA sense strand
ggacuacaauaacaaucac

SEQ ID NO: 623367 - RNA, 19 nt, Homo sapiens
  misc_RNA (1)...(19): siRNA sense strand
gcccauggaggcagaagaa

SEQ ID NO: 623368 - RNA, 19 nt, Homo sapiens
  misc_RNA (1)...(19): siRNA sense strand
gaaugggucccuauuaucc

SEQ ID NO: 623369 - RNA, 19 nt, Homo sapiens
  misc_RNA (1)...(19): siRNA sense strand
gauggagcuugcugcuguu

SEQ ID NO: 623370 - RNA, 19 nt, Homo sapiens
  misc_RNA (1)...(19): siRNA sense strand
accaaggccuguuugaaug

SEQ ID NO: 623371 - RNA, 19 nt, Homo sapiens
  misc_RNA (1)...(19): siRNA sense strand
gaaaguauugcugccuuca

SEQ ID NO: 623372 - RNA, 19 nt, Homo sapiens
  misc_RNA (1)...(19): siRNA sense strand
agaaccaguugaaagugaa

SEQ ID NO: 623373 - RNA, 19 nt, Homo sapiens
  misc_RNA (1)...(19): siRNA sense strand
uguuaucaauggccgaauu

SEQ ID NO: 623374 - RNA, 19 nt, Homo sapiens
  misc_RNA (1)...(19): siRNA sense strand
gcaacccacacauugauca

SEQ ID NO: 623375 - RNA, 19 nt, Homo sapiens
  misc_RNA (1)...(19): siRNA sense strand
gauccagcaacaucuuuga

SEQ ID NO: 623376 - RNA, 19 nt, Homo sapiens
  misc_RNA (1)...(19): siRNA sense strand
ggaaugccaacagcuaugu

SEQ ID NO: 623377 - RNA, 19 nt, Homo sapiens
  misc_RNA (1)...(19): siRNA sense strand
gcuugcugcuguuaucaau

SEQ ID NO: 623378 - RNA, 19 nt, Homo sapiens
  misc_RNA (1)...(19): siRNA sense strand
gggacgaguucugcaagau

SEQ ID NO: 623379 - RNA, 19 nt, Homo sapiens
  misc_RNA (1)...(19): siRNA sense strand
ccacggacuacaauaacaa

SEQ ID NO: 623380 - RNA, 19 nt, Homo sapiens
  misc_RNA (1)...(19): siRNA sense strand
auacaacgccucaguggau

SEQ ID NO: 623381 - RNA, 19 nt, Homo sapiens
  misc_RNA (1)...(19): siRNA sense strand
aaccaaggccuguuugaau

SEQ ID NO: 623382 - RNA, 19 nt, Homo sapiens
  misc_RNA (1)...(19): siRNA sense strand
caggagcccacacccagua

SEQ ID NO: 623383 - RNA, 19 nt, Homo sapiens
  misc_RNA (1)...(19): siRNA sense strand
ggaaccacugugaccauga

SEQ ID NO: 623384 - RNA, 19 nt, Homo sapiens
  misc_RNA (1)...(19): siRNA sense strand
ugguaugccugccaagaga

SEQ ID NO: 623385 - RNA, 19 nt, Homo sapiens
  misc_RNA (1)...(19): siRNA sense strand
ggaaguucagggagcagaa

SEQ ID NO: 623386 - RNA, 19 nt, Homo sapiens
  misc_RNA (1)...(19): siRNA sense strand
guaaccaaggccuguuuga

SEQ ID NO: 623387 - RNA, 19 nt, Homo sapiens
  misc_RNA (1)...(19): siRNA sense strand
ggauuucccaccagagugu

SEQ ID NO: 623388 - RNA, 19 nt, Homo sapiens
  misc_RNA (1)...(19): siRNA sense strand
gggccuugcuuucucuucu

SEQ ID NO: 623389 - RNA, 19 nt, Homo sapiens
  misc_RNA (1)...(19): siRNA sense strand
uggaggagccugacagcuu

SEQ ID NO: 623390 - RNA, 19 nt, Homo sapiens
  misc_RNA (1)...(19): siRNA sense strand
aacaacggcucauuuacca

SEQ ID NO: 623391 - RNA, 19 nt, Homo sapiens
  misc_RNA (1)...(19): siRNA sense strand
cccuaaaccugcacugcuu

SEQ ID NO: 623392 - RNA, 19 nt, Homo sapiens
  misc_RNA (1)...(19): siRNA sense strand
aaacaucagaaccaguuga

SEQ ID NO: 623393 - RNA, 19 nt, Homo sapiens
  misc_RNA (1)...(19): siRNA sense strand
gaccuuggacucucaaacu

SEQ ID NO: 623394 - RNA, 19 nt, Homo sapiens
  misc_RNA (1)...(19): siRNA sense strand
cugcgcaugugcugcauug

SEQ ID NO: 623395 - RNA, 19 nt, Homo sapiens
  misc_RNA (1)...(19): siRNA sense strand
ucugcaagaugauaagaag

SEQ ID NO: 623396 - RNA, 19 nt, Homo sapiens
  misc_RNA (1)...(19): siRNA sense strand
ccgagggucauccggauuu

SEQ ID NO: 623397 - RNA, 19 nt, Homo sapiens
  misc_RNA (1)...(19): siRNA sense strand
gcagcgcuacuacgagguu

SEQ ID NO: 623398 - RNA, 19 nt, Homo sapiens
  misc_RNA (1)...(19): siRNA sense strand
aaacaaaugcacccaacca

SEQ ID NO: 623399 - RNA, 19 nt, Homo sapiens
  misc_RNA (1)...(19): siRNA sense strand
aaacucguaccuuuauugu

SEQ ID NO: 623400 - RNA, 19 nt, Homo sapiens
  misc_RNA (1)...(19): siRNA sense strand
ccaagagacgcaagacgau

SEQ ID NO: 623401 - RNA, 19 nt, Homo sapiens
  misc_RNA (1)...(19): siRNA sense strand
gagccugucaccggaguuu

SEQ ID NO: 623402 - RNA, 19 nt, Homo sapiens
  misc_RNA (1)...(19): siRNA sense strand
caacccggguggugauugc

SEQ ID NO: 623403 - RNA, 19 nt, Homo sapiens
  misc_RNA (1)...(19): siRNA sense strand
caugugguccggccuaugu

SEQ ID NO: 623404 - RNA, 19 nt, Homo sapiens
  misc_RNA (1)...(19): siRNA sense strand
cauggaggcagaagaagug

SEQ ID NO: 623405 - RNA, 19 nt, Homo sapiens
  misc_RNA (1)...(19): siRNA sense strand
ugucugaccugcgcugcaa

SEQ ID NO: 623406 - RNA, 19 nt, Homo sapiens
  misc_RNA (1)...(19): siRNA sense strand
gaguuuaaggagcacauug

SEQ ID NO: 623407 - RNA, 19 nt, Homo sapiens
  misc_RNA (1)...(19): siRNA sense strand
ccuaaugauaguaccagua

SEQ ID NO: 623408 - RNA, 19 nt, Homo sapiens
  misc_RNA (1)...(19): siRNA sense strand
gcauuuccagccacuacaa

SEQ ID NO: 623409 - RNA, 19 nt, Homo sapiens
  misc_RNA (1)...(19): siRNA sense strand
gugccaggcuucccaacag

SEQ ID NO: 623410 - RNA, 19 nt, Homo sapiens
  misc_RNA (1)...(19): siRNA sense strand
aagagcaguuuaauagcau

SEQ ID NO: 623411 - RNA, 19 nt, Homo sapiens
  misc_RNA (1)...(19): siRNA sense strand
ggccgaauucgucguaugu

SEQ ID NO: 623412 - RNA, 19 nt, Homo sapiens
  misc_RNA (1)...(19): siRNA sense strand
cgaguucugcaagaugaua

SEQ ID NO: 623413 - RNA, 19 nt, Homo sapiens
  misc_RNA (1)...(19): siRNA sense strand
ggacaaaccuggaauuucu

SEQ ID NO: 623414 - RNA, 19 nt, Homo sapiens
  misc_RNA (1)...(19): siRNA sense strand
auaagaagcuucaggaaua

SEQ ID NO: 623415 - RNA, 19 nt, Homo sapiens
  misc_RNA (1)...(19): siRNA sense strand
caacagcuaugucaugguu

SEQ ID NO: 623416 - RNA, 19 nt, Homo sapiens
  misc_RNA (1)...(19): siRNA sense strand
cagaaugggucccuauuau

SEQ ID NO: 623417 - RNA, 19 nt, Homo sapiens
  misc_RNA (1)...(19): siRNA sense strand
caagagcaguuuaauagca

SEQ ID NO: 623418 - RNA, 19 nt, Homo sapiens
  misc_RNA (1)...(19): siRNA sense strand
gcaggcagccauucccaua

SEQ ID NO: 623419 - RNA, 19 nt, Homo sapiens
  misc_RNA (1)...(19): siRNA sense strand
gacgaguucugcaagauga

SEQ ID NO: 623420 - RNA, 19 nt, Homo sapiens
  misc_RNA (1)...(19): siRNA sense strand
guuggaaccuucaaucuuc

SEQ ID NO: 623421 - RNA, 19 nt, Homo sapiens
  misc_RNA (1)...(19): siRNA sense strand
cagcagcuccggucugaua

SEQ ID NO: 623422 - RNA, 19 nt, Homo sapiens
  misc_RNA (1)...(19): siRNA sense strand
gauaagaagcuucaggaau

SEQ ID NO: 623423 - RNA, 19 nt, Homo sapiens
  misc_RNA (1)...(19): siRNA sense strand
ccagaaugggucccuauua

SEQ ID NO: 623424 - RNA, 19 nt, Homo sapiens
  misc_RNA (1)...(19): siRNA sense strand
cagaaccaguugaaaguga

SEQ ID NO: 623425 - RNA, 19 nt, Homo sapiens
  misc_RNA (1)...(19): siRNA sense strand
aaguauugcugccuucaua

SEQ ID NO: 623426 - RNA, 19 nt, Homo sapiens
  misc_RNA (1)...(19): siRNA sense strand
gcuccggucugauauacaa

SEQ ID NO: 623427 - RNA, 19 nt, Homo sapiens
  misc_RNA (1)...(19): siRNA sense strand
ggugauggcucagcacaug

SEQ ID NO: 623428 - RNA, 19 nt, Homo sapiens
  misc_RNA (1)...(19): siRNA sense strand
gggcccagaugaauguaaa

SEQ ID NO: 623429 - RNA, 19 nt, Homo sapiens
  misc_RNA (1)...(19): siRNA sense strand
aggcaugacugacuucuug

SEQ ID NO: 623430 - RNA, 19 nt, Homo sapiens
  misc_RNA (1)...(19): siRNA sense strand
ugagcuggcugaccacuau

SEQ ID NO: 623431 - RNA, 19 nt, Homo sapiens
  misc_RNA (1)...(19): siRNA sense strand
ggauauacagaccuuacua

SEQ ID NO: 623432 - RNA, 19 nt, Homo sapiens
  misc_RNA (1)...(19): siRNA sense strand
ggagcuugcugcuguuauc

SEQ ID NO: 623433 - RNA, 19 nt, Homo sapiens
  misc_RNA (1)...(19): siRNA sense strand
gauggcaacccacacauug

SEQ ID NO: 623434 - RNA, 19 nt, Homo sapiens
  misc_RNA (1)...(19): siRNA sense strand
ccaccacggacuacaauaa

SEQ ID NO: 623435 - RNA, 19 nt, Homo sapiens
  misc_RNA (1)...(19): siRNA sense strand
gcacaugaucagggauaua

SEQ ID NO: 623436 - RNA, 19 nt, Homo sapiens
  misc_RNA (1)...(19): siRNA sense strand
uugcacagauaguggauuu

SEQ ID NO: 623437 - RNA, 19 nt, Homo sapiens
  misc_RNA (1)...(19): siRNA sense strand
ucaaacaucagaaccaguu

SEQ ID NO: 623438 - RNA, 19 nt, Homo sapiens
  misc_RNA (1)...(19): siRNA sense strand
caaacucguaccuuuauug

SEQ ID NO: 623439 - RNA, 19 nt, Homo sapiens
  misc_RNA (1)...(19): siRNA sense strand
gcuuggagguguuggugaa

SEQ ID NO: 623440 - RNA, 19 nt, Homo sapiens
  misc_RNA (1)...(19): siRNA sense strand
gauauacagaccuuacuau

SEQ ID NO: 623441 - RNA, 19 nt, Homo sapiens
  misc_RNA (1)...(19): siRNA sense strand
ugacggcucugcuguggau

SEQ ID NO: 623442 - RNA, 19 nt, Homo sapiens
  misc_RNA (1)...(19): siRNA sense strand
ucucaaacucguaccuuua

SEQ ID NO: 623443 - RNA, 19 nt, Homo sapiens
  misc_RNA (1)...(19): siRNA sense strand
gcaagaugauaagaagcuu

SEQ ID NO: 623444 - RNA, 19 nt, Homo sapiens
  misc_RNA (1)...(19): siRNA sense strand
gaacgggcuccuccucaga

SEQ ID NO: 623445 - RNA, 19 nt, Homo sapiens
  misc_RNA (1)...(19): siRNA sense strand
ccuucaaucuuccuaguga

SEQ ID NO: 623446 - RNA, 19 nt, Homo sapiens
  misc_RNA (1)...(19): siRNA sense strand
gaaccacugugaccaugac

SEQ ID NO: 623447 - RNA, 19 nt, Homo sapiens
  misc_RNA (1)...(19): siRNA sense strand
gcucugcuguggauguuca

SEQ ID NO: 623448 - RNA, 19 nt, Homo sapiens
  misc_RNA (1)...(19): siRNA sense strand
uggcagcagugaaaguauu

SEQ ID NO: 623449 - RNA, 19 nt, Homo sapiens
  misc_RNA (1)...(19): siRNA sense strand
ggacgaguucugcaagaug

SEQ ID NO: 623450 - RNA, 19 nt, Homo sapiens
  misc_RNA (1)...(19): siRNA sense strand
uccaagagcaguuuaauag

SEQ ID NO: 623451 - RNA, 19 nt, Homo sapiens
  misc_RNA (1)...(19): siRNA sense strand
ugaagaccuuggacucuca

SEQ ID NO: 623452 - RNA, 19 nt, Homo sapiens
  misc_RNA (1)...(19): siRNA sense strand
gcagcuccggucugauaua

SEQ ID NO: 623453 - RNA, 19 nt, Homo sapiens
  misc_RNA (1)...(19): siRNA sense strand
uguaggcccugaugccauu

SEQ ID NO: 623454 - RNA, 19 nt, Homo sapiens
  misc_RNA (1)...(19): siRNA sense strand
uugaaugccuggcccuaaa

SEQ ID NO: 623455 - RNA, 19 nt, Homo sapiens
  misc_RNA (1)...(19): siRNA sense strand
caucagaaccaguugaaag

SEQ ID NO: 623456 - RNA, 19 nt, Homo sapiens
  misc_RNA (1)...(19): siRNA sense strand
ucaaacucguaccuuuauu

SEQ ID NO: 623457 - RNA, 19 nt, Homo sapiens
  misc_RNA (1)...(19): siRNA sense strand
cuucaggaauacaauguug

SEQ ID NO: 623458 - RNA, 19 nt, Homo sapiens
  misc_RNA (1)...(19): siRNA sense strand
gcacagauaguggauuugg

SEQ ID NO: 623459 - RNA, 19 nt, Homo sapiens
  misc_RNA (1)...(19): siRNA sense strand
cagcacaugaucagggaua

SEQ ID NO: 623460 - RNA, 19 nt, Homo sapiens
  misc_RNA (1)...(19): siRNA sense strand
gaaguucagggagcagaaa

SEQ ID NO: 623461 - RNA, 19 nt, Homo sapiens
  misc_RNA (1)...(19): siRNA sense strand
ucacggggcuagaagagua

SEQ ID NO: 623462 - RNA, 19 nt, Homo sapiens
  misc_RNA (1)...(19): siRNA sense strand
ggauggcaacccacacauu

SEQ ID NO: 623463 - RNA, 19 nt, Homo sapiens
  misc_RNA (1)...(19): siRNA sense strand
ucagggauauacagaccuu

SEQ ID NO: 623464 - RNA, 19 nt, Homo sapiens
  misc_RNA (1)...(19): siRNA sense strand
uaagaagcuucaggaauac

SEQ ID NO: 623465 - RNA, 19 nt, Homo sapiens
  misc_RNA (1)...(19): siRNA sense strand
uaaccaaggccuguuugaa

SEQ ID NO: 623466 - RNA, 19 nt, Homo sapiens
  misc_RNA (1)...(19): siRNA sense strand
ggacuacaauaacaaucac

SEQ ID NO: 623467 - RNA, 19 nt, Homo sapiens
  misc_RNA (1)...(19): siRNA sense strand
gcccauggaggcagaagaa

SEQ ID NO: 623468 - RNA, 19 nt, Homo sapiens
  misc_RNA (1)...(19): siRNA sense strand
gaaugggucccuauuaucc

SEQ ID NO: 623469 - RNA, 19 nt, Homo sapiens
  misc_RNA (1)...(19): siRNA sense strand
gauggagcuugcugcuguu

SEQ ID NO: 623470 - RNA, 19 nt, Homo sapiens
  misc_RNA (1)...(19): siRNA sense strand
accaaggccuguuugaaug

SEQ ID NO: 623471 - RNA, 19 nt, Homo sapiens
  misc_RNA (1)...(19): siRNA sense strand
gaaaguauugcugccuuca

SEQ ID NO: 623472 - RNA, 19 nt, Homo sapiens
  misc_RNA (1)...(19): siRNA sense strand
agaaccaguugaaagugaa

SEQ ID NO: 623473 - RNA, 19 nt, Homo sapiens
  misc_RNA (1)...(19): siRNA sense strand
uguuaucaauggccgaauu

SEQ ID NO: 623474 - RNA, 19 nt, Homo sapiens
  misc_RNA (1)...(19): siRNA sense strand
gcaacccacacauugauca

SEQ ID NO: 623475 - RNA, 19 nt, Homo sapiens
  misc_RNA (1)...(19): siRNA sense strand
gauccagcaacaucuuuga

SEQ ID NO: 623476 - RNA, 19 nt, Homo sapiens
  misc_RNA (1)...(19): siRNA sense strand
ggaaugccaacagcuaugu

SEQ ID NO: 623477 - RNA, 19 nt, Homo sapiens
  misc_RNA (1)...(19): siRNA sense strand
gcuugcugcuguuaucaau

SEQ ID NO: 623478 - RNA, 19 nt, Homo sapiens
  misc_RNA (1)...(19): siRNA sense strand
gggacgaguucugcaagau

SEQ ID NO: 623479 - RNA, 19 nt, Homo sapiens
  misc_RNA (1)...(19): siRNA sense strand
ccacggacuacaauaacaa

SEQ ID NO: 623480 - RNA, 19 nt, Homo sapiens
  misc_RNA (1)...(19): siRNA sense strand
auacaacgccucaguggau

SEQ ID NO: 623481 - RNA, 19 nt, Homo sapiens
  misc_RNA (1)...(19): siRNA sense strand
aaccaaggccuguuugaau

SEQ ID NO: 623482 - RNA, 19 nt, Homo sapiens
  misc_RNA (1)...(19): siRNA sense strand
caggagcccacacccagua

SEQ ID NO: 623483 - RNA, 19 nt, Homo sapiens
  misc_RNA (1)...(19): siRNA sense strand
ggaaccacugugaccauga

SEQ ID NO: 623484 - RNA, 19 nt, Homo sapiens
  misc_RNA (1)...(19): siRNA sense strand
ugguaugccugccaagaga

SEQ ID NO: 623485 - RNA, 19 nt, Homo sapiens
  misc_RNA (1)...(19): siRNA sense strand
ggaaguucagggagcagaa

SEQ ID NO: 623486 - RNA, 19 nt, Homo sapiens
  misc_RNA (1)...(19): siRNA sense strand
guaaccaaggccuguuuga

SEQ ID NO: 623487 - RNA, 19 nt, Homo sapiens
  misc_RNA (1)...(19): siRNA sense strand
ggauuucccaccagagugu

SEQ ID NO: 623488 - RNA, 19 nt, Homo sapiens
  misc_RNA (1)...(19): siRNA sense strand
gggccuugcuuucucuucu

SEQ ID NO: 623489 - RNA, 19 nt, Homo sapiens
  misc_RNA (1)...(19): siRNA sense strand
uggaggagccugacagcuu

SEQ ID NO: 623490 - RNA, 19 nt, Homo sapiens
  misc_RNA (1)...(19): siRNA sense strand
aacaacggcucauuuacca

SEQ ID NO: 623491 - RNA, 19 nt, Homo sapiens
  misc_RNA (1)...(19): siRNA sense strand
cccuaaaccugcacugcuu

SEQ ID NO: 623492 - RNA, 19 nt, Homo sapiens
  misc_RNA (1)...(19): siRNA sense strand
aaacaucagaaccaguuga

SEQ ID NO: 623493 - RNA, 19 nt, Homo sapiens
  misc_RNA (1)...(19): siRNA sense strand
gaccuuggacucucaaacu

SEQ ID NO: 623494 - RNA, 19 nt, Homo sapiens
  misc_RNA (1)...(19): siRNA sense strand
cugcgcaugugcugcauug

SEQ ID NO: 623495 - RNA, 19 nt, Homo sapiens
  misc_RNA (1)...(19): siRNA sense strand
ucugcaagaugauaagaag

SEQ ID NO: 623496 - RNA, 19 nt, Homo sapiens
  misc_RNA (1)...(19): siRNA sense strand
ccgagggucauccggauuu

SEQ ID NO: 623497 - RNA, 19 nt, Homo sapiens
  misc_RNA (1)...(19): siRNA sense strand
gcagcgcuacuacgagguu

SEQ ID NO: 623498 - RNA, 19 nt, Homo sapiens
  misc_RNA (1)...(19): siRNA sense strand
aaacaaaugcacccaacca

SEQ ID NO: 623499 - RNA, 19 nt, Homo sapiens
  misc_RNA (1)...(19): siRNA sense strand
aaacucguaccuuuauugu

SEQ ID NO: 623500 - RNA, 19 nt, Homo sapiens
  misc_RNA (1)...(19): siRNA sense strand
ccaagagacgcaagacgau

SEQ ID NO: 623501 - RNA, 19 nt, Homo sapiens
  misc_RNA (1)...(19): siRNA sense strand
gagccugucaccggaguuu

SEQ ID NO: 623502 - RNA, 19 nt, Homo sapiens
  misc_RNA (1)...(19): siRNA sense strand
caacccggguggugauugc

SEQ ID NO: 623503 - RNA, 19 nt, Homo sapiens
  misc_RNA (1)...(19): siRNA sense strand
caugugguccggccuaugu

SEQ ID NO: 623504 - RNA, 19 nt, Homo sapiens
  misc_RNA (1)...(19): siRNA sense strand
cauggaggcagaagaagug

SEQ ID NO: 623505 - RNA, 19 nt, Homo sapiens
  misc_RNA (1)...(19): siRNA sense strand
ugucugaccugcgcugcaa

SEQ ID NO: 623506 - RNA, 19 nt, Homo sapiens
  misc_RNA (1)...(19): siRNA sense strand
gaguuuaaggagcacauug

SEQ ID NO: 623507 - RNA, 19 nt, Homo sapiens
  misc_RNA (1)...(19): siRNA sense strand
ccuaaugauaguaccagua

SEQ ID NO: 623508 - RNA, 19 nt, Homo sapiens
  misc_RNA (1)...(19): siRNA sense strand
gcauuuccagccacuacaa

SEQ ID NO: 623509 - RNA, 19 nt, Homo sapiens
  misc_RNA (1)...(19): siRNA sense strand
gugccaggcuucccaacag

SEQ ID NO: 623510 - RNA, 19 nt, Homo sapiens
  misc_RNA (1)...(19): siRNA sense strand
aagagcaguuuaauagcau

SEQ ID NO: 623511 - RNA, 19 nt, Homo sapiens
  misc_RNA (1)...(19): siRNA sense strand
ggccgaauucgucguaugu

SEQ ID NO: 623512 - RNA, 19 nt, Homo sapiens
  misc_RNA (1)...(19): siRNA sense strand
cgaguucugcaagaugaua

SEQ ID NO: 623513 - RNA, 19 nt, Homo sapiens
  misc_RNA (1)...(19): siRNA sense strand
ggaccaacaugcucuacua

SEQ ID NO: 623514 - RNA, 19 nt, Homo sapiens
  misc_RNA (1)...(19): siRNA sense strand
guauguggcuuccauggua

SEQ ID NO: 623515 - RNA, 19 nt, Homo sapiens
  misc_RNA (1)...(19): siRNA sense strand
gcaagaagcaccucacaga

SEQ ID NO: 623516 - RNA, 19 nt, Homo sapiens
  misc_RNA (1)...(19): siRNA sense strand
ggagacuauuuccgaguua

SEQ ID NO: 623517 - RNA, 19 nt, Homo sapiens
  misc_RNA (1)...(19): siRNA sense strand
ggagagauccugucugugu

SEQ ID NO: 623518 - RNA, 19 nt, Homo sapiens
  misc_RNA (1)...(19): siRNA sense strand
ugacgagcauguacaauga

SEQ ID NO: 623519 - RNA, 19 nt, Homo sapiens
  misc_RNA (1)...(19): siRNA sense strand
gcacaucgccaucgagaga

SEQ ID NO: 623520 - RNA, 19 nt, Homo sapiens
  misc_RNA (1)...(19): siRNA sense strand
ugagagaccugugccguuu

SEQ ID NO: 623521 - RNA, 19 nt, Homo sapiens
  misc_RNA (1)...(19): siRNA sense strand
uggaggagcucaccaacaa

SEQ ID NO: 623522 - RNA, 19 nt, Homo sapiens
  misc_RNA (1)...(19): siRNA sense strand
gccuggagcuguucaaguu

SEQ ID NO: 623523 - RNA, 19 nt, Homo sapiens
  misc_RNA (1)...(19): siRNA sense strand
caucuaugccgucaugaua

SEQ ID NO: 623524 - RNA, 19 nt, Homo sapiens
  misc_RNA (1)...(19): siRNA sense strand
gagagauccugucuguguu

SEQ ID NO: 623525 - RNA, 19 nt, Homo sapiens
  misc_RNA (1)...(19): siRNA sense strand
gagcauguacaaugagauu

SEQ ID NO: 623526 - RNA, 19 nt, Homo sapiens
  misc_RNA (1)...(19): siRNA sense strand
uccgagggauucaguauuu

SEQ ID NO: 623527 - RNA, 19 nt, Homo sapiens
  misc_RNA (1)...(19): siRNA sense strand
guggacagcuacagugaga

SEQ ID NO: 623528 - RNA, 19 nt, Homo sapiens
  misc_RNA (1)...(19): siRNA sense strand
ucagccaccucaaggagua

SEQ ID NO: 623529 - RNA, 19 nt, Homo sapiens
  misc_RNA (1)...(19): siRNA sense strand
ggacaagugggacagauuc

SEQ ID NO: 623530 - RNA, 19 nt, Homo sapiens
  misc_RNA (1)...(19): siRNA sense strand
gaccuggaguucacugaga

SEQ ID NO: 623531 - RNA, 19 nt, Homo sapiens
  misc_RNA (1)...(19): siRNA sense strand
agaagcaccucacagacaa

SEQ ID NO: 623532 - RNA, 19 nt, Homo sapiens
  misc_RNA (1)...(19): siRNA sense strand
gcaagaacaucuggaagcu

SEQ ID NO: 623533 - RNA, 19 nt, Homo sapiens
  misc_RNA (1)...(19): siRNA sense strand
gcugcuggccuauguaauu

SEQ ID NO: 623534 - RNA, 19 nt, Homo sapiens
  misc_RNA (1)...(19): siRNA sense strand
cuucaaggcugucuucauc

SEQ ID NO: 623535 - RNA, 19 nt, Homo sapiens
  misc_RNA (1)...(19): siRNA sense strand
caccauggcugccuacuac

SEQ ID NO: 623536 - RNA, 19 nt, Homo sapiens
  misc_RNA (1)...(19): siRNA sense strand
ggacagcuacagugagaug

SEQ ID NO: 623537 - RNA, 19 nt, Homo sapiens
  misc_RNA (1)...(19): siRNA sense strand
cccgauagcuccuacaaca

SEQ ID NO: 623538 - RNA, 19 nt, Homo sapiens
  misc_RNA (1)...(19): siRNA sense strand
ugagaacuaugacuucaag

SEQ ID NO: 623539 - RNA, 19 nt, Homo sapiens
  misc_RNA (1)...(19): siRNA sense strand
agaagaugauccugagaga

SEQ ID NO: 623540 - RNA, 19 nt, Homo sapiens
  misc_RNA (1)...(19): siRNA sense strand
ggaggagucuacuucuuuu

SEQ ID NO: 623541 - RNA, 19 nt, Homo sapiens
  misc_RNA (1)...(19): siRNA sense strand
ccugugccguuucauguuu

SEQ ID NO: 623542 - RNA, 19 nt, Homo sapiens
  misc_RNA (1)...(19): siRNA sense strand
gaucgcaggaguaucuuug

SEQ ID NO: 623543 - RNA, 19 nt, Homo sapiens
  misc_RNA (1)...(19): siRNA sense strand
gaggagcucaccaacaaga

SEQ ID NO: 623544 - RNA, 19 nt, Homo sapiens
  misc_RNA (1)...(19): siRNA sense strand
guucaaagacccugagaca

SEQ ID NO: 623545 - RNA, 19 nt, Homo sapiens
  misc_RNA (1)...(19): siRNA sense strand
ucaagcgcaucuucuacuu

SEQ ID NO: 623546 - RNA, 19 nt, Homo sapiens
  misc_RNA (1)...(19): siRNA sense strand
gugagacugucaacaagau

SEQ ID NO: 623547 - RNA, 19 nt, Homo sapiens
  misc_RNA (1)...(19): siRNA sense strand
ccaccugccuggagcuguu

SEQ ID NO: 623548 - RNA, 19 nt, Homo sapiens
  misc_RNA (1)...(19): siRNA sense strand
cuggagagauccugucugu

SEQ ID NO: 623549 - RNA, 19 nt, Homo sapiens
  misc_RNA (1)...(19): siRNA sense strand
gaggcaagugcucgagaua

SEQ ID NO: 623550 - RNA, 19 nt, Homo sapiens
  misc_RNA (1)...(19): siRNA sense strand
gcacaggagagcaagaaca

SEQ ID NO: 623551 - RNA, 19 nt, Homo sapiens
  misc_RNA (1)...(19): siRNA sense strand
aagcgcaucuucuacuuca

SEQ ID NO: 623552 - RNA, 19 nt, Homo sapiens
  misc_RNA (1)...(19): siRNA sense strand
ucacugagaacuaugacuu

SEQ ID NO: 623553 - RNA, 19 nt, Homo sapiens
  misc_RNA (1)...(19): siRNA sense strand
cuacaucgucuucuuguuc

SEQ ID NO: 623554 - RNA, 19 nt, Homo sapiens
  misc_RNA (1)...(19): siRNA sense strand
ccuauguaauucucaccua

SEQ ID NO: 623555 - RNA, 19 nt, Homo sapiens
  misc_RNA (1)...(19): siRNA sense strand
ggcaagugcucgagauagg

SEQ ID NO: 623556 - RNA, 19 nt, Homo sapiens
  misc_RNA (1)...(19): siRNA sense strand
ugaagccguugcucagaau

SEQ ID NO: 623557 - RNA, 19 nt, Homo sapiens
  misc_RNA (1)...(19): siRNA sense strand
agaggacgcugaggucuuc

SEQ ID NO: 623558 - RNA, 19 nt, Homo sapiens
  misc_RNA (1)...(19): siRNA sense strand
ucacagacaacgaguucaa

SEQ ID NO: 623559 - RNA, 19 nt, Homo sapiens
  misc_RNA (1)...(19): siRNA sense strand
gugacgagcauguacaaug

SEQ ID NO: 623560 - RNA, 19 nt, Homo sapiens
  misc_RNA (1)...(19): siRNA sense strand
gcagacacuggaagaacuu

SEQ ID NO: 623561 - RNA, 19 nt, Homo sapiens
  misc_RNA (1)...(19): siRNA sense strand
agaagacccucaggcucua

SEQ ID NO: 623562 - RNA, 19 nt, Homo sapiens
  misc_RNA (1)...(19): siRNA sense strand
ucaaggcugucuucaucau

SEQ ID NO: 623563 - RNA, 19 nt, Homo sapiens
  misc_RNA (1)...(19): siRNA sense strand
uggugacgcugauugaaga

SEQ ID NO: 623564 - RNA, 19 nt, Homo sapiens
  misc_RNA (1)...(19): siRNA sense strand
gaccugugccguuucaugu

SEQ ID NO: 623565 - RNA, 19 nt, Homo sapiens
  misc_RNA (1)...(19): siRNA sense strand
cgaugaagacccuguuugu

SEQ ID NO: 623566 - RNA, 19 nt, Homo sapiens
  misc_RNA (1)...(19): siRNA sense strand
uaggaggagucuacuucuu

SEQ ID NO: 623567 - RNA, 19 nt, Homo sapiens
  misc_RNA (1)...(19): siRNA sense strand
agagauccugucuguguua

SEQ ID NO: 623568 - RNA, 19 nt, Homo sapiens
  misc_RNA (1)...(19): siRNA sense strand
uggagacuauuuccgaguu

SEQ ID NO: 623569 - RNA, 19 nt, Homo sapiens
  misc_RNA (1)...(19): siRNA sense strand
gcaaacggacagccugaag

SEQ ID NO: 623570 - RNA, 19 nt, Homo sapiens
  misc_RNA (1)...(19): siRNA sense strand
gggugagacugucaacaag

SEQ ID NO: 623571 - RNA, 19 nt, Homo sapiens
  misc_RNA (1)...(19): siRNA sense strand
guuaggaggagucuacuuc

SEQ ID NO: 623572 - RNA, 19 nt, Homo sapiens
  misc_RNA (1)...(19): siRNA sense strand
caucuucuacuucaacuuc

SEQ ID NO: 623573 - RNA, 19 nt, Homo sapiens
  misc_RNA (1)...(19): siRNA sense strand
ggucuuggccuauauucuc

SEQ ID NO: 623574 - RNA, 19 nt, Homo sapiens
  misc_RNA (1)...(19): siRNA sense strand
aaacggacagccugaagga

SEQ ID NO: 623575 - RNA, 19 nt, Homo sapiens
  misc_RNA (1)...(19): siRNA sense strand
ucgcaggaguaucuuugaa

SEQ ID NO: 623576 - RNA, 19 nt, Homo sapiens
  misc_RNA (1)...(19): siRNA sense strand
ggcagacacuggaagaacu

SEQ ID NO: 623577 - RNA, 19 nt, Homo sapiens
  misc_RNA (1)...(19): siRNA sense strand
gaugaagacccuguuugug

SEQ ID NO: 623578 - RNA, 19 nt, Homo sapiens
  misc_RNA (1)...(19): siRNA sense strand
aggaggagucuacuucuuu

SEQ ID NO: 623579 - RNA, 19 nt, Homo sapiens
  misc_RNA (1)...(19): siRNA sense strand
gaagccguugcucagaaua

SEQ ID NO: 623580 - RNA, 19 nt, Homo sapiens
  misc_RNA (1)...(19): siRNA sense strand
ugaaagccaugcucaaccu

SEQ ID NO: 623581 - RNA, 19 nt, Homo sapiens
  misc_RNA (1)...(19): siRNA sense strand
gagcaagaagcaccucaca

SEQ ID NO: 623582 - RNA, 19 nt, Homo sapiens
  misc_RNA (1)...(19): siRNA sense strand
ucaacuuccuggucuacug

SEQ ID NO: 623583 - RNA, 19 nt, Homo sapiens
  misc_RNA (1)...(19): siRNA sense strand
gccuguacaugaucaucuu

SEQ ID NO: 623584 - RNA, 19 nt, Homo sapiens
  misc_RNA (1)...(19): siRNA sense strand
ccaacaugcucuacuacac

SEQ ID NO: 623585 - RNA, 19 nt, Homo sapiens
  misc_RNA (1)...(19): siRNA sense strand
uugaagccguugcucagaa

SEQ ID NO: 623586 - RNA, 19 nt, Homo sapiens
  misc_RNA (1)...(19): siRNA sense strand
gcauguacaaugagauucu

SEQ ID NO: 623587 - RNA, 19 nt, Homo sapiens
  misc_RNA (1)...(19): siRNA sense strand
aaguuuaucugcgacaguu

SEQ ID NO: 623588 - RNA, 19 nt, Homo sapiens
  misc_RNA (1)...(19): siRNA sense strand
gcucagcccgaggaaguuu

SEQ ID NO: 623589 - RNA, 19 nt, Homo sapiens
  misc_RNA (1)...(19): siRNA sense strand
uaugaucgcaggaguaucu

SEQ ID NO: 623590 - RNA, 19 nt, Homo sapiens
  misc_RNA (1)...(19): siRNA sense strand
ggugagacugucaacaaga

SEQ ID NO: 623591 - RNA, 19 nt, Homo sapiens
  misc_RNA (1)...(19): siRNA sense strand
cagacaacgaguucaaaga

SEQ ID NO: 623592 - RNA, 19 nt, Homo sapiens
  misc_RNA (1)...(19): siRNA sense strand
uugaagacgggaagaauga

SEQ ID NO: 623593 - RNA, 19 nt, Homo sapiens
  misc_RNA (1)...(19): siRNA sense strand
gauugaagacgggaagaau

SEQ ID NO: 623594 - RNA, 19 nt, Homo sapiens
  misc_RNA (1)...(19): siRNA sense strand
agagaccugugccguuuca

SEQ ID NO: 623595 - RNA, 19 nt, Homo sapiens
  misc_RNA (1)...(19): siRNA sense strand
guacuucagccaccucaag

SEQ ID NO: 623596 - RNA, 19 nt, Homo sapiens
  misc_RNA (1)...(19): siRNA sense strand
uggcuugccucccuuuaag

SEQ ID NO: 623597 - RNA, 19 nt, Homo sapiens
  misc_RNA (1)...(19): siRNA sense strand
cgaaguuugugacgagcau

SEQ ID NO: 623598 - RNA, 19 nt, Homo sapiens
  misc_RNA (1)...(19): siRNA sense strand
ugaacuggaccaccuggaa

SEQ ID NO: 623599 - RNA, 19 nt, Homo sapiens
  misc_RNA (1)...(19): siRNA sense strand
gagauccugucuguguuag

SEQ ID NO: 623600 - RNA, 19 nt, Homo sapiens
  misc_RNA (1)...(19): siRNA sense strand
ccgaguuacuggagagauc

SEQ ID NO: 623601 - RNA, 19 nt, Homo sapiens
  misc_RNA (1)...(19): siRNA sense strand
acacggacagcuacuacaa

SEQ ID NO: 623602 - RNA, 19 nt, Homo sapiens
  misc_RNA (1)...(19): siRNA sense strand
gacuaccgguggugcuuca

SEQ ID NO: 623603 - RNA, 19 nt, Homo sapiens
  misc_RNA (1)...(19): siRNA sense strand
caggagagcaagaacaucu

SEQ ID NO: 623604 - RNA, 19 nt, Homo sapiens
  misc_RNA (1)...(19): siRNA sense strand
gauggcuugccucccuuua

SEQ ID NO: 623605 - RNA, 19 nt, Homo sapiens
  misc_RNA (1)...(19): siRNA sense strand
aagaagcaccucacagaca

SEQ ID NO: 623606 - RNA, 19 nt, Homo sapiens
  misc_RNA (1)...(19): siRNA sense strand
cagcuacagugagaugcuu

SEQ ID NO: 623607 - RNA, 19 nt, Homo sapiens
  misc_RNA (1)...(19): siRNA sense strand
ucuacugccuguacaugau

SEQ ID NO: 623608 - RNA, 19 nt, Homo sapiens
  misc_RNA (1)...(19): siRNA sense strand
gaaguuuaucugcgacagu

SEQ ID NO: 623609 - RNA, 19 nt, Homo sapiens
  misc_RNA (1)...(19): siRNA sense strand
caacgugggcaucaucaac

SEQ ID NO: 623610 - RNA, 19 nt, Homo sapiens
  misc_RNA (1)...(19): siRNA sense strand
gagacuauuuccgaguuac

SEQ ID NO: 623611 - RNA, 19 nt, Homo sapiens
  misc_RNA (1)...(19): siRNA sense strand
ucaccauggcugccuacua

SEQ ID NO: 623612 - RNA, 19 nt, Homo sapiens
  misc_RNA (1)...(19): siRNA sense strand
ugggugagacugucaacaa

SEQ ID NO: 623613 - RNA, 19 nt, Homo sapiens
  misc_RNA (1)...(19): siRNA sense strand
ggaccaacaugcucuacua

SEQ ID NO: 623614 - RNA, 19 nt, Homo sapiens
  misc_RNA (1)...(19): siRNA sense strand
guauguggcuuccauggua

SEQ ID NO: 623615 - RNA, 19 nt, Homo sapiens
  misc_RNA (1)...(19): siRNA sense strand
gcaagaagcaccucacaga

SEQ ID NO: 623616 - RNA, 19 nt, Homo sapiens
  misc_RNA (1)...(19): siRNA sense strand
ggagacuauuuccgaguua

SEQ ID NO: 623617 - RNA, 19 nt, Homo sapiens
  misc_RNA (1)...(19): siRNA sense strand
ggagagauccugucugugu

SEQ ID NO: 623618 - RNA, 19 nt, Homo sapiens
  misc_RNA (1)...(19): siRNA sense strand
ugacgagcauguacaauga

SEQ ID NO: 623619 - RNA, 19 nt, Homo sapiens
  misc_RNA (1)...(19): siRNA sense strand
gcacaucgccaucgagaga

SEQ ID NO: 623620 - RNA, 19 nt, Homo sapiens
  misc_RNA (1)...(19): siRNA sense strand
ugagagaccugugccguuu

SEQ ID NO: 623621 - RNA, 19 nt, Homo sapiens
  misc_RNA (1)...(19): siRNA sense strand
uggaggagcucaccaacaa

SEQ ID NO: 623622 - RNA, 19 nt, Homo sapiens
  misc_RNA (1)...(19): siRNA sense strand
gccuggagcuguucaaguu

SEQ ID NO: 623623 - RNA, 19 nt, Homo sapiens
  misc_RNA (1)...(19): siRNA sense strand
caucuaugccgucaugaua

SEQ ID NO: 623624 - RNA, 19 nt, Homo sapiens
  misc_RNA (1)...(19): siRNA sense strand
gagagauccugucuguguu

SEQ ID NO: 623625 - RNA, 19 nt, Homo sapiens
  misc_RNA (1)...(19): siRNA sense strand
gagcauguacaaugagauu

SEQ ID NO: 623626 - RNA, 19 nt, Homo sapiens
  misc_RNA (1)...(19): siRNA sense strand
uccgagggauucaguauuu

SEQ ID NO: 623627 - RNA, 19 nt, Homo sapiens
  misc_RNA (1)...(19): siRNA sense strand
guggacagcuacagugaga

SEQ ID NO: 623628 - RNA, 19 nt, Homo sapiens
  misc_RNA (1)...(19): siRNA sense strand
ucagccaccucaaggagua

SEQ ID NO: 623629 - RNA, 19 nt, Homo sapiens
  misc_RNA (1)...(19): siRNA sense strand
ggacaagugggacagauuc

SEQ ID NO: 623630 - RNA, 19 nt, Homo sapiens
  misc_RNA (1)...(19): siRNA sense strand
gaccuggaguucacugaga

SEQ ID NO: 623631 - RNA, 19 nt, Homo sapiens
  misc_RNA (1)...(19): siRNA sense strand
agaagcaccucacagacaa

SEQ ID NO: 623632 - RNA, 19 nt, Homo sapiens
  misc_RNA (1)...(19): siRNA sense strand
gcaagaacaucuggaagcu

SEQ ID NO: 623633 - RNA, 19 nt, Homo sapiens
  misc_RNA (1)...(19): siRNA sense strand
gcugcuggccuauguaauu

SEQ ID NO: 623634 - RNA, 19 nt, Homo sapiens
  misc_RNA (1)...(19): siRNA sense strand
cuucaaggcugucuucauc

SEQ ID NO: 623635 - RNA, 19 nt, Homo sapiens
  misc_RNA (1)...(19): siRNA sense strand
caccauggcugccuacuac

SEQ ID NO: 623636 - RNA, 19 nt, Homo sapiens
  misc_RNA (1)...(19): siRNA sense strand
ggacagcuacagugagaug

SEQ ID NO: 623637 - RNA, 19 nt, Homo sapiens
  misc_RNA (1)...(19): siRNA sense strand
cccgauagcuccuacaaca

SEQ ID NO: 623638 - RNA, 19 nt, Homo sapiens
  misc_RNA (1)...(19): siRNA sense strand
ugagaacuaugacuucaag

SEQ ID NO: 623639 - RNA, 19 nt, Homo sapiens
  misc_RNA (1)...(19): siRNA sense strand
agaagaugauccugagaga

SEQ ID NO: 623640 - RNA, 19 nt, Homo sapiens
  misc_RNA (1)...(19): siRNA sense strand
ggaggagucuacuucuuuu

SEQ ID NO: 623641 - RNA, 19 nt, Homo sapiens
  misc_RNA (1)...(19): siRNA sense strand
ccugugccguuucauguuu

SEQ ID NO: 623642 - RNA, 19 nt, Homo sapiens
  misc_RNA (1)...(19): siRNA sense strand
gaucgcaggaguaucuuug

SEQ ID NO: 623643 - RNA, 19 nt, Homo sapiens
  misc_RNA (1)...(19): siRNA sense strand
gaggagcucaccaacaaga

SEQ ID NO: 623644 - RNA, 19 nt, Homo sapiens
  misc_RNA (1)...(19): siRNA sense strand
guucaaagacccugagaca

SEQ ID NO: 623645 - RNA, 19 nt, Homo sapiens
  misc_RNA (1)...(19): siRNA sense strand
ucaagcgcaucuucuacuu

SEQ ID NO: 623646 - RNA, 19 nt, Homo sapiens
  misc_RNA (1)...(19): siRNA sense strand
gugagacugucaacaagau

SEQ ID NO: 623647 - RNA, 19 nt, Homo sapiens
  misc_RNA (1)...(19): siRNA sense strand
ccaccugccuggagcuguu

SEQ ID NO: 623648 - RNA, 19 nt, Homo sapiens
  misc_RNA (1)...(19): siRNA sense strand
cuggagagauccugucugu

SEQ ID NO: 623649 - RNA, 19 nt, Homo sapiens
  misc_RNA (1)...(19): siRNA sense strand
gaggcaagugcucgagaua

SEQ ID NO: 623650 - RNA, 19 nt, Homo sapiens
  misc_RNA (1)...(19): siRNA sense strand
gcacaggagagcaagaaca

SEQ ID NO: 623651 - RNA, 19 nt, Homo sapiens
  misc_RNA (1)...(19): siRNA sense strand
aagcgcaucuucuacuuca

SEQ ID NO: 623652 - RNA, 19 nt, Homo sapiens
  misc_RNA (1)...(19): siRNA sense strand
ucacugagaacuaugacuu

SEQ ID NO: 623653 - RNA, 19 nt, Homo sapiens
  misc_RNA (1)...(19): siRNA sense strand
cuacaucgucuucuuguuc

SEQ ID NO: 623654 - RNA, 19 nt, Homo sapiens
  misc_RNA (1)...(19): siRNA sense strand
ccuauguaauucucaccua

SEQ ID NO: 623655 - RNA, 19 nt, Homo sapiens
  misc_RNA (1)...(19): siRNA sense strand
ggcaagugcucgagauagg

SEQ ID NO: 623656 - RNA, 19 nt, Homo sapiens
  misc_RNA (1)...(19): siRNA sense strand
ugaagccguugcucagaau

SEQ ID NO: 623657 - RNA, 19 nt, Homo sapiens
  misc_RNA (1)...(19): siRNA sense strand
agaggacgcugaggucuuc

SEQ ID NO: 623658 - RNA, 19 nt, Homo sapiens
  misc_RNA (1)...(19): siRNA sense strand
ucacagacaacgaguucaa

SEQ ID NO: 623659 - RNA, 19 nt, Homo sapiens
  misc_RNA (1)...(19): siRNA sense strand
gugacgagcauguacaaug

SEQ ID NO: 623660 - RNA, 19 nt, Homo sapiens
  misc_RNA (1)...(19): siRNA sense strand
gcagacacuggaagaacuu

SEQ ID NO: 623661 - RNA, 19 nt, Homo sapiens
  misc_RNA (1)...(19): siRNA sense strand
agaagacccucaggcucua

SEQ ID NO: 623662 - RNA, 19 nt, Homo sapiens
  misc_RNA (1)...(19): siRNA sense strand
ucaaggcugucuucaucau

SEQ ID NO: 623663 - RNA, 19 nt, Homo sapiens
  misc_RNA (1)...(19): siRNA sense strand
uggugacgcugauugaaga

SEQ ID NO: 623664 - RNA, 19 nt, Homo sapiens
  misc_RNA (1)...(19): siRNA sense strand
gaccugugccguuucaugu

SEQ ID NO: 623665 - RNA, 19 nt, Homo sapiens
  misc_RNA (1)...(19): siRNA sense strand
cgaugaagacccuguuugu

SEQ ID NO: 623666 - RNA, 19 nt, Homo sapiens
  misc_RNA (1)...(19): siRNA sense strand
uaggaggagucuacuucuu

SEQ ID NO: 623667 - RNA, 19 nt, Homo sapiens
  misc_RNA (1)...(19): siRNA sense strand
agagauccugucuguguua

SEQ ID NO: 623668 - RNA, 19 nt, Homo sapiens
  misc_RNA (1)...(19): siRNA sense strand
uggagacuauuuccgaguu

SEQ ID NO: 623669 - RNA, 19 nt, Homo sapiens
  misc_RNA (1)...(19): siRNA sense strand
gcaaacggacagccugaag

SEQ ID NO: 623670 - RNA, 19 nt, Homo sapiens
  misc_RNA (1)...(19): siRNA sense strand
gggugagacugucaacaag

SEQ ID NO: 623671 - RNA, 19 nt, Homo sapiens
  misc_RNA (1)...(19): siRNA sense strand
guuaggaggagucuacuuc

SEQ ID NO: 623672 - RNA, 19 nt, Homo sapiens
  misc_RNA (1)...(19): siRNA sense strand
caucuucuacuucaacuuc

SEQ ID NO: 623673 - RNA, 19 nt, Homo sapiens
  misc_RNA (1)...(19): siRNA sense strand
ggucuuggccuauauucuc

SEQ ID NO: 623674 - RNA, 19 nt, Homo sapiens
  misc_RNA (1)...(19): siRNA sense strand
aaacggacagccugaagga

SEQ ID NO: 623675 - RNA, 19 nt, Homo sapiens
  misc_RNA (1)...(19): siRNA sense strand
ucgcaggaguaucuuugaa

SEQ ID NO: 623676 - RNA, 19 nt, Homo sapiens
  misc_RNA (1)...(19): siRNA sense strand
ggcagacacuggaagaacu

SEQ ID NO: 623677 - RNA, 19 nt, Homo sapiens
  misc_RNA (1)...(19): siRNA sense strand
gaugaagacccuguuugug

SEQ ID NO: 623678 - RNA, 19 nt, Homo sapiens
  misc_RNA (1)...(19): siRNA sense strand
aggaggagucuacuucuuu

SEQ ID NO: 623679 - RNA, 19 nt, Homo sapiens
  misc_RNA (1)...(19): siRNA sense strand
gaagccguugcucagaaua

SEQ ID NO: 623680 - RNA, 19 nt, Homo sapiens
  misc_RNA (1)...(19): siRNA sense strand
ugaaagccaugcucaaccu

SEQ ID NO: 623681 - RNA, 19 nt, Homo sapiens
  misc_RNA (1)...(19): siRNA sense strand
gagcaagaagcaccucaca

SEQ ID NO: 623682 - RNA, 19 nt, Homo sapiens
  misc_RNA (1)...(19): siRNA sense strand
ucaacuuccuggucuacug

SEQ ID NO: 623683 - RNA, 19 nt, Homo sapiens
  misc_RNA (1)...(19): siRNA sense strand
gccuguacaugaucaucuu

SEQ ID NO: 623684 - RNA, 19 nt, Homo sapiens
  misc_RNA (1)...(19): siRNA sense strand
ccaacaugcucuacuacac

SEQ ID NO: 623685 - RNA, 19 nt, Homo sapiens
  misc_RNA (1)...(19): siRNA sense strand
uugaagccguugcucagaa

SEQ ID NO: 623686 - RNA, 19 nt, Homo sapiens
  misc_RNA (1)...(19): siRNA sense strand
gcauguacaaugagauucu

SEQ ID NO: 623687 - RNA, 19 nt, Homo sapiens
  misc_RNA (1)...(19): siRNA sense strand
aaguuuaucugcgacaguu

SEQ ID NO: 623688 - RNA, 19 nt, Homo sapiens
  misc_RNA (1)...(19): siRNA sense strand
gcucagcccgaggaaguuu

SEQ ID NO: 623689 - RNA, 19 nt, Homo sapiens
  misc_RNA (1)...(19): siRNA sense strand
uaugaucgcaggaguaucu

SEQ ID NO: 623690 - RNA, 19 nt, Homo sapiens
  misc_RNA (1)...(19): siRNA sense strand
ggugagacugucaacaaga

SEQ ID NO: 623691 - RNA, 19 nt, Homo sapiens
  misc_RNA (1)...(19): siRNA sense strand
cagacaacgaguucaaaga

SEQ ID NO: 623692 - RNA, 19 nt, Homo sapiens
  misc_RNA (1)...(19): siRNA sense strand
uugaagacgggaagaauga

SEQ ID NO: 623693 - RNA, 19 nt, Homo sapiens
  misc_RNA (1)...(19): siRNA sense strand
gauugaagacgggaagaau

SEQ ID NO: 623694 - RNA, 19 nt, Homo sapiens
  misc_RNA (1)...(19): siRNA sense strand
agagaccugugccguuuca

SEQ ID NO: 623695 - RNA, 19 nt, Homo sapiens
  misc_RNA (1)...(19): siRNA sense strand
guacuucagccaccucaag

SEQ ID NO: 623696 - RNA, 19 nt, Homo sapiens
  misc_RNA (1)...(19): siRNA sense strand
uggcuugccucccuuuaag

SEQ ID NO: 623697 - RNA, 19 nt, Homo sapiens
  misc_RNA (1)...(19): siRNA sense strand
cgaaguuugugacgagcau

SEQ ID NO: 623698 - RNA, 19 nt, Homo sapiens
  misc_RNA (1)...(19): siRNA sense strand
ugaacuggaccaccuggaa

SEQ ID NO: 623699 - RNA, 19 nt, Homo sapiens
  misc_RNA (1)...(19): siRNA sense strand
gagauccugucuguguuag

SEQ ID NO: 623700 - RNA, 19 nt, Homo sapiens
  misc_RNA (1)...(19): siRNA sense strand
ccgaguuacuggagagauc

SEQ ID NO: 623701 - RNA, 19 nt, Homo sapiens
  misc_RNA (1)...(19): siRNA sense strand
acacggacagcuacuacaa

SEQ ID NO: 623702 - RNA, 19 nt, Homo sapiens
  misc_RNA (1)...(19): siRNA sense strand
gacuaccgguggugcuuca

SEQ ID NO: 623703 - RNA, 19 nt, Homo sapiens
  misc_RNA (1)...(19): siRNA sense strand
caggagagcaagaacaucu

SEQ ID NO: 623704 - RNA, 19 nt, Homo sapiens
  misc_RNA (1)...(19): siRNA sense strand
gauggcuugccucccuuua

SEQ ID NO: 623705 - RNA, 19 nt, Homo sapiens
  misc_RNA (1)...(19): siRNA sense strand
aagaagcaccucacagaca

SEQ ID NO: 623706 - RNA, 19 nt, Homo sapiens
  misc_RNA (1)...(19): siRNA sense strand
cagcuacagugagaugcuu

SEQ ID NO: 623707 - RNA, 19 nt, Homo sapiens
  misc_RNA (1)...(19): siRNA sense strand
ucuacugccuguacaugau

SEQ ID NO: 623708 - RNA, 19 nt, Homo sapiens
  misc_RNA (1)...(19): siRNA sense strand
gaaguuuaucugcgacagu

SEQ ID NO: 623709 - RNA, 19 nt, Homo sapiens
  misc_RNA (1)...(19): siRNA sense strand
caacgugggcaucaucaac

SEQ ID NO: 623710 - RNA, 19 nt, Homo sapiens
  misc_RNA (1)...(19): siRNA sense strand
gagacuauuuccgaguuac

SEQ ID NO: 623711 - RNA, 19 nt, Homo sapiens
  misc_RNA (1)...(19): siRNA sense strand
ucaccauggcugccuacua

SEQ ID NO: 623712 - RNA, 19 nt, Homo sapiens
  misc_RNA (1)...(19): siRNA sense strand
ugggugagacugucaacaa

SEQ ID NO: 623713 - RNA, 19 nt, Homo sapiens
  misc_RNA (1)...(19): siRNA sense strand
ggaccaacaugcucuacua

SEQ ID NO: 623714 - RNA, 19 nt, Homo sapiens
  misc_RNA (1)...(19): siRNA sense strand
guauguggcuuccauggua

SEQ ID NO: 623715 - RNA, 19 nt, Homo sapiens
  misc_RNA (1)...(19): siRNA sense strand
gcaagaagcaccucacaga

SEQ ID NO: 623716 - RNA, 19 nt, Homo sapiens
  misc_RNA (1)...(19): siRNA sense strand
ggagacuauuuccgaguua

SEQ ID NO: 623717 - RNA, 19 nt, Homo sapiens
  misc_RNA (1)...(19): siRNA sense strand
ggagagauccugucugugu

SEQ ID NO: 623718 - RNA, 19 nt, Homo sapiens
  misc_RNA (1)...(19): siRNA sense strand
ugacgagcauguacaauga

SEQ ID NO: 623719 - RNA, 19 nt, Homo sapiens
  misc_RNA (1)...(19): siRNA sense strand
gcacaucgccaucgagaga

SEQ ID NO: 623720 - RNA, 19 nt, Homo sapiens
  misc_RNA (1)...(19): siRNA sense strand
ugagagaccugugccguuu

SEQ ID NO: 623721 - RNA, 19 nt, Homo sapiens
  misc_RNA (1)...(19): siRNA sense strand
uggaggagcucaccaacaa

SEQ ID NO: 623722 - RNA, 19 nt, Homo sapiens
  misc_RNA (1)...(19): siRNA sense strand
gccuggagcuguucaaguu

SEQ ID NO: 623723 - RNA, 19 nt, Homo sapiens
  misc_RNA (1)...(19): siRNA sense strand
caucuaugccgucaugaua

SEQ ID NO: 623724 - RNA, 19 nt, Homo sapiens
  misc_RNA (1)...(19): siRNA sense strand
gagagauccugucuguguu

SEQ ID NO: 623725 - RNA, 19 nt, Homo sapiens
  misc_RNA (1)...(19): siRNA sense strand
gagcauguacaaugagauu

SEQ ID NO: 623726 - RNA, 19 nt, Homo sapiens
  misc_RNA (1)...(19): siRNA sense strand
uccgagggauucaguauuu

SEQ ID NO: 623727 - RNA, 19 nt, Homo sapiens
  misc_RNA (1)...(19): siRNA sense strand
guggacagcuacagugaga

SEQ ID NO: 623728 - RNA, 19 nt, Homo sapiens
  misc_RNA (1)...(19): siRNA sense strand
ucagccaccucaaggagua

SEQ ID NO: 623729 - RNA, 19 nt, Homo sapiens
  misc_RNA (1)...(19): siRNA sense strand
ggacaagugggacagauuc

SEQ ID NO: 623730 - RNA, 19 nt, Homo sapiens
  misc_RNA (1)...(19): siRNA sense strand
gaccuggaguucacugaga

SEQ ID NO: 623731 - RNA, 19 nt, Homo sapiens
  misc_RNA (1)...(19): siRNA sense strand
agaagcaccucacagacaa

SEQ ID NO: 623732 - RNA, 19 nt, Homo sapiens
  misc_RNA (1)...(19): siRNA sense strand
gcaagaacaucuggaagcu

SEQ ID NO: 623733 - RNA, 19 nt, Homo sapiens
  misc_RNA (1)...(19): siRNA sense strand
gcugcuggccuauguaauu

SEQ ID NO: 623734 - RNA, 19 nt, Homo sapiens
  misc_RNA (1)...(19): siRNA sense strand
cuucaaggcugucuucauc

SEQ ID NO: 623735 - RNA, 19 nt, Homo sapiens
  misc_RNA (1)...(19): siRNA sense strand
caccauggcugccuacuac

SEQ ID NO: 623736 - RNA, 19 nt, Homo sapiens
  misc_RNA (1)...(19): siRNA sense strand
ggacagcuacagugagaug

SEQ ID NO: 623737 - RNA, 19 nt, Homo sapiens
  misc_RNA (1)...(19): siRNA sense strand
cccgauagcuccuacaaca

SEQ ID NO: 623738 - RNA, 19 nt, Homo sapiens
  misc_RNA (1)...(19): siRNA sense strand
ugagaacuaugacuucaag

SEQ ID NO: 623739 - RNA, 19 nt, Homo sapiens
  misc_RNA (1)...(19): siRNA sense strand
agaagaugauccugagaga

SEQ ID NO: 623740 - RNA, 19 nt, Homo sapiens
  misc_RNA (1)...(19): siRNA sense strand
ggaggagucuacuucuuuu

SEQ ID NO: 623741 - RNA, 19 nt, Homo sapiens
  misc_RNA (1)...(19): siRNA sense strand
ccugugccguuucauguuu

SEQ ID NO: 623742 - RNA, 19 nt, Homo sapiens
  misc_RNA (1)...(19): siRNA sense strand
gaucgcaggaguaucuuug

SEQ ID NO: 623743 - RNA, 19 nt, Homo sapiens
  misc_RNA (1)...(19): siRNA sense strand
gaggagcucaccaacaaga

SEQ ID NO: 623744 - RNA, 19 nt, Homo sapiens
  misc_RNA (1)...(19): siRNA sense strand
guucaaagacccugagaca

SEQ ID NO: 623745 - RNA, 19 nt, Homo sapiens
  misc_RNA (1)...(19): siRNA sense strand
ucaagcgcaucuucuacuu

SEQ ID NO: 623746 - RNA, 19 nt, Homo sapiens
  misc_RNA (1)...(19): siRNA sense strand
gugagacugucaacaagau

SEQ ID NO: 623747 - RNA, 19 nt, Homo sapiens
  misc_RNA (1)...(19): siRNA sense strand
ccaccugccuggagcuguu

SEQ ID NO: 623748 - RNA, 19 nt, Homo sapiens
  misc_RNA (1)...(19): siRNA sense strand
cuggagagauccugucugu

SEQ ID NO: 623749 - RNA, 19 nt, Homo sapiens
  misc_RNA (1)...(19): siRNA sense strand
gaggcaagugcucgagaua

SEQ ID NO: 623750 - RNA, 19 nt, Homo sapiens
  misc_RNA (1)...(19): siRNA sense strand
gcacaggagagcaagaaca

SEQ ID NO: 623751 - RNA, 19 nt, Homo sapiens
  misc_RNA (1)...(19): siRNA sense strand
aagcgcaucuucuacuuca

SEQ ID NO: 623752 - RNA, 19 nt, Homo sapiens
  misc_RNA (1)...(19): siRNA sense strand
ucacugagaacuaugacuu

SEQ ID NO: 623753 - RNA, 19 nt, Homo sapiens
  misc_RNA (1)...(19): siRNA sense strand
cuacaucgucuucuuguuc

SEQ ID NO: 623754 - RNA, 19 nt, Homo sapiens
  misc_RNA (1)...(19): siRNA sense strand
ccuauguaauucucaccua

SEQ ID NO: 623755 - RNA, 19 nt, Homo sapiens
  misc_RNA (1)...(19): siRNA sense strand
ggcaagugcucgagauagg

SEQ ID NO: 623756 - RNA, 19 nt, Homo sapiens
  misc_RNA (1)...(19): siRNA sense strand
ugaagccguugcucagaau

SEQ ID NO: 623757 - RNA, 19 nt, Homo sapiens
  misc_RNA (1)...(19): siRNA sense strand
agaggacgcugaggucuuc

SEQ ID NO: 623758 - RNA, 19 nt, Homo sapiens
  misc_RNA (1)...(19): siRNA sense strand
ucacagacaacgaguucaa

SEQ ID NO: 623759 - RNA, 19 nt, Homo sapiens
  misc_RNA (1)...(19): siRNA sense strand
gugacgagcauguacaaug

SEQ ID NO: 623760 - RNA, 19 nt, Homo sapiens
  misc_RNA (1)...(19): siRNA sense strand
gcagacacuggaagaacuu

SEQ ID NO: 623761 - RNA, 19 nt, Homo sapiens
  misc_RNA (1)...(19): siRNA sense strand
agaagacccucaggcucua

SEQ ID NO: 623762 - RNA, 19 nt, Homo sapiens
  misc_RNA (1)...(19): siRNA sense strand
ucaaggcugucuucaucau

SEQ ID NO: 623763 - RNA, 19 nt, Homo sapiens
  misc_RNA (1)...(19): siRNA sense strand
uggugacgcugauugaaga

SEQ ID NO: 623764 - RNA, 19 nt, Homo sapiens
  misc_RNA (1)...(19): siRNA sense strand
gaccugugccguuucaugu

SEQ ID NO: 623765 - RNA, 19 nt, Homo sapiens
  misc_RNA (1)...(19): siRNA sense strand
cgaugaagacccuguuugu

SEQ ID NO: 623766 - RNA, 19 nt, Homo sapiens
  misc_RNA (1)...(19): siRNA sense strand
uaggaggagucuacuucuu

SEQ ID NO: 623767 - RNA, 19 nt, Homo sapiens
  misc_RNA (1)...(19): siRNA sense strand
agagauccugucuguguua

SEQ ID NO: 623768 - RNA, 19 nt, Homo sapiens
  misc_RNA (1)...(19): siRNA sense strand
uggagacuauuuccgaguu

SEQ ID NO: 623769 - RNA, 19 nt, Homo sapiens
  misc_RNA (1)...(19): siRNA sense strand
gcaaacggacagccugaag

SEQ ID NO: 623770 - RNA, 19 nt, Homo sapiens
  misc_RNA (1)...(19): siRNA sense strand
gggugagacugucaacaag

SEQ ID NO: 623771 - RNA, 19 nt, Homo sapiens
  misc_RNA (1)...(19): siRNA sense strand
guuaggaggagucuacuuc

SEQ ID NO: 623772 - RNA, 19 nt, Homo sapiens
  misc_RNA (1)...(19): siRNA sense strand
caucuucuacuucaacuuc

SEQ ID NO: 623773 - RNA, 19 nt, Homo sapiens
  misc_RNA (1)...(19): siRNA sense strand
ggucuuggccuauauucuc

SEQ ID NO: 623774 - RNA, 19 nt, Homo sapiens
  misc_RNA (1)...(19): siRNA sense strand
aaacggacagccugaagga

SEQ ID NO: 623775 - RNA, 19 nt, Homo sapiens
  misc_RNA (1)...(19): siRNA sense strand
ucgcaggaguaucuuugaa

SEQ ID NO: 623776 - RNA, 19 nt, Homo sapiens
  misc_RNA (1)...(19): siRNA sense strand
ggcagacacuggaagaacu

SEQ ID NO: 623777 - RNA, 19 nt, Homo sapiens
  misc_RNA (1)...(19): siRNA sense strand
gaugaagacccuguuugug

SEQ ID NO: 623778 - RNA, 19 nt, Homo sapiens
  misc_RNA (1)...(19): siRNA sense strand
aggaggagucuacuucuuu

SEQ ID NO: 623779 - RNA, 19 nt, Homo sapiens
  misc_RNA (1)...(19): siRNA sense strand
gaagccguugcucagaaua

SEQ ID NO: 623780 - RNA, 19 nt, Homo sapiens
  misc_RNA (1)...(19): siRNA sense strand
ugaaagccaugcucaaccu

SEQ ID NO: 623781 - RNA, 19 nt, Homo sapiens
  misc_RNA (1)...(19): siRNA sense strand
gagcaagaagcaccucaca

SEQ ID NO: 623782 - RNA, 19 nt, Homo sapiens
  misc_RNA (1)...(19): siRNA sense strand
ucaacuuccuggucuacug

SEQ ID NO: 623783 - RNA, 19 nt, Homo sapiens
  misc_RNA (1)...(19): siRNA sense strand
gccuguacaugaucaucuu

SEQ ID NO: 623784 - RNA, 19 nt, Homo sapiens
  misc_RNA (1)...(19): siRNA sense strand
ccaacaugcucuacuacac

SEQ ID NO: 623785 - RNA, 19 nt, Homo sapiens
  misc_RNA (1)...(19): siRNA sense strand
uugaagccguugcucagaa

SEQ ID NO: 623786 - RNA, 19 nt, Homo sapiens
  misc_RNA (1)...(19): siRNA sense strand
gcauguacaaugagauucu

SEQ ID NO: 623787 - RNA, 19 nt, Homo sapiens
  misc_RNA (1)...(19): siRNA sense strand
aaguuuaucugcgacaguu

SEQ ID NO: 623788 - RNA, 19 nt, Homo sapiens
  misc_RNA (1)...(19): siRNA sense strand
gcucagcccgaggaaguuu

SEQ ID NO: 623789 - RNA, 19 nt, Homo sapiens
  misc_RNA (1)...(19): siRNA sense strand
uaugaucgcaggaguaucu

SEQ ID NO: 623790 - RNA, 19 nt, Homo sapiens
  misc_RNA (1)...(19): siRNA sense strand
ggugagacugucaacaaga

SEQ ID NO: 623791 - RNA, 19 nt, Homo sapiens
  misc_RNA (1)...(19): siRNA sense strand
cagacaacgaguucaaaga

SEQ ID NO: 623792 - RNA, 19 nt, Homo sapiens
  misc_RNA (1)...(19): siRNA sense strand
uugaagacgggaagaauga

SEQ ID NO: 623793 - RNA, 19 nt, Homo sapiens
  misc_RNA (1)...(19): siRNA sense strand
gauugaagacgggaagaau

SEQ ID NO: 623794 - RNA, 19 nt, Homo sapiens
  misc_RNA (1)...(19): siRNA sense strand
agagaccugugccguuuca

SEQ ID NO: 623795 - RNA, 19 nt, Homo sapiens
  misc_RNA (1)...(19): siRNA sense strand
guacuucagccaccucaag

SEQ ID NO: 623796 - RNA, 19 nt, Homo sapiens
  misc_RNA (1)...(19): siRNA sense strand
uggcuugccucccuuuaag

SEQ ID NO: 623797 - RNA, 19 nt, Homo sapiens
  misc_RNA (1)...(19): siRNA sense strand
cgaaguuugugacgagcau

SEQ ID NO: 623798 - RNA, 19 nt, Homo sapiens
  misc_RNA (1)...(19): siRNA sense strand
ugaacuggaccaccuggaa

SEQ ID NO: 623799 - RNA, 19 nt, Homo sapiens
  misc_RNA (1)...(19): siRNA sense strand
gagauccugucuguguuag

SEQ ID NO: 623800 - RNA, 19 nt, Homo sapiens
  misc_RNA (1)...(19): siRNA sense strand
ccgaguuacuggagagauc

SEQ ID NO: 623801 - RNA, 19 nt, Homo sapiens
  misc_RNA (1)...(19): siRNA sense strand
acacggacagcuacuacaa

SEQ ID NO: 623802 - RNA, 19 nt, Homo sapiens
  misc_RNA (1)...(19): siRNA sense strand
gacuaccgguggugcuuca

SEQ ID NO: 623803 - RNA, 19 nt, Homo sapiens
  misc_RNA (1)...(19): siRNA sense strand
caggagagcaagaacaucu

SEQ ID NO: 623804 - RNA, 19 nt, Homo sapiens
  misc_RNA (1)...(19): siRNA sense strand
gauggcuugccucccuuua

SEQ ID NO: 623805 - RNA, 19 nt, Homo sapiens
  misc_RNA (1)...(19): siRNA sense strand
aagaagcaccucacagaca

SEQ ID NO: 623806 - RNA, 19 nt, Homo sapiens
  misc_RNA (1)...(19): siRNA sense strand
cagcuacagugagaugcuu

SEQ ID NO: 623807 - RNA, 19 nt, Homo sapiens
  misc_RNA (1)...(19): siRNA sense strand
ucuacugccuguacaugau

SEQ ID NO: 623808 - RNA, 19 nt, Homo sapiens
  misc_RNA (1)...(19): siRNA sense strand
gaaguuuaucugcgacagu

SEQ ID NO: 623809 - RNA, 19 nt, Homo sapiens
  misc_RNA (1)...(19): siRNA sense strand
caacgugggcaucaucaac

SEQ ID NO: 623810 - RNA, 19 nt, Homo sapiens
  misc_RNA (1)...(19): siRNA sense strand
gagacuauuuccgaguuac

SEQ ID NO: 623811 - RNA, 19 nt, Homo sapiens
  misc_RNA (1)...(19): siRNA sense strand
ucaccauggcugccuacua

SEQ ID NO: 623812 - RNA, 19 nt, Homo sapiens
  misc_RNA (1)...(19): siRNA sense strand
ugggugagacugucaacaa

SEQ ID NO: 623813 - RNA, 19 nt, Homo sapiens
  misc_RNA (1)...(19): siRNA sense strand
ggaccaacaugcucuacua

SEQ ID NO: 623814 - RNA, 19 nt, Homo sapiens
  misc_RNA (1)...(19): siRNA sense strand
guauguggcuuccauggua

SEQ ID NO: 623815 - RNA, 19 nt, Homo sapiens
  misc_RNA (1)...(19): siRNA sense strand
gcaagaagcaccucacaga

SEQ ID NO: 623816 - RNA, 19 nt, Homo sapiens
  misc_RNA (1)...(19): siRNA sense strand
ggagacuauuuccgaguua

SEQ ID NO: 623817 - RNA, 19 nt, Homo sapiens
  misc_RNA (1)...(19): siRNA sense strand
ggagagauccugucugugu

SEQ ID NO: 623818 - RNA, 19 nt, Homo sapiens
  misc_RNA (1)...(19): siRNA sense strand
ugacgagcauguacaauga

SEQ ID NO: 623819 - RNA, 19 nt, Homo sapiens
  misc_RNA (1)...(19): siRNA sense strand
gcacaucgccaucgagaga

SEQ ID NO: 623820 - RNA, 19 nt, Homo sapiens
  misc_RNA (1)...(19): siRNA sense strand
ugagagaccugugccguuu

SEQ ID NO: 623821 - RNA, 19 nt, Homo sapiens
  misc_RNA (1)...(19): siRNA sense strand
uggaggagcucaccaacaa

SEQ ID NO: 623822 - RNA, 19 nt, Homo sapiens
  misc_RNA (1)...(19): siRNA sense strand
gccuggagcuguucaaguu

SEQ ID NO: 623823 - RNA, 19 nt, Homo sapiens
  misc_RNA (1)...(19): siRNA sense strand
caucuaugccgucaugaua

SEQ ID NO: 623824 - RNA, 19 nt, Homo sapiens
  misc_RNA (1)...(19): siRNA sense strand
gagagauccugucuguguu

SEQ ID NO: 623825 - RNA, 19 nt, Homo sapiens
  misc_RNA (1)...(19): siRNA sense strand
gagcauguacaaugagauu

SEQ ID NO: 623826 - RNA, 19 nt, Homo sapiens
  misc_RNA (1)...(19): siRNA sense strand
uccgagggauucaguauuu

SEQ ID NO: 623827 - RNA, 19 nt, Homo sapiens
  misc_RNA (1)...(19): siRNA sense strand
guggacagcuacagugaga

SEQ ID NO: 623828 - RNA, 19 nt, Homo sapiens
  misc_RNA (1)...(19): siRNA sense strand
ucagccaccucaaggagua

SEQ ID NO: 623829 - RNA, 19 nt, Homo sapiens
  misc_RNA (1)...(19): siRNA sense strand
ggacaagugggacagauuc

SEQ ID NO: 623830 - RNA, 19 nt, Homo sapiens
  misc_RNA (1)...(19): siRNA sense strand
gaccuggaguucacugaga

SEQ ID NO: 623831 - RNA, 19 nt, Homo sapiens
  misc_RNA (1)...(19): siRNA sense strand
agaagcaccucacagacaa

SEQ ID NO: 623832 - RNA, 19 nt, Homo sapiens
  misc_RNA (1)...(19): siRNA sense strand
gcaagaacaucuggaagcu

SEQ ID NO: 623833 - RNA, 19 nt, Homo sapiens
  misc_RNA (1)...(19): siRNA sense strand
gcugcuggccuauguaauu

SEQ ID NO: 623834 - RNA, 19 nt, Homo sapiens
  misc_RNA (1)...(19): siRNA sense strand
cuucaaggcugucuucauc

SEQ ID NO: 623835 - RNA, 19 nt, Homo sapiens
  misc_RNA (1)...(19): siRNA sense strand
caccauggcugccuacuac

SEQ ID NO: 623836 - RNA, 19 nt, Homo sapiens
  misc_RNA (1)...(19): siRNA sense strand
ggacagcuacagugagaug

SEQ ID NO: 623837 - RNA, 19 nt, Homo sapiens
  misc_RNA (1)...(19): siRNA sense strand
cccgauagcuccuacaaca

SEQ ID NO: 623838 - RNA, 19 nt, Homo sapiens
  misc_RNA (1)...(19): siRNA sense strand
ugagaacuaugacuucaag

SEQ ID NO: 623839 - RNA, 19 nt, Homo sapiens
  misc_RNA (1)...(19): siRNA sense strand
agaagaugauccugagaga

SEQ ID NO: 623840 - RNA, 19 nt, Homo sapiens
  misc_RNA (1)...(19): siRNA sense strand
ggaggagucuacuucuuuu

SEQ ID NO: 623841 - RNA, 19 nt, Homo sapiens
  misc_RNA (1)...(19): siRNA sense strand
ccugugccguuucauguuu

SEQ ID NO: 623842 - RNA, 19 nt, Homo sapiens
  misc_RNA (1)...(19): siRNA sense strand
gaucgcaggaguaucuuug

SEQ ID NO: 623843 - RNA, 19 nt, Homo sapiens
  misc_RNA (1)...(19): siRNA sense strand
gaggagcucaccaacaaga

SEQ ID NO: 623844 - RNA, 19 nt, Homo sapiens
  misc_RNA (1)...(19): siRNA sense strand
guucaaagacccugagaca

SEQ ID NO: 623845 - RNA, 19 nt, Homo sapiens
  misc_RNA (1)...(19): siRNA sense strand
ucaagcgcaucuucuacuu

SEQ ID NO: 623846 - RNA, 19 nt, Homo sapiens
  misc_RNA (1)...(19): siRNA sense strand
gugagacugucaacaagau

SEQ ID NO: 623847 - RNA, 19 nt, Homo sapiens
  misc_RNA (1)...(19): siRNA sense strand
ccaccugccuggagcuguu

SEQ ID NO: 623848 - RNA, 19 nt, Homo sapiens
  misc_RNA (1)...(19): siRNA sense strand
cuggagagauccugucugu

SEQ ID NO: 623849 - RNA, 19 nt, Homo sapiens
  misc_RNA (1)...(19): siRNA sense strand
gaggcaagugcucgagaua

SEQ ID NO: 623850 - RNA, 19 nt, Homo sapiens
  misc_RNA (1)...(19): siRNA sense strand
gcacaggagagcaagaaca

SEQ ID NO: 623851 - RNA, 19 nt, Homo sapiens
  misc_RNA (1)...(19): siRNA sense strand
aagcgcaucuucuacuuca

SEQ ID NO: 623852 - RNA, 19 nt, Homo sapiens
  misc_RNA (1)...(19): siRNA sense strand
ucacugagaacuaugacuu

SEQ ID NO: 623853 - RNA, 19 nt, Homo sapiens
  misc_RNA (1)...(19): siRNA sense strand
cuacaucgucuucuuguuc

SEQ ID NO: 623854 - RNA, 19 nt, Homo sapiens
  misc_RNA (1)...(19): siRNA sense strand
ccuauguaauucucaccua

SEQ ID NO: 623855 - RNA, 19 nt, Homo sapiens
  misc_RNA (1)...(19): siRNA sense strand
ggcaagugcucgagauagg

SEQ ID NO: 623856 - RNA, 19 nt, Homo sapiens
  misc_RNA (1)...(19): siRNA sense strand
ugaagccguugcucagaau

SEQ ID NO: 623857 - RNA, 19 nt, Homo sapiens
  misc_RNA (1)...(19): siRNA sense strand
agaggacgcugaggucuuc

SEQ ID NO: 623858 - RNA, 19 nt, Homo sapiens
  misc_RNA (1)...(19): siRNA sense strand
ucacagacaacgaguucaa

SEQ ID NO: 623859 - RNA, 19 nt, Homo sapiens
  misc_RNA (1)...(19): siRNA sense strand
gugacgagcauguacaaug

SEQ ID NO: 623860 - RNA, 19 nt, Homo sapiens
  misc_RNA (1)...(19): siRNA sense strand
gcagacacuggaagaacuu

SEQ ID NO: 623861 - RNA, 19 nt, Homo sapiens
  misc_RNA (1)...(19): siRNA sense strand
agaagacccucaggcucua

SEQ ID NO: 623862 - RNA, 19 nt, Homo sapiens
  misc_RNA (1)...(19): siRNA sense strand
ucaaggcugucuucaucau

SEQ ID NO: 623863 - RNA, 19 nt, Homo sapiens
  misc_RNA (1)...(19): siRNA sense strand
uggugacgcugauugaaga

SEQ ID NO: 623864 - RNA, 19 nt, Homo sapiens
  misc_RNA (1)...(19): siRNA sense strand
gaccugugccguuucaugu

SEQ ID NO: 623865 - RNA, 19 nt, Homo sapiens
  misc_RNA (1)...(19): siRNA sense strand
cgaugaagacccuguuugu

SEQ ID NO: 623866 - RNA, 19 nt, Homo sapiens
  misc_RNA (1)...(19): siRNA sense strand
uaggaggagucuacuucuu

SEQ ID NO: 623867 - RNA, 19 nt, Homo sapiens
  misc_RNA (1)...(19): siRNA sense strand
agagauccugucuguguua

SEQ ID NO: 623868 - RNA, 19 nt, Homo sapiens
  misc_RNA (1)...(19): siRNA sense strand
uggagacuauuuccgaguu

SEQ ID NO: 623869 - RNA, 19 nt, Homo sapiens
  misc_RNA (1)...(19): siRNA sense strand
gcaaacggacagccugaag

SEQ ID NO: 623870 - RNA, 19 nt, Homo sapiens
  misc_RNA (1)...(19): siRNA sense strand
gggugagacugucaacaag

SEQ ID NO: 623871 - RNA, 19 nt, Homo sapiens
  misc_RNA (1)...(19): siRNA sense strand
guuaggaggagucuacuuc

SEQ ID NO: 623872 - RNA, 19 nt, Homo sapiens
  misc_RNA (1)...(19): siRNA sense strand
caucuucuacuucaacuuc

SEQ ID NO: 623873 - RNA, 19 nt, Homo sapiens
  misc_RNA (1)...(19): siRNA sense strand
ggucuuggccuauauucuc

SEQ ID NO: 623874 - RNA, 19 nt, Homo sapiens
  misc_RNA (1)...(19): siRNA sense strand
aaacggacagccugaagga

SEQ ID NO: 623875 - RNA, 19 nt, Homo sapiens
  misc_RNA (1)...(19): siRNA sense strand
ucgcaggaguaucuuugaa

SEQ ID NO: 623876 - RNA, 19 nt, Homo sapiens
  misc_RNA (1)...(19): siRNA sense strand
ggcagacacuggaagaacu

SEQ ID NO: 623877 - RNA, 19 nt, Homo sapiens
  misc_RNA (1)...(19): siRNA sense strand
gaugaagacccuguuugug

SEQ ID NO: 623878 - RNA, 19 nt, Homo sapiens
  misc_RNA (1)...(19): siRNA sense strand
aggaggagucuacuucuuu

SEQ ID NO: 623879 - RNA, 19 nt, Homo sapiens
  misc_RNA (1)...(19): siRNA sense strand
gaagccguugcucagaaua

SEQ ID NO: 623880 - RNA, 19 nt, Homo sapiens
  misc_RNA (1)...(19): siRNA sense strand
ugaaagccaugcucaaccu

SEQ ID NO: 623881 - RNA, 19 nt, Homo sapiens
  misc_RNA (1)...(19): siRNA sense strand
gagcaagaagcaccucaca

SEQ ID NO: 623882 - RNA, 19 nt, Homo sapiens
  misc_RNA (1)...(19): siRNA sense strand
ucaacuuccuggucuacug

SEQ ID NO: 623883 - RNA, 19 nt, Homo sapiens
  misc_RNA (1)...(19): siRNA sense strand
gccuguacaugaucaucuu

SEQ ID NO: 623884 - RNA, 19 nt, Homo sapiens
  misc_RNA (1)...(19): siRNA sense strand
ccaacaugcucuacuacac

SEQ ID NO: 623885 - RNA, 19 nt, Homo sapiens
  misc_RNA (1)...(19): siRNA sense strand
uugaagccguugcucagaa

SEQ ID NO: 623886 - RNA, 19 nt, Homo sapiens
  misc_RNA (1)...(19): siRNA sense strand
gcauguacaaugagauucu

SEQ ID NO: 623887 - RNA, 19 nt, Homo sapiens
  misc_RNA (1)...(19): siRNA sense strand
aaguuuaucugcgacaguu

SEQ ID NO: 623888 - RNA, 19 nt, Homo sapiens
  misc_RNA (1)...(19): siRNA sense strand
gcucagcccgaggaaguuu

SEQ ID NO: 623889 - RNA, 19 nt, Homo sapiens
  misc_RNA (1)...(19): siRNA sense strand
uaugaucgcaggaguaucu

SEQ ID NO: 623890 - RNA, 19 nt, Homo sapiens
  misc_RNA (1)...(19): siRNA sense strand
ggugagacugucaacaaga

SEQ ID NO: 623891 - RNA, 19 nt, Homo sapiens
  misc_RNA (1)...(19): siRNA sense strand
cagacaacgaguucaaaga

SEQ ID NO: 623892 - RNA, 19 nt, Homo sapiens
  misc_RNA (1)...(19): siRNA sense strand
uugaagacgggaagaauga

SEQ ID NO: 623893 - RNA, 19 nt, Homo sapiens
  misc_RNA (1)...(19): siRNA sense strand
gauugaagacgggaagaau

SEQ ID NO: 623894 - RNA, 19 nt, Homo sapiens
  misc_RNA (1)...(19): siRNA sense strand
agagaccugugccguuuca

SEQ ID NO: 623895 - RNA, 19 nt, Homo sapiens
  misc_RNA (1)...(19): siRNA sense strand
guacuucagccaccucaag

SEQ ID NO: 623896 - RNA, 19 nt, Homo sapiens
  misc_RNA (1)...(19): siRNA sense strand
uggcuugccucccuuuaag

SEQ ID NO: 623897 - RNA, 19 nt, Homo sapiens
  misc_RNA (1)...(19): siRNA sense strand
cgaaguuugugacgagcau

SEQ ID NO: 623898 - RNA, 19 nt, Homo sapiens
  misc_RNA (1)...(19): siRNA sense strand
ugaacuggaccaccuggaa

SEQ ID NO: 623899 - RNA, 19 nt, Homo sapiens
  misc_RNA (1)...(19): siRNA sense strand
gagauccugucuguguuag

SEQ ID NO: 623900 - RNA, 19 nt, Homo sapiens
  misc_RNA (1)...(19): siRNA sense strand
ccgaguuacuggagagauc

SEQ ID NO: 623901 - RNA, 19 nt, Homo sapiens
  misc_RNA (1)...(19): siRNA sense strand
acacggacagcuacuacaa

SEQ ID NO: 623902 - RNA, 19 nt, Homo sapiens
  misc_RNA (1)...(19): siRNA sense strand
gacuaccgguggugcuuca

SEQ ID NO: 623903 - RNA, 19 nt, Homo sapiens
  misc_RNA (1)...(19): siRNA sense strand
caggagagcaagaacaucu

SEQ ID NO: 623904 - RNA, 19 nt, Homo sapiens
  misc_RNA (1)...(19): siRNA sense strand
gauggcuugccucccuuua

SEQ ID NO: 623905 - RNA, 19 nt, Homo sapiens
  misc_RNA (1)...(19): siRNA sense strand
aagaagcaccucacagaca

SEQ ID NO: 623906 - RNA, 19 nt, Homo sapiens
  misc_RNA (1)...(19): siRNA sense strand
cagcuacagugagaugcuu

SEQ ID NO: 623907 - RNA, 19 nt, Homo sapiens
  misc_RNA (1)...(19): siRNA sense strand
ucuacugccuguacaugau

SEQ ID NO: 623908 - RNA, 19 nt, Homo sapiens
  misc_RNA (1)...(19): siRNA sense strand
gaaguuuaucugcgacagu

SEQ ID NO: 623909 - RNA, 19 nt, Homo sapiens
  misc_RNA (1)...(19): siRNA sense strand
caacgugggcaucaucaac

SEQ ID NO: 623910 - RNA, 19 nt, Homo sapiens
  misc_RNA (1)...(19): siRNA sense strand
gagacuauuuccgaguuac

SEQ ID NO: 623911 - RNA, 19 nt, Homo sapiens
  misc_RNA (1)...(19): siRNA sense strand
ucaccauggcugccuacua

SEQ ID NO: 623912 - RNA, 19 nt, Homo sapiens
  misc_RNA (1)...(19): siRNA sense strand
ugggugagacugucaacaa

SEQ ID NO: 623913 - RNA, 19 nt, Homo sapiens
  misc_RNA (1)...(19): siRNA sense strand
gaucagagcuggcgcaaag

SEQ ID NO: 623914 - RNA, 19 nt, Homo sapiens
  misc_RNA (1)...(19): siRNA sense strand
gcaaagagcggguacugaa

SEQ ID NO: 623915 - RNA, 19 nt, Homo sapiens
  misc_RNA (1)...(19): siRNA sense strand
gcaaugaaaucuggacuca

SEQ ID NO: 623916 - RNA, 19 nt, Homo sapiens
  misc_RNA (1)...(19): siRNA sense strand
gauguuuccuaccuauaua

SEQ ID NO: 623917 - RNA, 19 nt, Homo sapiens
  misc_RNA (1)...(19): siRNA sense strand
gagcaauggugggaagauu

SEQ ID NO: 623918 - RNA, 19 nt, Homo sapiens
  misc_RNA (1)...(19): siRNA sense strand
ccacuguucugugcaauga

SEQ ID NO: 623919 - RNA, 19 nt, Homo sapiens
  misc_RNA (1)...(19): siRNA sense strand
ggauguuuccuaccuauau

SEQ ID NO: 623920 - RNA, 19 nt, Homo sapiens
  misc_RNA (1)...(19): siRNA sense strand
ggagcugccugccaaccuu

SEQ ID NO: 623921 - RNA, 19 nt, Homo sapiens
  misc_RNA (1)...(19): siRNA sense strand
caaagaggacugugagcaa

SEQ ID NO: 623922 - RNA, 19 nt, Homo sapiens
  misc_RNA (1)...(19): siRNA sense strand
ggacuucaggguuuaacaa

SEQ ID NO: 623923 - RNA, 19 nt, Homo sapiens
  misc_RNA (1)...(19): siRNA sense strand
ccaggaagcccauaaggau

SEQ ID NO: 623924 - RNA, 19 nt, Homo sapiens
  misc_RNA (1)...(19): siRNA sense strand
ggaagaaugccugcuguuc

SEQ ID NO: 623925 - RNA, 19 nt, Homo sapiens
  misc_RNA (1)...(19): siRNA sense strand
ccuacaaggucagcaacua

SEQ ID NO: 623926 - RNA, 19 nt, Homo sapiens
  misc_RNA (1)...(19): siRNA sense strand
aaagaggacugugagcaau

SEQ ID NO: 623927 - RNA, 19 nt, Homo sapiens
  misc_RNA (1)...(19): siRNA sense strand
aaugaaaucuggacucacu

SEQ ID NO: 623928 - RNA, 19 nt, Homo sapiens
  misc_RNA (1)...(19): siRNA sense strand
caaguugcaugagcagugu

SEQ ID NO: 623929 - RNA, 19 nt, Homo sapiens
  misc_RNA (1)...(19): siRNA sense strand
gcaaacggcauuucaucca

SEQ ID NO: 623930 - RNA, 19 nt, Homo sapiens
  misc_RNA (1)...(19): siRNA sense strand
cuucaggguuuaacaagug

SEQ ID NO: 623931 - RNA, 19 nt, Homo sapiens
  misc_RNA (1)...(19): siRNA sense strand
gccaaccuuuccauuucua

SEQ ID NO: 623932 - RNA, 19 nt, Homo sapiens
  misc_RNA (1)...(19): siRNA sense strand
ugucgacccuggaggaaga

SEQ ID NO: 623933 - RNA, 19 nt, Homo sapiens
  misc_RNA (1)...(19): siRNA sense strand
cugccaaccuuuccauuuc

SEQ ID NO: 623934 - RNA, 19 nt, Homo sapiens
  misc_RNA (1)...(19): siRNA sense strand
ggaagcccauaaggauguu

SEQ ID NO: 623935 - RNA, 19 nt, Homo sapiens
  misc_RNA (1)...(19): siRNA sense strand
gccaagcaccacaaggaaa

SEQ ID NO: 623936 - RNA, 19 nt, Homo sapiens
  misc_RNA (1)...(19): siRNA sense strand
acuguucugugcaaugaaa

SEQ ID NO: 623937 - RNA, 19 nt, Homo sapiens
  misc_RNA (1)...(19): siRNA sense strand
ggacucacuccuacaaggu

SEQ ID NO: 623938 - RNA, 19 nt, Homo sapiens
  misc_RNA (1)...(19): siRNA sense strand
gccaggaagcccauaagga

SEQ ID NO: 623939 - RNA, 19 nt, Homo sapiens
  misc_RNA (1)...(19): siRNA sense strand
ggagguggcgagguucuau

SEQ ID NO: 623940 - RNA, 19 nt, Homo sapiens
  misc_RNA (1)...(19): siRNA sense strand
gccuggccuuuccugcuua

SEQ ID NO: 623941 - RNA, 19 nt, Homo sapiens
  misc_RNA (1)...(19): siRNA sense strand
cuaccuauauagauucaac

SEQ ID NO: 623942 - RNA, 19 nt, Homo sapiens
  misc_RNA (1)...(19): siRNA sense strand
augaggagguggcgagguu

SEQ ID NO: 623943 - RNA, 19 nt, Homo sapiens
  misc_RNA (1)...(19): siRNA sense strand
gaacgccaagcaccacaag

SEQ ID NO: 623944 - RNA, 19 nt, Homo sapiens
  misc_RNA (1)...(19): siRNA sense strand
gagcugccugccaaccuuu

SEQ ID NO: 623945 - RNA, 19 nt, Homo sapiens
  misc_RNA (1)...(19): siRNA sense strand
gcucagacaaggauugcau

SEQ ID NO: 623946 - RNA, 19 nt, Homo sapiens
  misc_RNA (1)...(19): siRNA sense strand
ccgaggacaaguugcauga

SEQ ID NO: 623947 - RNA, 19 nt, Homo sapiens
  misc_RNA (1)...(19): siRNA sense strand
ccugccaaccuuuccauuu

SEQ ID NO: 623948 - RNA, 19 nt, Homo sapiens
  misc_RNA (1)...(19): siRNA sense strand
gcgcaaagagcggguacug

SEQ ID NO: 623949 - RNA, 19 nt, Homo sapiens
  misc_RNA (1)...(19): siRNA sense strand
gaacgugccccugugcaaa

SEQ ID NO: 623950 - RNA, 19 nt, Homo sapiens
  misc_RNA (1)...(19): siRNA sense strand
aagauugucgcaccuccua

SEQ ID NO: 623951 - RNA, 19 nt, Homo sapiens
  misc_RNA (1)...(19): siRNA sense strand
gggaggcucagacaaggau

SEQ ID NO: 623952 - RNA, 19 nt, Homo sapiens
  misc_RNA (1)...(19): siRNA sense strand
aaaucuggacucacuccua

SEQ ID NO: 623953 - RNA, 19 nt, Homo sapiens
  misc_RNA (1)...(19): siRNA sense strand
gcaagagcaacuggcacaa

SEQ ID NO: 623954 - RNA, 19 nt, Homo sapiens
  misc_RNA (1)...(19): siRNA sense strand
gaucagagcuggcgcaaag

SEQ ID NO: 623955 - RNA, 19 nt, Homo sapiens
  misc_RNA (1)...(19): siRNA sense strand
gcaaagagcggguacugaa

SEQ ID NO: 623956 - RNA, 19 nt, Homo sapiens
  misc_RNA (1)...(19): siRNA sense strand
gcaaugaaaucuggacuca

SEQ ID NO: 623957 - RNA, 19 nt, Homo sapiens
  misc_RNA (1)...(19): siRNA sense strand
gauguuuccuaccuauaua

SEQ ID NO: 623958 - RNA, 19 nt, Homo sapiens
  misc_RNA (1)...(19): siRNA sense strand
gagcaauggugggaagauu

SEQ ID NO: 623959 - RNA, 19 nt, Homo sapiens
  misc_RNA (1)...(19): siRNA sense strand
ccacuguucugugcaauga

SEQ ID NO: 623960 - RNA, 19 nt, Homo sapiens
  misc_RNA (1)...(19): siRNA sense strand
ggauguuuccuaccuauau

SEQ ID NO: 623961 - RNA, 19 nt, Homo sapiens
  misc_RNA (1)...(19): siRNA sense strand
ggagcugccugccaaccuu

SEQ ID NO: 623962 - RNA, 19 nt, Homo sapiens
  misc_RNA (1)...(19): siRNA sense strand
caaagaggacugugagcaa

SEQ ID NO: 623963 - RNA, 19 nt, Homo sapiens
  misc_RNA (1)...(19): siRNA sense strand
ggacuucaggguuuaacaa

SEQ ID NO: 623964 - RNA, 19 nt, Homo sapiens
  misc_RNA (1)...(19): siRNA sense strand
ccaggaagcccauaaggau

SEQ ID NO: 623965 - RNA, 19 nt, Homo sapiens
  misc_RNA (1)...(19): siRNA sense strand
ggaagaaugccugcuguuc

SEQ ID NO: 623966 - RNA, 19 nt, Homo sapiens
  misc_RNA (1)...(19): siRNA sense strand
ccuacaaggucagcaacua

SEQ ID NO: 623967 - RNA, 19 nt, Homo sapiens
  misc_RNA (1)...(19): siRNA sense strand
aaagaggacugugagcaau

SEQ ID NO: 623968 - RNA, 19 nt, Homo sapiens
  misc_RNA (1)...(19): siRNA sense strand
aaugaaaucuggacucacu

SEQ ID NO: 623969 - RNA, 19 nt, Homo sapiens
  misc_RNA (1)...(19): siRNA sense strand
caaguugcaugagcagugu

SEQ ID NO: 623970 - RNA, 19 nt, Homo sapiens
  misc_RNA (1)...(19): siRNA sense strand
gcaaacggcauuucaucca

SEQ ID NO: 623971 - RNA, 19 nt, Homo sapiens
  misc_RNA (1)...(19): siRNA sense strand
cuucaggguuuaacaagug

SEQ ID NO: 623972 - RNA, 19 nt, Homo sapiens
  misc_RNA (1)...(19): siRNA sense strand
gccaaccuuuccauuucua

SEQ ID NO: 623973 - RNA, 19 nt, Homo sapiens
  misc_RNA (1)...(19): siRNA sense strand
ugucgacccuggaggaaga

SEQ ID NO: 623974 - RNA, 19 nt, Homo sapiens
  misc_RNA (1)...(19): siRNA sense strand
cugccaaccuuuccauuuc

SEQ ID NO: 623975 - RNA, 19 nt, Homo sapiens
  misc_RNA (1)...(19): siRNA sense strand
ggaagcccauaaggauguu

SEQ ID NO: 623976 - RNA, 19 nt, Homo sapiens
  misc_RNA (1)...(19): siRNA sense strand
gccaagcaccacaaggaaa

SEQ ID NO: 623977 - RNA, 19 nt, Homo sapiens
  misc_RNA (1)...(19): siRNA sense strand
acuguucugugcaaugaaa

SEQ ID NO: 623978 - RNA, 19 nt, Homo sapiens
  misc_RNA (1)...(19): siRNA sense strand
ggacucacuccuacaaggu

SEQ ID NO: 623979 - RNA, 19 nt, Homo sapiens
  misc_RNA (1)...(19): siRNA sense strand
gccaggaagcccauaagga

SEQ ID NO: 623980 - RNA, 19 nt, Homo sapiens
  misc_RNA (1)...(19): siRNA sense strand
ggagguggcgagguucuau

SEQ ID NO: 623981 - RNA, 19 nt, Homo sapiens
  misc_RNA (1)...(19): siRNA sense strand
gccuggccuuuccugcuua

SEQ ID NO: 623982 - RNA, 19 nt, Homo sapiens
  misc_RNA (1)...(19): siRNA sense strand
cuaccuauauagauucaac

SEQ ID NO: 623983 - RNA, 19 nt, Homo sapiens
  misc_RNA (1)...(19): siRNA sense strand
augaggagguggcgagguu

SEQ ID NO: 623984 - RNA, 19 nt, Homo sapiens
  misc_RNA (1)...(19): siRNA sense strand
gaacgccaagcaccacaag

SEQ ID NO: 623985 - RNA, 19 nt, Homo sapiens
  misc_RNA (1)...(19): siRNA sense strand
gagcugccugccaaccuuu

SEQ ID NO: 623986 - RNA, 19 nt, Homo sapiens
  misc_RNA (1)...(19): siRNA sense strand
gcucagacaaggauugcau

SEQ ID NO: 623987 - RNA, 19 nt, Homo sapiens
  misc_RNA (1)...(19): siRNA sense strand
ccgaggacaaguugcauga

SEQ ID NO: 623988 - RNA, 19 nt, Homo sapiens
  misc_RNA (1)...(19): siRNA sense strand
ccugccaaccuuuccauuu

SEQ ID NO: 623989 - RNA, 19 nt, Homo sapiens
  misc_RNA (1)...(19): siRNA sense strand
gcgcaaagagcggguacug

SEQ ID NO: 623990 - RNA, 19 nt, Homo sapiens
  misc_RNA (1)...(19): siRNA sense strand
gaacgugccccugugcaaa

SEQ ID NO: 623991 - RNA, 19 nt, Homo sapiens
  misc_RNA (1)...(19): siRNA sense strand
aagauugucgcaccuccua

SEQ ID NO: 623992 - RNA, 19 nt, Homo sapiens
  misc_RNA (1)...(19): siRNA sense strand
gggaggcucagacaaggau

SEQ ID NO: 623993 - RNA, 19 nt, Homo sapiens
  misc_RNA (1)...(19): siRNA sense strand
aaaucuggacucacuccua

SEQ ID NO: 623994 - RNA, 19 nt, Homo sapiens
  misc_RNA (1)...(19): siRNA sense strand
gcaagagcaacuggcacaa

SEQ ID NO: 623995 - RNA, 19 nt, Homo sapiens
  misc_RNA (1)...(19): siRNA sense strand
gaucagagcuggcgcaaag

SEQ ID NO: 623996 - RNA, 19 nt, Homo sapiens
  misc_RNA (1)...(19): siRNA sense strand
gcaaagagcggguacugaa

SEQ ID NO: 623997 - RNA, 19 nt, Homo sapiens
  misc_RNA (1)...(19): siRNA sense strand
gcaaugaaaucuggacuca

SEQ ID NO: 623998 - RNA, 19 nt, Homo sapiens
  misc_RNA (1)...(19): siRNA sense strand
gauguuuccuaccuauaua

SEQ ID NO: 623999 - RNA, 19 nt, Homo sapiens
  misc_RNA (1)...(19): siRNA sense strand
gagcaauggugggaagauu

SEQ ID NO: 624000 - RNA, 19 nt, Homo sapiens
  misc_RNA (1)...(19): siRNA sense strand
ccacuguucugugcaauga

SEQ ID NO: 624001 - RNA, 19 nt, Homo sapiens
  misc_RNA (1)...(19): siRNA sense strand
ggauguuuccuaccuauau

SEQ ID NO: 624002 - RNA, 19 nt, Homo sapiens
  misc_RNA (1)...(19): siRNA sense strand
ggagcugccugccaaccuu

SEQ ID NO: 624003 - RNA, 19 nt, Homo sapiens
  misc_RNA (1)...(19): siRNA sense strand
caaagaggacugugagcaa

SEQ ID NO: 624004 - RNA, 19 nt, Homo sapiens
  misc_RNA (1)...(19): siRNA sense strand
ggacuucaggguuuaacaa

SEQ ID NO: 624005 - RNA, 19 nt, Homo sapiens
  misc_RNA (1)...(19): siRNA sense strand
ccaggaagcccauaaggau

SEQ ID NO: 624006 - RNA, 19 nt, Homo sapiens
  misc_RNA (1)...(19): siRNA sense strand
ggaagaaugccugcuguuc

SEQ ID NO: 624007 - RNA, 19 nt, Homo sapiens
  misc_RNA (1)...(19): siRNA sense strand
ccuacaaggucagcaacua

SEQ ID NO: 624008 - RNA, 19 nt, Homo sapiens
  misc_RNA (1)...(19): siRNA sense strand
aaagaggacugugagcaau

SEQ ID NO: 624009 - RNA, 19 nt, Homo sapiens
  misc_RNA (1)...(19): siRNA sense strand
aaugaaaucuggacucacu

SEQ ID NO: 624010 - RNA, 19 nt, Homo sapiens
  misc_RNA (1)...(19): siRNA sense strand
caaguugcaugagcagugu

SEQ ID NO: 624011 - RNA, 19 nt, Homo sapiens
  misc_RNA (1)...(19): siRNA sense strand
gcaaacggcauuucaucca

SEQ ID NO: 624012 - RNA, 19 nt, Homo sapiens
  misc_RNA (1)...(19): siRNA sense strand
cuucaggguuuaacaagug

SEQ ID NO: 624013 - RNA, 19 nt, Homo sapiens
  misc_RNA (1)...(19): siRNA sense strand
gccaaccuuuccauuucua

SEQ ID NO: 624014 - RNA, 19 nt, Homo sapiens
  misc_RNA (1)...(19): siRNA sense strand
ugucgacccuggaggaaga

SEQ ID NO: 624015 - RNA, 19 nt, Homo sapiens
  misc_RNA (1)...(19): siRNA sense strand
cugccaaccuuuccauuuc

SEQ ID NO: 624016 - RNA, 19 nt, Homo sapiens
  misc_RNA (1)...(19): siRNA sense strand
ggaagcccauaaggauguu

SEQ ID NO: 624017 - RNA, 19 nt, Homo sapiens
  misc_RNA (1)...(19): siRNA sense strand
gccaagcaccacaaggaaa

SEQ ID NO: 624018 - RNA, 19 nt, Homo sapiens
  misc_RNA (1)...(19): siRNA sense strand
acuguucugugcaaugaaa

SEQ ID NO: 624019 - RNA, 19 nt, Homo sapiens
  misc_RNA (1)...(19): siRNA sense strand
ggacucacuccuacaaggu

SEQ ID NO: 624020 - RNA, 19 nt, Homo sapiens
  misc_RNA (1)...(19): siRNA sense strand
gccaggaagcccauaagga

SEQ ID NO: 624021 - RNA, 19 nt, Homo sapiens
  misc_RNA (1)...(19): siRNA sense strand
ggagguggcgagguucuau

SEQ ID NO: 624022 - RNA, 19 nt, Homo sapiens
  misc_RNA (1)...(19): siRNA sense strand
gccuggccuuuccugcuua

SEQ ID NO: 624023 - RNA, 19 nt, Homo sapiens
  misc_RNA (1)...(19): siRNA sense strand
cuaccuauauagauucaac

SEQ ID NO: 624024 - RNA, 19 nt, Homo sapiens
  misc_RNA (1)...(19): siRNA sense strand
augaggagguggcgagguu

SEQ ID NO: 624025 - RNA, 19 nt, Homo sapiens
  misc_RNA (1)...(19): siRNA sense strand
gaacgccaagcaccacaag

SEQ ID NO: 624026 - RNA, 19 nt, Homo sapiens
  misc_RNA (1)...(19): siRNA sense strand
gagcugccugccaaccuuu

SEQ ID NO: 624027 - RNA, 19 nt, Homo sapiens
  misc_RNA (1)...(19): siRNA sense strand
gcucagacaaggauugcau

SEQ ID NO: 624028 - RNA, 19 nt, Homo sapiens
  misc_RNA (1)...(19): siRNA sense strand
ccgaggacaaguugcauga

SEQ ID NO: 624029 - RNA, 19 nt, Homo sapiens
  misc_RNA (1)...(19): siRNA sense strand
ccugccaaccuuuccauuu

SEQ ID NO: 624030 - RNA, 19 nt, Homo sapiens
  misc_RNA (1)...(19): siRNA sense strand
gcgcaaagagcggguacug

SEQ ID NO: 624031 - RNA, 19 nt, Homo sapiens
  misc_RNA (1)...(19): siRNA sense strand
gaacgugccccugugcaaa

SEQ ID NO: 624032 - RNA, 19 nt, Homo sapiens
  misc_RNA (1)...(19): siRNA sense strand
aagauugucgcaccuccua

SEQ ID NO: 624033 - RNA, 19 nt, Homo sapiens
  misc_RNA (1)...(19): siRNA sense strand
gggaggcucagacaaggau

SEQ ID NO: 624034 - RNA, 19 nt, Homo sapiens
  misc_RNA (1)...(19): siRNA sense strand
aaaucuggacucacuccua

SEQ ID NO: 624035 - RNA, 19 nt, Homo sapiens
  misc_RNA (1)...(19): siRNA sense strand
gcaagagcaacuggcacaa

SEQ ID NO: 624036 - RNA, 19 nt, Homo sapiens
  misc_RNA (1)...(19): siRNA sense strand
gaucagagcuggcgcaaag

SEQ ID NO: 624037 - RNA, 19 nt, Homo sapiens
  misc_RNA (1)...(19): siRNA sense strand
gcaaagagcggguacugaa

SEQ ID NO: 624038 - RNA, 19 nt, Homo sapiens
  misc_RNA (1)...(19): siRNA sense strand
gcaaugaaaucuggacuca

SEQ ID NO: 624039 - RNA, 19 nt, Homo sapiens
  misc_RNA (1)...(19): siRNA sense strand
gauguuuccuaccuauaua

SEQ ID NO: 624040 - RNA, 19 nt, Homo sapiens
  misc_RNA (1)...(19): siRNA sense strand
gagcaauggugggaagauu

SEQ ID NO: 624041 - RNA, 19 nt, Homo sapiens
  misc_RNA (1)...(19): siRNA sense strand
ccacuguucugugcaauga

SEQ ID NO: 624042 - RNA, 19 nt, Homo sapiens
  misc_RNA (1)...(19): siRNA sense strand
ggauguuuccuaccuauau

SEQ ID NO: 624043 - RNA, 19 nt, Homo sapiens
  misc_RNA (1)...(19): siRNA sense strand
ggagcugccugccaaccuu

SEQ ID NO: 624044 - RNA, 19 nt, Homo sapiens
  misc_RNA (1)...(19): siRNA sense strand
caaagaggacugugagcaa

SEQ ID NO: 624045 - RNA, 19 nt, Homo sapiens
  misc_RNA (1)...(19): siRNA sense strand
ggacuucaggguuuaacaa

SEQ ID NO: 624046 - RNA, 19 nt, Homo sapiens
  misc_RNA (1)...(19): siRNA sense strand
ccaggaagcccauaaggau

SEQ ID NO: 624047 - RNA, 19 nt, Homo sapiens
  misc_RNA (1)...(19): siRNA sense strand
ggaagaaugccugcuguuc

SEQ ID NO: 624048 - RNA, 19 nt, Homo sapiens
  misc_RNA (1)...(19): siRNA sense strand
ccuacaaggucagcaacua

SEQ ID NO: 624049 - RNA, 19 nt, Homo sapiens
  misc_RNA (1)...(19): siRNA sense strand
aaagaggacugugagcaau

SEQ ID NO: 624050 - RNA, 19 nt, Homo sapiens
  misc_RNA (1)...(19): siRNA sense strand
aaugaaaucuggacucacu

SEQ ID NO: 624051 - RNA, 19 nt, Homo sapiens
  misc_RNA (1)...(19): siRNA sense strand
caaguugcaugagcagugu

SEQ ID NO: 624052 - RNA, 19 nt, Homo sapiens
  misc_RNA (1)...(19): siRNA sense strand
gcaaacggcauuucaucca

SEQ ID NO: 624053 - RNA, 19 nt, Homo sapiens
  misc_RNA (1)...(19): siRNA sense strand
cuucaggguuuaacaagug

SEQ ID NO: 624054 - RNA, 19 nt, Homo sapiens
  misc_RNA (1)...(19): siRNA sense strand
gccaaccuuuccauuucua

SEQ ID NO: 624055 - RNA, 19 nt, Homo sapiens
  misc_RNA (1)...(19): siRNA sense strand
ugucgacccuggaggaaga

SEQ ID NO: 624056 - RNA, 19 nt, Homo sapiens
  misc_RNA (1)...(19): siRNA sense strand
cugccaaccuuuccauuuc

SEQ ID NO: 624057 - RNA, 19 nt, Homo sapiens
  misc_RNA (1)...(19): siRNA sense strand
ggaagcccauaaggauguu

SEQ ID NO: 624058 - RNA, 19 nt, Homo sapiens
  misc_RNA (1)...(19): siRNA sense strand
gccaagcaccacaaggaaa

SEQ ID NO: 624059 - RNA, 19 nt, Homo sapiens
  misc_RNA (1)...(19): siRNA sense strand
acuguucugugcaaugaaa

SEQ ID NO: 624060 - RNA, 19 nt, Homo sapiens
  misc_RNA (1)...(19): siRNA sense strand
ggacucacuccuacaaggu

SEQ ID NO: 624061 - RNA, 19 nt, Homo sapiens
  misc_RNA (1)...(19): siRNA sense strand
gccaggaagcccauaagga

SEQ ID NO: 624062 - RNA, 19 nt, Homo sapiens
  misc_RNA (1)...(19): siRNA sense strand
ggagguggcgagguucuau

SEQ ID NO: 624063 - RNA, 19 nt, Homo sapiens
  misc_RNA (1)...(19): siRNA sense strand
gccuggccuuuccugcuua

SEQ ID NO: 624064 - RNA, 19 nt, Homo sapiens
  misc_RNA (1)...(19): siRNA sense strand
cuaccuauauagauucaac

SEQ ID NO: 624065 - RNA, 19 nt, Homo sapiens
  misc_RNA (1)...(19): siRNA sense strand
augaggagguggcgagguu

SEQ ID NO: 624066 - RNA, 19 nt, Homo sapiens
  misc_RNA (1)...(19): siRNA sense strand
gaacgccaagcaccacaag

SEQ ID NO: 624067 - RNA, 19 nt, Homo sapiens
  misc_RNA (1)...(19): siRNA sense strand
gagcugccugccaaccuuu

SEQ ID NO: 624068 - RNA, 19 nt, Homo sapiens
  misc_RNA (1)...(19): siRNA sense strand
gcucagacaaggauugcau

SEQ ID NO: 624069 - RNA, 19 nt, Homo sapiens
  misc_RNA (1)...(19): siRNA sense strand
ccgaggacaaguugcauga

SEQ ID NO: 624070 - RNA, 19 nt, Homo sapiens
  misc_RNA (1)...(19): siRNA sense strand
ccugccaaccuuuccauuu

SEQ ID NO: 624071 - RNA, 19 nt, Homo sapiens
  misc_RNA (1)...(19): siRNA sense strand
gcgcaaagagcggguacug

SEQ ID NO: 624072 - RNA, 19 nt, Homo sapiens
  misc_RNA (1)...(19): siRNA sense strand
gaacgugccccugugcaaa

SEQ ID NO: 624073 - RNA, 19 nt, Homo sapiens
  misc_RNA (1)...(19): siRNA sense strand
aagauugucgcaccuccua

SEQ ID NO: 624074 - RNA, 19 nt, Homo sapiens
  misc_RNA (1)...(19): siRNA sense strand
gggaggcucagacaaggau

SEQ ID NO: 624075 - RNA, 19 nt, Homo sapiens
  misc_RNA (1)...(19): siRNA sense strand
aaaucuggacucacuccua

SEQ ID NO: 624076 - RNA, 19 nt, Homo sapiens
  misc_RNA (1)...(19): siRNA sense strand
gcaagagcaacuggcacaa

SEQ ID NO: 624077 - RNA, 19 nt, Homo sapiens
  misc_RNA (1)...(19): siRNA sense strand
gaucagagcuggcgcaaag

SEQ ID NO: 624078 - RNA, 19 nt, Homo sapiens
  misc_RNA (1)...(19): siRNA sense strand
gcaaagagcggguacugaa

SEQ ID NO: 624079 - RNA, 19 nt, Homo sapiens
  misc_RNA (1)...(19): siRNA sense strand
gcaaugaaaucuggacuca

SEQ ID NO: 624080 - RNA, 19 nt, Homo sapiens
  misc_RNA (1)...(19): siRNA sense strand
gauguuuccuaccuauaua

SEQ ID NO: 624081 - RNA, 19 nt, Homo sapiens
  misc_RNA (1)...(19): siRNA sense strand
gagcaauggugggaagauu

SEQ ID NO: 624082 - RNA, 19 nt, Homo sapiens
  misc_RNA (1)...(19): siRNA sense strand
ccacuguucugugcaauga

SEQ ID NO: 624083 - RNA, 19 nt, Homo sapiens
  misc_RNA (1)...(19): siRNA sense strand
ggauguuuccuaccuauau

SEQ ID NO: 624084 - RNA, 19 nt, Homo sapiens
  misc_RNA (1)...(19): siRNA sense strand
ggagcugccugccaaccuu

SEQ ID NO: 624085 - RNA, 19 nt, Homo sapiens
  misc_RNA (1)...(19): siRNA sense strand
caaagaggacugugagcaa

SEQ ID NO: 624086 - RNA, 19 nt, Homo sapiens
  misc_RNA (1)...(19): siRNA sense strand
ggacuucaggguuuaacaa

SEQ ID NO: 624087 - RNA, 19 nt, Homo sapiens
  misc_RNA (1)...(19): siRNA sense strand
ccaggaagcccauaaggau

SEQ ID NO: 624088 - RNA, 19 nt, Homo sapiens
  misc_RNA (1)...(19): siRNA sense strand
ggaagaaugccugcuguuc

SEQ ID NO: 624089 - RNA, 19 nt, Homo sapiens
  misc_RNA (1)...(19): siRNA sense strand
ccuacaaggucagcaacua

SEQ ID NO: 624090 - RNA, 19 nt, Homo sapiens
  misc_RNA (1)...(19): siRNA sense strand
aaagaggacugugagcaau

SEQ ID NO: 624091 - RNA, 19 nt, Homo sapiens
  misc_RNA (1)...(19): siRNA sense strand
aaugaaaucuggacucacu

SEQ ID NO: 624092 - RNA, 19 nt, Homo sapiens
  misc_RNA (1)...(19): siRNA sense strand
caaguugcaugagcagugu

SEQ ID NO: 624093 - RNA, 19 nt, Homo sapiens
  misc_RNA (1)...(19): siRNA sense strand
gcaaacggcauuucaucca

SEQ ID NO: 624094 - RNA, 19 nt, Homo sapiens
  misc_RNA (1)...(19): siRNA sense strand
cuucaggguuuaacaagug

SEQ ID NO: 624095 - RNA, 19 nt, Homo sapiens
  misc_RNA (1)...(19): siRNA sense strand
gccaaccuuuccauuucua

SEQ ID NO: 624096 - RNA, 19 nt, Homo sapiens
  misc_RNA (1)...(19): siRNA sense strand
ugucgacccuggaggaaga

SEQ ID NO: 624097 - RNA, 19 nt, Homo sapiens
  misc_RNA (1)...(19): siRNA sense strand
cugccaaccuuuccauuuc

SEQ ID NO: 624098 - RNA, 19 nt, Homo sapiens
  misc_RNA (1)...(19): siRNA sense strand
ggaagcccauaaggauguu

SEQ ID NO: 624099 - RNA, 19 nt, Homo sapiens
  misc_RNA (1)...(19): siRNA sense strand
gccaagcaccacaaggaaa

SEQ ID NO: 624100 - RNA, 19 nt, Homo sapiens
  misc_RNA (1)...(19): siRNA sense strand
acuguucugugcaaugaaa

SEQ ID NO: 624101 - RNA, 19 nt, Homo sapiens
  misc_RNA (1)...(19): siRNA sense strand
ggacucacuccuacaaggu

SEQ ID NO: 624102 - RNA, 19 nt, Homo sapiens
  misc_RNA (1)...(19): siRNA sense strand
gccaggaagcccauaagga

SEQ ID NO: 624103 - RNA, 19 nt, Homo sapiens
  misc_RNA (1)...(19): siRNA sense strand
ggagguggcgagguucuau

SEQ ID NO: 624104 - RNA, 19 nt, Homo sapiens
  misc_RNA (1)...(19): siRNA sense strand
gccuggccuuuccugcuua

SEQ ID NO: 624105 - RNA, 19 nt, Homo sapiens
  misc_RNA (1)...(19): siRNA sense strand
cuaccuauauagauucaac

SEQ ID NO: 624106 - RNA, 19 nt, Homo sapiens
  misc_RNA (1)...(19): siRNA sense strand
augaggagguggcgagguu

SEQ ID NO: 624107 - RNA, 19 nt, Homo sapiens
  misc_RNA (1)...(19): siRNA sense strand
gaacgccaagcaccacaag

SEQ ID NO: 624108 - RNA, 19 nt, Homo sapiens
  misc_RNA (1)...(19): siRNA sense strand
gagcugccugccaaccuuu

SEQ ID NO: 624109 - RNA, 19 nt, Homo sapiens
  misc_RNA (1)...(19): siRNA sense strand
gcucagacaaggauugcau

SEQ ID NO: 624110 - RNA, 19 nt, Homo sapiens
  misc_RNA (1)...(19): siRNA sense strand
ccgaggacaaguugcauga

SEQ ID NO: 624111 - RNA, 19 nt, Homo sapiens
  misc_RNA (1)...(19): siRNA sense strand
ccugccaaccuuuccauuu

SEQ ID NO: 624112 - RNA, 19 nt, Homo sapiens
  misc_RNA (1)...(19): siRNA sense strand
gcgcaaagagcggguacug

SEQ ID NO: 624113 - RNA, 19 nt, Homo sapiens
  misc_RNA (1)...(19): siRNA sense strand
gaacgugccccugugcaaa

SEQ ID NO: 624114 - RNA, 19 nt, Homo sapiens
  misc_RNA (1)...(19): siRNA sense strand
aagauugucgcaccuccua

SEQ ID NO: 624115 - RNA, 19 nt, Homo sapiens
  misc_RNA (1)...(19): siRNA sense strand
gggaggcucagacaaggau

SEQ ID NO: 624116 - RNA, 19 nt, Homo sapiens
  misc_RNA (1)...(19): siRNA sense strand
aaaucuggacucacuccua

SEQ ID NO: 624117 - RNA, 19 nt, Homo sapiens
  misc_RNA (1)...(19): siRNA sense strand
gcaagagcaacuggcacaa

SEQ ID NO: 624118 - RNA, 19 nt, Homo sapiens
  misc_RNA (1)...(19): siRNA sense strand
gaucagagcuggcgcaaag

SEQ ID NO: 624119 - RNA, 19 nt, Homo sapiens
  misc_RNA (1)...(19): siRNA sense strand
gcaaagagcggguacugaa

SEQ ID NO: 624120 - RNA, 19 nt, Homo sapiens
  misc_RNA (1)...(19): siRNA sense strand
gcaaugaaaucuggacuca

SEQ ID NO: 624121 - RNA, 19 nt, Homo sapiens
  misc_RNA (1)...(19): siRNA sense strand
gauguuuccuaccuauaua

SEQ ID NO: 624122 - RNA, 19 nt, Homo sapiens
  misc_RNA (1)...(19): siRNA sense strand
gagcaauggugggaagauu

SEQ ID NO: 624123 - RNA, 19 nt, Homo sapiens
  misc_RNA (1)...(19): siRNA sense strand
ccacuguucugugcaauga

SEQ ID NO: 624124 - RNA, 19 nt, Homo sapiens
  misc_RNA (1)...(19): siRNA sense strand
ggauguuuccuaccuauau

SEQ ID NO: 624125 - RNA, 19 nt, Homo sapiens
  misc_RNA (1)...(19): siRNA sense strand
ggagcugccugccaaccuu

SEQ ID NO: 624126 - RNA, 19 nt, Homo sapiens
  misc_RNA (1)...(19): siRNA sense strand
caaagaggacugugagcaa

SEQ ID NO: 624127 - RNA, 19 nt, Homo sapiens
  misc_RNA (1)...(19): siRNA sense strand
ggacuucaggguuuaacaa

SEQ ID NO: 624128 - RNA, 19 nt, Homo sapiens
  misc_RNA (1)...(19): siRNA sense strand
ccaggaagcccauaaggau

SEQ ID NO: 624129 - RNA, 19 nt, Homo sapiens
  misc_RNA (1)...(19): siRNA sense strand
ggaagaaugccugcuguuc

SEQ ID NO: 624130 - RNA, 19 nt, Homo sapiens
  misc_RNA (1)...(19): siRNA sense strand
ccuacaaggucagcaacua

SEQ ID NO: 624131 - RNA, 19 nt, Homo sapiens
  misc_RNA (1)...(19): siRNA sense strand
aaagaggacugugagcaau

SEQ ID NO: 624132 - RNA, 19 nt, Homo sapiens
  misc_RNA (1)...(19): siRNA sense strand
aaugaaaucuggacucacu

SEQ ID NO: 624133 - RNA, 19 nt, Homo sapiens
  misc_RNA (1)...(19): siRNA sense strand
caaguugcaugagcagugu

SEQ ID NO: 624134 - RNA, 19 nt, Homo sapiens
  misc_RNA (1)...(19): siRNA sense strand
gcaaacggcauuucaucca

SEQ ID NO: 624135 - RNA, 19 nt, Homo sapiens
  misc_RNA (1)...(19): siRNA sense strand
cuucaggguuuaacaagug

SEQ ID NO: 624136 - RNA, 19 nt, Homo sapiens
  misc_RNA (1)...(19): siRNA sense strand
gccaaccuuuccauuucua

SEQ ID NO: 624137 - RNA, 19 nt, Homo sapiens
  misc_RNA (1)...(19): siRNA sense strand
ugucgacccuggaggaaga

SEQ ID NO: 624138 - RNA, 19 nt, Homo sapiens
  misc_RNA (1)...(19): siRNA sense strand
cugccaaccuuuccauuuc

SEQ ID NO: 624139 - RNA, 19 nt, Homo sapiens
  misc_RNA (1)...(19): siRNA sense strand
ggaagcccauaaggauguu

SEQ ID NO: 624140 - RNA, 19 nt, Homo sapiens
  misc_RNA (1)...(19): siRNA sense strand
gccaagcaccacaaggaaa

SEQ ID NO: 624141 - RNA, 19 nt, Homo sapiens
  misc_RNA (1)...(19): siRNA sense strand
acuguucugugcaaugaaa

SEQ ID NO: 624142 - RNA, 19 nt, Homo sapiens
  misc_RNA (1)...(19): siRNA sense strand
ggacucacuccuacaaggu

SEQ ID NO: 624143 - RNA, 19 nt, Homo sapiens
  misc_RNA (1)...(19): siRNA sense strand
gccaggaagcccauaagga

SEQ ID NO: 624144 - RNA, 19 nt, Homo sapiens
  misc_RNA (1)...(19): siRNA sense strand
ggagguggcgagguucuau

SEQ ID NO: 624145 - RNA, 19 nt, Homo sapiens
  misc_RNA (1)...(19): siRNA sense strand
gccuggccuuuccugcuua

SEQ ID NO: 624146 - RNA, 19 nt, Homo sapiens
  misc_RNA (1)...(19): siRNA sense strand
cuaccuauauagauucaac

SEQ ID NO: 624147 - RNA, 19 nt, Homo sapiens
  misc_RNA (1)...(19): siRNA sense strand
augaggagguggcgagguu

SEQ ID NO: 624148 - RNA, 19 nt, Homo sapiens
  misc_RNA (1)...(19): siRNA sense strand
gaacgccaagcaccacaag

SEQ ID NO: 624149 - RNA, 19 nt, Homo sapiens
  misc_RNA (1)...(19): siRNA sense strand
gagcugccugccaaccuuu

SEQ ID NO: 624150 - RNA, 19 nt, Homo sapiens
  misc_RNA (1)...(19): siRNA sense strand
gcucagacaaggauugcau

SEQ ID NO: 624151 - RNA, 19 nt, Homo sapiens
  misc_RNA (1)...(19): siRNA sense strand
ccgaggacaaguugcauga

SEQ ID NO: 624152 - RNA, 19 nt, Homo sapiens
  misc_RNA (1)...(19): siRNA sense strand
ccugccaaccuuuccauuu

SEQ ID NO: 624153 - RNA, 19 nt, Homo sapiens
  misc_RNA (1)...(19): siRNA sense strand
gcgcaaagagcggguacug

SEQ ID NO: 624154 - RNA, 19 nt, Homo sapiens
  misc_RNA (1)...(19): siRNA sense strand
gaacgugccccugugcaaa

SEQ ID NO: 624155 - RNA, 19 nt, Homo sapiens
  misc_RNA (1)...(19): siRNA sense strand
aagauugucgcaccuccua

SEQ ID NO: 624156 - RNA, 19 nt, Homo sapiens
  misc_RNA (1)...(19): siRNA sense strand
gggaggcucagacaaggau

SEQ ID NO: 624157 - RNA, 19 nt, Homo sapiens
  misc_RNA (1)...(19): siRNA sense strand
aaaucuggacucacuccua

SEQ ID NO: 624158 - RNA, 19 nt, Homo sapiens
  misc_RNA (1)...(19): siRNA sense strand
gcaagagcaacuggcacaa

SEQ ID NO: 624159 - RNA, 19 nt, Homo sapiens
  misc_RNA (1)...(19): siRNA sense strand
gaucagagcuggcgcaaag

SEQ ID NO: 624160 - RNA, 19 nt, Homo sapiens
  misc_RNA (1)...(19): siRNA sense strand
gcaaagagcggguacugaa

SEQ ID NO: 624161 - RNA, 19 nt, Homo sapiens
  misc_RNA (1)...(19): siRNA sense strand
gcaaugaaaucuggacuca

SEQ ID NO: 624162 - RNA, 19 nt, Homo sapiens
  misc_RNA (1)...(19): siRNA sense strand
gauguuuccuaccuauaua

SEQ ID NO: 624163 - RNA, 19 nt, Homo sapiens
  misc_RNA (1)...(19): siRNA sense strand
gagcaauggugggaagauu

SEQ ID NO: 624164 - RNA, 19 nt, Homo sapiens
  misc_RNA (1)...(19): siRNA sense strand
ccacuguucugugcaauga

SEQ ID NO: 624165 - RNA, 19 nt, Homo sapiens
  misc_RNA (1)...(19): siRNA sense strand
ggauguuuccuaccuauau

SEQ ID NO: 624166 - RNA, 19 nt, Homo sapiens
  misc_RNA (1)...(19): siRNA sense strand
ggagcugccugccaaccuu

SEQ ID NO: 624167 - RNA, 19 nt, Homo sapiens
  misc_RNA (1)...(19): siRNA sense strand
caaagaggacugugagcaa

SEQ ID NO: 624168 - RNA, 19 nt, Homo sapiens
  misc_RNA (1)...(19): siRNA sense strand
ggacuucaggguuuaacaa

SEQ ID NO: 624169 - RNA, 19 nt, Homo sapiens
  misc_RNA (1)...(19): siRNA sense strand
ccaggaagcccauaaggau

SEQ ID NO: 624170 - RNA, 19 nt, Homo sapiens
  misc_RNA (1)...(19): siRNA sense strand
ggaagaaugccugcuguuc

SEQ ID NO: 624171 - RNA, 19 nt, Homo sapiens
  misc_RNA (1)...(19): siRNA sense strand
ccuacaaggucagcaacua

SEQ ID NO: 624172 - RNA, 19 nt, Homo sapiens
  misc_RNA (1)...(19): siRNA sense strand
aaagaggacugugagcaau

SEQ ID NO: 624173 - RNA, 19 nt, Homo sapiens
  misc_RNA (1)...(19): siRNA sense strand
aaugaaaucuggacucacu

SEQ ID NO: 624174 - RNA, 19 nt, Homo sapiens
  misc_RNA (1)...(19): siRNA sense strand
caaguugcaugagcagugu

SEQ ID NO: 624175 - RNA, 19 nt, Homo sapiens
  misc_RNA (1)...(19): siRNA sense strand
gcaaacggcauuucaucca

SEQ ID NO: 624176 - RNA, 19 nt, Homo sapiens
  misc_RNA (1)...(19): siRNA sense strand
cuucaggguuuaacaagug

SEQ ID NO: 624177 - RNA, 19 nt, Homo sapiens
  misc_RNA (1)...(19): siRNA sense strand
gccaaccuuuccauuucua

SEQ ID NO: 624178 - RNA, 19 nt, Homo sapiens
  misc_RNA (1)...(19): siRNA sense strand
ugucgacccuggaggaaga

SEQ ID NO: 624179 - RNA, 19 nt, Homo sapiens
  misc_RNA (1)...(19): siRNA sense strand
cugccaaccuuuccauuuc

SEQ ID NO: 624180 - RNA, 19 nt, Homo sapiens
  misc_RNA (1)...(19): siRNA sense strand
ggaagcccauaaggauguu

SEQ ID NO: 624181 - RNA, 19 nt, Homo sapiens
  misc_RNA (1)...(19): siRNA sense strand
gccaagcaccacaaggaaa

SEQ ID NO: 624182 - RNA, 19 nt, Homo sapiens
  misc_RNA (1)...(19): siRNA sense strand
acuguucugugcaaugaaa

SEQ ID NO: 624183 - RNA, 19 nt, Homo sapiens
  misc_RNA (1)...(19): siRNA sense strand
ggacucacuccuacaaggu

SEQ ID NO: 624184 - RNA, 19 nt, Homo sapiens
  misc_RNA (1)...(19): siRNA sense strand
gccaggaagcccauaagga

SEQ ID NO: 624185 - RNA, 19 nt, Homo sapiens
  misc_RNA (1)...(19): siRNA sense strand
ggagguggcgagguucuau

SEQ ID NO: 624186 - RNA, 19 nt, Homo sapiens
  misc_RNA (1)...(19): siRNA sense strand
gccuggccuuuccugcuua

SEQ ID NO: 624187 - RNA, 19 nt, Homo sapiens
  misc_RNA (1)...(19): siRNA sense strand
cuaccuauauagauucaac

SEQ ID NO: 624188 - RNA, 19 nt, Homo sapiens
  misc_RNA (1)...(19): siRNA sense strand
augaggagguggcgagguu

SEQ ID NO: 624189 - RNA, 19 nt, Homo sapiens
  misc_RNA (1)...(19): siRNA sense strand
gaacgccaagcaccacaag

SEQ ID NO: 624190 - RNA, 19 nt, Homo sapiens
  misc_RNA (1)...(19): siRNA sense strand
gagcugccugccaaccuuu

SEQ ID NO: 624191 - RNA, 19 nt, Homo sapiens
  misc_RNA (1)...(19): siRNA sense strand
gcucagacaaggauugcau

SEQ ID NO: 624192 - RNA, 19 nt, Homo sapiens
  misc_RNA (1)...(19): siRNA sense strand
ccgaggacaaguugcauga

SEQ ID NO: 624193 - RNA, 19 nt, Homo sapiens
  misc_RNA (1)...(19): siRNA sense strand
ccugccaaccuuuccauuu

SEQ ID NO: 624194 - RNA, 19 nt, Homo sapiens
  misc_RNA (1)...(19): siRNA sense strand
gcgcaaagagcggguacug

SEQ ID NO: 624195 - RNA, 19 nt, Homo sapiens
  misc_RNA (1)...(19): siRNA sense strand
gaacgugccccugugcaaa

SEQ ID NO: 624196 - RNA, 19 nt, Homo sapiens
  misc_RNA (1)...(19): siRNA sense strand
aagauugucgcaccuccua

SEQ ID NO: 624197 - RNA, 19 nt, Homo sapiens
  misc_RNA (1)...(19): siRNA sense strand
gggaggcucagacaaggau

SEQ ID NO: 624198 - RNA, 19 nt, Homo sapiens
  misc_RNA (1)...(19): siRNA sense strand
aaaucuggacucacuccua

SEQ ID NO: 624199 - RNA, 19 nt, Homo sapiens
  misc_RNA (1)...(19): siRNA sense strand
gcaagagcaacuggcacaa

SEQ ID NO: 624200 - RNA, 19 nt, Homo sapiens
  misc_RNA (1)...(19): siRNA sense strand
gaucagagcuggcgcaaag

SEQ ID NO: 624201 - RNA, 19 nt, Homo sapiens
  misc_RNA (1)...(19): siRNA sense strand
gcaaagagcggguacugaa

SEQ ID NO: 624202 - RNA, 19 nt, Homo sapiens
  misc_RNA (1)...(19): siRNA sense strand
gcaaugaaaucuggacuca

SEQ ID NO: 624203 - RNA, 19 nt, Homo sapiens
  misc_RNA (1)...(19): siRNA sense strand
gauguuuccuaccuauaua

SEQ ID NO: 624204 - RNA, 19 nt, Homo sapiens
  misc_RNA (1)...(19): siRNA sense strand
gagcaauggugggaagauu

SEQ ID NO: 624205 - RNA, 19 nt, Homo sapiens
  misc_RNA (1)...(19): siRNA sense strand
ccacuguucugugcaauga

SEQ ID NO: 624206 - RNA, 19 nt, Homo sapiens
  misc_RNA (1)...(19): siRNA sense strand
ggauguuuccuaccuauau

SEQ ID NO: 624207 - RNA, 19 nt, Homo sapiens
  misc_RNA (1)...(19): siRNA sense strand
ggagcugccugccaaccuu

SEQ ID NO: 624208 - RNA, 19 nt, Homo sapiens
  misc_RNA (1)...(19): siRNA sense strand
caaagaggacugugagcaa

SEQ ID NO: 624209 - RNA, 19 nt, Homo sapiens
  misc_RNA (1)...(19): siRNA sense strand
ggacuucaggguuuaacaa

SEQ ID NO: 624210 - RNA, 19 nt, Homo sapiens
  misc_RNA (1)...(19): siRNA sense strand
ccaggaagcccauaaggau

SEQ ID NO: 624211 - RNA, 19 nt, Homo sapiens
  misc_RNA (1)...(19): siRNA sense strand
ggaagaaugccugcuguuc

SEQ ID NO: 624212 - RNA, 19 nt, Homo sapiens
  misc_RNA (1)...(19): siRNA sense strand
ccuacaaggucagcaacua

SEQ ID NO: 624213 - RNA, 19 nt, Homo sapiens
  misc_RNA (1)...(19): siRNA sense strand
aaagaggacugugagcaau

SEQ ID NO: 624214 - RNA, 19 nt, Homo sapiens
  misc_RNA (1)...(19): siRNA sense strand
aaugaaaucuggacucacu

SEQ ID NO: 624215 - RNA, 19 nt, Homo sapiens
  misc_RNA (1)...(19): siRNA sense strand
caaguugcaugagcagugu

SEQ ID NO: 624216 - RNA, 19 nt, Homo sapiens
  misc_RNA (1)...(19): siRNA sense strand
gcaaacggcauuucaucca

SEQ ID NO: 624217 - RNA, 19 nt, Homo sapiens
  misc_RNA (1)...(19): siRNA sense strand
cuucaggguuuaacaagug

SEQ ID NO: 624218 - RNA, 19 nt, Homo sapiens
  misc_RNA (1)...(19): siRNA sense strand
gccaaccuuuccauuucua

SEQ ID NO: 624219 - RNA, 19 nt, Homo sapiens
  misc_RNA (1)...(19): siRNA sense strand
ugucgacccuggaggaaga

SEQ ID NO: 624220 - RNA, 19 nt, Homo sapiens
  misc_RNA (1)...(19): siRNA sense strand
cugccaaccuuuccauuuc

SEQ ID NO: 624221 - RNA, 19 nt, Homo sapiens
  misc_RNA (1)...(19): siRNA sense strand
ggaagcccauaaggauguu

SEQ ID NO: 624222 - RNA, 19 nt, Homo sapiens
  misc_RNA (1)...(19): siRNA sense strand
gccaagcaccacaaggaaa

SEQ ID NO: 624223 - RNA, 19 nt, Homo sapiens
  misc_RNA (1)...(19): siRNA sense strand
acuguucugugcaaugaaa

SEQ ID NO: 624224 - RNA, 19 nt, Homo sapiens
  misc_RNA (1)...(19): siRNA sense strand
ggacucacuccuacaaggu

SEQ ID NO: 624225 - RNA, 19 nt, Homo sapiens
  misc_RNA (1)...(19): siRNA sense strand
gccaggaagcccauaagga

SEQ ID NO: 624226 - RNA, 19 nt, Homo sapiens
  misc_RNA (1)...(19): siRNA sense strand
ggagguggcgagguucuau

SEQ ID NO: 624227 - RNA, 19 nt, Homo sapiens
  misc_RNA (1)...(19): siRNA sense strand
gccuggccuuuccugcuua

SEQ ID NO: 624228 - RNA, 19 nt, Homo sapiens
  misc_RNA (1)...(19): siRNA sense strand
cuaccuauauagauucaac

SEQ ID NO: 624229 - RNA, 19 nt, Homo sapiens
  misc_RNA (1)...(19): siRNA sense strand
augaggagguggcgagguu

SEQ ID NO: 624230 - RNA, 19 nt, Homo sapiens
  misc_RNA (1)...(19): siRNA sense strand
gaacgccaagcaccacaag

SEQ ID NO: 624231 - RNA, 19 nt, Homo sapiens
  misc_RNA (1)...(19): siRNA sense strand
gagcugccugccaaccuuu

SEQ ID NO: 624232 - RNA, 19 nt, Homo sapiens
  misc_RNA (1)...(19): siRNA sense strand
gcucagacaaggauugcau

SEQ ID NO: 624233 - RNA, 19 nt, Homo sapiens
  misc_RNA (1)...(19): siRNA sense strand
ccgaggacaaguugcauga

SEQ ID NO: 624234 - RNA, 19 nt, Homo sapiens
  misc_RNA (1)...(19): siRNA sense strand
ccugccaaccuuuccauuu

SEQ ID NO: 624235 - RNA, 19 nt, Homo sapiens
  misc_RNA (1)...(19): siRNA sense strand
gcgcaaagagcggguacug

SEQ ID NO: 624236 - RNA, 19 nt, Homo sapiens
  misc_RNA (1)...(19): siRNA sense strand
gaacgugccccugugcaaa

SEQ ID NO: 624237 - RNA, 19 nt, Homo sapiens
  misc_RNA (1)...(19): siRNA sense strand
aagauugucgcaccuccua

SEQ ID NO: 624238 - RNA, 19 nt, Homo sapiens
  misc_RNA (1)...(19): siRNA sense strand
gggaggcucagacaaggau

SEQ ID NO: 624239 - RNA, 19 nt, Homo sapiens
  misc_RNA (1)...(19): siRNA sense strand
aaaucuggacucacuccua

SEQ ID NO: 624240 - RNA, 19 nt, Homo sapiens
  misc_RNA (1)...(19): siRNA sense strand
gcaagagcaacuggcacaa

SEQ ID NO: 624241 - RNA, 19 nt, Homo sapiens
  misc_RNA (1)...(19): siRNA sense strand
gaucagagcuggcgcaaag

SEQ ID NO: 624242 - RNA, 19 nt, Homo sapiens
  misc_RNA (1)...(19): siRNA sense strand
gcaaagagcggguacugaa

SEQ ID NO: 624243 - RNA, 19 nt, Homo sapiens
  misc_RNA (1)...(19): siRNA sense strand
gcaaugaaaucuggacuca

SEQ ID NO: 624244 - RNA, 19 nt, Homo sapiens
  misc_RNA (1)...(19): siRNA sense strand
gauguuuccuaccuauaua

SEQ ID NO: 624245 - RNA, 19 nt, Homo sapiens
  misc_RNA (1)...(19): siRNA sense strand
gagcaauggugggaagauu

SEQ ID NO: 624246 - RNA, 19 nt, Homo sapiens
  misc_RNA (1)...(19): siRNA sense strand
ccacuguucugugcaauga

SEQ ID NO: 624247 - RNA, 19 nt, Homo sapiens
  misc_RNA (1)...(19): siRNA sense strand
ggauguuuccuaccuauau

SEQ ID NO: 624248 - RNA, 19 nt, Homo sapiens
  misc_RNA (1)...(19): siRNA sense strand
ggagcugccugccaaccuu

SEQ ID NO: 624249 - RNA, 19 nt, Homo sapiens
  misc_RNA (1)...(19): siRNA sense strand
caaagaggacugugagcaa

SEQ ID NO: 624250 - RNA, 19 nt, Homo sapiens
  misc_RNA (1)...(19): siRNA sense strand
ggacuucaggguuuaacaa

SEQ ID NO: 624251 - RNA, 19 nt, Homo sapiens
  misc_RNA (1)...(19): siRNA sense strand
ccaggaagcccauaaggau

SEQ ID NO: 624252 - RNA, 19 nt, Homo sapiens
  misc_RNA (1)...(19): siRNA sense strand
ggaagaaugccugcuguuc

SEQ ID NO: 624253 - RNA, 19 nt, Homo sapiens
  misc_RNA (1)...(19): siRNA sense strand
ccuacaaggucagcaacua

SEQ ID NO: 624254 - RNA, 19 nt, Homo sapiens
  misc_RNA (1)...(19): siRNA sense strand
aaagaggacugugagcaau

SEQ ID NO: 624255 - RNA, 19 nt, Homo sapiens
  misc_RNA (1)...(19): siRNA sense strand
aaugaaaucuggacucacu

SEQ ID NO: 624256 - RNA, 19 nt, Homo sapiens
  misc_RNA (1)...(19): siRNA sense strand
caaguugcaugagcagugu

SEQ ID NO: 624257 - RNA, 19 nt, Homo sapiens
  misc_RNA (1)...(19): siRNA sense strand
gcaaacggcauuucaucca

SEQ ID NO: 624258 - RNA, 19 nt, Homo sapiens
  misc_RNA (1)...(19): siRNA sense strand
cuucaggguuuaacaagug

SEQ ID NO: 624259 - RNA, 19 nt, Homo sapiens
  misc_RNA (1)...(19): siRNA sense strand
gccaaccuuuccauuucua

SEQ ID NO: 624260 - RNA, 19 nt, Homo sapiens
  misc_RNA (1)...(19): siRNA sense strand
ugucgacccuggaggaaga

SEQ ID NO: 624261 - RNA, 19 nt, Homo sapiens
  misc_RNA (1)...(19): siRNA sense strand
cugccaaccuuuccauuuc

SEQ ID NO: 624262 - RNA, 19 nt, Homo sapiens
  misc_RNA (1)...(19): siRNA sense strand
ggaagcccauaaggauguu

SEQ ID NO: 624263 - RNA, 19 nt, Homo sapiens
  misc_RNA (1)...(19): siRNA sense strand
gccaagcaccacaaggaaa

SEQ ID NO: 624264 - RNA, 19 nt, Homo sapiens
  misc_RNA (1)...(19): siRNA sense strand
acuguucugugcaaugaaa

SEQ ID NO: 624265 - RNA, 19 nt, Homo sapiens
  misc_RNA (1)...(19): siRNA sense strand
ggacucacuccuacaaggu

SEQ ID NO: 624266 - RNA, 19 nt, Homo sapiens
  misc_RNA (1)...(19): siRNA sense strand
gccaggaagcccauaagga

SEQ ID NO: 624267 - RNA, 19 nt, Homo sapiens
  misc_RNA (1)...(19): siRNA sense strand
ggagguggcgagguucuau

SEQ ID NO: 624268 - RNA, 19 nt, Homo sapiens
  misc_RNA (1)...(19): siRNA sense strand
gccuggccuuuccugcuua

SEQ ID NO: 624269 - RNA, 19 nt, Homo sapiens
  misc_RNA (1)...(19): siRNA sense strand
cuaccuauauagauucaac

SEQ ID NO: 624270 - RNA, 19 nt, Homo sapiens
  misc_RNA (1)...(19): siRNA sense strand
augaggagguggcgagguu

SEQ ID NO: 624271 - RNA, 19 nt, Homo sapiens
  misc_RNA (1)...(19): siRNA sense strand
gaacgccaagcaccacaag

SEQ ID NO: 624272 - RNA, 19 nt, Homo sapiens
  misc_RNA (1)...(19): siRNA sense strand
gagcugccugccaaccuuu

SEQ ID NO: 624273 - RNA, 19 nt, Homo sapiens
  misc_RNA (1)...(19): siRNA sense strand
gcucagacaaggauugcau

SEQ ID NO: 624274 - RNA, 19 nt, Homo sapiens
  misc_RNA (1)...(19): siRNA sense strand
ccgaggacaaguugcauga

SEQ ID NO: 624275 - RNA, 19 nt, Homo sapiens
  misc_RNA (1)...(19): siRNA sense strand
ccugccaaccuuuccauuu

SEQ ID NO: 624276 - RNA, 19 nt, Homo sapiens
  misc_RNA (1)...(19): siRNA sense strand
gcgcaaagagcggguacug

SEQ ID NO: 624277 - RNA, 19 nt, Homo sapiens
  misc_RNA (1)...(19): siRNA sense strand
gaacgugccccugugcaaa

SEQ ID NO: 624278 - RNA, 19 nt, Homo sapiens
  misc_RNA (1)...(19): siRNA sense strand
aagauugucgcaccuccua

SEQ ID NO: 624279 - RNA, 19 nt, Homo sapiens
  misc_RNA (1)...(19): siRNA sense strand
gggaggcucagacaaggau

SEQ ID NO: 624280 - RNA, 19 nt, Homo sapiens
  misc_RNA (1)...(19): siRNA sense strand
aaaucuggacucacuccua

SEQ ID NO: 624281 - RNA, 19 nt, Homo sapiens
  misc_RNA (1)...(19): siRNA sense strand
gcaagagcaacuggcacaa

SEQ ID NO: 624282 - RNA, 19 nt, Homo sapiens
  misc_RNA (1)...(19): siRNA sense strand
gaucagagcuggcgcaaag

SEQ ID NO: 624283 - RNA, 19 nt, Homo sapiens
  misc_RNA (1)...(19): siRNA sense strand
gcaaagagcggguacugaa

SEQ ID NO: 624284 - RNA, 19 nt, Homo sapiens
  misc_RNA (1)...(19): siRNA sense strand
gcaaugaaaucuggacuca

SEQ ID NO: 624285 - RNA, 19 nt, Homo sapiens
  misc_RNA (1)...(19): siRNA sense strand
gauguuuccuaccuauaua

SEQ ID NO: 624286 - RNA, 19 nt, Homo sapiens
  misc_RNA (1)...(19): siRNA sense strand
gagcaauggugggaagauu

SEQ ID NO: 624287 - RNA, 19 nt, Homo sapiens
  misc_RNA (1)...(19): siRNA sense strand
ccacuguucugugcaauga

SEQ ID NO: 624288 - RNA, 19 nt, Homo sapiens
  misc_RNA (1)...(19): siRNA sense strand
ggauguuuccuaccuauau

SEQ ID NO: 624289 - RNA, 19 nt, Homo sapiens
  misc_RNA (1)...(19): siRNA sense strand
ggagcugccugccaaccuu

SEQ ID NO: 624290 - RNA, 19 nt, Homo sapiens
  misc_RNA (1)...(19): siRNA sense strand
caaagaggacugugagcaa

SEQ ID NO: 624291 - RNA, 19 nt, Homo sapiens
  misc_RNA (1)...(19): siRNA sense strand
ggacuucaggguuuaacaa

SEQ ID NO: 624292 - RNA, 19 nt, Homo sapiens
  misc_RNA (1)...(19): siRNA sense strand
ccaggaagcccauaaggau

SEQ ID NO: 624293 - RNA, 19 nt, Homo sapiens
  misc_RNA (1)...(19): siRNA sense strand
ggaagaaugccugcuguuc

SEQ ID NO: 624294 - RNA, 19 nt, Homo sapiens
  misc_RNA (1)...(19): siRNA sense strand
ccuacaaggucagcaacua

SEQ ID NO: 624295 - RNA, 19 nt, Homo sapiens
  misc_RNA (1)...(19): siRNA sense strand
aaagaggacugugagcaau

SEQ ID NO: 624296 - RNA, 19 nt, Homo sapiens
  misc_RNA (1)...(19): siRNA sense strand
aaugaaaucuggacucacu

SEQ ID NO: 624297 - RNA, 19 nt, Homo sapiens
  misc_RNA (1)...(19): siRNA sense strand
caaguugcaugagcagugu

SEQ ID NO: 624298 - RNA, 19 nt, Homo sapiens
  misc_RNA (1)...(19): siRNA sense strand
gcaaacggcauuucaucca

SEQ ID NO: 624299 - RNA, 19 nt, Homo sapiens
  misc_RNA (1)...(19): siRNA sense strand
cuucaggguuuaacaagug

SEQ ID NO: 624300 - RNA, 19 nt, Homo sapiens
  misc_RNA (1)...(19): siRNA sense strand
gccaaccuuuccauuucua

SEQ ID NO: 624301 - RNA, 19 nt, Homo sapiens
  misc_RNA (1)...(19): siRNA sense strand
ugucgacccuggaggaaga

SEQ ID NO: 624302 - RNA, 19 nt, Homo sapiens
  misc_RNA (1)...(19): siRNA sense strand
cugccaaccuuuccauuuc

SEQ ID NO: 624303 - RNA, 19 nt, Homo sapiens
  misc_RNA (1)...(19): siRNA sense strand
ggaagcccauaaggauguu

SEQ ID NO: 624304 - RNA, 19 nt, Homo sapiens
  misc_RNA (1)...(19): siRNA sense strand
gccaagcaccacaaggaaa

SEQ ID NO: 624305 - RNA, 19 nt, Homo sapiens
  misc_RNA (1)...(19): siRNA sense strand
acuguucugugcaaugaaa

SEQ ID NO: 624306 - RNA, 19 nt, Homo sapiens
  misc_RNA (1)...(19): siRNA sense strand
ggacucacuccuacaaggu

SEQ ID NO: 624307 - RNA, 19 nt, Homo sapiens
  misc_RNA (1)...(19): siRNA sense strand
gccaggaagcccauaagga

SEQ ID NO: 624308 - RNA, 19 nt, Homo sapiens
  misc_RNA (1)...(19): siRNA sense strand
ggagguggcgagguucuau

SEQ ID NO: 624309 - RNA, 19 nt, Homo sapiens
  misc_RNA (1)...(19): siRNA sense strand
gccuggccuuuccugcuua

SEQ ID NO: 624310 - RNA, 19 nt, Homo sapiens
  misc_RNA (1)...(19): siRNA sense strand
cuaccuauauagauucaac

SEQ ID NO: 624311 - RNA, 19 nt, Homo sapiens
  misc_RNA (1)...(19): siRNA sense strand
augaggagguggcgagguu

SEQ ID NO: 624312 - RNA, 19 nt, Homo sapiens
  misc_RNA (1)...(19): siRNA sense strand
gaacgccaagcaccacaag

SEQ ID NO: 624313 - RNA, 19 nt, Homo sapiens
  misc_RNA (1)...(19): siRNA sense strand
gagcugccugccaaccuuu

SEQ ID NO: 624314 - RNA, 19 nt, Homo sapiens
  misc_RNA (1)...(19): siRNA sense strand
gcucagacaaggauugcau

SEQ ID NO: 624315 - RNA, 19 nt, Homo sapiens
  misc_RNA (1)...(19): siRNA sense strand
ccgaggacaaguugcauga

SEQ ID NO: 624316 - RNA, 19 nt, Homo sapiens
  misc_RNA (1)...(19): siRNA sense strand
ccugccaaccuuuccauuu

SEQ ID NO: 624317 - RNA, 19 nt, Homo sapiens
  misc_RNA (1)...(19): siRNA sense strand
gcgcaaagagcggguacug

SEQ ID NO: 624318 - RNA, 19 nt, Homo sapiens
  misc_RNA (1)...(19): siRNA sense strand
gaacgugccccugugcaaa

SEQ ID NO: 624319 - RNA, 19 nt, Homo sapiens
  misc_RNA (1)...(19): siRNA sense strand
aagauugucgcaccuccua

SEQ ID NO: 624320 - RNA, 19 nt, Homo sapiens
  misc_RNA (1)...(19): siRNA sense strand
gggaggcucagacaaggau

SEQ ID NO: 624321 - RNA, 19 nt, Homo sapiens
  misc_RNA (1)...(19): siRNA sense strand
aaaucuggacucacuccua

SEQ ID NO: 624322 - RNA, 19 nt, Homo sapiens
  misc_RNA (1)...(19): siRNA sense strand
gcaagagcaacuggcacaa

SEQ ID NO: 624323 - RNA, 19 nt, Homo sapiens
  misc_RNA (1)...(19): siRNA sense strand
gaucagagcuggcgcaaag

SEQ ID NO: 624324 - RNA, 19 nt, Homo sapiens
  misc_RNA (1)...(19): siRNA sense strand
gcaaagagcggguacugaa

SEQ ID NO: 624325 - RNA, 19 nt, Homo sapiens
  misc_RNA (1)...(19): siRNA sense strand
gcaaugaaaucuggacuca

SEQ ID NO: 624326 - RNA, 19 nt, Homo sapiens
  misc_RNA (1)...(19): siRNA sense strand
gauguuuccuaccuauaua

SEQ ID NO: 624327 - RNA, 19 nt, Homo sapiens
  misc_RNA (1)...(19): siRNA sense strand
gagcaauggugggaagauu

SEQ ID NO: 624328 - RNA, 19 nt, Homo sapiens
  misc_RNA (1)...(19): siRNA sense strand
ccacuguucugugcaauga

SEQ ID NO: 624329 - RNA, 19 nt, Homo sapiens
  misc_RNA (1)...(19): siRNA sense strand
ggauguuuccuaccuauau

SEQ ID NO: 624330 - RNA, 19 nt, Homo sapiens
  misc_RNA (1)...(19): siRNA sense strand
ggagcugccugccaaccuu

SEQ ID NO: 624331 - RNA, 19 nt, Homo sapiens
  misc_RNA (1)...(19): siRNA sense strand
caaagaggacugugagcaa

SEQ ID NO: 624332 - RNA, 19 nt, Homo sapiens
  misc_RNA (1)...(19): siRNA sense strand
ggacuucaggguuuaacaa

SEQ ID NO: 624333 - RNA, 19 nt, Homo sapiens
  misc_RNA (1)...(19): siRNA sense strand
ccaggaagcccauaaggau

SEQ ID NO: 624334 - RNA, 19 nt, Homo sapiens
  misc_RNA (1)...(19): siRNA sense strand
ggaagaaugccugcuguuc

SEQ ID NO: 624335 - RNA, 19 nt, Homo sapiens
  misc_RNA (1)...(19): siRNA sense strand
ccuacaaggucagcaacua

SEQ ID NO: 624336 - RNA, 19 nt, Homo sapiens
  misc_RNA (1)...(19): siRNA sense strand
aaagaggacugugagcaau

SEQ ID NO: 624337 - RNA, 19 nt, Homo sapiens
  misc_RNA (1)...(19): siRNA sense strand
aaugaaaucuggacucacu

SEQ ID NO: 624338 - RNA, 19 nt, Homo sapiens
  misc_RNA (1)...(19): siRNA sense strand
caaguugcaugagcagugu

SEQ ID NO: 624339 - RNA, 19 nt, Homo sapiens
  misc_RNA (1)...(19): siRNA sense strand
gcaaacggcauuucaucca

SEQ ID NO: 624340 - RNA, 19 nt, Homo sapiens
  misc_RNA (1)...(19): siRNA sense strand
cuucaggguuuaacaagug

SEQ ID NO: 624341 - RNA, 19 nt, Homo sapiens
  misc_RNA (1)...(19): siRNA sense strand
gccaaccuuuccauuucua

SEQ ID NO: 624342 - RNA, 19 nt, Homo sapiens
  misc_RNA (1)...(19): siRNA sense strand
ugucgacccuggaggaaga

SEQ ID NO: 624343 - RNA, 19 nt, Homo sapiens
  misc_RNA (1)...(19): siRNA sense strand
cugccaaccuuuccauuuc

SEQ ID NO: 624344 - RNA, 19 nt, Homo sapiens
  misc_RNA (1)...(19): siRNA sense strand
ggaagcccauaaggauguu

SEQ ID NO: 624345 - RNA, 19 nt, Homo sapiens
  misc_RNA (1)...(19): siRNA sense strand
gccaagcaccacaaggaaa

SEQ ID NO: 624346 - RNA, 19 nt, Homo sapiens
  misc_RNA (1)...(19): siRNA sense strand
acuguucugugcaaugaaa

SEQ ID NO: 624347 - RNA, 19 nt, Homo sapiens
  misc_RNA (1)...(19): siRNA sense strand
ggacucacuccuacaaggu

SEQ ID NO: 624348 - RNA, 19 nt, Homo sapiens
  misc_RNA (1)...(19): siRNA sense strand
gccaggaagcccauaagga

SEQ ID NO: 624349 - RNA, 19 nt, Homo sapiens
  misc_RNA (1)...(19): siRNA sense strand
ggagguggcgagguucuau

SEQ ID NO: 624350 - RNA, 19 nt, Homo sapiens
  misc_RNA (1)...(19): siRNA sense strand
gccuggccuuuccugcuua

SEQ ID NO: 624351 - RNA, 19 nt, Homo sapiens
  misc_RNA (1)...(19): siRNA sense strand
cuaccuauauagauucaac

SEQ ID NO: 624352 - RNA, 19 nt, Homo sapiens
  misc_RNA (1)...(19): siRNA sense strand
augaggagguggcgagguu

SEQ ID NO: 624353 - RNA, 19 nt, Homo sapiens
  misc_RNA (1)...(19): siRNA sense strand
gaacgccaagcaccacaag

SEQ ID NO: 624354 - RNA, 19 nt, Homo sapiens
  misc_RNA (1)...(19): siRNA sense strand
gagcugccugccaaccuuu

SEQ ID NO: 624355 - RNA, 19 nt, Homo sapiens
  misc_RNA (1)...(19): siRNA sense strand
gcucagacaaggauugcau

SEQ ID NO: 624356 - RNA, 19 nt, Homo sapiens
  misc_RNA (1)...(19): siRNA sense strand
ccgaggacaaguugcauga

SEQ ID NO: 624357 - RNA, 19 nt, Homo sapiens
  misc_RNA (1)...(19): siRNA sense strand
ccugccaaccuuuccauuu

SEQ ID NO: 624358 - RNA, 19 nt, Homo sapiens
  misc_RNA (1)...(19): siRNA sense strand
gcgcaaagagcggguacug

SEQ ID NO: 624359 - RNA, 19 nt, Homo sapiens
  misc_RNA (1)...(19): siRNA sense strand
gaacgugccccugugcaaa

SEQ ID NO: 624360 - RNA, 19 nt, Homo sapiens
  misc_RNA (1)...(19): siRNA sense strand
aagauugucgcaccuccua

SEQ ID NO: 624361 - RNA, 19 nt, Homo sapiens
  misc_RNA (1)...(19): siRNA sense strand
gggaggcucagacaaggau

SEQ ID NO: 624362 - RNA, 19 nt, Homo sapiens
  misc_RNA (1)...(19): siRNA sense strand
aaaucuggacucacuccua

SEQ ID NO: 624363 - RNA, 19 nt, Homo sapiens
  misc_RNA (1)...(19): siRNA sense strand
gcaagagcaacuggcacaa

SEQ ID NO: 624364 - RNA, 19 nt, Homo sapiens
  misc_RNA (1)...(19): siRNA sense strand
gaucagagcuggcgcaaag

SEQ ID NO: 624365 - RNA, 19 nt, Homo sapiens
  misc_RNA (1)...(19): siRNA sense strand
gcaaagagcggguacugaa

SEQ ID NO: 624366 - RNA, 19 nt, Homo sapiens
  misc_RNA (1)...(19): siRNA sense strand
gcaaugaaaucuggacuca

SEQ ID NO: 624367 - RNA, 19 nt, Homo sapiens
  misc_RNA (1)...(19): siRNA sense strand
gauguuuccuaccuauaua

SEQ ID NO: 624368 - RNA, 19 nt, Homo sapiens
  misc_RNA (1)...(19): siRNA sense strand
gagcaauggugggaagauu

SEQ ID NO: 624369 - RNA, 19 nt, Homo sapiens
  misc_RNA (1)...(19): siRNA sense strand
ccacuguucugugcaauga

SEQ ID NO: 624370 - RNA, 19 nt, Homo sapiens
  misc_RNA (1)...(19): siRNA sense strand
ggauguuuccuaccuauau

SEQ ID NO: 624371 - RNA, 19 nt, Homo sapiens
  misc_RNA (1)...(19): siRNA sense strand
ggagcugccugccaaccuu

SEQ ID NO: 624372 - RNA, 19 nt, Homo sapiens
  misc_RNA (1)...(19): siRNA sense strand
caaagaggacugugagcaa

SEQ ID NO: 624373 - RNA, 19 nt, Homo sapiens
  misc_RNA (1)...(19): siRNA sense strand
ggacuucaggguuuaacaa

SEQ ID NO: 624374 - RNA, 19 nt, Homo sapiens
  misc_RNA (1)...(19): siRNA sense strand
ccaggaagcccauaaggau

SEQ ID NO: 624375 - RNA, 19 nt, Homo sapiens
  misc_RNA (1)...(19): siRNA sense strand
ggaagaaugccugcuguuc

SEQ ID NO: 624376 - RNA, 19 nt, Homo sapiens
  misc_RNA (1)...(19): siRNA sense strand
ccuacaaggucagcaacua

SEQ ID NO: 624377 - RNA, 19 nt, Homo sapiens
  misc_RNA (1)...(19): siRNA sense strand
aaagaggacugugagcaau

SEQ ID NO: 624378 - RNA, 19 nt, Homo sapiens
  misc_RNA (1)...(19): siRNA sense strand
aaugaaaucuggacucacu

SEQ ID NO: 624379 - RNA, 19 nt, Homo sapiens
  misc_RNA (1)...(19): siRNA sense strand
caaguugcaugagcagugu

SEQ ID NO: 624380 - RNA, 19 nt, Homo sapiens
  misc_RNA (1)...(19): siRNA sense strand
gcaaacggcauuucaucca

SEQ ID NO: 624381 - RNA, 19 nt, Homo sapiens
  misc_RNA (1)...(19): siRNA sense strand
cuucaggguuuaacaagug

SEQ ID NO: 624382 - RNA, 19 nt, Homo sapiens
  misc_RNA (1)...(19): siRNA sense strand
gccaaccuuuccauuucua

SEQ ID NO: 624383 - RNA, 19 nt, Homo sapiens
  misc_RNA (1)...(19): siRNA sense strand
ugucgacccuggaggaaga

SEQ ID NO: 624384 - RNA, 19 nt, Homo sapiens
  misc_RNA (1)...(19): siRNA sense strand
cugccaaccuuuccauuuc

SEQ ID NO: 624385 - RNA, 19 nt, Homo sapiens
  misc_RNA (1)...(19): siRNA sense strand
ggaagcccauaaggauguu

SEQ ID NO: 624386 - RNA, 19 nt, Homo sapiens
  misc_RNA (1)...(19): siRNA sense strand
gccaagcaccacaaggaaa

SEQ ID NO: 624387 - RNA, 19 nt, Homo sapiens
  misc_RNA (1)...(19): siRNA sense strand
acuguucugugcaaugaaa

SEQ ID NO: 624388 - RNA, 19 nt, Homo sapiens
  misc_RNA (1)...(19): siRNA sense strand
ggacucacuccuacaaggu

SEQ ID NO: 624389 - RNA, 19 nt, Homo sapiens
  misc_RNA (1)...(19): siRNA sense strand
gccaggaagcccauaagga

SEQ ID NO: 624390 - RNA, 19 nt, Homo sapiens
  misc_RNA (1)...(19): siRNA sense strand
ggagguggcgagguucuau

SEQ ID NO: 624391 - RNA, 19 nt, Homo sapiens
  misc_RNA (1)...(19): siRNA sense strand
gccuggccuuuccugcuua

SEQ ID NO: 624392 - RNA, 19 nt, Homo sapiens
  misc_RNA (1)...(19): siRNA sense strand
cuaccuauauagauucaac

SEQ ID NO: 624393 - RNA, 19 nt, Homo sapiens
  misc_RNA (1)...(19): siRNA sense strand
augaggagguggcgagguu

SEQ ID NO: 624394 - RNA, 19 nt, Homo sapiens
  misc_RNA (1)...(19): siRNA sense strand
gaacgccaagcaccacaag

SEQ ID NO: 624395 - RNA, 19 nt, Homo sapiens
  misc_RNA (1)...(19): siRNA sense strand
gagcugccugccaaccuuu

SEQ ID NO: 624396 - RNA, 19 nt, Homo sapiens
  misc_RNA (1)...(19): siRNA sense strand
gcucagacaaggauugcau

SEQ ID NO: 624397 - RNA, 19 nt, Homo sapiens
  misc_RNA (1)...(19): siRNA sense strand
ccgaggacaaguugcauga

SEQ ID NO: 624398 - RNA, 19 nt, Homo sapiens
  misc_RNA (1)...(19): siRNA sense strand
ccugccaaccuuuccauuu

SEQ ID NO: 624399 - RNA, 19 nt, Homo sapiens
  misc_RNA (1)...(19): siRNA sense strand
gcgcaaagagcggguacug

SEQ ID NO: 624400 - RNA, 19 nt, Homo sapiens
  misc_RNA (1)...(19): siRNA sense strand
gaacgugccccugugcaaa

SEQ ID NO: 624401 - RNA, 19 nt, Homo sapiens
  misc_RNA (1)...(19): siRNA sense strand
aagauugucgcaccuccua

SEQ ID NO: 624402 - RNA, 19 nt, Homo sapiens
  misc_RNA (1)...(19): siRNA sense strand
gggaggcucagacaaggau

SEQ ID NO: 624403 - RNA, 19 nt, Homo sapiens
  misc_RNA (1)...(19): siRNA sense strand
aaaucuggacucacuccua

SEQ ID NO: 624404 - RNA, 19 nt, Homo sapiens
  misc_RNA (1)...(19): siRNA sense strand
gcaagagcaacuggcacaa

SEQ ID NO: 624405 - RNA, 19 nt, Homo sapiens
  misc_RNA (1)...(19): siRNA sense strand
ggaccaacaugcucuacua

SEQ ID NO: 624406 - RNA, 19 nt, Homo sapiens
  misc_RNA (1)...(19): siRNA sense strand
guauguggcuuccauggua

SEQ ID NO: 624407 - RNA, 19 nt, Homo sapiens
  misc_RNA (1)...(19): siRNA sense strand
gcaagaagcaccucacaga

SEQ ID NO: 624408 - RNA, 19 nt, Homo sapiens
  misc_RNA (1)...(19): siRNA sense strand
ggagacuauuuccgaguua

SEQ ID NO: 624409 - RNA, 19 nt, Homo sapiens
  misc_RNA (1)...(19): siRNA sense strand
ggagagauccugucugugu

SEQ ID NO: 624410 - RNA, 19 nt, Homo sapiens
  misc_RNA (1)...(19): siRNA sense strand
ugacgagcauguacaauga

SEQ ID NO: 624411 - RNA, 19 nt, Homo sapiens
  misc_RNA (1)...(19): siRNA sense strand
gcacaucgccaucgagaga

SEQ ID NO: 624412 - RNA, 19 nt, Homo sapiens
  misc_RNA (1)...(19): siRNA sense strand
ugagagaccugugccguuu

SEQ ID NO: 624413 - RNA, 19 nt, Homo sapiens
  misc_RNA (1)...(19): siRNA sense strand
uggaggagcucaccaacaa

SEQ ID NO: 624414 - RNA, 19 nt, Homo sapiens
  misc_RNA (1)...(19): siRNA sense strand
gccuggagcuguucaaguu

SEQ ID NO: 624415 - RNA, 19 nt, Homo sapiens
  misc_RNA (1)...(19): siRNA sense strand
caucuaugccgucaugaua

SEQ ID NO: 624416 - RNA, 19 nt, Homo sapiens
  misc_RNA (1)...(19): siRNA sense strand
gagagauccugucuguguu

SEQ ID NO: 624417 - RNA, 19 nt, Homo sapiens
  misc_RNA (1)...(19): siRNA sense strand
gagcauguacaaugagauu

SEQ ID NO: 624418 - RNA, 19 nt, Homo sapiens
  misc_RNA (1)...(19): siRNA sense strand
uccgagggauucaguauuu

SEQ ID NO: 624419 - RNA, 19 nt, Homo sapiens
  misc_RNA (1)...(19): siRNA sense strand
guggacagcuacagugaga

SEQ ID NO: 624420 - RNA, 19 nt, Homo sapiens
  misc_RNA (1)...(19): siRNA sense strand
ucagccaccucaaggagua

SEQ ID NO: 624421 - RNA, 19 nt, Homo sapiens
  misc_RNA (1)...(19): siRNA sense strand
ggacaagugggacagauuc

SEQ ID NO: 624422 - RNA, 19 nt, Homo sapiens
  misc_RNA (1)...(19): siRNA sense strand
gaccuggaguucacugaga

SEQ ID NO: 624423 - RNA, 19 nt, Homo sapiens
  misc_RNA (1)...(19): siRNA sense strand
agaagcaccucacagacaa

SEQ ID NO: 624424 - RNA, 19 nt, Homo sapiens
  misc_RNA (1)...(19): siRNA sense strand
gcaagaacaucuggaagcu

SEQ ID NO: 624425 - RNA, 19 nt, Homo sapiens
  misc_RNA (1)...(19): siRNA sense strand
gcugcuggccuauguaauu

SEQ ID NO: 624426 - RNA, 19 nt, Homo sapiens
  misc_RNA (1)...(19): siRNA sense strand
cuucaaggcugucuucauc

SEQ ID NO: 624427 - RNA, 19 nt, Homo sapiens
  misc_RNA (1)...(19): siRNA sense strand
caccauggcugccuacuac

SEQ ID NO: 624428 - RNA, 19 nt, Homo sapiens
  misc_RNA (1)...(19): siRNA sense strand
ggacagcuacagugagaug

SEQ ID NO: 624429 - RNA, 19 nt, Homo sapiens
  misc_RNA (1)...(19): siRNA sense strand
cccgauagcuccuacaaca

SEQ ID NO: 624430 - RNA, 19 nt, Homo sapiens
  misc_RNA (1)...(19): siRNA sense strand
ugagaacuaugacuucaag

SEQ ID NO: 624431 - RNA, 19 nt, Homo sapiens
  misc_RNA (1)...(19): siRNA sense strand
agaagaugauccugagaga

SEQ ID NO: 624432 - RNA, 19 nt, Homo sapiens
  misc_RNA (1)...(19): siRNA sense strand
ggaggagucuacuucuuuu

SEQ ID NO: 624433 - RNA, 19 nt, Homo sapiens
  misc_RNA (1)...(19): siRNA sense strand
ccugugccguuucauguuu

SEQ ID NO: 624434 - RNA, 19 nt, Homo sapiens
  misc_RNA (1)...(19): siRNA sense strand
gaucgcaggaguaucuuug

SEQ ID NO: 624435 - RNA, 19 nt, Homo sapiens
  misc_RNA (1)...(19): siRNA sense strand
gaggagcucaccaacaaga

SEQ ID NO: 624436 - RNA, 19 nt, Homo sapiens
  misc_RNA (1)...(19): siRNA sense strand
guucaaagacccugagaca

SEQ ID NO: 624437 - RNA, 19 nt, Homo sapiens
  misc_RNA (1)...(19): siRNA sense strand
ucaagcgcaucuucuacuu

SEQ ID NO: 624438 - RNA, 19 nt, Homo sapiens
  misc_RNA (1)...(19): siRNA sense strand
gugagacugucaacaagau

SEQ ID NO: 624439 - RNA, 19 nt, Homo sapiens
  misc_RNA (1)...(19): siRNA sense strand
ccaccugccuggagcuguu

SEQ ID NO: 624440 - RNA, 19 nt, Homo sapiens
  misc_RNA (1)...(19): siRNA sense strand
cuggagagauccugucugu

SEQ ID NO: 624441 - RNA, 19 nt, Homo sapiens
  misc_RNA (1)...(19): siRNA sense strand
gaggcaagugcucgagaua

SEQ ID NO: 624442 - RNA, 19 nt, Homo sapiens
  misc_RNA (1)...(19): siRNA sense strand
gcacaggagagcaagaaca

SEQ ID NO: 624443 - RNA, 19 nt, Homo sapiens
  misc_RNA (1)...(19): siRNA sense strand
aagcgcaucuucuacuuca

SEQ ID NO: 624444 - RNA, 19 nt, Homo sapiens
  misc_RNA (1)...(19): siRNA sense strand
ucacugagaacuaugacuu

SEQ ID NO: 624445 - RNA, 19 nt, Homo sapiens
  misc_RNA (1)...(19): siRNA sense strand
cuacaucgucuucuuguuc

SEQ ID NO: 624446 - RNA, 19 nt, Homo sapiens
  misc_RNA (1)...(19): siRNA sense strand
ccuauguaauucucaccua

SEQ ID NO: 624447 - RNA, 19 nt, Homo sapiens
  misc_RNA (1)...(19): siRNA sense strand
ggcaagugcucgagauagg

SEQ ID NO: 624448 - RNA, 19 nt, Homo sapiens
  misc_RNA (1)...(19): siRNA sense strand
ugaagccguugcucagaau

SEQ ID NO: 624449 - RNA, 19 nt, Homo sapiens
  misc_RNA (1)...(19): siRNA sense strand
agaggacgcugaggucuuc

SEQ ID NO: 624450 - RNA, 19 nt, Homo sapiens
  misc_RNA (1)...(19): siRNA sense strand
ucacagacaacgaguucaa

SEQ ID NO: 624451 - RNA, 19 nt, Homo sapiens
  misc_RNA (1)...(19): siRNA sense strand
gugacgagcauguacaaug

SEQ ID NO: 624452 - RNA, 19 nt, Homo sapiens
  misc_RNA (1)...(19): siRNA sense strand
gcagacacuggaagaacuu

SEQ ID NO: 624453 - RNA, 19 nt, Homo sapiens
  misc_RNA (1)...(19): siRNA sense strand
agaagacccucaggcucua

SEQ ID NO: 624454 - RNA, 19 nt, Homo sapiens
  misc_RNA (1)...(19): siRNA sense strand
ucaaggcugucuucaucau

SEQ ID NO: 624455 - RNA, 19 nt, Homo sapiens
  misc_RNA (1)...(19): siRNA sense strand
uggugacgcugauugaaga

SEQ ID NO: 624456 - RNA, 19 nt, Homo sapiens
  misc_RNA (1)...(19): siRNA sense strand
gaccugugccguuucaugu

SEQ ID NO: 624457 - RNA, 19 nt, Homo sapiens
  misc_RNA (1)...(19): siRNA sense strand
cgaugaagacccuguuugu

SEQ ID NO: 624458 - RNA, 19 nt, Homo sapiens
  misc_RNA (1)...(19): siRNA sense strand
uaggaggagucuacuucuu

SEQ ID NO: 624459 - RNA, 19 nt, Homo sapiens
  misc_RNA (1)...(19): siRNA sense strand
agagauccugucuguguua

SEQ ID NO: 624460 - RNA, 19 nt, Homo sapiens
  misc_RNA (1)...(19): siRNA sense strand
uggagacuauuuccgaguu

SEQ ID NO: 624461 - RNA, 19 nt, Homo sapiens
  misc_RNA (1)...(19): siRNA sense strand
gcaaacggacagccugaag

SEQ ID NO: 624462 - RNA, 19 nt, Homo sapiens
  misc_RNA (1)...(19): siRNA sense strand
gggugagacugucaacaag

SEQ ID NO: 624463 - RNA, 19 nt, Homo sapiens
  misc_RNA (1)...(19): siRNA sense strand
guuaggaggagucuacuuc

SEQ ID NO: 624464 - RNA, 19 nt, Homo sapiens
  misc_RNA (1)...(19): siRNA sense strand
caucuucuacuucaacuuc

SEQ ID NO: 624465 - RNA, 19 nt, Homo sapiens
  misc_RNA (1)...(19): siRNA sense strand
ggucuuggccuauauucuc

SEQ ID NO: 624466 - RNA, 19 nt, Homo sapiens
  misc_RNA (1)...(19): siRNA sense strand
aaacggacagccugaagga

SEQ ID NO: 624467 - RNA, 19 nt, Homo sapiens
  misc_RNA (1)...(19): siRNA sense strand
ucgcaggaguaucuuugaa

SEQ ID NO: 624468 - RNA, 19 nt, Homo sapiens
  misc_RNA (1)...(19): siRNA sense strand
ggcagacacuggaagaacu

SEQ ID NO: 624469 - RNA, 19 nt, Homo sapiens
  misc_RNA (1)...(19): siRNA sense strand
gaugaagacccuguuugug

SEQ ID NO: 624470 - RNA, 19 nt, Homo sapiens
  misc_RNA (1)...(19): siRNA sense strand
aggaggagucuacuucuuu

SEQ ID NO: 624471 - RNA, 19 nt, Homo sapiens
  misc_RNA (1)...(19): siRNA sense strand
gaagccguugcucagaaua

SEQ ID NO: 624472 - RNA, 19 nt, Homo sapiens
  misc_RNA (1)...(19): siRNA sense strand
ugaaagccaugcucaaccu

SEQ ID NO: 624473 - RNA, 19 nt, Homo sapiens
  misc_RNA (1)...(19): siRNA sense strand
gagcaagaagcaccucaca

SEQ ID NO: 624474 - RNA, 19 nt, Homo sapiens
  misc_RNA (1)...(19): siRNA sense strand
ucaacuuccuggucuacug

SEQ ID NO: 624475 - RNA, 19 nt, Homo sapiens
  misc_RNA (1)...(19): siRNA sense strand
gccuguacaugaucaucuu

SEQ ID NO: 624476 - RNA, 19 nt, Homo sapiens
  misc_RNA (1)...(19): siRNA sense strand
ccaacaugcucuacuacac

SEQ ID NO: 624477 - RNA, 19 nt, Homo sapiens
  misc_RNA (1)...(19): siRNA sense strand
uugaagccguugcucagaa

SEQ ID NO: 624478 - RNA, 19 nt, Homo sapiens
  misc_RNA (1)...(19): siRNA sense strand
gcauguacaaugagauucu

SEQ ID NO: 624479 - RNA, 19 nt, Homo sapiens
  misc_RNA (1)...(19): siRNA sense strand
aaguuuaucugcgacaguu

SEQ ID NO: 624480 - RNA, 19 nt, Homo sapiens
  misc_RNA (1)...(19): siRNA sense strand
gcucagcccgaggaaguuu

SEQ ID NO: 624481 - RNA, 19 nt, Homo sapiens
  misc_RNA (1)...(19): siRNA sense strand
uaugaucgcaggaguaucu

SEQ ID NO: 624482 - RNA, 19 nt, Homo sapiens
  misc_RNA (1)...(19): siRNA sense strand
ggugagacugucaacaaga

SEQ ID NO: 624483 - RNA, 19 nt, Homo sapiens
  misc_RNA (1)...(19): siRNA sense strand
cagacaacgaguucaaaga

SEQ ID NO: 624484 - RNA, 19 nt, Homo sapiens
  misc_RNA (1)...(19): siRNA sense strand
uugaagacgggaagaauga

SEQ ID NO: 624485 - RNA, 19 nt, Homo sapiens
  misc_RNA (1)...(19): siRNA sense strand
gauugaagacgggaagaau

SEQ ID NO: 624486 - RNA, 19 nt, Homo sapiens
  misc_RNA (1)...(19): siRNA sense strand
agagaccugugccguuuca

SEQ ID NO: 624487 - RNA, 19 nt, Homo sapiens
  misc_RNA (1)...(19): siRNA sense strand
guacuucagccaccucaag

SEQ ID NO: 624488 - RNA, 19 nt, Homo sapiens
  misc_RNA (1)...(19): siRNA sense strand
uggcuugccucccuuuaag

SEQ ID NO: 624489 - RNA, 19 nt, Homo sapiens
  misc_RNA (1)...(19): siRNA sense strand
cgaaguuugugacgagcau

SEQ ID NO: 624490 - RNA, 19 nt, Homo sapiens
  misc_RNA (1)...(19): siRNA sense strand
ugaacuggaccaccuggaa

SEQ ID NO: 624491 - RNA, 19 nt, Homo sapiens
  misc_RNA (1)...(19): siRNA sense strand
gagauccugucuguguuag

SEQ ID NO: 624492 - RNA, 19 nt, Homo sapiens
  misc_RNA (1)...(19): siRNA sense strand
ccgaguuacuggagagauc

SEQ ID NO: 624493 - RNA, 19 nt, Homo sapiens
  misc_RNA (1)...(19): siRNA sense strand
acacggacagcuacuacaa

SEQ ID NO: 624494 - RNA, 19 nt, Homo sapiens
  misc_RNA (1)...(19): siRNA sense strand
gacuaccgguggugcuuca

SEQ ID NO: 624495 - RNA, 19 nt, Homo sapiens
  misc_RNA (1)...(19): siRNA sense strand
caggagagcaagaacaucu

SEQ ID NO: 624496 - RNA, 19 nt, Homo sapiens
  misc_RNA (1)...(19): siRNA sense strand
gauggcuugccucccuuua

SEQ ID NO: 624497 - RNA, 19 nt, Homo sapiens
  misc_RNA (1)...(19): siRNA sense strand
aagaagcaccucacagaca

SEQ ID NO: 624498 - RNA, 19 nt, Homo sapiens
  misc_RNA (1)...(19): siRNA sense strand
cagcuacagugagaugcuu

SEQ ID NO: 624499 - RNA, 19 nt, Homo sapiens
  misc_RNA (1)...(19): siRNA sense strand
ucuacugccuguacaugau

SEQ ID NO: 624500 - RNA, 19 nt, Homo sapiens
  misc_RNA (1)...(19): siRNA sense strand
gaaguuuaucugcgacagu

SEQ ID NO: 624501 - RNA, 19 nt, Homo sapiens
  misc_RNA (1)...(19): siRNA sense strand
caacgugggcaucaucaac

SEQ ID NO: 624502 - RNA, 19 nt, Homo sapiens
  misc_RNA (1)...(19): siRNA sense strand
gagacuauuuccgaguuac

SEQ ID NO: 624503 - RNA, 19 nt, Homo sapiens
  misc_RNA (1)...(19): siRNA sense strand
ucaccauggcugccuacua

SEQ ID NO: 624504 - RNA, 19 nt, Homo sapiens
  misc_RNA (1)...(19): siRNA sense strand
ugggugagacugucaacaa

SEQ ID NO: 624505 - RNA, 19 nt, Homo sapiens
  misc_RNA (1)...(19): siRNA sense strand
ggaccaacaugcucuacua

SEQ ID NO: 624506 - RNA, 19 nt, Homo sapiens
  misc_RNA (1)...(19): siRNA sense strand
guauguggcuuccauggua

SEQ ID NO: 624507 - RNA, 19 nt, Homo sapiens
  misc_RNA (1)...(19): siRNA sense strand
gcaagaagcaccucacaga

SEQ ID NO: 624508 - RNA, 19 nt, Homo sapiens
  misc_RNA (1)...(19): siRNA sense strand
ggagacuauuuccgaguua

SEQ ID NO: 624509 - RNA, 19 nt, Homo sapiens
  misc_RNA (1)...(19): siRNA sense strand
ggagagauccugucugugu

SEQ ID NO: 624510 - RNA, 19 nt, Homo sapiens
  misc_RNA (1)...(19): siRNA sense strand
ugacgagcauguacaauga

SEQ ID NO: 624511 - RNA, 19 nt, Homo sapiens
  misc_RNA (1)...(19): siRNA sense strand
gcacaucgccaucgagaga

SEQ ID NO: 624512 - RNA, 19 nt, Homo sapiens
  misc_RNA (1)...(19): siRNA sense strand
ugagagaccugugccguuu

SEQ ID NO: 624513 - RNA, 19 nt, Homo sapiens
  misc_RNA (1)...(19): siRNA sense strand
uggaggagcucaccaacaa

SEQ ID NO: 624514 - RNA, 19 nt, Homo sapiens
  misc_RNA (1)...(19): siRNA sense strand
gccuggagcuguucaaguu

SEQ ID NO: 624515 - RNA, 19 nt, Homo sapiens
  misc_RNA (1)...(19): siRNA sense strand
caucuaugccgucaugaua

SEQ ID NO: 624516 - RNA, 19 nt, Homo sapiens
  misc_RNA (1)...(19): siRNA sense strand
gagagauccugucuguguu

SEQ ID NO: 624517 - RNA, 19 nt, Homo sapiens
  misc_RNA (1)...(19): siRNA sense strand
gagcauguacaaugagauu

SEQ ID NO: 624518 - RNA, 19 nt, Homo sapiens
  misc_RNA (1)...(19): siRNA sense strand
uccgagggauucaguauuu

SEQ ID NO: 624519 - RNA, 19 nt, Homo sapiens
  misc_RNA (1)...(19): siRNA sense strand
guggacagcuacagugaga

SEQ ID NO: 624520 - RNA, 19 nt, Homo sapiens
  misc_RNA (1)...(19): siRNA sense strand
ucagccaccucaaggagua

SEQ ID NO: 624521 - RNA, 19 nt, Homo sapiens
  misc_RNA (1)...(19): siRNA sense strand
ggacaagugggacagauuc

SEQ ID NO: 624522 - RNA, 19 nt, Homo sapiens
  misc_RNA (1)...(19): siRNA sense strand
gaccuggaguucacugaga

SEQ ID NO: 624523 - RNA, 19 nt, Homo sapiens
  misc_RNA (1)...(19): siRNA sense strand
agaagcaccucacagacaa

SEQ ID NO: 624524 - RNA, 19 nt, Homo sapiens
  misc_RNA (1)...(19): siRNA sense strand
gcaagaacaucuggaagcu

SEQ ID NO: 624525 - RNA, 19 nt, Homo sapiens
  misc_RNA (1)...(19): siRNA sense strand
gcugcuggccuauguaauu

SEQ ID NO: 624526 - RNA, 19 nt, Homo sapiens
  misc_RNA (1)...(19): siRNA sense strand
cuucaaggcugucuucauc

SEQ ID NO: 624527 - RNA, 19 nt, Homo sapiens
  misc_RNA (1)...(19): siRNA sense strand
caccauggcugccuacuac

SEQ ID NO: 624528 - RNA, 19 nt, Homo sapiens
  misc_RNA (1)...(19): siRNA sense strand
ggacagcuacagugagaug

SEQ ID NO: 624529 - RNA, 19 nt, Homo sapiens
  misc_RNA (1)...(19): siRNA sense strand
cccgauagcuccuacaaca

SEQ ID NO: 624530 - RNA, 19 nt, Homo sapiens
  misc_RNA (1)...(19): siRNA sense strand
ugagaacuaugacuucaag

SEQ ID NO: 624531 - RNA, 19 nt, Homo sapiens
  misc_RNA (1)...(19): siRNA sense strand
agaagaugauccugagaga

SEQ ID NO: 624532 - RNA, 19 nt, Homo sapiens
  misc_RNA (1)...(19): siRNA sense strand
ggaggagucuacuucuuuu

SEQ ID NO: 624533 - RNA, 19 nt, Homo sapiens
  misc_RNA (1)...(19): siRNA sense strand
ccugugccguuucauguuu

SEQ ID NO: 624534 - RNA, 19 nt, Homo sapiens
  misc_RNA (1)...(19): siRNA sense strand
gaucgcaggaguaucuuug

SEQ ID NO: 624535 - RNA, 19 nt, Homo sapiens
  misc_RNA (1)...(19): siRNA sense strand
gaggagcucaccaacaaga

SEQ ID NO: 624536 - RNA, 19 nt, Homo sapiens
  misc_RNA (1)...(19): siRNA sense strand
guucaaagacccugagaca

SEQ ID NO: 624537 - RNA, 19 nt, Homo sapiens
  misc_RNA (1)...(19): siRNA sense strand
ucaagcgcaucuucuacuu

SEQ ID NO: 624538 - RNA, 19 nt, Homo sapiens
  misc_RNA (1)...(19): siRNA sense strand
gugagacugucaacaagau

SEQ ID NO: 624539 - RNA, 19 nt, Homo sapiens
  misc_RNA (1)...(19): siRNA sense strand
ccaccugccuggagcuguu

SEQ ID NO: 624540 - RNA, 19 nt, Homo sapiens
  misc_RNA (1)...(19): siRNA sense strand
cuggagagauccugucugu

SEQ ID NO: 624541 - RNA, 19 nt, Homo sapiens
  misc_RNA (1)...(19): siRNA sense strand
gaggcaagugcucgagaua

SEQ ID NO: 624542 - RNA, 19 nt, Homo sapiens
  misc_RNA (1)...(19): siRNA sense strand
gcacaggagagcaagaaca

SEQ ID NO: 624543 - RNA, 19 nt, Homo sapiens
  misc_RNA (1)...(19): siRNA sense strand
aagcgcaucuucuacuuca

SEQ ID NO: 624544 - RNA, 19 nt, Homo sapiens
  misc_RNA (1)...(19): siRNA sense strand
ucacugagaacuaugacuu

SEQ ID NO: 624545 - RNA, 19 nt, Homo sapiens
  misc_RNA (1)...(19): siRNA sense strand
cuacaucgucuucuuguuc

SEQ ID NO: 624546 - RNA, 19 nt, Homo sapiens
  misc_RNA (1)...(19): siRNA sense strand
ccuauguaauucucaccua

SEQ ID NO: 624547 - RNA, 19 nt, Homo sapiens
  misc_RNA (1)...(19): siRNA sense strand
ggcaagugcucgagauagg

SEQ ID NO: 624548 - RNA, 19 nt, Homo sapiens
  misc_RNA (1)...(19): siRNA sense strand
ugaagccguugcucagaau

SEQ ID NO: 624549 - RNA, 19 nt, Homo sapiens
  misc_RNA (1)...(19): siRNA sense strand
agaggacgcugaggucuuc

SEQ ID NO: 624550 - RNA, 19 nt, Homo sapiens
  misc_RNA (1)...(19): siRNA sense strand
ucacagacaacgaguucaa

SEQ ID NO: 624551 - RNA, 19 nt, Homo sapiens
  misc_RNA (1)...(19): siRNA sense strand
gugacgagcauguacaaug

SEQ ID NO: 624552 - RNA, 19 nt, Homo sapiens
  misc_RNA (1)...(19): siRNA sense strand
gcagacacuggaagaacuu

SEQ ID NO: 624553 - RNA, 19 nt, Homo sapiens
  misc_RNA (1)...(19): siRNA sense strand
agaagacccucaggcucua

SEQ ID NO: 624554 - RNA, 19 nt, Homo sapiens
  misc_RNA (1)...(19): siRNA sense strand
ucaaggcugucuucaucau

SEQ ID NO: 624555 - RNA, 19 nt, Homo sapiens
  misc_RNA (1)...(19): siRNA sense strand
uggugacgcugauugaaga

SEQ ID NO: 624556 - RNA, 19 nt, Homo sapiens
  misc_RNA (1)...(19): siRNA sense strand
gaccugugccguuucaugu

SEQ ID NO: 624557 - RNA, 19 nt, Homo sapiens
  misc_RNA (1)...(19): siRNA sense strand
cgaugaagacccuguuugu

SEQ ID NO: 624558 - RNA, 19 nt, Homo sapiens
  misc_RNA (1)...(19): siRNA sense strand
uaggaggagucuacuucuu

SEQ ID NO: 624559 - RNA, 19 nt, Homo sapiens
  misc_RNA (1)...(19): siRNA sense strand
agagauccugucuguguua

SEQ ID NO: 624560 - RNA, 19 nt, Homo sapiens
  misc_RNA (1)...(19): siRNA sense strand
uggagacuauuuccgaguu

SEQ ID NO: 624561 - RNA, 19 nt, Homo sapiens
  misc_RNA (1)...(19): siRNA sense strand
gcaaacggacagccugaag

SEQ ID NO: 624562 - RNA, 19 nt, Homo sapiens
  misc_RNA (1)...(19): siRNA sense strand
gggugagacugucaacaag

SEQ ID NO: 624563 - RNA, 19 nt, Homo sapiens
  misc_RNA (1)...(19): siRNA sense strand
guuaggaggagucuacuuc

SEQ ID NO: 624564 - RNA, 19 nt, Homo sapiens
  misc_RNA (1)...(19): siRNA sense strand
caucuucuacuucaacuuc

SEQ ID NO: 624565 - RNA, 19 nt, Homo sapiens
  misc_RNA (1)...(19): siRNA sense strand
ggucuuggccuauauucuc

SEQ ID NO: 624566 - RNA, 19 nt, Homo sapiens
  misc_RNA (1)...(19): siRNA sense strand
aaacggacagccugaagga

SEQ ID NO: 624567 - RNA, 19 nt, Homo sapiens
  misc_RNA (1)...(19): siRNA sense strand
ucgcaggaguaucuuugaa

SEQ ID NO: 624568 - RNA, 19 nt, Homo sapiens
  misc_RNA (1)...(19): siRNA sense strand
ggcagacacuggaagaacu

SEQ ID NO: 624569 - RNA, 19 nt, Homo sapiens
  misc_RNA (1)...(19): siRNA sense strand
gaugaagacccuguuugug

SEQ ID NO: 624570 - RNA, 19 nt, Homo sapiens
  misc_RNA (1)...(19): siRNA sense strand
aggaggagucuacuucuuu

SEQ ID NO: 624571 - RNA, 19 nt, Homo sapiens
  misc_RNA (1)...(19): siRNA sense strand
gaagccguugcucagaaua

SEQ ID NO: 624572 - RNA, 19 nt, Homo sapiens
  misc_RNA (1)...(19): siRNA sense strand
ugaaagccaugcucaaccu

SEQ ID NO: 624573 - RNA, 19 nt, Homo sapiens
  misc_RNA (1)...(19): siRNA sense strand
gagcaagaagcaccucaca

SEQ ID NO: 624574 - RNA, 19 nt, Homo sapiens
  misc_RNA (1)...(19): siRNA sense strand
ucaacuuccuggucuacug

SEQ ID NO: 624575 - RNA, 19 nt, Homo sapiens
  misc_RNA (1)...(19): siRNA sense strand
gccuguacaugaucaucuu

SEQ ID NO: 624576 - RNA, 19 nt, Homo sapiens
  misc_RNA (1)...(19): siRNA sense strand
ccaacaugcucuacuacac

SEQ ID NO: 624577 - RNA, 19 nt, Homo sapiens
  misc_RNA (1)...(19): siRNA sense strand
uugaagccguugcucagaa

SEQ ID NO: 624578 - RNA, 19 nt, Homo sapiens
  misc_RNA (1)...(19): siRNA sense strand
gcauguacaaugagauucu

SEQ ID NO: 624579 - RNA, 19 nt, Homo sapiens
  misc_RNA (1)...(19): siRNA sense strand
aaguuuaucugcgacaguu

SEQ ID NO: 624580 - RNA, 19 nt, Homo sapiens
  misc_RNA (1)...(19): siRNA sense strand
gcucagcccgaggaaguuu

SEQ ID NO: 624581 - RNA, 19 nt, Homo sapiens
  misc_RNA (1)...(19): siRNA sense strand
uaugaucgcaggaguaucu

SEQ ID NO: 624582 - RNA, 19 nt, Homo sapiens
  misc_RNA (1)...(19): siRNA sense strand
ggugagacugucaacaaga

SEQ ID NO: 624583 - RNA, 19 nt, Homo sapiens
  misc_RNA (1)...(19): siRNA sense strand
cagacaacgaguucaaaga

SEQ ID NO: 624584 - RNA, 19 nt, Homo sapiens
  misc_RNA (1)...(19): siRNA sense strand
uugaagacgggaagaauga

SEQ ID NO: 624585 - RNA, 19 nt, Homo sapiens
  misc_RNA (1)...(19): siRNA sense strand
gauugaagacgggaagaau

SEQ ID NO: 624586 - RNA, 19 nt, Homo sapiens
  misc_RNA (1)...(19): siRNA sense strand
agagaccugugccguuuca

SEQ ID NO: 624587 - RNA, 19 nt, Homo sapiens
  misc_RNA (1)...(19): siRNA sense strand
guacuucagccaccucaag

SEQ ID NO: 624588 - RNA, 19 nt, Homo sapiens
  misc_RNA (1)...(19): siRNA sense strand
uggcuugccucccuuuaag

SEQ ID NO: 624589 - RNA, 19 nt, Homo sapiens
  misc_RNA (1)...(19): siRNA sense strand
cgaaguuugugacgagcau

SEQ ID NO: 624590 - RNA, 19 nt, Homo sapiens
  misc_RNA (1)...(19): siRNA sense strand
ugaacuggaccaccuggaa

SEQ ID NO: 624591 - RNA, 19 nt, Homo sapiens
  misc_RNA (1)...(19): siRNA sense strand
gagauccugucuguguuag

SEQ ID NO: 624592 - RNA, 19 nt, Homo sapiens
  misc_RNA (1)...(19): siRNA sense strand
ccgaguuacuggagagauc

SEQ ID NO: 624593 - RNA, 19 nt, Homo sapiens
  misc_RNA (1)...(19): siRNA sense strand
acacggacagcuacuacaa

SEQ ID NO: 624594 - RNA, 19 nt, Homo sapiens
  misc_RNA (1)...(19): siRNA sense strand
gacuaccgguggugcuuca

SEQ ID NO: 624595 - RNA, 19 nt, Homo sapiens
  misc_RNA (1)...(19): siRNA sense strand
caggagagcaagaacaucu

SEQ ID NO: 624596 - RNA, 19 nt, Homo sapiens
  misc_RNA (1)...(19): siRNA sense strand
gauggcuugccucccuuua

SEQ ID NO: 624597 - RNA, 19 nt, Homo sapiens
  misc_RNA (1)...(19): siRNA sense strand
aagaagcaccucacagaca

SEQ ID NO: 624598 - RNA, 19 nt, Homo sapiens
  misc_RNA (1)...(19): siRNA sense strand
cagcuacagugagaugcuu

SEQ ID NO: 624599 - RNA, 19 nt, Homo sapiens
  misc_RNA (1)...(19): siRNA sense strand
ucuacugccuguacaugau

SEQ ID NO: 624600 - RNA, 19 nt, Homo sapiens
  misc_RNA (1)...(19): siRNA sense strand
gaaguuuaucugcgacagu

SEQ ID NO: 624601 - RNA, 19 nt, Homo sapiens
  misc_RNA (1)...(19): siRNA sense strand
caacgugggcaucaucaac

SEQ ID NO: 624602 - RNA, 19 nt, Homo sapiens
  misc_RNA (1)...(19): siRNA sense strand
gagacuauuuccgaguuac

SEQ ID NO: 624603 - RNA, 19 nt, Homo sapiens
  misc_RNA (1)...(19): siRNA sense strand
ucaccauggcugccuacua

SEQ ID NO: 624604 - RNA, 19 nt, Homo sapiens
  misc_RNA (1)...(19): siRNA sense strand
ugggugagacugucaacaa

SEQ ID NO: 624605 - RNA, 19 nt, Homo sapiens
  misc_RNA (1)...(19): siRNA sense strand
ggaccaacaugcucuacua

SEQ ID NO: 624606 - RNA, 19 nt, Homo sapiens
  misc_RNA (1)...(19): siRNA sense strand
guauguggcuuccauggua

SEQ ID NO: 624607 - RNA, 19 nt, Homo sapiens
  misc_RNA (1)...(19): siRNA sense strand
gcaagaagcaccucacaga

SEQ ID NO: 624608 - RNA, 19 nt, Homo sapiens
  misc_RNA (1)...(19): siRNA sense strand
ggagacuauuuccgaguua

SEQ ID NO: 624609 - RNA, 19 nt, Homo sapiens
  misc_RNA (1)...(19): siRNA sense strand
ggagagauccugucugugu

SEQ ID NO: 624610 - RNA, 19 nt, Homo sapiens
  misc_RNA (1)...(19): siRNA sense strand
ugacgagcauguacaauga

SEQ ID NO: 624611 - RNA, 19 nt, Homo sapiens
  misc_RNA (1)...(19): siRNA sense strand
gcacaucgccaucgagaga

SEQ ID NO: 624612 - RNA, 19 nt, Homo sapiens
  misc_RNA (1)...(19): siRNA sense strand
ugagagaccugugccguuu

SEQ ID NO: 624613 - RNA, 19 nt, Homo sapiens
  misc_RNA (1)...(19): siRNA sense strand
uggaggagcucaccaacaa

SEQ ID NO: 624614 - RNA, 19 nt, Homo sapiens
  misc_RNA (1)...(19): siRNA sense strand
gccuggagcuguucaaguu

SEQ ID NO: 624615 - RNA, 19 nt, Homo sapiens
  misc_RNA (1)...(19): siRNA sense strand
caucuaugccgucaugaua

SEQ ID NO: 624616 - RNA, 19 nt, Homo sapiens
  misc_RNA (1)...(19): siRNA sense strand
gagagauccugucuguguu

SEQ ID NO: 624617 - RNA, 19 nt, Homo sapiens
  misc_RNA (1)...(19): siRNA sense strand
gagcauguacaaugagauu

SEQ ID NO: 624618 - RNA, 19 nt, Homo sapiens
  misc_RNA (1)...(19): siRNA sense strand
uccgagggauucaguauuu

SEQ ID NO: 624619 - RNA, 19 nt, Homo sapiens
  misc_RNA (1)...(19): siRNA sense strand
guggacagcuacagugaga

SEQ ID NO: 624620 - RNA, 19 nt, Homo sapiens
  misc_RNA (1)...(19): siRNA sense strand
ucagccaccucaaggagua

SEQ ID NO: 624621 - RNA, 19 nt, Homo sapiens
  misc_RNA (1)...(19): siRNA sense strand
ggacaagugggacagauuc

SEQ ID NO: 624622 - RNA, 19 nt, Homo sapiens
  misc_RNA (1)...(19): siRNA sense strand
gaccuggaguucacugaga

SEQ ID NO: 624623 - RNA, 19 nt, Homo sapiens
  misc_RNA (1)...(19): siRNA sense strand
agaagcaccucacagacaa

SEQ ID NO: 624624 - RNA, 19 nt, Homo sapiens
  misc_RNA (1)...(19): siRNA sense strand
gcaagaacaucuggaagcu

SEQ ID NO: 624625 - RNA, 19 nt, Homo sapiens
  misc_RNA (1)...(19): siRNA sense strand
gcugcuggccuauguaauu

SEQ ID NO: 624626 - RNA, 19 nt, Homo sapiens
  misc_RNA (1)...(19): siRNA sense strand
cuucaaggcugucuucauc

SEQ ID NO: 624627 - RNA, 19 nt, Homo sapiens
  misc_RNA (1)...(19): siRNA sense strand
caccauggcugccuacuac

SEQ ID NO: 624628 - RNA, 19 nt, Homo sapiens
  misc_RNA (1)...(19): siRNA sense strand
ggacagcuacagugagaug

SEQ ID NO: 624629 - RNA, 19 nt, Homo sapiens
  misc_RNA (1)...(19): siRNA sense strand
cccgauagcuccuacaaca

SEQ ID NO: 624630 - RNA, 19 nt, Homo sapiens
  misc_RNA (1)...(19): siRNA sense strand
ugagaacuaugacuucaag

SEQ ID NO: 624631 - RNA, 19 nt, Homo sapiens
  misc_RNA (1)...(19): siRNA sense strand
agaagaugauccugagaga

SEQ ID NO: 624632 - RNA, 19 nt, Homo sapiens
  misc_RNA (1)...(19): siRNA sense strand
ggaggagucuacuucuuuu

SEQ ID NO: 624633 - RNA, 19 nt, Homo sapiens
  misc_RNA (1)...(19): siRNA sense strand
ccugugccguuucauguuu

SEQ ID NO: 624634 - RNA, 19 nt, Homo sapiens
  misc_RNA (1)...(19): siRNA sense strand
gaucgcaggaguaucuuug

SEQ ID NO: 624635 - RNA, 19 nt, Homo sapiens
  misc_RNA (1)...(19): siRNA sense strand
gaggagcucaccaacaaga

SEQ ID NO: 624636 - RNA, 19 nt, Homo sapiens
  misc_RNA (1)...(19): siRNA sense strand
guucaaagacccugagaca

SEQ ID NO: 624637 - RNA, 19 nt, Homo sapiens
  misc_RNA (1)...(19): siRNA sense strand
ucaagcgcaucuucuacuu

SEQ ID NO: 624638 - RNA, 19 nt, Homo sapiens
  misc_RNA (1)...(19): siRNA sense strand
gugagacugucaacaagau

SEQ ID NO: 624639 - RNA, 19 nt, Homo sapiens
  misc_RNA (1)...(19): siRNA sense strand
ccaccugccuggagcuguu

SEQ ID NO: 624640 - RNA, 19 nt, Homo sapiens
  misc_RNA (1)...(19): siRNA sense strand
cuggagagauccugucugu

SEQ ID NO: 624641 - RNA, 19 nt, Homo sapiens
  misc_RNA (1)...(19): siRNA sense strand
gaggcaagugcucgagaua

SEQ ID NO: 624642 - RNA, 19 nt, Homo sapiens
  misc_RNA (1)...(19): siRNA sense strand
gcacaggagagcaagaaca

SEQ ID NO: 624643 - RNA, 19 nt, Homo sapiens
  misc_RNA (1)...(19): siRNA sense strand
aagcgcaucuucuacuuca

SEQ ID NO: 624644 - RNA, 19 nt, Homo sapiens
  misc_RNA (1)...(19): siRNA sense strand
ucacugagaacuaugacuu

SEQ ID NO: 624645 - RNA, 19 nt, Homo sapiens
  misc_RNA (1)...(19): siRNA sense strand
cuacaucgucuucuuguuc

SEQ ID NO: 624646 - RNA, 19 nt, Homo sapiens
  misc_RNA (1)...(19): siRNA sense strand
ccuauguaauucucaccua

SEQ ID NO: 624647 - RNA, 19 nt, Homo sapiens
  misc_RNA (1)...(19): siRNA sense strand
ggcaagugcucgagauagg

SEQ ID NO: 624648 - RNA, 19 nt, Homo sapiens
  misc_RNA (1)...(19): siRNA sense strand
ugaagccguugcucagaau

SEQ ID NO: 624649 - RNA, 19 nt, Homo sapiens
  misc_RNA (1)...(19): siRNA sense strand
agaggacgcugaggucuuc

SEQ ID NO: 624650 - RNA, 19 nt, Homo sapiens
  misc_RNA (1)...(19): siRNA sense strand
ucacagacaacgaguucaa

SEQ ID NO: 624651 - RNA, 19 nt, Homo sapiens
  misc_RNA (1)...(19): siRNA sense strand
gugacgagcauguacaaug

SEQ ID NO: 624652 - RNA, 19 nt, Homo sapiens
  misc_RNA (1)...(19): siRNA sense strand
gcagacacuggaagaacuu

SEQ ID NO: 624653 - RNA, 19 nt, Homo sapiens
  misc_RNA (1)...(19): siRNA sense strand
agaagacccucaggcucua

SEQ ID NO: 624654 - RNA, 19 nt, Homo sapiens
  misc_RNA (1)...(19): siRNA sense strand
ucaaggcugucuucaucau

SEQ ID NO: 624655 - RNA, 19 nt, Homo sapiens
  misc_RNA (1)...(19): siRNA sense strand
uggugacgcugauugaaga

SEQ ID NO: 624656 - RNA, 19 nt, Homo sapiens
  misc_RNA (1)...(19): siRNA sense strand
gaccugugccguuucaugu

SEQ ID NO: 624657 - RNA, 19 nt, Homo sapiens
  misc_RNA (1)...(19): siRNA sense strand
cgaugaagacccuguuugu

SEQ ID NO: 624658 - RNA, 19 nt, Homo sapiens
  misc_RNA (1)...(19): siRNA sense strand
uaggaggagucuacuucuu

SEQ ID NO: 624659 - RNA, 19 nt, Homo sapiens
  misc_RNA (1)...(19): siRNA sense strand
agagauccugucuguguua

SEQ ID NO: 624660 - RNA, 19 nt, Homo sapiens
  misc_RNA (1)...(19): siRNA sense strand
uggagacuauuuccgaguu

SEQ ID NO: 624661 - RNA, 19 nt, Homo sapiens
  misc_RNA (1)...(19): siRNA sense strand
gcaaacggacagccugaag

SEQ ID NO: 624662 - RNA, 19 nt, Homo sapiens
  misc_RNA (1)...(19): siRNA sense strand
gggugagacugucaacaag

SEQ ID NO: 624663 - RNA, 19 nt, Homo sapiens
  misc_RNA (1)...(19): siRNA sense strand
guuaggaggagucuacuuc

SEQ ID NO: 624664 - RNA, 19 nt, Homo sapiens
  misc_RNA (1)...(19): siRNA sense strand
caucuucuacuucaacuuc

SEQ ID NO: 624665 - RNA, 19 nt, Homo sapiens
  misc_RNA (1)...(19): siRNA sense strand
ggucuuggccuauauucuc

SEQ ID NO: 624666 - RNA, 19 nt, Homo sapiens
  misc_RNA (1)...(19): siRNA sense strand
aaacggacagccugaagga

SEQ ID NO: 624667 - RNA, 19 nt, Homo sapiens
  misc_RNA (1)...(19): siRNA sense strand
ucgcaggaguaucuuugaa

SEQ ID NO: 624668 - RNA, 19 nt, Homo sapiens
  misc_RNA (1)...(19): siRNA sense strand
ggcagacacuggaagaacu

SEQ ID NO: 624669 - RNA, 19 nt, Homo sapiens
  misc_RNA (1)...(19): siRNA sense strand
gaugaagacccuguuugug

SEQ ID NO: 624670 - RNA, 19 nt, Homo sapiens
  misc_RNA (1)...(19): siRNA sense strand
aggaggagucuacuucuuu

SEQ ID NO: 624671 - RNA, 19 nt, Homo sapiens
  misc_RNA (1)...(19): siRNA sense strand
gaagccguugcucagaaua

SEQ ID NO: 624672 - RNA, 19 nt, Homo sapiens
  misc_RNA (1)...(19): siRNA sense strand
ugaaagccaugcucaaccu

SEQ ID NO: 624673 - RNA, 19 nt, Homo sapiens
  misc_RNA (1)...(19): siRNA sense strand
gagcaagaagcaccucaca

SEQ ID NO: 624674 - RNA, 19 nt, Homo sapiens
  misc_RNA (1)...(19): siRNA sense strand
ucaacuuccuggucuacug

SEQ ID NO: 624675 - RNA, 19 nt, Homo sapiens
  misc_RNA (1)...(19): siRNA sense strand
gccuguacaugaucaucuu

SEQ ID NO: 624676 - RNA, 19 nt, Homo sapiens
  misc_RNA (1)...(19): siRNA sense strand
ccaacaugcucuacuacac

SEQ ID NO: 624677 - RNA, 19 nt, Homo sapiens
  misc_RNA (1)...(19): siRNA sense strand
uugaagccguugcucagaa

SEQ ID NO: 624678 - RNA, 19 nt, Homo sapiens
  misc_RNA (1)...(19): siRNA sense strand
gcauguacaaugagauucu

SEQ ID NO: 624679 - RNA, 19 nt, Homo sapiens
  misc_RNA (1)...(19): siRNA sense strand
aaguuuaucugcgacaguu

SEQ ID NO: 624680 - RNA, 19 nt, Homo sapiens
  misc_RNA (1)...(19): siRNA sense strand
gcucagcccgaggaaguuu

SEQ ID NO: 624681 - RNA, 19 nt, Homo sapiens
  misc_RNA (1)...(19): siRNA sense strand
uaugaucgcaggaguaucu

SEQ ID NO: 624682 - RNA, 19 nt, Homo sapiens
  misc_RNA (1)...(19): siRNA sense strand
ggugagacugucaacaaga

SEQ ID NO: 624683 - RNA, 19 nt, Homo sapiens
  misc_RNA (1)...(19): siRNA sense strand
cagacaacgaguucaaaga

SEQ ID NO: 624684 - RNA, 19 nt, Homo sapiens
  misc_RNA (1)...(19): siRNA sense strand
uugaagacgggaagaauga

SEQ ID NO: 624685 - RNA, 19 nt, Homo sapiens
  misc_RNA (1)...(19): siRNA sense strand
gauugaagacgggaagaau

SEQ ID NO: 624686 - RNA, 19 nt, Homo sapiens
  misc_RNA (1)...(19): siRNA sense strand
agagaccugugccguuuca

SEQ ID NO: 624687 - RNA, 19 nt, Homo sapiens
  misc_RNA (1)...(19): siRNA sense strand
guacuucagccaccucaag

SEQ ID NO: 624688 - RNA, 19 nt, Homo sapiens
  misc_RNA (1)...(19): siRNA sense strand
uggcuugccucccuuuaag

SEQ ID NO: 624689 - RNA, 19 nt, Homo sapiens
  misc_RNA (1)...(19): siRNA sense strand
cgaaguuugugacgagcau

SEQ ID NO: 624690 - RNA, 19 nt, Homo sapiens
  misc_RNA (1)...(19): siRNA sense strand
ugaacuggaccaccuggaa

SEQ ID NO: 624691 - RNA, 19 nt, Homo sapiens
  misc_RNA (1)...(19): siRNA sense strand
gagauccugucuguguuag

SEQ ID NO: 624692 - RNA, 19 nt, Homo sapiens
  misc_RNA (1)...(19): siRNA sense strand
ccgaguuacuggagagauc

SEQ ID NO: 624693 - RNA, 19 nt, Homo sapiens
  misc_RNA (1)...(19): siRNA sense strand
acacggacagcuacuacaa

SEQ ID NO: 624694 - RNA, 19 nt, Homo sapiens
  misc_RNA (1)...(19): siRNA sense strand
gacuaccgguggugcuuca

SEQ ID NO: 624695 - RNA, 19 nt, Homo sapiens
  misc_RNA (1)...(19): siRNA sense strand
caggagagcaagaacaucu

SEQ ID NO: 624696 - RNA, 19 nt, Homo sapiens
  misc_RNA (1)...(19): siRNA sense strand
gauggcuugccucccuuua

SEQ ID NO: 624697 - RNA, 19 nt, Homo sapiens
  misc_RNA (1)...(19): siRNA sense strand
aagaagcaccucacagaca

SEQ ID NO: 624698 - RNA, 19 nt, Homo sapiens
  misc_RNA (1)...(19): siRNA sense strand
cagcuacagugagaugcuu

SEQ ID NO: 624699 - RNA, 19 nt, Homo sapiens
  misc_RNA (1)...(19): siRNA sense strand
ucuacugccuguacaugau

SEQ ID NO: 624700 - RNA, 19 nt, Homo sapiens
  misc_RNA (1)...(19): siRNA sense strand
gaaguuuaucugcgacagu

SEQ ID NO: 624701 - RNA, 19 nt, Homo sapiens
  misc_RNA (1)...(19): siRNA sense strand
caacgugggcaucaucaac

SEQ ID NO: 624702 - RNA, 19 nt, Homo sapiens
  misc_RNA (1)...(19): siRNA sense strand
gagacuauuuccgaguuac

SEQ ID NO: 624703 - RNA, 19 nt, Homo sapiens
  misc_RNA (1)...(19): siRNA sense strand
ucaccauggcugccuacua

SEQ ID NO: 624704 - RNA, 19 nt, Homo sapiens
  misc_RNA (1)...(19): siRNA sense strand
ugggugagacugucaacaa

SEQ ID NO: 624705 - RNA, 19 nt, Homo sapiens
  misc_RNA (1)...(19): siRNA sense strand
ggaccaacaugcucuacua

SEQ ID NO: 624706 - RNA, 19 nt, Homo sapiens
  misc_RNA (1)...(19): siRNA sense strand
guauguggcuuccauggua

SEQ ID NO: 624707 - RNA, 19 nt, Homo sapiens
  misc_RNA (1)...(19): siRNA sense strand
gcaagaagcaccucacaga

SEQ ID NO: 624708 - RNA, 19 nt, Homo sapiens
  misc_RNA (1)...(19): siRNA sense strand
ggagacuauuuccgaguua

SEQ ID NO: 624709 - RNA, 19 nt, Homo sapiens
  misc_RNA (1)...(19): siRNA sense strand
ggagagauccugucugugu

SEQ ID NO: 624710 - RNA, 19 nt, Homo sapiens
  misc_RNA (1)...(19): siRNA sense strand
ugacgagcauguacaauga

SEQ ID NO: 624711 - RNA, 19 nt, Homo sapiens
  misc_RNA (1)...(19): siRNA sense strand
gcacaucgccaucgagaga

SEQ ID NO: 624712 - RNA, 19 nt, Homo sapiens
  misc_RNA (1)...(19): siRNA sense strand
ugagagaccugugccguuu

SEQ ID NO: 624713 - RNA, 19 nt, Homo sapiens
  misc_RNA (1)...(19): siRNA sense strand
uggaggagcucaccaacaa

SEQ ID NO: 624714 - RNA, 19 nt, Homo sapiens
  misc_RNA (1)...(19): siRNA sense strand
gccuggagcuguucaaguu

SEQ ID NO: 624715 - RNA, 19 nt, Homo sapiens
  misc_RNA (1)...(19): siRNA sense strand
caucuaugccgucaugaua

SEQ ID NO: 624716 - RNA, 19 nt, Homo sapiens
  misc_RNA (1)...(19): siRNA sense strand
gagagauccugucuguguu

SEQ ID NO: 624717 - RNA, 19 nt, Homo sapiens
  misc_RNA (1)...(19): siRNA sense strand
gagcauguacaaugagauu

SEQ ID NO: 624718 - RNA, 19 nt, Homo sapiens
  misc_RNA (1)...(19): siRNA sense strand
uccgagggauucaguauuu

SEQ ID NO: 624719 - RNA, 19 nt, Homo sapiens
  misc_RNA (1)...(19): siRNA sense strand
guggacagcuacagugaga

SEQ ID NO: 624720 - RNA, 19 nt, Homo sapiens
  misc_RNA (1)...(19): siRNA sense strand
ucagccaccucaaggagua

SEQ ID NO: 624721 - RNA, 19 nt, Homo sapiens
  misc_RNA (1)...(19): siRNA sense strand
ggacaagugggacagauuc

SEQ ID NO: 624722 - RNA, 19 nt, Homo sapiens
  misc_RNA (1)...(19): siRNA sense strand
gaccuggaguucacugaga

SEQ ID NO: 624723 - RNA, 19 nt, Homo sapiens
  misc_RNA (1)...(19): siRNA sense strand
agaagcaccucacagacaa

SEQ ID NO: 624724 - RNA, 19 nt, Homo sapiens
  misc_RNA (1)...(19): siRNA sense strand
gcaagaacaucuggaagcu

SEQ ID NO: 624725 - RNA, 19 nt, Homo sapiens
  misc_RNA (1)...(19): siRNA sense strand
gcugcuggccuauguaauu

SEQ ID NO: 624726 - RNA, 19 nt, Homo sapiens
  misc_RNA (1)...(19): siRNA sense strand
cuucaaggcugucuucauc

SEQ ID NO: 624727 - RNA, 19 nt, Homo sapiens
  misc_RNA (1)...(19): siRNA sense strand
caccauggcugccuacuac

SEQ ID NO: 624728 - RNA, 19 nt, Homo sapiens
  misc_RNA (1)...(19): siRNA sense strand
ggacagcuacagugagaug

SEQ ID NO: 624729 - RNA, 19 nt, Homo sapiens
  misc_RNA (1)...(19): siRNA sense strand
cccgauagcuccuacaaca

SEQ ID NO: 624730 - RNA, 19 nt, Homo sapiens
  misc_RNA (1)...(19): siRNA sense strand
ugagaacuaugacuucaag

SEQ ID NO: 624731 - RNA, 19 nt, Homo sapiens
  misc_RNA (1)...(19): siRNA sense strand
agaagaugauccugagaga

SEQ ID NO: 624732 - RNA, 19 nt, Homo sapiens
  misc_RNA (1)...(19): siRNA sense strand
ggaggagucuacuucuuuu

SEQ ID NO: 624733 - RNA, 19 nt, Homo sapiens
  misc_RNA (1)...(19): siRNA sense strand
ccugugccguuucauguuu

SEQ ID NO: 624734 - RNA, 19 nt, Homo sapiens
  misc_RNA (1)...(19): siRNA sense strand
gaucgcaggaguaucuuug

SEQ ID NO: 624735 - RNA, 19 nt, Homo sapiens
  misc_RNA (1)...(19): siRNA sense strand
gaggagcucaccaacaaga

SEQ ID NO: 624736 - RNA, 19 nt, Homo sapiens
  misc_RNA (1)...(19): siRNA sense strand
guucaaagacccugagaca

SEQ ID NO: 624737 - RNA, 19 nt, Homo sapiens
  misc_RNA (1)...(19): siRNA sense strand
ucaagcgcaucuucuacuu

SEQ ID NO: 624738 - RNA, 19 nt, Homo sapiens
  misc_RNA (1)...(19): siRNA sense strand
gugagacugucaacaagau

SEQ ID NO: 624739 - RNA, 19 nt, Homo sapiens
  misc_RNA (1)...(19): siRNA sense strand
ccaccugccuggagcuguu

SEQ ID NO: 624740 - RNA, 19 nt, Homo sapiens
  misc_RNA (1)...(19): siRNA sense strand
cuggagagauccugucugu

SEQ ID NO: 624741 - RNA, 19 nt, Homo sapiens
  misc_RNA (1)...(19): siRNA sense strand
gaggcaagugcucgagaua

SEQ ID NO: 624742 - RNA, 19 nt, Homo sapiens
  misc_RNA (1)...(19): siRNA sense strand
gcacaggagagcaagaaca

SEQ ID NO: 624743 - RNA, 19 nt, Homo sapiens
  misc_RNA (1)...(19): siRNA sense strand
aagcgcaucuucuacuuca

SEQ ID NO: 624744 - RNA, 19 nt, Homo sapiens
  misc_RNA (1)...(19): siRNA sense strand
ucacugagaacuaugacuu

SEQ ID NO: 624745 - RNA, 19 nt, Homo sapiens
  misc_RNA (1)...(19): siRNA sense strand
cuacaucgucuucuuguuc

SEQ ID NO: 624746 - RNA, 19 nt, Homo sapiens
  misc_RNA (1)...(19): siRNA sense strand
ccuauguaauucucaccua

SEQ ID NO: 624747 - RNA, 19 nt, Homo sapiens
  misc_RNA (1)...(19): siRNA sense strand
ggcaagugcucgagauagg

SEQ ID NO: 624748 - RNA, 19 nt, Homo sapiens
  misc_RNA (1)...(19): siRNA sense strand
ugaagccguugcucagaau

SEQ ID NO: 624749 - RNA, 19 nt, Homo sapiens
  misc_RNA (1)...(19): siRNA sense strand
agaggacgcugaggucuuc

SEQ ID NO: 624750 - RNA, 19 nt, Homo sapiens
  misc_RNA (1)...(19): siRNA sense strand
ucacagacaacgaguucaa

SEQ ID NO: 624751 - RNA, 19 nt, Homo sapiens
  misc_RNA (1)...(19): siRNA sense strand
gugacgagcauguacaaug

SEQ ID NO: 624752 - RNA, 19 nt, Homo sapiens
  misc_RNA (1)...(19): siRNA sense strand
gcagacacuggaagaacuu

SEQ ID NO: 624753 - RNA, 19 nt, Homo sapiens
  misc_RNA (1)...(19): siRNA sense strand
agaagacccucaggcucua

SEQ ID NO: 624754 - RNA, 19 nt, Homo sapiens
  misc_RNA (1)...(19): siRNA sense strand
ucaaggcugucuucaucau

SEQ ID NO: 624755 - RNA, 19 nt, Homo sapiens
  misc_RNA (1)...(19): siRNA sense strand
uggugacgcugauugaaga

SEQ ID NO: 624756 - RNA, 19 nt, Homo sapiens
  misc_RNA (1)...(19): siRNA sense strand
gaccugugccguuucaugu

SEQ ID NO: 624757 - RNA, 19 nt, Homo sapiens
  misc_RNA (1)...(19): siRNA sense strand
cgaugaagacccuguuugu

SEQ ID NO: 624758 - RNA, 19 nt, Homo sapiens
  misc_RNA (1)...(19): siRNA sense strand
uaggaggagucuacuucuu

SEQ ID NO: 624759 - RNA, 19 nt, Homo sapiens
  misc_RNA (1)...(19): siRNA sense strand
agagauccugucuguguua

SEQ ID NO: 624760 - RNA, 19 nt, Homo sapiens
  misc_RNA (1)...(19): siRNA sense strand
uggagacuauuuccgaguu

SEQ ID NO: 624761 - RNA, 19 nt, Homo sapiens
  misc_RNA (1)...(19): siRNA sense strand
gcaaacggacagccugaag

SEQ ID NO: 624762 - RNA, 19 nt, Homo sapiens
  misc_RNA (1)...(19): siRNA sense strand
gggugagacugucaacaag

SEQ ID NO: 624763 - RNA, 19 nt, Homo sapiens
  misc_RNA (1)...(19): siRNA sense strand
guuaggaggagucuacuuc

SEQ ID NO: 624764 - RNA, 19 nt, Homo sapiens
  misc_RNA (1)...(19): siRNA sense strand
caucuucuacuucaacuuc

SEQ ID NO: 624765 - RNA, 19 nt, Homo sapiens
  misc_RNA (1)...(19): siRNA sense strand
ggucuuggccuauauucuc

SEQ ID NO: 624766 - RNA, 19 nt, Homo sapiens
  misc_RNA (1)...(19): siRNA sense strand
aaacggacagccugaagga

SEQ ID NO: 624767 - RNA, 19 nt, Homo sapiens
  misc_RNA (1)...(19): siRNA sense strand
ucgcaggaguaucuuugaa

SEQ ID NO: 624768 - RNA, 19 nt, Homo sapiens
  misc_RNA (1)...(19): siRNA sense strand
ggcagacacuggaagaacu

SEQ ID NO: 624769 - RNA, 19 nt, Homo sapiens
  misc_RNA (1)...(19): siRNA sense strand
gaugaagacccuguuugug

SEQ ID NO: 624770 - RNA, 19 nt, Homo sapiens
  misc_RNA (1)...(19): siRNA sense strand
aggaggagucuacuucuuu

SEQ ID NO: 624771 - RNA, 19 nt, Homo sapiens
  misc_RNA (1)...(19): siRNA sense strand
gaagccguugcucagaaua

SEQ ID NO: 624772 - RNA, 19 nt, Homo sapiens
  misc_RNA (1)...(19): siRNA sense strand
ugaaagccaugcucaaccu

SEQ ID NO: 624773 - RNA, 19 nt, Homo sapiens
  misc_RNA (1)...(19): siRNA sense strand
gagcaagaagcaccucaca

SEQ ID NO: 624774 - RNA, 19 nt, Homo sapiens
  misc_RNA (1)...(19): siRNA sense strand
ucaacuuccuggucuacug

SEQ ID NO: 624775 - RNA, 19 nt, Homo sapiens
  misc_RNA (1)...(19): siRNA sense strand
gccuguacaugaucaucuu

SEQ ID NO: 624776 - RNA, 19 nt, Homo sapiens
  misc_RNA (1)...(19): siRNA sense strand
ccaacaugcucuacuacac

SEQ ID NO: 624777 - RNA, 19 nt, Homo sapiens
  misc_RNA (1)...(19): siRNA sense strand
uugaagccguugcucagaa

SEQ ID NO: 624778 - RNA, 19 nt, Homo sapiens
  misc_RNA (1)...(19): siRNA sense strand
gcauguacaaugagauucu

SEQ ID NO: 624779 - RNA, 19 nt, Homo sapiens
  misc_RNA (1)...(19): siRNA sense strand
aaguuuaucugcgacaguu

SEQ ID NO: 624780 - RNA, 19 nt, Homo sapiens
  misc_RNA (1)...(19): siRNA sense strand
gcucagcccgaggaaguuu

SEQ ID NO: 624781 - RNA, 19 nt, Homo sapiens
  misc_RNA (1)...(19): siRNA sense strand
uaugaucgcaggaguaucu

SEQ ID NO: 624782 - RNA, 19 nt, Homo sapiens
  misc_RNA (1)...(19): siRNA sense strand
ggugagacugucaacaaga

SEQ ID NO: 624783 - RNA, 19 nt, Homo sapiens
  misc_RNA (1)...(19): siRNA sense strand
cagacaacgaguucaaaga

SEQ ID NO: 624784 - RNA, 19 nt, Homo sapiens
  misc_RNA (1)...(19): siRNA sense strand
uugaagacgggaagaauga

SEQ ID NO: 624785 - RNA, 19 nt, Homo sapiens
  misc_RNA (1)...(19): siRNA sense strand
gauugaagacgggaagaau

SEQ ID NO: 624786 - RNA, 19 nt, Homo sapiens
  misc_RNA (1)...(19): siRNA sense strand
agagaccugugccguuuca

SEQ ID NO: 624787 - RNA, 19 nt, Homo sapiens
  misc_RNA (1)...(19): siRNA sense strand
guacuucagccaccucaag

SEQ ID NO: 624788 - RNA, 19 nt, Homo sapiens
  misc_RNA (1)...(19): siRNA sense strand
uggcuugccucccuuuaag

SEQ ID NO: 624789 - RNA, 19 nt, Homo sapiens
  misc_RNA (1)...(19): siRNA sense strand
cgaaguuugugacgagcau

SEQ ID NO: 624790 - RNA, 19 nt, Homo sapiens
  misc_RNA (1)...(19): siRNA sense strand
ugaacuggaccaccuggaa

SEQ ID NO: 624791 - RNA, 19 nt, Homo sapiens
  misc_RNA (1)...(19): siRNA sense strand
gagauccugucuguguuag

SEQ ID NO: 624792 - RNA, 19 nt, Homo sapiens
  misc_RNA (1)...(19): siRNA sense strand
ccgaguuacuggagagauc

SEQ ID NO: 624793 - RNA, 19 nt, Homo sapiens
  misc_RNA (1)...(19): siRNA sense strand
acacggacagcuacuacaa

SEQ ID NO: 624794 - RNA, 19 nt, Homo sapiens
  misc_RNA (1)...(19): siRNA sense strand
gacuaccgguggugcuuca

SEQ ID NO: 624795 - RNA, 19 nt, Homo sapiens
  misc_RNA (1)...(19): siRNA sense strand
caggagagcaagaacaucu

SEQ ID NO: 624796 - RNA, 19 nt, Homo sapiens
  misc_RNA (1)...(19): siRNA sense strand
gauggcuugccucccuuua

SEQ ID NO: 624797 - RNA, 19 nt, Homo sapiens
  misc_RNA (1)...(19): siRNA sense strand
aagaagcaccucacagaca

SEQ ID NO: 624798 - RNA, 19 nt, Homo sapiens
  misc_RNA (1)...(19): siRNA sense strand
cagcuacagugagaugcuu

SEQ ID NO: 624799 - RNA, 19 nt, Homo sapiens
  misc_RNA (1)...(19): siRNA sense strand
ucuacugccuguacaugau

SEQ ID NO: 624800 - RNA, 19 nt, Homo sapiens
  misc_RNA (1)...(19): siRNA sense strand
gaaguuuaucugcgacagu

SEQ ID NO: 624801 - RNA, 19 nt, Homo sapiens
  misc_RNA (1)...(19): siRNA sense strand
caacgugggcaucaucaac

SEQ ID NO: 624802 - RNA, 19 nt, Homo sapiens
  misc_RNA (1)...(19): siRNA sense strand
gagacuauuuccgaguuac

SEQ ID NO: 624803 - RNA, 19 nt, Homo sapiens
  misc_RNA (1)...(19): siRNA sense strand
ucaccauggcugccuacua

SEQ ID NO: 624804 - RNA, 19 nt, Homo sapiens
  misc_RNA (1)...(19): siRNA sense strand
ugggugagacugucaacaa

SEQ ID NO: 624805 - RNA, 19 nt, Homo sapiens
  misc_RNA (1)...(19): siRNA sense strand
ggaccaacaugcucuacua

SEQ ID NO: 624806 - RNA, 19 nt, Homo sapiens
  misc_RNA (1)...(19): siRNA sense strand
guauguggcuuccauggua

SEQ ID NO: 624807 - RNA, 19 nt, Homo sapiens
  misc_RNA (1)...(19): siRNA sense strand
gcaagaagcaccucacaga

SEQ ID NO: 624808 - RNA, 19 nt, Homo sapiens
  misc_RNA (1)...(19): siRNA sense strand
ggagacuauuuccgaguua

SEQ ID NO: 624809 - RNA, 19 nt, Homo sapiens
  misc_RNA (1)...(19): siRNA sense strand
ggagagauccugucugugu

SEQ ID NO: 624810 - RNA, 19 nt, Homo sapiens
  misc_RNA (1)...(19): siRNA sense strand
ugacgagcauguacaauga

SEQ ID NO: 624811 - RNA, 19 nt, Homo sapiens
  misc_RNA (1)...(19): siRNA sense strand
gcacaucgccaucgagaga

SEQ ID NO: 624812 - RNA, 19 nt, Homo sapiens
  misc_RNA (1)...(19): siRNA sense strand
ugagagaccugugccguuu

SEQ ID NO: 624813 - RNA, 19 nt, Homo sapiens
  misc_RNA (1)...(19): siRNA sense strand
uggaggagcucaccaacaa

SEQ ID NO: 624814 - RNA, 19 nt, Homo sapiens
  misc_RNA (1)...(19): siRNA sense strand
gccuggagcuguucaaguu

SEQ ID NO: 624815 - RNA, 19 nt, Homo sapiens
  misc_RNA (1)...(19): siRNA sense strand
caucuaugccgucaugaua

SEQ ID NO: 624816 - RNA, 19 nt, Homo sapiens
  misc_RNA (1)...(19): siRNA sense strand
gagagauccugucuguguu

SEQ ID NO: 624817 - RNA, 19 nt, Homo sapiens
  misc_RNA (1)...(19): siRNA sense strand
gagcauguacaaugagauu

SEQ ID NO: 624818 - RNA, 19 nt, Homo sapiens
  misc_RNA (1)...(19): siRNA sense strand
uccgagggauucaguauuu

SEQ ID NO: 624819 - RNA, 19 nt, Homo sapiens
  misc_RNA (1)...(19): siRNA sense strand
guggacagcuacagugaga

SEQ ID NO: 624820 - RNA, 19 nt, Homo sapiens
  misc_RNA (1)...(19): siRNA sense strand
ucagccaccucaaggagua

SEQ ID NO: 624821 - RNA, 19 nt, Homo sapiens
  misc_RNA (1)...(19): siRNA sense strand
ggacaagugggacagauuc

SEQ ID NO: 624822 - RNA, 19 nt, Homo sapiens
  misc_RNA (1)...(19): siRNA sense strand
gaccuggaguucacugaga

SEQ ID NO: 624823 - RNA, 19 nt, Homo sapiens
  misc_RNA (1)...(19): siRNA sense strand
agaagcaccucacagacaa

SEQ ID NO: 624824 - RNA, 19 nt, Homo sapiens
  misc_RNA (1)...(19): siRNA sense strand
gcaagaacaucuggaagcu

SEQ ID NO: 624825 - RNA, 19 nt, Homo sapiens
  misc_RNA (1)...(19): siRNA sense strand
gcugcuggccuauguaauu

SEQ ID NO: 624826 - RNA, 19 nt, Homo sapiens
  misc_RNA (1)...(19): siRNA sense strand
cuucaaggcugucuucauc

SEQ ID NO: 624827 - RNA, 19 nt, Homo sapiens
  misc_RNA (1)...(19): siRNA sense strand
caccauggcugccuacuac

SEQ ID NO: 624828 - RNA, 19 nt, Homo sapiens
  misc_RNA (1)...(19): siRNA sense strand
ggacagcuacagugagaug

SEQ ID NO: 624829 - RNA, 19 nt, Homo sapiens
  misc_RNA (1)...(19): siRNA sense strand
cccgauagcuccuacaaca

SEQ ID NO: 624830 - RNA, 19 nt, Homo sapiens
  misc_RNA (1)...(19): siRNA sense strand
ugagaacuaugacuucaag

SEQ ID NO: 624831 - RNA, 19 nt, Homo sapiens
  misc_RNA (1)...(19): siRNA sense strand
agaagaugauccugagaga

SEQ ID NO: 624832 - RNA, 19 nt, Homo sapiens
  misc_RNA (1)...(19): siRNA sense strand
ggaggagucuacuucuuuu

SEQ ID NO: 624833 - RNA, 19 nt, Homo sapiens
  misc_RNA (1)...(19): siRNA sense strand
ccugugccguuucauguuu

SEQ ID NO: 624834 - RNA, 19 nt, Homo sapiens
  misc_RNA (1)...(19): siRNA sense strand
gaucgcaggaguaucuuug

SEQ ID NO: 624835 - RNA, 19 nt, Homo sapiens
  misc_RNA (1)...(19): siRNA sense strand
gaggagcucaccaacaaga

SEQ ID NO: 624836 - RNA, 19 nt, Homo sapiens
  misc_RNA (1)...(19): siRNA sense strand
guucaaagacccugagaca

SEQ ID NO: 624837 - RNA, 19 nt, Homo sapiens
  misc_RNA (1)...(19): siRNA sense strand
ucaagcgcaucuucuacuu

SEQ ID NO: 624838 - RNA, 19 nt, Homo sapiens
  misc_RNA (1)...(19): siRNA sense strand
gugagacugucaacaagau

SEQ ID NO: 624839 - RNA, 19 nt, Homo sapiens
  misc_RNA (1)...(19): siRNA sense strand
ccaccugccuggagcuguu

SEQ ID NO: 624840 - RNA, 19 nt, Homo sapiens
  misc_RNA (1)...(19): siRNA sense strand
cuggagagauccugucugu

SEQ ID NO: 624841 - RNA, 19 nt, Homo sapiens
  misc_RNA (1)...(19): siRNA sense strand
gaggcaagugcucgagaua

SEQ ID NO: 624842 - RNA, 19 nt, Homo sapiens
  misc_RNA (1)...(19): siRNA sense strand
gcacaggagagcaagaaca

SEQ ID NO: 624843 - RNA, 19 nt, Homo sapiens
  misc_RNA (1)...(19): siRNA sense strand
aagcgcaucuucuacuuca

SEQ ID NO: 624844 - RNA, 19 nt, Homo sapiens
  misc_RNA (1)...(19): siRNA sense strand
ucacugagaacuaugacuu

SEQ ID NO: 624845 - RNA, 19 nt, Homo sapiens
  misc_RNA (1)...(19): siRNA sense strand
cuacaucgucuucuuguuc

SEQ ID NO: 624846 - RNA, 19 nt, Homo sapiens
  misc_RNA (1)...(19): siRNA sense strand
ccuauguaauucucaccua

SEQ ID NO: 624847 - RNA, 19 nt, Homo sapiens
  misc_RNA (1)...(19): siRNA sense strand
ggcaagugcucgagauagg

SEQ ID NO: 624848 - RNA, 19 nt, Homo sapiens
  misc_RNA (1)...(19): siRNA sense strand
ugaagccguugcucagaau

SEQ ID NO: 624849 - RNA, 19 nt, Homo sapiens
  misc_RNA (1)...(19): siRNA sense strand
agaggacgcugaggucuuc

SEQ ID NO: 624850 - RNA, 19 nt, Homo sapiens
  misc_RNA (1)...(19): siRNA sense strand
ucacagacaacgaguucaa

SEQ ID NO: 624851 - RNA, 19 nt, Homo sapiens
  misc_RNA (1)...(19): siRNA sense strand
gugacgagcauguacaaug

SEQ ID NO: 624852 - RNA, 19 nt, Homo sapiens
  misc_RNA (1)...(19): siRNA sense strand
gcagacacuggaagaacuu

SEQ ID NO: 624853 - RNA, 19 nt, Homo sapiens
  misc_RNA (1)...(19): siRNA sense strand
agaagacccucaggcucua

SEQ ID NO: 624854 - RNA, 19 nt, Homo sapiens
  misc_RNA (1)...(19): siRNA sense strand
ucaaggcugucuucaucau

SEQ ID NO: 624855 - RNA, 19 nt, Homo sapiens
  misc_RNA (1)...(19): siRNA sense strand
uggugacgcugauugaaga

SEQ ID NO: 624856 - RNA, 19 nt, Homo sapiens
  misc_RNA (1)...(19): siRNA sense strand
gaccugugccguuucaugu

SEQ ID NO: 624857 - RNA, 19 nt, Homo sapiens
  misc_RNA (1)...(19): siRNA sense strand
cgaugaagacccuguuugu

SEQ ID NO: 624858 - RNA, 19 nt, Homo sapiens
  misc_RNA (1)...(19): siRNA sense strand
uaggaggagucuacuucuu

SEQ ID NO: 624859 - RNA, 19 nt, Homo sapiens
  misc_RNA (1)...(19): siRNA sense strand
agagauccugucuguguua

SEQ ID NO: 624860 - RNA, 19 nt, Homo sapiens
  misc_RNA (1)...(19): siRNA sense strand
uggagacuauuuccgaguu

SEQ ID NO: 624861 - RNA, 19 nt, Homo sapiens
  misc_RNA (1)...(19): siRNA sense strand
gcaaacggacagccugaag

SEQ ID NO: 624862 - RNA, 19 nt, Homo sapiens
  misc_RNA (1)...(19): siRNA sense strand
gggugagacugucaacaag

SEQ ID NO: 624863 - RNA, 19 nt, Homo sapiens
  misc_RNA (1)...(19): siRNA sense strand
guuaggaggagucuacuuc

SEQ ID NO: 624864 - RNA, 19 nt, Homo sapiens
  misc_RNA (1)...(19): siRNA sense strand
caucuucuacuucaacuuc

SEQ ID NO: 624865 - RNA, 19 nt, Homo sapiens
  misc_RNA (1)...(19): siRNA sense strand
ggucuuggccuauauucuc

SEQ ID NO: 624866 - RNA, 19 nt, Homo sapiens
  misc_RNA (1)...(19): siRNA sense strand
aaacggacagccugaagga

SEQ ID NO: 624867 - RNA, 19 nt, Homo sapiens
  misc_RNA (1)...(19): siRNA sense strand
ucgcaggaguaucuuugaa

SEQ ID NO: 624868 - RNA, 19 nt, Homo sapiens
  misc_RNA (1)...(19): siRNA sense strand
ggcagacacuggaagaacu

SEQ ID NO: 624869 - RNA, 19 nt, Homo sapiens
  misc_RNA (1)...(19): siRNA sense strand
gaugaagacccuguuugug

SEQ ID NO: 624870 - RNA, 19 nt, Homo sapiens
  misc_RNA (1)...(19): siRNA sense strand
aggaggagucuacuucuuu

SEQ ID NO: 624871 - RNA, 19 nt, Homo sapiens
  misc_RNA (1)...(19): siRNA sense strand
gaagccguugcucagaaua

SEQ ID NO: 624872 - RNA, 19 nt, Homo sapiens
  misc_RNA (1)...(19): siRNA sense strand
ugaaagccaugcucaaccu

SEQ ID NO: 624873 - RNA, 19 nt, Homo sapiens
  misc_RNA (1)...(19): siRNA sense strand
gagcaagaagcaccucaca

SEQ ID NO: 624874 - RNA, 19 nt, Homo sapiens
  misc_RNA (1)...(19): siRNA sense strand
ucaacuuccuggucuacug

SEQ ID NO: 624875 - RNA, 19 nt, Homo sapiens
  misc_RNA (1)...(19): siRNA sense strand
gccuguacaugaucaucuu

SEQ ID NO: 624876 - RNA, 19 nt, Homo sapiens
  misc_RNA (1)...(19): siRNA sense strand
ccaacaugcucuacuacac

SEQ ID NO: 624877 - RNA, 19 nt, Homo sapiens
  misc_RNA (1)...(19): siRNA sense strand
uugaagccguugcucagaa

SEQ ID NO: 624878 - RNA, 19 nt, Homo sapiens
  misc_RNA (1)...(19): siRNA sense strand
gcauguacaaugagauucu

SEQ ID NO: 624879 - RNA, 19 nt, Homo sapiens
  misc_RNA (1)...(19): siRNA sense strand
aaguuuaucugcgacaguu

SEQ ID NO: 624880 - RNA, 19 nt, Homo sapiens
  misc_RNA (1)...(19): siRNA sense strand
gcucagcccgaggaaguuu

SEQ ID NO: 624881 - RNA, 19 nt, Homo sapiens
  misc_RNA (1)...(19): siRNA sense strand
uaugaucgcaggaguaucu

SEQ ID NO: 624882 - RNA, 19 nt, Homo sapiens
  misc_RNA (1)...(19): siRNA sense strand
ggugagacugucaacaaga

SEQ ID NO: 624883 - RNA, 19 nt, Homo sapiens
  misc_RNA (1)...(19): siRNA sense strand
cagacaacgaguucaaaga

SEQ ID NO: 624884 - RNA, 19 nt, Homo sapiens
  misc_RNA (1)...(19): siRNA sense strand
uugaagacgggaagaauga

SEQ ID NO: 624885 - RNA, 19 nt, Homo sapiens
  misc_RNA (1)...(19): siRNA sense strand
gauugaagacgggaagaau

SEQ ID NO: 624886 - RNA, 19 nt, Homo sapiens
  misc_RNA (1)...(19): siRNA sense strand
agagaccugugccguuuca

SEQ ID NO: 624887 - RNA, 19 nt, Homo sapiens
  misc_RNA (1)...(19): siRNA sense strand
guacuucagccaccucaag

SEQ ID NO: 624888 - RNA, 19 nt, Homo sapiens
  misc_RNA (1)...(19): siRNA sense strand
uggcuugccucccuuuaag

SEQ ID NO: 624889 - RNA, 19 nt, Homo sapiens
  misc_RNA (1)...(19): siRNA sense strand
cgaaguuugugacgagcau

SEQ ID NO: 624890 - RNA, 19 nt, Homo sapiens
  misc_RNA (1)...(19): siRNA sense strand
ugaacuggaccaccuggaa

SEQ ID NO: 624891 - RNA, 19 nt, Homo sapiens
  misc_RNA (1)...(19): siRNA sense strand
gagauccugucuguguuag

SEQ ID NO: 624892 - RNA, 19 nt, Homo sapiens
  misc_RNA (1)...(19): siRNA sense strand
ccgaguuacuggagagauc

SEQ ID NO: 624893 - RNA, 19 nt, Homo sapiens
  misc_RNA (1)...(19): siRNA sense strand
acacggacagcuacuacaa

SEQ ID NO: 624894 - RNA, 19 nt, Homo sapiens
  misc_RNA (1)...(19): siRNA sense strand
gacuaccgguggugcuuca

SEQ ID NO: 624895 - RNA, 19 nt, Homo sapiens
  misc_RNA (1)...(19): siRNA sense strand
caggagagcaagaacaucu

SEQ ID NO: 624896 - RNA, 19 nt, Homo sapiens
  misc_RNA (1)...(19): siRNA sense strand
gauggcuugccucccuuua

SEQ ID NO: 624897 - RNA, 19 nt, Homo sapiens
  misc_RNA (1)...(19): siRNA sense strand
aagaagcaccucacagaca

SEQ ID NO: 624898 - RNA, 19 nt, Homo sapiens
  misc_RNA (1)...(19): siRNA sense strand
cagcuacagugagaugcuu

SEQ ID NO: 624899 - RNA, 19 nt, Homo sapiens
  misc_RNA (1)...(19): siRNA sense strand
ucuacugccuguacaugau

SEQ ID NO: 624900 - RNA, 19 nt, Homo sapiens
  misc_RNA (1)...(19): siRNA sense strand
gaaguuuaucugcgacagu

SEQ ID NO: 624901 - RNA, 19 nt, Homo sapiens
  misc_RNA (1)...(19): siRNA sense strand
caacgugggcaucaucaac

SEQ ID NO: 624902 - RNA, 19 nt, Homo sapiens
  misc_RNA (1)...(19): siRNA sense strand
gagacuauuuccgaguuac

SEQ ID NO: 624903 - RNA, 19 nt, Homo sapiens
  misc_RNA (1)...(19): siRNA sense strand
ucaccauggcugccuacua

SEQ ID NO: 624904 - RNA, 19 nt, Homo sapiens
  misc_RNA (1)...(19): siRNA sense strand
ugggugagacugucaacaa

SEQ ID NO: 624905 - RNA, 19 nt, Homo sapiens
  misc_RNA (1)...(19): siRNA sense strand
ggaccaacaugcucuacua

SEQ ID NO: 624906 - RNA, 19 nt, Homo sapiens
  misc_RNA (1)...(19): siRNA sense strand
guauguggcuuccauggua

SEQ ID NO: 624907 - RNA, 19 nt, Homo sapiens
  misc_RNA (1)...(19): siRNA sense strand
gcaagaagcaccucacaga

SEQ ID NO: 624908 - RNA, 19 nt, Homo sapiens
  misc_RNA (1)...(19): siRNA sense strand
ggagacuauuuccgaguua

SEQ ID NO: 624909 - RNA, 19 nt, Homo sapiens
  misc_RNA (1)...(19): siRNA sense strand
ggagagauccugucugugu

SEQ ID NO: 624910 - RNA, 19 nt, Homo sapiens
  misc_RNA (1)...(19): siRNA sense strand
ugacgagcauguacaauga

SEQ ID NO: 624911 - RNA, 19 nt, Homo sapiens
  misc_RNA (1)...(19): siRNA sense strand
gcacaucgccaucgagaga

SEQ ID NO: 624912 - RNA, 19 nt, Homo sapiens
  misc_RNA (1)...(19): siRNA sense strand
ugagagaccugugccguuu

SEQ ID NO: 624913 - RNA, 19 nt, Homo sapiens
  misc_RNA (1)...(19): siRNA sense strand
uggaggagcucaccaacaa

SEQ ID NO: 624914 - RNA, 19 nt, Homo sapiens
  misc_RNA (1)...(19): siRNA sense strand
gccuggagcuguucaaguu

SEQ ID NO: 624915 - RNA, 19 nt, Homo sapiens
  misc_RNA (1)...(19): siRNA sense strand
caucuaugccgucaugaua

SEQ ID NO: 624916 - RNA, 19 nt, Homo sapiens
  misc_RNA (1)...(19): siRNA sense strand
gagagauccugucuguguu

SEQ ID NO: 624917 - RNA, 19 nt, Homo sapiens
  misc_RNA (1)...(19): siRNA sense strand
gagcauguacaaugagauu

SEQ ID NO: 624918 - RNA, 19 nt, Homo sapiens
  misc_RNA (1)...(19): siRNA sense strand
uccgagggauucaguauuu

SEQ ID NO: 624919 - RNA, 19 nt, Homo sapiens
  misc_RNA (1)...(19): siRNA sense strand
guggacagcuacagugaga

SEQ ID NO: 624920 - RNA, 19 nt, Homo sapiens
  misc_RNA (1)...(19): siRNA sense strand
ucagccaccucaaggagua

SEQ ID NO: 624921 - RNA, 19 nt, Homo sapiens
  misc_RNA (1)...(19): siRNA sense strand
ggacaagugggacagauuc

SEQ ID NO: 624922 - RNA, 19 nt, Homo sapiens
  misc_RNA (1)...(19): siRNA sense strand
gaccuggaguucacugaga

SEQ ID NO: 624923 - RNA, 19 nt, Homo sapiens
  misc_RNA (1)...(19): siRNA sense strand
agaagcaccucacagacaa

SEQ ID NO: 624924 - RNA, 19 nt, Homo sapiens
  misc_RNA (1)...(19): siRNA sense strand
gcaagaacaucuggaagcu

SEQ ID NO: 624925 - RNA, 19 nt, Homo sapiens
  misc_RNA (1)...(19): siRNA sense strand
gcugcuggccuauguaauu

SEQ ID NO: 624926 - RNA, 19 nt, Homo sapiens
  misc_RNA (1)...(19): siRNA sense strand
cuucaaggcugucuucauc

SEQ ID NO: 624927 - RNA, 19 nt, Homo sapiens
  misc_RNA (1)...(19): siRNA sense strand
caccauggcugccuacuac

SEQ ID NO: 624928 - RNA, 19 nt, Homo sapiens
  misc_RNA (1)...(19): siRNA sense strand
ggacagcuacagugagaug

SEQ ID NO: 624929 - RNA, 19 nt, Homo sapiens
  misc_RNA (1)...(19): siRNA sense strand
cccgauagcuccuacaaca

SEQ ID NO: 624930 - RNA, 19 nt, Homo sapiens
  misc_RNA (1)...(19): siRNA sense strand
ugagaacuaugacuucaag

SEQ ID NO: 624931 - RNA, 19 nt, Homo sapiens
  misc_RNA (1)...(19): siRNA sense strand
agaagaugauccugagaga

SEQ ID NO: 624932 - RNA, 19 nt, Homo sapiens
  misc_RNA (1)...(19): siRNA sense strand
ggaggagucuacuucuuuu

SEQ ID NO: 624933 - RNA, 19 nt, Homo sapiens
  misc_RNA (1)...(19): siRNA sense strand
ccugugccguuucauguuu

SEQ ID NO: 624934 - RNA, 19 nt, Homo sapiens
  misc_RNA (1)...(19): siRNA sense strand
gaucgcaggaguaucuuug

SEQ ID NO: 624935 - RNA, 19 nt, Homo sapiens
  misc_RNA (1)...(19): siRNA sense strand
gaggagcucaccaacaaga

SEQ ID NO: 624936 - RNA, 19 nt, Homo sapiens
  misc_RNA (1)...(19): siRNA sense strand
guucaaagacccugagaca

SEQ ID NO: 624937 - RNA, 19 nt, Homo sapiens
  misc_RNA (1)...(19): siRNA sense strand
ucaagcgcaucuucuacuu

SEQ ID NO: 624938 - RNA, 19 nt, Homo sapiens
  misc_RNA (1)...(19): siRNA sense strand
gugagacugucaacaagau

SEQ ID NO: 624939 - RNA, 19 nt, Homo sapiens
  misc_RNA (1)...(19): siRNA sense strand
ccaccugccuggagcuguu

SEQ ID NO: 624940 - RNA, 19 nt, Homo sapiens
  misc_RNA (1)...(19): siRNA sense strand
cuggagagauccugucugu

SEQ ID NO: 624941 - RNA, 19 nt, Homo sapiens
  misc_RNA (1)...(19): siRNA sense strand
gaggcaagugcucgagaua

SEQ ID NO: 624942 - RNA, 19 nt, Homo sapiens
  misc_RNA (1)...(19): siRNA sense strand
gcacaggagagcaagaaca

SEQ ID NO: 624943 - RNA, 19 nt, Homo sapiens
  misc_RNA (1)...(19): siRNA sense strand
aagcgcaucuucuacuuca

SEQ ID NO: 624944 - RNA, 19 nt, Homo sapiens
  misc_RNA (1)...(19): siRNA sense strand
ucacugagaacuaugacuu

SEQ ID NO: 624945 - RNA, 19 nt, Homo sapiens
  misc_RNA (1)...(19): siRNA sense strand
cuacaucgucuucuuguuc

SEQ ID NO: 624946 - RNA, 19 nt, Homo sapiens
  misc_RNA (1)...(19): siRNA sense strand
ccuauguaauucucaccua

SEQ ID NO: 624947 - RNA, 19 nt, Homo sapiens
  misc_RNA (1)...(19): siRNA sense strand
ggcaagugcucgagauagg

SEQ ID NO: 624948 - RNA, 19 nt, Homo sapiens
  misc_RNA (1)...(19): siRNA sense strand
ugaagccguugcucagaau

SEQ ID NO: 624949 - RNA, 19 nt, Homo sapiens
  misc_RNA (1)...(19): siRNA sense strand
agaggacgcugaggucuuc

SEQ ID NO: 624950 - RNA, 19 nt, Homo sapiens
  misc_RNA (1)...(19): siRNA sense strand
ucacagacaacgaguucaa

SEQ ID NO: 624951 - RNA, 19 nt, Homo sapiens
  misc_RNA (1)...(19): siRNA sense strand
gugacgagcauguacaaug

SEQ ID NO: 624952 - RNA, 19 nt, Homo sapiens
  misc_RNA (1)...(19): siRNA sense strand
gcagacacuggaagaacuu

SEQ ID NO: 624953 - RNA, 19 nt, Homo sapiens
  misc_RNA (1)...(19): siRNA sense strand
agaagacccucaggcucua

SEQ ID NO: 624954 - RNA, 19 nt, Homo sapiens
  misc_RNA (1)...(19): siRNA sense strand
ucaaggcugucuucaucau

SEQ ID NO: 624955 - RNA, 19 nt, Homo sapiens
  misc_RNA (1)...(19): siRNA sense strand
uggugacgcugauugaaga

SEQ ID NO: 624956 - RNA, 19 nt, Homo sapiens
  misc_RNA (1)...(19): siRNA sense strand
gaccugugccguuucaugu

SEQ ID NO: 624957 - RNA, 19 nt, Homo sapiens
  misc_RNA (1)...(19): siRNA sense strand
cgaugaagacccuguuugu

SEQ ID NO: 624958 - RNA, 19 nt, Homo sapiens
  misc_RNA (1)...(19): siRNA sense strand
uaggaggagucuacuucuu

SEQ ID NO: 624959 - RNA, 19 nt, Homo sapiens
  misc_RNA (1)...(19): siRNA sense strand
agagauccugucuguguua

SEQ ID NO: 624960 - RNA, 19 nt, Homo sapiens
  misc_RNA (1)...(19): siRNA sense strand
uggagacuauuuccgaguu

SEQ ID NO: 624961 - RNA, 19 nt, Homo sapiens
  misc_RNA (1)...(19): siRNA sense strand
gcaaacggacagccugaag

SEQ ID NO: 624962 - RNA, 19 nt, Homo sapiens
  misc_RNA (1)...(19): siRNA sense strand
gggugagacugucaacaag

SEQ ID NO: 624963 - RNA, 19 nt, Homo sapiens
  misc_RNA (1)...(19): siRNA sense strand
guuaggaggagucuacuuc

SEQ ID NO: 624964 - RNA, 19 nt, Homo sapiens
  misc_RNA (1)...(19): siRNA sense strand
caucuucuacuucaacuuc

SEQ ID NO: 624965 - RNA, 19 nt, Homo sapiens
  misc_RNA (1)...(19): siRNA sense strand
ggucuuggccuauauucuc

SEQ ID NO: 624966 - RNA, 19 nt, Homo sapiens
  misc_RNA (1)...(19): siRNA sense strand
aaacggacagccugaagga

SEQ ID NO: 624967 - RNA, 19 nt, Homo sapiens
  misc_RNA (1)...(19): siRNA sense strand
ucgcaggaguaucuuugaa

SEQ ID NO: 624968 - RNA, 19 nt, Homo sapiens
  misc_RNA (1)...(19): siRNA sense strand
ggcagacacuggaagaacu

SEQ ID NO: 624969 - RNA, 19 nt, Homo sapiens
  misc_RNA (1)...(19): siRNA sense strand
gaugaagacccuguuugug

SEQ ID NO: 624970 - RNA, 19 nt, Homo sapiens
  misc_RNA (1)...(19): siRNA sense strand
aggaggagucuacuucuuu

SEQ ID NO: 624971 - RNA, 19 nt, Homo sapiens
  misc_RNA (1)...(19): siRNA sense strand
gaagccguugcucagaaua

SEQ ID NO: 624972 - RNA, 19 nt, Homo sapiens
  misc_RNA (1)...(19): siRNA sense strand
ugaaagccaugcucaaccu

SEQ ID NO: 624973 - RNA, 19 nt, Homo sapiens
  misc_RNA (1)...(19): siRNA sense strand
gagcaagaagcaccucaca

SEQ ID NO: 624974 - RNA, 19 nt, Homo sapiens
  misc_RNA (1)...(19): siRNA sense strand
ucaacuuccuggucuacug

SEQ ID NO: 624975 - RNA, 19 nt, Homo sapiens
  misc_RNA (1)...(19): siRNA sense strand
gccuguacaugaucaucuu

SEQ ID NO: 624976 - RNA, 19 nt, Homo sapiens
  misc_RNA (1)...(19): siRNA sense strand
ccaacaugcucuacuacac

SEQ ID NO: 624977 - RNA, 19 nt, Homo sapiens
  misc_RNA (1)...(19): siRNA sense strand
uugaagccguugcucagaa

SEQ ID NO: 624978 - RNA, 19 nt, Homo sapiens
  misc_RNA (1)...(19): siRNA sense strand
gcauguacaaugagauucu

SEQ ID NO: 624979 - RNA, 19 nt, Homo sapiens
  misc_RNA (1)...(19): siRNA sense strand
aaguuuaucugcgacaguu

SEQ ID NO: 624980 - RNA, 19 nt, Homo sapiens
  misc_RNA (1)...(19): siRNA sense strand
gcucagcccgaggaaguuu

SEQ ID NO: 624981 - RNA, 19 nt, Homo sapiens
  misc_RNA (1)...(19): siRNA sense strand
uaugaucgcaggaguaucu

SEQ ID NO: 624982 - RNA, 19 nt, Homo sapiens
  misc_RNA (1)...(19): siRNA sense strand
ggugagacugucaacaaga

SEQ ID NO: 624983 - RNA, 19 nt, Homo sapiens
  misc_RNA (1)...(19): siRNA sense strand
cagacaacgaguucaaaga

SEQ ID NO: 624984 - RNA, 19 nt, Homo sapiens
  misc_RNA (1)...(19): siRNA sense strand
uugaagacgggaagaauga

SEQ ID NO: 624985 - RNA, 19 nt, Homo sapiens
  misc_RNA (1)...(19): siRNA sense strand
gauugaagacgggaagaau

SEQ ID NO: 624986 - RNA, 19 nt, Homo sapiens
  misc_RNA (1)...(19): siRNA sense strand
agagaccugugccguuuca

SEQ ID NO: 624987 - RNA, 19 nt, Homo sapiens
  misc_RNA (1)...(19): siRNA sense strand
guacuucagccaccucaag

SEQ ID NO: 624988 - RNA, 19 nt, Homo sapiens
  misc_RNA (1)...(19): siRNA sense strand
uggcuugccucccuuuaag

SEQ ID NO: 624989 - RNA, 19 nt, Homo sapiens
  misc_RNA (1)...(19): siRNA sense strand
cgaaguuugugacgagcau

SEQ ID NO: 624990 - RNA, 19 nt, Homo sapiens
  misc_RNA (1)...(19): siRNA sense strand
ugaacuggaccaccuggaa

SEQ ID NO: 624991 - RNA, 19 nt, Homo sapiens
  misc_RNA (1)...(19): siRNA sense strand
gagauccugucuguguuag

SEQ ID NO: 624992 - RNA, 19 nt, Homo sapiens
  misc_RNA (1)...(19): siRNA sense strand
ccgaguuacuggagagauc

SEQ ID NO: 624993 - RNA, 19 nt, Homo sapiens
  misc_RNA (1)...(19): siRNA sense strand
acacggacagcuacuacaa

SEQ ID NO: 624994 - RNA, 19 nt, Homo sapiens
  misc_RNA (1)...(19): siRNA sense strand
gacuaccgguggugcuuca

SEQ ID NO: 624995 - RNA, 19 nt, Homo sapiens
  misc_RNA (1)...(19): siRNA sense strand
caggagagcaagaacaucu

SEQ ID NO: 624996 - RNA, 19 nt, Homo sapiens
  misc_RNA (1)...(19): siRNA sense strand
gauggcuugccucccuuua

SEQ ID NO: 624997 - RNA, 19 nt, Homo sapiens
  misc_RNA (1)...(19): siRNA sense strand
aagaagcaccucacagaca

SEQ ID NO: 624998 - RNA, 19 nt, Homo sapiens
  misc_RNA (1)...(19): siRNA sense strand
cagcuacagugagaugcuu

SEQ ID NO: 624999 - RNA, 19 nt, Homo sapiens
  misc_RNA (1)...(19): siRNA sense strand
ucuacugccuguacaugau

SEQ ID NO: 625000 - RNA, 19 nt, Homo sapiens
  misc_RNA (1)...(19): siRNA sense strand
gaaguuuaucugcgacagu

SEQ ID NO: 625001 - RNA, 19 nt, Homo sapiens
  misc_RNA (1)...(19): siRNA sense strand
caacgugggcaucaucaac

SEQ ID NO: 625002 - RNA, 19 nt, Homo sapiens
  misc_RNA (1)...(19): siRNA sense strand
gagacuauuuccgaguuac

SEQ ID NO: 625003 - RNA, 19 nt, Homo sapiens
  misc_RNA (1)...(19): siRNA sense strand
ucaccauggcugccuacua

SEQ ID NO: 625004 - RNA, 19 nt, Homo sapiens
  misc_RNA (1)...(19): siRNA sense strand
ugggugagacugucaacaa

SEQ ID NO: 625005 - RNA, 19 nt, Homo sapiens
  misc_RNA (1)...(19): siRNA sense strand
ggaccaacaugcucuacua

SEQ ID NO: 625006 - RNA, 19 nt, Homo sapiens
  misc_RNA (1)...(19): siRNA sense strand
guauguggcuuccauggua

SEQ ID NO: 625007 - RNA, 19 nt, Homo sapiens
  misc_RNA (1)...(19): siRNA sense strand
gcaagaagcaccucacaga

SEQ ID NO: 625008 - RNA, 19 nt, Homo sapiens
  misc_RNA (1)...(19): siRNA sense strand
ggagacuauuuccgaguua

SEQ ID NO: 625009 - RNA, 19 nt, Homo sapiens
  misc_RNA (1)...(19): siRNA sense strand
ggagagauccugucugugu

SEQ ID NO: 625010 - RNA, 19 nt, Homo sapiens
  misc_RNA (1)...(19): siRNA sense strand
ugacgagcauguacaauga

SEQ ID NO: 625011 - RNA, 19 nt, Homo sapiens
  misc_RNA (1)...(19): siRNA sense strand
gcacaucgccaucgagaga

SEQ ID NO: 625012 - RNA, 19 nt, Homo sapiens
  misc_RNA (1)...(19): siRNA sense strand
ugagagaccugugccguuu

SEQ ID NO: 625013 - RNA, 19 nt, Homo sapiens
  misc_RNA (1)...(19): siRNA sense strand
uggaggagcucaccaacaa

SEQ ID NO: 625014 - RNA, 19 nt, Homo sapiens
  misc_RNA (1)...(19): siRNA sense strand
gccuggagcuguucaaguu

SEQ ID NO: 625015 - RNA, 19 nt, Homo sapiens
  misc_RNA (1)...(19): siRNA sense strand
caucuaugccgucaugaua

SEQ ID NO: 625016 - RNA, 19 nt, Homo sapiens
  misc_RNA (1)...(19): siRNA sense strand
gagagauccugucuguguu

SEQ ID NO: 625017 - RNA, 19 nt, Homo sapiens
  misc_RNA (1)...(19): siRNA sense strand
gagcauguacaaugagauu

SEQ ID NO: 625018 - RNA, 19 nt, Homo sapiens
  misc_RNA (1)...(19): siRNA sense strand
uccgagggauucaguauuu

SEQ ID NO: 625019 - RNA, 19 nt, Homo sapiens
  misc_RNA (1)...(19): siRNA sense strand
guggacagcuacagugaga

SEQ ID NO: 625020 - RNA, 19 nt, Homo sapiens
  misc_RNA (1)...(19): siRNA sense strand
ucagccaccucaaggagua

SEQ ID NO: 625021 - RNA, 19 nt, Homo sapiens
  misc_RNA (1)...(19): siRNA sense strand
ggacaagugggacagauuc

SEQ ID NO: 625022 - RNA, 19 nt, Homo sapiens
  misc_RNA (1)...(19): siRNA sense strand
gaccuggaguucacugaga

SEQ ID NO: 625023 - RNA, 19 nt, Homo sapiens
  misc_RNA (1)...(19): siRNA sense strand
agaagcaccucacagacaa

SEQ ID NO: 625024 - RNA, 19 nt, Homo sapiens
  misc_RNA (1)...(19): siRNA sense strand
gcaagaacaucuggaagcu

SEQ ID NO: 625025 - RNA, 19 nt, Homo sapiens
  misc_RNA (1)...(19): siRNA sense strand
gcugcuggccuauguaauu

SEQ ID NO: 625026 - RNA, 19 nt, Homo sapiens
  misc_RNA (1)...(19): siRNA sense strand
cuucaaggcugucuucauc

SEQ ID NO: 625027 - RNA, 19 nt, Homo sapiens
  misc_RNA (1)...(19): siRNA sense strand
caccauggcugccuacuac

SEQ ID NO: 625028 - RNA, 19 nt, Homo sapiens
  misc_RNA (1)...(19): siRNA sense strand
ggacagcuacagugagaug

SEQ ID NO: 625029 - RNA, 19 nt, Homo sapiens
  misc_RNA (1)...(19): siRNA sense strand
cccgauagcuccuacaaca

SEQ ID NO: 625030 - RNA, 19 nt, Homo sapiens
  misc_RNA (1)...(19): siRNA sense strand
ugagaacuaugacuucaag

SEQ ID NO: 625031 - RNA, 19 nt, Homo sapiens
  misc_RNA (1)...(19): siRNA sense strand
agaagaugauccugagaga

SEQ ID NO: 625032 - RNA, 19 nt, Homo sapiens
  misc_RNA (1)...(19): siRNA sense strand
ggaggagucuacuucuuuu

SEQ ID NO: 625033 - RNA, 19 nt, Homo sapiens
  misc_RNA (1)...(19): siRNA sense strand
ccugugccguuucauguuu

SEQ ID NO: 625034 - RNA, 19 nt, Homo sapiens
  misc_RNA (1)...(19): siRNA sense strand
gaucgcaggaguaucuuug

SEQ ID NO: 625035 - RNA, 19 nt, Homo sapiens
  misc_RNA (1)...(19): siRNA sense strand
gaggagcucaccaacaaga

SEQ ID NO: 625036 - RNA, 19 nt, Homo sapiens
  misc_RNA (1)...(19): siRNA sense strand
guucaaagacccugagaca

SEQ ID NO: 625037 - RNA, 19 nt, Homo sapiens
  misc_RNA (1)...(19): siRNA sense strand
ucaagcgcaucuucuacuu

SEQ ID NO: 625038 - RNA, 19 nt, Homo sapiens
  misc_RNA (1)...(19): siRNA sense strand
gugagacugucaacaagau

SEQ ID NO: 625039 - RNA, 19 nt, Homo sapiens
  misc_RNA (1)...(19): siRNA sense strand
ccaccugccuggagcuguu

SEQ ID NO: 625040 - RNA, 19 nt, Homo sapiens
  misc_RNA (1)...(19): siRNA sense strand
cuggagagauccugucugu

SEQ ID NO: 625041 - RNA, 19 nt, Homo sapiens
  misc_RNA (1)...(19): siRNA sense strand
gaggcaagugcucgagaua

SEQ ID NO: 625042 - RNA, 19 nt, Homo sapiens
  misc_RNA (1)...(19): siRNA sense strand
gcacaggagagcaagaaca

SEQ ID NO: 625043 - RNA, 19 nt, Homo sapiens
  misc_RNA (1)...(19): siRNA sense strand
aagcgcaucuucuacuuca

SEQ ID NO: 625044 - RNA, 19 nt, Homo sapiens
  misc_RNA (1)...(19): siRNA sense strand
ucacugagaacuaugacuu

SEQ ID NO: 625045 - RNA, 19 nt, Homo sapiens
  misc_RNA (1)...(19): siRNA sense strand
cuacaucgucuucuuguuc

SEQ ID NO: 625046 - RNA, 19 nt, Homo sapiens
  misc_RNA (1)...(19): siRNA sense strand
ccuauguaauucucaccua

SEQ ID NO: 625047 - RNA, 19 nt, Homo sapiens
  misc_RNA (1)...(19): siRNA sense strand
ggcaagugcucgagauagg

SEQ ID NO: 625048 - RNA, 19 nt, Homo sapiens
  misc_RNA (1)...(19): siRNA sense strand
ugaagccguugcucagaau

SEQ ID NO: 625049 - RNA, 19 nt, Homo sapiens
  misc_RNA (1)...(19): siRNA sense strand
agaggacgcugaggucuuc

SEQ ID NO: 625050 - RNA, 19 nt, Homo sapiens
  misc_RNA (1)...(19): siRNA sense strand
ucacagacaacgaguucaa

SEQ ID NO: 625051 - RNA, 19 nt, Homo sapiens
  misc_RNA (1)...(19): siRNA sense strand
gugacgagcauguacaaug

SEQ ID NO: 625052 - RNA, 19 nt, Homo sapiens
  misc_RNA (1)...(19): siRNA sense strand
gcagacacuggaagaacuu

SEQ ID NO: 625053 - RNA, 19 nt, Homo sapiens
  misc_RNA (1)...(19): siRNA sense strand
agaagacccucaggcucua

SEQ ID NO: 625054 - RNA, 19 nt, Homo sapiens
  misc_RNA (1)...(19): siRNA sense strand
ucaaggcugucuucaucau

SEQ ID NO: 625055 - RNA, 19 nt, Homo sapiens
  misc_RNA (1)...(19): siRNA sense strand
uggugacgcugauugaaga

SEQ ID NO: 625056 - RNA, 19 nt, Homo sapiens
  misc_RNA (1)...(19): siRNA sense strand
gaccugugccguuucaugu

SEQ ID NO: 625057 - RNA, 19 nt, Homo sapiens
  misc_RNA (1)...(19): siRNA sense strand
cgaugaagacccuguuugu

SEQ ID NO: 625058 - RNA, 19 nt, Homo sapiens
  misc_RNA (1)...(19): siRNA sense strand
uaggaggagucuacuucuu

SEQ ID NO: 625059 - RNA, 19 nt, Homo sapiens
  misc_RNA (1)...(19): siRNA sense strand
agagauccugucuguguua

SEQ ID NO: 625060 - RNA, 19 nt, Homo sapiens
  misc_RNA (1)...(19): siRNA sense strand
uggagacuauuuccgaguu

SEQ ID NO: 625061 - RNA, 19 nt, Homo sapiens
  misc_RNA (1)...(19): siRNA sense strand
gcaaacggacagccugaag

SEQ ID NO: 625062 - RNA, 19 nt, Homo sapiens
  misc_RNA (1)...(19): siRNA sense strand
gggugagacugucaacaag

SEQ ID NO: 625063 - RNA, 19 nt, Homo sapiens
  misc_RNA (1)...(19): siRNA sense strand
guuaggaggagucuacuuc

SEQ ID NO: 625064 - RNA, 19 nt, Homo sapiens
  misc_RNA (1)...(19): siRNA sense strand
caucuucuacuucaacuuc

SEQ ID NO: 625065 - RNA, 19 nt, Homo sapiens
  misc_RNA (1)...(19): siRNA sense strand
ggucuuggccuauauucuc

SEQ ID NO: 625066 - RNA, 19 nt, Homo sapiens
  misc_RNA (1)...(19): siRNA sense strand
aaacggacagccugaagga

SEQ ID NO: 625067 - RNA, 19 nt, Homo sapiens
  misc_RNA (1)...(19): siRNA sense strand
ucgcaggaguaucuuugaa

SEQ ID NO: 625068 - RNA, 19 nt, Homo sapiens
  misc_RNA (1)...(19): siRNA sense strand
ggcagacacuggaagaacu

SEQ ID NO: 625069 - RNA, 19 nt, Homo sapiens
  misc_RNA (1)...(19): siRNA sense strand
gaugaagacccuguuugug

SEQ ID NO: 625070 - RNA, 19 nt, Homo sapiens
  misc_RNA (1)...(19): siRNA sense strand
aggaggagucuacuucuuu

SEQ ID NO: 625071 - RNA, 19 nt, Homo sapiens
  misc_RNA (1)...(19): siRNA sense strand
gaagccguugcucagaaua

SEQ ID NO: 625072 - RNA, 19 nt, Homo sapiens
  misc_RNA (1)...(19): siRNA sense strand
ugaaagccaugcucaaccu

SEQ ID NO: 625073 - RNA, 19 nt, Homo sapiens
  misc_RNA (1)...(19): siRNA sense strand
gagcaagaagcaccucaca

SEQ ID NO: 625074 - RNA, 19 nt, Homo sapiens
  misc_RNA (1)...(19): siRNA sense strand
ucaacuuccuggucuacug

SEQ ID NO: 625075 - RNA, 19 nt, Homo sapiens
  misc_RNA (1)...(19): siRNA sense strand
gccuguacaugaucaucuu

SEQ ID NO: 625076 - RNA, 19 nt, Homo sapiens
  misc_RNA (1)...(19): siRNA sense strand
ccaacaugcucuacuacac

SEQ ID NO: 625077 - RNA, 19 nt, Homo sapiens
  misc_RNA (1)...(19): siRNA sense strand
uugaagccguugcucagaa

SEQ ID NO: 625078 - RNA, 19 nt, Homo sapiens
  misc_RNA (1)...(19): siRNA sense strand
gcauguacaaugagauucu

SEQ ID NO: 625079 - RNA, 19 nt, Homo sapiens
  misc_RNA (1)...(19): siRNA sense strand
aaguuuaucugcgacaguu

SEQ ID NO: 625080 - RNA, 19 nt, Homo sapiens
  misc_RNA (1)...(19): siRNA sense strand
gcucagcccgaggaaguuu

SEQ ID NO: 625081 - RNA, 19 nt, Homo sapiens
  misc_RNA (1)...(19): siRNA sense strand
uaugaucgcaggaguaucu

SEQ ID NO: 625082 - RNA, 19 nt, Homo sapiens
  misc_RNA (1)...(19): siRNA sense strand
ggugagacugucaacaaga

SEQ ID NO: 625083 - RNA, 19 nt, Homo sapiens
  misc_RNA (1)...(19): siRNA sense strand
cagacaacgaguucaaaga

SEQ ID NO: 625084 - RNA, 19 nt, Homo sapiens
  misc_RNA (1)...(19): siRNA sense strand
uugaagacgggaagaauga

SEQ ID NO: 625085 - RNA, 19 nt, Homo sapiens
  misc_RNA (1)...(19): siRNA sense strand
gauugaagacgggaagaau

SEQ ID NO: 625086 - RNA, 19 nt, Homo sapiens
  misc_RNA (1)...(19): siRNA sense strand
agagaccugugccguuuca

SEQ ID NO: 625087 - RNA, 19 nt, Homo sapiens
  misc_RNA (1)...(19): siRNA sense strand
guacuucagccaccucaag

SEQ ID NO: 625088 - RNA, 19 nt, Homo sapiens
  misc_RNA (1)...(19): siRNA sense strand
uggcuugccucccuuuaag

SEQ ID NO: 625089 - RNA, 19 nt, Homo sapiens
  misc_RNA (1)...(19): siRNA sense strand
cgaaguuugugacgagcau

SEQ ID NO: 625090 - RNA, 19 nt, Homo sapiens
  misc_RNA (1)...(19): siRNA sense strand
ugaacuggaccaccuggaa

SEQ ID NO: 625091 - RNA, 19 nt, Homo sapiens
  misc_RNA (1)...(19): siRNA sense strand
gagauccugucuguguuag

SEQ ID NO: 625092 - RNA, 19 nt, Homo sapiens
  misc_RNA (1)...(19): siRNA sense strand
ccgaguuacuggagagauc

SEQ ID NO: 625093 - RNA, 19 nt, Homo sapiens
  misc_RNA (1)...(19): siRNA sense strand
acacggacagcuacuacaa

SEQ ID NO: 625094 - RNA, 19 nt, Homo sapiens
  misc_RNA (1)...(19): siRNA sense strand
gacuaccgguggugcuuca

SEQ ID NO: 625095 - RNA, 19 nt, Homo sapiens
  misc_RNA (1)...(19): siRNA sense strand
caggagagcaagaacaucu

SEQ ID NO: 625096 - RNA, 19 nt, Homo sapiens
  misc_RNA (1)...(19): siRNA sense strand
gauggcuugccucccuuua

SEQ ID NO: 625097 - RNA, 19 nt, Homo sapiens
  misc_RNA (1)...(19): siRNA sense strand
aagaagcaccucacagaca

SEQ ID NO: 625098 - RNA, 19 nt, Homo sapiens
  misc_RNA (1)...(19): siRNA sense strand
cagcuacagugagaugcuu

SEQ ID NO: 625099 - RNA, 19 nt, Homo sapiens
  misc_RNA (1)...(19): siRNA sense strand
ucuacugccuguacaugau

SEQ ID NO: 625100 - RNA, 19 nt, Homo sapiens
  misc_RNA (1)...(19): siRNA sense strand
gaaguuuaucugcgacagu

SEQ ID NO: 625101 - RNA, 19 nt, Homo sapiens
  misc_RNA (1)...(19): siRNA sense strand
caacgugggcaucaucaac

SEQ ID NO: 625102 - RNA, 19 nt, Homo sapiens
  misc_RNA (1)...(19): siRNA sense strand
gagacuauuuccgaguuac

SEQ ID NO: 625103 - RNA, 19 nt, Homo sapiens
  misc_RNA (1)...(19): siRNA sense strand
ucaccauggcugccuacua

SEQ ID NO: 625104 - RNA, 19 nt, Homo sapiens
  misc_RNA (1)...(19): siRNA sense strand
ugggugagacugucaacaa

SEQ ID NO: 625105 - RNA, 19 nt, Homo sapiens
  misc_RNA (1)...(19): siRNA sense strand
ggaccaacaugcucuacua

SEQ ID NO: 625106 - RNA, 19 nt, Homo sapiens
  misc_RNA (1)...(19): siRNA sense strand
guauguggcuuccauggua

SEQ ID NO: 625107 - RNA, 19 nt, Homo sapiens
  misc_RNA (1)...(19): siRNA sense strand
gcaagaagcaccucacaga

SEQ ID NO: 625108 - RNA, 19 nt, Homo sapiens
  misc_RNA (1)...(19): siRNA sense strand
ggagacuauuuccgaguua

SEQ ID NO: 625109 - RNA, 19 nt, Homo sapiens
  misc_RNA (1)...(19): siRNA sense strand
ggagagauccugucugugu

SEQ ID NO: 625110 - RNA, 19 nt, Homo sapiens
  misc_RNA (1)...(19): siRNA sense strand
ugacgagcauguacaauga

SEQ ID NO: 625111 - RNA, 19 nt, Homo sapiens
  misc_RNA (1)...(19): siRNA sense strand
gcacaucgccaucgagaga

SEQ ID NO: 625112 - RNA, 19 nt, Homo sapiens
  misc_RNA (1)...(19): siRNA sense strand
ugagagaccugugccguuu

SEQ ID NO: 625113 - RNA, 19 nt, Homo sapiens
  misc_RNA (1)...(19): siRNA sense strand
uggaggagcucaccaacaa

SEQ ID NO: 625114 - RNA, 19 nt, Homo sapiens
  misc_RNA (1)...(19): siRNA sense strand
gccuggagcuguucaaguu

SEQ ID NO: 625115 - RNA, 19 nt, Homo sapiens
  misc_RNA (1)...(19): siRNA sense strand
caucuaugccgucaugaua

SEQ ID NO: 625116 - RNA, 19 nt, Homo sapiens
  misc_RNA (1)...(19): siRNA sense strand
gagagauccugucuguguu

SEQ ID NO: 625117 - RNA, 19 nt, Homo sapiens
  misc_RNA (1)...(19): siRNA sense strand
gagcauguacaaugagauu

SEQ ID NO: 625118 - RNA, 19 nt, Homo sapiens
  misc_RNA (1)...(19): siRNA sense strand
uccgagggauucaguauuu

SEQ ID NO: 625119 - RNA, 19 nt, Homo sapiens
  misc_RNA (1)...(19): siRNA sense strand
guggacagcuacagugaga

SEQ ID NO: 625120 - RNA, 19 nt, Homo sapiens
  misc_RNA (1)...(19): siRNA sense strand
ucagccaccucaaggagua

SEQ ID NO: 625121 - RNA, 19 nt, Homo sapiens
  misc_RNA (1)...(19): siRNA sense strand
ggacaagugggacagauuc

SEQ ID NO: 625122 - RNA, 19 nt, Homo sapiens
  misc_RNA (1)...(19): siRNA sense strand
gaccuggaguucacugaga

SEQ ID NO: 625123 - RNA, 19 nt, Homo sapiens
  misc_RNA (1)...(19): siRNA sense strand
agaagcaccucacagacaa

SEQ ID NO: 625124 - RNA, 19 nt, Homo sapiens
  misc_RNA (1)...(19): siRNA sense strand
gcaagaacaucuggaagcu

SEQ ID NO: 625125 - RNA, 19 nt, Homo sapiens
  misc_RNA (1)...(19): siRNA sense strand
gcugcuggccuauguaauu

SEQ ID NO: 625126 - RNA, 19 nt, Homo sapiens
  misc_RNA (1)...(19): siRNA sense strand
cuucaaggcugucuucauc

SEQ ID NO: 625127 - RNA, 19 nt, Homo sapiens
  misc_RNA (1)...(19): siRNA sense strand
caccauggcugccuacuac

SEQ ID NO: 625128 - RNA, 19 nt, Homo sapiens
  misc_RNA (1)...(19): siRNA sense strand
ggacagcuacagugagaug

SEQ ID NO: 625129 - RNA, 19 nt, Homo sapiens
  misc_RNA (1)...(19): siRNA sense strand
cccgauagcuccuacaaca

SEQ ID NO: 625130 - RNA, 19 nt, Homo sapiens
  misc_RNA (1)...(19): siRNA sense strand
ugagaacuaugacuucaag

SEQ ID NO: 625131 - RNA, 19 nt, Homo sapiens
  misc_RNA (1)...(19): siRNA sense strand
agaagaugauccugagaga

SEQ ID NO: 625132 - RNA, 19 nt, Homo sapiens
  misc_RNA (1)...(19): siRNA sense strand
ggaggagucuacuucuuuu

SEQ ID NO: 625133 - RNA, 19 nt, Homo sapiens
  misc_RNA (1)...(19): siRNA sense strand
ccugugccguuucauguuu

SEQ ID NO: 625134 - RNA, 19 nt, Homo sapiens
  misc_RNA (1)...(19): siRNA sense strand
gaucgcaggaguaucuuug

SEQ ID NO: 625135 - RNA, 19 nt, Homo sapiens
  misc_RNA (1)...(19): siRNA sense strand
gaggagcucaccaacaaga

SEQ ID NO: 625136 - RNA, 19 nt, Homo sapiens
  misc_RNA (1)...(19): siRNA sense strand
guucaaagacccugagaca

SEQ ID NO: 625137 - RNA, 19 nt, Homo sapiens
  misc_RNA (1)...(19): siRNA sense strand
ucaagcgcaucuucuacuu

SEQ ID NO: 625138 - RNA, 19 nt, Homo sapiens
  misc_RNA (1)...(19): siRNA sense strand
gugagacugucaacaagau

SEQ ID NO: 625139 - RNA, 19 nt, Homo sapiens
  misc_RNA (1)...(19): siRNA sense strand
ccaccugccuggagcuguu

SEQ ID NO: 625140 - RNA, 19 nt, Homo sapiens
  misc_RNA (1)...(19): siRNA sense strand
cuggagagauccugucugu

SEQ ID NO: 625141 - RNA, 19 nt, Homo sapiens
  misc_RNA (1)...(19): siRNA sense strand
gaggcaagugcucgagaua

SEQ ID NO: 625142 - RNA, 19 nt, Homo sapiens
  misc_RNA (1)...(19): siRNA sense strand
gcacaggagagcaagaaca

SEQ ID NO: 625143 - RNA, 19 nt, Homo sapiens
  misc_RNA (1)...(19): siRNA sense strand
aagcgcaucuucuacuuca

SEQ ID NO: 625144 - RNA, 19 nt, Homo sapiens
  misc_RNA (1)...(19): siRNA sense strand
ucacugagaacuaugacuu

SEQ ID NO: 625145 - RNA, 19 nt, Homo sapiens
  misc_RNA (1)...(19): siRNA sense strand
cuacaucgucuucuuguuc

SEQ ID NO: 625146 - RNA, 19 nt, Homo sapiens
  misc_RNA (1)...(19): siRNA sense strand
ccuauguaauucucaccua

SEQ ID NO: 625147 - RNA, 19 nt, Homo sapiens
  misc_RNA (1)...(19): siRNA sense strand
ggcaagugcucgagauagg

SEQ ID NO: 625148 - RNA, 19 nt, Homo sapiens
  misc_RNA (1)...(19): siRNA sense strand
ugaagccguugcucagaau

SEQ ID NO: 625149 - RNA, 19 nt, Homo sapiens
  misc_RNA (1)...(19): siRNA sense strand
agaggacgcugaggucuuc

SEQ ID NO: 625150 - RNA, 19 nt, Homo sapiens
  misc_RNA (1)...(19): siRNA sense strand
ucacagacaacgaguucaa

SEQ ID NO: 625151 - RNA, 19 nt, Homo sapiens
  misc_RNA (1)...(19): siRNA sense strand
gugacgagcauguacaaug

SEQ ID NO: 625152 - RNA, 19 nt, Homo sapiens
  misc_RNA (1)...(19): siRNA sense strand
gcagacacuggaagaacuu

SEQ ID NO: 625153 - RNA, 19 nt, Homo sapiens
  misc_RNA (1)...(19): siRNA sense strand
agaagacccucaggcucua

SEQ ID NO: 625154 - RNA, 19 nt, Homo sapiens
  misc_RNA (1)...(19): siRNA sense strand
ucaaggcugucuucaucau

SEQ ID NO: 625155 - RNA, 19 nt, Homo sapiens
  misc_RNA (1)...(19): siRNA sense strand
uggugacgcugauugaaga

SEQ ID NO: 625156 - RNA, 19 nt, Homo sapiens
  misc_RNA (1)...(19): siRNA sense strand
gaccugugccguuucaugu

SEQ ID NO: 625157 - RNA, 19 nt, Homo sapiens
  misc_RNA (1)...(19): siRNA sense strand
cgaugaagacccuguuugu

SEQ ID NO: 625158 - RNA, 19 nt, Homo sapiens
  misc_RNA (1)...(19): siRNA sense strand
uaggaggagucuacuucuu

SEQ ID NO: 625159 - RNA, 19 nt, Homo sapiens
  misc_RNA (1)...(19): siRNA sense strand
agagauccugucuguguua

SEQ ID NO: 625160 - RNA, 19 nt, Homo sapiens
  misc_RNA (1)...(19): siRNA sense strand
uggagacuauuuccgaguu

SEQ ID NO: 625161 - RNA, 19 nt, Homo sapiens
  misc_RNA (1)...(19): siRNA sense strand
gcaaacggacagccugaag

SEQ ID NO: 625162 - RNA, 19 nt, Homo sapiens
  misc_RNA (1)...(19): siRNA sense strand
gggugagacugucaacaag

SEQ ID NO: 625163 - RNA, 19 nt, Homo sapiens
  misc_RNA (1)...(19): siRNA sense strand
guuaggaggagucuacuuc

SEQ ID NO: 625164 - RNA, 19 nt, Homo sapiens
  misc_RNA (1)...(19): siRNA sense strand
caucuucuacuucaacuuc

SEQ ID NO: 625165 - RNA, 19 nt, Homo sapiens
  misc_RNA (1)...(19): siRNA sense strand
ggucuuggccuauauucuc

SEQ ID NO: 625166 - RNA, 19 nt, Homo sapiens
  misc_RNA (1)...(19): siRNA sense strand
aaacggacagccugaagga

SEQ ID NO: 625167 - RNA, 19 nt, Homo sapiens
  misc_RNA (1)...(19): siRNA sense strand
ucgcaggaguaucuuugaa

SEQ ID NO: 625168 - RNA, 19 nt, Homo sapiens
  misc_RNA (1)...(19): siRNA sense strand
ggcagacacuggaagaacu

SEQ ID NO: 625169 - RNA, 19 nt, Homo sapiens
  misc_RNA (1)...(19): siRNA sense strand
gaugaagacccuguuugug

SEQ ID NO: 625170 - RNA, 19 nt, Homo sapiens
  misc_RNA (1)...(19): siRNA sense strand
aggaggagucuacuucuuu

SEQ ID NO: 625171 - RNA, 19 nt, Homo sapiens
  misc_RNA (1)...(19): siRNA sense strand
gaagccguugcucagaaua

SEQ ID NO: 625172 - RNA, 19 nt, Homo sapiens
  misc_RNA (1)...(19): siRNA sense strand
ugaaagccaugcucaaccu

SEQ ID NO: 625173 - RNA, 19 nt, Homo sapiens
  misc_RNA (1)...(19): siRNA sense strand
gagcaagaagcaccucaca

SEQ ID NO: 625174 - RNA, 19 nt, Homo sapiens
  misc_RNA (1)...(19): siRNA sense strand
ucaacuuccuggucuacug

SEQ ID NO: 625175 - RNA, 19 nt, Homo sapiens
  misc_RNA (1)...(19): siRNA sense strand
gccuguacaugaucaucuu

SEQ ID NO: 625176 - RNA, 19 nt, Homo sapiens
  misc_RNA (1)...(19): siRNA sense strand
ccaacaugcucuacuacac

SEQ ID NO: 625177 - RNA, 19 nt, Homo sapiens
  misc_RNA (1)...(19): siRNA sense strand
uugaagccguugcucagaa

SEQ ID NO: 625178 - RNA, 19 nt, Homo sapiens
  misc_RNA (1)...(19): siRNA sense strand
gcauguacaaugagauucu

SEQ ID NO: 625179 - RNA, 19 nt, Homo sapiens
  misc_RNA (1)...(19): siRNA sense strand
aaguuuaucugcgacaguu

SEQ ID NO: 625180 - RNA, 19 nt, Homo sapiens
  misc_RNA (1)...(19): siRNA sense strand
gcucagcccgaggaaguuu

SEQ ID NO: 625181 - RNA, 19 nt, Homo sapiens
  misc_RNA (1)...(19): siRNA sense strand
uaugaucgcaggaguaucu

SEQ ID NO: 625182 - RNA, 19 nt, Homo sapiens
  misc_RNA (1)...(19): siRNA sense strand
ggugagacugucaacaaga

SEQ ID NO: 625183 - RNA, 19 nt, Homo sapiens
  misc_RNA (1)...(19): siRNA sense strand
cagacaacgaguucaaaga

SEQ ID NO: 625184 - RNA, 19 nt, Homo sapiens
  misc_RNA (1)...(19): siRNA sense strand
uugaagacgggaagaauga

SEQ ID NO: 625185 - RNA, 19 nt, Homo sapiens
  misc_RNA (1)...(19): siRNA sense strand
gauugaagacgggaagaau

SEQ ID NO: 625186 - RNA, 19 nt, Homo sapiens
  misc_RNA (1)...(19): siRNA sense strand
agagaccugugccguuuca

SEQ ID NO: 625187 - RNA, 19 nt, Homo sapiens
  misc_RNA (1)...(19): siRNA sense strand
guacuucagccaccucaag

SEQ ID NO: 625188 - RNA, 19 nt, Homo sapiens
  misc_RNA (1)...(19): siRNA sense strand
uggcuugccucccuuuaag

SEQ ID NO: 625189 - RNA, 19 nt, Homo sapiens
  misc_RNA (1)...(19): siRNA sense strand
cgaaguuugugacgagcau

SEQ ID NO: 625190 - RNA, 19 nt, Homo sapiens
  misc_RNA (1)...(19): siRNA sense strand
ugaacuggaccaccuggaa

SEQ ID NO: 625191 - RNA, 19 nt, Homo sapiens
  misc_RNA (1)...(19): siRNA sense strand
gagauccugucuguguuag

SEQ ID NO: 625192 - RNA, 19 nt, Homo sapiens
  misc_RNA (1)...(19): siRNA sense strand
ccgaguuacuggagagauc

SEQ ID NO: 625193 - RNA, 19 nt, Homo sapiens
  misc_RNA (1)...(19): siRNA sense strand
acacggacagcuacuacaa

SEQ ID NO: 625194 - RNA, 19 nt, Homo sapiens
  misc_RNA (1)...(19): siRNA sense strand
gacuaccgguggugcuuca

SEQ ID NO: 625195 - RNA, 19 nt, Homo sapiens
  misc_RNA (1)...(19): siRNA sense strand
caggagagcaagaacaucu

SEQ ID NO: 625196 - RNA, 19 nt, Homo sapiens
  misc_RNA (1)...(19): siRNA sense strand
gauggcuugccucccuuua

SEQ ID NO: 625197 - RNA, 19 nt, Homo sapiens
  misc_RNA (1)...(19): siRNA sense strand
aagaagcaccucacagaca

SEQ ID NO: 625198 - RNA, 19 nt, Homo sapiens
  misc_RNA (1)...(19): siRNA sense strand
cagcuacagugagaugcuu

SEQ ID NO: 625199 - RNA, 19 nt, Homo sapiens
  misc_RNA (1)...(19): siRNA sense strand
ucuacugccuguacaugau

SEQ ID NO: 625200 - RNA, 19 nt, Homo sapiens
  misc_RNA (1)...(19): siRNA sense strand
gaaguuuaucugcgacagu

SEQ ID NO: 625201 - RNA, 19 nt, Homo sapiens
  misc_RNA (1)...(19): siRNA sense strand
caacgugggcaucaucaac

SEQ ID NO: 625202 - RNA, 19 nt, Homo sapiens
  misc_RNA (1)...(19): siRNA sense strand
gagacuauuuccgaguuac

SEQ ID NO: 625203 - RNA, 19 nt, Homo sapiens
  misc_RNA (1)...(19): siRNA sense strand
ucaccauggcugccuacua

SEQ ID NO: 625204 - RNA, 19 nt, Homo sapiens
  misc_RNA (1)...(19): siRNA sense strand
ugggugagacugucaacaa

SEQ ID NO: 625205 - RNA, 19 nt, Homo sapiens
  misc_RNA (1)...(19): siRNA sense strand
caacaacuaugaugacuac

SEQ ID NO: 625206 - RNA, 19 nt, Homo sapiens
  misc_RNA (1)...(19): siRNA sense strand
gcuaugaacuggacgaaaa

SEQ ID NO: 625207 - RNA, 19 nt, Homo sapiens
  misc_RNA (1)...(19): siRNA sense strand
gagcgggucuacuucuuca

SEQ ID NO: 625208 - RNA, 19 nt, Homo sapiens
  misc_RNA (1)...(19): siRNA sense strand
caaugccacuguccaugaa

SEQ ID NO: 625209 - RNA, 19 nt, Homo sapiens
  misc_RNA (1)...(19): siRNA sense strand
gacaaguacuaccgaguca

SEQ ID NO: 625210 - RNA, 19 nt, Homo sapiens
  misc_RNA (1)...(19): siRNA sense strand
ggacaagaagugccagugu

SEQ ID NO: 625211 - RNA, 19 nt, Homo sapiens
  misc_RNA (1)...(19): siRNA sense strand
gagccaacaacuaugauga

SEQ ID NO: 625212 - RNA, 19 nt, Homo sapiens
  misc_RNA (1)...(19): siRNA sense strand
ucacuaugccggaggauga

SEQ ID NO: 625213 - RNA, 19 nt, Homo sapiens
  misc_RNA (1)...(19): siRNA sense strand
gcuucaacguggacaagaa

SEQ ID NO: 625214 - RNA, 19 nt, Homo sapiens
  misc_RNA (1)...(19): siRNA sense strand
gcacugagggcuucaacgu

SEQ ID NO: 625215 - RNA, 19 nt, Homo sapiens
  misc_RNA (1)...(19): siRNA sense strand
caaaggcuaccguucacaa

SEQ ID NO: 625216 - RNA, 19 nt, Homo sapiens
  misc_RNA (1)...(19): siRNA sense strand
gggagcgggucuacuucuu

SEQ ID NO: 625217 - RNA, 19 nt, Homo sapiens
  misc_RNA (1)...(19): siRNA sense strand
gaacccauccagagugucu

SEQ ID NO: 625218 - RNA, 19 nt, Homo sapiens
  misc_RNA (1)...(19): siRNA sense strand
caaguacuaccgagucaau

SEQ ID NO: 625219 - RNA, 19 nt, Homo sapiens
  misc_RNA (1)...(19): siRNA sense strand
acaagaagugccaguguga

SEQ ID NO: 625220 - RNA, 19 nt, Homo sapiens
  misc_RNA (1)...(19): siRNA sense strand
gugaacccauccagagugu

SEQ ID NO: 625221 - RNA, 19 nt, Homo sapiens
  misc_RNA (1)...(19): siRNA sense strand
ugaacacuuugccaugaug

SEQ ID NO: 625222 - RNA, 19 nt, Homo sapiens
  misc_RNA (1)...(19): siRNA sense strand
gagcugcugcacagacuau

SEQ ID NO: 625223 - RNA, 19 nt, Homo sapiens
  misc_RNA (1)...(19): siRNA sense strand
ccgcaaaggcuaccguuca

SEQ ID NO: 625224 - RNA, 19 nt, Homo sapiens
  misc_RNA (1)...(19): siRNA sense strand
acaaugccacuguccauga

SEQ ID NO: 625225 - RNA, 19 nt, Homo sapiens
  misc_RNA (1)...(19): siRNA sense strand
ccagucaggaggaguguga

SEQ ID NO: 625226 - RNA, 19 nt, Homo sapiens
  misc_RNA (1)...(19): siRNA sense strand
uuugaacacuuugccauga

SEQ ID NO: 625227 - RNA, 19 nt, Homo sapiens
  misc_RNA (1)...(19): siRNA sense strand
guacacggucuaugacgau

SEQ ID NO: 625228 - RNA, 19 nt, Homo sapiens
  misc_RNA (1)...(19): siRNA sense strand
ccaacaacuaugaugacua

SEQ ID NO: 625229 - RNA, 19 nt, Homo sapiens
  misc_RNA (1)...(19): siRNA sense strand
agucaguacuggcgcuuug

SEQ ID NO: 625230 - RNA, 19 nt, Homo sapiens
  misc_RNA (1)...(19): siRNA sense strand
ucugaaaccugaggaagag

SEQ ID NO: 625231 - RNA, 19 nt, Homo sapiens
  misc_RNA (1)...(19): siRNA sense strand
caucuucgagcuucucuuc

SEQ ID NO: 625232 - RNA, 19 nt, Homo sapiens
  misc_RNA (1)...(19): siRNA sense strand
ggagcgggucuacuucuuc

SEQ ID NO: 625233 - RNA, 19 nt, Homo sapiens
  misc_RNA (1)...(19): siRNA sense strand
guacuggcgcuuugaggau

SEQ ID NO: 625234 - RNA, 19 nt, Homo sapiens
  misc_RNA (1)...(19): siRNA sense strand
agacagccccaguucauua

SEQ ID NO: 625235 - RNA, 19 nt, Homo sapiens
  misc_RNA (1)...(19): siRNA sense strand
guacuaccgagucaaucuu

SEQ ID NO: 625236 - RNA, 19 nt, Homo sapiens
  misc_RNA (1)...(19): siRNA sense strand
ggagccaacaacuaugaug

SEQ ID NO: 625237 - RNA, 19 nt, Homo sapiens
  misc_RNA (1)...(19): siRNA sense strand
ucacccgcaucaacuguca

SEQ ID NO: 625238 - RNA, 19 nt, Homo sapiens
  misc_RNA (1)...(19): siRNA sense strand
gcggggauguguucacuau

SEQ ID NO: 625239 - RNA, 19 nt, Homo sapiens
  misc_RNA (1)...(19): siRNA sense strand
ggaggacaucuucgagcuu

SEQ ID NO: 625240 - RNA, 19 nt, Homo sapiens
  misc_RNA (1)...(19): siRNA sense strand
aaacaaugccacuguccau

SEQ ID NO: 625241 - RNA, 19 nt, Homo sapiens
  misc_RNA (1)...(19): siRNA sense strand
cuucaaggguagucaguac

SEQ ID NO: 625242 - RNA, 19 nt, Homo sapiens
  misc_RNA (1)...(19): siRNA sense strand
ccugucggcuguguuugaa

SEQ ID NO: 625243 - RNA, 19 nt, Homo sapiens
  misc_RNA (1)...(19): siRNA sense strand
cacgcuccaucgcucagua

SEQ ID NO: 625244 - RNA, 19 nt, Homo sapiens
  misc_RNA (1)...(19): siRNA sense strand
augaguacacggucuauga

SEQ ID NO: 625245 - RNA, 19 nt, Homo sapiens
  misc_RNA (1)...(19): siRNA sense strand
gccaacaacuaugaugacu

SEQ ID NO: 625246 - RNA, 19 nt, Homo sapiens
  misc_RNA (1)...(19): siRNA sense strand
cagcugggaggacaucuuc

SEQ ID NO: 625247 - RNA, 19 nt, Homo sapiens
  misc_RNA (1)...(19): siRNA sense strand
ggacagcugggaggacauc

SEQ ID NO: 625248 - RNA, 19 nt, Homo sapiens
  misc_RNA (1)...(19): siRNA sense strand
ccagugaggagagcaacuu

SEQ ID NO: 625249 - RNA, 19 nt, Homo sapiens
  misc_RNA (1)...(19): siRNA sense strand
gauaauaaauggucuguga

SEQ ID NO: 625250 - RNA, 19 nt, Homo sapiens
  misc_RNA (1)...(19): siRNA sense strand
gauacaaauucgcagauaa

SEQ ID NO: 625251 - RNA, 19 nt, Homo sapiens
  misc_RNA (1)...(19): siRNA sense strand
gaaagagaacuguggcuaa

SEQ ID NO: 625252 - RNA, 19 nt, Homo sapiens
  misc_RNA (1)...(19): siRNA sense strand
caaauaccagccuagauua

SEQ ID NO: 625253 - RNA, 19 nt, Homo sapiens
  misc_RNA (1)...(19): siRNA sense strand
gcacggaaaugaucauaac

SEQ ID NO: 625254 - RNA, 19 nt, Homo sapiens
  misc_RNA (1)...(19): siRNA sense strand
guucugcacucacgucuuu

SEQ ID NO: 625255 - RNA, 19 nt, Homo sapiens
  misc_RNA (1)...(19): siRNA sense strand
aaagagaacuguggcuaaa

SEQ ID NO: 625256 - RNA, 19 nt, Homo sapiens
  misc_RNA (1)...(19): siRNA sense strand
ugucaagaaugcaaaguaa

SEQ ID NO: 625257 - RNA, 19 nt, Homo sapiens
  misc_RNA (1)...(19): siRNA sense strand
caaaguguuucuccaugaa

SEQ ID NO: 625258 - RNA, 19 nt, Homo sapiens
  misc_RNA (1)...(19): siRNA sense strand
gaagugggcacggaaauga

SEQ ID NO: 625259 - RNA, 19 nt, Homo sapiens
  misc_RNA (1)...(19): siRNA sense strand
ucaaaguguuucuccauga

SEQ ID NO: 625260 - RNA, 19 nt, Homo sapiens
  misc_RNA (1)...(19): siRNA sense strand
acaaauaccagccuagauu

SEQ ID NO: 625261 - RNA, 19 nt, Homo sapiens
  misc_RNA (1)...(19): siRNA sense strand
gcacagaaugucaagaaug

SEQ ID NO: 625262 - RNA, 19 nt, Homo sapiens
  misc_RNA (1)...(19): siRNA sense strand
cacaagaucacgcaauuaa

SEQ ID NO: 625263 - RNA, 19 nt, Homo sapiens
  misc_RNA (1)...(19): siRNA sense strand
gaucacagauacaaauucg

SEQ ID NO: 625264 - RNA, 19 nt, Homo sapiens
  misc_RNA (1)...(19): siRNA sense strand
gaaagcggaugaaaauaau

SEQ ID NO: 625265 - RNA, 19 nt, Homo sapiens
  misc_RNA (1)...(19): siRNA sense strand
acauggagcugcacagaau

SEQ ID NO: 625266 - RNA, 19 nt, Homo sapiens
  misc_RNA (1)...(19): siRNA sense strand
ggagggaaucaaaguguuu

SEQ ID NO: 625267 - RNA, 19 nt, Homo sapiens
  misc_RNA (1)...(19): siRNA sense strand
gcacaaauaccagccuaga

SEQ ID NO: 625268 - RNA, 19 nt, Homo sapiens
  misc_RNA (1)...(19): siRNA sense strand
ccaggagcauagccaaauu

SEQ ID NO: 625269 - RNA, 19 nt, Homo sapiens
  misc_RNA (1)...(19): siRNA sense strand
caagaucacgcaauuaaag

SEQ ID NO: 625270 - RNA, 19 nt, Homo sapiens
  misc_RNA (1)...(19): siRNA sense strand
gcucgucuccuuccagaaa

SEQ ID NO: 625271 - RNA, 19 nt, Homo sapiens
  misc_RNA (1)...(19): siRNA sense strand
ugaggcagcucgucuccuu

SEQ ID NO: 625272 - RNA, 19 nt, Homo sapiens
  misc_RNA (1)...(19): siRNA sense strand
gggcauggagggaaucaaa

SEQ ID NO: 625273 - RNA, 19 nt, Homo sapiens
  misc_RNA (1)...(19): siRNA sense strand
gaucacgcaauuaaagauu

SEQ ID NO: 625274 - RNA, 19 nt, Homo sapiens
  misc_RNA (1)...(19): siRNA sense strand
agauacaaauucgcagaua

SEQ ID NO: 625275 - RNA, 19 nt, Homo sapiens
  misc_RNA (1)...(19): siRNA sense strand
ccacaagaucacgcaauua

SEQ ID NO: 625276 - RNA, 19 nt, Homo sapiens
  misc_RNA (1)...(19): siRNA sense strand
ggcggauguuucccaguua

SEQ ID NO: 625277 - RNA, 19 nt, Homo sapiens
  misc_RNA (1)...(19): siRNA sense strand
cggaaaugaucauaaccaa

SEQ ID NO: 625278 - RNA, 19 nt, Homo sapiens
  misc_RNA (1)...(19): siRNA sense strand
acaaccaccuggacccauu

SEQ ID NO: 625279 - RNA, 19 nt, Homo sapiens
  misc_RNA (1)...(19): siRNA sense strand
gagcauagccaaauuuacc

SEQ ID NO: 625280 - RNA, 19 nt, Homo sapiens
  misc_RNA (1)...(19): siRNA sense strand
cacagaaugucaagaaugc

SEQ ID NO: 625281 - RNA, 19 nt, Homo sapiens
  misc_RNA (1)...(19): siRNA sense strand
uuauagcagugacuuccua

SEQ ID NO: 625282 - RNA, 19 nt, Homo sapiens
  misc_RNA (1)...(19): siRNA sense strand
gauuacacaucgugaaagc

SEQ ID NO: 625283 - RNA, 19 nt, Homo sapiens
  misc_RNA (1)...(19): siRNA sense strand
ugaaagcggaugaaaauaa

SEQ ID NO: 625284 - RNA, 19 nt, Homo sapiens
  misc_RNA (1)...(19): siRNA sense strand
gauguuucccaguuacaaa

SEQ ID NO: 625285 - RNA, 19 nt, Homo sapiens
  misc_RNA (1)...(19): siRNA sense strand
caagaaugcaaaguaaaga

SEQ ID NO: 625286 - RNA, 19 nt, Homo sapiens
  misc_RNA (1)...(19): siRNA sense strand
uagauuacacaucgugaaa

SEQ ID NO: 625287 - RNA, 19 nt, Homo sapiens
  misc_RNA (1)...(19): siRNA sense strand
gacgaucacagauacaaau

SEQ ID NO: 625288 - RNA, 19 nt, Homo sapiens
  misc_RNA (1)...(19): siRNA sense strand
cauuguaccugccgacgau

SEQ ID NO: 625289 - RNA, 19 nt, Homo sapiens
  misc_RNA (1)...(19): siRNA sense strand
ucaagaaugcaaaguaaag

SEQ ID NO: 625290 - RNA, 19 nt, Homo sapiens
  misc_RNA (1)...(19): siRNA sense strand
uagccaaauuuaccauugu

SEQ ID NO: 625291 - RNA, 19 nt, Homo sapiens
  misc_RNA (1)...(19): siRNA sense strand
accacaagaucacgcaauu

SEQ ID NO: 625292 - RNA, 19 nt, Homo sapiens
  misc_RNA (1)...(19): siRNA sense strand
agccaaauuuaccauugua

SEQ ID NO: 625293 - RNA, 19 nt, Homo sapiens
  misc_RNA (1)...(19): siRNA sense strand
caauaccagugugagaaug

SEQ ID NO: 625294 - RNA, 19 nt, Homo sapiens
  misc_RNA (1)...(19): siRNA sense strand
aauaauggauuuggcucaa

SEQ ID NO: 625295 - RNA, 19 nt, Homo sapiens
  misc_RNA (1)...(19): siRNA sense strand
gcuggaaggcggauguuuc

SEQ ID NO: 625296 - RNA, 19 nt, Homo sapiens
  misc_RNA (1)...(19): siRNA sense strand
aggcggauguuucccaguu

SEQ ID NO: 625297 - RNA, 19 nt, Homo sapiens
  misc_RNA (1)...(19): siRNA sense strand
gcauggagggaaucaaagu

SEQ ID NO: 625298 - RNA, 19 nt, Homo sapiens
  misc_RNA (1)...(19): siRNA sense strand
caggagcauagccaaauuu

SEQ ID NO: 625299 - RNA, 19 nt, Homo sapiens
  misc_RNA (1)...(19): siRNA sense strand
gagcugcacagaaugucaa

SEQ ID NO: 625300 - RNA, 19 nt, Homo sapiens
  misc_RNA (1)...(19): siRNA sense strand
uaccagaaccacaagauca

SEQ ID NO: 625301 - RNA, 19 nt, Homo sapiens
  misc_RNA (1)...(19): siRNA sense strand
ccauuugggcauauuauuc

SEQ ID NO: 625302 - RNA, 19 nt, Homo sapiens
  misc_RNA (1)...(19): siRNA sense strand
auagccaaauuuaccauug

SEQ ID NO: 625303 - RNA, 19 nt, Homo sapiens
  misc_RNA (1)...(19): siRNA sense strand
gacauggagcugcacagaa

SEQ ID NO: 625304 - RNA, 19 nt, Homo sapiens
  misc_RNA (1)...(19): siRNA sense strand
cuaaauuccaugcacaaau

SEQ ID NO: 625305 - RNA, 19 nt, Homo sapiens
  misc_RNA (1)...(19): siRNA sense strand
aacucaagcucaccaacaa

SEQ ID NO: 625306 - RNA, 19 nt, Homo sapiens
  misc_RNA (1)...(19): siRNA sense strand
caaauuuaccauuguacca

SEQ ID NO: 625307 - RNA, 19 nt, Homo sapiens
  misc_RNA (1)...(19): siRNA sense strand
ccaauaccagugugagaau

SEQ ID NO: 625308 - RNA, 19 nt, Homo sapiens
  misc_RNA (1)...(19): siRNA sense strand
caaccaccuggacccauuu

SEQ ID NO: 625309 - RNA, 19 nt, Homo sapiens
  misc_RNA (1)...(19): siRNA sense strand
aaacucaagcucaccaaca

SEQ ID NO: 625310 - RNA, 19 nt, Homo sapiens
  misc_RNA (1)...(19): siRNA sense strand
aggagcauagccaaauuua

SEQ ID NO: 625311 - RNA, 19 nt, Homo sapiens
  misc_RNA (1)...(19): siRNA sense strand
uggagggaaucaaaguguu

SEQ ID NO: 625312 - RNA, 19 nt, Homo sapiens
  misc_RNA (1)...(19): siRNA sense strand
cagaaugucaagaaugcaa

SEQ ID NO: 625313 - RNA, 19 nt, Homo sapiens
  misc_RNA (1)...(19): siRNA sense strand
acaagaucacgcaauuaaa

SEQ ID NO: 625314 - RNA, 19 nt, Homo sapiens
  misc_RNA (1)...(19): siRNA sense strand
cugcacagaaugucaagaa

SEQ ID NO: 625315 - RNA, 19 nt, Homo sapiens
  misc_RNA (1)...(19): siRNA sense strand
cgacgaucacagauacaaa

SEQ ID NO: 625316 - RNA, 19 nt, Homo sapiens
  misc_RNA (1)...(19): siRNA sense strand
auacagcguucugcacuca

SEQ ID NO: 625317 - RNA, 19 nt, Homo sapiens
  misc_RNA (1)...(19): siRNA sense strand
gggcacggaaaugaucaua

SEQ ID NO: 625318 - RNA, 19 nt, Homo sapiens
  misc_RNA (1)...(19): siRNA sense strand
gcggauguuucccaguuac

SEQ ID NO: 625319 - RNA, 19 nt, Homo sapiens
  misc_RNA (1)...(19): siRNA sense strand
ugacauggagcugcacaga

SEQ ID NO: 625320 - RNA, 19 nt, Homo sapiens
  misc_RNA (1)...(19): siRNA sense strand
gucaagaaugcaaaguaaa

SEQ ID NO: 625321 - RNA, 19 nt, Homo sapiens
  misc_RNA (1)...(19): siRNA sense strand
gacgggccuuaaucccaaa

SEQ ID NO: 625322 - RNA, 19 nt, Homo sapiens
  misc_RNA (1)...(19): siRNA sense strand
ggauguuucccaguuacaa

SEQ ID NO: 625323 - RNA, 19 nt, Homo sapiens
  misc_RNA (1)...(19): siRNA sense strand
cgaagugggcacggaaaug

SEQ ID NO: 625324 - RNA, 19 nt, Homo sapiens
  misc_RNA (1)...(19): siRNA sense strand
ggcacggaaaugaucauaa

SEQ ID NO: 625325 - RNA, 19 nt, Homo sapiens
  misc_RNA (1)...(19): siRNA sense strand
agagaacuguggcuaaaau

SEQ ID NO: 625326 - RNA, 19 nt, Homo sapiens
  misc_RNA (1)...(19): siRNA sense strand
aagaucacgcaauuaaaga

SEQ ID NO: 625327 - RNA, 19 nt, Homo sapiens
  misc_RNA (1)...(19): siRNA sense strand
gaaugucaagaaugcaaag

SEQ ID NO: 625328 - RNA, 19 nt, Homo sapiens
  misc_RNA (1)...(19): siRNA sense strand
ggagcugcacagaauguca

SEQ ID NO: 625329 - RNA, 19 nt, Homo sapiens
  misc_RNA (1)...(19): siRNA sense strand
gauaauaaauggucuguga

SEQ ID NO: 625330 - RNA, 19 nt, Homo sapiens
  misc_RNA (1)...(19): siRNA sense strand
gauacaaauucgcagauaa

SEQ ID NO: 625331 - RNA, 19 nt, Homo sapiens
  misc_RNA (1)...(19): siRNA sense strand
gaaagagaacuguggcuaa

SEQ ID NO: 625332 - RNA, 19 nt, Homo sapiens
  misc_RNA (1)...(19): siRNA sense strand
caaauaccagccuagauua

SEQ ID NO: 625333 - RNA, 19 nt, Homo sapiens
  misc_RNA (1)...(19): siRNA sense strand
gcacggaaaugaucauaac

SEQ ID NO: 625334 - RNA, 19 nt, Homo sapiens
  misc_RNA (1)...(19): siRNA sense strand
guucugcacucacgucuuu

SEQ ID NO: 625335 - RNA, 19 nt, Homo sapiens
  misc_RNA (1)...(19): siRNA sense strand
aaagagaacuguggcuaaa

SEQ ID NO: 625336 - RNA, 19 nt, Homo sapiens
  misc_RNA (1)...(19): siRNA sense strand
ugucaagaaugcaaaguaa

SEQ ID NO: 625337 - RNA, 19 nt, Homo sapiens
  misc_RNA (1)...(19): siRNA sense strand
caaaguguuucuccaugaa

SEQ ID NO: 625338 - RNA, 19 nt, Homo sapiens
  misc_RNA (1)...(19): siRNA sense strand
gaagugggcacggaaauga

SEQ ID NO: 625339 - RNA, 19 nt, Homo sapiens
  misc_RNA (1)...(19): siRNA sense strand
ucaaaguguuucuccauga

SEQ ID NO: 625340 - RNA, 19 nt, Homo sapiens
  misc_RNA (1)...(19): siRNA sense strand
acaaauaccagccuagauu

SEQ ID NO: 625341 - RNA, 19 nt, Homo sapiens
  misc_RNA (1)...(19): siRNA sense strand
gcacagaaugucaagaaug

SEQ ID NO: 625342 - RNA, 19 nt, Homo sapiens
  misc_RNA (1)...(19): siRNA sense strand
cacaagaucacgcaauuaa

SEQ ID NO: 625343 - RNA, 19 nt, Homo sapiens
  misc_RNA (1)...(19): siRNA sense strand
gaucacagauacaaauucg

SEQ ID NO: 625344 - RNA, 19 nt, Homo sapiens
  misc_RNA (1)...(19): siRNA sense strand
gaaagcggaugaaaauaau

SEQ ID NO: 625345 - RNA, 19 nt, Homo sapiens
  misc_RNA (1)...(19): siRNA sense strand
ggagggaaucaaaguguuu

SEQ ID NO: 625346 - RNA, 19 nt, Homo sapiens
  misc_RNA (1)...(19): siRNA sense strand
acauggagcugcacagaau

SEQ ID NO: 625347 - RNA, 19 nt, Homo sapiens
  misc_RNA (1)...(19): siRNA sense strand
gcacaaauaccagccuaga

SEQ ID NO: 625348 - RNA, 19 nt, Homo sapiens
  misc_RNA (1)...(19): siRNA sense strand
ccaggagcauagccaaauu

SEQ ID NO: 625349 - RNA, 19 nt, Homo sapiens
  misc_RNA (1)...(19): siRNA sense strand
caagaucacgcaauuaaag

SEQ ID NO: 625350 - RNA, 19 nt, Homo sapiens
  misc_RNA (1)...(19): siRNA sense strand
gcucgucuccuuccagaaa

SEQ ID NO: 625351 - RNA, 19 nt, Homo sapiens
  misc_RNA (1)...(19): siRNA sense strand
ugaggcagcucgucuccuu

SEQ ID NO: 625352 - RNA, 19 nt, Homo sapiens
  misc_RNA (1)...(19): siRNA sense strand
gaucacgcaauuaaagauu

SEQ ID NO: 625353 - RNA, 19 nt, Homo sapiens
  misc_RNA (1)...(19): siRNA sense strand
agauacaaauucgcagaua

SEQ ID NO: 625354 - RNA, 19 nt, Homo sapiens
  misc_RNA (1)...(19): siRNA sense strand
ccacaagaucacgcaauua

SEQ ID NO: 625355 - RNA, 19 nt, Homo sapiens
  misc_RNA (1)...(19): siRNA sense strand
ggcggauguuucccaguua

SEQ ID NO: 625356 - RNA, 19 nt, Homo sapiens
  misc_RNA (1)...(19): siRNA sense strand
cggaaaugaucauaaccaa

SEQ ID NO: 625357 - RNA, 19 nt, Homo sapiens
  misc_RNA (1)...(19): siRNA sense strand
acaaccaccuggacccauu

SEQ ID NO: 625358 - RNA, 19 nt, Homo sapiens
  misc_RNA (1)...(19): siRNA sense strand
gagcauagccaaauuuacc

SEQ ID NO: 625359 - RNA, 19 nt, Homo sapiens
  misc_RNA (1)...(19): siRNA sense strand
cacagaaugucaagaaugc

SEQ ID NO: 625360 - RNA, 19 nt, Homo sapiens
  misc_RNA (1)...(19): siRNA sense strand
uuauagcagugacuuccua

SEQ ID NO: 625361 - RNA, 19 nt, Homo sapiens
  misc_RNA (1)...(19): siRNA sense strand
gauuacacaucgugaaagc

SEQ ID NO: 625362 - RNA, 19 nt, Homo sapiens
  misc_RNA (1)...(19): siRNA sense strand
ugaaagcggaugaaaauaa

SEQ ID NO: 625363 - RNA, 19 nt, Homo sapiens
  misc_RNA (1)...(19): siRNA sense strand
gauguuucccaguuacaaa

SEQ ID NO: 625364 - RNA, 19 nt, Homo sapiens
  misc_RNA (1)...(19): siRNA sense strand
caagaaugcaaaguaaaga

SEQ ID NO: 625365 - RNA, 19 nt, Homo sapiens
  misc_RNA (1)...(19): siRNA sense strand
uagauuacacaucgugaaa

SEQ ID NO: 625366 - RNA, 19 nt, Homo sapiens
  misc_RNA (1)...(19): siRNA sense strand
gacgaucacagauacaaau

SEQ ID NO: 625367 - RNA, 19 nt, Homo sapiens
  misc_RNA (1)...(19): siRNA sense strand
cauuguaccugccgacgau

SEQ ID NO: 625368 - RNA, 19 nt, Homo sapiens
  misc_RNA (1)...(19): siRNA sense strand
ucaagaaugcaaaguaaag

SEQ ID NO: 625369 - RNA, 19 nt, Homo sapiens
  misc_RNA (1)...(19): siRNA sense strand
uagccaaauuuaccauugu

SEQ ID NO: 625370 - RNA, 19 nt, Homo sapiens
  misc_RNA (1)...(19): siRNA sense strand
accacaagaucacgcaauu

SEQ ID NO: 625371 - RNA, 19 nt, Homo sapiens
  misc_RNA (1)...(19): siRNA sense strand
agccaaauuuaccauugua

SEQ ID NO: 625372 - RNA, 19 nt, Homo sapiens
  misc_RNA (1)...(19): siRNA sense strand
caauaccagugugagaaug

SEQ ID NO: 625373 - RNA, 19 nt, Homo sapiens
  misc_RNA (1)...(19): siRNA sense strand
aggcggauguuucccaguu

SEQ ID NO: 625374 - RNA, 19 nt, Homo sapiens
  misc_RNA (1)...(19): siRNA sense strand
aauaauggauuuggcucaa

SEQ ID NO: 625375 - RNA, 19 nt, Homo sapiens
  misc_RNA (1)...(19): siRNA sense strand
gcuggaaggcggauguuuc

SEQ ID NO: 625376 - RNA, 19 nt, Homo sapiens
  misc_RNA (1)...(19): siRNA sense strand
uaccagaaccacaagauca

SEQ ID NO: 625377 - RNA, 19 nt, Homo sapiens
  misc_RNA (1)...(19): siRNA sense strand
caggagcauagccaaauuu

SEQ ID NO: 625378 - RNA, 19 nt, Homo sapiens
  misc_RNA (1)...(19): siRNA sense strand
gagcugcacagaaugucaa

SEQ ID NO: 625379 - RNA, 19 nt, Homo sapiens
  misc_RNA (1)...(19): siRNA sense strand
ccauuugggcauauuauuc

SEQ ID NO: 625380 - RNA, 19 nt, Homo sapiens
  misc_RNA (1)...(19): siRNA sense strand
auagccaaauuuaccauug

SEQ ID NO: 625381 - RNA, 19 nt, Homo sapiens
  misc_RNA (1)...(19): siRNA sense strand
gacauggagcugcacagaa

SEQ ID NO: 625382 - RNA, 19 nt, Homo sapiens
  misc_RNA (1)...(19): siRNA sense strand
cuaaauuccaugcacaaau

SEQ ID NO: 625383 - RNA, 19 nt, Homo sapiens
  misc_RNA (1)...(19): siRNA sense strand
aacucaagcucaccaacaa

SEQ ID NO: 625384 - RNA, 19 nt, Homo sapiens
  misc_RNA (1)...(19): siRNA sense strand
caaauuuaccauuguacca

SEQ ID NO: 625385 - RNA, 19 nt, Homo sapiens
  misc_RNA (1)...(19): siRNA sense strand
ccaauaccagugugagaau

SEQ ID NO: 625386 - RNA, 19 nt, Homo sapiens
  misc_RNA (1)...(19): siRNA sense strand
caaccaccuggacccauuu

SEQ ID NO: 625387 - RNA, 19 nt, Homo sapiens
  misc_RNA (1)...(19): siRNA sense strand
aaacucaagcucaccaaca

SEQ ID NO: 625388 - RNA, 19 nt, Homo sapiens
  misc_RNA (1)...(19): siRNA sense strand
aggagcauagccaaauuua

SEQ ID NO: 625389 - RNA, 19 nt, Homo sapiens
  misc_RNA (1)...(19): siRNA sense strand
cagaaugucaagaaugcaa

SEQ ID NO: 625390 - RNA, 19 nt, Homo sapiens
  misc_RNA (1)...(19): siRNA sense strand
acaagaucacgcaauuaaa

SEQ ID NO: 625391 - RNA, 19 nt, Homo sapiens
  misc_RNA (1)...(19): siRNA sense strand
cugcacagaaugucaagaa

SEQ ID NO: 625392 - RNA, 19 nt, Homo sapiens
  misc_RNA (1)...(19): siRNA sense strand
cgacgaucacagauacaaa

SEQ ID NO: 625393 - RNA, 19 nt, Homo sapiens
  misc_RNA (1)...(19): siRNA sense strand
gggcacggaaaugaucaua

SEQ ID NO: 625394 - RNA, 19 nt, Homo sapiens
  misc_RNA (1)...(19): siRNA sense strand
auacagcguucugcacuca

SEQ ID NO: 625395 - RNA, 19 nt, Homo sapiens
  misc_RNA (1)...(19): siRNA sense strand
gcggauguuucccaguuac

SEQ ID NO: 625396 - RNA, 19 nt, Homo sapiens
  misc_RNA (1)...(19): siRNA sense strand
ugacauggagcugcacaga

SEQ ID NO: 625397 - RNA, 19 nt, Homo sapiens
  misc_RNA (1)...(19): siRNA sense strand
gucaagaaugcaaaguaaa

SEQ ID NO: 625398 - RNA, 19 nt, Homo sapiens
  misc_RNA (1)...(19): siRNA sense strand
cgaagugggcacggaaaug

SEQ ID NO: 625399 - RNA, 19 nt, Homo sapiens
  misc_RNA (1)...(19): siRNA sense strand
ggauguuucccaguuacaa

SEQ ID NO: 625400 - RNA, 19 nt, Homo sapiens
  misc_RNA (1)...(19): siRNA sense strand
gacgggccuuaaucccaaa

SEQ ID NO: 625401 - RNA, 19 nt, Homo sapiens
  misc_RNA (1)...(19): siRNA sense strand
ggcacggaaaugaucauaa

SEQ ID NO: 625402 - RNA, 19 nt, Homo sapiens
  misc_RNA (1)...(19): siRNA sense strand
agagaacuguggcuaaaau

SEQ ID NO: 625403 - RNA, 19 nt, Homo sapiens
  misc_RNA (1)...(19): siRNA sense strand
aagaucacgcaauuaaaga

SEQ ID NO: 625404 - RNA, 19 nt, Homo sapiens
  misc_RNA (1)...(19): siRNA sense strand
gaaugucaagaaugcaaag

SEQ ID NO: 625405 - RNA, 19 nt, Homo sapiens
  misc_RNA (1)...(19): siRNA sense strand
ggagcugcacagaauguca

SEQ ID NO: 625406 - RNA, 19 nt, Homo sapiens
  misc_RNA (1)...(19): siRNA sense strand
gauaauaaauggucuguga

SEQ ID NO: 625407 - RNA, 19 nt, Homo sapiens
  misc_RNA (1)...(19): siRNA sense strand
gauacaaauucgcagauaa

SEQ ID NO: 625408 - RNA, 19 nt, Homo sapiens
  misc_RNA (1)...(19): siRNA sense strand
gaaagagaacuguggcuaa

SEQ ID NO: 625409 - RNA, 19 nt, Homo sapiens
  misc_RNA (1)...(19): siRNA sense strand
caaauaccagccuagauua

SEQ ID NO: 625410 - RNA, 19 nt, Homo sapiens
  misc_RNA (1)...(19): siRNA sense strand
gcacggaaaugaucauaac

SEQ ID NO: 625411 - RNA, 19 nt, Homo sapiens
  misc_RNA (1)...(19): siRNA sense strand
guucugcacucacgucuuu

SEQ ID NO: 625412 - RNA, 19 nt, Homo sapiens
  misc_RNA (1)...(19): siRNA sense strand
aaagagaacuguggcuaaa

SEQ ID NO: 625413 - RNA, 19 nt, Homo sapiens
  misc_RNA (1)...(19): siRNA sense strand
ugucaagaaugcaaaguaa

SEQ ID NO: 625414 - RNA, 19 nt, Homo sapiens
  misc_RNA (1)...(19): siRNA sense strand
caaaguguuucuccaugaa

SEQ ID NO: 625415 - RNA, 19 nt, Homo sapiens
  misc_RNA (1)...(19): siRNA sense strand
gaagugggcacggaaauga

SEQ ID NO: 625416 - RNA, 19 nt, Homo sapiens
  misc_RNA (1)...(19): siRNA sense strand
ucaaaguguuucuccauga

SEQ ID NO: 625417 - RNA, 19 nt, Homo sapiens
  misc_RNA (1)...(19): siRNA sense strand
acaaauaccagccuagauu

SEQ ID NO: 625418 - RNA, 19 nt, Homo sapiens
  misc_RNA (1)...(19): siRNA sense strand
gcacagaaugucaagaaug

SEQ ID NO: 625419 - RNA, 19 nt, Homo sapiens
  misc_RNA (1)...(19): siRNA sense strand
cacaagaucacgcaauuaa

SEQ ID NO: 625420 - RNA, 19 nt, Homo sapiens
  misc_RNA (1)...(19): siRNA sense strand
gaucacagauacaaauucg

SEQ ID NO: 625421 - RNA, 19 nt, Homo sapiens
  misc_RNA (1)...(19): siRNA sense strand
gaaagcggaugaaaauaau

SEQ ID NO: 625422 - RNA, 19 nt, Homo sapiens
  misc_RNA (1)...(19): siRNA sense strand
acauggagcugcacagaau

SEQ ID NO: 625423 - RNA, 19 nt, Homo sapiens
  misc_RNA (1)...(19): siRNA sense strand
ggagggaaucaaaguguuu

SEQ ID NO: 625424 - RNA, 19 nt, Homo sapiens
  misc_RNA (1)...(19): siRNA sense strand
gcacaaauaccagccuaga

SEQ ID NO: 625425 - RNA, 19 nt, Homo sapiens
  misc_RNA (1)...(19): siRNA sense strand
ccaggagcauagccaaauu

SEQ ID NO: 625426 - RNA, 19 nt, Homo sapiens
  misc_RNA (1)...(19): siRNA sense strand
caagaucacgcaauuaaag

SEQ ID NO: 625427 - RNA, 19 nt, Homo sapiens
  misc_RNA (1)...(19): siRNA sense strand
gcucgucuccuuccagaaa

SEQ ID NO: 625428 - RNA, 19 nt, Homo sapiens
  misc_RNA (1)...(19): siRNA sense strand
ugaggcagcucgucuccuu

SEQ ID NO: 625429 - RNA, 19 nt, Homo sapiens
  misc_RNA (1)...(19): siRNA sense strand
gggcauggagggaaucaaa

SEQ ID NO: 625430 - RNA, 19 nt, Homo sapiens
  misc_RNA (1)...(19): siRNA sense strand
gaucacgcaauuaaagauu

SEQ ID NO: 625431 - RNA, 19 nt, Homo sapiens
  misc_RNA (1)...(19): siRNA sense strand
agauacaaauucgcagaua

SEQ ID NO: 625432 - RNA, 19 nt, Homo sapiens
  misc_RNA (1)...(19): siRNA sense strand
ccacaagaucacgcaauua

SEQ ID NO: 625433 - RNA, 19 nt, Homo sapiens
  misc_RNA (1)...(19): siRNA sense strand
ggcggauguuucccaguua

SEQ ID NO: 625434 - RNA, 19 nt, Homo sapiens
  misc_RNA (1)...(19): siRNA sense strand
cggaaaugaucauaaccaa

SEQ ID NO: 625435 - RNA, 19 nt, Homo sapiens
  misc_RNA (1)...(19): siRNA sense strand
acaaccaccuggacccauu

SEQ ID NO: 625436 - RNA, 19 nt, Homo sapiens
  misc_RNA (1)...(19): siRNA sense strand
gagcauagccaaauuuacc

SEQ ID NO: 625437 - RNA, 19 nt, Homo sapiens
  misc_RNA (1)...(19): siRNA sense strand
cacagaaugucaagaaugc

SEQ ID NO: 625438 - RNA, 19 nt, Homo sapiens
  misc_RNA (1)...(19): siRNA sense strand
uuauagcagugacuuccua

SEQ ID NO: 625439 - RNA, 19 nt, Homo sapiens
  misc_RNA (1)...(19): siRNA sense strand
gauuacacaucgugaaagc

SEQ ID NO: 625440 - RNA, 19 nt, Homo sapiens
  misc_RNA (1)...(19): siRNA sense strand
ugaaagcggaugaaaauaa

SEQ ID NO: 625441 - RNA, 19 nt, Homo sapiens
  misc_RNA (1)...(19): siRNA sense strand
gauguuucccaguuacaaa

SEQ ID NO: 625442 - RNA, 19 nt, Homo sapiens
  misc_RNA (1)...(19): siRNA sense strand
caagaaugcaaaguaaaga

SEQ ID NO: 625443 - RNA, 19 nt, Homo sapiens
  misc_RNA (1)...(19): siRNA sense strand
uagauuacacaucgugaaa

SEQ ID NO: 625444 - RNA, 19 nt, Homo sapiens
  misc_RNA (1)...(19): siRNA sense strand
gacgaucacagauacaaau

SEQ ID NO: 625445 - RNA, 19 nt, Homo sapiens
  misc_RNA (1)...(19): siRNA sense strand
cauuguaccugccgacgau

SEQ ID NO: 625446 - RNA, 19 nt, Homo sapiens
  misc_RNA (1)...(19): siRNA sense strand
ucaagaaugcaaaguaaag

SEQ ID NO: 625447 - RNA, 19 nt, Homo sapiens
  misc_RNA (1)...(19): siRNA sense strand
uagccaaauuuaccauugu

SEQ ID NO: 625448 - RNA, 19 nt, Homo sapiens
  misc_RNA (1)...(19): siRNA sense strand
accacaagaucacgcaauu

SEQ ID NO: 625449 - RNA, 19 nt, Homo sapiens
  misc_RNA (1)...(19): siRNA sense strand
agccaaauuuaccauugua

SEQ ID NO: 625450 - RNA, 19 nt, Homo sapiens
  misc_RNA (1)...(19): siRNA sense strand
caauaccagugugagaaug

SEQ ID NO: 625451 - RNA, 19 nt, Homo sapiens
  misc_RNA (1)...(19): siRNA sense strand
aauaauggauuuggcucaa

SEQ ID NO: 625452 - RNA, 19 nt, Homo sapiens
  misc_RNA (1)...(19): siRNA sense strand
gcuggaaggcggauguuuc

SEQ ID NO: 625453 - RNA, 19 nt, Homo sapiens
  misc_RNA (1)...(19): siRNA sense strand
aggcggauguuucccaguu

SEQ ID NO: 625454 - RNA, 19 nt, Homo sapiens
  misc_RNA (1)...(19): siRNA sense strand
gcauggagggaaucaaagu

SEQ ID NO: 625455 - RNA, 19 nt, Homo sapiens
  misc_RNA (1)...(19): siRNA sense strand
caggagcauagccaaauuu

SEQ ID NO: 625456 - RNA, 19 nt, Homo sapiens
  misc_RNA (1)...(19): siRNA sense strand
gagcugcacagaaugucaa

SEQ ID NO: 625457 - RNA, 19 nt, Homo sapiens
  misc_RNA (1)...(19): siRNA sense strand
uaccagaaccacaagauca

SEQ ID NO: 625458 - RNA, 19 nt, Homo sapiens
  misc_RNA (1)...(19): siRNA sense strand
ccauuugggcauauuauuc

SEQ ID NO: 625459 - RNA, 19 nt, Homo sapiens
  misc_RNA (1)...(19): siRNA sense strand
auagccaaauuuaccauug

SEQ ID NO: 625460 - RNA, 19 nt, Homo sapiens
  misc_RNA (1)...(19): siRNA sense strand
gacauggagcugcacagaa

SEQ ID NO: 625461 - RNA, 19 nt, Homo sapiens
  misc_RNA (1)...(19): siRNA sense strand
cuaaauuccaugcacaaau

SEQ ID NO: 625462 - RNA, 19 nt, Homo sapiens
  misc_RNA (1)...(19): siRNA sense strand
aacucaagcucaccaacaa

SEQ ID NO: 625463 - RNA, 19 nt, Homo sapiens
  misc_RNA (1)...(19): siRNA sense strand
caaauuuaccauuguacca

SEQ ID NO: 625464 - RNA, 19 nt, Homo sapiens
  misc_RNA (1)...(19): siRNA sense strand
ccaauaccagugugagaau

SEQ ID NO: 625465 - RNA, 19 nt, Homo sapiens
  misc_RNA (1)...(19): siRNA sense strand
caaccaccuggacccauuu

SEQ ID NO: 625466 - RNA, 19 nt, Homo sapiens
  misc_RNA (1)...(19): siRNA sense strand
aaacucaagcucaccaaca

SEQ ID NO: 625467 - RNA, 19 nt, Homo sapiens
  misc_RNA (1)...(19): siRNA sense strand
aggagcauagccaaauuua

SEQ ID NO: 625468 - RNA, 19 nt, Homo sapiens
  misc_RNA (1)...(19): siRNA sense strand
uggagggaaucaaaguguu

SEQ ID NO: 625469 - RNA, 19 nt, Homo sapiens
  misc_RNA (1)...(19): siRNA sense strand
cagaaugucaagaaugcaa

SEQ ID NO: 625470 - RNA, 19 nt, Homo sapiens
  misc_RNA (1)...(19): siRNA sense strand
acaagaucacgcaauuaaa

SEQ ID NO: 625471 - RNA, 19 nt, Homo sapiens
  misc_RNA (1)...(19): siRNA sense strand
cugcacagaaugucaagaa

SEQ ID NO: 625472 - RNA, 19 nt, Homo sapiens
  misc_RNA (1)...(19): siRNA sense strand
cgacgaucacagauacaaa

SEQ ID NO: 625473 - RNA, 19 nt, Homo sapiens
  misc_RNA (1)...(19): siRNA sense strand
auacagcguucugcacuca

SEQ ID NO: 625474 - RNA, 19 nt, Homo sapiens
  misc_RNA (1)...(19): siRNA sense strand
gggcacggaaaugaucaua

SEQ ID NO: 625475 - RNA, 19 nt, Homo sapiens
  misc_RNA (1)...(19): siRNA sense strand
gcggauguuucccaguuac

SEQ ID NO: 625476 - RNA, 19 nt, Homo sapiens
  misc_RNA (1)...(19): siRNA sense strand
ugacauggagcugcacaga

SEQ ID NO: 625477 - RNA, 19 nt, Homo sapiens
  misc_RNA (1)...(19): siRNA sense strand
gucaagaaugcaaaguaaa

SEQ ID NO: 625478 - RNA, 19 nt, Homo sapiens
  misc_RNA (1)...(19): siRNA sense strand
gacgggccuuaaucccaaa

SEQ ID NO: 625479 - RNA, 19 nt, Homo sapiens
  misc_RNA (1)...(19): siRNA sense strand
ggauguuucccaguuacaa

SEQ ID NO: 625480 - RNA, 19 nt, Homo sapiens
  misc_RNA (1)...(19): siRNA sense strand
cgaagugggcacggaaaug

SEQ ID NO: 625481 - RNA, 19 nt, Homo sapiens
  misc_RNA (1)...(19): siRNA sense strand
ggcacggaaaugaucauaa

SEQ ID NO: 625482 - RNA, 19 nt, Homo sapiens
  misc_RNA (1)...(19): siRNA sense strand
agagaacuguggcuaaaau

SEQ ID NO: 625483 - RNA, 19 nt, Homo sapiens
  misc_RNA (1)...(19): siRNA sense strand
aagaucacgcaauuaaaga

SEQ ID NO: 625484 - RNA, 19 nt, Homo sapiens
  misc_RNA (1)...(19): siRNA sense strand
gaaugucaagaaugcaaag

SEQ ID NO: 625485 - RNA, 19 nt, Homo sapiens
  misc_RNA (1)...(19): siRNA sense strand
ggagcugcacagaauguca

SEQ ID NO: 625486 - RNA, 19 nt, Homo sapiens
  misc_RNA (1)...(19): siRNA sense strand
gauaauaaauggucuguga

SEQ ID NO: 625487 - RNA, 19 nt, Homo sapiens
  misc_RNA (1)...(19): siRNA sense strand
gauacaaauucgcagauaa

SEQ ID NO: 625488 - RNA, 19 nt, Homo sapiens
  misc_RNA (1)...(19): siRNA sense strand
gaaagagaacuguggcuaa

SEQ ID NO: 625489 - RNA, 19 nt, Homo sapiens
  misc_RNA (1)...(19): siRNA sense strand
caaauaccagccuagauua

SEQ ID NO: 625490 - RNA, 19 nt, Homo sapiens
  misc_RNA (1)...(19): siRNA sense strand
gcacggaaaugaucauaac

SEQ ID NO: 625491 - RNA, 19 nt, Homo sapiens
  misc_RNA (1)...(19): siRNA sense strand
guucugcacucacgucuuu

SEQ ID NO: 625492 - RNA, 19 nt, Homo sapiens
  misc_RNA (1)...(19): siRNA sense strand
aaagagaacuguggcuaaa

SEQ ID NO: 625493 - RNA, 19 nt, Homo sapiens
  misc_RNA (1)...(19): siRNA sense strand
ugucaagaaugcaaaguaa

SEQ ID NO: 625494 - RNA, 19 nt, Homo sapiens
  misc_RNA (1)...(19): siRNA sense strand
caaaguguuucuccaugaa

SEQ ID NO: 625495 - RNA, 19 nt, Homo sapiens
  misc_RNA (1)...(19): siRNA sense strand
gaagugggcacggaaauga

SEQ ID NO: 625496 - RNA, 19 nt, Homo sapiens
  misc_RNA (1)...(19): siRNA sense strand
ucaaaguguuucuccauga

SEQ ID NO: 625497 - RNA, 19 nt, Homo sapiens
  misc_RNA (1)...(19): siRNA sense strand
acaaauaccagccuagauu

SEQ ID NO: 625498 - RNA, 19 nt, Homo sapiens
  misc_RNA (1)...(19): siRNA sense strand
gcacagaaugucaagaaug

SEQ ID NO: 625499 - RNA, 19 nt, Homo sapiens
  misc_RNA (1)...(19): siRNA sense strand
cacaagaucacgcaauuaa

SEQ ID NO: 625500 - RNA, 19 nt, Homo sapiens
  misc_RNA (1)...(19): siRNA sense strand
gaucacagauacaaauucg

SEQ ID NO: 625501 - RNA, 19 nt, Homo sapiens
  misc_RNA (1)...(19): siRNA sense strand
gaaagcggaugaaaauaau

SEQ ID NO: 625502 - RNA, 19 nt, Homo sapiens
  misc_RNA (1)...(19): siRNA sense strand
acauggagcugcacagaau

SEQ ID NO: 625503 - RNA, 19 nt, Homo sapiens
  misc_RNA (1)...(19): siRNA sense strand
ggagggaaucaaaguguuu

SEQ ID NO: 625504 - RNA, 19 nt, Homo sapiens
  misc_RNA (1)...(19): siRNA sense strand
gcacaaauaccagccuaga

SEQ ID NO: 625505 - RNA, 19 nt, Homo sapiens
  misc_RNA (1)...(19): siRNA sense strand
ccaggagcauagccaaauu

SEQ ID NO: 625506 - RNA, 19 nt, Homo sapiens
  misc_RNA (1)...(19): siRNA sense strand
caagaucacgcaauuaaag

SEQ ID NO: 625507 - RNA, 19 nt, Homo sapiens
  misc_RNA (1)...(19): siRNA sense strand
gcucgucuccuuccagaaa

SEQ ID NO: 625508 - RNA, 19 nt, Homo sapiens
  misc_RNA (1)...(19): siRNA sense strand
ugaggcagcucgucuccuu

SEQ ID NO: 625509 - RNA, 19 nt, Homo sapiens
  misc_RNA (1)...(19): siRNA sense strand
gggcauggagggaaucaaa

SEQ ID NO: 625510 - RNA, 19 nt, Homo sapiens
  misc_RNA (1)...(19): siRNA sense strand
gaucacgcaauuaaagauu

SEQ ID NO: 625511 - RNA, 19 nt, Homo sapiens
  misc_RNA (1)...(19): siRNA sense strand
agauacaaauucgcagaua

SEQ ID NO: 625512 - RNA, 19 nt, Homo sapiens
  misc_RNA (1)...(19): siRNA sense strand
ccacaagaucacgcaauua

SEQ ID NO: 625513 - RNA, 19 nt, Homo sapiens
  misc_RNA (1)...(19): siRNA sense strand
ggcggauguuucccaguua

SEQ ID NO: 625514 - RNA, 19 nt, Homo sapiens
  misc_RNA (1)...(19): siRNA sense strand
cggaaaugaucauaaccaa

SEQ ID NO: 625515 - RNA, 19 nt, Homo sapiens
  misc_RNA (1)...(19): siRNA sense strand
acaaccaccuggacccauu

SEQ ID NO: 625516 - RNA, 19 nt, Homo sapiens
  misc_RNA (1)...(19): siRNA sense strand
gagcauagccaaauuuacc

SEQ ID NO: 625517 - RNA, 19 nt, Homo sapiens
  misc_RNA (1)...(19): siRNA sense strand
cacagaaugucaagaaugc

SEQ ID NO: 625518 - RNA, 19 nt, Homo sapiens
  misc_RNA (1)...(19): siRNA sense strand
uuauagcagugacuuccua

SEQ ID NO: 625519 - RNA, 19 nt, Homo sapiens
  misc_RNA (1)...(19): siRNA sense strand
gauuacacaucgugaaagc

SEQ ID NO: 625520 - RNA, 19 nt, Homo sapiens
  misc_RNA (1)...(19): siRNA sense strand
ugaaagcggaugaaaauaa

SEQ ID NO: 625521 - RNA, 19 nt, Homo sapiens
  misc_RNA (1)...(19): siRNA sense strand
gauguuucccaguuacaaa

SEQ ID NO: 625522 - RNA, 19 nt, Homo sapiens
  misc_RNA (1)...(19): siRNA sense strand
caagaaugcaaaguaaaga

SEQ ID NO: 625523 - RNA, 19 nt, Homo sapiens
  misc_RNA (1)...(19): siRNA sense strand
uagauuacacaucgugaaa

SEQ ID NO: 625524 - RNA, 19 nt, Homo sapiens
  misc_RNA (1)...(19): siRNA sense strand
gacgaucacagauacaaau

SEQ ID NO: 625525 - RNA, 19 nt, Homo sapiens
  misc_RNA (1)...(19): siRNA sense strand
cauuguaccugccgacgau

SEQ ID NO: 625526 - RNA, 19 nt, Homo sapiens
  misc_RNA (1)...(19): siRNA sense strand
ucaagaaugcaaaguaaag

SEQ ID NO: 625527 - RNA, 19 nt, Homo sapiens
  misc_RNA (1)...(19): siRNA sense strand
uagccaaauuuaccauugu

SEQ ID NO: 625528 - RNA, 19 nt, Homo sapiens
  misc_RNA (1)...(19): siRNA sense strand
accacaagaucacgcaauu

SEQ ID NO: 625529 - RNA, 19 nt, Homo sapiens
  misc_RNA (1)...(19): siRNA sense strand
agccaaauuuaccauugua

SEQ ID NO: 625530 - RNA, 19 nt, Homo sapiens
  misc_RNA (1)...(19): siRNA sense strand
caauaccagugugagaaug

SEQ ID NO: 625531 - RNA, 19 nt, Homo sapiens
  misc_RNA (1)...(19): siRNA sense strand
aauaauggauuuggcucaa

SEQ ID NO: 625532 - RNA, 19 nt, Homo sapiens
  misc_RNA (1)...(19): siRNA sense strand
gcuggaaggcggauguuuc

SEQ ID NO: 625533 - RNA, 19 nt, Homo sapiens
  misc_RNA (1)...(19): siRNA sense strand
aggcggauguuucccaguu

SEQ ID NO: 625534 - RNA, 19 nt, Homo sapiens
  misc_RNA (1)...(19): siRNA sense strand
gcauggagggaaucaaagu

SEQ ID NO: 625535 - RNA, 19 nt, Homo sapiens
  misc_RNA (1)...(19): siRNA sense strand
caggagcauagccaaauuu

SEQ ID NO: 625536 - RNA, 19 nt, Homo sapiens
  misc_RNA (1)...(19): siRNA sense strand
gagcugcacagaaugucaa

SEQ ID NO: 625537 - RNA, 19 nt, Homo sapiens
  misc_RNA (1)...(19): siRNA sense strand
uaccagaaccacaagauca

SEQ ID NO: 625538 - RNA, 19 nt, Homo sapiens
  misc_RNA (1)...(19): siRNA sense strand
ccauuugggcauauuauuc

SEQ ID NO: 625539 - RNA, 19 nt, Homo sapiens
  misc_RNA (1)...(19): siRNA sense strand
auagccaaauuuaccauug

SEQ ID NO: 625540 - RNA, 19 nt, Homo sapiens
  misc_RNA (1)...(19): siRNA sense strand
gacauggagcugcacagaa

SEQ ID NO: 625541 - RNA, 19 nt, Homo sapiens
  misc_RNA (1)...(19): siRNA sense strand
cuaaauuccaugcacaaau

SEQ ID NO: 625542 - RNA, 19 nt, Homo sapiens
  misc_RNA (1)...(19): siRNA sense strand
aacucaagcucaccaacaa

SEQ ID NO: 625543 - RNA, 19 nt, Homo sapiens
  misc_RNA (1)...(19): siRNA sense strand
caaauuuaccauuguacca

SEQ ID NO: 625544 - RNA, 19 nt, Homo sapiens
  misc_RNA (1)...(19): siRNA sense strand
ccaauaccagugugagaau

SEQ ID NO: 625545 - RNA, 19 nt, Homo sapiens
  misc_RNA (1)...(19): siRNA sense strand
caaccaccuggacccauuu

SEQ ID NO: 625546 - RNA, 19 nt, Homo sapiens
  misc_RNA (1)...(19): siRNA sense strand
aaacucaagcucaccaaca

SEQ ID NO: 625547 - RNA, 19 nt, Homo sapiens
  misc_RNA (1)...(19): siRNA sense strand
aggagcauagccaaauuua

SEQ ID NO: 625548 - RNA, 19 nt, Homo sapiens
  misc_RNA (1)...(19): siRNA sense strand
uggagggaaucaaaguguu

SEQ ID NO: 625549 - RNA, 19 nt, Homo sapiens
  misc_RNA (1)...(19): siRNA sense strand
cagaaugucaagaaugcaa

SEQ ID NO: 625550 - RNA, 19 nt, Homo sapiens
  misc_RNA (1)...(19): siRNA sense strand
acaagaucacgcaauuaaa

SEQ ID NO: 625551 - RNA, 19 nt, Homo sapiens
  misc_RNA (1)...(19): siRNA sense strand
cugcacagaaugucaagaa

SEQ ID NO: 625552 - RNA, 19 nt, Homo sapiens
  misc_RNA (1)...(19): siRNA sense strand
cgacgaucacagauacaaa

SEQ ID NO: 625553 - RNA, 19 nt, Homo sapiens
  misc_RNA (1)...(19): siRNA sense strand
auacagcguucugcacuca

SEQ ID NO: 625554 - RNA, 19 nt, Homo sapiens
  misc_RNA (1)...(19): siRNA sense strand
gggcacggaaaugaucaua

SEQ ID NO: 625555 - RNA, 19 nt, Homo sapiens
  misc_RNA (1)...(19): siRNA sense strand
gcggauguuucccaguuac

SEQ ID NO: 625556 - RNA, 19 nt, Homo sapiens
  misc_RNA (1)...(19): siRNA sense strand
ugacauggagcugcacaga

SEQ ID NO: 625557 - RNA, 19 nt, Homo sapiens
  misc_RNA (1)...(19): siRNA sense strand
gucaagaaugcaaaguaaa

SEQ ID NO: 625558 - RNA, 19 nt, Homo sapiens
  misc_RNA (1)...(19): siRNA sense strand
gacgggccuuaaucccaaa

SEQ ID NO: 625559 - RNA, 19 nt, Homo sapiens
  misc_RNA (1)...(19): siRNA sense strand
ggauguuucccaguuacaa

SEQ ID NO: 625560 - RNA, 19 nt, Homo sapiens
  misc_RNA (1)...(19): siRNA sense strand
cgaagugggcacggaaaug

SEQ ID NO: 625561 - RNA, 19 nt, Homo sapiens
  misc_RNA (1)...(19): siRNA sense strand
ggcacggaaaugaucauaa

SEQ ID NO: 625562 - RNA, 19 nt, Homo sapiens
  misc_RNA (1)...(19): siRNA sense strand
agagaacuguggcuaaaau

SEQ ID NO: 625563 - RNA, 19 nt, Homo sapiens
  misc_RNA (1)...(19): siRNA sense strand
aagaucacgcaauuaaaga

SEQ ID NO: 625564 - RNA, 19 nt, Homo sapiens
  misc_RNA (1)...(19): siRNA sense strand
gaaugucaagaaugcaaag

SEQ ID NO: 625565 - RNA, 19 nt, Homo sapiens
  misc_RNA (1)...(19): siRNA sense strand
ggagcugcacagaauguca

SEQ ID NO: 625566 - RNA, 19 nt, Homo sapiens
  misc_RNA (1)...(19): siRNA sense strand
gauaauaaauggucuguga

SEQ ID NO: 625567 - RNA, 19 nt, Homo sapiens
  misc_RNA (1)...(19): siRNA sense strand
gauacaaauucgcagauaa

SEQ ID NO: 625568 - RNA, 19 nt, Homo sapiens
  misc_RNA (1)...(19): siRNA sense strand
gaaagagaacuguggcuaa

SEQ ID NO: 625569 - RNA, 19 nt, Homo sapiens
  misc_RNA (1)...(19): siRNA sense strand
caaauaccagccuagauua

SEQ ID NO: 625570 - RNA, 19 nt, Homo sapiens
  misc_RNA (1)...(19): siRNA sense strand
gcacggaaaugaucauaac

SEQ ID NO: 625571 - RNA, 19 nt, Homo sapiens
  misc_RNA (1)...(19): siRNA sense strand
guucugcacucacgucuuu

SEQ ID NO: 625572 - RNA, 19 nt, Homo sapiens
  misc_RNA (1)...(19): siRNA sense strand
aaagagaacuguggcuaaa

SEQ ID NO: 625573 - RNA, 19 nt, Homo sapiens
  misc_RNA (1)...(19): siRNA sense strand
ugucaagaaugcaaaguaa

SEQ ID NO: 625574 - RNA, 19 nt, Homo sapiens
  misc_RNA (1)...(19): siRNA sense strand
caaaguguuucuccaugaa

SEQ ID NO: 625575 - RNA, 19 nt, Homo sapiens
  misc_RNA (1)...(19): siRNA sense strand
gaagugggcacggaaauga

SEQ ID NO: 625576 - RNA, 19 nt, Homo sapiens
  misc_RNA (1)...(19): siRNA sense strand
ucaaaguguuucuccauga

SEQ ID NO: 625577 - RNA, 19 nt, Homo sapiens
  misc_RNA (1)...(19): siRNA sense strand
acaaauaccagccuagauu

SEQ ID NO: 625578 - RNA, 19 nt, Homo sapiens
  misc_RNA (1)...(19): siRNA sense strand
gcacagaaugucaagaaug

SEQ ID NO: 625579 - RNA, 19 nt, Homo sapiens
  misc_RNA (1)...(19): siRNA sense strand
cacaagaucacgcaauuaa

SEQ ID NO: 625580 - RNA, 19 nt, Homo sapiens
  misc_RNA (1)...(19): siRNA sense strand
gaucacagauacaaauucg

SEQ ID NO: 625581 - RNA, 19 nt, Homo sapiens
  misc_RNA (1)...(19): siRNA sense strand
gaaagcggaugaaaauaau

SEQ ID NO: 625582 - RNA, 19 nt, Homo sapiens
  misc_RNA (1)...(19): siRNA sense strand
acauggagcugcacagaau

SEQ ID NO: 625583 - RNA, 19 nt, Homo sapiens
  misc_RNA (1)...(19): siRNA sense strand
ggagggaaucaaaguguuu

SEQ ID NO: 625584 - RNA, 19 nt, Homo sapiens
  misc_RNA (1)...(19): siRNA sense strand
gcacaaauaccagccuaga

SEQ ID NO: 625585 - RNA, 19 nt, Homo sapiens
  misc_RNA (1)...(19): siRNA sense strand
ccaggagcauagccaaauu

SEQ ID NO: 625586 - RNA, 19 nt, Homo sapiens
  misc_RNA (1)...(19): siRNA sense strand
caagaucacgcaauuaaag

SEQ ID NO: 625587 - RNA, 19 nt, Homo sapiens
  misc_RNA (1)...(19): siRNA sense strand
gcucgucuccuuccagaaa

SEQ ID NO: 625588 - RNA, 19 nt, Homo sapiens
  misc_RNA (1)...(19): siRNA sense strand
ugaggcagcucgucuccuu

SEQ ID NO: 625589 - RNA, 19 nt, Homo sapiens
  misc_RNA (1)...(19): siRNA sense strand
gggcauggagggaaucaaa

SEQ ID NO: 625590 - RNA, 19 nt, Homo sapiens
  misc_RNA (1)...(19): siRNA sense strand
gaucacgcaauuaaagauu

SEQ ID NO: 625591 - RNA, 19 nt, Homo sapiens
  misc_RNA (1)...(19): siRNA sense strand
agauacaaauucgcagaua

SEQ ID NO: 625592 - RNA, 19 nt, Homo sapiens
  misc_RNA (1)...(19): siRNA sense strand
ccacaagaucacgcaauua

SEQ ID NO: 625593 - RNA, 19 nt, Homo sapiens
  misc_RNA (1)...(19): siRNA sense strand
ggcggauguuucccaguua

SEQ ID NO: 625594 - RNA, 19 nt, Homo sapiens
  misc_RNA (1)...(19): siRNA sense strand
cggaaaugaucauaaccaa

SEQ ID NO: 625595 - RNA, 19 nt, Homo sapiens
  misc_RNA (1)...(19): siRNA sense strand
acaaccaccuggacccauu

SEQ ID NO: 625596 - RNA, 19 nt, Homo sapiens
  misc_RNA (1)...(19): siRNA sense strand
gagcauagccaaauuuacc

SEQ ID NO: 625597 - RNA, 19 nt, Homo sapiens
  misc_RNA (1)...(19): siRNA sense strand
cacagaaugucaagaaugc

SEQ ID NO: 625598 - RNA, 19 nt, Homo sapiens
  misc_RNA (1)...(19): siRNA sense strand
uuauagcagugacuuccua

SEQ ID NO: 625599 - RNA, 19 nt, Homo sapiens
  misc_RNA (1)...(19): siRNA sense strand
gauuacacaucgugaaagc

SEQ ID NO: 625600 - RNA, 19 nt, Homo sapiens
  misc_RNA (1)...(19): siRNA sense strand
ugaaagcggaugaaaauaa

SEQ ID NO: 625601 - RNA, 19 nt, Homo sapiens
  misc_RNA (1)...(19): siRNA sense strand
gauguuucccaguuacaaa

SEQ ID NO: 625602 - RNA, 19 nt, Homo sapiens
  misc_RNA (1)...(19): siRNA sense strand
caagaaugcaaaguaaaga

SEQ ID NO: 625603 - RNA, 19 nt, Homo sapiens
  misc_RNA (1)...(19): siRNA sense strand
uagauuacacaucgugaaa

SEQ ID NO: 625604 - RNA, 19 nt, Homo sapiens
  misc_RNA (1)...(19): siRNA sense strand
gacgaucacagauacaaau

SEQ ID NO: 625605 - RNA, 19 nt, Homo sapiens
  misc_RNA (1)...(19): siRNA sense strand
cauuguaccugccgacgau

SEQ ID NO: 625606 - RNA, 19 nt, Homo sapiens
  misc_RNA (1)...(19): siRNA sense strand
ucaagaaugcaaaguaaag

SEQ ID NO: 625607 - RNA, 19 nt, Homo sapiens
  misc_RNA (1)...(19): siRNA sense strand
uagccaaauuuaccauugu

SEQ ID NO: 625608 - RNA, 19 nt, Homo sapiens
  misc_RNA (1)...(19): siRNA sense strand
accacaagaucacgcaauu

SEQ ID NO: 625609 - RNA, 19 nt, Homo sapiens
  misc_RNA (1)...(19): siRNA sense strand
agccaaauuuaccauugua

SEQ ID NO: 625610 - RNA, 19 nt, Homo sapiens
  misc_RNA (1)...(19): siRNA sense strand
caauaccagugugagaaug

SEQ ID NO: 625611 - RNA, 19 nt, Homo sapiens
  misc_RNA (1)...(19): siRNA sense strand
aauaauggauuuggcucaa

SEQ ID NO: 625612 - RNA, 19 nt, Homo sapiens
  misc_RNA (1)...(19): siRNA sense strand
gcuggaaggcggauguuuc

SEQ ID NO: 625613 - RNA, 19 nt, Homo sapiens
  misc_RNA (1)...(19): siRNA sense strand
aggcggauguuucccaguu

SEQ ID NO: 625614 - RNA, 19 nt, Homo sapiens
  misc_RNA (1)...(19): siRNA sense strand
gcauggagggaaucaaagu

SEQ ID NO: 625615 - RNA, 19 nt, Homo sapiens
  misc_RNA (1)...(19): siRNA sense strand
caggagcauagccaaauuu

SEQ ID NO: 625616 - RNA, 19 nt, Homo sapiens
  misc_RNA (1)...(19): siRNA sense strand
gagcugcacagaaugucaa

SEQ ID NO: 625617 - RNA, 19 nt, Homo sapiens
  misc_RNA (1)...(19): siRNA sense strand
uaccagaaccacaagauca

SEQ ID NO: 625618 - RNA, 19 nt, Homo sapiens
  misc_RNA (1)...(19): siRNA sense strand
ccauuugggcauauuauuc

SEQ ID NO: 625619 - RNA, 19 nt, Homo sapiens
  misc_RNA (1)...(19): siRNA sense strand
auagccaaauuuaccauug

SEQ ID NO: 625620 - RNA, 19 nt, Homo sapiens
  misc_RNA (1)...(19): siRNA sense strand
gacauggagcugcacagaa

SEQ ID NO: 625621 - RNA, 19 nt, Homo sapiens
  misc_RNA (1)...(19): siRNA sense strand
cuaaauuccaugcacaaau

SEQ ID NO: 625622 - RNA, 19 nt, Homo sapiens
  misc_RNA (1)...(19): siRNA sense strand
aacucaagcucaccaacaa

SEQ ID NO: 625623 - RNA, 19 nt, Homo sapiens
  misc_RNA (1)...(19): siRNA sense strand
caaauuuaccauuguacca

SEQ ID NO: 625624 - RNA, 19 nt, Homo sapiens
  misc_RNA (1)...(19): siRNA sense strand
ccaauaccagugugagaau

SEQ ID NO: 625625 - RNA, 19 nt, Homo sapiens
  misc_RNA (1)...(19): siRNA sense strand
caaccaccuggacccauuu

SEQ ID NO: 625626 - RNA, 19 nt, Homo sapiens
  misc_RNA (1)...(19): siRNA sense strand
aaacucaagcucaccaaca

SEQ ID NO: 625627 - RNA, 19 nt, Homo sapiens
  misc_RNA (1)...(19): siRNA sense strand
aggagcauagccaaauuua

SEQ ID NO: 625628 - RNA, 19 nt, Homo sapiens
  misc_RNA (1)...(19): siRNA sense strand
uggagggaaucaaaguguu

SEQ ID NO: 625629 - RNA, 19 nt, Homo sapiens
  misc_RNA (1)...(19): siRNA sense strand
cagaaugucaagaaugcaa

SEQ ID NO: 625630 - RNA, 19 nt, Homo sapiens
  misc_RNA (1)...(19): siRNA sense strand
acaagaucacgcaauuaaa

SEQ ID NO: 625631 - RNA, 19 nt, Homo sapiens
  misc_RNA (1)...(19): siRNA sense strand
cugcacagaaugucaagaa

SEQ ID NO: 625632 - RNA, 19 nt, Homo sapiens
  misc_RNA (1)...(19): siRNA sense strand
cgacgaucacagauacaaa

SEQ ID NO: 625633 - RNA, 19 nt, Homo sapiens
  misc_RNA (1)...(19): siRNA sense strand
auacagcguucugcacuca

SEQ ID NO: 625634 - RNA, 19 nt, Homo sapiens
  misc_RNA (1)...(19): siRNA sense strand
gggcacggaaaugaucaua

SEQ ID NO: 625635 - RNA, 19 nt, Homo sapiens
  misc_RNA (1)...(19): siRNA sense strand
gcggauguuucccaguuac

SEQ ID NO: 625636 - RNA, 19 nt, Homo sapiens
  misc_RNA (1)...(19): siRNA sense strand
ugacauggagcugcacaga

SEQ ID NO: 625637 - RNA, 19 nt, Homo sapiens
  misc_RNA (1)...(19): siRNA sense strand
gucaagaaugcaaaguaaa

SEQ ID NO: 625638 - RNA, 19 nt, Homo sapiens
  misc_RNA (1)...(19): siRNA sense strand
gacgggccuuaaucccaaa

SEQ ID NO: 625639 - RNA, 19 nt, Homo sapiens
  misc_RNA (1)...(19): siRNA sense strand
ggauguuucccaguuacaa

SEQ ID NO: 625640 - RNA, 19 nt, Homo sapiens
  misc_RNA (1)...(19): siRNA sense strand
cgaagugggcacggaaaug

SEQ ID NO: 625641 - RNA, 19 nt, Homo sapiens
  misc_RNA (1)...(19): siRNA sense strand
ggcacggaaaugaucauaa

SEQ ID NO: 625642 - RNA, 19 nt, Homo sapiens
  misc_RNA (1)...(19): siRNA sense strand
agagaacuguggcuaaaau

SEQ ID NO: 625643 - RNA, 19 nt, Homo sapiens
  misc_RNA (1)...(19): siRNA sense strand
aagaucacgcaauuaaaga

SEQ ID NO: 625644 - RNA, 19 nt, Homo sapiens
  misc_RNA (1)...(19): siRNA sense strand
gaaugucaagaaugcaaag

SEQ ID NO: 625645 - RNA, 19 nt, Homo sapiens
  misc_RNA (1)...(19): siRNA sense strand
ggagcugcacagaauguca

SEQ ID NO: 625646 - RNA, 19 nt, Homo sapiens
  misc_RNA (1)...(19): siRNA sense strand
gauaauaaauggucuguga

SEQ ID NO: 625647 - RNA, 19 nt, Homo sapiens
  misc_RNA (1)...(19): siRNA sense strand
gauacaaauucgcagauaa

SEQ ID NO: 625648 - RNA, 19 nt, Homo sapiens
  misc_RNA (1)...(19): siRNA sense strand
gaaagagaacuguggcuaa

SEQ ID NO: 625649 - RNA, 19 nt, Homo sapiens
  misc_RNA (1)...(19): siRNA sense strand
caaauaccagccuagauua

SEQ ID NO: 625650 - RNA, 19 nt, Homo sapiens
  misc_RNA (1)...(19): siRNA sense strand
gcacggaaaugaucauaac

SEQ ID NO: 625651 - RNA, 19 nt, Homo sapiens
  misc_RNA (1)...(19): siRNA sense strand
guucugcacucacgucuuu

SEQ ID NO: 625652 - RNA, 19 nt, Homo sapiens
  misc_RNA (1)...(19): siRNA sense strand
aaagagaacuguggcuaaa

SEQ ID NO: 625653 - RNA, 19 nt, Homo sapiens
  misc_RNA (1)...(19): siRNA sense strand
ugucaagaaugcaaaguaa

SEQ ID NO: 625654 - RNA, 19 nt, Homo sapiens
  misc_RNA (1)...(19): siRNA sense strand
caaaguguuucuccaugaa

SEQ ID NO: 625655 - RNA, 19 nt, Homo sapiens
  misc_RNA (1)...(19): siRNA sense strand
gaagugggcacggaaauga

SEQ ID NO: 625656 - RNA, 19 nt, Homo sapiens
  misc_RNA (1)...(19): siRNA sense strand
ucaaaguguuucuccauga

SEQ ID NO: 625657 - RNA, 19 nt, Homo sapiens
  misc_RNA (1)...(19): siRNA sense strand
acaaauaccagccuagauu

SEQ ID NO: 625658 - RNA, 19 nt, Homo sapiens
  misc_RNA (1)...(19): siRNA sense strand
gcacagaaugucaagaaug

SEQ ID NO: 625659 - RNA, 19 nt, Homo sapiens
  misc_RNA (1)...(19): siRNA sense strand
cacaagaucacgcaauuaa

SEQ ID NO: 625660 - RNA, 19 nt, Homo sapiens
  misc_RNA (1)...(19): siRNA sense strand
gaucacagauacaaauucg

SEQ ID NO: 625661 - RNA, 19 nt, Homo sapiens
  misc_RNA (1)...(19): siRNA sense strand
gaaagcggaugaaaauaau

SEQ ID NO: 625662 - RNA, 19 nt, Homo sapiens
  misc_RNA (1)...(19): siRNA sense strand
ggagggaaucaaaguguuu

SEQ ID NO: 625663 - RNA, 19 nt, Homo sapiens
  misc_RNA (1)...(19): siRNA sense strand
acauggagcugcacagaau

SEQ ID NO: 625664 - RNA, 19 nt, Homo sapiens
  misc_RNA (1)...(19): siRNA sense strand
gcacaaauaccagccuaga

SEQ ID NO: 625665 - RNA, 19 nt, Homo sapiens
  misc_RNA (1)...(19): siRNA sense strand
ccaggagcauagccaaauu

SEQ ID NO: 625666 - RNA, 19 nt, Homo sapiens
  misc_RNA (1)...(19): siRNA sense strand
caagaucacgcaauuaaag

SEQ ID NO: 625667 - RNA, 19 nt, Homo sapiens
  misc_RNA (1)...(19): siRNA sense strand
gcucgucuccuuccagaaa

SEQ ID NO: 625668 - RNA, 19 nt, Homo sapiens
  misc_RNA (1)...(19): siRNA sense strand
ugaggcagcucgucuccuu

SEQ ID NO: 625669 - RNA, 19 nt, Homo sapiens
  misc_RNA (1)...(19): siRNA sense strand
gaucacgcaauuaaagauu

SEQ ID NO: 625670 - RNA, 19 nt, Homo sapiens
  misc_RNA (1)...(19): siRNA sense strand
agauacaaauucgcagaua

SEQ ID NO: 625671 - RNA, 19 nt, Homo sapiens
  misc_RNA (1)...(19): siRNA sense strand
ccacaagaucacgcaauua

SEQ ID NO: 625672 - RNA, 19 nt, Homo sapiens
  misc_RNA (1)...(19): siRNA sense strand
ggcggauguuucccaguua

SEQ ID NO: 625673 - RNA, 19 nt, Homo sapiens
  misc_RNA (1)...(19): siRNA sense strand
cggaaaugaucauaaccaa

SEQ ID NO: 625674 - RNA, 19 nt, Homo sapiens
  misc_RNA (1)...(19): siRNA sense strand
acaaccaccuggacccauu

SEQ ID NO: 625675 - RNA, 19 nt, Homo sapiens
  misc_RNA (1)...(19): siRNA sense strand
gagcauagccaaauuuacc

SEQ ID NO: 625676 - RNA, 19 nt, Homo sapiens
  misc_RNA (1)...(19): siRNA sense strand
cacagaaugucaagaaugc

SEQ ID NO: 625677 - RNA, 19 nt, Homo sapiens
  misc_RNA (1)...(19): siRNA sense strand
uuauagcagugacuuccua

SEQ ID NO: 625678 - RNA, 19 nt, Homo sapiens
  misc_RNA (1)...(19): siRNA sense strand
gauuacacaucgugaaagc

SEQ ID NO: 625679 - RNA, 19 nt, Homo sapiens
  misc_RNA (1)...(19): siRNA sense strand
ugaaagcggaugaaaauaa

SEQ ID NO: 625680 - RNA, 19 nt, Homo sapiens
  misc_RNA (1)...(19): siRNA sense strand
gauguuucccaguuacaaa

SEQ ID NO: 625681 - RNA, 19 nt, Homo sapiens
  misc_RNA (1)...(19): siRNA sense strand
caagaaugcaaaguaaaga

SEQ ID NO: 625682 - RNA, 19 nt, Homo sapiens
  misc_RNA (1)...(19): siRNA sense strand
uagauuacacaucgugaaa

SEQ ID NO: 625683 - RNA, 19 nt, Homo sapiens
  misc_RNA (1)...(19): siRNA sense strand
gacgaucacagauacaaau

SEQ ID NO: 625684 - RNA, 19 nt, Homo sapiens
  misc_RNA (1)...(19): siRNA sense strand
cauuguaccugccgacgau

SEQ ID NO: 625685 - RNA, 19 nt, Homo sapiens
  misc_RNA (1)...(19): siRNA sense strand
ucaagaaugcaaaguaaag

SEQ ID NO: 625686 - RNA, 19 nt, Homo sapiens
  misc_RNA (1)...(19): siRNA sense strand
uagccaaauuuaccauugu

SEQ ID NO: 625687 - RNA, 19 nt, Homo sapiens
  misc_RNA (1)...(19): siRNA sense strand
accacaagaucacgcaauu

SEQ ID NO: 625688 - RNA, 19 nt, Homo sapiens
  misc_RNA (1)...(19): siRNA sense strand
agccaaauuuaccauugua

SEQ ID NO: 625689 - RNA, 19 nt, Homo sapiens
  misc_RNA (1)...(19): siRNA sense strand
caauaccagugugagaaug

SEQ ID NO: 625690 - RNA, 19 nt, Homo sapiens
  misc_RNA (1)...(19): siRNA sense strand
aggcggauguuucccaguu

SEQ ID NO: 625691 - RNA, 19 nt, Homo sapiens
  misc_RNA (1)...(19): siRNA sense strand
aauaauggauuuggcucaa

SEQ ID NO: 625692 - RNA, 19 nt, Homo sapiens
  misc_RNA (1)...(19): siRNA sense strand
gcuggaaggcggauguuuc

SEQ ID NO: 625693 - RNA, 19 nt, Homo sapiens
  misc_RNA (1)...(19): siRNA sense strand
uaccagaaccacaagauca

SEQ ID NO: 625694 - RNA, 19 nt, Homo sapiens
  misc_RNA (1)...(19): siRNA sense strand
caggagcauagccaaauuu

SEQ ID NO: 625695 - RNA, 19 nt, Homo sapiens
  misc_RNA (1)...(19): siRNA sense strand
gagcugcacagaaugucaa

SEQ ID NO: 625696 - RNA, 19 nt, Homo sapiens
  misc_RNA (1)...(19): siRNA sense strand
ccauuugggcauauuauuc

SEQ ID NO: 625697 - RNA, 19 nt, Homo sapiens
  misc_RNA (1)...(19): siRNA sense strand
auagccaaauuuaccauug

SEQ ID NO: 625698 - RNA, 19 nt, Homo sapiens
  misc_RNA (1)...(19): siRNA sense strand
gacauggagcugcacagaa

SEQ ID NO: 625699 - RNA, 19 nt, Homo sapiens
  misc_RNA (1)...(19): siRNA sense strand
cuaaauuccaugcacaaau

SEQ ID NO: 625700 - RNA, 19 nt, Homo sapiens
  misc_RNA (1)...(19): siRNA sense strand
aacucaagcucaccaacaa

SEQ ID NO: 625701 - RNA, 19 nt, Homo sapiens
  misc_RNA (1)...(19): siRNA sense strand
caaauuuaccauuguacca

SEQ ID NO: 625702 - RNA, 19 nt, Homo sapiens
  misc_RNA (1)...(19): siRNA sense strand
ccaauaccagugugagaau

SEQ ID NO: 625703 - RNA, 19 nt, Homo sapiens
  misc_RNA (1)...(19): siRNA sense strand
caaccaccuggacccauuu

SEQ ID NO: 625704 - RNA, 19 nt, Homo sapiens
  misc_RNA (1)...(19): siRNA sense strand
aaacucaagcucaccaaca

SEQ ID NO: 625705 - RNA, 19 nt, Homo sapiens
  misc_RNA (1)...(19): siRNA sense strand
aggagcauagccaaauuua

SEQ ID NO: 625706 - RNA, 19 nt, Homo sapiens
  misc_RNA (1)...(19): siRNA sense strand
cagaaugucaagaaugcaa

SEQ ID NO: 625707 - RNA, 19 nt, Homo sapiens
  misc_RNA (1)...(19): siRNA sense strand
acaagaucacgcaauuaaa

SEQ ID NO: 625708 - RNA, 19 nt, Homo sapiens
  misc_RNA (1)...(19): siRNA sense strand
cugcacagaaugucaagaa

SEQ ID NO: 625709 - RNA, 19 nt, Homo sapiens
  misc_RNA (1)...(19): siRNA sense strand
cgacgaucacagauacaaa

SEQ ID NO: 625710 - RNA, 19 nt, Homo sapiens
  misc_RNA (1)...(19): siRNA sense strand
gggcacggaaaugaucaua

SEQ ID NO: 625711 - RNA, 19 nt, Homo sapiens
  misc_RNA (1)...(19): siRNA sense strand
auacagcguucugcacuca

SEQ ID NO: 625712 - RNA, 19 nt, Homo sapiens
  misc_RNA (1)...(19): siRNA sense strand
gcggauguuucccaguuac

SEQ ID NO: 625713 - RNA, 19 nt, Homo sapiens
  misc_RNA (1)...(19): siRNA sense strand
ugacauggagcugcacaga

SEQ ID NO: 625714 - RNA, 19 nt, Homo sapiens
  misc_RNA (1)...(19): siRNA sense strand
gucaagaaugcaaaguaaa

SEQ ID NO: 625715 - RNA, 19 nt, Homo sapiens
  misc_RNA (1)...(19): siRNA sense strand
cgaagugggcacggaaaug

SEQ ID NO: 625716 - RNA, 19 nt, Homo sapiens
  misc_RNA (1)...(19): siRNA sense strand
ggauguuucccaguuacaa

SEQ ID NO: 625717 - RNA, 19 nt, Homo sapiens
  misc_RNA (1)...(19): siRNA sense strand
gacgggccuuaaucccaaa

SEQ ID NO: 625718 - RNA, 19 nt, Homo sapiens
  misc_RNA (1)...(19): siRNA sense strand
ggcacggaaaugaucauaa

SEQ ID NO: 625719 - RNA, 19 nt, Homo sapiens
  misc_RNA (1)...(19): siRNA sense strand
agagaacuguggcuaaaau

SEQ ID NO: 625720 - RNA, 19 nt, Homo sapiens
  misc_RNA (1)...(19): siRNA sense strand
aagaucacgcaauuaaaga

SEQ ID NO: 625721 - RNA, 19 nt, Homo sapiens
  misc_RNA (1)...(19): siRNA sense strand
gaaugucaagaaugcaaag

SEQ ID NO: 625722 - RNA, 19 nt, Homo sapiens
  misc_RNA (1)...(19): siRNA sense strand
ggagcugcacagaauguca

SEQ ID NO: 625723 - RNA, 19 nt, Homo sapiens
  misc_RNA (1)...(19): siRNA sense strand
gauaauaaauggucuguga

SEQ ID NO: 625724 - RNA, 19 nt, Homo sapiens
  misc_RNA (1)...(19): siRNA sense strand
gauacaaauucgcagauaa

SEQ ID NO: 625725 - RNA, 19 nt, Homo sapiens
  misc_RNA (1)...(19): siRNA sense strand
gaaagagaacuguggcuaa

SEQ ID NO: 625726 - RNA, 19 nt, Homo sapiens
  misc_RNA (1)...(19): siRNA sense strand
caaauaccagccuagauua

SEQ ID NO: 625727 - RNA, 19 nt, Homo sapiens
  misc_RNA (1)...(19): siRNA sense strand
gcacggaaaugaucauaac

SEQ ID NO: 625728 - RNA, 19 nt, Homo sapiens
  misc_RNA (1)...(19): siRNA sense strand
guucugcacucacgucuuu

SEQ ID NO: 625729 - RNA, 19 nt, Homo sapiens
  misc_RNA (1)...(19): siRNA sense strand
aaagagaacuguggcuaaa

SEQ ID NO: 625730 - RNA, 19 nt, Homo sapiens
  misc_RNA (1)...(19): siRNA sense strand
ugucaagaaugcaaaguaa

SEQ ID NO: 625731 - RNA, 19 nt, Homo sapiens
  misc_RNA (1)...(19): siRNA sense strand
caaaguguuucuccaugaa

SEQ ID NO: 625732 - RNA, 19 nt, Homo sapiens
  misc_RNA (1)...(19): siRNA sense strand
gaagugggcacggaaauga

SEQ ID NO: 625733 - RNA, 19 nt, Homo sapiens
  misc_RNA (1)...(19): siRNA sense strand
ucaaaguguuucuccauga

SEQ ID NO: 625734 - RNA, 19 nt, Homo sapiens
  misc_RNA (1)...(19): siRNA sense strand
acaaauaccagccuagauu

SEQ ID NO: 625735 - RNA, 19 nt, Homo sapiens
  misc_RNA (1)...(19): siRNA sense strand
gcacagaaugucaagaaug

SEQ ID NO: 625736 - RNA, 19 nt, Homo sapiens
  misc_RNA (1)...(19): siRNA sense strand
cacaagaucacgcaauuaa

SEQ ID NO: 625737 - RNA, 19 nt, Homo sapiens
  misc_RNA (1)...(19): siRNA sense strand
gaucacagauacaaauucg

SEQ ID NO: 625738 - RNA, 19 nt, Homo sapiens
  misc_RNA (1)...(19): siRNA sense strand
gaaagcggaugaaaauaau

SEQ ID NO: 625739 - RNA, 19 nt, Homo sapiens
  misc_RNA (1)...(19): siRNA sense strand
acauggagcugcacagaau

SEQ ID NO: 625740 - RNA, 19 nt, Homo sapiens
  misc_RNA (1)...(19): siRNA sense strand
ggagggaaucaaaguguuu

SEQ ID NO: 625741 - RNA, 19 nt, Homo sapiens
  misc_RNA (1)...(19): siRNA sense strand
gcacaaauaccagccuaga

SEQ ID NO: 625742 - RNA, 19 nt, Homo sapiens
  misc_RNA (1)...(19): siRNA sense strand
ccaggagcauagccaaauu

SEQ ID NO: 625743 - RNA, 19 nt, Homo sapiens
  misc_RNA (1)...(19): siRNA sense strand
caagaucacgcaauuaaag

SEQ ID NO: 625744 - RNA, 19 nt, Homo sapiens
  misc_RNA (1)...(19): siRNA sense strand
gcucgucuccuuccagaaa

SEQ ID NO: 625745 - RNA, 19 nt, Homo sapiens
  misc_RNA (1)...(19): siRNA sense strand
ugaggcagcucgucuccuu

SEQ ID NO: 625746 - RNA, 19 nt, Homo sapiens
  misc_RNA (1)...(19): siRNA sense strand
gggcauggagggaaucaaa

SEQ ID NO: 625747 - RNA, 19 nt, Homo sapiens
  misc_RNA (1)...(19): siRNA sense strand
gaucacgcaauuaaagauu

SEQ ID NO: 625748 - RNA, 19 nt, Homo sapiens
  misc_RNA (1)...(19): siRNA sense strand
agauacaaauucgcagaua

SEQ ID NO: 625749 - RNA, 19 nt, Homo sapiens
  misc_RNA (1)...(19): siRNA sense strand
ccacaagaucacgcaauua

SEQ ID NO: 625750 - RNA, 19 nt, Homo sapiens
  misc_RNA (1)...(19): siRNA sense strand
ggcggauguuucccaguua

SEQ ID NO: 625751 - RNA, 19 nt, Homo sapiens
  misc_RNA (1)...(19): siRNA sense strand
cggaaaugaucauaaccaa

SEQ ID NO: 625752 - RNA, 19 nt, Homo sapiens
  misc_RNA (1)...(19): siRNA sense strand
acaaccaccuggacccauu

SEQ ID NO: 625753 - RNA, 19 nt, Homo sapiens
  misc_RNA (1)...(19): siRNA sense strand
gagcauagccaaauuuacc

SEQ ID NO: 625754 - RNA, 19 nt, Homo sapiens
  misc_RNA (1)...(19): siRNA sense strand
cacagaaugucaagaaugc

SEQ ID NO: 625755 - RNA, 19 nt, Homo sapiens
  misc_RNA (1)...(19): siRNA sense strand
uuauagcagugacuuccua

SEQ ID NO: 625756 - RNA, 19 nt, Homo sapiens
  misc_RNA (1)...(19): siRNA sense strand
gauuacacaucgugaaagc

SEQ ID NO: 625757 - RNA, 19 nt, Homo sapiens
  misc_RNA (1)...(19): siRNA sense strand
ugaaagcggaugaaaauaa

SEQ ID NO: 625758 - RNA, 19 nt, Homo sapiens
  misc_RNA (1)...(19): siRNA sense strand
gauguuucccaguuacaaa

SEQ ID NO: 625759 - RNA, 19 nt, Homo sapiens
  misc_RNA (1)...(19): siRNA sense strand
caagaaugcaaaguaaaga

SEQ ID NO: 625760 - RNA, 19 nt, Homo sapiens
  misc_RNA (1)...(19): siRNA sense strand
uagauuacacaucgugaaa

SEQ ID NO: 625761 - RNA, 19 nt, Homo sapiens
  misc_RNA (1)...(19): siRNA sense strand
gacgaucacagauacaaau

SEQ ID NO: 625762 - RNA, 19 nt, Homo sapiens
  misc_RNA (1)...(19): siRNA sense strand
cauuguaccugccgacgau

SEQ ID NO: 625763 - RNA, 19 nt, Homo sapiens
  misc_RNA (1)...(19): siRNA sense strand
ucaagaaugcaaaguaaag

SEQ ID NO: 625764 - RNA, 19 nt, Homo sapiens
  misc_RNA (1)...(19): siRNA sense strand
uagccaaauuuaccauugu

SEQ ID NO: 625765 - RNA, 19 nt, Homo sapiens
  misc_RNA (1)...(19): siRNA sense strand
accacaagaucacgcaauu

SEQ ID NO: 625766 - RNA, 19 nt, Homo sapiens
  misc_RNA (1)...(19): siRNA sense strand
agccaaauuuaccauugua

SEQ ID NO: 625767 - RNA, 19 nt, Homo sapiens
  misc_RNA (1)...(19): siRNA sense strand
caauaccagugugagaaug

SEQ ID NO: 625768 - RNA, 19 nt, Homo sapiens
  misc_RNA (1)...(19): siRNA sense strand
aauaauggauuuggcucaa

SEQ ID NO: 625769 - RNA, 19 nt, Homo sapiens
  misc_RNA (1)...(19): siRNA sense strand
gcuggaaggcggauguuuc

SEQ ID NO: 625770 - RNA, 19 nt, Homo sapiens
  misc_RNA (1)...(19): siRNA sense strand
aggcggauguuucccaguu

SEQ ID NO: 625771 - RNA, 19 nt, Homo sapiens
  misc_RNA (1)...(19): siRNA sense strand
gcauggagggaaucaaagu

SEQ ID NO: 625772 - RNA, 19 nt, Homo sapiens
  misc_RNA (1)...(19): siRNA sense strand
caggagcauagccaaauuu

SEQ ID NO: 625773 - RNA, 19 nt, Homo sapiens
  misc_RNA (1)...(19): siRNA sense strand
gagcugcacagaaugucaa

SEQ ID NO: 625774 - RNA, 19 nt, Homo sapiens
  misc_RNA (1)...(19): siRNA sense strand
uaccagaaccacaagauca

SEQ ID NO: 625775 - RNA, 19 nt, Homo sapiens
  misc_RNA (1)...(19): siRNA sense strand
ccauuugggcauauuauuc

SEQ ID NO: 625776 - RNA, 19 nt, Homo sapiens
  misc_RNA (1)...(19): siRNA sense strand
auagccaaauuuaccauug

SEQ ID NO: 625777 - RNA, 19 nt, Homo sapiens
  misc_RNA (1)...(19): siRNA sense strand
gacauggagcugcacagaa

SEQ ID NO: 625778 - RNA, 19 nt, Homo sapiens
  misc_RNA (1)...(19): siRNA sense strand
cuaaauuccaugcacaaau

SEQ ID NO: 625779 - RNA, 19 nt, Homo sapiens
  misc_RNA (1)...(19): siRNA sense strand
aacucaagcucaccaacaa

SEQ ID NO: 625780 - RNA, 19 nt, Homo sapiens
  misc_RNA (1)...(19): siRNA sense strand
caaauuuaccauuguacca

SEQ ID NO: 625781 - RNA, 19 nt, Homo sapiens
  misc_RNA (1)...(19): siRNA sense strand
ccaauaccagugugagaau

SEQ ID NO: 625782 - RNA, 19 nt, Homo sapiens
  misc_RNA (1)...(19): siRNA sense strand
caaccaccuggacccauuu

SEQ ID NO: 625783 - RNA, 19 nt, Homo sapiens
  misc_RNA (1)...(19): siRNA sense strand
aaacucaagcucaccaaca

SEQ ID NO: 625784 - RNA, 19 nt, Homo sapiens
  misc_RNA (1)...(19): siRNA sense strand
aggagcauagccaaauuua

SEQ ID NO: 625785 - RNA, 19 nt, Homo sapiens
  misc_RNA (1)...(19): siRNA sense strand
uggagggaaucaaaguguu

SEQ ID NO: 625786 - RNA, 19 nt, Homo sapiens
  misc_RNA (1)...(19): siRNA sense strand
cagaaugucaagaaugcaa

SEQ ID NO: 625787 - RNA, 19 nt, Homo sapiens
  misc_RNA (1)...(19): siRNA sense strand
acaagaucacgcaauuaaa

SEQ ID NO: 625788 - RNA, 19 nt, Homo sapiens
  misc_RNA (1)...(19): siRNA sense strand
cugcacagaaugucaagaa

SEQ ID NO: 625789 - RNA, 19 nt, Homo sapiens
  misc_RNA (1)...(19): siRNA sense strand
cgacgaucacagauacaaa

SEQ ID NO: 625790 - RNA, 19 nt, Homo sapiens
  misc_RNA (1)...(19): siRNA sense strand
auacagcguucugcacuca

SEQ ID NO: 625791 - RNA, 19 nt, Homo sapiens
  misc_RNA (1)...(19): siRNA sense strand
gggcacggaaaugaucaua

SEQ ID NO: 625792 - RNA, 19 nt, Homo sapiens
  misc_RNA (1)...(19): siRNA sense strand
gcggauguuucccaguuac

SEQ ID NO: 625793 - RNA, 19 nt, Homo sapiens
  misc_RNA (1)...(19): siRNA sense strand
ugacauggagcugcacaga

SEQ ID NO: 625794 - RNA, 19 nt, Homo sapiens
  misc_RNA (1)...(19): siRNA sense strand
gucaagaaugcaaaguaaa

SEQ ID NO: 625795 - RNA, 19 nt, Homo sapiens
  misc_RNA (1)...(19): siRNA sense strand
gacgggccuuaaucccaaa

SEQ ID NO: 625796 - RNA, 19 nt, Homo sapiens
  misc_RNA (1)...(19): siRNA sense strand
ggauguuucccaguuacaa

SEQ ID NO: 625797 - RNA, 19 nt, Homo sapiens
  misc_RNA (1)...(19): siRNA sense strand
cgaagugggcacggaaaug

SEQ ID NO: 625798 - RNA, 19 nt, Homo sapiens
  misc_RNA (1)...(19): siRNA sense strand
ggcacggaaaugaucauaa

SEQ ID NO: 625799 - RNA, 19 nt, Homo sapiens
  misc_RNA (1)...(19): siRNA sense strand
agagaacuguggcuaaaau

SEQ ID NO: 625800 - RNA, 19 nt, Homo sapiens
  misc_RNA (1)...(19): siRNA sense strand
aagaucacgcaauuaaaga

SEQ ID NO: 625801 - RNA, 19 nt, Homo sapiens
  misc_RNA (1)...(19): siRNA sense strand
gaaugucaagaaugcaaag

SEQ ID NO: 625802 - RNA, 19 nt, Homo sapiens
  misc_RNA (1)...(19): siRNA sense strand
ggagcugcacagaauguca

SEQ ID NO: 625803 - RNA, 19 nt, Homo sapiens
  misc_RNA (1)...(19): siRNA sense strand
gauaauaaauggucuguga

SEQ ID NO: 625804 - RNA, 19 nt, Homo sapiens
  misc_RNA (1)...(19): siRNA sense strand
gauacaaauucgcagauaa

SEQ ID NO: 625805 - RNA, 19 nt, Homo sapiens
  misc_RNA (1)...(19): siRNA sense strand
gaaagagaacuguggcuaa

SEQ ID NO: 625806 - RNA, 19 nt, Homo sapiens
  misc_RNA (1)...(19): siRNA sense strand
caaauaccagccuagauua

SEQ ID NO: 625807 - RNA, 19 nt, Homo sapiens
  misc_RNA (1)...(19): siRNA sense strand
gcacggaaaugaucauaac

SEQ ID NO: 625808 - RNA, 19 nt, Homo sapiens
  misc_RNA (1)...(19): siRNA sense strand
guucugcacucacgucuuu

SEQ ID NO: 625809 - RNA, 19 nt, Homo sapiens
  misc_RNA (1)...(19): siRNA sense strand
aaagagaacuguggcuaaa

SEQ ID NO: 625810 - RNA, 19 nt, Homo sapiens
  misc_RNA (1)...(19): siRNA sense strand
ugucaagaaugcaaaguaa

SEQ ID NO: 625811 - RNA, 19 nt, Homo sapiens
  misc_RNA (1)...(19): siRNA sense strand
caaaguguuucuccaugaa

SEQ ID NO: 625812 - RNA, 19 nt, Homo sapiens
  misc_RNA (1)...(19): siRNA sense strand
gaagugggcacggaaauga

SEQ ID NO: 625813 - RNA, 19 nt, Homo sapiens
  misc_RNA (1)...(19): siRNA sense strand
ucaaaguguuucuccauga

SEQ ID NO: 625814 - RNA, 19 nt, Homo sapiens
  misc_RNA (1)...(19): siRNA sense strand
acaaauaccagccuagauu

SEQ ID NO: 625815 - RNA, 19 nt, Homo sapiens
  misc_RNA (1)...(19): siRNA sense strand
gcacagaaugucaagaaug

SEQ ID NO: 625816 - RNA, 19 nt, Homo sapiens
  misc_RNA (1)...(19): siRNA sense strand
cacaagaucacgcaauuaa

SEQ ID NO: 625817 - RNA, 19 nt, Homo sapiens
  misc_RNA (1)...(19): siRNA sense strand
gaucacagauacaaauucg

SEQ ID NO: 625818 - RNA, 19 nt, Homo sapiens
  misc_RNA (1)...(19): siRNA sense strand
gaaagcggaugaaaauaau

SEQ ID NO: 625819 - RNA, 19 nt, Homo sapiens
  misc_RNA (1)...(19): siRNA sense strand
acauggagcugcacagaau

SEQ ID NO: 625820 - RNA, 19 nt, Homo sapiens
  misc_RNA (1)...(19): siRNA sense strand
ggagggaaucaaaguguuu

SEQ ID NO: 625821 - RNA, 19 nt, Homo sapiens
  misc_RNA (1)...(19): siRNA sense strand
gcacaaauaccagccuaga

SEQ ID NO: 625822 - RNA, 19 nt, Homo sapiens
  misc_RNA (1)...(19): siRNA sense strand
ccaggagcauagccaaauu

SEQ ID NO: 625823 - RNA, 19 nt, Homo sapiens
  misc_RNA (1)...(19): siRNA sense strand
caagaucacgcaauuaaag

SEQ ID NO: 625824 - RNA, 19 nt, Homo sapiens
  misc_RNA (1)...(19): siRNA sense strand
gcucgucuccuuccagaaa

SEQ ID NO: 625825 - RNA, 19 nt, Homo sapiens
  misc_RNA (1)...(19): siRNA sense strand
ugaggcagcucgucuccuu

SEQ ID NO: 625826 - RNA, 19 nt, Homo sapiens
  misc_RNA (1)...(19): siRNA sense strand
gggcauggagggaaucaaa

SEQ ID NO: 625827 - RNA, 19 nt, Homo sapiens
  misc_RNA (1)...(19): siRNA sense strand
gaucacgcaauuaaagauu

SEQ ID NO: 625828 - RNA, 19 nt, Homo sapiens
  misc_RNA (1)...(19): siRNA sense strand
agauacaaauucgcagaua

SEQ ID NO: 625829 - RNA, 19 nt, Homo sapiens
  misc_RNA (1)...(19): siRNA sense strand
ccacaagaucacgcaauua

SEQ ID NO: 625830 - RNA, 19 nt, Homo sapiens
  misc_RNA (1)...(19): siRNA sense strand
ggcggauguuucccaguua

SEQ ID NO: 625831 - RNA, 19 nt, Homo sapiens
  misc_RNA (1)...(19): siRNA sense strand
cggaaaugaucauaaccaa

SEQ ID NO: 625832 - RNA, 19 nt, Homo sapiens
  misc_RNA (1)...(19): siRNA sense strand
acaaccaccuggacccauu

SEQ ID NO: 625833 - RNA, 19 nt, Homo sapiens
  misc_RNA (1)...(19): siRNA sense strand
gagcauagccaaauuuacc

SEQ ID NO: 625834 - RNA, 19 nt, Homo sapiens
  misc_RNA (1)...(19): siRNA sense strand
cacagaaugucaagaaugc

SEQ ID NO: 625835 - RNA, 19 nt, Homo sapiens
  misc_RNA (1)...(19): siRNA sense strand
uuauagcagugacuuccua

SEQ ID NO: 625836 - RNA, 19 nt, Homo sapiens
  misc_RNA (1)...(19): siRNA sense strand
gauuacacaucgugaaagc

SEQ ID NO: 625837 - RNA, 19 nt, Homo sapiens
  misc_RNA (1)...(19): siRNA sense strand
ugaaagcggaugaaaauaa

SEQ ID NO: 625838 - RNA, 19 nt, Homo sapiens
  misc_RNA (1)...(19): siRNA sense strand
gauguuucccaguuacaaa

SEQ ID NO: 625839 - RNA, 19 nt, Homo sapiens
  misc_RNA (1)...(19): siRNA sense strand
caagaaugcaaaguaaaga

SEQ ID NO: 625840 - RNA, 19 nt, Homo sapiens
  misc_RNA (1)...(19): siRNA sense strand
uagauuacacaucgugaaa

SEQ ID NO: 625841 - RNA, 19 nt, Homo sapiens
  misc_RNA (1)...(19): siRNA sense strand
gacgaucacagauacaaau

SEQ ID NO: 625842 - RNA, 19 nt, Homo sapiens
  misc_RNA (1)...(19): siRNA sense strand
cauuguaccugccgacgau

SEQ ID NO: 625843 - RNA, 19 nt, Homo sapiens
  misc_RNA (1)...(19): siRNA sense strand
ucaagaaugcaaaguaaag

SEQ ID NO: 625844 - RNA, 19 nt, Homo sapiens
  misc_RNA (1)...(19): siRNA sense strand
uagccaaauuuaccauugu

SEQ ID NO: 625845 - RNA, 19 nt, Homo sapiens
  misc_RNA (1)...(19): siRNA sense strand
accacaagaucacgcaauu

SEQ ID NO: 625846 - RNA, 19 nt, Homo sapiens
  misc_RNA (1)...(19): siRNA sense strand
agccaaauuuaccauugua

SEQ ID NO: 625847 - RNA, 19 nt, Homo sapiens
  misc_RNA (1)...(19): siRNA sense strand
caauaccagugugagaaug

SEQ ID NO: 625848 - RNA, 19 nt, Homo sapiens
  misc_RNA (1)...(19): siRNA sense strand
aauaauggauuuggcucaa

SEQ ID NO: 625849 - RNA, 19 nt, Homo sapiens
  misc_RNA (1)...(19): siRNA sense strand
gcuggaaggcggauguuuc

SEQ ID NO: 625850 - RNA, 19 nt, Homo sapiens
  misc_RNA (1)...(19): siRNA sense strand
aggcggauguuucccaguu

SEQ ID NO: 625851 - RNA, 19 nt, Homo sapiens
  misc_RNA (1)...(19): siRNA sense strand
gcauggagggaaucaaagu

SEQ ID NO: 625852 - RNA, 19 nt, Homo sapiens
  misc_RNA (1)...(19): siRNA sense strand
caggagcauagccaaauuu

SEQ ID NO: 625853 - RNA, 19 nt, Homo sapiens
  misc_RNA (1)...(19): siRNA sense strand
gagcugcacagaaugucaa

SEQ ID NO: 625854 - RNA, 19 nt, Homo sapiens
  misc_RNA (1)...(19): siRNA sense strand
uaccagaaccacaagauca

SEQ ID NO: 625855 - RNA, 19 nt, Homo sapiens
  misc_RNA (1)...(19): siRNA sense strand
ccauuugggcauauuauuc

SEQ ID NO: 625856 - RNA, 19 nt, Homo sapiens
  misc_RNA (1)...(19): siRNA sense strand
auagccaaauuuaccauug

SEQ ID NO: 625857 - RNA, 19 nt, Homo sapiens
  misc_RNA (1)...(19): siRNA sense strand
gacauggagcugcacagaa

SEQ ID NO: 625858 - RNA, 19 nt, Homo sapiens
  misc_RNA (1)...(19): siRNA sense strand
cuaaauuccaugcacaaau

SEQ ID NO: 625859 - RNA, 19 nt, Homo sapiens
  misc_RNA (1)...(19): siRNA sense strand
aacucaagcucaccaacaa

SEQ ID NO: 625860 - RNA, 19 nt, Homo sapiens
  misc_RNA (1)...(19): siRNA sense strand
caaauuuaccauuguacca

SEQ ID NO: 625861 - RNA, 19 nt, Homo sapiens
  misc_RNA (1)...(19): siRNA sense strand
ccaauaccagugugagaau

SEQ ID NO: 625862 - RNA, 19 nt, Homo sapiens
  misc_RNA (1)...(19): siRNA sense strand
caaccaccuggacccauuu

SEQ ID NO: 625863 - RNA, 19 nt, Homo sapiens
  misc_RNA (1)...(19): siRNA sense strand
aaacucaagcucaccaaca

SEQ ID NO: 625864 - RNA, 19 nt, Homo sapiens
  misc_RNA (1)...(19): siRNA sense strand
aggagcauagccaaauuua

SEQ ID NO: 625865 - RNA, 19 nt, Homo sapiens
  misc_RNA (1)...(19): siRNA sense strand
uggagggaaucaaaguguu

SEQ ID NO: 625866 - RNA, 19 nt, Homo sapiens
  misc_RNA (1)...(19): siRNA sense strand
cagaaugucaagaaugcaa

SEQ ID NO: 625867 - RNA, 19 nt, Homo sapiens
  misc_RNA (1)...(19): siRNA sense strand
acaagaucacgcaauuaaa

SEQ ID NO: 625868 - RNA, 19 nt, Homo sapiens
  misc_RNA (1)...(19): siRNA sense strand
cugcacagaaugucaagaa

SEQ ID NO: 625869 - RNA, 19 nt, Homo sapiens
  misc_RNA (1)...(19): siRNA sense strand
cgacgaucacagauacaaa

SEQ ID NO: 625870 - RNA, 19 nt, Homo sapiens
  misc_RNA (1)...(19): siRNA sense strand
auacagcguucugcacuca

SEQ ID NO: 625871 - RNA, 19 nt, Homo sapiens
  misc_RNA (1)...(19): siRNA sense strand
gggcacggaaaugaucaua

SEQ ID NO: 625872 - RNA, 19 nt, Homo sapiens
  misc_RNA (1)...(19): siRNA sense strand
gcggauguuucccaguuac

SEQ ID NO: 625873 - RNA, 19 nt, Homo sapiens
  misc_RNA (1)...(19): siRNA sense strand
ugacauggagcugcacaga

SEQ ID NO: 625874 - RNA, 19 nt, Homo sapiens
  misc_RNA (1)...(19): siRNA sense strand
gucaagaaugcaaaguaaa

SEQ ID NO: 625875 - RNA, 19 nt, Homo sapiens
  misc_RNA (1)...(19): siRNA sense strand
gacgggccuuaaucccaaa

SEQ ID NO: 625876 - RNA, 19 nt, Homo sapiens
  misc_RNA (1)...(19): siRNA sense strand
ggauguuucccaguuacaa

SEQ ID NO: 625877 - RNA, 19 nt, Homo sapiens
  misc_RNA (1)...(19): siRNA sense strand
cgaagugggcacggaaaug

SEQ ID NO: 625878 - RNA, 19 nt, Homo sapiens
  misc_RNA (1)...(19): siRNA sense strand
ggcacggaaaugaucauaa

SEQ ID NO: 625879 - RNA, 19 nt, Homo sapiens
  misc_RNA (1)...(19): siRNA sense strand
agagaacuguggcuaaaau

SEQ ID NO: 625880 - RNA, 19 nt, Homo sapiens
  misc_RNA (1)...(19): siRNA sense strand
aagaucacgcaauuaaaga

SEQ ID NO: 625881 - RNA, 19 nt, Homo sapiens
  misc_RNA (1)...(19): siRNA sense strand
gaaugucaagaaugcaaag

SEQ ID NO: 625882 - RNA, 19 nt, Homo sapiens
  misc_RNA (1)...(19): siRNA sense strand
ggagcugcacagaauguca

SEQ ID NO: 625883 - RNA, 19 nt, Homo sapiens
  misc_RNA (1)...(19): siRNA sense strand
gauaauaaauggucuguga

SEQ ID NO: 625884 - RNA, 19 nt, Homo sapiens
  misc_RNA (1)...(19): siRNA sense strand
gauacaaauucgcagauaa

SEQ ID NO: 625885 - RNA, 19 nt, Homo sapiens
  misc_RNA (1)...(19): siRNA sense strand
gaaagagaacuguggcuaa

SEQ ID NO: 625886 - RNA, 19 nt, Homo sapiens
  misc_RNA (1)...(19): siRNA sense strand
caaauaccagccuagauua

SEQ ID NO: 625887 - RNA, 19 nt, Homo sapiens
  misc_RNA (1)...(19): siRNA sense strand
gcacggaaaugaucauaac

SEQ ID NO: 625888 - RNA, 19 nt, Homo sapiens
  misc_RNA (1)...(19): siRNA sense strand
guucugcacucacgucuuu

SEQ ID NO: 625889 - RNA, 19 nt, Homo sapiens
  misc_RNA (1)...(19): siRNA sense strand
aaagagaacuguggcuaaa

SEQ ID NO: 625890 - RNA, 19 nt, Homo sapiens
  misc_RNA (1)...(19): siRNA sense strand
ugucaagaaugcaaaguaa

SEQ ID NO: 625891 - RNA, 19 nt, Homo sapiens
  misc_RNA (1)...(19): siRNA sense strand
caaaguguuucuccaugaa

SEQ ID NO: 625892 - RNA, 19 nt, Homo sapiens
  misc_RNA (1)...(19): siRNA sense strand
gaagugggcacggaaauga

SEQ ID NO: 625893 - RNA, 19 nt, Homo sapiens
  misc_RNA (1)...(19): siRNA sense strand
ucaaaguguuucuccauga

SEQ ID NO: 625894 - RNA, 19 nt, Homo sapiens
  misc_RNA (1)...(19): siRNA sense strand
acaaauaccagccuagauu

SEQ ID NO: 625895 - RNA, 19 nt, Homo sapiens
  misc_RNA (1)...(19): siRNA sense strand
gcacagaaugucaagaaug

SEQ ID NO: 625896 - RNA, 19 nt, Homo sapiens
  misc_RNA (1)...(19): siRNA sense strand
cacaagaucacgcaauuaa

SEQ ID NO: 625897 - RNA, 19 nt, Homo sapiens
  misc_RNA (1)...(19): siRNA sense strand
gaucacagauacaaauucg

SEQ ID NO: 625898 - RNA, 19 nt, Homo sapiens
  misc_RNA (1)...(19): siRNA sense strand
gaaagcggaugaaaauaau

SEQ ID NO: 625899 - RNA, 19 nt, Homo sapiens
  misc_RNA (1)...(19): siRNA sense strand
acauggagcugcacagaau

SEQ ID NO: 625900 - RNA, 19 nt, Homo sapiens
  misc_RNA (1)...(19): siRNA sense strand
ggagggaaucaaaguguuu

SEQ ID NO: 625901 - RNA, 19 nt, Homo sapiens
  misc_RNA (1)...(19): siRNA sense strand
gcacaaauaccagccuaga

SEQ ID NO: 625902 - RNA, 19 nt, Homo sapiens
  misc_RNA (1)...(19): siRNA sense strand
ccaggagcauagccaaauu

SEQ ID NO: 625903 - RNA, 19 nt, Homo sapiens
  misc_RNA (1)...(19): siRNA sense strand
caagaucacgcaauuaaag

SEQ ID NO: 625904 - RNA, 19 nt, Homo sapiens
  misc_RNA (1)...(19): siRNA sense strand
gcucgucuccuuccagaaa

SEQ ID NO: 625905 - RNA, 19 nt, Homo sapiens
  misc_RNA (1)...(19): siRNA sense strand
ugaggcagcucgucuccuu

SEQ ID NO: 625906 - RNA, 19 nt, Homo sapiens
  misc_RNA (1)...(19): siRNA sense strand
gggcauggagggaaucaaa

SEQ ID NO: 625907 - RNA, 19 nt, Homo sapiens
  misc_RNA (1)...(19): siRNA sense strand
gaucacgcaauuaaagauu

SEQ ID NO: 625908 - RNA, 19 nt, Homo sapiens
  misc_RNA (1)...(19): siRNA sense strand
agauacaaauucgcagaua

SEQ ID NO: 625909 - RNA, 19 nt, Homo sapiens
  misc_RNA (1)...(19): siRNA sense strand
ccacaagaucacgcaauua

SEQ ID NO: 625910 - RNA, 19 nt, Homo sapiens
  misc_RNA (1)...(19): siRNA sense strand
ggcggauguuucccaguua

SEQ ID NO: 625911 - RNA, 19 nt, Homo sapiens
  misc_RNA (1)...(19): siRNA sense strand
cggaaaugaucauaaccaa

SEQ ID NO: 625912 - RNA, 19 nt, Homo sapiens
  misc_RNA (1)...(19): siRNA sense strand
acaaccaccuggacccauu

SEQ ID NO: 625913 - RNA, 19 nt, Homo sapiens
  misc_RNA (1)...(19): siRNA sense strand
gagcauagccaaauuuacc

SEQ ID NO: 625914 - RNA, 19 nt, Homo sapiens
  misc_RNA (1)...(19): siRNA sense strand
cacagaaugucaagaaugc

SEQ ID NO: 625915 - RNA, 19 nt, Homo sapiens
  misc_RNA (1)...(19): siRNA sense strand
uuauagcagugacuuccua

SEQ ID NO: 625916 - RNA, 19 nt, Homo sapiens
  misc_RNA (1)...(19): siRNA sense strand
gauuacacaucgugaaagc

SEQ ID NO: 625917 - RNA, 19 nt, Homo sapiens
  misc_RNA (1)...(19): siRNA sense strand
ugaaagcggaugaaaauaa

SEQ ID NO: 625918 - RNA, 19 nt, Homo sapiens
  misc_RNA (1)...(19): siRNA sense strand
gauguuucccaguuacaaa

SEQ ID NO: 625919 - RNA, 19 nt, Homo sapiens
  misc_RNA (1)...(19): siRNA sense strand
caagaaugcaaaguaaaga

SEQ ID NO: 625920 - RNA, 19 nt, Homo sapiens
  misc_RNA (1)...(19): siRNA sense strand
uagauuacacaucgugaaa

SEQ ID NO: 625921 - RNA, 19 nt, Homo sapiens
  misc_RNA (1)...(19): siRNA sense strand
gacgaucacagauacaaau

SEQ ID NO: 625922 - RNA, 19 nt, Homo sapiens
  misc_RNA (1)...(19): siRNA sense strand
cauuguaccugccgacgau

SEQ ID NO: 625923 - RNA, 19 nt, Homo sapiens
  misc_RNA (1)...(19): siRNA sense strand
ucaagaaugcaaaguaaag

SEQ ID NO: 625924 - RNA, 19 nt, Homo sapiens
  misc_RNA (1)...(19): siRNA sense strand
uagccaaauuuaccauugu

SEQ ID NO: 625925 - RNA, 19 nt, Homo sapiens
  misc_RNA (1)...(19): siRNA sense strand
accacaagaucacgcaauu

SEQ ID NO: 625926 - RNA, 19 nt, Homo sapiens
  misc_RNA (1)...(19): siRNA sense strand
agccaaauuuaccauugua

SEQ ID NO: 625927 - RNA, 19 nt, Homo sapiens
  misc_RNA (1)...(19): siRNA sense strand
caauaccagugugagaaug

SEQ ID NO: 625928 - RNA, 19 nt, Homo sapiens
  misc_RNA (1)...(19): siRNA sense strand
aauaauggauuuggcucaa

SEQ ID NO: 625929 - RNA, 19 nt, Homo sapiens
  misc_RNA (1)...(19): siRNA sense strand
gcuggaaggcggauguuuc

SEQ ID NO: 625930 - RNA, 19 nt, Homo sapiens
  misc_RNA (1)...(19): siRNA sense strand
aggcggauguuucccaguu

SEQ ID NO: 625931 - RNA, 19 nt, Homo sapiens
  misc_RNA (1)...(19): siRNA sense strand
gcauggagggaaucaaagu

SEQ ID NO: 625932 - RNA, 19 nt, Homo sapiens
  misc_RNA (1)...(19): siRNA sense strand
caggagcauagccaaauuu

SEQ ID NO: 625933 - RNA, 19 nt, Homo sapiens
  misc_RNA (1)...(19): siRNA sense strand
gagcugcacagaaugucaa

SEQ ID NO: 625934 - RNA, 19 nt, Homo sapiens
  misc_RNA (1)...(19): siRNA sense strand
uaccagaaccacaagauca

SEQ ID NO: 625935 - RNA, 19 nt, Homo sapiens
  misc_RNA (1)...(19): siRNA sense strand
ccauuugggcauauuauuc

SEQ ID NO: 625936 - RNA, 19 nt, Homo sapiens
  misc_RNA (1)...(19): siRNA sense strand
auagccaaauuuaccauug

SEQ ID NO: 625937 - RNA, 19 nt, Homo sapiens
  misc_RNA (1)...(19): siRNA sense strand
gacauggagcugcacagaa

SEQ ID NO: 625938 - RNA, 19 nt, Homo sapiens
  misc_RNA (1)...(19): siRNA sense strand
cuaaauuccaugcacaaau

SEQ ID NO: 625939 - RNA, 19 nt, Homo sapiens
  misc_RNA (1)...(19): siRNA sense strand
aacucaagcucaccaacaa

SEQ ID NO: 625940 - RNA, 19 nt, Homo sapiens
  misc_RNA (1)...(19): siRNA sense strand
caaauuuaccauuguacca

SEQ ID NO: 625941 - RNA, 19 nt, Homo sapiens
  misc_RNA (1)...(19): siRNA sense strand
ccaauaccagugugagaau

SEQ ID NO: 625942 - RNA, 19 nt, Homo sapiens
  misc_RNA (1)...(19): siRNA sense strand
caaccaccuggacccauuu

SEQ ID NO: 625943 - RNA, 19 nt, Homo sapiens
  misc_RNA (1)...(19): siRNA sense strand
aaacucaagcucaccaaca

SEQ ID NO: 625944 - RNA, 19 nt, Homo sapiens
  misc_RNA (1)...(19): siRNA sense strand
aggagcauagccaaauuua

SEQ ID NO: 625945 - RNA, 19 nt, Homo sapiens
  misc_RNA (1)...(19): siRNA sense strand
uggagggaaucaaaguguu

SEQ ID NO: 625946 - RNA, 19 nt, Homo sapiens
  misc_RNA (1)...(19): siRNA sense strand
cagaaugucaagaaugcaa

SEQ ID NO: 625947 - RNA, 19 nt, Homo sapiens
  misc_RNA (1)...(19): siRNA sense strand
acaagaucacgcaauuaaa

SEQ ID NO: 625948 - RNA, 19 nt, Homo sapiens
  misc_RNA (1)...(19): siRNA sense strand
cugcacagaaugucaagaa

SEQ ID NO: 625949 - RNA, 19 nt, Homo sapiens
  misc_RNA (1)...(19): siRNA sense strand
cgacgaucacagauacaaa

SEQ ID NO: 625950 - RNA, 19 nt, Homo sapiens
  misc_RNA (1)...(19): siRNA sense strand
auacagcguucugcacuca

SEQ ID NO: 625951 - RNA, 19 nt, Homo sapiens
  misc_RNA (1)...(19): siRNA sense strand
gggcacggaaaugaucaua

SEQ ID NO: 625952 - RNA, 19 nt, Homo sapiens
  misc_RNA (1)...(19): siRNA sense strand
gcggauguuucccaguuac

SEQ ID NO: 625953 - RNA, 19 nt, Homo sapiens
  misc_RNA (1)...(19): siRNA sense strand
ugacauggagcugcacaga

SEQ ID NO: 625954 - RNA, 19 nt, Homo sapiens
  misc_RNA (1)...(19): siRNA sense strand
gucaagaaugcaaaguaaa

SEQ ID NO: 625955 - RNA, 19 nt, Homo sapiens
  misc_RNA (1)...(19): siRNA sense strand
gacgggccuuaaucccaaa

SEQ ID NO: 625956 - RNA, 19 nt, Homo sapiens
  misc_RNA (1)...(19): siRNA sense strand
ggauguuucccaguuacaa

SEQ ID NO: 625957 - RNA, 19 nt, Homo sapiens
  misc_RNA (1)...(19): siRNA sense strand
cgaagugggcacggaaaug

SEQ ID NO: 625958 - RNA, 19 nt, Homo sapiens
  misc_RNA (1)...(19): siRNA sense strand
ggcacggaaaugaucauaa

SEQ ID NO: 625959 - RNA, 19 nt, Homo sapiens
  misc_RNA (1)...(19): siRNA sense strand
agagaacuguggcuaaaau

SEQ ID NO: 625960 - RNA, 19 nt, Homo sapiens
  misc_RNA (1)...(19): siRNA sense strand
aagaucacgcaauuaaaga

SEQ ID NO: 625961 - RNA, 19 nt, Homo sapiens
  misc_RNA (1)...(19): siRNA sense strand
gaaugucaagaaugcaaag

SEQ ID NO: 625962 - RNA, 19 nt, Homo sapiens
  misc_RNA (1)...(19): siRNA sense strand
ggagcugcacagaauguca

SEQ ID NO: 625963 - RNA, 19 nt, Homo sapiens
  misc_RNA (1)...(19): siRNA sense strand
gauaauaaauggucuguga

SEQ ID NO: 625964 - RNA, 19 nt, Homo sapiens
  misc_RNA (1)...(19): siRNA sense strand
gauacaaauucgcagauaa

SEQ ID NO: 625965 - RNA, 19 nt, Homo sapiens
  misc_RNA (1)...(19): siRNA sense strand
gaaagagaacuguggcuaa

SEQ ID NO: 625966 - RNA, 19 nt, Homo sapiens
  misc_RNA (1)...(19): siRNA sense strand
caaauaccagccuagauua

SEQ ID NO: 625967 - RNA, 19 nt, Homo sapiens
  misc_RNA (1)...(19): siRNA sense strand
gcacggaaaugaucauaac

SEQ ID NO: 625968 - RNA, 19 nt, Homo sapiens
  misc_RNA (1)...(19): siRNA sense strand
guucugcacucacgucuuu

SEQ ID NO: 625969 - RNA, 19 nt, Homo sapiens
  misc_RNA (1)...(19): siRNA sense strand
aaagagaacuguggcuaaa

SEQ ID NO: 625970 - RNA, 19 nt, Homo sapiens
  misc_RNA (1)...(19): siRNA sense strand
ugucaagaaugcaaaguaa

SEQ ID NO: 625971 - RNA, 19 nt, Homo sapiens
  misc_RNA (1)...(19): siRNA sense strand
caaaguguuucuccaugaa

SEQ ID NO: 625972 - RNA, 19 nt, Homo sapiens
  misc_RNA (1)...(19): siRNA sense strand
gaagugggcacggaaauga

SEQ ID NO: 625973 - RNA, 19 nt, Homo sapiens
  misc_RNA (1)...(19): siRNA sense strand
ucaaaguguuucuccauga

SEQ ID NO: 625974 - RNA, 19 nt, Homo sapiens
  misc_RNA (1)...(19): siRNA sense strand
acaaauaccagccuagauu

SEQ ID NO: 625975 - RNA, 19 nt, Homo sapiens
  misc_RNA (1)...(19): siRNA sense strand
gcacagaaugucaagaaug

SEQ ID NO: 625976 - RNA, 19 nt, Homo sapiens
  misc_RNA (1)...(19): siRNA sense strand
cacaagaucacgcaauuaa

SEQ ID NO: 625977 - RNA, 19 nt, Homo sapiens
  misc_RNA (1)...(19): siRNA sense strand
gaucacagauacaaauucg

SEQ ID NO: 625978 - RNA, 19 nt, Homo sapiens
  misc_RNA (1)...(19): siRNA sense strand
gaaagcggaugaaaauaau

SEQ ID NO: 625979 - RNA, 19 nt, Homo sapiens
  misc_RNA (1)...(19): siRNA sense strand
ggagggaaucaaaguguuu

SEQ ID NO: 625980 - RNA, 19 nt, Homo sapiens
  misc_RNA (1)...(19): siRNA sense strand
acauggagcugcacagaau

SEQ ID NO: 625981 - RNA, 19 nt, Homo sapiens
  misc_RNA (1)...(19): siRNA sense strand
gcacaaauaccagccuaga

SEQ ID NO: 625982 - RNA, 19 nt, Homo sapiens
  misc_RNA (1)...(19): siRNA sense strand
ccaggagcauagccaaauu

SEQ ID NO: 625983 - RNA, 19 nt, Homo sapiens
  misc_RNA (1)...(19): siRNA sense strand
caagaucacgcaauuaaag

SEQ ID NO: 625984 - RNA, 19 nt, Homo sapiens
  misc_RNA (1)...(19): siRNA sense strand
gcucgucuccuuccagaaa

SEQ ID NO: 625985 - RNA, 19 nt, Homo sapiens
  misc_RNA (1)...(19): siRNA sense strand
ugaggcagcucgucuccuu

SEQ ID NO: 625986 - RNA, 19 nt, Homo sapiens
  misc_RNA (1)...(19): siRNA sense strand
gaucacgcaauuaaagauu

SEQ ID NO: 625987 - RNA, 19 nt, Homo sapiens
  misc_RNA (1)...(19): siRNA sense strand
agauacaaauucgcagaua

SEQ ID NO: 625988 - RNA, 19 nt, Homo sapiens
  misc_RNA (1)...(19): siRNA sense strand
ccacaagaucacgcaauua

SEQ ID NO: 625989 - RNA, 19 nt, Homo sapiens
  misc_RNA (1)...(19): siRNA sense strand
ggcggauguuucccaguua

SEQ ID NO: 625990 - RNA, 19 nt, Homo sapiens
  misc_RNA (1)...(19): siRNA sense strand
cggaaaugaucauaaccaa

SEQ ID NO: 625991 - RNA, 19 nt, Homo sapiens
  misc_RNA (1)...(19): siRNA sense strand
acaaccaccuggacccauu

SEQ ID NO: 625992 - RNA, 19 nt, Homo sapiens
  misc_RNA (1)...(19): siRNA sense strand
gagcauagccaaauuuacc

SEQ ID NO: 625993 - RNA, 19 nt, Homo sapiens
  misc_RNA (1)...(19): siRNA sense strand
cacagaaugucaagaaugc

SEQ ID NO: 625994 - RNA, 19 nt, Homo sapiens
  misc_RNA (1)...(19): siRNA sense strand
uuauagcagugacuuccua

SEQ ID NO: 625995 - RNA, 19 nt, Homo sapiens
  misc_RNA (1)...(19): siRNA sense strand
gauuacacaucgugaaagc

SEQ ID NO: 625996 - RNA, 19 nt, Homo sapiens
  misc_RNA (1)...(19): siRNA sense strand
ugaaagcggaugaaaauaa

SEQ ID NO: 625997 - RNA, 19 nt, Homo sapiens
  misc_RNA (1)...(19): siRNA sense strand
gauguuucccaguuacaaa

SEQ ID NO: 625998 - RNA, 19 nt, Homo sapiens
  misc_RNA (1)...(19): siRNA sense strand
caagaaugcaaaguaaaga

SEQ ID NO: 625999 - RNA, 19 nt, Homo sapiens
  misc_RNA (1)...(19): siRNA sense strand
uagauuacacaucgugaaa

SEQ ID NO: 626000 - RNA, 19 nt, Homo sapiens
  misc_RNA (1)...(19): siRNA sense strand
gacgaucacagauacaaau

SEQ ID NO: 626001 - RNA, 19 nt, Homo sapiens
  misc_RNA (1)...(19): siRNA sense strand
cauuguaccugccgacgau

SEQ ID NO: 626002 - RNA, 19 nt, Homo sapiens
  misc_RNA (1)...(19): siRNA sense strand
ucaagaaugcaaaguaaag

SEQ ID NO: 626003 - RNA, 19 nt, Homo sapiens
  misc_RNA (1)...(19): siRNA sense strand
uagccaaauuuaccauugu

SEQ ID NO: 626004 - RNA, 19 nt, Homo sapiens
  misc_RNA (1)...(19): siRNA sense strand
accacaagaucacgcaauu

SEQ ID NO: 626005 - RNA, 19 nt, Homo sapiens
  misc_RNA (1)...(19): siRNA sense strand
agccaaauuuaccauugua

SEQ ID NO: 626006 - RNA, 19 nt, Homo sapiens
  misc_RNA (1)...(19): siRNA sense strand
caauaccagugugagaaug

SEQ ID NO: 626007 - RNA, 19 nt, Homo sapiens
  misc_RNA (1)...(19): siRNA sense strand
aggcggauguuucccaguu

SEQ ID NO: 626008 - RNA, 19 nt, Homo sapiens
  misc_RNA (1)...(19): siRNA sense strand
aauaauggauuuggcucaa

SEQ ID NO: 626009 - RNA, 19 nt, Homo sapiens
  misc_RNA (1)...(19): siRNA sense strand
gcuggaaggcggauguuuc

SEQ ID NO: 626010 - RNA, 19 nt, Homo sapiens
  misc_RNA (1)...(19): siRNA sense strand
uaccagaaccacaagauca

SEQ ID NO: 626011 - RNA, 19 nt, Homo sapiens
  misc_RNA (1)...(19): siRNA sense strand
caggagcauagccaaauuu

SEQ ID NO: 626012 - RNA, 19 nt, Homo sapiens
  misc_RNA (1)...(19): siRNA sense strand
gagcugcacagaaugucaa

SEQ ID NO: 626013 - RNA, 19 nt, Homo sapiens
  misc_RNA (1)...(19): siRNA sense strand
ccauuugggcauauuauuc

SEQ ID NO: 626014 - RNA, 19 nt, Homo sapiens
  misc_RNA (1)...(19): siRNA sense strand
auagccaaauuuaccauug

SEQ ID NO: 626015 - RNA, 19 nt, Homo sapiens
  misc_RNA (1)...(19): siRNA sense strand
gacauggagcugcacagaa

SEQ ID NO: 626016 - RNA, 19 nt, Homo sapiens
  misc_RNA (1)...(19): siRNA sense strand
cuaaauuccaugcacaaau

SEQ ID NO: 626017 - RNA, 19 nt, Homo sapiens
  misc_RNA (1)...(19): siRNA sense strand
aacucaagcucaccaacaa

SEQ ID NO: 626018 - RNA, 19 nt, Homo sapiens
  misc_RNA (1)...(19): siRNA sense strand
caaauuuaccauuguacca

SEQ ID NO: 626019 - RNA, 19 nt, Homo sapiens
  misc_RNA (1)...(19): siRNA sense strand
ccaauaccagugugagaau

SEQ ID NO: 626020 - RNA, 19 nt, Homo sapiens
  misc_RNA (1)...(19): siRNA sense strand
caaccaccuggacccauuu

SEQ ID NO: 626021 - RNA, 19 nt, Homo sapiens
  misc_RNA (1)...(19): siRNA sense strand
aaacucaagcucaccaaca

SEQ ID NO: 626022 - RNA, 19 nt, Homo sapiens
  misc_RNA (1)...(19): siRNA sense strand
aggagcauagccaaauuua

SEQ ID NO: 626023 - RNA, 19 nt, Homo sapiens
  misc_RNA (1)...(19): siRNA sense strand
cagaaugucaagaaugcaa

SEQ ID NO: 626024 - RNA, 19 nt, Homo sapiens
  misc_RNA (1)...(19): siRNA sense strand
acaagaucacgcaauuaaa

SEQ ID NO: 626025 - RNA, 19 nt, Homo sapiens
  misc_RNA (1)...(19): siRNA sense strand
cugcacagaaugucaagaa

SEQ ID NO: 626026 - RNA, 19 nt, Homo sapiens
  misc_RNA (1)...(19): siRNA sense strand
cgacgaucacagauacaaa

SEQ ID NO: 626027 - RNA, 19 nt, Homo sapiens
  misc_RNA (1)...(19): siRNA sense strand
gggcacggaaaugaucaua

SEQ ID NO: 626028 - RNA, 19 nt, Homo sapiens
  misc_RNA (1)...(19): siRNA sense strand
auacagcguucugcacuca

SEQ ID NO: 626029 - RNA, 19 nt, Homo sapiens
  misc_RNA (1)...(19): siRNA sense strand
gcggauguuucccaguuac

SEQ ID NO: 626030 - RNA, 19 nt, Homo sapiens
  misc_RNA (1)...(19): siRNA sense strand
ugacauggagcugcacaga

SEQ ID NO: 626031 - RNA, 19 nt, Homo sapiens
  misc_RNA (1)...(19): siRNA sense strand
gucaagaaugcaaaguaaa

SEQ ID NO: 626032 - RNA, 19 nt, Homo sapiens
  misc_RNA (1)...(19): siRNA sense strand
cgaagugggcacggaaaug

SEQ ID NO: 626033 - RNA, 19 nt, Homo sapiens
  misc_RNA (1)...(19): siRNA sense strand
ggauguuucccaguuacaa

SEQ ID NO: 626034 - RNA, 19 nt, Homo sapiens
  misc_RNA (1)...(19): siRNA sense strand
gacgggccuuaaucccaaa

SEQ ID NO: 626035 - RNA, 19 nt, Homo sapiens
  misc_RNA (1)...(19): siRNA sense strand
ggcacggaaaugaucauaa

SEQ ID NO: 626036 - RNA, 19 nt, Homo sapiens
  misc_RNA (1)...(19): siRNA sense strand
agagaacuguggcuaaaau

SEQ ID NO: 626037 - RNA, 19 nt, Homo sapiens
  misc_RNA (1)...(19): siRNA sense strand
aagaucacgcaauuaaaga

SEQ ID NO: 626038 - RNA, 19 nt, Homo sapiens
  misc_RNA (1)...(19): siRNA sense strand
gaaugucaagaaugcaaag

SEQ ID NO: 626039 - RNA, 19 nt, Homo sapiens
  misc_RNA (1)...(19): siRNA sense strand
ggagcugcacagaauguca

SEQ ID NO: 626040 - RNA, 19 nt, Homo sapiens
  misc_RNA (1)...(19): siRNA sense strand
gauaauaaauggucuguga

SEQ ID NO: 626041 - RNA, 19 nt, Homo sapiens
  misc_RNA (1)...(19): siRNA sense strand
gauacaaauucgcagauaa

SEQ ID NO: 626042 - RNA, 19 nt, Homo sapiens
  misc_RNA (1)...(19): siRNA sense strand
gaaagagaacuguggcuaa

SEQ ID NO: 626043 - RNA, 19 nt, Homo sapiens
  misc_RNA (1)...(19): siRNA sense strand
caaauaccagccuagauua

SEQ ID NO: 626044 - RNA, 19 nt, Homo sapiens
  misc_RNA (1)...(19): siRNA sense strand
gcacggaaaugaucauaac

SEQ ID NO: 626045 - RNA, 19 nt, Homo sapiens
  misc_RNA (1)...(19): siRNA sense strand
guucugcacucacgucuuu

SEQ ID NO: 626046 - RNA, 19 nt, Homo sapiens
  misc_RNA (1)...(19): siRNA sense strand
aaagagaacuguggcuaaa

SEQ ID NO: 626047 - RNA, 19 nt, Homo sapiens
  misc_RNA (1)...(19): siRNA sense strand
ugucaagaaugcaaaguaa

SEQ ID NO: 626048 - RNA, 19 nt, Homo sapiens
  misc_RNA (1)...(19): siRNA sense strand
caaaguguuucuccaugaa

SEQ ID NO: 626049 - RNA, 19 nt, Homo sapiens
  misc_RNA (1)...(19): siRNA sense strand
gaagugggcacggaaauga

SEQ ID NO: 626050 - RNA, 19 nt, Homo sapiens
  misc_RNA (1)...(19): siRNA sense strand
ucaaaguguuucuccauga

SEQ ID NO: 626051 - RNA, 19 nt, Homo sapiens
  misc_RNA (1)...(19): siRNA sense strand
acaaauaccagccuagauu

SEQ ID NO: 626052 - RNA, 19 nt, Homo sapiens
  misc_RNA (1)...(19): siRNA sense strand
gcacagaaugucaagaaug

SEQ ID NO: 626053 - RNA, 19 nt, Homo sapiens
  misc_RNA (1)...(19): siRNA sense strand
cacaagaucacgcaauuaa

SEQ ID NO: 626054 - RNA, 19 nt, Homo sapiens
  misc_RNA (1)...(19): siRNA sense strand
gaucacagauacaaauucg

SEQ ID NO: 626055 - RNA, 19 nt, Homo sapiens
  misc_RNA (1)...(19): siRNA sense strand
gaaagcggaugaaaauaau

SEQ ID NO: 626056 - RNA, 19 nt, Homo sapiens
  misc_RNA (1)...(19): siRNA sense strand
acauggagcugcacagaau

SEQ ID NO: 626057 - RNA, 19 nt, Homo sapiens
  misc_RNA (1)...(19): siRNA sense strand
ggagggaaucaaaguguuu

SEQ ID NO: 626058 - RNA, 19 nt, Homo sapiens
  misc_RNA (1)...(19): siRNA sense strand
gcacaaauaccagccuaga

SEQ ID NO: 626059 - RNA, 19 nt, Homo sapiens
  misc_RNA (1)...(19): siRNA sense strand
ccaggagcauagccaaauu

SEQ ID NO: 626060 - RNA, 19 nt, Homo sapiens
  misc_RNA (1)...(19): siRNA sense strand
caagaucacgcaauuaaag

SEQ ID NO: 626061 - RNA, 19 nt, Homo sapiens
  misc_RNA (1)...(19): siRNA sense strand
gcucgucuccuuccagaaa

SEQ ID NO: 626062 - RNA, 19 nt, Homo sapiens
  misc_RNA (1)...(19): siRNA sense strand
ugaggcagcucgucuccuu

SEQ ID NO: 626063 - RNA, 19 nt, Homo sapiens
  misc_RNA (1)...(19): siRNA sense strand
gggcauggagggaaucaaa

SEQ ID NO: 626064 - RNA, 19 nt, Homo sapiens
  misc_RNA (1)...(19): siRNA sense strand
gaucacgcaauuaaagauu

SEQ ID NO: 626065 - RNA, 19 nt, Homo sapiens
  misc_RNA (1)...(19): siRNA sense strand
agauacaaauucgcagaua

SEQ ID NO: 626066 - RNA, 19 nt, Homo sapiens
  misc_RNA (1)...(19): siRNA sense strand
ccacaagaucacgcaauua

SEQ ID NO: 626067 - RNA, 19 nt, Homo sapiens
  misc_RNA (1)...(19): siRNA sense strand
ggcggauguuucccaguua

SEQ ID NO: 626068 - RNA, 19 nt, Homo sapiens
  misc_RNA (1)...(19): siRNA sense strand
cggaaaugaucauaaccaa

SEQ ID NO: 626069 - RNA, 19 nt, Homo sapiens
  misc_RNA (1)...(19): siRNA sense strand
acaaccaccuggacccauu

SEQ ID NO: 626070 - RNA, 19 nt, Homo sapiens
  misc_RNA (1)...(19): siRNA sense strand
gagcauagccaaauuuacc

SEQ ID NO: 626071 - RNA, 19 nt, Homo sapiens
  misc_RNA (1)...(19): siRNA sense strand
cacagaaugucaagaaugc

SEQ ID NO: 626072 - RNA, 19 nt, Homo sapiens
  misc_RNA (1)...(19): siRNA sense strand
uuauagcagugacuuccua

SEQ ID NO: 626073 - RNA, 19 nt, Homo sapiens
  misc_RNA (1)...(19): siRNA sense strand
gauuacacaucgugaaagc

SEQ ID NO: 626074 - RNA, 19 nt, Homo sapiens
  misc_RNA (1)...(19): siRNA sense strand
ugaaagcggaugaaaauaa

SEQ ID NO: 626075 - RNA, 19 nt, Homo sapiens
  misc_RNA (1)...(19): siRNA sense strand
gauguuucccaguuacaaa

SEQ ID NO: 626076 - RNA, 19 nt, Homo sapiens
  misc_RNA (1)...(19): siRNA sense strand
caagaaugcaaaguaaaga

SEQ ID NO: 626077 - RNA, 19 nt, Homo sapiens
  misc_RNA (1)...(19): siRNA sense strand
uagauuacacaucgugaaa

SEQ ID NO: 626078 - RNA, 19 nt, Homo sapiens
  misc_RNA (1)...(19): siRNA sense strand
gacgaucacagauacaaau

SEQ ID NO: 626079 - RNA, 19 nt, Homo sapiens
  misc_RNA (1)...(19): siRNA sense strand
cauuguaccugccgacgau

SEQ ID NO: 626080 - RNA, 19 nt, Homo sapiens
  misc_RNA (1)...(19): siRNA sense strand
ucaagaaugcaaaguaaag

SEQ ID NO: 626081 - RNA, 19 nt, Homo sapiens
  misc_RNA (1)...(19): siRNA sense strand
uagccaaauuuaccauugu

SEQ ID NO: 626082 - RNA, 19 nt, Homo sapiens
  misc_RNA (1)...(19): siRNA sense strand
accacaagaucacgcaauu

SEQ ID NO: 626083 - RNA, 19 nt, Homo sapiens
  misc_RNA (1)...(19): siRNA sense strand
agccaaauuuaccauugua

SEQ ID NO: 626084 - RNA, 19 nt, Homo sapiens
  misc_RNA (1)...(19): siRNA sense strand
caauaccagugugagaaug

SEQ ID NO: 626085 - RNA, 19 nt, Homo sapiens
  misc_RNA (1)...(19): siRNA sense strand
aauaauggauuuggcucaa

SEQ ID NO: 626086 - RNA, 19 nt, Homo sapiens
  misc_RNA (1)...(19): siRNA sense strand
gcuggaaggcggauguuuc

SEQ ID NO: 626087 - RNA, 19 nt, Homo sapiens
  misc_RNA (1)...(19): siRNA sense strand
aggcggauguuucccaguu

SEQ ID NO: 626088 - RNA, 19 nt, Homo sapiens
  misc_RNA (1)...(19): siRNA sense strand
gcauggagggaaucaaagu

SEQ ID NO: 626089 - RNA, 19 nt, Homo sapiens
  misc_RNA (1)...(19): siRNA sense strand
caggagcauagccaaauuu

SEQ ID NO: 626090 - RNA, 19 nt, Homo sapiens
  misc_RNA (1)...(19): siRNA sense strand
gagcugcacagaaugucaa

SEQ ID NO: 626091 - RNA, 19 nt, Homo sapiens
  misc_RNA (1)...(19): siRNA sense strand
uaccagaaccacaagauca

SEQ ID NO: 626092 - RNA, 19 nt, Homo sapiens
  misc_RNA (1)...(19): siRNA sense strand
ccauuugggcauauuauuc

SEQ ID NO: 626093 - RNA, 19 nt, Homo sapiens
  misc_RNA (1)...(19): siRNA sense strand
auagccaaauuuaccauug

SEQ ID NO: 626094 - RNA, 19 nt, Homo sapiens
  misc_RNA (1)...(19): siRNA sense strand
gacauggagcugcacagaa

SEQ ID NO: 626095 - RNA, 19 nt, Homo sapiens
  misc_RNA (1)...(19): siRNA sense strand
cuaaauuccaugcacaaau

SEQ ID NO: 626096 - RNA, 19 nt, Homo sapiens
  misc_RNA (1)...(19): siRNA sense strand
aacucaagcucaccaacaa

SEQ ID NO: 626097 - RNA, 19 nt, Homo sapiens
  misc_RNA (1)...(19): siRNA sense strand
caaauuuaccauuguacca

SEQ ID NO: 626098 - RNA, 19 nt, Homo sapiens
  misc_RNA (1)...(19): siRNA sense strand
ccaauaccagugugagaau

SEQ ID NO: 626099 - RNA, 19 nt, Homo sapiens
  misc_RNA (1)...(19): siRNA sense strand
caaccaccuggacccauuu

SEQ ID NO: 626100 - RNA, 19 nt, Homo sapiens
  misc_RNA (1)...(19): siRNA sense strand
aaacucaagcucaccaaca

SEQ ID NO: 626101 - RNA, 19 nt, Homo sapiens
  misc_RNA (1)...(19): siRNA sense strand
aggagcauagccaaauuua

SEQ ID NO: 626102 - RNA, 19 nt, Homo sapiens
  misc_RNA (1)...(19): siRNA sense strand
uggagggaaucaaaguguu

SEQ ID NO: 626103 - RNA, 19 nt, Homo sapiens
  misc_RNA (1)...(19): siRNA sense strand
cagaaugucaagaaugcaa

SEQ ID NO: 626104 - RNA, 19 nt, Homo sapiens
  misc_RNA (1)...(19): siRNA sense strand
acaagaucacgcaauuaaa

SEQ ID NO: 626105 - RNA, 19 nt, Homo sapiens
  misc_RNA (1)...(19): siRNA sense strand
cugcacagaaugucaagaa

SEQ ID NO: 626106 - RNA, 19 nt, Homo sapiens
  misc_RNA (1)...(19): siRNA sense strand
cgacgaucacagauacaaa

SEQ ID NO: 626107 - RNA, 19 nt, Homo sapiens
  misc_RNA (1)...(19): siRNA sense strand
auacagcguucugcacuca

SEQ ID NO: 626108 - RNA, 19 nt, Homo sapiens
  misc_RNA (1)...(19): siRNA sense strand
gggcacggaaaugaucaua

SEQ ID NO: 626109 - RNA, 19 nt, Homo sapiens
  misc_RNA (1)...(19): siRNA sense strand
gcggauguuucccaguuac

SEQ ID NO: 626110 - RNA, 19 nt, Homo sapiens
  misc_RNA (1)...(19): siRNA sense strand
ugacauggagcugcacaga

SEQ ID NO: 626111 - RNA, 19 nt, Homo sapiens
  misc_RNA (1)...(19): siRNA sense strand
gucaagaaugcaaaguaaa

SEQ ID NO: 626112 - RNA, 19 nt, Homo sapiens
  misc_RNA (1)...(19): siRNA sense strand
gacgggccuuaaucccaaa

SEQ ID NO: 626113 - RNA, 19 nt, Homo sapiens
  misc_RNA (1)...(19): siRNA sense strand
ggauguuucccaguuacaa

SEQ ID NO: 626114 - RNA, 19 nt, Homo sapiens
  misc_RNA (1)...(19): siRNA sense strand
cgaagugggcacggaaaug

SEQ ID NO: 626115 - RNA, 19 nt, Homo sapiens
  misc_RNA (1)...(19): siRNA sense strand
ggcacggaaaugaucauaa

SEQ ID NO: 626116 - RNA, 19 nt, Homo sapiens
  misc_RNA (1)...(19): siRNA sense strand
agagaacuguggcuaaaau

SEQ ID NO: 626117 - RNA, 19 nt, Homo sapiens
  misc_RNA (1)...(19): siRNA sense strand
aagaucacgcaauuaaaga

SEQ ID NO: 626118 - RNA, 19 nt, Homo sapiens
  misc_RNA (1)...(19): siRNA sense strand
gaaugucaagaaugcaaag

SEQ ID NO: 626119 - RNA, 19 nt, Homo sapiens
  misc_RNA (1)...(19): siRNA sense strand
ggagcugcacagaauguca

SEQ ID NO: 626120 - RNA, 19 nt, Homo sapiens
  misc_RNA (1)...(19): siRNA sense strand
gauaauaaauggucuguga

SEQ ID NO: 626121 - RNA, 19 nt, Homo sapiens
  misc_RNA (1)...(19): siRNA sense strand
gauacaaauucgcagauaa

SEQ ID NO: 626122 - RNA, 19 nt, Homo sapiens
  misc_RNA (1)...(19): siRNA sense strand
gaaagagaacuguggcuaa

SEQ ID NO: 626123 - RNA, 19 nt, Homo sapiens
  misc_RNA (1)...(19): siRNA sense strand
caaauaccagccuagauua

SEQ ID NO: 626124 - RNA, 19 nt, Homo sapiens
  misc_RNA (1)...(19): siRNA sense strand
gcacggaaaugaucauaac

SEQ ID NO: 626125 - RNA, 19 nt, Homo sapiens
  misc_RNA (1)...(19): siRNA sense strand
guucugcacucacgucuuu

SEQ ID NO: 626126 - RNA, 19 nt, Homo sapiens
  misc_RNA (1)...(19): siRNA sense strand
aaagagaacuguggcuaaa

SEQ ID NO: 626127 - RNA, 19 nt, Homo sapiens
  misc_RNA (1)...(19): siRNA sense strand
ugucaagaaugcaaaguaa

SEQ ID NO: 626128 - RNA, 19 nt, Homo sapiens
  misc_RNA (1)...(19): siRNA sense strand
caaaguguuucuccaugaa

SEQ ID NO: 626129 - RNA, 19 nt, Homo sapiens
  misc_RNA (1)...(19): siRNA sense strand
gaagugggcacggaaauga

SEQ ID NO: 626130 - RNA, 19 nt, Homo sapiens
  misc_RNA (1)...(19): siRNA sense strand
ucaaaguguuucuccauga

SEQ ID NO: 626131 - RNA, 19 nt, Homo sapiens
  misc_RNA (1)...(19): siRNA sense strand
acaaauaccagccuagauu

SEQ ID NO: 626132 - RNA, 19 nt, Homo sapiens
  misc_RNA (1)...(19): siRNA sense strand
gcacagaaugucaagaaug

SEQ ID NO: 626133 - RNA, 19 nt, Homo sapiens
  misc_RNA (1)...(19): siRNA sense strand
cacaagaucacgcaauuaa

SEQ ID NO: 626134 - RNA, 19 nt, Homo sapiens
  misc_RNA (1)...(19): siRNA sense strand
gaucacagauacaaauucg

SEQ ID NO: 626135 - RNA, 19 nt, Homo sapiens
  misc_RNA (1)...(19): siRNA sense strand
gaaagcggaugaaaauaau

SEQ ID NO: 626136 - RNA, 19 nt, Homo sapiens
  misc_RNA (1)...(19): siRNA sense strand
acauggagcugcacagaau

SEQ ID NO: 626137 - RNA, 19 nt, Homo sapiens
  misc_RNA (1)...(19): siRNA sense strand
ggagggaaucaaaguguuu

SEQ ID NO: 626138 - RNA, 19 nt, Homo sapiens
  misc_RNA (1)...(19): siRNA sense strand
gcacaaauaccagccuaga

SEQ ID NO: 626139 - RNA, 19 nt, Homo sapiens
  misc_RNA (1)...(19): siRNA sense strand
ccaggagcauagccaaauu

SEQ ID NO: 626140 - RNA, 19 nt, Homo sapiens
  misc_RNA (1)...(19): siRNA sense strand
caagaucacgcaauuaaag

SEQ ID NO: 626141 - RNA, 19 nt, Homo sapiens
  misc_RNA (1)...(19): siRNA sense strand
gcucgucuccuuccagaaa

SEQ ID NO: 626142 - RNA, 19 nt, Homo sapiens
  misc_RNA (1)...(19): siRNA sense strand
ugaggcagcucgucuccuu

SEQ ID NO: 626143 - RNA, 19 nt, Homo sapiens
  misc_RNA (1)...(19): siRNA sense strand
gggcauggagggaaucaaa

SEQ ID NO: 626144 - RNA, 19 nt, Homo sapiens
  misc_RNA (1)...(19): siRNA sense strand
gaucacgcaauuaaagauu

SEQ ID NO: 626145 - RNA, 19 nt, Homo sapiens
  misc_RNA (1)...(19): siRNA sense strand
agauacaaauucgcagaua

SEQ ID NO: 626146 - RNA, 19 nt, Homo sapiens
  misc_RNA (1)...(19): siRNA sense strand
ccacaagaucacgcaauua

SEQ ID NO: 626147 - RNA, 19 nt, Homo sapiens
  misc_RNA (1)...(19): siRNA sense strand
ggcggauguuucccaguua

SEQ ID NO: 626148 - RNA, 19 nt, Homo sapiens
  misc_RNA (1)...(19): siRNA sense strand
cggaaaugaucauaaccaa

SEQ ID NO: 626149 - RNA, 19 nt, Homo sapiens
  misc_RNA (1)...(19): siRNA sense strand
acaaccaccuggacccauu

SEQ ID NO: 626150 - RNA, 19 nt, Homo sapiens
  misc_RNA (1)...(19): siRNA sense strand
gagcauagccaaauuuacc

SEQ ID NO: 626151 - RNA, 19 nt, Homo sapiens
  misc_RNA (1)...(19): siRNA sense strand
cacagaaugucaagaaugc

SEQ ID NO: 626152 - RNA, 19 nt, Homo sapiens
  misc_RNA (1)...(19): siRNA sense strand
uuauagcagugacuuccua

SEQ ID NO: 626153 - RNA, 19 nt, Homo sapiens
  misc_RNA (1)...(19): siRNA sense strand
gauuacacaucgugaaagc

SEQ ID NO: 626154 - RNA, 19 nt, Homo sapiens
  misc_RNA (1)...(19): siRNA sense strand
ugaaagcggaugaaaauaa

SEQ ID NO: 626155 - RNA, 19 nt, Homo sapiens
  misc_RNA (1)...(19): siRNA sense strand
gauguuucccaguuacaaa

SEQ ID NO: 626156 - RNA, 19 nt, Homo sapiens
  misc_RNA (1)...(19): siRNA sense strand
caagaaugcaaaguaaaga

SEQ ID NO: 626157 - RNA, 19 nt, Homo sapiens
  misc_RNA (1)...(19): siRNA sense strand
uagauuacacaucgugaaa

SEQ ID NO: 626158 - RNA, 19 nt, Homo sapiens
  misc_RNA (1)...(19): siRNA sense strand
gacgaucacagauacaaau

SEQ ID NO: 626159 - RNA, 19 nt, Homo sapiens
  misc_RNA (1)...(19): siRNA sense strand
cauuguaccugccgacgau

SEQ ID NO: 626160 - RNA, 19 nt, Homo sapiens
  misc_RNA (1)...(19): siRNA sense strand
ucaagaaugcaaaguaaag

SEQ ID NO: 626161 - RNA, 19 nt, Homo sapiens
  misc_RNA (1)...(19): siRNA sense strand
uagccaaauuuaccauugu

SEQ ID NO: 626162 - RNA, 19 nt, Homo sapiens
  misc_RNA (1)...(19): siRNA sense strand
accacaagaucacgcaauu

SEQ ID NO: 626163 - RNA, 19 nt, Homo sapiens
  misc_RNA (1)...(19): siRNA sense strand
agccaaauuuaccauugua

SEQ ID NO: 626164 - RNA, 19 nt, Homo sapiens
  misc_RNA (1)...(19): siRNA sense strand
caauaccagugugagaaug

SEQ ID NO: 626165 - RNA, 19 nt, Homo sapiens
  misc_RNA (1)...(19): siRNA sense strand
aauaauggauuuggcucaa

SEQ ID NO: 626166 - RNA, 19 nt, Homo sapiens
  misc_RNA (1)...(19): siRNA sense strand
gcuggaaggcggauguuuc

SEQ ID NO: 626167 - RNA, 19 nt, Homo sapiens
  misc_RNA (1)...(19): siRNA sense strand
aggcggauguuucccaguu

SEQ ID NO: 626168 - RNA, 19 nt, Homo sapiens
  misc_RNA (1)...(19): siRNA sense strand
gcauggagggaaucaaagu

SEQ ID NO: 626169 - RNA, 19 nt, Homo sapiens
  misc_RNA (1)...(19): siRNA sense strand
caggagcauagccaaauuu

SEQ ID NO: 626170 - RNA, 19 nt, Homo sapiens
  misc_RNA (1)...(19): siRNA sense strand
gagcugcacagaaugucaa

SEQ ID NO: 626171 - RNA, 19 nt, Homo sapiens
  misc_RNA (1)...(19): siRNA sense strand
uaccagaaccacaagauca

SEQ ID NO: 626172 - RNA, 19 nt, Homo sapiens
  misc_RNA (1)...(19): siRNA sense strand
ccauuugggcauauuauuc

SEQ ID NO: 626173 - RNA, 19 nt, Homo sapiens
  misc_RNA (1)...(19): siRNA sense strand
auagccaaauuuaccauug

SEQ ID NO: 626174 - RNA, 19 nt, Homo sapiens
  misc_RNA (1)...(19): siRNA sense strand
gacauggagcugcacagaa

SEQ ID NO: 626175 - RNA, 19 nt, Homo sapiens
  misc_RNA (1)...(19): siRNA sense strand
cuaaauuccaugcacaaau

SEQ ID NO: 626176 - RNA, 19 nt, Homo sapiens
  misc_RNA (1)...(19): siRNA sense strand
aacucaagcucaccaacaa

SEQ ID NO: 626177 - RNA, 19 nt, Homo sapiens
  misc_RNA (1)...(19): siRNA sense strand
caaauuuaccauuguacca

SEQ ID NO: 626178 - RNA, 19 nt, Homo sapiens
  misc_RNA (1)...(19): siRNA sense strand
ccaauaccagugugagaau

SEQ ID NO: 626179 - RNA, 19 nt, Homo sapiens
  misc_RNA (1)...(19): siRNA sense strand
caaccaccuggacccauuu

SEQ ID NO: 626180 - RNA, 19 nt, Homo sapiens
  misc_RNA (1)...(19): siRNA sense strand
aaacucaagcucaccaaca

SEQ ID NO: 626181 - RNA, 19 nt, Homo sapiens
  misc_RNA (1)...(19): siRNA sense strand
aggagcauagccaaauuua

SEQ ID NO: 626182 - RNA, 19 nt, Homo sapiens
  misc_RNA (1)...(19): siRNA sense strand
uggagggaaucaaaguguu

SEQ ID NO: 626183 - RNA, 19 nt, Homo sapiens
  misc_RNA (1)...(19): siRNA sense strand
cagaaugucaagaaugcaa

SEQ ID NO: 626184 - RNA, 19 nt, Homo sapiens
  misc_RNA (1)...(19): siRNA sense strand
acaagaucacgcaauuaaa

SEQ ID NO: 626185 - RNA, 19 nt, Homo sapiens
  misc_RNA (1)...(19): siRNA sense strand
cugcacagaaugucaagaa

SEQ ID NO: 626186 - RNA, 19 nt, Homo sapiens
  misc_RNA (1)...(19): siRNA sense strand
cgacgaucacagauacaaa

SEQ ID NO: 626187 - RNA, 19 nt, Homo sapiens
  misc_RNA (1)...(19): siRNA sense strand
auacagcguucugcacuca

SEQ ID NO: 626188 - RNA, 19 nt, Homo sapiens
  misc_RNA (1)...(19): siRNA sense strand
gggcacggaaaugaucaua

SEQ ID NO: 626189 - RNA, 19 nt, Homo sapiens
  misc_RNA (1)...(19): siRNA sense strand
gcggauguuucccaguuac

SEQ ID NO: 626190 - RNA, 19 nt, Homo sapiens
  misc_RNA (1)...(19): siRNA sense strand
ugacauggagcugcacaga

SEQ ID NO: 626191 - RNA, 19 nt, Homo sapiens
  misc_RNA (1)...(19): siRNA sense strand
gucaagaaugcaaaguaaa

SEQ ID NO: 626192 - RNA, 19 nt, Homo sapiens
  misc_RNA (1)...(19): siRNA sense strand
gacgggccuuaaucccaaa

SEQ ID NO: 626193 - RNA, 19 nt, Homo sapiens
  misc_RNA (1)...(19): siRNA sense strand
ggauguuucccaguuacaa

SEQ ID NO: 626194 - RNA, 19 nt, Homo sapiens
  misc_RNA (1)...(19): siRNA sense strand
cgaagugggcacggaaaug

SEQ ID NO: 626195 - RNA, 19 nt, Homo sapiens
  misc_RNA (1)...(19): siRNA sense strand
ggcacggaaaugaucauaa

SEQ ID NO: 626196 - RNA, 19 nt, Homo sapiens
  misc_RNA (1)...(19): siRNA sense strand
agagaacuguggcuaaaau

SEQ ID NO: 626197 - RNA, 19 nt, Homo sapiens
  misc_RNA (1)...(19): siRNA sense strand
aagaucacgcaauuaaaga

SEQ ID NO: 626198 - RNA, 19 nt, Homo sapiens
  misc_RNA (1)...(19): siRNA sense strand
gaaugucaagaaugcaaag

SEQ ID NO: 626199 - RNA, 19 nt, Homo sapiens
  misc_RNA (1)...(19): siRNA sense strand
ggagcugcacagaauguca

SEQ ID NO: 626200 - RNA, 19 nt, Homo sapiens
  misc_RNA (1)...(19): siRNA sense strand
ugaagaagaugaaacguua

SEQ ID NO: 626201 - RNA, 19 nt, Homo sapiens
  misc_RNA (1)...(19): siRNA sense strand
caagaacgguugaagcuua

SEQ ID NO: 626202 - RNA, 19 nt, Homo sapiens
  misc_RNA (1)...(19): siRNA sense strand
gaaagcacaucaagagaaa

SEQ ID NO: 626203 - RNA, 19 nt, Homo sapiens
  misc_RNA (1)...(19): siRNA sense strand
gagcgaaucuucuacauug

SEQ ID NO: 626204 - RNA, 19 nt, Homo sapiens
  misc_RNA (1)...(19): siRNA sense strand
gagaggagguggccauuaa

SEQ ID NO: 626205 - RNA, 19 nt, Homo sapiens
  misc_RNA (1)...(19): siRNA sense strand
uaacccagcugcacuauug

SEQ ID NO: 626206 - RNA, 19 nt, Homo sapiens
  misc_RNA (1)...(19): siRNA sense strand
gaucaugugugaaauccua

SEQ ID NO: 626207 - RNA, 19 nt, Homo sapiens
  misc_RNA (1)...(19): siRNA sense strand
gaacaaccccaaacuauua

SEQ ID NO: 626208 - RNA, 19 nt, Homo sapiens
  misc_RNA (1)...(19): siRNA sense strand
ugaauaaggugaagaagau

SEQ ID NO: 626209 - RNA, 19 nt, Homo sapiens
  misc_RNA (1)...(19): siRNA sense strand
ugagguggcugaucgaauu

SEQ ID NO: 626210 - RNA, 19 nt, Homo sapiens
  misc_RNA (1)...(19): siRNA sense strand
gaucuuaguccucagcaua

SEQ ID NO: 626211 - RNA, 19 nt, Homo sapiens
  misc_RNA (1)...(19): siRNA sense strand
gcagagaugcuauacaaga

SEQ ID NO: 626212 - RNA, 19 nt, Homo sapiens
  misc_RNA (1)...(19): siRNA sense strand
gacaugagaugguggugaa

SEQ ID NO: 626213 - RNA, 19 nt, Homo sapiens
  misc_RNA (1)...(19): siRNA sense strand
gcagaguguuugaagauca

SEQ ID NO: 626214 - RNA, 19 nt, Homo sapiens
  misc_RNA (1)...(19): siRNA sense strand
auacaggagugaucuauga

SEQ ID NO: 626215 - RNA, 19 nt, Homo sapiens
  misc_RNA (1)...(19): siRNA sense strand
cugauaagaucuccuuuga

SEQ ID NO: 626216 - RNA, 19 nt, Homo sapiens
  misc_RNA (1)...(19): siRNA sense strand
uacagagacucaaguguuu

SEQ ID NO: 626217 - RNA, 19 nt, Homo sapiens
  misc_RNA (1)...(19): siRNA sense strand
cgagagagcccaaccauag

SEQ ID NO: 626218 - RNA, 19 nt, Homo sapiens
  misc_RNA (1)...(19): siRNA sense strand
guuaucagcugcuuuaaac

SEQ ID NO: 626219 - RNA, 19 nt, Homo sapiens
  misc_RNA (1)...(19): siRNA sense strand
cagagaugcuauacaagaa

SEQ ID NO: 626220 - RNA, 19 nt, Homo sapiens
  misc_RNA (1)...(19): siRNA sense strand
guuugaagaucauguguga

SEQ ID NO: 626221 - RNA, 19 nt, Homo sapiens
  misc_RNA (1)...(19): siRNA sense strand
gaaacguuaucauguugga

SEQ ID NO: 626222 - RNA, 19 nt, Homo sapiens
  misc_RNA (1)...(19): siRNA sense strand
guuaacaucccaacugaaa

SEQ ID NO: 626223 - RNA, 19 nt, Homo sapiens
  misc_RNA (1)...(19): siRNA sense strand
aggcagagaugcuauacaa

SEQ ID NO: 626224 - RNA, 19 nt, Homo sapiens
  misc_RNA (1)...(19): siRNA sense strand
gauuguggaugggauguuu

SEQ ID NO: 626225 - RNA, 19 nt, Homo sapiens
  misc_RNA (1)...(19): siRNA sense strand
gaccuaaagcugcuauuug

SEQ ID NO: 626226 - RNA, 19 nt, Homo sapiens
  misc_RNA (1)...(19): siRNA sense strand
ccuaguagagcaaauguuu

SEQ ID NO: 626227 - RNA, 19 nt, Homo sapiens
  misc_RNA (1)...(19): siRNA sense strand
gagaugcuauacaagaaca

SEQ ID NO: 626228 - RNA, 19 nt, Homo sapiens
  misc_RNA (1)...(19): siRNA sense strand
cuacagagacucaaguguu

SEQ ID NO: 626229 - RNA, 19 nt, Homo sapiens
  misc_RNA (1)...(19): siRNA sense strand
ugaaggaaacccugacuga

SEQ ID NO: 626230 - RNA, 19 nt, Homo sapiens
  misc_RNA (1)...(19): siRNA sense strand
cagcugcacuauugugaga

SEQ ID NO: 626231 - RNA, 19 nt, Homo sapiens
  misc_RNA (1)...(19): siRNA sense strand
accuaaagcugcuauuuga

SEQ ID NO: 626232 - RNA, 19 nt, Homo sapiens
  misc_RNA (1)...(19): siRNA sense strand
gaagaucaugugugaaauc

SEQ ID NO: 626233 - RNA, 19 nt, Homo sapiens
  misc_RNA (1)...(19): siRNA sense strand
ugaccuuacuguucccuuu

SEQ ID NO: 626234 - RNA, 19 nt, Homo sapiens
  misc_RNA (1)...(19): siRNA sense strand
gaugcagaguguuugaaga

SEQ ID NO: 626235 - RNA, 19 nt, Homo sapiens
  misc_RNA (1)...(19): siRNA sense strand
ugaaagcacaucaagagaa

SEQ ID NO: 626236 - RNA, 19 nt, Homo sapiens
  misc_RNA (1)...(19): siRNA sense strand
uggaauugcugauaagauc

SEQ ID NO: 626237 - RNA, 19 nt, Homo sapiens
  misc_RNA (1)...(19): siRNA sense strand
aggaaacccugacugagaa

SEQ ID NO: 626238 - RNA, 19 nt, Homo sapiens
  misc_RNA (1)...(19): siRNA sense strand
gaacgguugaagcuuauug

SEQ ID NO: 626239 - RNA, 19 nt, Homo sapiens
  misc_RNA (1)...(19): siRNA sense strand
guguuaacaucccaacuga

SEQ ID NO: 626240 - RNA, 19 nt, Homo sapiens
  misc_RNA (1)...(19): siRNA sense strand
cauuugagcugaaggaaac

SEQ ID NO: 626241 - RNA, 19 nt, Homo sapiens
  misc_RNA (1)...(19): siRNA sense strand
uugcagagcuuugggauuc

SEQ ID NO: 626242 - RNA, 19 nt, Homo sapiens
  misc_RNA (1)...(19): siRNA sense strand
gagcaagaacugaaagaag

SEQ ID NO: 626243 - RNA, 19 nt, Homo sapiens
  misc_RNA (1)...(19): siRNA sense strand
gaaauucagaagcgacugu

SEQ ID NO: 626244 - RNA, 19 nt, Homo sapiens
  misc_RNA (1)...(19): siRNA sense strand
caacugaaagcacaucaag

SEQ ID NO: 626245 - RNA, 19 nt, Homo sapiens
  misc_RNA (1)...(19): siRNA sense strand
uaccugacuuuauuuggaa

SEQ ID NO: 626246 - RNA, 19 nt, Homo sapiens
  misc_RNA (1)...(19): siRNA sense strand
gcacaucaagagaaaccaa

SEQ ID NO: 626247 - RNA, 19 nt, Homo sapiens
  misc_RNA (1)...(19): siRNA sense strand
cuaaagcugcuauuugaau

SEQ ID NO: 626248 - RNA, 19 nt, Homo sapiens
  misc_RNA (1)...(19): siRNA sense strand
gcgagagagcccaaccaua

SEQ ID NO: 626249 - RNA, 19 nt, Homo sapiens
  misc_RNA (1)...(19): siRNA sense strand
cagaggcaguguuaacauc

SEQ ID NO: 626250 - RNA, 19 nt, Homo sapiens
  misc_RNA (1)...(19): siRNA sense strand
gcauuugagcugaaggaaa

SEQ ID NO: 626251 - RNA, 19 nt, Homo sapiens
  misc_RNA (1)...(19): siRNA sense strand
gcugauaagaucuccuuug

SEQ ID NO: 626252 - RNA, 19 nt, Homo sapiens
  misc_RNA (1)...(19): siRNA sense strand
gguugcagaggcaguguua

SEQ ID NO: 626253 - RNA, 19 nt, Homo sapiens
  misc_RNA (1)...(19): siRNA sense strand
gaagaagaugaaacguuau

SEQ ID NO: 626254 - RNA, 19 nt, Homo sapiens
  misc_RNA (1)...(19): siRNA sense strand
gugaagaagaugaaacguu

SEQ ID NO: 626255 - RNA, 19 nt, Homo sapiens
  misc_RNA (1)...(19): siRNA sense strand
uugaagaucaugugugaaa

SEQ ID NO: 626256 - RNA, 19 nt, Homo sapiens
  misc_RNA (1)...(19): siRNA sense strand
ggucauuauuggugagcaa

SEQ ID NO: 626257 - RNA, 19 nt, Homo sapiens
  misc_RNA (1)...(19): siRNA sense strand
caucaagagaaaccaaauu

SEQ ID NO: 626258 - RNA, 19 nt, Homo sapiens
  misc_RNA (1)...(19): siRNA sense strand
gaugggauguuugcugucu

SEQ ID NO: 626259 - RNA, 19 nt, Homo sapiens
  misc_RNA (1)...(19): siRNA sense strand
gguuaucagcugcuuuaaa

SEQ ID NO: 626260 - RNA, 19 nt, Homo sapiens
  misc_RNA (1)...(19): siRNA sense strand
ccacaccacagaagaacuu

SEQ ID NO: 626261 - RNA, 19 nt, Homo sapiens
  misc_RNA (1)...(19): siRNA sense strand
auaccugacuuuauuugga

SEQ ID NO: 626262 - RNA, 19 nt, Homo sapiens
  misc_RNA (1)...(19): siRNA sense strand
aaggaaacccugacugaga

SEQ ID NO: 626263 - RNA, 19 nt, Homo sapiens
  misc_RNA (1)...(19): siRNA sense strand
gggccuagacuacuauaca

SEQ ID NO: 626264 - RNA, 19 nt, Homo sapiens
  misc_RNA (1)...(19): siRNA sense strand
ucaaggcagagaugcuaua

SEQ ID NO: 626265 - RNA, 19 nt, Homo sapiens
  misc_RNA (1)...(19): siRNA sense strand
ggugagaaggugcggacua

SEQ ID NO: 626266 - RNA, 19 nt, Homo sapiens
  misc_RNA (1)...(19): siRNA sense strand
ccaugaauaaggugaagaa

SEQ ID NO: 626267 - RNA, 19 nt, Homo sapiens
  misc_RNA (1)...(19): siRNA sense strand
gcagaggcaguguuaacau

SEQ ID NO: 626268 - RNA, 19 nt, Homo sapiens
  misc_RNA (1)...(19): siRNA sense strand
aagaacgguugaagcuuau

SEQ ID NO: 626269 - RNA, 19 nt, Homo sapiens
  misc_RNA (1)...(19): siRNA sense strand
ggacuacagagacucaagu

SEQ ID NO: 626270 - RNA, 19 nt, Homo sapiens
  misc_RNA (1)...(19): siRNA sense strand
gacuuucucauuaagguaa

SEQ ID NO: 626271 - RNA, 19 nt, Homo sapiens
  misc_RNA (1)...(19): siRNA sense strand
gccaucugcuccuccauag

SEQ ID NO: 626272 - RNA, 19 nt, Homo sapiens
  misc_RNA (1)...(19): siRNA sense strand
cauuauuggugagcaagaa

SEQ ID NO: 626273 - RNA, 19 nt, Homo sapiens
  misc_RNA (1)...(19): siRNA sense strand
ggacucugggcucauguau

SEQ ID NO: 626274 - RNA, 19 nt, Homo sapiens
  misc_RNA (1)...(19): siRNA sense strand
gaaagaaggggucaucaag

SEQ ID NO: 626275 - RNA, 19 nt, Homo sapiens
  misc_RNA (1)...(19): siRNA sense strand
gugagaaggugcggacuac

SEQ ID NO: 626276 - RNA, 19 nt, Homo sapiens
  misc_RNA (1)...(19): siRNA sense strand
gaagaccaaaggugagaag

SEQ ID NO: 626277 - RNA, 19 nt, Homo sapiens
  misc_RNA (1)...(19): siRNA sense strand
ggguugagcgaaucuucua

SEQ ID NO: 626278 - RNA, 19 nt, Homo sapiens
  misc_RNA (1)...(19): siRNA sense strand
cucguuaucuggccaugaa

SEQ ID NO: 626279 - RNA, 19 nt, Homo sapiens
  misc_RNA (1)...(19): siRNA sense strand
ccauuaaacgggaaaauuu

SEQ ID NO: 626280 - RNA, 19 nt, Homo sapiens
  misc_RNA (1)...(19): siRNA sense strand
aaacccugacugagaagua

SEQ ID NO: 626281 - RNA, 19 nt, Homo sapiens
  misc_RNA (1)...(19): siRNA sense strand
gcgaaucuucuacauugug

SEQ ID NO: 626282 - RNA, 19 nt, Homo sapiens
  misc_RNA (1)...(19): siRNA sense strand
gagagagcccaaccauagu

SEQ ID NO: 626283 - RNA, 19 nt, Homo sapiens
  misc_RNA (1)...(19): siRNA sense strand
gcuguugucccuccgcuau

SEQ ID NO: 626284 - RNA, 19 nt, Homo sapiens
  misc_RNA (1)...(19): siRNA sense strand
aaggguaccagggaucuua

SEQ ID NO: 626285 - RNA, 19 nt, Homo sapiens
  misc_RNA (1)...(19): siRNA sense strand
caagaacaaccccaaacua

SEQ ID NO: 626286 - RNA, 19 nt, Homo sapiens
  misc_RNA (1)...(19): siRNA sense strand
uugguuaucagcugcuuua

SEQ ID NO: 626287 - RNA, 19 nt, Homo sapiens
  misc_RNA (1)...(19): siRNA sense strand
uaaacgucauggagcaaag

SEQ ID NO: 626288 - RNA, 19 nt, Homo sapiens
  misc_RNA (1)...(19): siRNA sense strand
gggaggagccccugaaugu

SEQ ID NO: 626289 - RNA, 19 nt, Homo sapiens
  misc_RNA (1)...(19): siRNA sense strand
uaguagagcaaauguuuca

SEQ ID NO: 626290 - RNA, 19 nt, Homo sapiens
  misc_RNA (1)...(19): siRNA sense strand
ugaagaucaugugugaaau

SEQ ID NO: 626291 - RNA, 19 nt, Homo sapiens
  misc_RNA (1)...(19): siRNA sense strand
ccagugugauuuugacauu

SEQ ID NO: 626292 - RNA, 19 nt, Homo sapiens
  misc_RNA (1)...(19): siRNA sense strand
gagaaggugcggacuacag

SEQ ID NO: 626293 - RNA, 19 nt, Homo sapiens
  misc_RNA (1)...(19): siRNA sense strand
ggccuagacuacuauacag

SEQ ID NO: 626294 - RNA, 19 nt, Homo sapiens
  misc_RNA (1)...(19): siRNA sense strand
agaccuaaagcugcuauuu

SEQ ID NO: 626295 - RNA, 19 nt, Homo sapiens
  misc_RNA (1)...(19): siRNA sense strand
guuucaggaucccagacua

SEQ ID NO: 626296 - RNA, 19 nt, Homo sapiens
  misc_RNA (1)...(19): siRNA sense strand
aagauggcuuggaaagaug

SEQ ID NO: 626297 - RNA, 19 nt, Homo sapiens
  misc_RNA (1)...(19): siRNA sense strand
gcuggugggcgcuaugaug

SEQ ID NO: 626298 - RNA, 19 nt, Homo sapiens
  misc_RNA (1)...(19): siRNA sense strand
aaucaaggcagagaugcua

SEQ ID NO: 626299 - RNA, 19 nt, Homo sapiens
  misc_RNA (1)...(19): siRNA sense strand
gauggacaccccagcauuu

SEQ ID NO: 626300 - RNA, 19 nt, Homo sapiens
  misc_RNA (1)...(19): siRNA sense strand
gacuaaagcuugucucaga

SEQ ID NO: 626301 - RNA, 19 nt, Homo sapiens
  misc_RNA (1)...(19): siRNA sense strand
ugaaguugcucuuugagua

SEQ ID NO: 626302 - RNA, 19 nt, Homo sapiens
  misc_RNA (1)...(19): siRNA sense strand
ugaauaaacugaccaacau

SEQ ID NO: 626303 - RNA, 19 nt, Homo sapiens
  misc_RNA (1)...(19): siRNA sense strand
gagaagguguuugacguaa

SEQ ID NO: 626304 - RNA, 19 nt, Homo sapiens
  misc_RNA (1)...(19): siRNA sense strand
gaacuaaaggaaacacuga

SEQ ID NO: 626305 - RNA, 19 nt, Homo sapiens
  misc_RNA (1)...(19): siRNA sense strand
acuccaagcuuaucuauga

SEQ ID NO: 626306 - RNA, 19 nt, Homo sapiens
  misc_RNA (1)...(19): siRNA sense strand
gaagguguuugacguaauc

SEQ ID NO: 626307 - RNA, 19 nt, Homo sapiens
  misc_RNA (1)...(19): siRNA sense strand
gcgaaacuccugaaacuga

SEQ ID NO: 626308 - RNA, 19 nt, Homo sapiens
  misc_RNA (1)...(19): siRNA sense strand
gaccugaaguugcucuuug

SEQ ID NO: 626309 - RNA, 19 nt, Homo sapiens
  misc_RNA (1)...(19): siRNA sense strand
gaugaaagcaaacagaaau

SEQ ID NO: 626310 - RNA, 19 nt, Homo sapiens
  misc_RNA (1)...(19): siRNA sense strand
ccacauagcaaagguauau

SEQ ID NO: 626311 - RNA, 19 nt, Homo sapiens
  misc_RNA (1)...(19): siRNA sense strand
gcagagugccugaagauca

SEQ ID NO: 626312 - RNA, 19 nt, Homo sapiens
  misc_RNA (1)...(19): siRNA sense strand
aaacacugaugggaaagua

SEQ ID NO: 626313 - RNA, 19 nt, Homo sapiens
  misc_RNA (1)...(19): siRNA sense strand
gugcagaagucauugauac

SEQ ID NO: 626314 - RNA, 19 nt, Homo sapiens
  misc_RNA (1)...(19): siRNA sense strand
aggcugagcugcuguacaa

SEQ ID NO: 626315 - RNA, 19 nt, Homo sapiens
  misc_RNA (1)...(19): siRNA sense strand
caagaagaacccaaagcua

SEQ ID NO: 626316 - RNA, 19 nt, Homo sapiens
  misc_RNA (1)...(19): siRNA sense strand
gagcugcuguacaagaaga

SEQ ID NO: 626317 - RNA, 19 nt, Homo sapiens
  misc_RNA (1)...(19): siRNA sense strand
cgaaacuccugaaacugaa

SEQ ID NO: 626318 - RNA, 19 nt, Homo sapiens
  misc_RNA (1)...(19): siRNA sense strand
cauuaaacgcuaccacaua

SEQ ID NO: 626319 - RNA, 19 nt, Homo sapiens
  misc_RNA (1)...(19): siRNA sense strand
ggggaagacuccaagcuua

SEQ ID NO: 626320 - RNA, 19 nt, Homo sapiens
  misc_RNA (1)...(19): siRNA sense strand
gauccuaaacuaucccaaa

SEQ ID NO: 626321 - RNA, 19 nt, Homo sapiens
  misc_RNA (1)...(19): siRNA sense strand
aggaaacacugaugggaaa

SEQ ID NO: 626322 - RNA, 19 nt, Homo sapiens
  misc_RNA (1)...(19): siRNA sense strand
gaauaaacugaccaacauu

SEQ ID NO: 626323 - RNA, 19 nt, Homo sapiens
  misc_RNA (1)...(19): siRNA sense strand
guaaucauccguugcuuca

SEQ ID NO: 626324 - RNA, 19 nt, Homo sapiens
  misc_RNA (1)...(19): siRNA sense strand
uggaggagcuggugaaacu

SEQ ID NO: 626325 - RNA, 19 nt, Homo sapiens
  misc_RNA (1)...(19): siRNA sense strand
cucgagggcuggauuacua

SEQ ID NO: 626326 - RNA, 19 nt, Homo sapiens
  misc_RNA (1)...(19): siRNA sense strand
gaagaagcugcuagaggaa

SEQ ID NO: 626327 - RNA, 19 nt, Homo sapiens
  misc_RNA (1)...(19): siRNA sense strand
gcacagcuggguccugaug

SEQ ID NO: 626328 - RNA, 19 nt, Homo sapiens
  misc_RNA (1)...(19): siRNA sense strand
uugaguaccugacccuauu

SEQ ID NO: 626329 - RNA, 19 nt, Homo sapiens
  misc_RNA (1)...(19): siRNA sense strand
acaccuguauuugaacuaa

SEQ ID NO: 626330 - RNA, 19 nt, Homo sapiens
  misc_RNA (1)...(19): siRNA sense strand
agagguggauguccgaaga

SEQ ID NO: 626331 - RNA, 19 nt, Homo sapiens
  misc_RNA (1)...(19): siRNA sense strand
cauucuagaugggauguuu

SEQ ID NO: 626332 - RNA, 19 nt, Homo sapiens
  misc_RNA (1)...(19): siRNA sense strand
gaugcagagugccugaaga

SEQ ID NO: 626333 - RNA, 19 nt, Homo sapiens
  misc_RNA (1)...(19): siRNA sense strand
cgagaagguguuugacgua

SEQ ID NO: 626334 - RNA, 19 nt, Homo sapiens
  misc_RNA (1)...(19): siRNA sense strand
ggguaucccugguggaaca

SEQ ID NO: 626335 - RNA, 19 nt, Homo sapiens
  misc_RNA (1)...(19): siRNA sense strand
ccacggugcagaagucauu

SEQ ID NO: 626336 - RNA, 19 nt, Homo sapiens
  misc_RNA (1)...(19): siRNA sense strand
uggcgaaacuccugaaacu

SEQ ID NO: 626337 - RNA, 19 nt, Homo sapiens
  misc_RNA (1)...(19): siRNA sense strand
cagagugccugaagaucau

SEQ ID NO: 626338 - RNA, 19 nt, Homo sapiens
  misc_RNA (1)...(19): siRNA sense strand
gggaagacuccaagcuuau

SEQ ID NO: 626339 - RNA, 19 nt, Homo sapiens
  misc_RNA (1)...(19): siRNA sense strand
ugaguucacuucagauagg

SEQ ID NO: 626340 - RNA, 19 nt, Homo sapiens
  misc_RNA (1)...(19): siRNA sense strand
gauggcaguucgcgagaag

SEQ ID NO: 626341 - RNA, 19 nt, Homo sapiens
  misc_RNA (1)...(19): siRNA sense strand
gccgauaccgggaauucua

SEQ ID NO: 626342 - RNA, 19 nt, Homo sapiens
  misc_RNA (1)...(19): siRNA sense strand
gcuuaucuaugaccugaag

SEQ ID NO: 626343 - RNA, 19 nt, Homo sapiens
  misc_RNA (1)...(19): siRNA sense strand
gcagggaagagguggaugu

SEQ ID NO: 626344 - RNA, 19 nt, Homo sapiens
  misc_RNA (1)...(19): siRNA sense strand
acacuggggugaucuauga

SEQ ID NO: 626345 - RNA, 19 nt, Homo sapiens
  misc_RNA (1)...(19): siRNA sense strand
gaaguugcucuuugaguac

SEQ ID NO: 626346 - RNA, 19 nt, Homo sapiens
  misc_RNA (1)...(19): siRNA sense strand
auuaaacgcuaccacauag

SEQ ID NO: 626347 - RNA, 19 nt, Homo sapiens
  misc_RNA (1)...(19): siRNA sense strand
aaucauccguugcuucaag

SEQ ID NO: 626348 - RNA, 19 nt, Homo sapiens
  misc_RNA (1)...(19): siRNA sense strand
aacagagacuagaggcuuu

SEQ ID NO: 626349 - RNA, 19 nt, Homo sapiens
  misc_RNA (1)...(19): siRNA sense strand
gacccuauuuggcauugau

SEQ ID NO: 626350 - RNA, 19 nt, Homo sapiens
  misc_RNA (1)...(19): siRNA sense strand
gcucgguauuuggcaauga

SEQ ID NO: 626351 - RNA, 19 nt, Homo sapiens
  misc_RNA (1)...(19): siRNA sense strand
cugagcugcuguacaagaa

SEQ ID NO: 626352 - RNA, 19 nt, Homo sapiens
  misc_RNA (1)...(19): siRNA sense strand
gcugagcugcuguacaaga

SEQ ID NO: 626353 - RNA, 19 nt, Homo sapiens
  misc_RNA (1)...(19): siRNA sense strand
ggcgcaaggugccaugugu

SEQ ID NO: 626354 - RNA, 19 nt, Homo sapiens
  misc_RNA (1)...(19): siRNA sense strand
caagggcacaagagacuau

SEQ ID NO: 626355 - RNA, 19 nt, Homo sapiens
  misc_RNA (1)...(19): siRNA sense strand
aaacugaccaacauuaaac

SEQ ID NO: 626356 - RNA, 19 nt, Homo sapiens
  misc_RNA (1)...(19): siRNA sense strand
acagcuggguccugaugaa

SEQ ID NO: 626357 - RNA, 19 nt, Homo sapiens
  misc_RNA (1)...(19): siRNA sense strand
gaagaacccaaagcuacug

SEQ ID NO: 626358 - RNA, 19 nt, Homo sapiens
  misc_RNA (1)...(19): siRNA sense strand
acuaaagcuugucucagaa

SEQ ID NO: 626359 - RNA, 19 nt, Homo sapiens
  misc_RNA (1)...(19): siRNA sense strand
gcugcuagaggaaagacua

SEQ ID NO: 626360 - RNA, 19 nt, Homo sapiens
  misc_RNA (1)...(19): siRNA sense strand
uagaggcuuuggaggagaa

SEQ ID NO: 626361 - RNA, 19 nt, Homo sapiens
  misc_RNA (1)...(19): siRNA sense strand
gaggagcuggugaaacuuc

SEQ ID NO: 626362 - RNA, 19 nt, Homo sapiens
  misc_RNA (1)...(19): siRNA sense strand
ggaagacuccaagcuuauc

SEQ ID NO: 626363 - RNA, 19 nt, Homo sapiens
  misc_RNA (1)...(19): siRNA sense strand
aggaaagacuaaagcuugu

SEQ ID NO: 626364 - RNA, 19 nt, Homo sapiens
  misc_RNA (1)...(19): siRNA sense strand
aagcuugucucagaacugu

SEQ ID NO: 626365 - RNA, 19 nt, Homo sapiens
  misc_RNA (1)...(19): siRNA sense strand
ugaccucacuguuccuuuu

SEQ ID NO: 626366 - RNA, 19 nt, Homo sapiens
  misc_RNA (1)...(19): siRNA sense strand
gcuggaggacgcuaugaug

SEQ ID NO: 626367 - RNA, 19 nt, Homo sapiens
  misc_RNA (1)...(19): siRNA sense strand
ggugcagaagucauugaua

SEQ ID NO: 626368 - RNA, 19 nt, Homo sapiens
  misc_RNA (1)...(19): siRNA sense strand
acccaaagcuacugaacca

SEQ ID NO: 626369 - RNA, 19 nt, Homo sapiens
  misc_RNA (1)...(19): siRNA sense strand
ugaugaaagcaaacagaaa

SEQ ID NO: 626370 - RNA, 19 nt, Homo sapiens
  misc_RNA (1)...(19): siRNA sense strand
cgggauaacccagccauga

SEQ ID NO: 626371 - RNA, 19 nt, Homo sapiens
  misc_RNA (1)...(19): siRNA sense strand
gaagacuccaagcuuaucu

SEQ ID NO: 626372 - RNA, 19 nt, Homo sapiens
  misc_RNA (1)...(19): siRNA sense strand
ccgaagagaagaccuugug

SEQ ID NO: 626373 - RNA, 19 nt, Homo sapiens
  misc_RNA (1)...(19): siRNA sense strand
ucaucaagcuccguucagu

SEQ ID NO: 626374 - RNA, 19 nt, Homo sapiens
  misc_RNA (1)...(19): siRNA sense strand
gaaacacugaugggaaagu

SEQ ID NO: 626375 - RNA, 19 nt, Homo sapiens
  misc_RNA (1)...(19): siRNA sense strand
gcaaguuccguaccaucug

SEQ ID NO: 626376 - RNA, 19 nt, Homo sapiens
  misc_RNA (1)...(19): siRNA sense strand
agaagguguuugacguaau

SEQ ID NO: 626377 - RNA, 19 nt, Homo sapiens
  misc_RNA (1)...(19): siRNA sense strand
gcuccugucccuucgcuau

SEQ ID NO: 626378 - RNA, 19 nt, Homo sapiens
  misc_RNA (1)...(19): siRNA sense strand
aggaggagguggcgaaacu

SEQ ID NO: 626379 - RNA, 19 nt, Homo sapiens
  misc_RNA (1)...(19): siRNA sense strand
gaacccaaagcuacugaac

SEQ ID NO: 626380 - RNA, 19 nt, Homo sapiens
  misc_RNA (1)...(19): siRNA sense strand
uauuuggcauugaugacaa

SEQ ID NO: 626381 - RNA, 19 nt, Homo sapiens
  misc_RNA (1)...(19): siRNA sense strand
caccuguauuugaacuaaa

SEQ ID NO: 626382 - RNA, 19 nt, Homo sapiens
  misc_RNA (1)...(19): siRNA sense strand
guacaagaagaacccaaag

SEQ ID NO: 626383 - RNA, 19 nt, Homo sapiens
  misc_RNA (1)...(19): siRNA sense strand
gagauccugaguucacuuc

SEQ ID NO: 626384 - RNA, 19 nt, Homo sapiens
  misc_RNA (1)...(19): siRNA sense strand
ggucaucaagcuccguuca

SEQ ID NO: 626385 - RNA, 19 nt, Homo sapiens
  misc_RNA (1)...(19): siRNA sense strand
gcuagaggaaagacuaaag

SEQ ID NO: 626386 - RNA, 19 nt, Homo sapiens
  misc_RNA (1)...(19): siRNA sense strand
ugggagaccugaaguugcu

SEQ ID NO: 626387 - RNA, 19 nt, Homo sapiens
  misc_RNA (1)...(19): siRNA sense strand
acacugaugggaaaguaug

SEQ ID NO: 626388 - RNA, 19 nt, Homo sapiens
  misc_RNA (1)...(19): siRNA sense strand
ucaaggcugagcugcugua

SEQ ID NO: 626389 - RNA, 19 nt, Homo sapiens
  misc_RNA (1)...(19): siRNA sense strand
uaaagcuugucucagaacu

SEQ ID NO: 626390 - RNA, 19 nt, Homo sapiens
  misc_RNA (1)...(19): siRNA sense strand
gggcacaagagacuauagu

SEQ ID NO: 626391 - RNA, 19 nt, Homo sapiens
  misc_RNA (1)...(19): siRNA sense strand
caaugaauaaacugaccaa

SEQ ID NO: 626392 - RNA, 19 nt, Homo sapiens
  misc_RNA (1)...(19): siRNA sense strand
gaggaaaucaaaaggagaa

SEQ ID NO: 626393 - RNA, 19 nt, Homo sapiens
  misc_RNA (1)...(19): siRNA sense strand
agaagaccuuguggaggaa

SEQ ID NO: 626394 - RNA, 19 nt, Homo sapiens
  misc_RNA (1)...(19): siRNA sense strand
guggauguccgaagagaag

SEQ ID NO: 626395 - RNA, 19 nt, Homo sapiens
  misc_RNA (1)...(19): siRNA sense strand
uaucaucggcgagcaggaa

SEQ ID NO: 626396 - RNA, 19 nt, Homo sapiens
  misc_RNA (1)...(19): siRNA sense strand
agaagcugcuagaggaaag

SEQ ID NO: 626397 - RNA, 19 nt, Homo sapiens
  misc_RNA (1)...(19): siRNA sense strand
cacagaagaagcugcuaga

SEQ ID NO: 626398 - RNA, 19 nt, Homo sapiens
  misc_RNA (1)...(19): siRNA sense strand
gcuggguccugaugaaagc

SEQ ID NO: 626399 - RNA, 19 nt, Homo sapiens
  misc_RNA (1)...(19): siRNA sense strand
gaagaccuuguggaggaaa

SEQ ID NO: 626400 - RNA, 19 nt, Homo sapiens
  misc_RNA (1)...(19): siRNA sense strand
gcagauccgucacagacua

SEQ ID NO: 626401 - RNA, 19 nt, Homo sapiens
  misc_RNA (1)...(19): siRNA sense strand
cagaaggccugcccucaga

SEQ ID NO: 626402 - RNA, 19 nt, Homo sapiens
  misc_RNA (1)...(19): siRNA sense strand
ucaacaaggucgacaagca

SEQ ID NO: 626403 - RNA, 19 nt, Homo sapiens
  misc_RNA (1)...(19): siRNA sense strand
uggaaauccuggaguacaa

SEQ ID NO: 626404 - RNA, 19 nt, Homo sapiens
  misc_RNA (1)...(19): siRNA sense strand
ggaguacaacuucaacaag

SEQ ID NO: 626405 - RNA, 19 nt, Homo sapiens
  misc_RNA (1)...(19): siRNA sense strand
gaggagacccagaaauggu

SEQ ID NO: 626406 - RNA, 19 nt, Homo sapiens
  misc_RNA (1)...(19): siRNA sense strand
cagaggaccagguggaaau

SEQ ID NO: 626407 - RNA, 19 nt, Homo sapiens
  misc_RNA (1)...(19): siRNA sense strand
ggaggagacccagaaaugg

SEQ ID NO: 626408 - RNA, 19 nt, Homo sapiens
  misc_RNA (1)...(19): siRNA sense strand
ggagacccagaaaugguuu

SEQ ID NO: 626409 - RNA, 19 nt, Homo sapiens
  misc_RNA (1)...(19): siRNA sense strand
uuaagcagcgccuggcaaa

SEQ ID NO: 626410 - RNA, 19 nt, Homo sapiens
  misc_RNA (1)...(19): siRNA sense strand
aggaggagacccagaaaug

SEQ ID NO: 626411 - RNA, 19 nt, Homo sapiens
  misc_RNA (1)...(19): siRNA sense strand
agguggaaauccuggagua

SEQ ID NO: 626412 - RNA, 19 nt, Homo sapiens
  misc_RNA (1)...(19): siRNA sense strand
gaggaggagacccagaaau

SEQ ID NO: 626413 - RNA, 19 nt, Homo sapiens
  misc_RNA (1)...(19): siRNA sense strand
gagacccagaaaugguuua

SEQ ID NO: 626414 - RNA, 19 nt, Homo sapiens
  misc_RNA (1)...(19): siRNA sense strand
gaaggccugcccucagagu

SEQ ID NO: 626415 - RNA, 19 nt, Homo sapiens
  misc_RNA (1)...(19): siRNA sense strand
ccgaggaggagacccagaa

SEQ ID NO: 626416 - RNA, 19 nt, Homo sapiens
  misc_RNA (1)...(19): siRNA sense strand
cagauccgucacagacuaa

SEQ ID NO: 626417 - RNA, 19 nt, Homo sapiens
  misc_RNA (1)...(19): siRNA sense strand
cgaggaggagacccagaaa

SEQ ID NO: 626418 - RNA, 19 nt, Homo sapiens
  misc_RNA (1)...(19): siRNA sense strand
gcagauccgucacagacua

SEQ ID NO: 626419 - RNA, 19 nt, Homo sapiens
  misc_RNA (1)...(19): siRNA sense strand
cagaaggccugcccucaga

SEQ ID NO: 626420 - RNA, 19 nt, Homo sapiens
  misc_RNA (1)...(19): siRNA sense strand
ucaacaaggucgacaagca

SEQ ID NO: 626421 - RNA, 19 nt, Homo sapiens
  misc_RNA (1)...(19): siRNA sense strand
uggaaauccuggaguacaa

SEQ ID NO: 626422 - RNA, 19 nt, Homo sapiens
  misc_RNA (1)...(19): siRNA sense strand
ggaguacaacuucaacaag

SEQ ID NO: 626423 - RNA, 19 nt, Homo sapiens
  misc_RNA (1)...(19): siRNA sense strand
gaggagacccagaaauggu

SEQ ID NO: 626424 - RNA, 19 nt, Homo sapiens
  misc_RNA (1)...(19): siRNA sense strand
cagaggaccagguggaaau

SEQ ID NO: 626425 - RNA, 19 nt, Homo sapiens
  misc_RNA (1)...(19): siRNA sense strand
ggaggagacccagaaaugg

SEQ ID NO: 626426 - RNA, 19 nt, Homo sapiens
  misc_RNA (1)...(19): siRNA sense strand
ggagacccagaaaugguuu

SEQ ID NO: 626427 - RNA, 19 nt, Homo sapiens
  misc_RNA (1)...(19): siRNA sense strand
uuaagcagcgccuggcaaa

SEQ ID NO: 626428 - RNA, 19 nt, Homo sapiens
  misc_RNA (1)...(19): siRNA sense strand
aggaggagacccagaaaug

SEQ ID NO: 626429 - RNA, 19 nt, Homo sapiens
  misc_RNA (1)...(19): siRNA sense strand
agguggaaauccuggagua

SEQ ID NO: 626430 - RNA, 19 nt, Homo sapiens
  misc_RNA (1)...(19): siRNA sense strand
gaggaggagacccagaaau

SEQ ID NO: 626431 - RNA, 19 nt, Homo sapiens
  misc_RNA (1)...(19): siRNA sense strand
gagacccagaaaugguuua

SEQ ID NO: 626432 - RNA, 19 nt, Homo sapiens
  misc_RNA (1)...(19): siRNA sense strand
gaaggccugcccucagagu

SEQ ID NO: 626433 - RNA, 19 nt, Homo sapiens
  misc_RNA (1)...(19): siRNA sense strand
ccgaggaggagacccagaa

SEQ ID NO: 626434 - RNA, 19 nt, Homo sapiens
  misc_RNA (1)...(19): siRNA sense strand
cagauccgucacagacuaa

SEQ ID NO: 626435 - RNA, 19 nt, Homo sapiens
  misc_RNA (1)...(19): siRNA sense strand
cgaggaggagacccagaaa

SEQ ID NO: 626436 - RNA, 19 nt, Homo sapiens
  misc_RNA (1)...(19): siRNA sense strand
gcagauccgucacagacua

SEQ ID NO: 626437 - RNA, 19 nt, Homo sapiens
  misc_RNA (1)...(19): siRNA sense strand
cagaaggccugcccucaga

SEQ ID NO: 626438 - RNA, 19 nt, Homo sapiens
  misc_RNA (1)...(19): siRNA sense strand
ucaacaaggucgacaagca

SEQ ID NO: 626439 - RNA, 19 nt, Homo sapiens
  misc_RNA (1)...(19): siRNA sense strand
uggaaauccuggaguacaa

SEQ ID NO: 626440 - RNA, 19 nt, Homo sapiens
  misc_RNA (1)...(19): siRNA sense strand
ggaguacaacuucaacaag

SEQ ID NO: 626441 - RNA, 19 nt, Homo sapiens
  misc_RNA (1)...(19): siRNA sense strand
gaggagacccagaaauggu

SEQ ID NO: 626442 - RNA, 19 nt, Homo sapiens
  misc_RNA (1)...(19): siRNA sense strand
cagaggaccagguggaaau

SEQ ID NO: 626443 - RNA, 19 nt, Homo sapiens
  misc_RNA (1)...(19): siRNA sense strand
ggaggagacccagaaaugg

SEQ ID NO: 626444 - RNA, 19 nt, Homo sapiens
  misc_RNA (1)...(19): siRNA sense strand
ggagacccagaaaugguuu

SEQ ID NO: 626445 - RNA, 19 nt, Homo sapiens
  misc_RNA (1)...(19): siRNA sense strand
uuaagcagcgccuggcaaa

SEQ ID NO: 626446 - RNA, 19 nt, Homo sapiens
  misc_RNA (1)...(19): siRNA sense strand
aggaggagacccagaaaug

SEQ ID NO: 626447 - RNA, 19 nt, Homo sapiens
  misc_RNA (1)...(19): siRNA sense strand
agguggaaauccuggagua

SEQ ID NO: 626448 - RNA, 19 nt, Homo sapiens
  misc_RNA (1)...(19): siRNA sense strand
gaggaggagacccagaaau

SEQ ID NO: 626449 - RNA, 19 nt, Homo sapiens
  misc_RNA (1)...(19): siRNA sense strand
gagacccagaaaugguuua

SEQ ID NO: 626450 - RNA, 19 nt, Homo sapiens
  misc_RNA (1)...(19): siRNA sense strand
gaaggccugcccucagagu

SEQ ID NO: 626451 - RNA, 19 nt, Homo sapiens
  misc_RNA (1)...(19): siRNA sense strand
ccgaggaggagacccagaa

SEQ ID NO: 626452 - RNA, 19 nt, Homo sapiens
  misc_RNA (1)...(19): siRNA sense strand
cagauccgucacagacuaa

SEQ ID NO: 626453 - RNA, 19 nt, Homo sapiens
  misc_RNA (1)...(19): siRNA sense strand
cgaggaggagacccagaaa

SEQ ID NO: 626454 - RNA, 19 nt, Homo sapiens
  misc_RNA (1)...(19): siRNA sense strand
gaucagagcuggcgcaaag

SEQ ID NO: 626455 - RNA, 19 nt, Homo sapiens
  misc_RNA (1)...(19): siRNA sense strand
gcaaagagcggguacugaa

SEQ ID NO: 626456 - RNA, 19 nt, Homo sapiens
  misc_RNA (1)...(19): siRNA sense strand
gcaaugaaaucuggacuca

SEQ ID NO: 626457 - RNA, 19 nt, Homo sapiens
  misc_RNA (1)...(19): siRNA sense strand
gauguuuccuaccuauaua

SEQ ID NO: 626458 - RNA, 19 nt, Homo sapiens
  misc_RNA (1)...(19): siRNA sense strand
gagcaauggugggaagauu

SEQ ID NO: 626459 - RNA, 19 nt, Homo sapiens
  misc_RNA (1)...(19): siRNA sense strand
ccacuguucugugcaauga

SEQ ID NO: 626460 - RNA, 19 nt, Homo sapiens
  misc_RNA (1)...(19): siRNA sense strand
ggauguuuccuaccuauau

SEQ ID NO: 626461 - RNA, 19 nt, Homo sapiens
  misc_RNA (1)...(19): siRNA sense strand
ggagcugccugccaaccuu

SEQ ID NO: 626462 - RNA, 19 nt, Homo sapiens
  misc_RNA (1)...(19): siRNA sense strand
caaagaggacugugagcaa

SEQ ID NO: 626463 - RNA, 19 nt, Homo sapiens
  misc_RNA (1)...(19): siRNA sense strand
ggacuucaggguuuaacaa

SEQ ID NO: 626464 - RNA, 19 nt, Homo sapiens
  misc_RNA (1)...(19): siRNA sense strand
ccaggaagcccauaaggau

SEQ ID NO: 626465 - RNA, 19 nt, Homo sapiens
  misc_RNA (1)...(19): siRNA sense strand
ggaagaaugccugcuguuc

SEQ ID NO: 626466 - RNA, 19 nt, Homo sapiens
  misc_RNA (1)...(19): siRNA sense strand
ccuacaaggucagcaacua

SEQ ID NO: 626467 - RNA, 19 nt, Homo sapiens
  misc_RNA (1)...(19): siRNA sense strand
aaagaggacugugagcaau

SEQ ID NO: 626468 - RNA, 19 nt, Homo sapiens
  misc_RNA (1)...(19): siRNA sense strand
aaugaaaucuggacucacu

SEQ ID NO: 626469 - RNA, 19 nt, Homo sapiens
  misc_RNA (1)...(19): siRNA sense strand
caaguugcaugagcagugu

SEQ ID NO: 626470 - RNA, 19 nt, Homo sapiens
  misc_RNA (1)...(19): siRNA sense strand
gcaaacggcauuucaucca

SEQ ID NO: 626471 - RNA, 19 nt, Homo sapiens
  misc_RNA (1)...(19): siRNA sense strand
cuucaggguuuaacaagug

SEQ ID NO: 626472 - RNA, 19 nt, Homo sapiens
  misc_RNA (1)...(19): siRNA sense strand
gccaaccuuuccauuucua

SEQ ID NO: 626473 - RNA, 19 nt, Homo sapiens
  misc_RNA (1)...(19): siRNA sense strand
ugucgacccuggaggaaga

SEQ ID NO: 626474 - RNA, 19 nt, Homo sapiens
  misc_RNA (1)...(19): siRNA sense strand
cugccaaccuuuccauuuc

SEQ ID NO: 626475 - RNA, 19 nt, Homo sapiens
  misc_RNA (1)...(19): siRNA sense strand
ggaagcccauaaggauguu

SEQ ID NO: 626476 - RNA, 19 nt, Homo sapiens
  misc_RNA (1)...(19): siRNA sense strand
gccaagcaccacaaggaaa

SEQ ID NO: 626477 - RNA, 19 nt, Homo sapiens
  misc_RNA (1)...(19): siRNA sense strand
acuguucugugcaaugaaa

SEQ ID NO: 626478 - RNA, 19 nt, Homo sapiens
  misc_RNA (1)...(19): siRNA sense strand
ggacucacuccuacaaggu

SEQ ID NO: 626479 - RNA, 19 nt, Homo sapiens
  misc_RNA (1)...(19): siRNA sense strand
gccaggaagcccauaagga

SEQ ID NO: 626480 - RNA, 19 nt, Homo sapiens
  misc_RNA (1)...(19): siRNA sense strand
ggagguggcgagguucuau

SEQ ID NO: 626481 - RNA, 19 nt, Homo sapiens
  misc_RNA (1)...(19): siRNA sense strand
gccuggccuuuccugcuua

SEQ ID NO: 626482 - RNA, 19 nt, Homo sapiens
  misc_RNA (1)...(19): siRNA sense strand
cuaccuauauagauucaac

SEQ ID NO: 626483 - RNA, 19 nt, Homo sapiens
  misc_RNA (1)...(19): siRNA sense strand
augaggagguggcgagguu

SEQ ID NO: 626484 - RNA, 19 nt, Homo sapiens
  misc_RNA (1)...(19): siRNA sense strand
gaacgccaagcaccacaag

SEQ ID NO: 626485 - RNA, 19 nt, Homo sapiens
  misc_RNA (1)...(19): siRNA sense strand
gagcugccugccaaccuuu

SEQ ID NO: 626486 - RNA, 19 nt, Homo sapiens
  misc_RNA (1)...(19): siRNA sense strand
gcucagacaaggauugcau

SEQ ID NO: 626487 - RNA, 19 nt, Homo sapiens
  misc_RNA (1)...(19): siRNA sense strand
ccgaggacaaguugcauga

SEQ ID NO: 626488 - RNA, 19 nt, Homo sapiens
  misc_RNA (1)...(19): siRNA sense strand
ccugccaaccuuuccauuu

SEQ ID NO: 626489 - RNA, 19 nt, Homo sapiens
  misc_RNA (1)...(19): siRNA sense strand
gcgcaaagagcggguacug

SEQ ID NO: 626490 - RNA, 19 nt, Homo sapiens
  misc_RNA (1)...(19): siRNA sense strand
gaacgugccccugugcaaa

SEQ ID NO: 626491 - RNA, 19 nt, Homo sapiens
  misc_RNA (1)...(19): siRNA sense strand
aagauugucgcaccuccua

SEQ ID NO: 626492 - RNA, 19 nt, Homo sapiens
  misc_RNA (1)...(19): siRNA sense strand
gggaggcucagacaaggau

SEQ ID NO: 626493 - RNA, 19 nt, Homo sapiens
  misc_RNA (1)...(19): siRNA sense strand
aaaucuggacucacuccua

SEQ ID NO: 626494 - RNA, 19 nt, Homo sapiens
  misc_RNA (1)...(19): siRNA sense strand
gcaagagcaacuggcacaa

SEQ ID NO: 626495 - RNA, 19 nt, Homo sapiens
  misc_RNA (1)...(19): siRNA sense strand
gaucagagcuggcgcaaag

SEQ ID NO: 626496 - RNA, 19 nt, Homo sapiens
  misc_RNA (1)...(19): siRNA sense strand
gcaaagagcggguacugaa

SEQ ID NO: 626497 - RNA, 19 nt, Homo sapiens
  misc_RNA (1)...(19): siRNA sense strand
gcaaugaaaucuggacuca

SEQ ID NO: 626498 - RNA, 19 nt, Homo sapiens
  misc_RNA (1)...(19): siRNA sense strand
gauguuuccuaccuauaua

SEQ ID NO: 626499 - RNA, 19 nt, Homo sapiens
  misc_RNA (1)...(19): siRNA sense strand
gagcaauggugggaagauu

SEQ ID NO: 626500 - RNA, 19 nt, Homo sapiens
  misc_RNA (1)...(19): siRNA sense strand
ccacuguucugugcaauga

SEQ ID NO: 626501 - RNA, 19 nt, Homo sapiens
  misc_RNA (1)...(19): siRNA sense strand
ggauguuuccuaccuauau

SEQ ID NO: 626502 - RNA, 19 nt, Homo sapiens
  misc_RNA (1)...(19): siRNA sense strand
ggagcugccugccaaccuu

SEQ ID NO: 626503 - RNA, 19 nt, Homo sapiens
  misc_RNA (1)...(19): siRNA sense strand
caaagaggacugugagcaa

SEQ ID NO: 626504 - RNA, 19 nt, Homo sapiens
  misc_RNA (1)...(19): siRNA sense strand
ggacuucaggguuuaacaa

SEQ ID NO: 626505 - RNA, 19 nt, Homo sapiens
  misc_RNA (1)...(19): siRNA sense strand
ccaggaagcccauaaggau

SEQ ID NO: 626506 - RNA, 19 nt, Homo sapiens
  misc_RNA (1)...(19): siRNA sense strand
ggaagaaugccugcuguuc

SEQ ID NO: 626507 - RNA, 19 nt, Homo sapiens
  misc_RNA (1)...(19): siRNA sense strand
ccuacaaggucagcaacua

SEQ ID NO: 626508 - RNA, 19 nt, Homo sapiens
  misc_RNA (1)...(19): siRNA sense strand
aaagaggacugugagcaau

SEQ ID NO: 626509 - RNA, 19 nt, Homo sapiens
  misc_RNA (1)...(19): siRNA sense strand
aaugaaaucuggacucacu

SEQ ID NO: 626510 - RNA, 19 nt, Homo sapiens
  misc_RNA (1)...(19): siRNA sense strand
caaguugcaugagcagugu

SEQ ID NO: 626511 - RNA, 19 nt, Homo sapiens
  misc_RNA (1)...(19): siRNA sense strand
gcaaacggcauuucaucca

SEQ ID NO: 626512 - RNA, 19 nt, Homo sapiens
  misc_RNA (1)...(19): siRNA sense strand
cuucaggguuuaacaagug

SEQ ID NO: 626513 - RNA, 19 nt, Homo sapiens
  misc_RNA (1)...(19): siRNA sense strand
gccaaccuuuccauuucua

SEQ ID NO: 626514 - RNA, 19 nt, Homo sapiens
  misc_RNA (1)...(19): siRNA sense strand
ugucgacccuggaggaaga

SEQ ID NO: 626515 - RNA, 19 nt, Homo sapiens
  misc_RNA (1)...(19): siRNA sense strand
cugccaaccuuuccauuuc

SEQ ID NO: 626516 - RNA, 19 nt, Homo sapiens
  misc_RNA (1)...(19): siRNA sense strand
ggaagcccauaaggauguu

SEQ ID NO: 626517 - RNA, 19 nt, Homo sapiens
  misc_RNA (1)...(19): siRNA sense strand
gccaagcaccacaaggaaa

SEQ ID NO: 626518 - RNA, 19 nt, Homo sapiens
  misc_RNA (1)...(19): siRNA sense strand
acuguucugugcaaugaaa

SEQ ID NO: 626519 - RNA, 19 nt, Homo sapiens
  misc_RNA (1)...(19): siRNA sense strand
ggacucacuccuacaaggu

SEQ ID NO: 626520 - RNA, 19 nt, Homo sapiens
  misc_RNA (1)...(19): siRNA sense strand
gccaggaagcccauaagga

SEQ ID NO: 626521 - RNA, 19 nt, Homo sapiens
  misc_RNA (1)...(19): siRNA sense strand
ggagguggcgagguucuau

SEQ ID NO: 626522 - RNA, 19 nt, Homo sapiens
  misc_RNA (1)...(19): siRNA sense strand
gccuggccuuuccugcuua

SEQ ID NO: 626523 - RNA, 19 nt, Homo sapiens
  misc_RNA (1)...(19): siRNA sense strand
cuaccuauauagauucaac

SEQ ID NO: 626524 - RNA, 19 nt, Homo sapiens
  misc_RNA (1)...(19): siRNA sense strand
augaggagguggcgagguu

SEQ ID NO: 626525 - RNA, 19 nt, Homo sapiens
  misc_RNA (1)...(19): siRNA sense strand
gaacgccaagcaccacaag

SEQ ID NO: 626526 - RNA, 19 nt, Homo sapiens
  misc_RNA (1)...(19): siRNA sense strand
gagcugccugccaaccuuu

SEQ ID NO: 626527 - RNA, 19 nt, Homo sapiens
  misc_RNA (1)...(19): siRNA sense strand
gcucagacaaggauugcau

SEQ ID NO: 626528 - RNA, 19 nt, Homo sapiens
  misc_RNA (1)...(19): siRNA sense strand
ccgaggacaaguugcauga

SEQ ID NO: 626529 - RNA, 19 nt, Homo sapiens
  misc_RNA (1)...(19): siRNA sense strand
ccugccaaccuuuccauuu

SEQ ID NO: 626530 - RNA, 19 nt, Homo sapiens
  misc_RNA (1)...(19): siRNA sense strand
gcgcaaagagcggguacug

SEQ ID NO: 626531 - RNA, 19 nt, Homo sapiens
  misc_RNA (1)...(19): siRNA sense strand
gaacgugccccugugcaaa

SEQ ID NO: 626532 - RNA, 19 nt, Homo sapiens
  misc_RNA (1)...(19): siRNA sense strand
aagauugucgcaccuccua

SEQ ID NO: 626533 - RNA, 19 nt, Homo sapiens
  misc_RNA (1)...(19): siRNA sense strand
gggaggcucagacaaggau

SEQ ID NO: 626534 - RNA, 19 nt, Homo sapiens
  misc_RNA (1)...(19): siRNA sense strand
aaaucuggacucacuccua

SEQ ID NO: 626535 - RNA, 19 nt, Homo sapiens
  misc_RNA (1)...(19): siRNA sense strand
gcaagagcaacuggcacaa

SEQ ID NO: 626536 - RNA, 19 nt, Homo sapiens
  misc_RNA (1)...(19): siRNA sense strand
gaucagagcuggcgcaaag

SEQ ID NO: 626537 - RNA, 19 nt, Homo sapiens
  misc_RNA (1)...(19): siRNA sense strand
gcaaagagcggguacugaa

SEQ ID NO: 626538 - RNA, 19 nt, Homo sapiens
  misc_RNA (1)...(19): siRNA sense strand
gcaaugaaaucuggacuca

SEQ ID NO: 626539 - RNA, 19 nt, Homo sapiens
  misc_RNA (1)...(19): siRNA sense strand
gauguuuccuaccuauaua

SEQ ID NO: 626540 - RNA, 19 nt, Homo sapiens
  misc_RNA (1)...(19): siRNA sense strand
gagcaauggugggaagauu

SEQ ID NO: 626541 - RNA, 19 nt, Homo sapiens
  misc_RNA (1)...(19): siRNA sense strand
ccacuguucugugcaauga

SEQ ID NO: 626542 - RNA, 19 nt, Homo sapiens
  misc_RNA (1)...(19): siRNA sense strand
ggauguuuccuaccuauau

SEQ ID NO: 626543 - RNA, 19 nt, Homo sapiens
  misc_RNA (1)...(19): siRNA sense strand
ggagcugccugccaaccuu

SEQ ID NO: 626544 - RNA, 19 nt, Homo sapiens
  misc_RNA (1)...(19): siRNA sense strand
caaagaggacugugagcaa

SEQ ID NO: 626545 - RNA, 19 nt, Homo sapiens
  misc_RNA (1)...(19): siRNA sense strand
ggacuucaggguuuaacaa

SEQ ID NO: 626546 - RNA, 19 nt, Homo sapiens
  misc_RNA (1)...(19): siRNA sense strand
ccaggaagcccauaaggau

SEQ ID NO: 626547 - RNA, 19 nt, Homo sapiens
  misc_RNA (1)...(19): siRNA sense strand
ggaagaaugccugcuguuc

SEQ ID NO: 626548 - RNA, 19 nt, Homo sapiens
  misc_RNA (1)...(19): siRNA sense strand
ccuacaaggucagcaacua

SEQ ID NO: 626549 - RNA, 19 nt, Homo sapiens
  misc_RNA (1)...(19): siRNA sense strand
aaagaggacugugagcaau

SEQ ID NO: 626550 - RNA, 19 nt, Homo sapiens
  misc_RNA (1)...(19): siRNA sense strand
aaugaaaucuggacucacu

SEQ ID NO: 626551 - RNA, 19 nt, Homo sapiens
  misc_RNA (1)...(19): siRNA sense strand
caaguugcaugagcagugu

SEQ ID NO: 626552 - RNA, 19 nt, Homo sapiens
  misc_RNA (1)...(19): siRNA sense strand
gcaaacggcauuucaucca

SEQ ID NO: 626553 - RNA, 19 nt, Homo sapiens
  misc_RNA (1)...(19): siRNA sense strand
cuucaggguuuaacaagug

SEQ ID NO: 626554 - RNA, 19 nt, Homo sapiens
  misc_RNA (1)...(19): siRNA sense strand
gccaaccuuuccauuucua

SEQ ID NO: 626555 - RNA, 19 nt, Homo sapiens
  misc_RNA (1)...(19): siRNA sense strand
ugucgacccuggaggaaga

SEQ ID NO: 626556 - RNA, 19 nt, Homo sapiens
  misc_RNA (1)...(19): siRNA sense strand
cugccaaccuuuccauuuc

SEQ ID NO: 626557 - RNA, 19 nt, Homo sapiens
  misc_RNA (1)...(19): siRNA sense strand
ggaagcccauaaggauguu

SEQ ID NO: 626558 - RNA, 19 nt, Homo sapiens
  misc_RNA (1)...(19): siRNA sense strand
gccaagcaccacaaggaaa

SEQ ID NO: 626559 - RNA, 19 nt, Homo sapiens
  misc_RNA (1)...(19): siRNA sense strand
acuguucugugcaaugaaa

SEQ ID NO: 626560 - RNA, 19 nt, Homo sapiens
  misc_RNA (1)...(19): siRNA sense strand
ggacucacuccuacaaggu

SEQ ID NO: 626561 - RNA, 19 nt, Homo sapiens
  misc_RNA (1)...(19): siRNA sense strand
gccaggaagcccauaagga

SEQ ID NO: 626562 - RNA, 19 nt, Homo sapiens
  misc_RNA (1)...(19): siRNA sense strand
ggagguggcgagguucuau

SEQ ID NO: 626563 - RNA, 19 nt, Homo sapiens
  misc_RNA (1)...(19): siRNA sense strand
gccuggccuuuccugcuua

SEQ ID NO: 626564 - RNA, 19 nt, Homo sapiens
  misc_RNA (1)...(19): siRNA sense strand
cuaccuauauagauucaac

SEQ ID NO: 626565 - RNA, 19 nt, Homo sapiens
  misc_RNA (1)...(19): siRNA sense strand
augaggagguggcgagguu

SEQ ID NO: 626566 - RNA, 19 nt, Homo sapiens
  misc_RNA (1)...(19): siRNA sense strand
gaacgccaagcaccacaag

SEQ ID NO: 626567 - RNA, 19 nt, Homo sapiens
  misc_RNA (1)...(19): siRNA sense strand
gagcugccugccaaccuuu

SEQ ID NO: 626568 - RNA, 19 nt, Homo sapiens
  misc_RNA (1)...(19): siRNA sense strand
gcucagacaaggauugcau

SEQ ID NO: 626569 - RNA, 19 nt, Homo sapiens
  misc_RNA (1)...(19): siRNA sense strand
ccgaggacaaguugcauga

SEQ ID NO: 626570 - RNA, 19 nt, Homo sapiens
  misc_RNA (1)...(19): siRNA sense strand
ccugccaaccuuuccauuu

SEQ ID NO: 626571 - RNA, 19 nt, Homo sapiens
  misc_RNA (1)...(19): siRNA sense strand
gcgcaaagagcggguacug

SEQ ID NO: 626572 - RNA, 19 nt, Homo sapiens
  misc_RNA (1)...(19): siRNA sense strand
gaacgugccccugugcaaa

SEQ ID NO: 626573 - RNA, 19 nt, Homo sapiens
  misc_RNA (1)...(19): siRNA sense strand
aagauugucgcaccuccua

SEQ ID NO: 626574 - RNA, 19 nt, Homo sapiens
  misc_RNA (1)...(19): siRNA sense strand
gggaggcucagacaaggau

SEQ ID NO: 626575 - RNA, 19 nt, Homo sapiens
  misc_RNA (1)...(19): siRNA sense strand
aaaucuggacucacuccua

SEQ ID NO: 626576 - RNA, 19 nt, Homo sapiens
  misc_RNA (1)...(19): siRNA sense strand
gcaagagcaacuggcacaa

SEQ ID NO: 626577 - RNA, 19 nt, Homo sapiens
  misc_RNA (1)...(19): siRNA sense strand
gaucagagcuggcgcaaag

SEQ ID NO: 626578 - RNA, 19 nt, Homo sapiens
  misc_RNA (1)...(19): siRNA sense strand
gcaaagagcggguacugaa

SEQ ID NO: 626579 - RNA, 19 nt, Homo sapiens
  misc_RNA (1)...(19): siRNA sense strand
gcaaugaaaucuggacuca

SEQ ID NO: 626580 - RNA, 19 nt, Homo sapiens
  misc_RNA (1)...(19): siRNA sense strand
gauguuuccuaccuauaua

SEQ ID NO: 626581 - RNA, 19 nt, Homo sapiens
  misc_RNA (1)...(19): siRNA sense strand
gagcaauggugggaagauu

SEQ ID NO: 626582 - RNA, 19 nt, Homo sapiens
  misc_RNA (1)...(19): siRNA sense strand
ccacuguucugugcaauga

SEQ ID NO: 626583 - RNA, 19 nt, Homo sapiens
  misc_RNA (1)...(19): siRNA sense strand
ggauguuuccuaccuauau

SEQ ID NO: 626584 - RNA, 19 nt, Homo sapiens
  misc_RNA (1)...(19): siRNA sense strand
ggagcugccugccaaccuu

SEQ ID NO: 626585 - RNA, 19 nt, Homo sapiens
  misc_RNA (1)...(19): siRNA sense strand
caaagaggacugugagcaa

SEQ ID NO: 626586 - RNA, 19 nt, Homo sapiens
  misc_RNA (1)...(19): siRNA sense strand
ggacuucaggguuuaacaa

SEQ ID NO: 626587 - RNA, 19 nt, Homo sapiens
  misc_RNA (1)...(19): siRNA sense strand
ccaggaagcccauaaggau

SEQ ID NO: 626588 - RNA, 19 nt, Homo sapiens
  misc_RNA (1)...(19): siRNA sense strand
ggaagaaugccugcuguuc

SEQ ID NO: 626589 - RNA, 19 nt, Homo sapiens
  misc_RNA (1)...(19): siRNA sense strand
ccuacaaggucagcaacua

SEQ ID NO: 626590 - RNA, 19 nt, Homo sapiens
  misc_RNA (1)...(19): siRNA sense strand
aaagaggacugugagcaau

SEQ ID NO: 626591 - RNA, 19 nt, Homo sapiens
  misc_RNA (1)...(19): siRNA sense strand
aaugaaaucuggacucacu

SEQ ID NO: 626592 - RNA, 19 nt, Homo sapiens
  misc_RNA (1)...(19): siRNA sense strand
caaguugcaugagcagugu

SEQ ID NO: 626593 - RNA, 19 nt, Homo sapiens
  misc_RNA (1)...(19): siRNA sense strand
gcaaacggcauuucaucca

SEQ ID NO: 626594 - RNA, 19 nt, Homo sapiens
  misc_RNA (1)...(19): siRNA sense strand
cuucaggguuuaacaagug

SEQ ID NO: 626595 - RNA, 19 nt, Homo sapiens
  misc_RNA (1)...(19): siRNA sense strand
gccaaccuuuccauuucua

SEQ ID NO: 626596 - RNA, 19 nt, Homo sapiens
  misc_RNA (1)...(19): siRNA sense strand
ugucgacccuggaggaaga

SEQ ID NO: 626597 - RNA, 19 nt, Homo sapiens
  misc_RNA (1)...(19): siRNA sense strand
cugccaaccuuuccauuuc

SEQ ID NO: 626598 - RNA, 19 nt, Homo sapiens
  misc_RNA (1)...(19): siRNA sense strand
ggaagcccauaaggauguu

SEQ ID NO: 626599 - RNA, 19 nt, Homo sapiens
  misc_RNA (1)...(19): siRNA sense strand
gccaagcaccacaaggaaa

SEQ ID NO: 626600 - RNA, 19 nt, Homo sapiens
  misc_RNA (1)...(19): siRNA sense strand
acuguucugugcaaugaaa

SEQ ID NO: 626601 - RNA, 19 nt, Homo sapiens
  misc_RNA (1)...(19): siRNA sense strand
ggacucacuccuacaaggu

SEQ ID NO: 626602 - RNA, 19 nt, Homo sapiens
  misc_RNA (1)...(19): siRNA sense strand
gccaggaagcccauaagga

SEQ ID NO: 626603 - RNA, 19 nt, Homo sapiens
  misc_RNA (1)...(19): siRNA sense strand
ggagguggcgagguucuau

SEQ ID NO: 626604 - RNA, 19 nt, Homo sapiens
  misc_RNA (1)...(19): siRNA sense strand
gccuggccuuuccugcuua

SEQ ID NO: 626605 - RNA, 19 nt, Homo sapiens
  misc_RNA (1)...(19): siRNA sense strand
cuaccuauauagauucaac

SEQ ID NO: 626606 - RNA, 19 nt, Homo sapiens
  misc_RNA (1)...(19): siRNA sense strand
augaggagguggcgagguu

SEQ ID NO: 626607 - RNA, 19 nt, Homo sapiens
  misc_RNA (1)...(19): siRNA sense strand
gaacgccaagcaccacaag

SEQ ID NO: 626608 - RNA, 19 nt, Homo sapiens
  misc_RNA (1)...(19): siRNA sense strand
gagcugccugccaaccuuu

SEQ ID NO: 626609 - RNA, 19 nt, Homo sapiens
  misc_RNA (1)...(19): siRNA sense strand
gcucagacaaggauugcau

SEQ ID NO: 626610 - RNA, 19 nt, Homo sapiens
  misc_RNA (1)...(19): siRNA sense strand
ccgaggacaaguugcauga

SEQ ID NO: 626611 - RNA, 19 nt, Homo sapiens
  misc_RNA (1)...(19): siRNA sense strand
ccugccaaccuuuccauuu

SEQ ID NO: 626612 - RNA, 19 nt, Homo sapiens
  misc_RNA (1)...(19): siRNA sense strand
gcgcaaagagcggguacug

SEQ ID NO: 626613 - RNA, 19 nt, Homo sapiens
  misc_RNA (1)...(19): siRNA sense strand
gaacgugccccugugcaaa

SEQ ID NO: 626614 - RNA, 19 nt, Homo sapiens
  misc_RNA (1)...(19): siRNA sense strand
aagauugucgcaccuccua

SEQ ID NO: 626615 - RNA, 19 nt, Homo sapiens
  misc_RNA (1)...(19): siRNA sense strand
gggaggcucagacaaggau

SEQ ID NO: 626616 - RNA, 19 nt, Homo sapiens
  misc_RNA (1)...(19): siRNA sense strand
aaaucuggacucacuccua

SEQ ID NO: 626617 - RNA, 19 nt, Homo sapiens
  misc_RNA (1)...(19): siRNA sense strand
gcaagagcaacuggcacaa

SEQ ID NO: 626618 - RNA, 19 nt, Homo sapiens
  misc_RNA (1)...(19): siRNA sense strand
gaucagagcuggcgcaaag

SEQ ID NO: 626619 - RNA, 19 nt, Homo sapiens
  misc_RNA (1)...(19): siRNA sense strand
gcaaagagcggguacugaa

SEQ ID NO: 626620 - RNA, 19 nt, Homo sapiens
  misc_RNA (1)...(19): siRNA sense strand
gcaaugaaaucuggacuca

SEQ ID NO: 626621 - RNA, 19 nt, Homo sapiens
  misc_RNA (1)...(19): siRNA sense strand
gauguuuccuaccuauaua

SEQ ID NO: 626622 - RNA, 19 nt, Homo sapiens
  misc_RNA (1)...(19): siRNA sense strand
gagcaauggugggaagauu

SEQ ID NO: 626623 - RNA, 19 nt, Homo sapiens
  misc_RNA (1)...(19): siRNA sense strand
ccacuguucugugcaauga

SEQ ID NO: 626624 - RNA, 19 nt, Homo sapiens
  misc_RNA (1)...(19): siRNA sense strand
ggauguuuccuaccuauau

SEQ ID NO: 626625 - RNA, 19 nt, Homo sapiens
  misc_RNA (1)...(19): siRNA sense strand
ggagcugccugccaaccuu

SEQ ID NO: 626626 - RNA, 19 nt, Homo sapiens
  misc_RNA (1)...(19): siRNA sense strand
caaagaggacugugagcaa

SEQ ID NO: 626627 - RNA, 19 nt, Homo sapiens
  misc_RNA (1)...(19): siRNA sense strand
ggacuucaggguuuaacaa

SEQ ID NO: 626628 - RNA, 19 nt, Homo sapiens
  misc_RNA (1)...(19): siRNA sense strand
ccaggaagcccauaaggau

SEQ ID NO: 626629 - RNA, 19 nt, Homo sapiens
  misc_RNA (1)...(19): siRNA sense strand
ggaagaaugccugcuguuc

SEQ ID NO: 626630 - RNA, 19 nt, Homo sapiens
  misc_RNA (1)...(19): siRNA sense strand
ccuacaaggucagcaacua

SEQ ID NO: 626631 - RNA, 19 nt, Homo sapiens
  misc_RNA (1)...(19): siRNA sense strand
aaagaggacugugagcaau

SEQ ID NO: 626632 - RNA, 19 nt, Homo sapiens
  misc_RNA (1)...(19): siRNA sense strand
aaugaaaucuggacucacu

SEQ ID NO: 626633 - RNA, 19 nt, Homo sapiens
  misc_RNA (1)...(19): siRNA sense strand
caaguugcaugagcagugu

SEQ ID NO: 626634 - RNA, 19 nt, Homo sapiens
  misc_RNA (1)...(19): siRNA sense strand
gcaaacggcauuucaucca

SEQ ID NO: 626635 - RNA, 19 nt, Homo sapiens
  misc_RNA (1)...(19): siRNA sense strand
cuucaggguuuaacaagug

SEQ ID NO: 626636 - RNA, 19 nt, Homo sapiens
  misc_RNA (1)...(19): siRNA sense strand
gccaaccuuuccauuucua

SEQ ID NO: 626637 - RNA, 19 nt, Homo sapiens
  misc_RNA (1)...(19): siRNA sense strand
ugucgacccuggaggaaga

SEQ ID NO: 626638 - RNA, 19 nt, Homo sapiens
  misc_RNA (1)...(19): siRNA sense strand
cugccaaccuuuccauuuc

SEQ ID NO: 626639 - RNA, 19 nt, Homo sapiens
  misc_RNA (1)...(19): siRNA sense strand
ggaagcccauaaggauguu

SEQ ID NO: 626640 - RNA, 19 nt, Homo sapiens
  misc_RNA (1)...(19): siRNA sense strand
gccaagcaccacaaggaaa

SEQ ID NO: 626641 - RNA, 19 nt, Homo sapiens
  misc_RNA (1)...(19): siRNA sense strand
acuguucugugcaaugaaa

SEQ ID NO: 626642 - RNA, 19 nt, Homo sapiens
  misc_RNA (1)...(19): siRNA sense strand
ggacucacuccuacaaggu

SEQ ID NO: 626643 - RNA, 19 nt, Homo sapiens
  misc_RNA (1)...(19): siRNA sense strand
gccaggaagcccauaagga

SEQ ID NO: 626644 - RNA, 19 nt, Homo sapiens
  misc_RNA (1)...(19): siRNA sense strand
ggagguggcgagguucuau

SEQ ID NO: 626645 - RNA, 19 nt, Homo sapiens
  misc_RNA (1)...(19): siRNA sense strand
gccuggccuuuccugcuua

SEQ ID NO: 626646 - RNA, 19 nt, Homo sapiens
  misc_RNA (1)...(19): siRNA sense strand
cuaccuauauagauucaac

SEQ ID NO: 626647 - RNA, 19 nt, Homo sapiens
  misc_RNA (1)...(19): siRNA sense strand
augaggagguggcgagguu

SEQ ID NO: 626648 - RNA, 19 nt, Homo sapiens
  misc_RNA (1)...(19): siRNA sense strand
gaacgccaagcaccacaag

SEQ ID NO: 626649 - RNA, 19 nt, Homo sapiens
  misc_RNA (1)...(19): siRNA sense strand
gagcugccugccaaccuuu

SEQ ID NO: 626650 - RNA, 19 nt, Homo sapiens
  misc_RNA (1)...(19): siRNA sense strand
gcucagacaaggauugcau

SEQ ID NO: 626651 - RNA, 19 nt, Homo sapiens
  misc_RNA (1)...(19): siRNA sense strand
ccgaggacaaguugcauga

SEQ ID NO: 626652 - RNA, 19 nt, Homo sapiens
  misc_RNA (1)...(19): siRNA sense strand
ccugccaaccuuuccauuu

SEQ ID NO: 626653 - RNA, 19 nt, Homo sapiens
  misc_RNA (1)...(19): siRNA sense strand
gcgcaaagagcggguacug

SEQ ID NO: 626654 - RNA, 19 nt, Homo sapiens
  misc_RNA (1)...(19): siRNA sense strand
gaacgugccccugugcaaa

SEQ ID NO: 626655 - RNA, 19 nt, Homo sapiens
  misc_RNA (1)...(19): siRNA sense strand
aagauugucgcaccuccua

SEQ ID NO: 626656 - RNA, 19 nt, Homo sapiens
  misc_RNA (1)...(19): siRNA sense strand
gggaggcucagacaaggau

SEQ ID NO: 626657 - RNA, 19 nt, Homo sapiens
  misc_RNA (1)...(19): siRNA sense strand
aaaucuggacucacuccua

SEQ ID NO: 626658 - RNA, 19 nt, Homo sapiens
  misc_RNA (1)...(19): siRNA sense strand
gcaagagcaacuggcacaa

SEQ ID NO: 626659 - RNA, 19 nt, Homo sapiens
  misc_RNA (1)...(19): siRNA sense strand
gaucagagcuggcgcaaag

SEQ ID NO: 626660 - RNA, 19 nt, Homo sapiens
  misc_RNA (1)...(19): siRNA sense strand
gcaaagagcggguacugaa

SEQ ID NO: 626661 - RNA, 19 nt, Homo sapiens
  misc_RNA (1)...(19): siRNA sense strand
gcaaugaaaucuggacuca

SEQ ID NO: 626662 - RNA, 19 nt, Homo sapiens
  misc_RNA (1)...(19): siRNA sense strand
gauguuuccuaccuauaua

SEQ ID NO: 626663 - RNA, 19 nt, Homo sapiens
  misc_RNA (1)...(19): siRNA sense strand
gagcaauggugggaagauu

SEQ ID NO: 626664 - RNA, 19 nt, Homo sapiens
  misc_RNA (1)...(19): siRNA sense strand
ccacuguucugugcaauga

SEQ ID NO: 626665 - RNA, 19 nt, Homo sapiens
  misc_RNA (1)...(19): siRNA sense strand
ggauguuuccuaccuauau

SEQ ID NO: 626666 - RNA, 19 nt, Homo sapiens
  misc_RNA (1)...(19): siRNA sense strand
ggagcugccugccaaccuu

SEQ ID NO: 626667 - RNA, 19 nt, Homo sapiens
  misc_RNA (1)...(19): siRNA sense strand
caaagaggacugugagcaa

SEQ ID NO: 626668 - RNA, 19 nt, Homo sapiens
  misc_RNA (1)...(19): siRNA sense strand
ggacuucaggguuuaacaa

SEQ ID NO: 626669 - RNA, 19 nt, Homo sapiens
  misc_RNA (1)...(19): siRNA sense strand
ccaggaagcccauaaggau

SEQ ID NO: 626670 - RNA, 19 nt, Homo sapiens
  misc_RNA (1)...(19): siRNA sense strand
ggaagaaugccugcuguuc

SEQ ID NO: 626671 - RNA, 19 nt, Homo sapiens
  misc_RNA (1)...(19): siRNA sense strand
ccuacaaggucagcaacua

SEQ ID NO: 626672 - RNA, 19 nt, Homo sapiens
  misc_RNA (1)...(19): siRNA sense strand
aaagaggacugugagcaau

SEQ ID NO: 626673 - RNA, 19 nt, Homo sapiens
  misc_RNA (1)...(19): siRNA sense strand
aaugaaaucuggacucacu

SEQ ID NO: 626674 - RNA, 19 nt, Homo sapiens
  misc_RNA (1)...(19): siRNA sense strand
caaguugcaugagcagugu

SEQ ID NO: 626675 - RNA, 19 nt, Homo sapiens
  misc_RNA (1)...(19): siRNA sense strand
gcaaacggcauuucaucca

SEQ ID NO: 626676 - RNA, 19 nt, Homo sapiens
  misc_RNA (1)...(19): siRNA sense strand
cuucaggguuuaacaagug

SEQ ID NO: 626677 - RNA, 19 nt, Homo sapiens
  misc_RNA (1)...(19): siRNA sense strand
gccaaccuuuccauuucua

SEQ ID NO: 626678 - RNA, 19 nt, Homo sapiens
  misc_RNA (1)...(19): siRNA sense strand
ugucgacccuggaggaaga

SEQ ID NO: 626679 - RNA, 19 nt, Homo sapiens
  misc_RNA (1)...(19): siRNA sense strand
cugccaaccuuuccauuuc

SEQ ID NO: 626680 - RNA, 19 nt, Homo sapiens
  misc_RNA (1)...(19): siRNA sense strand
ggaagcccauaaggauguu

SEQ ID NO: 626681 - RNA, 19 nt, Homo sapiens
  misc_RNA (1)...(19): siRNA sense strand
gccaagcaccacaaggaaa

SEQ ID NO: 626682 - RNA, 19 nt, Homo sapiens
  misc_RNA (1)...(19): siRNA sense strand
acuguucugugcaaugaaa

SEQ ID NO: 626683 - RNA, 19 nt, Homo sapiens
  misc_RNA (1)...(19): siRNA sense strand
ggacucacuccuacaaggu

SEQ ID NO: 626684 - RNA, 19 nt, Homo sapiens
  misc_RNA (1)...(19): siRNA sense strand
gccaggaagcccauaagga

SEQ ID NO: 626685 - RNA, 19 nt, Homo sapiens
  misc_RNA (1)...(19): siRNA sense strand
ggagguggcgagguucuau

SEQ ID NO: 626686 - RNA, 19 nt, Homo sapiens
  misc_RNA (1)...(19): siRNA sense strand
gccuggccuuuccugcuua

SEQ ID NO: 626687 - RNA, 19 nt, Homo sapiens
  misc_RNA (1)...(19): siRNA sense strand
cuaccuauauagauucaac

SEQ ID NO: 626688 - RNA, 19 nt, Homo sapiens
  misc_RNA (1)...(19): siRNA sense strand
augaggagguggcgagguu

SEQ ID NO: 626689 - RNA, 19 nt, Homo sapiens
  misc_RNA (1)...(19): siRNA sense strand
gaacgccaagcaccacaag

SEQ ID NO: 626690 - RNA, 19 nt, Homo sapiens
  misc_RNA (1)...(19): siRNA sense strand
gagcugccugccaaccuuu

SEQ ID NO: 626691 - RNA, 19 nt, Homo sapiens
  misc_RNA (1)...(19): siRNA sense strand
gcucagacaaggauugcau

SEQ ID NO: 626692 - RNA, 19 nt, Homo sapiens
  misc_RNA (1)...(19): siRNA sense strand
ccgaggacaaguugcauga

SEQ ID NO: 626693 - RNA, 19 nt, Homo sapiens
  misc_RNA (1)...(19): siRNA sense strand
ccugccaaccuuuccauuu

SEQ ID NO: 626694 - RNA, 19 nt, Homo sapiens
  misc_RNA (1)...(19): siRNA sense strand
gcgcaaagagcggguacug

SEQ ID NO: 626695 - RNA, 19 nt, Homo sapiens
  misc_RNA (1)...(19): siRNA sense strand
gaacgugccccugugcaaa

SEQ ID NO: 626696 - RNA, 19 nt, Homo sapiens
  misc_RNA (1)...(19): siRNA sense strand
aagauugucgcaccuccua

SEQ ID NO: 626697 - RNA, 19 nt, Homo sapiens
  misc_RNA (1)...(19): siRNA sense strand
gggaggcucagacaaggau

SEQ ID NO: 626698 - RNA, 19 nt, Homo sapiens
  misc_RNA (1)...(19): siRNA sense strand
aaaucuggacucacuccua

SEQ ID NO: 626699 - RNA, 19 nt, Homo sapiens
  misc_RNA (1)...(19): siRNA sense strand
gcaagagcaacuggcacaa

SEQ ID NO: 626700 - RNA, 19 nt, Homo sapiens
  misc_RNA (1)...(19): siRNA sense strand
ccaaggacauggaguauuu

SEQ ID NO: 626701 - RNA, 19 nt, Homo sapiens
  misc_RNA (1)...(19): siRNA sense strand
caacaaggcuuuugaguau

SEQ ID NO: 626702 - RNA, 19 nt, Homo sapiens
  misc_RNA (1)...(19): siRNA sense strand
ggaaaggagacaugcguaa

SEQ ID NO: 626703 - RNA, 19 nt, Homo sapiens
  misc_RNA (1)...(19): siRNA sense strand
gaaaggagacaugcguaaa

SEQ ID NO: 626704 - RNA, 19 nt, Homo sapiens
  misc_RNA (1)...(19): siRNA sense strand
gcacuuuacuucacauacu

SEQ ID NO: 626705 - RNA, 19 nt, Homo sapiens
  misc_RNA (1)...(19): siRNA sense strand
gaguauaacaugcagauau

SEQ ID NO: 626706 - RNA, 19 nt, Homo sapiens
  misc_RNA (1)...(19): siRNA sense strand
ggaaggaggcgcugaccaa

SEQ ID NO: 626707 - RNA, 19 nt, Homo sapiens
  misc_RNA (1)...(19): siRNA sense strand
gaggauggguucccuguac

SEQ ID NO: 626708 - RNA, 19 nt, Homo sapiens
  misc_RNA (1)...(19): siRNA sense strand
gaaggaagggaccaaggaa

SEQ ID NO: 626709 - RNA, 19 nt, Homo sapiens
  misc_RNA (1)...(19): siRNA sense strand
ggacccaguucuaccuguu

SEQ ID NO: 626710 - RNA, 19 nt, Homo sapiens
  misc_RNA (1)...(19): siRNA sense strand
ggaaauggagcgcaacaag

SEQ ID NO: 626711 - RNA, 19 nt, Homo sapiens
  misc_RNA (1)...(19): siRNA sense strand
ggacaaugcccagcaguuc

SEQ ID NO: 626712 - RNA, 19 nt, Homo sapiens
  misc_RNA (1)...(19): siRNA sense strand
gggaagggacccaguucua

SEQ ID NO: 626713 - RNA, 19 nt, Homo sapiens
  misc_RNA (1)...(19): siRNA sense strand
ccaaggcugcccagaagua

SEQ ID NO: 626714 - RNA, 19 nt, Homo sapiens
  misc_RNA (1)...(19): siRNA sense strand
gagcggauccacuacauag

SEQ ID NO: 626715 - RNA, 19 nt, Homo sapiens
  misc_RNA (1)...(19): siRNA sense strand
acaugcagauauucaauga

SEQ ID NO: 626716 - RNA, 19 nt, Homo sapiens
  misc_RNA (1)...(19): siRNA sense strand
gaaaggcaacauuaagaag

SEQ ID NO: 626717 - RNA, 19 nt, Homo sapiens
  misc_RNA (1)...(19): siRNA sense strand
gcuccacacuggccagaga

SEQ ID NO: 626718 - RNA, 19 nt, Homo sapiens
  misc_RNA (1)...(19): siRNA sense strand
gcacacgaccgggcagaaa

SEQ ID NO: 626719 - RNA, 19 nt, Homo sapiens
  misc_RNA (1)...(19): siRNA sense strand
ugaaaggcaacauuaagaa

SEQ ID NO: 626720 - RNA, 19 nt, Homo sapiens
  misc_RNA (1)...(19): siRNA sense strand
gaacaugaagaccaaagag

SEQ ID NO: 626721 - RNA, 19 nt, Homo sapiens
  misc_RNA (1)...(19): siRNA sense strand
uuucuacgcugcugaacaa

SEQ ID NO: 626722 - RNA, 19 nt, Homo sapiens
  misc_RNA (1)...(19): siRNA sense strand
ugaccaaggacauggagua

SEQ ID NO: 626723 - RNA, 19 nt, Homo sapiens
  misc_RNA (1)...(19): siRNA sense strand
gaaaaggagaaccaaauga

SEQ ID NO: 626724 - RNA, 19 nt, Homo sapiens
  misc_RNA (1)...(19): siRNA sense strand
ggagcggauccacuacaua

SEQ ID NO: 626725 - RNA, 19 nt, Homo sapiens
  misc_RNA (1)...(19): siRNA sense strand
ugaacgcccuggaccugaa

SEQ ID NO: 626726 - RNA, 19 nt, Homo sapiens
  misc_RNA (1)...(19): siRNA sense strand
aaggagacaugcguaaaug

SEQ ID NO: 626727 - RNA, 19 nt, Homo sapiens
  misc_RNA (1)...(19): siRNA sense strand
aaauggagcgcaacaagga

SEQ ID NO: 626728 - RNA, 19 nt, Homo sapiens
  misc_RNA (1)...(19): siRNA sense strand
ccuagcugcuggacucuug

SEQ ID NO: 626729 - RNA, 19 nt, Homo sapiens
  misc_RNA (1)...(19): siRNA sense strand
gcccuggaccugaacauga

SEQ ID NO: 626730 - RNA, 19 nt, Homo sapiens
  misc_RNA (1)...(19): siRNA sense strand
aggaggcgcugaccaagga

SEQ ID NO: 626731 - RNA, 19 nt, Homo sapiens
  misc_RNA (1)...(19): siRNA sense strand
gccaggugcugaagaaggu

SEQ ID NO: 626732 - RNA, 19 nt, Homo sapiens
  misc_RNA (1)...(19): siRNA sense strand
acacccaguuugucaagga

SEQ ID NO: 626733 - RNA, 19 nt, Homo sapiens
  misc_RNA (1)...(19): siRNA sense strand
aaaggagacaugcguaaau

SEQ ID NO: 626734 - RNA, 19 nt, Homo sapiens
  misc_RNA (1)...(19): siRNA sense strand
gcagaacgagccggagcua

SEQ ID NO: 626735 - RNA, 19 nt, Homo sapiens
  misc_RNA (1)...(19): siRNA sense strand
ccacggcacuuuacuucac

SEQ ID NO: 626736 - RNA, 19 nt, Homo sapiens
  misc_RNA (1)...(19): siRNA sense strand
acaaggcuuuugaguauaa

SEQ ID NO: 626737 - RNA, 19 nt, Homo sapiens
  misc_RNA (1)...(19): siRNA sense strand
ggaagggacccaguucuac

SEQ ID NO: 626738 - RNA, 19 nt, Homo sapiens
  misc_RNA (1)...(19): siRNA sense strand
gaacgagccggagcuacug

SEQ ID NO: 626739 - RNA, 19 nt, Homo sapiens
  misc_RNA (1)...(19): siRNA sense strand
aaggcaacauuaagaagga

SEQ ID NO: 626740 - RNA, 19 nt, Homo sapiens
  misc_RNA (1)...(19): siRNA sense strand
aaggagaaccaaaugagaa

SEQ ID NO: 626741 - RNA, 19 nt, Homo sapiens
  misc_RNA (1)...(19): siRNA sense strand
aaaggagaaccaaaugaga

SEQ ID NO: 626742 - RNA, 19 nt, Homo sapiens
  misc_RNA (1)...(19): siRNA sense strand
ggaggauggguucccugua

SEQ ID NO: 626743 - RNA, 19 nt, Homo sapiens
  misc_RNA (1)...(19): siRNA sense strand
gagaaccaaaugagaaugg

SEQ ID NO: 626744 - RNA, 19 nt, Homo sapiens
  misc_RNA (1)...(19): siRNA sense strand
ugaaggaagggaccaagga

SEQ ID NO: 626745 - RNA, 19 nt, Homo sapiens
  misc_RNA (1)...(19): siRNA sense strand
ccaacaaggcuuuugagua

SEQ ID NO: 626746 - RNA, 19 nt, Homo sapiens
  misc_RNA (1)...(19): siRNA sense strand
gacaaugcccagcaguuca

SEQ ID NO: 626747 - RNA, 19 nt, Homo sapiens
  misc_RNA (1)...(19): siRNA sense strand
ggccugguacuacauguga

SEQ ID NO: 626748 - RNA, 19 nt, Homo sapiens
  misc_RNA (1)...(19): siRNA sense strand
gaccaaggacauggaguau

SEQ ID NO: 626749 - RNA, 19 nt, Homo sapiens
  misc_RNA (1)...(19): siRNA sense strand
cccuggaccugaacaugaa

SEQ ID NO: 626750 - RNA, 19 nt, Homo sapiens
  misc_RNA (1)...(19): siRNA sense strand
gacccaguucuaccuguuu

SEQ ID NO: 626751 - RNA, 19 nt, Homo sapiens
  misc_RNA (1)...(19): siRNA sense strand
uugaaaggcaacauuaaga

SEQ ID NO: 626752 - RNA, 19 nt, Homo sapiens
  misc_RNA (1)...(19): siRNA sense strand
ggaagggaccaaggaagca

SEQ ID NO: 626753 - RNA, 19 nt, Homo sapiens
  misc_RNA (1)...(19): siRNA sense strand
ggaagcccagccuccaguu

SEQ ID NO: 626754 - RNA, 19 nt, Homo sapiens
  misc_RNA (1)...(19): siRNA sense strand
cuauggcugugcugaggaa

SEQ ID NO: 626755 - RNA, 19 nt, Homo sapiens
  misc_RNA (1)...(19): siRNA sense strand
gcguaaaugcccuuucuac

SEQ ID NO: 626756 - RNA, 19 nt, Homo sapiens
  misc_RNA (1)...(19): siRNA sense strand
gaggaaauggagcgcaaca

SEQ ID NO: 626757 - RNA, 19 nt, Homo sapiens
  misc_RNA (1)...(19): siRNA sense strand
gaagcccagccuccaguuc

SEQ ID NO: 626758 - RNA, 19 nt, Homo sapiens
  misc_RNA (1)...(19): siRNA sense strand
cuacgcugcugaacaagac

SEQ ID NO: 626759 - RNA, 19 nt, Homo sapiens
  misc_RNA (1)...(19): siRNA sense strand
caccacggcacuuuacuuc

SEQ ID NO: 626760 - RNA, 19 nt, Homo sapiens
  misc_RNA (1)...(19): siRNA sense strand
uugagaauguggacaaugc

SEQ ID NO: 626761 - RNA, 19 nt, Homo sapiens
  misc_RNA (1)...(19): siRNA sense strand
ggagaaccaaaugagaaug

SEQ ID NO: 626762 - RNA, 19 nt, Homo sapiens
  misc_RNA (1)...(19): siRNA sense strand
ccaccacggcacuuuacuu

SEQ ID NO: 626763 - RNA, 19 nt, Homo sapiens
  misc_RNA (1)...(19): siRNA sense strand
auuaagaaggagcuguuua

SEQ ID NO: 626764 - RNA, 19 nt, Homo sapiens
  misc_RNA (1)...(19): siRNA sense strand
uggguucccuguacacgau

SEQ ID NO: 626765 - RNA, 19 nt, Homo sapiens
  misc_RNA (1)...(19): siRNA sense strand
ugaacaugaagaccaaaga

SEQ ID NO: 626766 - RNA, 19 nt, Homo sapiens
  misc_RNA (1)...(19): siRNA sense strand
uaagaaggagcuguuuaag

SEQ ID NO: 626767 - RNA, 19 nt, Homo sapiens
  misc_RNA (1)...(19): siRNA sense strand
gaucaaguauggacacuga

SEQ ID NO: 626768 - RNA, 19 nt, Homo sapiens
  misc_RNA (1)...(19): siRNA sense strand
agagguggcucagaaauuc

SEQ ID NO: 626769 - RNA, 19 nt, Homo sapiens
  misc_RNA (1)...(19): siRNA sense strand
uccaagagguggcucagaa

SEQ ID NO: 626770 - RNA, 19 nt, Homo sapiens
  misc_RNA (1)...(19): siRNA sense strand
gaaugccuuuucucuuuua

SEQ ID NO: 626771 - RNA, 19 nt, Homo sapiens
  misc_RNA (1)...(19): siRNA sense strand
uacccuggcucaacuguau

SEQ ID NO: 626772 - RNA, 19 nt, Homo sapiens
  misc_RNA (1)...(19): siRNA sense strand
ucgaaugccuuuucucuuu

SEQ ID NO: 626773 - RNA, 19 nt, Homo sapiens
  misc_RNA (1)...(19): siRNA sense strand
cagcuccacugcacugugu

SEQ ID NO: 626774 - RNA, 19 nt, Homo sapiens
  misc_RNA (1)...(19): siRNA sense strand
ccaagagguggcucagaaa

SEQ ID NO: 626775 - RNA, 19 nt, Homo sapiens
  misc_RNA (1)...(19): siRNA sense strand
caagagguggcucagaaau

SEQ ID NO: 626776 - RNA, 19 nt, Homo sapiens
  misc_RNA (1)...(19): siRNA sense strand
cgaaugccuuuucucuuuu

SEQ ID NO: 626777 - RNA, 19 nt, Homo sapiens
  misc_RNA (1)...(19): siRNA sense strand
gacaagaccccaucgaaug

SEQ ID NO: 626778 - RNA, 19 nt, Homo sapiens
  misc_RNA (1)...(19): siRNA sense strand
gguucugccuucuggacaa

SEQ ID NO: 626779 - RNA, 19 nt, Homo sapiens
  misc_RNA (1)...(19): siRNA sense strand
ggacucccacuuccaagag

SEQ ID NO: 626780 - RNA, 19 nt, Homo sapiens
  misc_RNA (1)...(19): siRNA sense strand
aagagguggcucagaaauu

SEQ ID NO: 626781 - RNA, 19 nt, Homo sapiens
  misc_RNA (1)...(19): siRNA sense strand
gagcaaaguccugcacacu

SEQ ID NO: 626782 - RNA, 19 nt, Homo sapiens
  misc_RNA (1)...(19): siRNA sense strand
ggaccugguucugccuucu

SEQ ID NO: 626783 - RNA, 19 nt, Homo sapiens
  misc_RNA (1)...(19): siRNA sense strand
acuagcggaucaaguaugg

SEQ ID NO: 626784 - RNA, 19 nt, Homo sapiens
  misc_RNA (1)...(19): siRNA sense strand
gauguuacccuggcucaac

SEQ ID NO: 626785 - RNA, 19 nt, Homo sapiens
  misc_RNA (1)...(19): siRNA sense strand
gaucaaguauggacacuga

SEQ ID NO: 626786 - RNA, 19 nt, Homo sapiens
  misc_RNA (1)...(19): siRNA sense strand
agagguggcucagaaauuc

SEQ ID NO: 626787 - RNA, 19 nt, Homo sapiens
  misc_RNA (1)...(19): siRNA sense strand
uccaagagguggcucagaa

SEQ ID NO: 626788 - RNA, 19 nt, Homo sapiens
  misc_RNA (1)...(19): siRNA sense strand
gaaugccuuuucucuuuua

SEQ ID NO: 626789 - RNA, 19 nt, Homo sapiens
  misc_RNA (1)...(19): siRNA sense strand
uacccuggcucaacuguau

SEQ ID NO: 626790 - RNA, 19 nt, Homo sapiens
  misc_RNA (1)...(19): siRNA sense strand
ucgaaugccuuuucucuuu

SEQ ID NO: 626791 - RNA, 19 nt, Homo sapiens
  misc_RNA (1)...(19): siRNA sense strand
cagcuccacugcacugugu

SEQ ID NO: 626792 - RNA, 19 nt, Homo sapiens
  misc_RNA (1)...(19): siRNA sense strand
ccaagagguggcucagaaa

SEQ ID NO: 626793 - RNA, 19 nt, Homo sapiens
  misc_RNA (1)...(19): siRNA sense strand
caagagguggcucagaaau

SEQ ID NO: 626794 - RNA, 19 nt, Homo sapiens
  misc_RNA (1)...(19): siRNA sense strand
cgaaugccuuuucucuuuu

SEQ ID NO: 626795 - RNA, 19 nt, Homo sapiens
  misc_RNA (1)...(19): siRNA sense strand
gacaagaccccaucgaaug

SEQ ID NO: 626796 - RNA, 19 nt, Homo sapiens
  misc_RNA (1)...(19): siRNA sense strand
gguucugccuucuggacaa

SEQ ID NO: 626797 - RNA, 19 nt, Homo sapiens
  misc_RNA (1)...(19): siRNA sense strand
ggacucccacuuccaagag

SEQ ID NO: 626798 - RNA, 19 nt, Homo sapiens
  misc_RNA (1)...(19): siRNA sense strand
aagagguggcucagaaauu

SEQ ID NO: 626799 - RNA, 19 nt, Homo sapiens
  misc_RNA (1)...(19): siRNA sense strand
gagcaaaguccugcacacu

SEQ ID NO: 626800 - RNA, 19 nt, Homo sapiens
  misc_RNA (1)...(19): siRNA sense strand
ggaccugguucugccuucu

SEQ ID NO: 626801 - RNA, 19 nt, Homo sapiens
  misc_RNA (1)...(19): siRNA sense strand
acuagcggaucaaguaugg

SEQ ID NO: 626802 - RNA, 19 nt, Homo sapiens
  misc_RNA (1)...(19): siRNA sense strand
gauguuacccuggcucaac

SEQ ID NO: 626803 - RNA, 19 nt, Homo sapiens
  misc_RNA (1)...(19): siRNA sense strand
gaucaaguauggacacuga

SEQ ID NO: 626804 - RNA, 19 nt, Homo sapiens
  misc_RNA (1)...(19): siRNA sense strand
agagguggcucagaaauuc

SEQ ID NO: 626805 - RNA, 19 nt, Homo sapiens
  misc_RNA (1)...(19): siRNA sense strand
uccaagagguggcucagaa

SEQ ID NO: 626806 - RNA, 19 nt, Homo sapiens
  misc_RNA (1)...(19): siRNA sense strand
gaaugccuuuucucuuuua

SEQ ID NO: 626807 - RNA, 19 nt, Homo sapiens
  misc_RNA (1)...(19): siRNA sense strand
uacccuggcucaacuguau

SEQ ID NO: 626808 - RNA, 19 nt, Homo sapiens
  misc_RNA (1)...(19): siRNA sense strand
ucgaaugccuuuucucuuu

SEQ ID NO: 626809 - RNA, 19 nt, Homo sapiens
  misc_RNA (1)...(19): siRNA sense strand
cagcuccacugcacugugu

SEQ ID NO: 626810 - RNA, 19 nt, Homo sapiens
  misc_RNA (1)...(19): siRNA sense strand
ccaagagguggcucagaaa

SEQ ID NO: 626811 - RNA, 19 nt, Homo sapiens
  misc_RNA (1)...(19): siRNA sense strand
caagagguggcucagaaau

SEQ ID NO: 626812 - RNA, 19 nt, Homo sapiens
  misc_RNA (1)...(19): siRNA sense strand
cgaaugccuuuucucuuuu

SEQ ID NO: 626813 - RNA, 19 nt, Homo sapiens
  misc_RNA (1)...(19): siRNA sense strand
gacaagaccccaucgaaug

SEQ ID NO: 626814 - RNA, 19 nt, Homo sapiens
  misc_RNA (1)...(19): siRNA sense strand
gguucugccuucuggacaa

SEQ ID NO: 626815 - RNA, 19 nt, Homo sapiens
  misc_RNA (1)...(19): siRNA sense strand
ggacucccacuuccaagag

SEQ ID NO: 626816 - RNA, 19 nt, Homo sapiens
  misc_RNA (1)...(19): siRNA sense strand
aagagguggcucagaaauu

SEQ ID NO: 626817 - RNA, 19 nt, Homo sapiens
  misc_RNA (1)...(19): siRNA sense strand
gagcaaaguccugcacacu

SEQ ID NO: 626818 - RNA, 19 nt, Homo sapiens
  misc_RNA (1)...(19): siRNA sense strand
ggaccugguucugccuucu

SEQ ID NO: 626819 - RNA, 19 nt, Homo sapiens
  misc_RNA (1)...(19): siRNA sense strand
acuagcggaucaaguaugg

SEQ ID NO: 626820 - RNA, 19 nt, Homo sapiens
  misc_RNA (1)...(19): siRNA sense strand
gauguuacccuggcucaac

SEQ ID NO: 626821 - RNA, 19 nt, Homo sapiens
  misc_RNA (1)...(19): siRNA sense strand
gaucaaguauggacacuga

SEQ ID NO: 626822 - RNA, 19 nt, Homo sapiens
  misc_RNA (1)...(19): siRNA sense strand
agagguggcucagaaauuc

SEQ ID NO: 626823 - RNA, 19 nt, Homo sapiens
  misc_RNA (1)...(19): siRNA sense strand
uccaagagguggcucagaa

SEQ ID NO: 626824 - RNA, 19 nt, Homo sapiens
  misc_RNA (1)...(19): siRNA sense strand
gaaugccuuuucucuuuua

SEQ ID NO: 626825 - RNA, 19 nt, Homo sapiens
  misc_RNA (1)...(19): siRNA sense strand
uacccuggcucaacuguau

SEQ ID NO: 626826 - RNA, 19 nt, Homo sapiens
  misc_RNA (1)...(19): siRNA sense strand
ucgaaugccuuuucucuuu

SEQ ID NO: 626827 - RNA, 19 nt, Homo sapiens
  misc_RNA (1)...(19): siRNA sense strand
cagcuccacugcacugugu

SEQ ID NO: 626828 - RNA, 19 nt, Homo sapiens
  misc_RNA (1)...(19): siRNA sense strand
ccaagagguggcucagaaa

SEQ ID NO: 626829 - RNA, 19 nt, Homo sapiens
  misc_RNA (1)...(19): siRNA sense strand
caagagguggcucagaaau

SEQ ID NO: 626830 - RNA, 19 nt, Homo sapiens
  misc_RNA (1)...(19): siRNA sense strand
cgaaugccuuuucucuuuu

SEQ ID NO: 626831 - RNA, 19 nt, Homo sapiens
  misc_RNA (1)...(19): siRNA sense strand
gacaagaccccaucgaaug

SEQ ID NO: 626832 - RNA, 19 nt, Homo sapiens
  misc_RNA (1)...(19): siRNA sense strand
gguucugccuucuggacaa

SEQ ID NO: 626833 - RNA, 19 nt, Homo sapiens
  misc_RNA (1)...(19): siRNA sense strand
ggacucccacuuccaagag

SEQ ID NO: 626834 - RNA, 19 nt, Homo sapiens
  misc_RNA (1)...(19): siRNA sense strand
aagagguggcucagaaauu

SEQ ID NO: 626835 - RNA, 19 nt, Homo sapiens
  misc_RNA (1)...(19): siRNA sense strand
gagcaaaguccugcacacu

SEQ ID NO: 626836 - RNA, 19 nt, Homo sapiens
  misc_RNA (1)...(19): siRNA sense strand
ggaccugguucugccuucu

SEQ ID NO: 626837 - RNA, 19 nt, Homo sapiens
  misc_RNA (1)...(19): siRNA sense strand
acuagcggaucaaguaugg

SEQ ID NO: 626838 - RNA, 19 nt, Homo sapiens
  misc_RNA (1)...(19): siRNA sense strand
gauguuacccuggcucaac

SEQ ID NO: 626839 - RNA, 19 nt, Homo sapiens
  misc_RNA (1)...(19): siRNA sense strand
gaucaaguauggacacuga

SEQ ID NO: 626840 - RNA, 19 nt, Homo sapiens
  misc_RNA (1)...(19): siRNA sense strand
agagguggcucagaaauuc

SEQ ID NO: 626841 - RNA, 19 nt, Homo sapiens
  misc_RNA (1)...(19): siRNA sense strand
uccaagagguggcucagaa

SEQ ID NO: 626842 - RNA, 19 nt, Homo sapiens
  misc_RNA (1)...(19): siRNA sense strand
gaaugccuuuucucuuuua

SEQ ID NO: 626843 - RNA, 19 nt, Homo sapiens
  misc_RNA (1)...(19): siRNA sense strand
uacccuggcucaacuguau

SEQ ID NO: 626844 - RNA, 19 nt, Homo sapiens
  misc_RNA (1)...(19): siRNA sense strand
ucgaaugccuuuucucuuu

SEQ ID NO: 626845 - RNA, 19 nt, Homo sapiens
  misc_RNA (1)...(19): siRNA sense strand
cagcuccacugcacugugu

SEQ ID NO: 626846 - RNA, 19 nt, Homo sapiens
  misc_RNA (1)...(19): siRNA sense strand
ccaagagguggcucagaaa

SEQ ID NO: 626847 - RNA, 19 nt, Homo sapiens
  misc_RNA (1)...(19): siRNA sense strand
caagagguggcucagaaau

SEQ ID NO: 626848 - RNA, 19 nt, Homo sapiens
  misc_RNA (1)...(19): siRNA sense strand
cgaaugccuuuucucuuuu

SEQ ID NO: 626849 - RNA, 19 nt, Homo sapiens
  misc_RNA (1)...(19): siRNA sense strand
gacaagaccccaucgaaug

SEQ ID NO: 626850 - RNA, 19 nt, Homo sapiens
  misc_RNA (1)...(19): siRNA sense strand
gguucugccuucuggacaa

SEQ ID NO: 626851 - RNA, 19 nt, Homo sapiens
  misc_RNA (1)...(19): siRNA sense strand
ggacucccacuuccaagag

SEQ ID NO: 626852 - RNA, 19 nt, Homo sapiens
  misc_RNA (1)...(19): siRNA sense strand
aagagguggcucagaaauu

SEQ ID NO: 626853 - RNA, 19 nt, Homo sapiens
  misc_RNA (1)...(19): siRNA sense strand
gagcaaaguccugcacacu

SEQ ID NO: 626854 - RNA, 19 nt, Homo sapiens
  misc_RNA (1)...(19): siRNA sense strand
ggaccugguucugccuucu

SEQ ID NO: 626855 - RNA, 19 nt, Homo sapiens
  misc_RNA (1)...(19): siRNA sense strand
acuagcggaucaaguaugg

SEQ ID NO: 626856 - RNA, 19 nt, Homo sapiens
  misc_RNA (1)...(19): siRNA sense strand
gauguuacccuggcucaac

SEQ ID NO: 626857 - RNA, 19 nt, Homo sapiens
  misc_RNA (1)...(19): siRNA sense strand
gaucaaguauggacacuga

SEQ ID NO: 626858 - RNA, 19 nt, Homo sapiens
  misc_RNA (1)...(19): siRNA sense strand
agagguggcucagaaauuc

SEQ ID NO: 626859 - RNA, 19 nt, Homo sapiens
  misc_RNA (1)...(19): siRNA sense strand
uccaagagguggcucagaa

SEQ ID NO: 626860 - RNA, 19 nt, Homo sapiens
  misc_RNA (1)...(19): siRNA sense strand
gaaugccuuuucucuuuua

SEQ ID NO: 626861 - RNA, 19 nt, Homo sapiens
  misc_RNA (1)...(19): siRNA sense strand
uacccuggcucaacuguau

SEQ ID NO: 626862 - RNA, 19 nt, Homo sapiens
  misc_RNA (1)...(19): siRNA sense strand
ucgaaugccuuuucucuuu

SEQ ID NO: 626863 - RNA, 19 nt, Homo sapiens
  misc_RNA (1)...(19): siRNA sense strand
cagcuccacugcacugugu

SEQ ID NO: 626864 - RNA, 19 nt, Homo sapiens
  misc_RNA (1)...(19): siRNA sense strand
ccaagagguggcucagaaa

SEQ ID NO: 626865 - RNA, 19 nt, Homo sapiens
  misc_RNA (1)...(19): siRNA sense strand
caagagguggcucagaaau

SEQ ID NO: 626866 - RNA, 19 nt, Homo sapiens
  misc_RNA (1)...(19): siRNA sense strand
cgaaugccuuuucucuuuu

SEQ ID NO: 626867 - RNA, 19 nt, Homo sapiens
  misc_RNA (1)...(19): siRNA sense strand
gacaagaccccaucgaaug

SEQ ID NO: 626868 - RNA, 19 nt, Homo sapiens
  misc_RNA (1)...(19): siRNA sense strand
gguucugccuucuggacaa

SEQ ID NO: 626869 - RNA, 19 nt, Homo sapiens
  misc_RNA (1)...(19): siRNA sense strand
ggacucccacuuccaagag

SEQ ID NO: 626870 - RNA, 19 nt, Homo sapiens
  misc_RNA (1)...(19): siRNA sense strand
aagagguggcucagaaauu

SEQ ID NO: 626871 - RNA, 19 nt, Homo sapiens
  misc_RNA (1)...(19): siRNA sense strand
gagcaaaguccugcacacu

SEQ ID NO: 626872 - RNA, 19 nt, Homo sapiens
  misc_RNA (1)...(19): siRNA sense strand
ggaccugguucugccuucu

SEQ ID NO: 626873 - RNA, 19 nt, Homo sapiens
  misc_RNA (1)...(19): siRNA sense strand
acuagcggaucaaguaugg

SEQ ID NO: 626874 - RNA, 19 nt, Homo sapiens
  misc_RNA (1)...(19): siRNA sense strand
gauguuacccuggcucaac

SEQ ID NO: 626875 - RNA, 19 nt, Homo sapiens
  misc_RNA (1)...(19): siRNA sense strand
gaucaaguauggacacuga

SEQ ID NO: 626876 - RNA, 19 nt, Homo sapiens
  misc_RNA (1)...(19): siRNA sense strand
agagguggcucagaaauuc

SEQ ID NO: 626877 - RNA, 19 nt, Homo sapiens
  misc_RNA (1)...(19): siRNA sense strand
uccaagagguggcucagaa

SEQ ID NO: 626878 - RNA, 19 nt, Homo sapiens
  misc_RNA (1)...(19): siRNA sense strand
gaaugccuuuucucuuuua

SEQ ID NO: 626879 - RNA, 19 nt, Homo sapiens
  misc_RNA (1)...(19): siRNA sense strand
uacccuggcucaacuguau

SEQ ID NO: 626880 - RNA, 19 nt, Homo sapiens
  misc_RNA (1)...(19): siRNA sense strand
ucgaaugccuuuucucuuu

SEQ ID NO: 626881 - RNA, 19 nt, Homo sapiens
  misc_RNA (1)...(19): siRNA sense strand
cagcuccacugcacugugu

SEQ ID NO: 626882 - RNA, 19 nt, Homo sapiens
  misc_RNA (1)...(19): siRNA sense strand
ccaagagguggcucagaaa

SEQ ID NO: 626883 - RNA, 19 nt, Homo sapiens
  misc_RNA (1)...(19): siRNA sense strand
caagagguggcucagaaau

SEQ ID NO: 626884 - RNA, 19 nt, Homo sapiens
  misc_RNA (1)...(19): siRNA sense strand
cgaaugccuuuucucuuuu

SEQ ID NO: 626885 - RNA, 19 nt, Homo sapiens
  misc_RNA (1)...(19): siRNA sense strand
gacaagaccccaucgaaug

SEQ ID NO: 626886 - RNA, 19 nt, Homo sapiens
  misc_RNA (1)...(19): siRNA sense strand
gguucugccuucuggacaa

SEQ ID NO: 626887 - RNA, 19 nt, Homo sapiens
  misc_RNA (1)...(19): siRNA sense strand
ggacucccacuuccaagag

SEQ ID NO: 626888 - RNA, 19 nt, Homo sapiens
  misc_RNA (1)...(19): siRNA sense strand
aagagguggcucagaaauu

SEQ ID NO: 626889 - RNA, 19 nt, Homo sapiens
  misc_RNA (1)...(19): siRNA sense strand
gagcaaaguccugcacacu

SEQ ID NO: 626890 - RNA, 19 nt, Homo sapiens
  misc_RNA (1)...(19): siRNA sense strand
ggaccugguucugccuucu

SEQ ID NO: 626891 - RNA, 19 nt, Homo sapiens
  misc_RNA (1)...(19): siRNA sense strand
acuagcggaucaaguaugg

SEQ ID NO: 626892 - RNA, 19 nt, Homo sapiens
  misc_RNA (1)...(19): siRNA sense strand
gauguuacccuggcucaac

SEQ ID NO: 626893 - RNA, 19 nt, Homo sapiens
  misc_RNA (1)...(19): siRNA sense strand
gaucaaguauggacacuga

SEQ ID NO: 626894 - RNA, 19 nt, Homo sapiens
  misc_RNA (1)...(19): siRNA sense strand
agagguggcucagaaauuc

SEQ ID NO: 626895 - RNA, 19 nt, Homo sapiens
  misc_RNA (1)...(19): siRNA sense strand
uccaagagguggcucagaa

SEQ ID NO: 626896 - RNA, 19 nt, Homo sapiens
  misc_RNA (1)...(19): siRNA sense strand
gaaugccuuuucucuuuua

SEQ ID NO: 626897 - RNA, 19 nt, Homo sapiens
  misc_RNA (1)...(19): siRNA sense strand
uacccuggcucaacuguau

SEQ ID NO: 626898 - RNA, 19 nt, Homo sapiens
  misc_RNA (1)...(19): siRNA sense strand
ucgaaugccuuuucucuuu

SEQ ID NO: 626899 - RNA, 19 nt, Homo sapiens
  misc_RNA (1)...(19): siRNA sense strand
cagcuccacugcacugugu

SEQ ID NO: 626900 - RNA, 19 nt, Homo sapiens
  misc_RNA (1)...(19): siRNA sense strand
ccaagagguggcucagaaa

SEQ ID NO: 626901 - RNA, 19 nt, Homo sapiens
  misc_RNA (1)...(19): siRNA sense strand
caagagguggcucagaaau

SEQ ID NO: 626902 - RNA, 19 nt, Homo sapiens
  misc_RNA (1)...(19): siRNA sense strand
cgaaugccuuuucucuuuu

SEQ ID NO: 626903 - RNA, 19 nt, Homo sapiens
  misc_RNA (1)...(19): siRNA sense strand
gacaagaccccaucgaaug

SEQ ID NO: 626904 - RNA, 19 nt, Homo sapiens
  misc_RNA (1)...(19): siRNA sense strand
gguucugccuucuggacaa

SEQ ID NO: 626905 - RNA, 19 nt, Homo sapiens
  misc_RNA (1)...(19): siRNA sense strand
ggacucccacuuccaagag

SEQ ID NO: 626906 - RNA, 19 nt, Homo sapiens
  misc_RNA (1)...(19): siRNA sense strand
aagagguggcucagaaauu

SEQ ID NO: 626907 - RNA, 19 nt, Homo sapiens
  misc_RNA (1)...(19): siRNA sense strand
gagcaaaguccugcacacu

SEQ ID NO: 626908 - RNA, 19 nt, Homo sapiens
  misc_RNA (1)...(19): siRNA sense strand
ggaccugguucugccuucu

SEQ ID NO: 626909 - RNA, 19 nt, Homo sapiens
  misc_RNA (1)...(19): siRNA sense strand
acuagcggaucaaguaugg

SEQ ID NO: 626910 - RNA, 19 nt, Homo sapiens
  misc_RNA (1)...(19): siRNA sense strand
gauguuacccuggcucaac

SEQ ID NO: 626911 - RNA, 19 nt, Homo sapiens
  misc_RNA (1)...(19): siRNA sense strand
gaucaaguauggacacuga

SEQ ID NO: 626912 - RNA, 19 nt, Homo sapiens
  misc_RNA (1)...(19): siRNA sense strand
agagguggcucagaaauuc

SEQ ID NO: 626913 - RNA, 19 nt, Homo sapiens
  misc_RNA (1)...(19): siRNA sense strand
uccaagagguggcucagaa

SEQ ID NO: 626914 - RNA, 19 nt, Homo sapiens
  misc_RNA (1)...(19): siRNA sense strand
gaaugccuuuucucuuuua

SEQ ID NO: 626915 - RNA, 19 nt, Homo sapiens
  misc_RNA (1)...(19): siRNA sense strand
uacccuggcucaacuguau

SEQ ID NO: 626916 - RNA, 19 nt, Homo sapiens
  misc_RNA (1)...(19): siRNA sense strand
ucgaaugccuuuucucuuu

SEQ ID NO: 626917 - RNA, 19 nt, Homo sapiens
  misc_RNA (1)...(19): siRNA sense strand
cagcuccacugcacugugu

SEQ ID NO: 626918 - RNA, 19 nt, Homo sapiens
  misc_RNA (1)...(19): siRNA sense strand
ccaagagguggcucagaaa

SEQ ID NO: 626919 - RNA, 19 nt, Homo sapiens
  misc_RNA (1)...(19): siRNA sense strand
caagagguggcucagaaau

SEQ ID NO: 626920 - RNA, 19 nt, Homo sapiens
  misc_RNA (1)...(19): siRNA sense strand
cgaaugccuuuucucuuuu

SEQ ID NO: 626921 - RNA, 19 nt, Homo sapiens
  misc_RNA (1)...(19): siRNA sense strand
gacaagaccccaucgaaug

SEQ ID NO: 626922 - RNA, 19 nt, Homo sapiens
  misc_RNA (1)...(19): siRNA sense strand
gguucugccuucuggacaa

SEQ ID NO: 626923 - RNA, 19 nt, Homo sapiens
  misc_RNA (1)...(19): siRNA sense strand
ggacucccacuuccaagag

SEQ ID NO: 626924 - RNA, 19 nt, Homo sapiens
  misc_RNA (1)...(19): siRNA sense strand
aagagguggcucagaaauu

SEQ ID NO: 626925 - RNA, 19 nt, Homo sapiens
  misc_RNA (1)...(19): siRNA sense strand
gagcaaaguccugcacacu

SEQ ID NO: 626926 - RNA, 19 nt, Homo sapiens
  misc_RNA (1)...(19): siRNA sense strand
ggaccugguucugccuucu

SEQ ID NO: 626927 - RNA, 19 nt, Homo sapiens
  misc_RNA (1)...(19): siRNA sense strand
acuagcggaucaaguaugg

SEQ ID NO: 626928 - RNA, 19 nt, Homo sapiens
  misc_RNA (1)...(19): siRNA sense strand
gauguuacccuggcucaac

SEQ ID NO: 626929 - RNA, 19 nt, Homo sapiens
  misc_RNA (1)...(19): siRNA sense strand
gaucaaguauggacacuga

SEQ ID NO: 626930 - RNA, 19 nt, Homo sapiens
  misc_RNA (1)...(19): siRNA sense strand
agagguggcucagaaauuc

SEQ ID NO: 626931 - RNA, 19 nt, Homo sapiens
  misc_RNA (1)...(19): siRNA sense strand
uccaagagguggcucagaa

SEQ ID NO: 626932 - RNA, 19 nt, Homo sapiens
  misc_RNA (1)...(19): siRNA sense strand
gaaugccuuuucucuuuua

SEQ ID NO: 626933 - RNA, 19 nt, Homo sapiens
  misc_RNA (1)...(19): siRNA sense strand
uacccuggcucaacuguau

SEQ ID NO: 626934 - RNA, 19 nt, Homo sapiens
  misc_RNA (1)...(19): siRNA sense strand
ucgaaugccuuuucucuuu

SEQ ID NO: 626935 - RNA, 19 nt, Homo sapiens
  misc_RNA (1)...(19): siRNA sense strand
cagcuccacugcacugugu

SEQ ID NO: 626936 - RNA, 19 nt, Homo sapiens
  misc_RNA (1)...(19): siRNA sense strand
ccaagagguggcucagaaa

SEQ ID NO: 626937 - RNA, 19 nt, Homo sapiens
  misc_RNA (1)...(19): siRNA sense strand
caagagguggcucagaaau

SEQ ID NO: 626938 - RNA, 19 nt, Homo sapiens
  misc_RNA (1)...(19): siRNA sense strand
cgaaugccuuuucucuuuu

SEQ ID NO: 626939 - RNA, 19 nt, Homo sapiens
  misc_RNA (1)...(19): siRNA sense strand
gacaagaccccaucgaaug

SEQ ID NO: 626940 - RNA, 19 nt, Homo sapiens
  misc_RNA (1)...(19): siRNA sense strand
gguucugccuucuggacaa

SEQ ID NO: 626941 - RNA, 19 nt, Homo sapiens
  misc_RNA (1)...(19): siRNA sense strand
ggacucccacuuccaagag

SEQ ID NO: 626942 - RNA, 19 nt, Homo sapiens
  misc_RNA (1)...(19): siRNA sense strand
aagagguggcucagaaauu

SEQ ID NO: 626943 - RNA, 19 nt, Homo sapiens
  misc_RNA (1)...(19): siRNA sense strand
gagcaaaguccugcacacu

SEQ ID NO: 626944 - RNA, 19 nt, Homo sapiens
  misc_RNA (1)...(19): siRNA sense strand
ggaccugguucugccuucu

SEQ ID NO: 626945 - RNA, 19 nt, Homo sapiens
  misc_RNA (1)...(19): siRNA sense strand
acuagcggaucaaguaugg

SEQ ID NO: 626946 - RNA, 19 nt, Homo sapiens
  misc_RNA (1)...(19): siRNA sense strand
gauguuacccuggcucaac

SEQ ID NO: 626947 - RNA, 19 nt, Homo sapiens
  misc_RNA (1)...(19): siRNA sense strand
gaucaaguauggacacuga

SEQ ID NO: 626948 - RNA, 19 nt, Homo sapiens
  misc_RNA (1)...(19): siRNA sense strand
agagguggcucagaaauuc

SEQ ID NO: 626949 - RNA, 19 nt, Homo sapiens
  misc_RNA (1)...(19): siRNA sense strand
uccaagagguggcucagaa

SEQ ID NO: 626950 - RNA, 19 nt, Homo sapiens
  misc_RNA (1)...(19): siRNA sense strand
gaaugccuuuucucuuuua

SEQ ID NO: 626951 - RNA, 19 nt, Homo sapiens
  misc_RNA (1)...(19): siRNA sense strand
uacccuggcucaacuguau

SEQ ID NO: 626952 - RNA, 19 nt, Homo sapiens
  misc_RNA (1)...(19): siRNA sense strand
ucgaaugccuuuucucuuu

SEQ ID NO: 626953 - RNA, 19 nt, Homo sapiens
  misc_RNA (1)...(19): siRNA sense strand
cagcuccacugcacugugu

SEQ ID NO: 626954 - RNA, 19 nt, Homo sapiens
  misc_RNA (1)...(19): siRNA sense strand
ccaagagguggcucagaaa

SEQ ID NO: 626955 - RNA, 19 nt, Homo sapiens
  misc_RNA (1)...(19): siRNA sense strand
caagagguggcucagaaau

SEQ ID NO: 626956 - RNA, 19 nt, Homo sapiens
  misc_RNA (1)...(19): siRNA sense strand
cgaaugccuuuucucuuuu

SEQ ID NO: 626957 - RNA, 19 nt, Homo sapiens
  misc_RNA (1)...(19): siRNA sense strand
gacaagaccccaucgaaug

SEQ ID NO: 626958 - RNA, 19 nt, Homo sapiens
  misc_RNA (1)...(19): siRNA sense strand
gguucugccuucuggacaa

SEQ ID NO: 626959 - RNA, 19 nt, Homo sapiens
  misc_RNA (1)...(19): siRNA sense strand
ggacucccacuuccaagag

SEQ ID NO: 626960 - RNA, 19 nt, Homo sapiens
  misc_RNA (1)...(19): siRNA sense strand
aagagguggcucagaaauu

SEQ ID NO: 626961 - RNA, 19 nt, Homo sapiens
  misc_RNA (1)...(19): siRNA sense strand
gagcaaaguccugcacacu

SEQ ID NO: 626962 - RNA, 19 nt, Homo sapiens
  misc_RNA (1)...(19): siRNA sense strand
ggaccugguucugccuucu

SEQ ID NO: 626963 - RNA, 19 nt, Homo sapiens
  misc_RNA (1)...(19): siRNA sense strand
acuagcggaucaaguaugg

SEQ ID NO: 626964 - RNA, 19 nt, Homo sapiens
  misc_RNA (1)...(19): siRNA sense strand
gauguuacccuggcucaac

SEQ ID NO: 626965 - RNA, 19 nt, Homo sapiens
  misc_RNA (1)...(19): siRNA sense strand
gaucaaguauggacacuga

SEQ ID NO: 626966 - RNA, 19 nt, Homo sapiens
  misc_RNA (1)...(19): siRNA sense strand
agagguggcucagaaauuc

SEQ ID NO: 626967 - RNA, 19 nt, Homo sapiens
  misc_RNA (1)...(19): siRNA sense strand
uccaagagguggcucagaa

SEQ ID NO: 626968 - RNA, 19 nt, Homo sapiens
  misc_RNA (1)...(19): siRNA sense strand
gaaugccuuuucucuuuua

SEQ ID NO: 626969 - RNA, 19 nt, Homo sapiens
  misc_RNA (1)...(19): siRNA sense strand
uacccuggcucaacuguau

SEQ ID NO: 626970 - RNA, 19 nt, Homo sapiens
  misc_RNA (1)...(19): siRNA sense strand
ucgaaugccuuuucucuuu

SEQ ID NO: 626971 - RNA, 19 nt, Homo sapiens
  misc_RNA (1)...(19): siRNA sense strand
cagcuccacugcacugugu

SEQ ID NO: 626972 - RNA, 19 nt, Homo sapiens
  misc_RNA (1)...(19): siRNA sense strand
ccaagagguggcucagaaa

SEQ ID NO: 626973 - RNA, 19 nt, Homo sapiens
  misc_RNA (1)...(19): siRNA sense strand
caagagguggcucagaaau

SEQ ID NO: 626974 - RNA, 19 nt, Homo sapiens
  misc_RNA (1)...(19): siRNA sense strand
cgaaugccuuuucucuuuu

SEQ ID NO: 626975 - RNA, 19 nt, Homo sapiens
  misc_RNA (1)...(19): siRNA sense strand
gacaagaccccaucgaaug

SEQ ID NO: 626976 - RNA, 19 nt, Homo sapiens
  misc_RNA (1)...(19): siRNA sense strand
gguucugccuucuggacaa

SEQ ID NO: 626977 - RNA, 19 nt, Homo sapiens
  misc_RNA (1)...(19): siRNA sense strand
ggacucccacuuccaagag

SEQ ID NO: 626978 - RNA, 19 nt, Homo sapiens
  misc_RNA (1)...(19): siRNA sense strand
aagagguggcucagaaauu

SEQ ID NO: 626979 - RNA, 19 nt, Homo sapiens
  misc_RNA (1)...(19): siRNA sense strand
gagcaaaguccugcacacu

SEQ ID NO: 626980 - RNA, 19 nt, Homo sapiens
  misc_RNA (1)...(19): siRNA sense strand
ggaccugguucugccuucu

SEQ ID NO: 626981 - RNA, 19 nt, Homo sapiens
  misc_RNA (1)...(19): siRNA sense strand
acuagcggaucaaguaugg

SEQ ID NO: 626982 - RNA, 19 nt, Homo sapiens
  misc_RNA (1)...(19): siRNA sense strand
gauguuacccuggcucaac

SEQ ID NO: 626983 - RNA, 19 nt, Homo sapiens
  misc_RNA (1)...(19): siRNA sense strand
gaucaaguauggacacuga

SEQ ID NO: 626984 - RNA, 19 nt, Homo sapiens
  misc_RNA (1)...(19): siRNA sense strand
agagguggcucagaaauuc

SEQ ID NO: 626985 - RNA, 19 nt, Homo sapiens
  misc_RNA (1)...(19): siRNA sense strand
uccaagagguggcucagaa

SEQ ID NO: 626986 - RNA, 19 nt, Homo sapiens
  misc_RNA (1)...(19): siRNA sense strand
gaaugccuuuucucuuuua

SEQ ID NO: 626987 - RNA, 19 nt, Homo sapiens
  misc_RNA (1)...(19): siRNA sense strand
uacccuggcucaacuguau

SEQ ID NO: 626988 - RNA, 19 nt, Homo sapiens
  misc_RNA (1)...(19): siRNA sense strand
ucgaaugccuuuucucuuu

SEQ ID NO: 626989 - RNA, 19 nt, Homo sapiens
  misc_RNA (1)...(19): siRNA sense strand
cagcuccacugcacugugu

SEQ ID NO: 626990 - RNA, 19 nt, Homo sapiens
  misc_RNA (1)...(19): siRNA sense strand
ccaagagguggcucagaaa

SEQ ID NO: 626991 - RNA, 19 nt, Homo sapiens
  misc_RNA (1)...(19): siRNA sense strand
caagagguggcucagaaau

SEQ ID NO: 626992 - RNA, 19 nt, Homo sapiens
  misc_RNA (1)...(19): siRNA sense strand
cgaaugccuuuucucuuuu

SEQ ID NO: 626993 - RNA, 19 nt, Homo sapiens
  misc_RNA (1)...(19): siRNA sense strand
gacaagaccccaucgaaug

SEQ ID NO: 626994 - RNA, 19 nt, Homo sapiens
  misc_RNA (1)...(19): siRNA sense strand
gguucugccuucuggacaa

SEQ ID NO: 626995 - RNA, 19 nt, Homo sapiens
  misc_RNA (1)...(19): siRNA sense strand
ggacucccacuuccaagag

SEQ ID NO: 626996 - RNA, 19 nt, Homo sapiens
  misc_RNA (1)...(19): siRNA sense strand
aagagguggcucagaaauu

SEQ ID NO: 626997 - RNA, 19 nt, Homo sapiens
  misc_RNA (1)...(19): siRNA sense strand
gagcaaaguccugcacacu

SEQ ID NO: 626998 - RNA, 19 nt, Homo sapiens
  misc_RNA (1)...(19): siRNA sense strand
ggaccugguucugccuucu

SEQ ID NO: 626999 - RNA, 19 nt, Homo sapiens
  misc_RNA (1)...(19): siRNA sense strand
acuagcggaucaaguaugg

SEQ ID NO: 627000 - RNA, 19 nt, Homo sapiens
  misc_RNA (1)...(19): siRNA sense strand
gauguuacccuggcucaac

SEQ ID NO: 627001 - RNA, 19 nt, Homo sapiens
  misc_RNA (1)...(19): siRNA sense strand
gaucaaguauggacacuga

SEQ ID NO: 627002 - RNA, 19 nt, Homo sapiens
  misc_RNA (1)...(19): siRNA sense strand
agagguggcucagaaauuc

SEQ ID NO: 627003 - RNA, 19 nt, Homo sapiens
  misc_RNA (1)...(19): siRNA sense strand
uccaagagguggcucagaa

SEQ ID NO: 627004 - RNA, 19 nt, Homo sapiens
  misc_RNA (1)...(19): siRNA sense strand
gaaugccuuuucucuuuua

SEQ ID NO: 627005 - RNA, 19 nt, Homo sapiens
  misc_RNA (1)...(19): siRNA sense strand
uacccuggcucaacuguau

SEQ ID NO: 627006 - RNA, 19 nt, Homo sapiens
  misc_RNA (1)...(19): siRNA sense strand
ucgaaugccuuuucucuuu

SEQ ID NO: 627007 - RNA, 19 nt, Homo sapiens
  misc_RNA (1)...(19): siRNA sense strand
cagcuccacugcacugugu

SEQ ID NO: 627008 - RNA, 19 nt, Homo sapiens
  misc_RNA (1)...(19): siRNA sense strand
ccaagagguggcucagaaa

SEQ ID NO: 627009 - RNA, 19 nt, Homo sapiens
  misc_RNA (1)...(19): siRNA sense strand
caagagguggcucagaaau

SEQ ID NO: 627010 - RNA, 19 nt, Homo sapiens
  misc_RNA (1)...(19): siRNA sense strand
cgaaugccuuuucucuuuu

SEQ ID NO: 627011 - RNA, 19 nt, Homo sapiens
  misc_RNA (1)...(19): siRNA sense strand
gacaagaccccaucgaaug

SEQ ID NO: 627012 - RNA, 19 nt, Homo sapiens
  misc_RNA (1)...(19): siRNA sense strand
gguucugccuucuggacaa

SEQ ID NO: 627013 - RNA, 19 nt, Homo sapiens
  misc_RNA (1)...(19): siRNA sense strand
ggacucccacuuccaagag

SEQ ID NO: 627014 - RNA, 19 nt, Homo sapiens
  misc_RNA (1)...(19): siRNA sense strand
aagagguggcucagaaauu

SEQ ID NO: 627015 - RNA, 19 nt, Homo sapiens
  misc_RNA (1)...(19): siRNA sense strand
gagcaaaguccugcacacu

SEQ ID NO: 627016 - RNA, 19 nt, Homo sapiens
  misc_RNA (1)...(19): siRNA sense strand
ggaccugguucugccuucu

SEQ ID NO: 627017 - RNA, 19 nt, Homo sapiens
  misc_RNA (1)...(19): siRNA sense strand
acuagcggaucaaguaugg

SEQ ID NO: 627018 - RNA, 19 nt, Homo sapiens
  misc_RNA (1)...(19): siRNA sense strand
gauguuacccuggcucaac

SEQ ID NO: 627019 - RNA, 19 nt, Homo sapiens
  misc_RNA (1)...(19): siRNA sense strand
gaucaaguauggacacuga

SEQ ID NO: 627020 - RNA, 19 nt, Homo sapiens
  misc_RNA (1)...(19): siRNA sense strand
agagguggcucagaaauuc

SEQ ID NO: 627021 - RNA, 19 nt, Homo sapiens
  misc_RNA (1)...(19): siRNA sense strand
uccaagagguggcucagaa

SEQ ID NO: 627022 - RNA, 19 nt, Homo sapiens
  misc_RNA (1)...(19): siRNA sense strand
gaaugccuuuucucuuuua

SEQ ID NO: 627023 - RNA, 19 nt, Homo sapiens
  misc_RNA (1)...(19): siRNA sense strand
uacccuggcucaacuguau

SEQ ID NO: 627024 - RNA, 19 nt, Homo sapiens
  misc_RNA (1)...(19): siRNA sense strand
ucgaaugccuuuucucuuu

SEQ ID NO: 627025 - RNA, 19 nt, Homo sapiens
  misc_RNA (1)...(19): siRNA sense strand
cagcuccacugcacugugu

SEQ ID NO: 627026 - RNA, 19 nt, Homo sapiens
  misc_RNA (1)...(19): siRNA sense strand
ccaagagguggcucagaaa

SEQ ID NO: 627027 - RNA, 19 nt, Homo sapiens
  misc_RNA (1)...(19): siRNA sense strand
caagagguggcucagaaau

SEQ ID NO: 627028 - RNA, 19 nt, Homo sapiens
  misc_RNA (1)...(19): siRNA sense strand
cgaaugccuuuucucuuuu

SEQ ID NO: 627029 - RNA, 19 nt, Homo sapiens
  misc_RNA (1)...(19): siRNA sense strand
gacaagaccccaucgaaug

SEQ ID NO: 627030 - RNA, 19 nt, Homo sapiens
  misc_RNA (1)...(19): siRNA sense strand
gguucugccuucuggacaa

SEQ ID NO: 627031 - RNA, 19 nt, Homo sapiens
  misc_RNA (1)...(19): siRNA sense strand
ggacucccacuuccaagag

SEQ ID NO: 627032 - RNA, 19 nt, Homo sapiens
  misc_RNA (1)...(19): siRNA sense strand
aagagguggcucagaaauu

SEQ ID NO: 627033 - RNA, 19 nt, Homo sapiens
  misc_RNA (1)...(19): siRNA sense strand
gagcaaaguccugcacacu

SEQ ID NO: 627034 - RNA, 19 nt, Homo sapiens
  misc_RNA (1)...(19): siRNA sense strand
ggaccugguucugccuucu

SEQ ID NO: 627035 - RNA, 19 nt, Homo sapiens
  misc_RNA (1)...(19): siRNA sense strand
acuagcggaucaaguaugg

SEQ ID NO: 627036 - RNA, 19 nt, Homo sapiens
  misc_RNA (1)...(19): siRNA sense strand
gauguuacccuggcucaac

SEQ ID NO: 627037 - RNA, 19 nt, Homo sapiens
  misc_RNA (1)...(19): siRNA sense strand
gaucaaguauggacacuga

SEQ ID NO: 627038 - RNA, 19 nt, Homo sapiens
  misc_RNA (1)...(19): siRNA sense strand
agagguggcucagaaauuc

SEQ ID NO: 627039 - RNA, 19 nt, Homo sapiens
  misc_RNA (1)...(19): siRNA sense strand
uccaagagguggcucagaa

SEQ ID NO: 627040 - RNA, 19 nt, Homo sapiens
  misc_RNA (1)...(19): siRNA sense strand
gaaugccuuuucucuuuua

SEQ ID NO: 627041 - RNA, 19 nt, Homo sapiens
  misc_RNA (1)...(19): siRNA sense strand
uacccuggcucaacuguau

SEQ ID NO: 627042 - RNA, 19 nt, Homo sapiens
  misc_RNA (1)...(19): siRNA sense strand
ucgaaugccuuuucucuuu

SEQ ID NO: 627043 - RNA, 19 nt, Homo sapiens
  misc_RNA (1)...(19): siRNA sense strand
cagcuccacugcacugugu

SEQ ID NO: 627044 - RNA, 19 nt, Homo sapiens
  misc_RNA (1)...(19): siRNA sense strand
ccaagagguggcucagaaa

SEQ ID NO: 627045 - RNA, 19 nt, Homo sapiens
  misc_RNA (1)...(19): siRNA sense strand
caagagguggcucagaaau

SEQ ID NO: 627046 - RNA, 19 nt, Homo sapiens
  misc_RNA (1)...(19): siRNA sense strand
cgaaugccuuuucucuuuu

SEQ ID NO: 627047 - RNA, 19 nt, Homo sapiens
  misc_RNA (1)...(19): siRNA sense strand
gacaagaccccaucgaaug

SEQ ID NO: 627048 - RNA, 19 nt, Homo sapiens
  misc_RNA (1)...(19): siRNA sense strand
gguucugccuucuggacaa

SEQ ID NO: 627049 - RNA, 19 nt, Homo sapiens
  misc_RNA (1)...(19): siRNA sense strand
ggacucccacuuccaagag

SEQ ID NO: 627050 - RNA, 19 nt, Homo sapiens
  misc_RNA (1)...(19): siRNA sense strand
aagagguggcucagaaauu

SEQ ID NO: 627051 - RNA, 19 nt, Homo sapiens
  misc_RNA (1)...(19): siRNA sense strand
gagcaaaguccugcacacu

SEQ ID NO: 627052 - RNA, 19 nt, Homo sapiens
  misc_RNA (1)...(19): siRNA sense strand
ggaccugguucugccuucu

SEQ ID NO: 627053 - RNA, 19 nt, Homo sapiens
  misc_RNA (1)...(19): siRNA sense strand
acuagcggaucaaguaugg

SEQ ID NO: 627054 - RNA, 19 nt, Homo sapiens
  misc_RNA (1)...(19): siRNA sense strand
gauguuacccuggcucaac

SEQ ID NO: 627055 - RNA, 19 nt, Homo sapiens
  misc_RNA (1)...(19): siRNA sense strand
gaucaaguauggacacuga

SEQ ID NO: 627056 - RNA, 19 nt, Homo sapiens
  misc_RNA (1)...(19): siRNA sense strand
agagguggcucagaaauuc

SEQ ID NO: 627057 - RNA, 19 nt, Homo sapiens
  misc_RNA (1)...(19): siRNA sense strand
uccaagagguggcucagaa

SEQ ID NO: 627058 - RNA, 19 nt, Homo sapiens
  misc_RNA (1)...(19): siRNA sense strand
gaaugccuuuucucuuuua

SEQ ID NO: 627059 - RNA, 19 nt, Homo sapiens
  misc_RNA (1)...(19): siRNA sense strand
uacccuggcucaacuguau

SEQ ID NO: 627060 - RNA, 19 nt, Homo sapiens
  misc_RNA (1)...(19): siRNA sense strand
ucgaaugccuuuucucuuu

SEQ ID NO: 627061 - RNA, 19 nt, Homo sapiens
  misc_RNA (1)...(19): siRNA sense strand
cagcuccacugcacugugu

SEQ ID NO: 627062 - RNA, 19 nt, Homo sapiens
  misc_RNA (1)...(19): siRNA sense strand
ccaagagguggcucagaaa

SEQ ID NO: 627063 - RNA, 19 nt, Homo sapiens
  misc_RNA (1)...(19): siRNA sense strand
caagagguggcucagaaau

SEQ ID NO: 627064 - RNA, 19 nt, Homo sapiens
  misc_RNA (1)...(19): siRNA sense strand
cgaaugccuuuucucuuuu

SEQ ID NO: 627065 - RNA, 19 nt, Homo sapiens
  misc_RNA (1)...(19): siRNA sense strand
gacaagaccccaucgaaug

SEQ ID NO: 627066 - RNA, 19 nt, Homo sapiens
  misc_RNA (1)...(19): siRNA sense strand
gguucugccuucuggacaa

SEQ ID NO: 627067 - RNA, 19 nt, Homo sapiens
  misc_RNA (1)...(19): siRNA sense strand
ggacucccacuuccaagag

SEQ ID NO: 627068 - RNA, 19 nt, Homo sapiens
  misc_RNA (1)...(19): siRNA sense strand
aagagguggcucagaaauu

SEQ ID NO: 627069 - RNA, 19 nt, Homo sapiens
  misc_RNA (1)...(19): siRNA sense strand
gagcaaaguccugcacacu

SEQ ID NO: 627070 - RNA, 19 nt, Homo sapiens
  misc_RNA (1)...(19): siRNA sense strand
ggaccugguucugccuucu

SEQ ID NO: 627071 - RNA, 19 nt, Homo sapiens
  misc_RNA (1)...(19): siRNA sense strand
acuagcggaucaaguaugg

SEQ ID NO: 627072 - RNA, 19 nt, Homo sapiens
  misc_RNA (1)...(19): siRNA sense strand
gauguuacccuggcucaac

SEQ ID NO: 627073 - RNA, 19 nt, Homo sapiens
  misc_RNA (1)...(19): siRNA sense strand
gaucaaguauggacacuga

SEQ ID NO: 627074 - RNA, 19 nt, Homo sapiens
  misc_RNA (1)...(19): siRNA sense strand
agagguggcucagaaauuc

SEQ ID NO: 627075 - RNA, 19 nt, Homo sapiens
  misc_RNA (1)...(19): siRNA sense strand
uccaagagguggcucagaa

SEQ ID NO: 627076 - RNA, 19 nt, Homo sapiens
  misc_RNA (1)...(19): siRNA sense strand
gaaugccuuuucucuuuua

SEQ ID NO: 627077 - RNA, 19 nt, Homo sapiens
  misc_RNA (1)...(19): siRNA sense strand
uacccuggcucaacuguau

SEQ ID NO: 627078 - RNA, 19 nt, Homo sapiens
  misc_RNA (1)...(19): siRNA sense strand
ucgaaugccuuuucucuuu

SEQ ID NO: 627079 - RNA, 19 nt, Homo sapiens
  misc_RNA (1)...(19): siRNA sense strand
cagcuccacugcacugugu

SEQ ID NO: 627080 - RNA, 19 nt, Homo sapiens
  misc_RNA (1)...(19): siRNA sense strand
ccaagagguggcucagaaa

SEQ ID NO: 627081 - RNA, 19 nt, Homo sapiens
  misc_RNA (1)...(19): siRNA sense strand
caagagguggcucagaaau

SEQ ID NO: 627082 - RNA, 19 nt, Homo sapiens
  misc_RNA (1)...(19): siRNA sense strand
cgaaugccuuuucucuuuu

SEQ ID NO: 627083 - RNA, 19 nt, Homo sapiens
  misc_RNA (1)...(19): siRNA sense strand
gacaagaccccaucgaaug

SEQ ID NO: 627084 - RNA, 19 nt, Homo sapiens
  misc_RNA (1)...(19): siRNA sense strand
gguucugccuucuggacaa

SEQ ID NO: 627085 - RNA, 19 nt, Homo sapiens
  misc_RNA (1)...(19): siRNA sense strand
ggacucccacuuccaagag

SEQ ID NO: 627086 - RNA, 19 nt, Homo sapiens
  misc_RNA (1)...(19): siRNA sense strand
aagagguggcucagaaauu

SEQ ID NO: 627087 - RNA, 19 nt, Homo sapiens
  misc_RNA (1)...(19): siRNA sense strand
gagcaaaguccugcacacu

SEQ ID NO: 627088 - RNA, 19 nt, Homo sapiens
  misc_RNA (1)...(19): siRNA sense strand
ggaccugguucugccuucu

SEQ ID NO: 627089 - RNA, 19 nt, Homo sapiens
  misc_RNA (1)...(19): siRNA sense strand
acuagcggaucaaguaugg

SEQ ID NO: 627090 - RNA, 19 nt, Homo sapiens
  misc_RNA (1)...(19): siRNA sense strand
gauguuacccuggcucaac

SEQ ID NO: 627091 - RNA, 19 nt, Homo sapiens
  misc_RNA (1)...(19): siRNA sense strand
gaucaaguauggacacuga

SEQ ID NO: 627092 - RNA, 19 nt, Homo sapiens
  misc_RNA (1)...(19): siRNA sense strand
agagguggcucagaaauuc

SEQ ID NO: 627093 - RNA, 19 nt, Homo sapiens
  misc_RNA (1)...(19): siRNA sense strand
uccaagagguggcucagaa

SEQ ID NO: 627094 - RNA, 19 nt, Homo sapiens
  misc_RNA (1)...(19): siRNA sense strand
gaaugccuuuucucuuuua

SEQ ID NO: 627095 - RNA, 19 nt, Homo sapiens
  misc_RNA (1)...(19): siRNA sense strand
uacccuggcucaacuguau

SEQ ID NO: 627096 - RNA, 19 nt, Homo sapiens
  misc_RNA (1)...(19): siRNA sense strand
ucgaaugccuuuucucuuu

SEQ ID NO: 627097 - RNA, 19 nt, Homo sapiens
  misc_RNA (1)...(19): siRNA sense strand
cagcuccacugcacugugu

SEQ ID NO: 627098 - RNA, 19 nt, Homo sapiens
  misc_RNA (1)...(19): siRNA sense strand
ccaagagguggcucagaaa

SEQ ID NO: 627099 - RNA, 19 nt, Homo sapiens
  misc_RNA (1)...(19): siRNA sense strand
caagagguggcucagaaau

SEQ ID NO: 627100 - RNA, 19 nt, Homo sapiens
  misc_RNA (1)...(19): siRNA sense strand
cgaaugccuuuucucuuuu

SEQ ID NO: 627101 - RNA, 19 nt, Homo sapiens
  misc_RNA (1)...(19): siRNA sense strand
gacaagaccccaucgaaug

SEQ ID NO: 627102 - RNA, 19 nt, Homo sapiens
  misc_RNA (1)...(19): siRNA sense strand
gguucugccuucuggacaa

SEQ ID NO: 627103 - RNA, 19 nt, Homo sapiens
  misc_RNA (1)...(19): siRNA sense strand
ggacucccacuuccaagag

SEQ ID NO: 627104 - RNA, 19 nt, Homo sapiens
  misc_RNA (1)...(19): siRNA sense strand
aagagguggcucagaaauu

SEQ ID NO: 627105 - RNA, 19 nt, Homo sapiens
  misc_RNA (1)...(19): siRNA sense strand
gagcaaaguccugcacacu

SEQ ID NO: 627106 - RNA, 19 nt, Homo sapiens
  misc_RNA (1)...(19): siRNA sense strand
ggaccugguucugccuucu

SEQ ID NO: 627107 - RNA, 19 nt, Homo sapiens
  misc_RNA (1)...(19): siRNA sense strand
acuagcggaucaaguaugg

SEQ ID NO: 627108 - RNA, 19 nt, Homo sapiens
  misc_RNA (1)...(19): siRNA sense strand
gauguuacccuggcucaac

SEQ ID NO: 627109 - RNA, 19 nt, Homo sapiens
  misc_RNA (1)...(19): siRNA sense strand
gaucaaguauggacacuga

SEQ ID NO: 627110 - RNA, 19 nt, Homo sapiens
  misc_RNA (1)...(19): siRNA sense strand
agagguggcucagaaauuc

SEQ ID NO: 627111 - RNA, 19 nt, Homo sapiens
  misc_RNA (1)...(19): siRNA sense strand
uccaagagguggcucagaa

SEQ ID NO: 627112 - RNA, 19 nt, Homo sapiens
  misc_RNA (1)...(19): siRNA sense strand
gaaugccuuuucucuuuua

SEQ ID NO: 627113 - RNA, 19 nt, Homo sapiens
  misc_RNA (1)...(19): siRNA sense strand
uacccuggcucaacuguau

SEQ ID NO: 627114 - RNA, 19 nt, Homo sapiens
  misc_RNA (1)...(19): siRNA sense strand
ucgaaugccuuuucucuuu

SEQ ID NO: 627115 - RNA, 19 nt, Homo sapiens
  misc_RNA (1)...(19): siRNA sense strand
cagcuccacugcacugugu

SEQ ID NO: 627116 - RNA, 19 nt, Homo sapiens
  misc_RNA (1)...(19): siRNA sense strand
ccaagagguggcucagaaa

SEQ ID NO: 627117 - RNA, 19 nt, Homo sapiens
  misc_RNA (1)...(19): siRNA sense strand
caagagguggcucagaaau

SEQ ID NO: 627118 - RNA, 19 nt, Homo sapiens
  misc_RNA (1)...(19): siRNA sense strand
cgaaugccuuuucucuuuu

SEQ ID NO: 627119 - RNA, 19 nt, Homo sapiens
  misc_RNA (1)...(19): siRNA sense strand
gacaagaccccaucgaaug

SEQ ID NO: 627120 - RNA, 19 nt, Homo sapiens
  misc_RNA (1)...(19): siRNA sense strand
gguucugccuucuggacaa

SEQ ID NO: 627121 - RNA, 19 nt, Homo sapiens
  misc_RNA (1)...(19): siRNA sense strand
ggacucccacuuccaagag

SEQ ID NO: 627122 - RNA, 19 nt, Homo sapiens
  misc_RNA (1)...(19): siRNA sense strand
aagagguggcucagaaauu

SEQ ID NO: 627123 - RNA, 19 nt, Homo sapiens
  misc_RNA (1)...(19): siRNA sense strand
gagcaaaguccugcacacu

SEQ ID NO: 627124 - RNA, 19 nt, Homo sapiens
  misc_RNA (1)...(19): siRNA sense strand
ggaccugguucugccuucu

SEQ ID NO: 627125 - RNA, 19 nt, Homo sapiens
  misc_RNA (1)...(19): siRNA sense strand
acuagcggaucaaguaugg

SEQ ID NO: 627126 - RNA, 19 nt, Homo sapiens
  misc_RNA (1)...(19): siRNA sense strand
gauguuacccuggcucaac

SEQ ID NO: 627127 - RNA, 19 nt, Homo sapiens
  misc_RNA (1)...(19): siRNA sense strand
gaucaaguauggacacuga

SEQ ID NO: 627128 - RNA, 19 nt, Homo sapiens
  misc_RNA (1)...(19): siRNA sense strand
agagguggcucagaaauuc

SEQ ID NO: 627129 - RNA, 19 nt, Homo sapiens
  misc_RNA (1)...(19): siRNA sense strand
uccaagagguggcucagaa

SEQ ID NO: 627130 - RNA, 19 nt, Homo sapiens
  misc_RNA (1)...(19): siRNA sense strand
gaaugccuuuucucuuuua

SEQ ID NO: 627131 - RNA, 19 nt, Homo sapiens
  misc_RNA (1)...(19): siRNA sense strand
uacccuggcucaacuguau

SEQ ID NO: 627132 - RNA, 19 nt, Homo sapiens
  misc_RNA (1)...(19): siRNA sense strand
ucgaaugccuuuucucuuu

SEQ ID NO: 627133 - RNA, 19 nt, Homo sapiens
  misc_RNA (1)...(19): siRNA sense strand
cagcuccacugcacugugu

SEQ ID NO: 627134 - RNA, 19 nt, Homo sapiens
  misc_RNA (1)...(19): siRNA sense strand
ccaagagguggcucagaaa

SEQ ID NO: 627135 - RNA, 19 nt, Homo sapiens
  misc_RNA (1)...(19): siRNA sense strand
caagagguggcucagaaau

SEQ ID NO: 627136 - RNA, 19 nt, Homo sapiens
  misc_RNA (1)...(19): siRNA sense strand
cgaaugccuuuucucuuuu

SEQ ID NO: 627137 - RNA, 19 nt, Homo sapiens
  misc_RNA (1)...(19): siRNA sense strand
gacaagaccccaucgaaug

SEQ ID NO: 627138 - RNA, 19 nt, Homo sapiens
  misc_RNA (1)...(19): siRNA sense strand
gguucugccuucuggacaa

SEQ ID NO: 627139 - RNA, 19 nt, Homo sapiens
  misc_RNA (1)...(19): siRNA sense strand
ggacucccacuuccaagag

SEQ ID NO: 627140 - RNA, 19 nt, Homo sapiens
  misc_RNA (1)...(19): siRNA sense strand
aagagguggcucagaaauu

SEQ ID NO: 627141 - RNA, 19 nt, Homo sapiens
  misc_RNA (1)...(19): siRNA sense strand
gagcaaaguccugcacacu

SEQ ID NO: 627142 - RNA, 19 nt, Homo sapiens
  misc_RNA (1)...(19): siRNA sense strand
ggaccugguucugccuucu

SEQ ID NO: 627143 - RNA, 19 nt, Homo sapiens
  misc_RNA (1)...(19): siRNA sense strand
acuagcggaucaaguaugg

SEQ ID NO: 627144 - RNA, 19 nt, Homo sapiens
  misc_RNA (1)...(19): siRNA sense strand
gauguuacccuggcucaac

SEQ ID NO: 627145 - RNA, 19 nt, Homo sapiens
  misc_RNA (1)...(19): siRNA sense strand
gaucaaguauggacacuga

SEQ ID NO: 627146 - RNA, 19 nt, Homo sapiens
  misc_RNA (1)...(19): siRNA sense strand
agagguggcucagaaauuc

SEQ ID NO: 627147 - RNA, 19 nt, Homo sapiens
  misc_RNA (1)...(19): siRNA sense strand
uccaagagguggcucagaa

SEQ ID NO: 627148 - RNA, 19 nt, Homo sapiens
  misc_RNA (1)...(19): siRNA sense strand
gaaugccuuuucucuuuua

SEQ ID NO: 627149 - RNA, 19 nt, Homo sapiens
  misc_RNA (1)...(19): siRNA sense strand
uacccuggcucaacuguau

SEQ ID NO: 627150 - RNA, 19 nt, Homo sapiens
  misc_RNA (1)...(19): siRNA sense strand
ucgaaugccuuuucucuuu

SEQ ID NO: 627151 - RNA, 19 nt, Homo sapiens
  misc_RNA (1)...(19): siRNA sense strand
cagcuccacugcacugugu

SEQ ID NO: 627152 - RNA, 19 nt, Homo sapiens
  misc_RNA (1)...(19): siRNA sense strand
ccaagagguggcucagaaa

SEQ ID NO: 627153 - RNA, 19 nt, Homo sapiens
  misc_RNA (1)...(19): siRNA sense strand
caagagguggcucagaaau

SEQ ID NO: 627154 - RNA, 19 nt, Homo sapiens
  misc_RNA (1)...(19): siRNA sense strand
cgaaugccuuuucucuuuu

SEQ ID NO: 627155 - RNA, 19 nt, Homo sapiens
  misc_RNA (1)...(19): siRNA sense strand
gacaagaccccaucgaaug

SEQ ID NO: 627156 - RNA, 19 nt, Homo sapiens
  misc_RNA (1)...(19): siRNA sense strand
gguucugccuucuggacaa

SEQ ID NO: 627157 - RNA, 19 nt, Homo sapiens
  misc_RNA (1)...(19): siRNA sense strand
ggacucccacuuccaagag

SEQ ID NO: 627158 - RNA, 19 nt, Homo sapiens
  misc_RNA (1)...(19): siRNA sense strand
aagagguggcucagaaauu

SEQ ID NO: 627159 - RNA, 19 nt, Homo sapiens
  misc_RNA (1)...(19): siRNA sense strand
gagcaaaguccugcacacu

SEQ ID NO: 627160 - RNA, 19 nt, Homo sapiens
  misc_RNA (1)...(19): siRNA sense strand
ggaccugguucugccuucu

SEQ ID NO: 627161 - RNA, 19 nt, Homo sapiens
  misc_RNA (1)...(19): siRNA sense strand
acuagcggaucaaguaugg

SEQ ID NO: 627162 - RNA, 19 nt, Homo sapiens
  misc_RNA (1)...(19): siRNA sense strand
gauguuacccuggcucaac

SEQ ID NO: 627163 - RNA, 19 nt, Homo sapiens
  misc_RNA (1)...(19): siRNA sense strand
gaucaaguauggacacuga

SEQ ID NO: 627164 - RNA, 19 nt, Homo sapiens
  misc_RNA (1)...(19): siRNA sense strand
agagguggcucagaaauuc

SEQ ID NO: 627165 - RNA, 19 nt, Homo sapiens
  misc_RNA (1)...(19): siRNA sense strand
uccaagagguggcucagaa

SEQ ID NO: 627166 - RNA, 19 nt, Homo sapiens
  misc_RNA (1)...(19): siRNA sense strand
gaaugccuuuucucuuuua

SEQ ID NO: 627167 - RNA, 19 nt, Homo sapiens
  misc_RNA (1)...(19): siRNA sense strand
uacccuggcucaacuguau

SEQ ID NO: 627168 - RNA, 19 nt, Homo sapiens
  misc_RNA (1)...(19): siRNA sense strand
ucgaaugccuuuucucuuu

SEQ ID NO: 627169 - RNA, 19 nt, Homo sapiens
  misc_RNA (1)...(19): siRNA sense strand
cagcuccacugcacugugu

SEQ ID NO: 627170 - RNA, 19 nt, Homo sapiens
  misc_RNA (1)...(19): siRNA sense strand
ccaagagguggcucagaaa

SEQ ID NO: 627171 - RNA, 19 nt, Homo sapiens
  misc_RNA (1)...(19): siRNA sense strand
caagagguggcucagaaau

SEQ ID NO: 627172 - RNA, 19 nt, Homo sapiens
  misc_RNA (1)...(19): siRNA sense strand
cgaaugccuuuucucuuuu

SEQ ID NO: 627173 - RNA, 19 nt, Homo sapiens
  misc_RNA (1)...(19): siRNA sense strand
gacaagaccccaucgaaug

SEQ ID NO: 627174 - RNA, 19 nt, Homo sapiens
  misc_RNA (1)...(19): siRNA sense strand
gguucugccuucuggacaa

SEQ ID NO: 627175 - RNA, 19 nt, Homo sapiens
  misc_RNA (1)...(19): siRNA sense strand
ggacucccacuuccaagag

SEQ ID NO: 627176 - RNA, 19 nt, Homo sapiens
  misc_RNA (1)...(19): siRNA sense strand
aagagguggcucagaaauu

SEQ ID NO: 627177 - RNA, 19 nt, Homo sapiens
  misc_RNA (1)...(19): siRNA sense strand
gagcaaaguccugcacacu

SEQ ID NO: 627178 - RNA, 19 nt, Homo sapiens
  misc_RNA (1)...(19): siRNA sense strand
ggaccugguucugccuucu

SEQ ID NO: 627179 - RNA, 19 nt, Homo sapiens
  misc_RNA (1)...(19): siRNA sense strand
acuagcggaucaaguaugg

SEQ ID NO: 627180 - RNA, 19 nt, Homo sapiens
  misc_RNA (1)...(19): siRNA sense strand
gauguuacccuggcucaac

SEQ ID NO: 627181 - RNA, 19 nt, Homo sapiens
  misc_RNA (1)...(19): siRNA sense strand
gaucaaguauggacacuga

SEQ ID NO: 627182 - RNA, 19 nt, Homo sapiens
  misc_RNA (1)...(19): siRNA sense strand
agagguggcucagaaauuc

SEQ ID NO: 627183 - RNA, 19 nt, Homo sapiens
  misc_RNA (1)...(19): siRNA sense strand
uccaagagguggcucagaa

SEQ ID NO: 627184 - RNA, 19 nt, Homo sapiens
  misc_RNA (1)...(19): siRNA sense strand
gaaugccuuuucucuuuua

SEQ ID NO: 627185 - RNA, 19 nt, Homo sapiens
  misc_RNA (1)...(19): siRNA sense strand
uacccuggcucaacuguau

SEQ ID NO: 627186 - RNA, 19 nt, Homo sapiens
  misc_RNA (1)...(19): siRNA sense strand
ucgaaugccuuuucucuuu

SEQ ID NO: 627187 - RNA, 19 nt, Homo sapiens
  misc_RNA (1)...(19): siRNA sense strand
cagcuccacugcacugugu

SEQ ID NO: 627188 - RNA, 19 nt, Homo sapiens
  misc_RNA (1)...(19): siRNA sense strand
ccaagagguggcucagaaa

SEQ ID NO: 627189 - RNA, 19 nt, Homo sapiens
  misc_RNA (1)...(19): siRNA sense strand
caagagguggcucagaaau

SEQ ID NO: 627190 - RNA, 19 nt, Homo sapiens
  misc_RNA (1)...(19): siRNA sense strand
cgaaugccuuuucucuuuu

SEQ ID NO: 627191 - RNA, 19 nt, Homo sapiens
  misc_RNA (1)...(19): siRNA sense strand
gacaagaccccaucgaaug

SEQ ID NO: 627192 - RNA, 19 nt, Homo sapiens
  misc_RNA (1)...(19): siRNA sense strand
gguucugccuucuggacaa

SEQ ID NO: 627193 - RNA, 19 nt, Homo sapiens
  misc_RNA (1)...(19): siRNA sense strand
ggacucccacuuccaagag

SEQ ID NO: 627194 - RNA, 19 nt, Homo sapiens
  misc_RNA (1)...(19): siRNA sense strand
aagagguggcucagaaauu

SEQ ID NO: 627195 - RNA, 19 nt, Homo sapiens
  misc_RNA (1)...(19): siRNA sense strand
gagcaaaguccugcacacu

SEQ ID NO: 627196 - RNA, 19 nt, Homo sapiens
  misc_RNA (1)...(19): siRNA sense strand
ggaccugguucugccuucu

SEQ ID NO: 627197 - RNA, 19 nt, Homo sapiens
  misc_RNA (1)...(19): siRNA sense strand
acuagcggaucaaguaugg

SEQ ID NO: 627198 - RNA, 19 nt, Homo sapiens
  misc_RNA (1)...(19): siRNA sense strand
gauguuacccuggcucaac

SEQ ID NO: 627199 - RNA, 19 nt, Homo sapiens
  misc_RNA (1)...(19): siRNA sense strand
gaucaaguauggacacuga

SEQ ID NO: 627200 - RNA, 19 nt, Homo sapiens
  misc_RNA (1)...(19): siRNA sense strand
agagguggcucagaaauuc

SEQ ID NO: 627201 - RNA, 19 nt, Homo sapiens
  misc_RNA (1)...(19): siRNA sense strand
uccaagagguggcucagaa

SEQ ID NO: 627202 - RNA, 19 nt, Homo sapiens
  misc_RNA (1)...(19): siRNA sense strand
gaaugccuuuucucuuuua

SEQ ID NO: 627203 - RNA, 19 nt, Homo sapiens
  misc_RNA (1)...(19): siRNA sense strand
uacccuggcucaacuguau

SEQ ID NO: 627204 - RNA, 19 nt, Homo sapiens
  misc_RNA (1)...(19): siRNA sense strand
ucgaaugccuuuucucuuu

SEQ ID NO: 627205 - RNA, 19 nt, Homo sapiens
  misc_RNA (1)...(19): siRNA sense strand
cagcuccacugcacugugu

SEQ ID NO: 627206 - RNA, 19 nt, Homo sapiens
  misc_RNA (1)...(19): siRNA sense strand
ccaagagguggcucagaaa

SEQ ID NO: 627207 - RNA, 19 nt, Homo sapiens
  misc_RNA (1)...(19): siRNA sense strand
caagagguggcucagaaau

SEQ ID NO: 627208 - RNA, 19 nt, Homo sapiens
  misc_RNA (1)...(19): siRNA sense strand
cgaaugccuuuucucuuuu

SEQ ID NO: 627209 - RNA, 19 nt, Homo sapiens
  misc_RNA (1)...(19): siRNA sense strand
gacaagaccccaucgaaug

SEQ ID NO: 627210 - RNA, 19 nt, Homo sapiens
  misc_RNA (1)...(19): siRNA sense strand
gguucugccuucuggacaa

SEQ ID NO: 627211 - RNA, 19 nt, Homo sapiens
  misc_RNA (1)...(19): siRNA sense strand
ggacucccacuuccaagag

SEQ ID NO: 627212 - RNA, 19 nt, Homo sapiens
  misc_RNA (1)...(19): siRNA sense strand
aagagguggcucagaaauu

SEQ ID NO: 627213 - RNA, 19 nt, Homo sapiens
  misc_RNA (1)...(19): siRNA sense strand
gagcaaaguccugcacacu

SEQ ID NO: 627214 - RNA, 19 nt, Homo sapiens
  misc_RNA (1)...(19): siRNA sense strand
ggaccugguucugccuucu

SEQ ID NO: 627215 - RNA, 19 nt, Homo sapiens
  misc_RNA (1)...(19): siRNA sense strand
acuagcggaucaaguaugg

SEQ ID NO: 627216 - RNA, 19 nt, Homo sapiens
  misc_RNA (1)...(19): siRNA sense strand
gauguuacccuggcucaac

SEQ ID NO: 627217 - RNA, 19 nt, Homo sapiens
  misc_RNA (1)...(19): siRNA sense strand
gaucaaguauggacacuga

SEQ ID NO: 627218 - RNA, 19 nt, Homo sapiens
  misc_RNA (1)...(19): siRNA sense strand
agagguggcucagaaauuc

SEQ ID NO: 627219 - RNA, 19 nt, Homo sapiens
  misc_RNA (1)...(19): siRNA sense strand
uccaagagguggcucagaa

SEQ ID NO: 627220 - RNA, 19 nt, Homo sapiens
  misc_RNA (1)...(19): siRNA sense strand
gaaugccuuuucucuuuua

SEQ ID NO: 627221 - RNA, 19 nt, Homo sapiens
  misc_RNA (1)...(19): siRNA sense strand
uacccuggcucaacuguau

SEQ ID NO: 627222 - RNA, 19 nt, Homo sapiens
  misc_RNA (1)...(19): siRNA sense strand
ucgaaugccuuuucucuuu

SEQ ID NO: 627223 - RNA, 19 nt, Homo sapiens
  misc_RNA (1)...(19): siRNA sense strand
cagcuccacugcacugugu

SEQ ID NO: 627224 - RNA, 19 nt, Homo sapiens
  misc_RNA (1)...(19): siRNA sense strand
ccaagagguggcucagaaa

SEQ ID NO: 627225 - RNA, 19 nt, Homo sapiens
  misc_RNA (1)...(19): siRNA sense strand
caagagguggcucagaaau

SEQ ID NO: 627226 - RNA, 19 nt, Homo sapiens
  misc_RNA (1)...(19): siRNA sense strand
cgaaugccuuuucucuuuu

SEQ ID NO: 627227 - RNA, 19 nt, Homo sapiens
  misc_RNA (1)...(19): siRNA sense strand
gacaagaccccaucgaaug

SEQ ID NO: 627228 - RNA, 19 nt, Homo sapiens
  misc_RNA (1)...(19): siRNA sense strand
gguucugccuucuggacaa

SEQ ID NO: 627229 - RNA, 19 nt, Homo sapiens
  misc_RNA (1)...(19): siRNA sense strand
ggacucccacuuccaagag

SEQ ID NO: 627230 - RNA, 19 nt, Homo sapiens
  misc_RNA (1)...(19): siRNA sense strand
aagagguggcucagaaauu

SEQ ID NO: 627231 - RNA, 19 nt, Homo sapiens
  misc_RNA (1)...(19): siRNA sense strand
gagcaaaguccugcacacu

SEQ ID NO: 627232 - RNA, 19 nt, Homo sapiens
  misc_RNA (1)...(19): siRNA sense strand
ggaccugguucugccuucu

SEQ ID NO: 627233 - RNA, 19 nt, Homo sapiens
  misc_RNA (1)...(19): siRNA sense strand
acuagcggaucaaguaugg

SEQ ID NO: 627234 - RNA, 19 nt, Homo sapiens
  misc_RNA (1)...(19): siRNA sense strand
gauguuacccuggcucaac

SEQ ID NO: 627235 - RNA, 19 nt, Homo sapiens
  misc_RNA (1)...(19): siRNA sense strand
gaucaaguauggacacuga

SEQ ID NO: 627236 - RNA, 19 nt, Homo sapiens
  misc_RNA (1)...(19): siRNA sense strand
agagguggcucagaaauuc

SEQ ID NO: 627237 - RNA, 19 nt, Homo sapiens
  misc_RNA (1)...(19): siRNA sense strand
uccaagagguggcucagaa

SEQ ID NO: 627238 - RNA, 19 nt, Homo sapiens
  misc_RNA (1)...(19): siRNA sense strand
gaaugccuuuucucuuuua

SEQ ID NO: 627239 - RNA, 19 nt, Homo sapiens
  misc_RNA (1)...(19): siRNA sense strand
uacccuggcucaacuguau

SEQ ID NO: 627240 - RNA, 19 nt, Homo sapiens
  misc_RNA (1)...(19): siRNA sense strand
ucgaaugccuuuucucuuu

SEQ ID NO: 627241 - RNA, 19 nt, Homo sapiens
  misc_RNA (1)...(19): siRNA sense strand
cagcuccacugcacugugu

SEQ ID NO: 627242 - RNA, 19 nt, Homo sapiens
  misc_RNA (1)...(19): siRNA sense strand
ccaagagguggcucagaaa

SEQ ID NO: 627243 - RNA, 19 nt, Homo sapiens
  misc_RNA (1)...(19): siRNA sense strand
caagagguggcucagaaau

SEQ ID NO: 627244 - RNA, 19 nt, Homo sapiens
  misc_RNA (1)...(19): siRNA sense strand
cgaaugccuuuucucuuuu

SEQ ID NO: 627245 - RNA, 19 nt, Homo sapiens
  misc_RNA (1)...(19): siRNA sense strand
gacaagaccccaucgaaug

SEQ ID NO: 627246 - RNA, 19 nt, Homo sapiens
  misc_RNA (1)...(19): siRNA sense strand
gguucugccuucuggacaa

SEQ ID NO: 627247 - RNA, 19 nt, Homo sapiens
  misc_RNA (1)...(19): siRNA sense strand
ggacucccacuuccaagag

SEQ ID NO: 627248 - RNA, 19 nt, Homo sapiens
  misc_RNA (1)...(19): siRNA sense strand
aagagguggcucagaaauu

SEQ ID NO: 627249 - RNA, 19 nt, Homo sapiens
  misc_RNA (1)...(19): siRNA sense strand
gagcaaaguccugcacacu

SEQ ID NO: 627250 - RNA, 19 nt, Homo sapiens
  misc_RNA (1)...(19): siRNA sense strand
ggaccugguucugccuucu

SEQ ID NO: 627251 - RNA, 19 nt, Homo sapiens
  misc_RNA (1)...(19): siRNA sense strand
acuagcggaucaaguaugg

SEQ ID NO: 627252 - RNA, 19 nt, Homo sapiens
  misc_RNA (1)...(19): siRNA sense strand
gauguuacccuggcucaac

SEQ ID NO: 627253 - RNA, 19 nt, Homo sapiens
  misc_RNA (1)...(19): siRNA sense strand
gaucaaguauggacacuga

SEQ ID NO: 627254 - RNA, 19 nt, Homo sapiens
  misc_RNA (1)...(19): siRNA sense strand
agagguggcucagaaauuc

SEQ ID NO: 627255 - RNA, 19 nt, Homo sapiens
  misc_RNA (1)...(19): siRNA sense strand
uccaagagguggcucagaa

SEQ ID NO: 627256 - RNA, 19 nt, Homo sapiens
  misc_RNA (1)...(19): siRNA sense strand
gaaugccuuuucucuuuua

SEQ ID NO: 627257 - RNA, 19 nt, Homo sapiens
  misc_RNA (1)...(19): siRNA sense strand
uacccuggcucaacuguau

SEQ ID NO: 627258 - RNA, 19 nt, Homo sapiens
  misc_RNA (1)...(19): siRNA sense strand
ucgaaugccuuuucucuuu

SEQ ID NO: 627259 - RNA, 19 nt, Homo sapiens
  misc_RNA (1)...(19): siRNA sense strand
cagcuccacugcacugugu

SEQ ID NO: 627260 - RNA, 19 nt, Homo sapiens
  misc_RNA (1)...(19): siRNA sense strand
ccaagagguggcucagaaa

SEQ ID NO: 627261 - RNA, 19 nt, Homo sapiens
  misc_RNA (1)...(19): siRNA sense strand
caagagguggcucagaaau

SEQ ID NO: 627262 - RNA, 19 nt, Homo sapiens
  misc_RNA (1)...(19): siRNA sense strand
cgaaugccuuuucucuuuu

SEQ ID NO: 627263 - RNA, 19 nt, Homo sapiens
  misc_RNA (1)...(19): siRNA sense strand
gacaagaccccaucgaaug

SEQ ID NO: 627264 - RNA, 19 nt, Homo sapiens
  misc_RNA (1)...(19): siRNA sense strand
gguucugccuucuggacaa

SEQ ID NO: 627265 - RNA, 19 nt, Homo sapiens
  misc_RNA (1)...(19): siRNA sense strand
ggacucccacuuccaagag

SEQ ID NO: 627266 - RNA, 19 nt, Homo sapiens
  misc_RNA (1)...(19): siRNA sense strand
aagagguggcucagaaauu

SEQ ID NO: 627267 - RNA, 19 nt, Homo sapiens
  misc_RNA (1)...(19): siRNA sense strand
gagcaaaguccugcacacu

SEQ ID NO: 627268 - RNA, 19 nt, Homo sapiens
  misc_RNA (1)...(19): siRNA sense strand
ggaccugguucugccuucu

SEQ ID NO: 627269 - RNA, 19 nt, Homo sapiens
  misc_RNA (1)...(19): siRNA sense strand
acuagcggaucaaguaugg

SEQ ID NO: 627270 - RNA, 19 nt, Homo sapiens
  misc_RNA (1)...(19): siRNA sense strand
gauguuacccuggcucaac

SEQ ID NO: 627271 - RNA, 19 nt, Homo sapiens
  misc_RNA (1)...(19): siRNA sense strand
gaucaaguauggacacuga

SEQ ID NO: 627272 - RNA, 19 nt, Homo sapiens
  misc_RNA (1)...(19): siRNA sense strand
agagguggcucagaaauuc

SEQ ID NO: 627273 - RNA, 19 nt, Homo sapiens
  misc_RNA (1)...(19): siRNA sense strand
uccaagagguggcucagaa

SEQ ID NO: 627274 - RNA, 19 nt, Homo sapiens
  misc_RNA (1)...(19): siRNA sense strand
gaaugccuuuucucuuuua

SEQ ID NO: 627275 - RNA, 19 nt, Homo sapiens
  misc_RNA (1)...(19): siRNA sense strand
uacccuggcucaacuguau

SEQ ID NO: 627276 - RNA, 19 nt, Homo sapiens
  misc_RNA (1)...(19): siRNA sense strand
ucgaaugccuuuucucuuu

SEQ ID NO: 627277 - RNA, 19 nt, Homo sapiens
  misc_RNA (1)...(19): siRNA sense strand
cagcuccacugcacugugu

SEQ ID NO: 627278 - RNA, 19 nt, Homo sapiens
  misc_RNA (1)...(19): siRNA sense strand
ccaagagguggcucagaaa

SEQ ID NO: 627279 - RNA, 19 nt, Homo sapiens
  misc_RNA (1)...(19): siRNA sense strand
caagagguggcucagaaau

SEQ ID NO: 627280 - RNA, 19 nt, Homo sapiens
  misc_RNA (1)...(19): siRNA sense strand
cgaaugccuuuucucuuuu

SEQ ID NO: 627281 - RNA, 19 nt, Homo sapiens
  misc_RNA (1)...(19): siRNA sense strand
gacaagaccccaucgaaug

SEQ ID NO: 627282 - RNA, 19 nt, Homo sapiens
  misc_RNA (1)...(19): siRNA sense strand
gguucugccuucuggacaa

SEQ ID NO: 627283 - RNA, 19 nt, Homo sapiens
  misc_RNA (1)...(19): siRNA sense strand
ggacucccacuuccaagag

SEQ ID NO: 627284 - RNA, 19 nt, Homo sapiens
  misc_RNA (1)...(19): siRNA sense strand
aagagguggcucagaaauu

SEQ ID NO: 627285 - RNA, 19 nt, Homo sapiens
  misc_RNA (1)...(19): siRNA sense strand
gagcaaaguccugcacacu

SEQ ID NO: 627286 - RNA, 19 nt, Homo sapiens
  misc_RNA (1)...(19): siRNA sense strand
ggaccugguucugccuucu

SEQ ID NO: 627287 - RNA, 19 nt, Homo sapiens
  misc_RNA (1)...(19): siRNA sense strand
acuagcggaucaaguaugg

SEQ ID NO: 627288 - RNA, 19 nt, Homo sapiens
  misc_RNA (1)...(19): siRNA sense strand
gauguuacccuggcucaac

SEQ ID NO: 627289 - RNA, 19 nt, Homo sapiens
  misc_RNA (1)...(19): siRNA sense strand
gaucaaguauggacacuga

SEQ ID NO: 627290 - RNA, 19 nt, Homo sapiens
  misc_RNA (1)...(19): siRNA sense strand
agagguggcucagaaauuc

SEQ ID NO: 627291 - RNA, 19 nt, Homo sapiens
  misc_RNA (1)...(19): siRNA sense strand
uccaagagguggcucagaa

SEQ ID NO: 627292 - RNA, 19 nt, Homo sapiens
  misc_RNA (1)...(19): siRNA sense strand
gaaugccuuuucucuuuua

SEQ ID NO: 627293 - RNA, 19 nt, Homo sapiens
  misc_RNA (1)...(19): siRNA sense strand
uacccuggcucaacuguau

SEQ ID NO: 627294 - RNA, 19 nt, Homo sapiens
  misc_RNA (1)...(19): siRNA sense strand
ucgaaugccuuuucucuuu

SEQ ID NO: 627295 - RNA, 19 nt, Homo sapiens
  misc_RNA (1)...(19): siRNA sense strand
cagcuccacugcacugugu

SEQ ID NO: 627296 - RNA, 19 nt, Homo sapiens
  misc_RNA (1)...(19): siRNA sense strand
ccaagagguggcucagaaa

SEQ ID NO: 627297 - RNA, 19 nt, Homo sapiens
  misc_RNA (1)...(19): siRNA sense strand
caagagguggcucagaaau

SEQ ID NO: 627298 - RNA, 19 nt, Homo sapiens
  misc_RNA (1)...(19): siRNA sense strand
cgaaugccuuuucucuuuu

SEQ ID NO: 627299 - RNA, 19 nt, Homo sapiens
  misc_RNA (1)...(19): siRNA sense strand
gacaagaccccaucgaaug

SEQ ID NO: 627300 - RNA, 19 nt, Homo sapiens
  misc_RNA (1)...(19): siRNA sense strand
gguucugccuucuggacaa

SEQ ID NO: 627301 - RNA, 19 nt, Homo sapiens
  misc_RNA (1)...(19): siRNA sense strand
ggacucccacuuccaagag

SEQ ID NO: 627302 - RNA, 19 nt, Homo sapiens
  misc_RNA (1)...(19): siRNA sense strand
aagagguggcucagaaauu

SEQ ID NO: 627303 - RNA, 19 nt, Homo sapiens
  misc_RNA (1)...(19): siRNA sense strand
gagcaaaguccugcacacu

SEQ ID NO: 627304 - RNA, 19 nt, Homo sapiens
  misc_RNA (1)...(19): siRNA sense strand
ggaccugguucugccuucu

SEQ ID NO: 627305 - RNA, 19 nt, Homo sapiens
  misc_RNA (1)...(19): siRNA sense strand
acuagcggaucaaguaugg

SEQ ID NO: 627306 - RNA, 19 nt, Homo sapiens
  misc_RNA (1)...(19): siRNA sense strand
gauguuacccuggcucaac

SEQ ID NO: 627307 - RNA, 19 nt, Homo sapiens
  misc_RNA (1)...(19): siRNA sense strand
gaucaaguauggacacuga

SEQ ID NO: 627308 - RNA, 19 nt, Homo sapiens
  misc_RNA (1)...(19): siRNA sense strand
agagguggcucagaaauuc

SEQ ID NO: 627309 - RNA, 19 nt, Homo sapiens
  misc_RNA (1)...(19): siRNA sense strand
uccaagagguggcucagaa

SEQ ID NO: 627310 - RNA, 19 nt, Homo sapiens
  misc_RNA (1)...(19): siRNA sense strand
gaaugccuuuucucuuuua

SEQ ID NO: 627311 - RNA, 19 nt, Homo sapiens
  misc_RNA (1)...(19): siRNA sense strand
uacccuggcucaacuguau

SEQ ID NO: 627312 - RNA, 19 nt, Homo sapiens
  misc_RNA (1)...(19): siRNA sense strand
ucgaaugccuuuucucuuu

SEQ ID NO: 627313 - RNA, 19 nt, Homo sapiens
  misc_RNA (1)...(19): siRNA sense strand
cagcuccacugcacugugu

SEQ ID NO: 627314 - RNA, 19 nt, Homo sapiens
  misc_RNA (1)...(19): siRNA sense strand
ccaagagguggcucagaaa

SEQ ID NO: 627315 - RNA, 19 nt, Homo sapiens
  misc_RNA (1)...(19): siRNA sense strand
caagagguggcucagaaau

SEQ ID NO: 627316 - RNA, 19 nt, Homo sapiens
  misc_RNA (1)...(19): siRNA sense strand
cgaaugccuuuucucuuuu

SEQ ID NO: 627317 - RNA, 19 nt, Homo sapiens
  misc_RNA (1)...(19): siRNA sense strand
gacaagaccccaucgaaug

SEQ ID NO: 627318 - RNA, 19 nt, Homo sapiens
  misc_RNA (1)...(19): siRNA sense strand
gguucugccuucuggacaa

SEQ ID NO: 627319 - RNA, 19 nt, Homo sapiens
  misc_RNA (1)...(19): siRNA sense strand
ggacucccacuuccaagag

SEQ ID NO: 627320 - RNA, 19 nt, Homo sapiens
  misc_RNA (1)...(19): siRNA sense strand
aagagguggcucagaaauu

SEQ ID NO: 627321 - RNA, 19 nt, Homo sapiens
  misc_RNA (1)...(19): siRNA sense strand
gagcaaaguccugcacacu

SEQ ID NO: 627322 - RNA, 19 nt, Homo sapiens
  misc_RNA (1)...(19): siRNA sense strand
ggaccugguucugccuucu

SEQ ID NO: 627323 - RNA, 19 nt, Homo sapiens
  misc_RNA (1)...(19): siRNA sense strand
acuagcggaucaaguaugg

SEQ ID NO: 627324 - RNA, 19 nt, Homo sapiens
  misc_RNA (1)...(19): siRNA sense strand
gauguuacccuggcucaac

SEQ ID NO: 627325 - RNA, 19 nt, Homo sapiens
  misc_RNA (1)...(19): siRNA sense strand
gaucaaguauggacacuga

SEQ ID NO: 627326 - RNA, 19 nt, Homo sapiens
  misc_RNA (1)...(19): siRNA sense strand
agagguggcucagaaauuc

SEQ ID NO: 627327 - RNA, 19 nt, Homo sapiens
  misc_RNA (1)...(19): siRNA sense strand
uccaagagguggcucagaa

SEQ ID NO: 627328 - RNA, 19 nt, Homo sapiens
  misc_RNA (1)...(19): siRNA sense strand
gaaugccuuuucucuuuua

SEQ ID NO: 627329 - RNA, 19 nt, Homo sapiens
  misc_RNA (1)...(19): siRNA sense strand
uacccuggcucaacuguau

SEQ ID NO: 627330 - RNA, 19 nt, Homo sapiens
  misc_RNA (1)...(19): siRNA sense strand
ucgaaugccuuuucucuuu

SEQ ID NO: 627331 - RNA, 19 nt, Homo sapiens
  misc_RNA (1)...(19): siRNA sense strand
cagcuccacugcacugugu

SEQ ID NO: 627332 - RNA, 19 nt, Homo sapiens
  misc_RNA (1)...(19): siRNA sense strand
ccaagagguggcucagaaa

SEQ ID NO: 627333 - RNA, 19 nt, Homo sapiens
  misc_RNA (1)...(19): siRNA sense strand
caagagguggcucagaaau

SEQ ID NO: 627334 - RNA, 19 nt, Homo sapiens
  misc_RNA (1)...(19): siRNA sense strand
cgaaugccuuuucucuuuu

SEQ ID NO: 627335 - RNA, 19 nt, Homo sapiens
  misc_RNA (1)...(19): siRNA sense strand
gacaagaccccaucgaaug

SEQ ID NO: 627336 - RNA, 19 nt, Homo sapiens
  misc_RNA (1)...(19): siRNA sense strand
gguucugccuucuggacaa

SEQ ID NO: 627337 - RNA, 19 nt, Homo sapiens
  misc_RNA (1)...(19): siRNA sense strand
ggacucccacuuccaagag

SEQ ID NO: 627338 - RNA, 19 nt, Homo sapiens
  misc_RNA (1)...(19): siRNA sense strand
aagagguggcucagaaauu

SEQ ID NO: 627339 - RNA, 19 nt, Homo sapiens
  misc_RNA (1)...(19): siRNA sense strand
gagcaaaguccugcacacu

SEQ ID NO: 627340 - RNA, 19 nt, Homo sapiens
  misc_RNA (1)...(19): siRNA sense strand
ggaccugguucugccuucu

SEQ ID NO: 627341 - RNA, 19 nt, Homo sapiens
  misc_RNA (1)...(19): siRNA sense strand
acuagcggaucaaguaugg

SEQ ID NO: 627342 - RNA, 19 nt, Homo sapiens
  misc_RNA (1)...(19): siRNA sense strand
gauguuacccuggcucaac

SEQ ID NO: 627343 - RNA, 19 nt, Homo sapiens
  misc_RNA (1)...(19): siRNA sense strand
gcaggagcaucacaauuug

SEQ ID NO: 627344 - RNA, 19 nt, Homo sapiens
  misc_RNA (1)...(19): siRNA sense strand
ggcaggagcaucacaauuu

SEQ ID NO: 627345 - RNA, 19 nt, Homo sapiens
  misc_RNA (1)...(19): siRNA sense strand
uaacaugaccaguaacaga

SEQ ID NO: 627346 - RNA, 19 nt, Homo sapiens
  misc_RNA (1)...(19): siRNA sense strand
gaggaaguauugguggaaa

SEQ ID NO: 627347 - RNA, 19 nt, Homo sapiens
  misc_RNA (1)...(19): siRNA sense strand
ggaggugguggacaucaua

SEQ ID NO: 627348 - RNA, 19 nt, Homo sapiens
  misc_RNA (1)...(19): siRNA sense strand
cuccuaacaugaccaguaa

SEQ ID NO: 627349 - RNA, 19 nt, Homo sapiens
  misc_RNA (1)...(19): siRNA sense strand
uaacagacgacuacagcaa

SEQ ID NO: 627350 - RNA, 19 nt, Homo sapiens
  misc_RNA (1)...(19): siRNA sense strand
ggagccaucugugccauca

SEQ ID NO: 627351 - RNA, 19 nt, Homo sapiens
  misc_RNA (1)...(19): siRNA sense strand
caucaucgugguaguuauu

SEQ ID NO: 627352 - RNA, 19 nt, Homo sapiens
  misc_RNA (1)...(19): siRNA sense strand
gccaucaucgugguaguua

SEQ ID NO: 627353 - RNA, 19 nt, Homo sapiens
  misc_RNA (1)...(19): siRNA sense strand
gcaaacccaggcacaagug

SEQ ID NO: 627354 - RNA, 19 nt, Homo sapiens
  misc_RNA (1)...(19): siRNA sense strand
caucgugguaguuauugua

SEQ ID NO: 627355 - RNA, 19 nt, Homo sapiens
  misc_RNA (1)...(19): siRNA sense strand
guggacaucauacguguga

SEQ ID NO: 627356 - RNA, 19 nt, Homo sapiens
  misc_RNA (1)...(19): siRNA sense strand
gcaggcaggagcaucacaa

SEQ ID NO: 627357 - RNA, 19 nt, Homo sapiens
  misc_RNA (1)...(19): siRNA sense strand
ccuccuaacaugaccagua

SEQ ID NO: 627358 - RNA, 19 nt, Homo sapiens
  misc_RNA (1)...(19): siRNA sense strand
uggaggaggugguggacau

SEQ ID NO: 627359 - RNA, 19 nt, Homo sapiens
  misc_RNA (1)...(19): siRNA sense strand
ggacaucauacgugugaac

SEQ ID NO: 627360 - RNA, 19 nt, Homo sapiens
  misc_RNA (1)...(19): siRNA sense strand
aagcuaaagaggaaguauu

SEQ ID NO: 627361 - RNA, 19 nt, Homo sapiens
  misc_RNA (1)...(19): siRNA sense strand
cuaaagaggaaguauuggu

SEQ ID NO: 627362 - RNA, 19 nt, Homo sapiens
  misc_RNA (1)...(19): siRNA sense strand
gaccaguaacagacgacua

SEQ ID NO: 627363 - RNA, 19 nt, Homo sapiens
  misc_RNA (1)...(19): siRNA sense strand
gugugaacguggacaaggu

SEQ ID NO: 627364 - RNA, 19 nt, Homo sapiens
  misc_RNA (1)...(19): siRNA sense strand
gcaggagcaucacaauuug

SEQ ID NO: 627365 - RNA, 19 nt, Homo sapiens
  misc_RNA (1)...(19): siRNA sense strand
ggcaggagcaucacaauuu

SEQ ID NO: 627366 - RNA, 19 nt, Homo sapiens
  misc_RNA (1)...(19): siRNA sense strand
uaacaugaccaguaacaga

SEQ ID NO: 627367 - RNA, 19 nt, Homo sapiens
  misc_RNA (1)...(19): siRNA sense strand
gaggaaguauugguggaaa

SEQ ID NO: 627368 - RNA, 19 nt, Homo sapiens
  misc_RNA (1)...(19): siRNA sense strand
ggaggugguggacaucaua

SEQ ID NO: 627369 - RNA, 19 nt, Homo sapiens
  misc_RNA (1)...(19): siRNA sense strand
cuccuaacaugaccaguaa

SEQ ID NO: 627370 - RNA, 19 nt, Homo sapiens
  misc_RNA (1)...(19): siRNA sense strand
uaacagacgacuacagcaa

SEQ ID NO: 627371 - RNA, 19 nt, Homo sapiens
  misc_RNA (1)...(19): siRNA sense strand
ggagccaucugugccauca

SEQ ID NO: 627372 - RNA, 19 nt, Homo sapiens
  misc_RNA (1)...(19): siRNA sense strand
caucaucgugguaguuauu

SEQ ID NO: 627373 - RNA, 19 nt, Homo sapiens
  misc_RNA (1)...(19): siRNA sense strand
gccaucaucgugguaguua

SEQ ID NO: 627374 - RNA, 19 nt, Homo sapiens
  misc_RNA (1)...(19): siRNA sense strand
gcaaacccaggcacaagug

SEQ ID NO: 627375 - RNA, 19 nt, Homo sapiens
  misc_RNA (1)...(19): siRNA sense strand
caucgugguaguuauugua

SEQ ID NO: 627376 - RNA, 19 nt, Homo sapiens
  misc_RNA (1)...(19): siRNA sense strand
guggacaucauacguguga

SEQ ID NO: 627377 - RNA, 19 nt, Homo sapiens
  misc_RNA (1)...(19): siRNA sense strand
gcaggcaggagcaucacaa

SEQ ID NO: 627378 - RNA, 19 nt, Homo sapiens
  misc_RNA (1)...(19): siRNA sense strand
ccuccuaacaugaccagua

SEQ ID NO: 627379 - RNA, 19 nt, Homo sapiens
  misc_RNA (1)...(19): siRNA sense strand
uggaggaggugguggacau

SEQ ID NO: 627380 - RNA, 19 nt, Homo sapiens
  misc_RNA (1)...(19): siRNA sense strand
ggacaucauacgugugaac

SEQ ID NO: 627381 - RNA, 19 nt, Homo sapiens
  misc_RNA (1)...(19): siRNA sense strand
aagcuaaagaggaaguauu

SEQ ID NO: 627382 - RNA, 19 nt, Homo sapiens
  misc_RNA (1)...(19): siRNA sense strand
cuaaagaggaaguauuggu

SEQ ID NO: 627383 - RNA, 19 nt, Homo sapiens
  misc_RNA (1)...(19): siRNA sense strand
gaccaguaacagacgacua

SEQ ID NO: 627384 - RNA, 19 nt, Homo sapiens
  misc_RNA (1)...(19): siRNA sense strand
gugugaacguggacaaggu

SEQ ID NO: 627385 - RNA, 19 nt, Homo sapiens
  misc_RNA (1)...(19): siRNA sense strand
gaaagcaacucuugaaauu

SEQ ID NO: 627386 - RNA, 19 nt, Homo sapiens
  misc_RNA (1)...(19): siRNA sense strand
aaagaaagcuuguuacugu

SEQ ID NO: 627387 - RNA, 19 nt, Homo sapiens
  misc_RNA (1)...(19): siRNA sense strand
ggacuuggaugaauugucu

SEQ ID NO: 627388 - RNA, 19 nt, Homo sapiens
  misc_RNA (1)...(19): siRNA sense strand
caacuuaucaagcauguuu

SEQ ID NO: 627389 - RNA, 19 nt, Homo sapiens
  misc_RNA (1)...(19): siRNA sense strand
gaacaucgucugcuucaug

SEQ ID NO: 627390 - RNA, 19 nt, Homo sapiens
  misc_RNA (1)...(19): siRNA sense strand
ggaaauguucacuuugaua

SEQ ID NO: 627391 - RNA, 19 nt, Homo sapiens
  misc_RNA (1)...(19): siRNA sense strand
gaccagaucaaguucuuua

SEQ ID NO: 627392 - RNA, 19 nt, Homo sapiens
  misc_RNA (1)...(19): siRNA sense strand
ccucggaaauguucacuuu

SEQ ID NO: 627393 - RNA, 19 nt, Homo sapiens
  misc_RNA (1)...(19): siRNA sense strand
gcaaauaucaaugguguga

SEQ ID NO: 627394 - RNA, 19 nt, Homo sapiens
  misc_RNA (1)...(19): siRNA sense strand
cagcagcaauggcaauuug

SEQ ID NO: 627395 - RNA, 19 nt, Homo sapiens
  misc_RNA (1)...(19): siRNA sense strand
gaaaccugcuaacgauaga

SEQ ID NO: 627396 - RNA, 19 nt, Homo sapiens
  misc_RNA (1)...(19): siRNA sense strand
gaacaaugauucugaaaag

SEQ ID NO: 627397 - RNA, 19 nt, Homo sapiens
  misc_RNA (1)...(19): siRNA sense strand
gaagcaaagcugcagguuu

SEQ ID NO: 627398 - RNA, 19 nt, Homo sapiens
  misc_RNA (1)...(19): siRNA sense strand
gaucaaguucuuuaaguga

SEQ ID NO: 627399 - RNA, 19 nt, Homo sapiens
  misc_RNA (1)...(19): siRNA sense strand
gaugaauugucuuuguuug

SEQ ID NO: 627400 - RNA, 19 nt, Homo sapiens
  misc_RNA (1)...(19): siRNA sense strand
ggugauguccuugcaaaua

SEQ ID NO: 627401 - RNA, 19 nt, Homo sapiens
  misc_RNA (1)...(19): siRNA sense strand
gugauguccuugcaaauau

SEQ ID NO: 627402 - RNA, 19 nt, Homo sapiens
  misc_RNA (1)...(19): siRNA sense strand
gagggcaacuuaucaagca

SEQ ID NO: 627403 - RNA, 19 nt, Homo sapiens
  misc_RNA (1)...(19): siRNA sense strand
ucggaaauguucacuuuga

SEQ ID NO: 627404 - RNA, 19 nt, Homo sapiens
  misc_RNA (1)...(19): siRNA sense strand
ucucaaagaaagcuuguua

SEQ ID NO: 627405 - RNA, 19 nt, Homo sapiens
  misc_RNA (1)...(19): siRNA sense strand
gaaagggaaguguccgaaa

SEQ ID NO: 627406 - RNA, 19 nt, Homo sapiens
  misc_RNA (1)...(19): siRNA sense strand
ggaaucgauuauccaguga

SEQ ID NO: 627407 - RNA, 19 nt, Homo sapiens
  misc_RNA (1)...(19): siRNA sense strand
uagaaggauucaaaugcua

SEQ ID NO: 627408 - RNA, 19 nt, Homo sapiens
  misc_RNA (1)...(19): siRNA sense strand
cagaucaaguucuuuaagu

SEQ ID NO: 627409 - RNA, 19 nt, Homo sapiens
  misc_RNA (1)...(19): siRNA sense strand
aagcaaagcugcagguuuu

SEQ ID NO: 627410 - RNA, 19 nt, Homo sapiens
  misc_RNA (1)...(19): siRNA sense strand
uacaaaggcuccugcaaca

SEQ ID NO: 627411 - RNA, 19 nt, Homo sapiens
  misc_RNA (1)...(19): siRNA sense strand
ugaauugucuuuguuugga

SEQ ID NO: 627412 - RNA, 19 nt, Homo sapiens
  misc_RNA (1)...(19): siRNA sense strand
ggaugaauugucuuuguuu

SEQ ID NO: 627413 - RNA, 19 nt, Homo sapiens
  misc_RNA (1)...(19): siRNA sense strand
gcaagcuggugauguccuu

SEQ ID NO: 627414 - RNA, 19 nt, Homo sapiens
  misc_RNA (1)...(19): siRNA sense strand
ggaaaccugcuaacgauag

SEQ ID NO: 627415 - RNA, 19 nt, Homo sapiens
  misc_RNA (1)...(19): siRNA sense strand
cgaaagcaacucuugaaau

SEQ ID NO: 627416 - RNA, 19 nt, Homo sapiens
  misc_RNA (1)...(19): siRNA sense strand
ccggaaaccugcuaacgau

SEQ ID NO: 627417 - RNA, 19 nt, Homo sapiens
  misc_RNA (1)...(19): siRNA sense strand
guacagaugaugagugcuu

SEQ ID NO: 627418 - RNA, 19 nt, Homo sapiens
  misc_RNA (1)...(19): siRNA sense strand
ucacugugcuggccugcaa

SEQ ID NO: 627419 - RNA, 19 nt, Homo sapiens
  misc_RNA (1)...(19): siRNA sense strand
caaaggcuccugcaacaca

SEQ ID NO: 627420 - RNA, 19 nt, Homo sapiens
  misc_RNA (1)...(19): siRNA sense strand
gaugaugagugcuuuaucc

SEQ ID NO: 627421 - RNA, 19 nt, Homo sapiens
  misc_RNA (1)...(19): siRNA sense strand
ggaaccggagcaucaguaa

SEQ ID NO: 627422 - RNA, 19 nt, Homo sapiens
  misc_RNA (1)...(19): siRNA sense strand
aaagggaaguguccgaaag

SEQ ID NO: 627423 - RNA, 19 nt, Homo sapiens
  misc_RNA (1)...(19): siRNA sense strand
aaacauggacuuggaugaa

SEQ ID NO: 627424 - RNA, 19 nt, Homo sapiens
  misc_RNA (1)...(19): siRNA sense strand
caaagaaagcuuguuacug

SEQ ID NO: 627425 - RNA, 19 nt, Homo sapiens
  misc_RNA (1)...(19): siRNA sense strand
gcagacgaguacagaugau

SEQ ID NO: 627426 - RNA, 19 nt, Homo sapiens
  misc_RNA (1)...(19): siRNA sense strand
uggaugaauugucuuuguu

SEQ ID NO: 627427 - RNA, 19 nt, Homo sapiens
  misc_RNA (1)...(19): siRNA sense strand
gaaaagaacggagcuugaa

SEQ ID NO: 627428 - RNA, 19 nt, Homo sapiens
  misc_RNA (1)...(19): siRNA sense strand
acacucaccggcagccuua

SEQ ID NO: 627429 - RNA, 19 nt, Homo sapiens
  misc_RNA (1)...(19): siRNA sense strand
cugaggaggucaucuucaa

SEQ ID NO: 627430 - RNA, 19 nt, Homo sapiens
  misc_RNA (1)...(19): siRNA sense strand
ggaccggaaucgauuaucc

SEQ ID NO: 627431 - RNA, 19 nt, Homo sapiens
  misc_RNA (1)...(19): siRNA sense strand
acaggaacaucgucugcuu

SEQ ID NO: 627432 - RNA, 19 nt, Homo sapiens
  misc_RNA (1)...(19): siRNA sense strand
acauggacuuggaugaauu

SEQ ID NO: 627433 - RNA, 19 nt, Homo sapiens
  misc_RNA (1)...(19): siRNA sense strand
ccagugagagcagcuguaa

SEQ ID NO: 627434 - RNA, 19 nt, Homo sapiens
  misc_RNA (1)...(19): siRNA sense strand
acaagucguugaccugauc

SEQ ID NO: 627435 - RNA, 19 nt, Homo sapiens
  misc_RNA (1)...(19): siRNA sense strand
agaucaaguucuuuaagug

SEQ ID NO: 627436 - RNA, 19 nt, Homo sapiens
  misc_RNA (1)...(19): siRNA sense strand
agugagagcagcuguaaga

SEQ ID NO: 627437 - RNA, 19 nt, Homo sapiens
  misc_RNA (1)...(19): siRNA sense strand
gcaauuuggcggacuucug

SEQ ID NO: 627438 - RNA, 19 nt, Homo sapiens
  misc_RNA (1)...(19): siRNA sense strand
ccugcaagcuggugauguc

SEQ ID NO: 627439 - RNA, 19 nt, Homo sapiens
  misc_RNA (1)...(19): siRNA sense strand
ggauccaugucucccuugu

SEQ ID NO: 627440 - RNA, 19 nt, Homo sapiens
  misc_RNA (1)...(19): siRNA sense strand
ggcagacgaguacagauga

SEQ ID NO: 627441 - RNA, 19 nt, Homo sapiens
  misc_RNA (1)...(19): siRNA sense strand
ggccagcguauagcucuua

SEQ ID NO: 627442 - RNA, 19 nt, Homo sapiens
  misc_RNA (1)...(19): siRNA sense strand
cuggugauguccuugcaaa

SEQ ID NO: 627443 - RNA, 19 nt, Homo sapiens
  misc_RNA (1)...(19): siRNA sense strand
ucaaagaaagcuuguuacu

SEQ ID NO: 627444 - RNA, 19 nt, Homo sapiens
  misc_RNA (1)...(19): siRNA sense strand
ggcaacuuaucaagcaugu

SEQ ID NO: 627445 - RNA, 19 nt, Homo sapiens
  misc_RNA (1)...(19): siRNA sense strand
ggaacaaugauucugaaaa

SEQ ID NO: 627446 - RNA, 19 nt, Homo sapiens
  misc_RNA (1)...(19): siRNA sense strand
cggaaauguucacuuugau

SEQ ID NO: 627447 - RNA, 19 nt, Homo sapiens
  misc_RNA (1)...(19): siRNA sense strand
aaucgauuauccagugaga

SEQ ID NO: 627448 - RNA, 19 nt, Homo sapiens
  misc_RNA (1)...(19): siRNA sense strand
ccgaaagcaacucuugaaa

SEQ ID NO: 627449 - RNA, 19 nt, Homo sapiens
  misc_RNA (1)...(19): siRNA sense strand
cagacacgguggcuacucu

SEQ ID NO: 627450 - RNA, 19 nt, Homo sapiens
  misc_RNA (1)...(19): siRNA sense strand
gacgauggacagugaagau

SEQ ID NO: 627451 - RNA, 19 nt, Homo sapiens
  misc_RNA (1)...(19): siRNA sense strand
cagcuugcuuugaccagau

SEQ ID NO: 627452 - RNA, 19 nt, Homo sapiens
  misc_RNA (1)...(19): siRNA sense strand
cuuaauggaacaaugauuc

SEQ ID NO: 627453 - RNA, 19 nt, Homo sapiens
  misc_RNA (1)...(19): siRNA sense strand
uacagaugaugagugcuuu

SEQ ID NO: 627454 - RNA, 19 nt, Homo sapiens
  misc_RNA (1)...(19): siRNA sense strand
agacgaguacagaugauga

SEQ ID NO: 627455 - RNA, 19 nt, Homo sapiens
  misc_RNA (1)...(19): siRNA sense strand
uuggaugaauugucuuugu

SEQ ID NO: 627456 - RNA, 19 nt, Homo sapiens
  misc_RNA (1)...(19): siRNA sense strand
aauggaacaaugauucuga

SEQ ID NO: 627457 - RNA, 19 nt, Homo sapiens
  misc_RNA (1)...(19): siRNA sense strand
auagaaggauucaaaugcu

SEQ ID NO: 627458 - RNA, 19 nt, Homo sapiens
  misc_RNA (1)...(19): siRNA sense strand
ccagaucaaguucuuuaag

SEQ ID NO: 627459 - RNA, 19 nt, Homo sapiens
  misc_RNA (1)...(19): siRNA sense strand
aauagaaggauucaaaugc

SEQ ID NO: 627460 - RNA, 19 nt, Homo sapiens
  misc_RNA (1)...(19): siRNA sense strand
aaccggagcaucaguaaca

SEQ ID NO: 627461 - RNA, 19 nt, Homo sapiens
  misc_RNA (1)...(19): siRNA sense strand
acucuuaauggaacaauga

SEQ ID NO: 627462 - RNA, 19 nt, Homo sapiens
  misc_RNA (1)...(19): siRNA sense strand
cuugugggagggcaacuua

SEQ ID NO: 627463 - RNA, 19 nt, Homo sapiens
  misc_RNA (1)...(19): siRNA sense strand
cagaugaugagugcuuuau

SEQ ID NO: 627464 - RNA, 19 nt, Homo sapiens
  misc_RNA (1)...(19): siRNA sense strand
cggcagacgaguacagaug

SEQ ID NO: 627465 - RNA, 19 nt, Homo sapiens
  misc_RNA (1)...(19): siRNA sense strand
aacauggacuuggaugaau

SEQ ID NO: 627466 - RNA, 19 nt, Homo sapiens
  misc_RNA (1)...(19): siRNA sense strand
gcaguuacaggaacaucgu

SEQ ID NO: 627467 - RNA, 19 nt, Homo sapiens
  misc_RNA (1)...(19): siRNA sense strand
gcaaagcugcagguuuuaa

SEQ ID NO: 627468 - RNA, 19 nt, Homo sapiens
  misc_RNA (1)...(19): siRNA sense strand
aauguucacuuugauaugc

SEQ ID NO: 627469 - RNA, 19 nt, Homo sapiens
  misc_RNA (1)...(19): siRNA sense strand
gggaaguguccgaaagcaa

SEQ ID NO: 627470 - RNA, 19 nt, Homo sapiens
  misc_RNA (1)...(19): siRNA sense strand
gcagcuaauugccccaguu

SEQ ID NO: 627471 - RNA, 19 nt, Homo sapiens
  misc_RNA (1)...(19): siRNA sense strand
cggaaaccugcuaacgaua

SEQ ID NO: 627472 - RNA, 19 nt, Homo sapiens
  misc_RNA (1)...(19): siRNA sense strand
gaggacagcccagcucacu

SEQ ID NO: 627473 - RNA, 19 nt, Homo sapiens
  misc_RNA (1)...(19): siRNA sense strand
aggaggaaccggagcauca

SEQ ID NO: 627474 - RNA, 19 nt, Homo sapiens
  misc_RNA (1)...(19): siRNA sense strand
acagaugaugagugcuuua

SEQ ID NO: 627475 - RNA, 19 nt, Homo sapiens
  misc_RNA (1)...(19): siRNA sense strand
ucauggugaugcagcuaau

SEQ ID NO: 627476 - RNA, 19 nt, Homo sapiens
  misc_RNA (1)...(19): siRNA sense strand
ugauguccuugcaaauauc

SEQ ID NO: 627477 - RNA, 19 nt, Homo sapiens
  misc_RNA (1)...(19): siRNA sense strand
gcccacagcucuucaacaa

SEQ ID NO: 627478 - RNA, 19 nt, Homo sapiens
  misc_RNA (1)...(19): siRNA sense strand
cauggacccugaugacaua

SEQ ID NO: 627479 - RNA, 19 nt, Homo sapiens
  misc_RNA (1)...(19): siRNA sense strand
ccacagcucuucaacaagu

SEQ ID NO: 627480 - RNA, 19 nt, Homo sapiens
  misc_RNA (1)...(19): siRNA sense strand
gagaagagcaggaccuaga

SEQ ID NO: 627481 - RNA, 19 nt, Homo sapiens
  misc_RNA (1)...(19): siRNA sense strand
ggaagacggugacauugca

SEQ ID NO: 627482 - RNA, 19 nt, Homo sapiens
  misc_RNA (1)...(19): siRNA sense strand
ccaggcaggccguuacuua

SEQ ID NO: 627483 - RNA, 19 nt, Homo sapiens
  misc_RNA (1)...(19): siRNA sense strand
gaucaucuuugcuaaggau

SEQ ID NO: 627484 - RNA, 19 nt, Homo sapiens
  misc_RNA (1)...(19): siRNA sense strand
uuccggagcugaagaauga

SEQ ID NO: 627485 - RNA, 19 nt, Homo sapiens
  misc_RNA (1)...(19): siRNA sense strand
ggacgugugccgcugauug

SEQ ID NO: 627486 - RNA, 19 nt, Homo sapiens
  misc_RNA (1)...(19): siRNA sense strand
gcagaugcuggaugacuuu

SEQ ID NO: 627487 - RNA, 19 nt, Homo sapiens
  misc_RNA (1)...(19): siRNA sense strand
ccagagccauuaagagaag

SEQ ID NO: 627488 - RNA, 19 nt, Homo sapiens
  misc_RNA (1)...(19): siRNA sense strand
gaugcuggaugacuuugga

SEQ ID NO: 627489 - RNA, 19 nt, Homo sapiens
  misc_RNA (1)...(19): siRNA sense strand
ccucugagcuaggcuaugu

SEQ ID NO: 627490 - RNA, 19 nt, Homo sapiens
  misc_RNA (1)...(19): siRNA sense strand
agacuacacucccguuugg

SEQ ID NO: 627491 - RNA, 19 nt, Homo sapiens
  misc_RNA (1)...(19): siRNA sense strand
ccaugaucaucuuugcuaa

SEQ ID NO: 627492 - RNA, 19 nt, Homo sapiens
  misc_RNA (1)...(19): siRNA sense strand
ggacccugaugacauacau

SEQ ID NO: 627493 - RNA, 19 nt, Homo sapiens
  misc_RNA (1)...(19): siRNA sense strand
ggaccacaucgcuacauug

SEQ ID NO: 627494 - RNA, 19 nt, Homo sapiens
  misc_RNA (1)...(19): siRNA sense strand
ggcccaagcuggcuaugag

SEQ ID NO: 627495 - RNA, 19 nt, Homo sapiens
  misc_RNA (1)...(19): siRNA sense strand
cagcuucccagagccauua

SEQ ID NO: 627496 - RNA, 19 nt, Homo sapiens
  misc_RNA (1)...(19): siRNA sense strand
ugacauggacccagaacau

SEQ ID NO: 627497 - RNA, 19 nt, Homo sapiens
  misc_RNA (1)...(19): siRNA sense strand
ucagagaccucaggcuagu

SEQ ID NO: 627498 - RNA, 19 nt, Homo sapiens
  misc_RNA (1)...(19): siRNA sense strand
uuaccagaguuuagggaaa

SEQ ID NO: 627499 - RNA, 19 nt, Homo sapiens
  misc_RNA (1)...(19): siRNA sense strand
gcuaggcuauguguuccaa

SEQ ID NO: 627500 - RNA, 19 nt, Homo sapiens
  misc_RNA (1)...(19): siRNA sense strand
ucccagagccauuaagaga

SEQ ID NO: 627501 - RNA, 19 nt, Homo sapiens
  misc_RNA (1)...(19): siRNA sense strand
gauguggccaagcaaguga

SEQ ID NO: 627502 - RNA, 19 nt, Homo sapiens
  misc_RNA (1)...(19): siRNA sense strand
ugagcuaggcuauguguuc

SEQ ID NO: 627503 - RNA, 19 nt, Homo sapiens
  misc_RNA (1)...(19): siRNA sense strand
ccuacgggauccagaagug

SEQ ID NO: 627504 - RNA, 19 nt, Homo sapiens
  misc_RNA (1)...(19): siRNA sense strand
ggccguuacuuaccagagu

SEQ ID NO: 627505 - RNA, 19 nt, Homo sapiens
  misc_RNA (1)...(19): siRNA sense strand
gaggccugcugugaacuga

SEQ ID NO: 627506 - RNA, 19 nt, Homo sapiens
  misc_RNA (1)...(19): siRNA sense strand
gguugggaccucaggguuu

SEQ ID NO: 627507 - RNA, 19 nt, Homo sapiens
  misc_RNA (1)...(19): siRNA sense strand
cccaugaucaucuuugcua

SEQ ID NO: 627508 - RNA, 19 nt, Homo sapiens
  misc_RNA (1)...(19): siRNA sense strand
ggcaguuggugaagcagau

SEQ ID NO: 627509 - RNA, 19 nt, Homo sapiens
  misc_RNA (1)...(19): siRNA sense strand
uggaccacaucgcuacauu

SEQ ID NO: 627510 - RNA, 19 nt, Homo sapiens
  misc_RNA (1)...(19): siRNA sense strand
ggaugacuuuggaccacau

SEQ ID NO: 627511 - RNA, 19 nt, Homo sapiens
  misc_RNA (1)...(19): siRNA sense strand
gccguuacuuaccagaguu

SEQ ID NO: 627512 - RNA, 19 nt, Homo sapiens
  misc_RNA (1)...(19): siRNA sense strand
uaaacacucacgucugcuu

SEQ ID NO: 627513 - RNA, 19 nt, Homo sapiens
  misc_RNA (1)...(19): siRNA sense strand
cagacuacacucccguuug

SEQ ID NO: 627514 - RNA, 19 nt, Homo sapiens
  misc_RNA (1)...(19): siRNA sense strand
aggaggagaucgggcaguu

SEQ ID NO: 627515 - RNA, 19 nt, Homo sapiens
  misc_RNA (1)...(19): siRNA sense strand
gcauugcagcuguuugagu

SEQ ID NO: 627516 - RNA, 19 nt, Homo sapiens
  misc_RNA (1)...(19): siRNA sense strand
ccugaugacauacaugguu

SEQ ID NO: 627517 - RNA, 19 nt, Homo sapiens
  misc_RNA (1)...(19): siRNA sense strand
agaagagcaggaccuagaa

SEQ ID NO: 627518 - RNA, 19 nt, Homo sapiens
  misc_RNA (1)...(19): siRNA sense strand
gaccacaucgcuacauugc

SEQ ID NO: 627519 - RNA, 19 nt, Homo sapiens
  misc_RNA (1)...(19): siRNA sense strand
ccugaggccugcugugaac

SEQ ID NO: 627520 - RNA, 19 nt, Homo sapiens
  misc_RNA (1)...(19): siRNA sense strand
acaaguuugcacugccuua

SEQ ID NO: 627521 - RNA, 19 nt, Homo sapiens
  misc_RNA (1)...(19): siRNA sense strand
gaagagcaggaccuagaac

SEQ ID NO: 627522 - RNA, 19 nt, Homo sapiens
  misc_RNA (1)...(19): siRNA sense strand
ggcaggccguuacuuacca

SEQ ID NO: 627523 - RNA, 19 nt, Homo sapiens
  misc_RNA (1)...(19): siRNA sense strand
ucuccgacauccuuguugu

SEQ ID NO: 627524 - RNA, 19 nt, Homo sapiens
  misc_RNA (1)...(19): siRNA sense strand
ggcuuuauccugacaugga

SEQ ID NO: 627525 - RNA, 19 nt, Homo sapiens
  misc_RNA (1)...(19): siRNA sense strand
gggaagacggugacauugc

SEQ ID NO: 627526 - RNA, 19 nt, Homo sapiens
  misc_RNA (1)...(19): siRNA sense strand
ccauggacccugaugacau

SEQ ID NO: 627527 - RNA, 19 nt, Homo sapiens
  misc_RNA (1)...(19): siRNA sense strand
aggcauugcagcuguuuga

SEQ ID NO: 627528 - RNA, 19 nt, Homo sapiens
  misc_RNA (1)...(19): siRNA sense strand
ccauauaccuuucaaccua

SEQ ID NO: 627529 - RNA, 19 nt, Homo sapiens
  misc_RNA (1)...(19): siRNA sense strand
gacagaacccaaacaaaua

SEQ ID NO: 627530 - RNA, 19 nt, Homo sapiens
  misc_RNA (1)...(19): siRNA sense strand
gaaugacacuuacuuacga

SEQ ID NO: 627531 - RNA, 19 nt, Homo sapiens
  misc_RNA (1)...(19): siRNA sense strand
gaugcaaccucaaccauau

SEQ ID NO: 627532 - RNA, 19 nt, Homo sapiens
  misc_RNA (1)...(19): siRNA sense strand
gaagcucugucaaccauau

SEQ ID NO: 627533 - RNA, 19 nt, Homo sapiens
  misc_RNA (1)...(19): siRNA sense strand
caaguuauuucuacaagga

SEQ ID NO: 627534 - RNA, 19 nt, Homo sapiens
  misc_RNA (1)...(19): siRNA sense strand
acaaauacaucccuaaugg

SEQ ID NO: 627535 - RNA, 19 nt, Homo sapiens
  misc_RNA (1)...(19): siRNA sense strand
gaaccuuuauuguguaagu

SEQ ID NO: 627536 - RNA, 19 nt, Homo sapiens
  misc_RNA (1)...(19): siRNA sense strand
cuaccaaccucuacauuuc

SEQ ID NO: 627537 - RNA, 19 nt, Homo sapiens
  misc_RNA (1)...(19): siRNA sense strand
ggaagaccauggcauagag

SEQ ID NO: 627538 - RNA, 19 nt, Homo sapiens
  misc_RNA (1)...(19): siRNA sense strand
ggaugcaaccucaaccaua

SEQ ID NO: 627539 - RNA, 19 nt, Homo sapiens
  misc_RNA (1)...(19): siRNA sense strand
agacagaacccaaacaaau

SEQ ID NO: 627540 - RNA, 19 nt, Homo sapiens
  misc_RNA (1)...(19): siRNA sense strand
cgaaugaucacucaaacuu

SEQ ID NO: 627541 - RNA, 19 nt, Homo sapiens
  misc_RNA (1)...(19): siRNA sense strand
cauauaccuuucaaccuaa

SEQ ID NO: 627542 - RNA, 19 nt, Homo sapiens
  misc_RNA (1)...(19): siRNA sense strand
caaagcaacaggaacaaga

SEQ ID NO: 627543 - RNA, 19 nt, Homo sapiens
  misc_RNA (1)...(19): siRNA sense strand
cguguuaacucccucaaug

SEQ ID NO: 627544 - RNA, 19 nt, Homo sapiens
  misc_RNA (1)...(19): siRNA sense strand
uauauugcaucuccuguau

SEQ ID NO: 627545 - RNA, 19 nt, Homo sapiens
  misc_RNA (1)...(19): siRNA sense strand
ggacaaguuauuucuacaa

SEQ ID NO: 627546 - RNA, 19 nt, Homo sapiens
  misc_RNA (1)...(19): siRNA sense strand
ggaaaauagucuccacaaa

SEQ ID NO: 627547 - RNA, 19 nt, Homo sapiens
  misc_RNA (1)...(19): siRNA sense strand
gguguuggcuuugcuagga

SEQ ID NO: 627548 - RNA, 19 nt, Homo sapiens
  misc_RNA (1)...(19): siRNA sense strand
cagaaccuuuauuguguaa

SEQ ID NO: 627549 - RNA, 19 nt, Homo sapiens
  misc_RNA (1)...(19): siRNA sense strand
cuacagcccgcaucaauga

SEQ ID NO: 627550 - RNA, 19 nt, Homo sapiens
  misc_RNA (1)...(19): siRNA sense strand
gcaguaauaacaacaguag

SEQ ID NO: 627551 - RNA, 19 nt, Homo sapiens
  misc_RNA (1)...(19): siRNA sense strand
auacaucccuaauggaaga

SEQ ID NO: 627552 - RNA, 19 nt, Homo sapiens
  misc_RNA (1)...(19): siRNA sense strand
cuacgugauuccaguggua

SEQ ID NO: 627553 - RNA, 19 nt, Homo sapiens
  misc_RNA (1)...(19): siRNA sense strand
caaccucaaccauauauuc

SEQ ID NO: 627554 - RNA, 19 nt, Homo sapiens
  misc_RNA (1)...(19): siRNA sense strand
gcuacaaaccgaaugauca

SEQ ID NO: 627555 - RNA, 19 nt, Homo sapiens
  misc_RNA (1)...(19): siRNA sense strand
acagaaccuuuauugugua

SEQ ID NO: 627556 - RNA, 19 nt, Homo sapiens
  misc_RNA (1)...(19): siRNA sense strand
gacaaguuauuucuacaag

SEQ ID NO: 627557 - RNA, 19 nt, Homo sapiens
  misc_RNA (1)...(19): siRNA sense strand
caaaccgaaugaucacuca

SEQ ID NO: 627558 - RNA, 19 nt, Homo sapiens
  misc_RNA (1)...(19): siRNA sense strand
acaaggauacuacgugauu

SEQ ID NO: 627559 - RNA, 19 nt, Homo sapiens
  misc_RNA (1)...(19): siRNA sense strand
gcaaaacgaaccucuauau

SEQ ID NO: 627560 - RNA, 19 nt, Homo sapiens
  misc_RNA (1)...(19): siRNA sense strand
gugaagcucugucaaccau

SEQ ID NO: 627561 - RNA, 19 nt, Homo sapiens
  misc_RNA (1)...(19): siRNA sense strand
ucuauuacacccuauauug

SEQ ID NO: 627562 - RNA, 19 nt, Homo sapiens
  misc_RNA (1)...(19): siRNA sense strand
caaacaaauacaucccuaa

SEQ ID NO: 627563 - RNA, 19 nt, Homo sapiens
  misc_RNA (1)...(19): siRNA sense strand
ccucuacauuucuaauuug

SEQ ID NO: 627564 - RNA, 19 nt, Homo sapiens
  misc_RNA (1)...(19): siRNA sense strand
gaaaauagucuccacaaag

SEQ ID NO: 627565 - RNA, 19 nt, Homo sapiens
  misc_RNA (1)...(19): siRNA sense strand
aaauacaucccuaauggaa

SEQ ID NO: 627566 - RNA, 19 nt, Homo sapiens
  misc_RNA (1)...(19): siRNA sense strand
gagacagaacccaaacaaa

SEQ ID NO: 627567 - RNA, 19 nt, Homo sapiens
  misc_RNA (1)...(19): siRNA sense strand
gaaaauaugcucaaaccau

SEQ ID NO: 627568 - RNA, 19 nt, Homo sapiens
  misc_RNA (1)...(19): siRNA sense strand
ggaggcaaguggucaacag

SEQ ID NO: 627569 - RNA, 19 nt, Homo sapiens
  misc_RNA (1)...(19): siRNA sense strand
uaagacaccaccaggaguu

SEQ ID NO: 627570 - RNA, 19 nt, Homo sapiens
  misc_RNA (1)...(19): siRNA sense strand
gcaccaccagcaguaauaa

SEQ ID NO: 627571 - RNA, 19 nt, Homo sapiens
  misc_RNA (1)...(19): siRNA sense strand
gaacccaaacaaauacauc

SEQ ID NO: 627572 - RNA, 19 nt, Homo sapiens
  misc_RNA (1)...(19): siRNA sense strand
gagcacaccaugucacuac

SEQ ID NO: 627573 - RNA, 19 nt, Homo sapiens
  misc_RNA (1)...(19): siRNA sense strand
caacuacagcugcuauaca

SEQ ID NO: 627574 - RNA, 19 nt, Homo sapiens
  misc_RNA (1)...(19): siRNA sense strand
ggaaugacacuuacuuacg

SEQ ID NO: 627575 - RNA, 19 nt, Homo sapiens
  misc_RNA (1)...(19): siRNA sense strand
gagcaagaacuagaaaaua

SEQ ID NO: 627576 - RNA, 19 nt, Homo sapiens
  misc_RNA (1)...(19): siRNA sense strand
ccuuucaaccuaauaagua

SEQ ID NO: 627577 - RNA, 19 nt, Homo sapiens
  misc_RNA (1)...(19): siRNA sense strand
cuacagcugcuauacagaa

SEQ ID NO: 627578 - RNA, 19 nt, Homo sapiens
  misc_RNA (1)...(19): siRNA sense strand
aggauggaaucaacagaaa

SEQ ID NO: 627579 - RNA, 19 nt, Homo sapiens
  misc_RNA (1)...(19): siRNA sense strand
gaugagcaagaacuagaaa

SEQ ID NO: 627580 - RNA, 19 nt, Homo sapiens
  misc_RNA (1)...(19): siRNA sense strand
gaugggaucagcucagcaa

SEQ ID NO: 627581 - RNA, 19 nt, Homo sapiens
  misc_RNA (1)...(19): siRNA sense strand
ccuaccaaccucuacauuu

SEQ ID NO: 627582 - RNA, 19 nt, Homo sapiens
  misc_RNA (1)...(19): siRNA sense strand
gaaugaucacucaaacuuc

SEQ ID NO: 627583 - RNA, 19 nt, Homo sapiens
  misc_RNA (1)...(19): siRNA sense strand
uagcagcaguagcaacuca

SEQ ID NO: 627584 - RNA, 19 nt, Homo sapiens
  misc_RNA (1)...(19): siRNA sense strand
caaauacaucccuaaugga

SEQ ID NO: 627585 - RNA, 19 nt, Homo sapiens
  misc_RNA (1)...(19): siRNA sense strand
ggaugagcaagaacuagaa

SEQ ID NO: 627586 - RNA, 19 nt, Homo sapiens
  misc_RNA (1)...(19): siRNA sense strand
gauuuuauccuucaccaua

SEQ ID NO: 627587 - RNA, 19 nt, Homo sapiens
  misc_RNA (1)...(19): siRNA sense strand
caaggauacuacgugauuc

SEQ ID NO: 627588 - RNA, 19 nt, Homo sapiens
  misc_RNA (1)...(19): siRNA sense strand
aaugaucacucaaacuucu

SEQ ID NO: 627589 - RNA, 19 nt, Homo sapiens
  misc_RNA (1)...(19): siRNA sense strand
gaagaccauggcauagaga

SEQ ID NO: 627590 - RNA, 19 nt, Homo sapiens
  misc_RNA (1)...(19): siRNA sense strand
ccauuuggacaaguuauuu

SEQ ID NO: 627591 - RNA, 19 nt, Homo sapiens
  misc_RNA (1)...(19): siRNA sense strand
ccucaaccauauauucuac

SEQ ID NO: 627592 - RNA, 19 nt, Homo sapiens
  misc_RNA (1)...(19): siRNA sense strand
uauugcaucuccuguaucu

SEQ ID NO: 627593 - RNA, 19 nt, Homo sapiens
  misc_RNA (1)...(19): siRNA sense strand
cgagacgucuaaugaccau

SEQ ID NO: 627594 - RNA, 19 nt, Homo sapiens
  misc_RNA (1)...(19): siRNA sense strand
aagcuguuauuggucauuu

SEQ ID NO: 627595 - RNA, 19 nt, Homo sapiens
  misc_RNA (1)...(19): siRNA sense strand
cacucaaacuucuauuaca

SEQ ID NO: 627596 - RNA, 19 nt, Homo sapiens
  misc_RNA (1)...(19): siRNA sense strand
gcuggaaugacacuuacuu

SEQ ID NO: 627597 - RNA, 19 nt, Homo sapiens
  misc_RNA (1)...(19): siRNA sense strand
aagcucaaauggcaaagca

SEQ ID NO: 627598 - RNA, 19 nt, Homo sapiens
  misc_RNA (1)...(19): siRNA sense strand
ucacucaaacuucuauuac

SEQ ID NO: 627599 - RNA, 19 nt, Homo sapiens
  misc_RNA (1)...(19): siRNA sense strand
aaaauagucuccacaaagg

SEQ ID NO: 627600 - RNA, 19 nt, Homo sapiens
  misc_RNA (1)...(19): siRNA sense strand
cagcaguaauaacaacagu

SEQ ID NO: 627601 - RNA, 19 nt, Homo sapiens
  misc_RNA (1)...(19): siRNA sense strand
cuccauggaugagcaagaa

SEQ ID NO: 627602 - RNA, 19 nt, Homo sapiens
  misc_RNA (1)...(19): siRNA sense strand
agagacagaacccaaacaa

SEQ ID NO: 627603 - RNA, 19 nt, Homo sapiens
  misc_RNA (1)...(19): siRNA sense strand
uaggauggaaucaacagaa

SEQ ID NO: 627604 - RNA, 19 nt, Homo sapiens
  misc_RNA (1)...(19): siRNA sense strand
ucaaccauaugggaaaaua

SEQ ID NO: 627605 - RNA, 19 nt, Homo sapiens
  misc_RNA (1)...(19): siRNA sense strand
gcaaagcaacaggaacaag

SEQ ID NO: 627606 - RNA, 19 nt, Homo sapiens
  misc_RNA (1)...(19): siRNA sense strand
ggagccuacuugccacagu

SEQ ID NO: 627607 - RNA, 19 nt, Homo sapiens
  misc_RNA (1)...(19): siRNA sense strand
ggaacauacaugccugcaa

SEQ ID NO: 627608 - RNA, 19 nt, Homo sapiens
  misc_RNA (1)...(19): siRNA sense strand
aaaccauuuggacaaguua

SEQ ID NO: 627609 - RNA, 19 nt, Homo sapiens
  misc_RNA (1)...(19): siRNA sense strand
augcaaagguuaugguuuu

SEQ ID NO: 627610 - RNA, 19 nt, Homo sapiens
  misc_RNA (1)...(19): siRNA sense strand
caaaugcaaagguuauggu

SEQ ID NO: 627611 - RNA, 19 nt, Homo sapiens
  misc_RNA (1)...(19): siRNA sense strand
cuauauugcaucuccugua

SEQ ID NO: 627612 - RNA, 19 nt, Homo sapiens
  misc_RNA (1)...(19): siRNA sense strand
cuggaaugacacuuacuua

SEQ ID NO: 627613 - RNA, 19 nt, Homo sapiens
  misc_RNA (1)...(19): siRNA sense strand
gguacaagucgugguguug

SEQ ID NO: 627614 - RNA, 19 nt, Homo sapiens
  misc_RNA (1)...(19): siRNA sense strand
uggcaaagcaacaggaaca

SEQ ID NO: 627615 - RNA, 19 nt, Homo sapiens
  misc_RNA (1)...(19): siRNA sense strand
caaccucuacauuucuaau

SEQ ID NO: 627616 - RNA, 19 nt, Homo sapiens
  misc_RNA (1)...(19): siRNA sense strand
accaaccucuacauuucua

SEQ ID NO: 627617 - RNA, 19 nt, Homo sapiens
  misc_RNA (1)...(19): siRNA sense strand
gcaagaacuagaaaauaug

SEQ ID NO: 627618 - RNA, 19 nt, Homo sapiens
  misc_RNA (1)...(19): siRNA sense strand
ggagcacaccaugucacua

SEQ ID NO: 627619 - RNA, 19 nt, Homo sapiens
  misc_RNA (1)...(19): siRNA sense strand
gcaaccucaaccauauauu

SEQ ID NO: 627620 - RNA, 19 nt, Homo sapiens
  misc_RNA (1)...(19): siRNA sense strand
ccaccagcaguaauaacaa

SEQ ID NO: 627621 - RNA, 19 nt, Homo sapiens
  misc_RNA (1)...(19): siRNA sense strand
gaagcuguuauuggucauu

SEQ ID NO: 627622 - RNA, 19 nt, Homo sapiens
  misc_RNA (1)...(19): siRNA sense strand
cauggaugagcaagaacua

SEQ ID NO: 627623 - RNA, 19 nt, Homo sapiens
  misc_RNA (1)...(19): siRNA sense strand
ucaaccauauauucuacag

SEQ ID NO: 627624 - RNA, 19 nt, Homo sapiens
  misc_RNA (1)...(19): siRNA sense strand
gcuguuauuggucauuuua

SEQ ID NO: 627625 - RNA, 19 nt, Homo sapiens
  misc_RNA (1)...(19): siRNA sense strand
guguaaguuugcugaugga

SEQ ID NO: 627626 - RNA, 19 nt, Homo sapiens
  misc_RNA (1)...(19): siRNA sense strand
cacuacagcccgcaucaau

SEQ ID NO: 627627 - RNA, 19 nt, Homo sapiens
  misc_RNA (1)...(19): siRNA sense strand
caccagcaguaauaacaac

SEQ ID NO: 627628 - RNA, 19 nt, Homo sapiens
  misc_RNA (1)...(19): siRNA sense strand
ccauauaccuuucaaccua

SEQ ID NO: 627629 - RNA, 19 nt, Homo sapiens
  misc_RNA (1)...(19): siRNA sense strand
gacagaacccaaacaaaua

SEQ ID NO: 627630 - RNA, 19 nt, Homo sapiens
  misc_RNA (1)...(19): siRNA sense strand
gaaugacacuuacuuacga

SEQ ID NO: 627631 - RNA, 19 nt, Homo sapiens
  misc_RNA (1)...(19): siRNA sense strand
gaugcaaccucaaccauau

SEQ ID NO: 627632 - RNA, 19 nt, Homo sapiens
  misc_RNA (1)...(19): siRNA sense strand
gaagcucugucaaccauau

SEQ ID NO: 627633 - RNA, 19 nt, Homo sapiens
  misc_RNA (1)...(19): siRNA sense strand
caaguuauuucuacaagga

SEQ ID NO: 627634 - RNA, 19 nt, Homo sapiens
  misc_RNA (1)...(19): siRNA sense strand
acaaauacaucccuaaugg

SEQ ID NO: 627635 - RNA, 19 nt, Homo sapiens
  misc_RNA (1)...(19): siRNA sense strand
gaaccuuuauuguguaagu

SEQ ID NO: 627636 - RNA, 19 nt, Homo sapiens
  misc_RNA (1)...(19): siRNA sense strand
cuaccaaccucuacauuuc

SEQ ID NO: 627637 - RNA, 19 nt, Homo sapiens
  misc_RNA (1)...(19): siRNA sense strand
ggaagaccauggcauagag

SEQ ID NO: 627638 - RNA, 19 nt, Homo sapiens
  misc_RNA (1)...(19): siRNA sense strand
ggaugcaaccucaaccaua

SEQ ID NO: 627639 - RNA, 19 nt, Homo sapiens
  misc_RNA (1)...(19): siRNA sense strand
agacagaacccaaacaaau

SEQ ID NO: 627640 - RNA, 19 nt, Homo sapiens
  misc_RNA (1)...(19): siRNA sense strand
cgaaugaucacucaaacuu

SEQ ID NO: 627641 - RNA, 19 nt, Homo sapiens
  misc_RNA (1)...(19): siRNA sense strand
cauauaccuuucaaccuaa

SEQ ID NO: 627642 - RNA, 19 nt, Homo sapiens
  misc_RNA (1)...(19): siRNA sense strand
caaagcaacaggaacaaga

SEQ ID NO: 627643 - RNA, 19 nt, Homo sapiens
  misc_RNA (1)...(19): siRNA sense strand
cguguuaacucccucaaug

SEQ ID NO: 627644 - RNA, 19 nt, Homo sapiens
  misc_RNA (1)...(19): siRNA sense strand
uauauugcaucuccuguau

SEQ ID NO: 627645 - RNA, 19 nt, Homo sapiens
  misc_RNA (1)...(19): siRNA sense strand
ggacaaguuauuucuacaa

SEQ ID NO: 627646 - RNA, 19 nt, Homo sapiens
  misc_RNA (1)...(19): siRNA sense strand
ggaaaauagucuccacaaa

SEQ ID NO: 627647 - RNA, 19 nt, Homo sapiens
  misc_RNA (1)...(19): siRNA sense strand
gguguuggcuuugcuagga

SEQ ID NO: 627648 - RNA, 19 nt, Homo sapiens
  misc_RNA (1)...(19): siRNA sense strand
cagaaccuuuauuguguaa

SEQ ID NO: 627649 - RNA, 19 nt, Homo sapiens
  misc_RNA (1)...(19): siRNA sense strand
cuacagcccgcaucaauga

SEQ ID NO: 627650 - RNA, 19 nt, Homo sapiens
  misc_RNA (1)...(19): siRNA sense strand
gcaguaauaacaacaguag

SEQ ID NO: 627651 - RNA, 19 nt, Homo sapiens
  misc_RNA (1)...(19): siRNA sense strand
auacaucccuaauggaaga

SEQ ID NO: 627652 - RNA, 19 nt, Homo sapiens
  misc_RNA (1)...(19): siRNA sense strand
cuacgugauuccaguggua

SEQ ID NO: 627653 - RNA, 19 nt, Homo sapiens
  misc_RNA (1)...(19): siRNA sense strand
caaccucaaccauauauuc

SEQ ID NO: 627654 - RNA, 19 nt, Homo sapiens
  misc_RNA (1)...(19): siRNA sense strand
gcuacaaaccgaaugauca

SEQ ID NO: 627655 - RNA, 19 nt, Homo sapiens
  misc_RNA (1)...(19): siRNA sense strand
acagaaccuuuauugugua

SEQ ID NO: 627656 - RNA, 19 nt, Homo sapiens
  misc_RNA (1)...(19): siRNA sense strand
gacaaguuauuucuacaag

SEQ ID NO: 627657 - RNA, 19 nt, Homo sapiens
  misc_RNA (1)...(19): siRNA sense strand
caaaccgaaugaucacuca

SEQ ID NO: 627658 - RNA, 19 nt, Homo sapiens
  misc_RNA (1)...(19): siRNA sense strand
acaaggauacuacgugauu

SEQ ID NO: 627659 - RNA, 19 nt, Homo sapiens
  misc_RNA (1)...(19): siRNA sense strand
gcaaaacgaaccucuauau

SEQ ID NO: 627660 - RNA, 19 nt, Homo sapiens
  misc_RNA (1)...(19): siRNA sense strand
gugaagcucugucaaccau

SEQ ID NO: 627661 - RNA, 19 nt, Homo sapiens
  misc_RNA (1)...(19): siRNA sense strand
ucuauuacacccuauauug

SEQ ID NO: 627662 - RNA, 19 nt, Homo sapiens
  misc_RNA (1)...(19): siRNA sense strand
caaacaaauacaucccuaa

SEQ ID NO: 627663 - RNA, 19 nt, Homo sapiens
  misc_RNA (1)...(19): siRNA sense strand
ccucuacauuucuaauuug

SEQ ID NO: 627664 - RNA, 19 nt, Homo sapiens
  misc_RNA (1)...(19): siRNA sense strand
gaaaauagucuccacaaag

SEQ ID NO: 627665 - RNA, 19 nt, Homo sapiens
  misc_RNA (1)...(19): siRNA sense strand
aaauacaucccuaauggaa

SEQ ID NO: 627666 - RNA, 19 nt, Homo sapiens
  misc_RNA (1)...(19): siRNA sense strand
gagacagaacccaaacaaa

SEQ ID NO: 627667 - RNA, 19 nt, Homo sapiens
  misc_RNA (1)...(19): siRNA sense strand
gaaaauaugcucaaaccau

SEQ ID NO: 627668 - RNA, 19 nt, Homo sapiens
  misc_RNA (1)...(19): siRNA sense strand
ggaggcaaguggucaacag

SEQ ID NO: 627669 - RNA, 19 nt, Homo sapiens
  misc_RNA (1)...(19): siRNA sense strand
uaagacaccaccaggaguu

SEQ ID NO: 627670 - RNA, 19 nt, Homo sapiens
  misc_RNA (1)...(19): siRNA sense strand
gcaccaccagcaguaauaa

SEQ ID NO: 627671 - RNA, 19 nt, Homo sapiens
  misc_RNA (1)...(19): siRNA sense strand
gaacccaaacaaauacauc

SEQ ID NO: 627672 - RNA, 19 nt, Homo sapiens
  misc_RNA (1)...(19): siRNA sense strand
gagcacaccaugucacuac

SEQ ID NO: 627673 - RNA, 19 nt, Homo sapiens
  misc_RNA (1)...(19): siRNA sense strand
caacuacagcugcuauaca

SEQ ID NO: 627674 - RNA, 19 nt, Homo sapiens
  misc_RNA (1)...(19): siRNA sense strand
ggaaugacacuuacuuacg

SEQ ID NO: 627675 - RNA, 19 nt, Homo sapiens
  misc_RNA (1)...(19): siRNA sense strand
gagcaagaacuagaaaaua

SEQ ID NO: 627676 - RNA, 19 nt, Homo sapiens
  misc_RNA (1)...(19): siRNA sense strand
ccuuucaaccuaauaagua

SEQ ID NO: 627677 - RNA, 19 nt, Homo sapiens
  misc_RNA (1)...(19): siRNA sense strand
cuacagcugcuauacagaa

SEQ ID NO: 627678 - RNA, 19 nt, Homo sapiens
  misc_RNA (1)...(19): siRNA sense strand
aggauggaaucaacagaaa

SEQ ID NO: 627679 - RNA, 19 nt, Homo sapiens
  misc_RNA (1)...(19): siRNA sense strand
gaugagcaagaacuagaaa

SEQ ID NO: 627680 - RNA, 19 nt, Homo sapiens
  misc_RNA (1)...(19): siRNA sense strand
gaugggaucagcucagcaa

SEQ ID NO: 627681 - RNA, 19 nt, Homo sapiens
  misc_RNA (1)...(19): siRNA sense strand
ccuaccaaccucuacauuu

SEQ ID NO: 627682 - RNA, 19 nt, Homo sapiens
  misc_RNA (1)...(19): siRNA sense strand
gaaugaucacucaaacuuc

SEQ ID NO: 627683 - RNA, 19 nt, Homo sapiens
  misc_RNA (1)...(19): siRNA sense strand
uagcagcaguagcaacuca

SEQ ID NO: 627684 - RNA, 19 nt, Homo sapiens
  misc_RNA (1)...(19): siRNA sense strand
caaauacaucccuaaugga

SEQ ID NO: 627685 - RNA, 19 nt, Homo sapiens
  misc_RNA (1)...(19): siRNA sense strand
ggaugagcaagaacuagaa

SEQ ID NO: 627686 - RNA, 19 nt, Homo sapiens
  misc_RNA (1)...(19): siRNA sense strand
gauuuuauccuucaccaua

SEQ ID NO: 627687 - RNA, 19 nt, Homo sapiens
  misc_RNA (1)...(19): siRNA sense strand
caaggauacuacgugauuc

SEQ ID NO: 627688 - RNA, 19 nt, Homo sapiens
  misc_RNA (1)...(19): siRNA sense strand
aaugaucacucaaacuucu

SEQ ID NO: 627689 - RNA, 19 nt, Homo sapiens
  misc_RNA (1)...(19): siRNA sense strand
gaagaccauggcauagaga

SEQ ID NO: 627690 - RNA, 19 nt, Homo sapiens
  misc_RNA (1)...(19): siRNA sense strand
ccauuuggacaaguuauuu

SEQ ID NO: 627691 - RNA, 19 nt, Homo sapiens
  misc_RNA (1)...(19): siRNA sense strand
ccucaaccauauauucuac

SEQ ID NO: 627692 - RNA, 19 nt, Homo sapiens
  misc_RNA (1)...(19): siRNA sense strand
uauugcaucuccuguaucu

SEQ ID NO: 627693 - RNA, 19 nt, Homo sapiens
  misc_RNA (1)...(19): siRNA sense strand
cgagacgucuaaugaccau

SEQ ID NO: 627694 - RNA, 19 nt, Homo sapiens
  misc_RNA (1)...(19): siRNA sense strand
aagcuguuauuggucauuu

SEQ ID NO: 627695 - RNA, 19 nt, Homo sapiens
  misc_RNA (1)...(19): siRNA sense strand
cacucaaacuucuauuaca

SEQ ID NO: 627696 - RNA, 19 nt, Homo sapiens
  misc_RNA (1)...(19): siRNA sense strand
gcuggaaugacacuuacuu

SEQ ID NO: 627697 - RNA, 19 nt, Homo sapiens
  misc_RNA (1)...(19): siRNA sense strand
aagcucaaauggcaaagca

SEQ ID NO: 627698 - RNA, 19 nt, Homo sapiens
  misc_RNA (1)...(19): siRNA sense strand
ucacucaaacuucuauuac

SEQ ID NO: 627699 - RNA, 19 nt, Homo sapiens
  misc_RNA (1)...(19): siRNA sense strand
aaaauagucuccacaaagg

SEQ ID NO: 627700 - RNA, 19 nt, Homo sapiens
  misc_RNA (1)...(19): siRNA sense strand
cagcaguaauaacaacagu

SEQ ID NO: 627701 - RNA, 19 nt, Homo sapiens
  misc_RNA (1)...(19): siRNA sense strand
cuccauggaugagcaagaa

SEQ ID NO: 627702 - RNA, 19 nt, Homo sapiens
  misc_RNA (1)...(19): siRNA sense strand
agagacagaacccaaacaa

SEQ ID NO: 627703 - RNA, 19 nt, Homo sapiens
  misc_RNA (1)...(19): siRNA sense strand
uaggauggaaucaacagaa

SEQ ID NO: 627704 - RNA, 19 nt, Homo sapiens
  misc_RNA (1)...(19): siRNA sense strand
ucaaccauaugggaaaaua

SEQ ID NO: 627705 - RNA, 19 nt, Homo sapiens
  misc_RNA (1)...(19): siRNA sense strand
gcaaagcaacaggaacaag

SEQ ID NO: 627706 - RNA, 19 nt, Homo sapiens
  misc_RNA (1)...(19): siRNA sense strand
ggagccuacuugccacagu

SEQ ID NO: 627707 - RNA, 19 nt, Homo sapiens
  misc_RNA (1)...(19): siRNA sense strand
ggaacauacaugccugcaa

SEQ ID NO: 627708 - RNA, 19 nt, Homo sapiens
  misc_RNA (1)...(19): siRNA sense strand
aaaccauuuggacaaguua

SEQ ID NO: 627709 - RNA, 19 nt, Homo sapiens
  misc_RNA (1)...(19): siRNA sense strand
augcaaagguuaugguuuu

SEQ ID NO: 627710 - RNA, 19 nt, Homo sapiens
  misc_RNA (1)...(19): siRNA sense strand
caaaugcaaagguuauggu

SEQ ID NO: 627711 - RNA, 19 nt, Homo sapiens
  misc_RNA (1)...(19): siRNA sense strand
cuauauugcaucuccugua

SEQ ID NO: 627712 - RNA, 19 nt, Homo sapiens
  misc_RNA (1)...(19): siRNA sense strand
cuggaaugacacuuacuua

SEQ ID NO: 627713 - RNA, 19 nt, Homo sapiens
  misc_RNA (1)...(19): siRNA sense strand
gguacaagucgugguguug

SEQ ID NO: 627714 - RNA, 19 nt, Homo sapiens
  misc_RNA (1)...(19): siRNA sense strand
uggcaaagcaacaggaaca

SEQ ID NO: 627715 - RNA, 19 nt, Homo sapiens
  misc_RNA (1)...(19): siRNA sense strand
caaccucuacauuucuaau

SEQ ID NO: 627716 - RNA, 19 nt, Homo sapiens
  misc_RNA (1)...(19): siRNA sense strand
accaaccucuacauuucua

SEQ ID NO: 627717 - RNA, 19 nt, Homo sapiens
  misc_RNA (1)...(19): siRNA sense strand
gcaagaacuagaaaauaug

SEQ ID NO: 627718 - RNA, 19 nt, Homo sapiens
  misc_RNA (1)...(19): siRNA sense strand
ggagcacaccaugucacua

SEQ ID NO: 627719 - RNA, 19 nt, Homo sapiens
  misc_RNA (1)...(19): siRNA sense strand
gcaaccucaaccauauauu

SEQ ID NO: 627720 - RNA, 19 nt, Homo sapiens
  misc_RNA (1)...(19): siRNA sense strand
ccaccagcaguaauaacaa

SEQ ID NO: 627721 - RNA, 19 nt, Homo sapiens
  misc_RNA (1)...(19): siRNA sense strand
gaagcuguuauuggucauu

SEQ ID NO: 627722 - RNA, 19 nt, Homo sapiens
  misc_RNA (1)...(19): siRNA sense strand
cauggaugagcaagaacua

SEQ ID NO: 627723 - RNA, 19 nt, Homo sapiens
  misc_RNA (1)...(19): siRNA sense strand
ucaaccauauauucuacag

SEQ ID NO: 627724 - RNA, 19 nt, Homo sapiens
  misc_RNA (1)...(19): siRNA sense strand
gcuguuauuggucauuuua

SEQ ID NO: 627725 - RNA, 19 nt, Homo sapiens
  misc_RNA (1)...(19): siRNA sense strand
guguaaguuugcugaugga

SEQ ID NO: 627726 - RNA, 19 nt, Homo sapiens
  misc_RNA (1)...(19): siRNA sense strand
cacuacagcccgcaucaau

SEQ ID NO: 627727 - RNA, 19 nt, Homo sapiens
  misc_RNA (1)...(19): siRNA sense strand
caccagcaguaauaacaac

SEQ ID NO: 627728 - RNA, 19 nt, Homo sapiens
  misc_RNA (1)...(19): siRNA sense strand
ccauauaccuuucaaccua

SEQ ID NO: 627729 - RNA, 19 nt, Homo sapiens
  misc_RNA (1)...(19): siRNA sense strand
gacagaacccaaacaaaua

SEQ ID NO: 627730 - RNA, 19 nt, Homo sapiens
  misc_RNA (1)...(19): siRNA sense strand
gaaugacacuuacuuacga

SEQ ID NO: 627731 - RNA, 19 nt, Homo sapiens
  misc_RNA (1)...(19): siRNA sense strand
gaugcaaccucaaccauau

SEQ ID NO: 627732 - RNA, 19 nt, Homo sapiens
  misc_RNA (1)...(19): siRNA sense strand
gaagcucugucaaccauau

SEQ ID NO: 627733 - RNA, 19 nt, Homo sapiens
  misc_RNA (1)...(19): siRNA sense strand
caaguuauuucuacaagga

SEQ ID NO: 627734 - RNA, 19 nt, Homo sapiens
  misc_RNA (1)...(19): siRNA sense strand
acaaauacaucccuaaugg

SEQ ID NO: 627735 - RNA, 19 nt, Homo sapiens
  misc_RNA (1)...(19): siRNA sense strand
gaaccuuuauuguguaagu

SEQ ID NO: 627736 - RNA, 19 nt, Homo sapiens
  misc_RNA (1)...(19): siRNA sense strand
cuaccaaccucuacauuuc

SEQ ID NO: 627737 - RNA, 19 nt, Homo sapiens
  misc_RNA (1)...(19): siRNA sense strand
ggaagaccauggcauagag

SEQ ID NO: 627738 - RNA, 19 nt, Homo sapiens
  misc_RNA (1)...(19): siRNA sense strand
ggaugcaaccucaaccaua

SEQ ID NO: 627739 - RNA, 19 nt, Homo sapiens
  misc_RNA (1)...(19): siRNA sense strand
agacagaacccaaacaaau

SEQ ID NO: 627740 - RNA, 19 nt, Homo sapiens
  misc_RNA (1)...(19): siRNA sense strand
cgaaugaucacucaaacuu

SEQ ID NO: 627741 - RNA, 19 nt, Homo sapiens
  misc_RNA (1)...(19): siRNA sense strand
cauauaccuuucaaccuaa

SEQ ID NO: 627742 - RNA, 19 nt, Homo sapiens
  misc_RNA (1)...(19): siRNA sense strand
caaagcaacaggaacaaga

SEQ ID NO: 627743 - RNA, 19 nt, Homo sapiens
  misc_RNA (1)...(19): siRNA sense strand
cguguuaacucccucaaug

SEQ ID NO: 627744 - RNA, 19 nt, Homo sapiens
  misc_RNA (1)...(19): siRNA sense strand
uauauugcaucuccuguau

SEQ ID NO: 627745 - RNA, 19 nt, Homo sapiens
  misc_RNA (1)...(19): siRNA sense strand
ggacaaguuauuucuacaa

SEQ ID NO: 627746 - RNA, 19 nt, Homo sapiens
  misc_RNA (1)...(19): siRNA sense strand
ggaaaauagucuccacaaa

SEQ ID NO: 627747 - RNA, 19 nt, Homo sapiens
  misc_RNA (1)...(19): siRNA sense strand
gguguuggcuuugcuagga

SEQ ID NO: 627748 - RNA, 19 nt, Homo sapiens
  misc_RNA (1)...(19): siRNA sense strand
cagaaccuuuauuguguaa

SEQ ID NO: 627749 - RNA, 19 nt, Homo sapiens
  misc_RNA (1)...(19): siRNA sense strand
cuacagcccgcaucaauga

SEQ ID NO: 627750 - RNA, 19 nt, Homo sapiens
  misc_RNA (1)...(19): siRNA sense strand
gcaguaauaacaacaguag

SEQ ID NO: 627751 - RNA, 19 nt, Homo sapiens
  misc_RNA (1)...(19): siRNA sense strand
auacaucccuaauggaaga

SEQ ID NO: 627752 - RNA, 19 nt, Homo sapiens
  misc_RNA (1)...(19): siRNA sense strand
cuacgugauuccaguggua

SEQ ID NO: 627753 - RNA, 19 nt, Homo sapiens
  misc_RNA (1)...(19): siRNA sense strand
caaccucaaccauauauuc

SEQ ID NO: 627754 - RNA, 19 nt, Homo sapiens
  misc_RNA (1)...(19): siRNA sense strand
gcuacaaaccgaaugauca

SEQ ID NO: 627755 - RNA, 19 nt, Homo sapiens
  misc_RNA (1)...(19): siRNA sense strand
acagaaccuuuauugugua

SEQ ID NO: 627756 - RNA, 19 nt, Homo sapiens
  misc_RNA (1)...(19): siRNA sense strand
gacaaguuauuucuacaag

SEQ ID NO: 627757 - RNA, 19 nt, Homo sapiens
  misc_RNA (1)...(19): siRNA sense strand
caaaccgaaugaucacuca

SEQ ID NO: 627758 - RNA, 19 nt, Homo sapiens
  misc_RNA (1)...(19): siRNA sense strand
acaaggauacuacgugauu

SEQ ID NO: 627759 - RNA, 19 nt, Homo sapiens
  misc_RNA (1)...(19): siRNA sense strand
gcaaaacgaaccucuauau

SEQ ID NO: 627760 - RNA, 19 nt, Homo sapiens
  misc_RNA (1)...(19): siRNA sense strand
gugaagcucugucaaccau

SEQ ID NO: 627761 - RNA, 19 nt, Homo sapiens
  misc_RNA (1)...(19): siRNA sense strand
ucuauuacacccuauauug

SEQ ID NO: 627762 - RNA, 19 nt, Homo sapiens
  misc_RNA (1)...(19): siRNA sense strand
caaacaaauacaucccuaa

SEQ ID NO: 627763 - RNA, 19 nt, Homo sapiens
  misc_RNA (1)...(19): siRNA sense strand
ccucuacauuucuaauuug

SEQ ID NO: 627764 - RNA, 19 nt, Homo sapiens
  misc_RNA (1)...(19): siRNA sense strand
gaaaauagucuccacaaag

SEQ ID NO: 627765 - RNA, 19 nt, Homo sapiens
  misc_RNA (1)...(19): siRNA sense strand
aaauacaucccuaauggaa

SEQ ID NO: 627766 - RNA, 19 nt, Homo sapiens
  misc_RNA (1)...(19): siRNA sense strand
gagacagaacccaaacaaa

SEQ ID NO: 627767 - RNA, 19 nt, Homo sapiens
  misc_RNA (1)...(19): siRNA sense strand
gaaaauaugcucaaaccau

SEQ ID NO: 627768 - RNA, 19 nt, Homo sapiens
  misc_RNA (1)...(19): siRNA sense strand
ggaggcaaguggucaacag

SEQ ID NO: 627769 - RNA, 19 nt, Homo sapiens
  misc_RNA (1)...(19): siRNA sense strand
uaagacaccaccaggaguu

SEQ ID NO: 627770 - RNA, 19 nt, Homo sapiens
  misc_RNA (1)...(19): siRNA sense strand
gcaccaccagcaguaauaa

SEQ ID NO: 627771 - RNA, 19 nt, Homo sapiens
  misc_RNA (1)...(19): siRNA sense strand
gaacccaaacaaauacauc

SEQ ID NO: 627772 - RNA, 19 nt, Homo sapiens
  misc_RNA (1)...(19): siRNA sense strand
gagcacaccaugucacuac

SEQ ID NO: 627773 - RNA, 19 nt, Homo sapiens
  misc_RNA (1)...(19): siRNA sense strand
caacuacagcugcuauaca

SEQ ID NO: 627774 - RNA, 19 nt, Homo sapiens
  misc_RNA (1)...(19): siRNA sense strand
ggaaugacacuuacuuacg

SEQ ID NO: 627775 - RNA, 19 nt, Homo sapiens
  misc_RNA (1)...(19): siRNA sense strand
gagcaagaacuagaaaaua

SEQ ID NO: 627776 - RNA, 19 nt, Homo sapiens
  misc_RNA (1)...(19): siRNA sense strand
ccuuucaaccuaauaagua

SEQ ID NO: 627777 - RNA, 19 nt, Homo sapiens
  misc_RNA (1)...(19): siRNA sense strand
cuacagcugcuauacagaa

SEQ ID NO: 627778 - RNA, 19 nt, Homo sapiens
  misc_RNA (1)...(19): siRNA sense strand
aggauggaaucaacagaaa

SEQ ID NO: 627779 - RNA, 19 nt, Homo sapiens
  misc_RNA (1)...(19): siRNA sense strand
gaugagcaagaacuagaaa

SEQ ID NO: 627780 - RNA, 19 nt, Homo sapiens
  misc_RNA (1)...(19): siRNA sense strand
gaugggaucagcucagcaa

SEQ ID NO: 627781 - RNA, 19 nt, Homo sapiens
  misc_RNA (1)...(19): siRNA sense strand
ccuaccaaccucuacauuu

SEQ ID NO: 627782 - RNA, 19 nt, Homo sapiens
  misc_RNA (1)...(19): siRNA sense strand
gaaugaucacucaaacuuc

SEQ ID NO: 627783 - RNA, 19 nt, Homo sapiens
  misc_RNA (1)...(19): siRNA sense strand
uagcagcaguagcaacuca

SEQ ID NO: 627784 - RNA, 19 nt, Homo sapiens
  misc_RNA (1)...(19): siRNA sense strand
caaauacaucccuaaugga

SEQ ID NO: 627785 - RNA, 19 nt, Homo sapiens
  misc_RNA (1)...(19): siRNA sense strand
ggaugagcaagaacuagaa

SEQ ID NO: 627786 - RNA, 19 nt, Homo sapiens
  misc_RNA (1)...(19): siRNA sense strand
gauuuuauccuucaccaua

SEQ ID NO: 627787 - RNA, 19 nt, Homo sapiens
  misc_RNA (1)...(19): siRNA sense strand
caaggauacuacgugauuc

SEQ ID NO: 627788 - RNA, 19 nt, Homo sapiens
  misc_RNA (1)...(19): siRNA sense strand
aaugaucacucaaacuucu

SEQ ID NO: 627789 - RNA, 19 nt, Homo sapiens
  misc_RNA (1)...(19): siRNA sense strand
gaagaccauggcauagaga

SEQ ID NO: 627790 - RNA, 19 nt, Homo sapiens
  misc_RNA (1)...(19): siRNA sense strand
ccauuuggacaaguuauuu

SEQ ID NO: 627791 - RNA, 19 nt, Homo sapiens
  misc_RNA (1)...(19): siRNA sense strand
ccucaaccauauauucuac

SEQ ID NO: 627792 - RNA, 19 nt, Homo sapiens
  misc_RNA (1)...(19): siRNA sense strand
uauugcaucuccuguaucu

SEQ ID NO: 627793 - RNA, 19 nt, Homo sapiens
  misc_RNA (1)...(19): siRNA sense strand
cgagacgucuaaugaccau

SEQ ID NO: 627794 - RNA, 19 nt, Homo sapiens
  misc_RNA (1)...(19): siRNA sense strand
aagcuguuauuggucauuu

SEQ ID NO: 627795 - RNA, 19 nt, Homo sapiens
  misc_RNA (1)...(19): siRNA sense strand
cacucaaacuucuauuaca

SEQ ID NO: 627796 - RNA, 19 nt, Homo sapiens
  misc_RNA (1)...(19): siRNA sense strand
gcuggaaugacacuuacuu

SEQ ID NO: 627797 - RNA, 19 nt, Homo sapiens
  misc_RNA (1)...(19): siRNA sense strand
aagcucaaauggcaaagca

SEQ ID NO: 627798 - RNA, 19 nt, Homo sapiens
  misc_RNA (1)...(19): siRNA sense strand
ucacucaaacuucuauuac

SEQ ID NO: 627799 - RNA, 19 nt, Homo sapiens
  misc_RNA (1)...(19): siRNA sense strand
aaaauagucuccacaaagg

SEQ ID NO: 627800 - RNA, 19 nt, Homo sapiens
  misc_RNA (1)...(19): siRNA sense strand
cagcaguaauaacaacagu

SEQ ID NO: 627801 - RNA, 19 nt, Homo sapiens
  misc_RNA (1)...(19): siRNA sense strand
cuccauggaugagcaagaa

SEQ ID NO: 627802 - RNA, 19 nt, Homo sapiens
  misc_RNA (1)...(19): siRNA sense strand
agagacagaacccaaacaa

SEQ ID NO: 627803 - RNA, 19 nt, Homo sapiens
  misc_RNA (1)...(19): siRNA sense strand
uaggauggaaucaacagaa

SEQ ID NO: 627804 - RNA, 19 nt, Homo sapiens
  misc_RNA (1)...(19): siRNA sense strand
ucaaccauaugggaaaaua

SEQ ID NO: 627805 - RNA, 19 nt, Homo sapiens
  misc_RNA (1)...(19): siRNA sense strand
gcaaagcaacaggaacaag

SEQ ID NO: 627806 - RNA, 19 nt, Homo sapiens
  misc_RNA (1)...(19): siRNA sense strand
ggagccuacuugccacagu

SEQ ID NO: 627807 - RNA, 19 nt, Homo sapiens
  misc_RNA (1)...(19): siRNA sense strand
ggaacauacaugccugcaa

SEQ ID NO: 627808 - RNA, 19 nt, Homo sapiens
  misc_RNA (1)...(19): siRNA sense strand
aaaccauuuggacaaguua

SEQ ID NO: 627809 - RNA, 19 nt, Homo sapiens
  misc_RNA (1)...(19): siRNA sense strand
augcaaagguuaugguuuu

SEQ ID NO: 627810 - RNA, 19 nt, Homo sapiens
  misc_RNA (1)...(19): siRNA sense strand
caaaugcaaagguuauggu

SEQ ID NO: 627811 - RNA, 19 nt, Homo sapiens
  misc_RNA (1)...(19): siRNA sense strand
cuauauugcaucuccugua

SEQ ID NO: 627812 - RNA, 19 nt, Homo sapiens
  misc_RNA (1)...(19): siRNA sense strand
cuggaaugacacuuacuua

SEQ ID NO: 627813 - RNA, 19 nt, Homo sapiens
  misc_RNA (1)...(19): siRNA sense strand
gguacaagucgugguguug

SEQ ID NO: 627814 - RNA, 19 nt, Homo sapiens
  misc_RNA (1)...(19): siRNA sense strand
uggcaaagcaacaggaaca

SEQ ID NO: 627815 - RNA, 19 nt, Homo sapiens
  misc_RNA (1)...(19): siRNA sense strand
caaccucuacauuucuaau

SEQ ID NO: 627816 - RNA, 19 nt, Homo sapiens
  misc_RNA (1)...(19): siRNA sense strand
accaaccucuacauuucua

SEQ ID NO: 627817 - RNA, 19 nt, Homo sapiens
  misc_RNA (1)...(19): siRNA sense strand
gcaagaacuagaaaauaug

SEQ ID NO: 627818 - RNA, 19 nt, Homo sapiens
  misc_RNA (1)...(19): siRNA sense strand
ggagcacaccaugucacua

SEQ ID NO: 627819 - RNA, 19 nt, Homo sapiens
  misc_RNA (1)...(19): siRNA sense strand
gcaaccucaaccauauauu

SEQ ID NO: 627820 - RNA, 19 nt, Homo sapiens
  misc_RNA (1)...(19): siRNA sense strand
ccaccagcaguaauaacaa

SEQ ID NO: 627821 - RNA, 19 nt, Homo sapiens
  misc_RNA (1)...(19): siRNA sense strand
gaagcuguuauuggucauu

SEQ ID NO: 627822 - RNA, 19 nt, Homo sapiens
  misc_RNA (1)...(19): siRNA sense strand
cauggaugagcaagaacua

SEQ ID NO: 627823 - RNA, 19 nt, Homo sapiens
  misc_RNA (1)...(19): siRNA sense strand
ucaaccauauauucuacag

SEQ ID NO: 627824 - RNA, 19 nt, Homo sapiens
  misc_RNA (1)...(19): siRNA sense strand
gcuguuauuggucauuuua

SEQ ID NO: 627825 - RNA, 19 nt, Homo sapiens
  misc_RNA (1)...(19): siRNA sense strand
guguaaguuugcugaugga

SEQ ID NO: 627826 - RNA, 19 nt, Homo sapiens
  misc_RNA (1)...(19): siRNA sense strand
cacuacagcccgcaucaau

SEQ ID NO: 627827 - RNA, 19 nt, Homo sapiens
  misc_RNA (1)...(19): siRNA sense strand
caccagcaguaauaacaac

SEQ ID NO: 627828 - RNA, 19 nt, Homo sapiens
  misc_RNA (1)...(19): siRNA sense strand
ccauauaccuuucaaccua

SEQ ID NO: 627829 - RNA, 19 nt, Homo sapiens
  misc_RNA (1)...(19): siRNA sense strand
gacagaacccaaacaaaua

SEQ ID NO: 627830 - RNA, 19 nt, Homo sapiens
  misc_RNA (1)...(19): siRNA sense strand
gaaugacacuuacuuacga

SEQ ID NO: 627831 - RNA, 19 nt, Homo sapiens
  misc_RNA (1)...(19): siRNA sense strand
gaugcaaccucaaccauau

SEQ ID NO: 627832 - RNA, 19 nt, Homo sapiens
  misc_RNA (1)...(19): siRNA sense strand
gaagcucugucaaccauau

SEQ ID NO: 627833 - RNA, 19 nt, Homo sapiens
  misc_RNA (1)...(19): siRNA sense strand
caaguuauuucuacaagga

SEQ ID NO: 627834 - RNA, 19 nt, Homo sapiens
  misc_RNA (1)...(19): siRNA sense strand
acaaauacaucccuaaugg

SEQ ID NO: 627835 - RNA, 19 nt, Homo sapiens
  misc_RNA (1)...(19): siRNA sense strand
gaaccuuuauuguguaagu

SEQ ID NO: 627836 - RNA, 19 nt, Homo sapiens
  misc_RNA (1)...(19): siRNA sense strand
cuaccaaccucuacauuuc

SEQ ID NO: 627837 - RNA, 19 nt, Homo sapiens
  misc_RNA (1)...(19): siRNA sense strand
ggaagaccauggcauagag

SEQ ID NO: 627838 - RNA, 19 nt, Homo sapiens
  misc_RNA (1)...(19): siRNA sense strand
ggaugcaaccucaaccaua

SEQ ID NO: 627839 - RNA, 19 nt, Homo sapiens
  misc_RNA (1)...(19): siRNA sense strand
agacagaacccaaacaaau

SEQ ID NO: 627840 - RNA, 19 nt, Homo sapiens
  misc_RNA (1)...(19): siRNA sense strand
cgaaugaucacucaaacuu

SEQ ID NO: 627841 - RNA, 19 nt, Homo sapiens
  misc_RNA (1)...(19): siRNA sense strand
cauauaccuuucaaccuaa

SEQ ID NO: 627842 - RNA, 19 nt, Homo sapiens
  misc_RNA (1)...(19): siRNA sense strand
caaagcaacaggaacaaga

SEQ ID NO: 627843 - RNA, 19 nt, Homo sapiens
  misc_RNA (1)...(19): siRNA sense strand
cguguuaacucccucaaug

SEQ ID NO: 627844 - RNA, 19 nt, Homo sapiens
  misc_RNA (1)...(19): siRNA sense strand
uauauugcaucuccuguau

SEQ ID NO: 627845 - RNA, 19 nt, Homo sapiens
  misc_RNA (1)...(19): siRNA sense strand
ggacaaguuauuucuacaa

SEQ ID NO: 627846 - RNA, 19 nt, Homo sapiens
  misc_RNA (1)...(19): siRNA sense strand
ggaaaauagucuccacaaa

SEQ ID NO: 627847 - RNA, 19 nt, Homo sapiens
  misc_RNA (1)...(19): siRNA sense strand
gguguuggcuuugcuagga

SEQ ID NO: 627848 - RNA, 19 nt, Homo sapiens
  misc_RNA (1)...(19): siRNA sense strand
cagaaccuuuauuguguaa

SEQ ID NO: 627849 - RNA, 19 nt, Homo sapiens
  misc_RNA (1)...(19): siRNA sense strand
cuacagcccgcaucaauga

SEQ ID NO: 627850 - RNA, 19 nt, Homo sapiens
  misc_RNA (1)...(19): siRNA sense strand
gcaguaauaacaacaguag

SEQ ID NO: 627851 - RNA, 19 nt, Homo sapiens
  misc_RNA (1)...(19): siRNA sense strand
auacaucccuaauggaaga

SEQ ID NO: 627852 - RNA, 19 nt, Homo sapiens
  misc_RNA (1)...(19): siRNA sense strand
cuacgugauuccaguggua

SEQ ID NO: 627853 - RNA, 19 nt, Homo sapiens
  misc_RNA (1)...(19): siRNA sense strand
caaccucaaccauauauuc

SEQ ID NO: 627854 - RNA, 19 nt, Homo sapiens
  misc_RNA (1)...(19): siRNA sense strand
gcuacaaaccgaaugauca

SEQ ID NO: 627855 - RNA, 19 nt, Homo sapiens
  misc_RNA (1)...(19): siRNA sense strand
acagaaccuuuauugugua

SEQ ID NO: 627856 - RNA, 19 nt, Homo sapiens
  misc_RNA (1)...(19): siRNA sense strand
gacaaguuauuucuacaag

SEQ ID NO: 627857 - RNA, 19 nt, Homo sapiens
  misc_RNA (1)...(19): siRNA sense strand
caaaccgaaugaucacuca

SEQ ID NO: 627858 - RNA, 19 nt, Homo sapiens
  misc_RNA (1)...(19): siRNA sense strand
acaaggauacuacgugauu

SEQ ID NO: 627859 - RNA, 19 nt, Homo sapiens
  misc_RNA (1)...(19): siRNA sense strand
gcaaaacgaaccucuauau

SEQ ID NO: 627860 - RNA, 19 nt, Homo sapiens
  misc_RNA (1)...(19): siRNA sense strand
gugaagcucugucaaccau

SEQ ID NO: 627861 - RNA, 19 nt, Homo sapiens
  misc_RNA (1)...(19): siRNA sense strand
ucuauuacacccuauauug

SEQ ID NO: 627862 - RNA, 19 nt, Homo sapiens
  misc_RNA (1)...(19): siRNA sense strand
caaacaaauacaucccuaa

SEQ ID NO: 627863 - RNA, 19 nt, Homo sapiens
  misc_RNA (1)...(19): siRNA sense strand
ccucuacauuucuaauuug

SEQ ID NO: 627864 - RNA, 19 nt, Homo sapiens
  misc_RNA (1)...(19): siRNA sense strand
gaaaauagucuccacaaag

SEQ ID NO: 627865 - RNA, 19 nt, Homo sapiens
  misc_RNA (1)...(19): siRNA sense strand
aaauacaucccuaauggaa

SEQ ID NO: 627866 - RNA, 19 nt, Homo sapiens
  misc_RNA (1)...(19): siRNA sense strand
gagacagaacccaaacaaa

SEQ ID NO: 627867 - RNA, 19 nt, Homo sapiens
  misc_RNA (1)...(19): siRNA sense strand
gaaaauaugcucaaaccau

SEQ ID NO: 627868 - RNA, 19 nt, Homo sapiens
  misc_RNA (1)...(19): siRNA sense strand
ggaggcaaguggucaacag

SEQ ID NO: 627869 - RNA, 19 nt, Homo sapiens
  misc_RNA (1)...(19): siRNA sense strand
uaagacaccaccaggaguu

SEQ ID NO: 627870 - RNA, 19 nt, Homo sapiens
  misc_RNA (1)...(19): siRNA sense strand
gcaccaccagcaguaauaa

SEQ ID NO: 627871 - RNA, 19 nt, Homo sapiens
  misc_RNA (1)...(19): siRNA sense strand
gaacccaaacaaauacauc

SEQ ID NO: 627872 - RNA, 19 nt, Homo sapiens
  misc_RNA (1)...(19): siRNA sense strand
gagcacaccaugucacuac

SEQ ID NO: 627873 - RNA, 19 nt, Homo sapiens
  misc_RNA (1)...(19): siRNA sense strand
caacuacagcugcuauaca

SEQ ID NO: 627874 - RNA, 19 nt, Homo sapiens
  misc_RNA (1)...(19): siRNA sense strand
ggaaugacacuuacuuacg

SEQ ID NO: 627875 - RNA, 19 nt, Homo sapiens
  misc_RNA (1)...(19): siRNA sense strand
gagcaagaacuagaaaaua

SEQ ID NO: 627876 - RNA, 19 nt, Homo sapiens
  misc_RNA (1)...(19): siRNA sense strand
ccuuucaaccuaauaagua

SEQ ID NO: 627877 - RNA, 19 nt, Homo sapiens
  misc_RNA (1)...(19): siRNA sense strand
cuacagcugcuauacagaa

SEQ ID NO: 627878 - RNA, 19 nt, Homo sapiens
  misc_RNA (1)...(19): siRNA sense strand
aggauggaaucaacagaaa

SEQ ID NO: 627879 - RNA, 19 nt, Homo sapiens
  misc_RNA (1)...(19): siRNA sense strand
gaugagcaagaacuagaaa

SEQ ID NO: 627880 - RNA, 19 nt, Homo sapiens
  misc_RNA (1)...(19): siRNA sense strand
gaugggaucagcucagcaa

SEQ ID NO: 627881 - RNA, 19 nt, Homo sapiens
  misc_RNA (1)...(19): siRNA sense strand
ccuaccaaccucuacauuu

SEQ ID NO: 627882 - RNA, 19 nt, Homo sapiens
  misc_RNA (1)...(19): siRNA sense strand
gaaugaucacucaaacuuc

SEQ ID NO: 627883 - RNA, 19 nt, Homo sapiens
  misc_RNA (1)...(19): siRNA sense strand
uagcagcaguagcaacuca

SEQ ID NO: 627884 - RNA, 19 nt, Homo sapiens
  misc_RNA (1)...(19): siRNA sense strand
caaauacaucccuaaugga

SEQ ID NO: 627885 - RNA, 19 nt, Homo sapiens
  misc_RNA (1)...(19): siRNA sense strand
ggaugagcaagaacuagaa

SEQ ID NO: 627886 - RNA, 19 nt, Homo sapiens
  misc_RNA (1)...(19): siRNA sense strand
gauuuuauccuucaccaua

SEQ ID NO: 627887 - RNA, 19 nt, Homo sapiens
  misc_RNA (1)...(19): siRNA sense strand
caaggauacuacgugauuc

SEQ ID NO: 627888 - RNA, 19 nt, Homo sapiens
  misc_RNA (1)...(19): siRNA sense strand
aaugaucacucaaacuucu

SEQ ID NO: 627889 - RNA, 19 nt, Homo sapiens
  misc_RNA (1)...(19): siRNA sense strand
gaagaccauggcauagaga

SEQ ID NO: 627890 - RNA, 19 nt, Homo sapiens
  misc_RNA (1)...(19): siRNA sense strand
ccauuuggacaaguuauuu

SEQ ID NO: 627891 - RNA, 19 nt, Homo sapiens
  misc_RNA (1)...(19): siRNA sense strand
ccucaaccauauauucuac

SEQ ID NO: 627892 - RNA, 19 nt, Homo sapiens
  misc_RNA (1)...(19): siRNA sense strand
uauugcaucuccuguaucu

SEQ ID NO: 627893 - RNA, 19 nt, Homo sapiens
  misc_RNA (1)...(19): siRNA sense strand
cgagacgucuaaugaccau

SEQ ID NO: 627894 - RNA, 19 nt, Homo sapiens
  misc_RNA (1)...(19): siRNA sense strand
aagcuguuauuggucauuu

SEQ ID NO: 627895 - RNA, 19 nt, Homo sapiens
  misc_RNA (1)...(19): siRNA sense strand
cacucaaacuucuauuaca

SEQ ID NO: 627896 - RNA, 19 nt, Homo sapiens
  misc_RNA (1)...(19): siRNA sense strand
gcuggaaugacacuuacuu

SEQ ID NO: 627897 - RNA, 19 nt, Homo sapiens
  misc_RNA (1)...(19): siRNA sense strand
aagcucaaauggcaaagca

SEQ ID NO: 627898 - RNA, 19 nt, Homo sapiens
  misc_RNA (1)...(19): siRNA sense strand
ucacucaaacuucuauuac

SEQ ID NO: 627899 - RNA, 19 nt, Homo sapiens
  misc_RNA (1)...(19): siRNA sense strand
aaaauagucuccacaaagg

SEQ ID NO: 627900 - RNA, 19 nt, Homo sapiens
  misc_RNA (1)...(19): siRNA sense strand
cagcaguaauaacaacagu

SEQ ID NO: 627901 - RNA, 19 nt, Homo sapiens
  misc_RNA (1)...(19): siRNA sense strand
cuccauggaugagcaagaa

SEQ ID NO: 627902 - RNA, 19 nt, Homo sapiens
  misc_RNA (1)...(19): siRNA sense strand
agagacagaacccaaacaa

SEQ ID NO: 627903 - RNA, 19 nt, Homo sapiens
  misc_RNA (1)...(19): siRNA sense strand
uaggauggaaucaacagaa

SEQ ID NO: 627904 - RNA, 19 nt, Homo sapiens
  misc_RNA (1)...(19): siRNA sense strand
ucaaccauaugggaaaaua

SEQ ID NO: 627905 - RNA, 19 nt, Homo sapiens
  misc_RNA (1)...(19): siRNA sense strand
gcaaagcaacaggaacaag

SEQ ID NO: 627906 - RNA, 19 nt, Homo sapiens
  misc_RNA (1)...(19): siRNA sense strand
ggagccuacuugccacagu

SEQ ID NO: 627907 - RNA, 19 nt, Homo sapiens
  misc_RNA (1)...(19): siRNA sense strand
ggaacauacaugccugcaa

SEQ ID NO: 627908 - RNA, 19 nt, Homo sapiens
  misc_RNA (1)...(19): siRNA sense strand
aaaccauuuggacaaguua

SEQ ID NO: 627909 - RNA, 19 nt, Homo sapiens
  misc_RNA (1)...(19): siRNA sense strand
augcaaagguuaugguuuu

SEQ ID NO: 627910 - RNA, 19 nt, Homo sapiens
  misc_RNA (1)...(19): siRNA sense strand
caaaugcaaagguuauggu

SEQ ID NO: 627911 - RNA, 19 nt, Homo sapiens
  misc_RNA (1)...(19): siRNA sense strand
cuauauugcaucuccugua

SEQ ID NO: 627912 - RNA, 19 nt, Homo sapiens
  misc_RNA (1)...(19): siRNA sense strand
cuggaaugacacuuacuua

SEQ ID NO: 627913 - RNA, 19 nt, Homo sapiens
  misc_RNA (1)...(19): siRNA sense strand
gguacaagucgugguguug

SEQ ID NO: 627914 - RNA, 19 nt, Homo sapiens
  misc_RNA (1)...(19): siRNA sense strand
uggcaaagcaacaggaaca

SEQ ID NO: 627915 - RNA, 19 nt, Homo sapiens
  misc_RNA (1)...(19): siRNA sense strand
caaccucuacauuucuaau

SEQ ID NO: 627916 - RNA, 19 nt, Homo sapiens
  misc_RNA (1)...(19): siRNA sense strand
accaaccucuacauuucua

SEQ ID NO: 627917 - RNA, 19 nt, Homo sapiens
  misc_RNA (1)...(19): siRNA sense strand
gcaagaacuagaaaauaug

SEQ ID NO: 627918 - RNA, 19 nt, Homo sapiens
  misc_RNA (1)...(19): siRNA sense strand
ggagcacaccaugucacua

SEQ ID NO: 627919 - RNA, 19 nt, Homo sapiens
  misc_RNA (1)...(19): siRNA sense strand
gcaaccucaaccauauauu

SEQ ID NO: 627920 - RNA, 19 nt, Homo sapiens
  misc_RNA (1)...(19): siRNA sense strand
ccaccagcaguaauaacaa

SEQ ID NO: 627921 - RNA, 19 nt, Homo sapiens
  misc_RNA (1)...(19): siRNA sense strand
gaagcuguuauuggucauu

SEQ ID NO: 627922 - RNA, 19 nt, Homo sapiens
  misc_RNA (1)...(19): siRNA sense strand
cauggaugagcaagaacua

SEQ ID NO: 627923 - RNA, 19 nt, Homo sapiens
  misc_RNA (1)...(19): siRNA sense strand
ucaaccauauauucuacag

SEQ ID NO: 627924 - RNA, 19 nt, Homo sapiens
  misc_RNA (1)...(19): siRNA sense strand
gcuguuauuggucauuuua

SEQ ID NO: 627925 - RNA, 19 nt, Homo sapiens
  misc_RNA (1)...(19): siRNA sense strand
guguaaguuugcugaugga

SEQ ID NO: 627926 - RNA, 19 nt, Homo sapiens
  misc_RNA (1)...(19): siRNA sense strand
cacuacagcccgcaucaau

SEQ ID NO: 627927 - RNA, 19 nt, Homo sapiens
  misc_RNA (1)...(19): siRNA sense strand
caccagcaguaauaacaac

SEQ ID NO: 627928 - RNA, 19 nt, Homo sapiens
  misc_RNA (1)...(19): siRNA sense strand
ccauauaccuuucaaccua

SEQ ID NO: 627929 - RNA, 19 nt, Homo sapiens
  misc_RNA (1)...(19): siRNA sense strand
gacagaacccaaacaaaua

SEQ ID NO: 627930 - RNA, 19 nt, Homo sapiens
  misc_RNA (1)...(19): siRNA sense strand
gaaugacacuuacuuacga

SEQ ID NO: 627931 - RNA, 19 nt, Homo sapiens
  misc_RNA (1)...(19): siRNA sense strand
gaugcaaccucaaccauau

SEQ ID NO: 627932 - RNA, 19 nt, Homo sapiens
  misc_RNA (1)...(19): siRNA sense strand
gaagcucugucaaccauau

SEQ ID NO: 627933 - RNA, 19 nt, Homo sapiens
  misc_RNA (1)...(19): siRNA sense strand
caaguuauuucuacaagga

SEQ ID NO: 627934 - RNA, 19 nt, Homo sapiens
  misc_RNA (1)...(19): siRNA sense strand
acaaauacaucccuaaugg

SEQ ID NO: 627935 - RNA, 19 nt, Homo sapiens
  misc_RNA (1)...(19): siRNA sense strand
gaaccuuuauuguguaagu

SEQ ID NO: 627936 - RNA, 19 nt, Homo sapiens
  misc_RNA (1)...(19): siRNA sense strand
cuaccaaccucuacauuuc

SEQ ID NO: 627937 - RNA, 19 nt, Homo sapiens
  misc_RNA (1)...(19): siRNA sense strand
ggaagaccauggcauagag

SEQ ID NO: 627938 - RNA, 19 nt, Homo sapiens
  misc_RNA (1)...(19): siRNA sense strand
ggaugcaaccucaaccaua

SEQ ID NO: 627939 - RNA, 19 nt, Homo sapiens
  misc_RNA (1)...(19): siRNA sense strand
agacagaacccaaacaaau

SEQ ID NO: 627940 - RNA, 19 nt, Homo sapiens
  misc_RNA (1)...(19): siRNA sense strand
cgaaugaucacucaaacuu

SEQ ID NO: 627941 - RNA, 19 nt, Homo sapiens
  misc_RNA (1)...(19): siRNA sense strand
cauauaccuuucaaccuaa

SEQ ID NO: 627942 - RNA, 19 nt, Homo sapiens
  misc_RNA (1)...(19): siRNA sense strand
caaagcaacaggaacaaga

SEQ ID NO: 627943 - RNA, 19 nt, Homo sapiens
  misc_RNA (1)...(19): siRNA sense strand
cguguuaacucccucaaug

SEQ ID NO: 627944 - RNA, 19 nt, Homo sapiens
  misc_RNA (1)...(19): siRNA sense strand
uauauugcaucuccuguau

SEQ ID NO: 627945 - RNA, 19 nt, Homo sapiens
  misc_RNA (1)...(19): siRNA sense strand
ggacaaguuauuucuacaa

SEQ ID NO: 627946 - RNA, 19 nt, Homo sapiens
  misc_RNA (1)...(19): siRNA sense strand
ggaaaauagucuccacaaa

SEQ ID NO: 627947 - RNA, 19 nt, Homo sapiens
  misc_RNA (1)...(19): siRNA sense strand
gguguuggcuuugcuagga

SEQ ID NO: 627948 - RNA, 19 nt, Homo sapiens
  misc_RNA (1)...(19): siRNA sense strand
cagaaccuuuauuguguaa

SEQ ID NO: 627949 - RNA, 19 nt, Homo sapiens
  misc_RNA (1)...(19): siRNA sense strand
cuacagcccgcaucaauga

SEQ ID NO: 627950 - RNA, 19 nt, Homo sapiens
  misc_RNA (1)...(19): siRNA sense strand
gcaguaauaacaacaguag

SEQ ID NO: 627951 - RNA, 19 nt, Homo sapiens
  misc_RNA (1)...(19): siRNA sense strand
auacaucccuaauggaaga

SEQ ID NO: 627952 - RNA, 19 nt, Homo sapiens
  misc_RNA (1)...(19): siRNA sense strand
cuacgugauuccaguggua

SEQ ID NO: 627953 - RNA, 19 nt, Homo sapiens
  misc_RNA (1)...(19): siRNA sense strand
caaccucaaccauauauuc

SEQ ID NO: 627954 - RNA, 19 nt, Homo sapiens
  misc_RNA (1)...(19): siRNA sense strand
gcuacaaaccgaaugauca

SEQ ID NO: 627955 - RNA, 19 nt, Homo sapiens
  misc_RNA (1)...(19): siRNA sense strand
acagaaccuuuauugugua

SEQ ID NO: 627956 - RNA, 19 nt, Homo sapiens
  misc_RNA (1)...(19): siRNA sense strand
gacaaguuauuucuacaag

SEQ ID NO: 627957 - RNA, 19 nt, Homo sapiens
  misc_RNA (1)...(19): siRNA sense strand
caaaccgaaugaucacuca

SEQ ID NO: 627958 - RNA, 19 nt, Homo sapiens
  misc_RNA (1)...(19): siRNA sense strand
acaaggauacuacgugauu

SEQ ID NO: 627959 - RNA, 19 nt, Homo sapiens
  misc_RNA (1)...(19): siRNA sense strand
gcaaaacgaaccucuauau

SEQ ID NO: 627960 - RNA, 19 nt, Homo sapiens
  misc_RNA (1)...(19): siRNA sense strand
gugaagcucugucaaccau

SEQ ID NO: 627961 - RNA, 19 nt, Homo sapiens
  misc_RNA (1)...(19): siRNA sense strand
ucuauuacacccuauauug

SEQ ID NO: 627962 - RNA, 19 nt, Homo sapiens
  misc_RNA (1)...(19): siRNA sense strand
caaacaaauacaucccuaa

SEQ ID NO: 627963 - RNA, 19 nt, Homo sapiens
  misc_RNA (1)...(19): siRNA sense strand
ccucuacauuucuaauuug

SEQ ID NO: 627964 - RNA, 19 nt, Homo sapiens
  misc_RNA (1)...(19): siRNA sense strand
gaaaauagucuccacaaag

SEQ ID NO: 627965 - RNA, 19 nt, Homo sapiens
  misc_RNA (1)...(19): siRNA sense strand
aaauacaucccuaauggaa

SEQ ID NO: 627966 - RNA, 19 nt, Homo sapiens
  misc_RNA (1)...(19): siRNA sense strand
gagacagaacccaaacaaa

SEQ ID NO: 627967 - RNA, 19 nt, Homo sapiens
  misc_RNA (1)...(19): siRNA sense strand
gaaaauaugcucaaaccau

SEQ ID NO: 627968 - RNA, 19 nt, Homo sapiens
  misc_RNA (1)...(19): siRNA sense strand
ggaggcaaguggucaacag

SEQ ID NO: 627969 - RNA, 19 nt, Homo sapiens
  misc_RNA (1)...(19): siRNA sense strand
uaagacaccaccaggaguu

SEQ ID NO: 627970 - RNA, 19 nt, Homo sapiens
  misc_RNA (1)...(19): siRNA sense strand
gcaccaccagcaguaauaa

SEQ ID NO: 627971 - RNA, 19 nt, Homo sapiens
  misc_RNA (1)...(19): siRNA sense strand
gaacccaaacaaauacauc

SEQ ID NO: 627972 - RNA, 19 nt, Homo sapiens
  misc_RNA (1)...(19): siRNA sense strand
gagcacaccaugucacuac

SEQ ID NO: 627973 - RNA, 19 nt, Homo sapiens
  misc_RNA (1)...(19): siRNA sense strand
caacuacagcugcuauaca

SEQ ID NO: 627974 - RNA, 19 nt, Homo sapiens
  misc_RNA (1)...(19): siRNA sense strand
ggaaugacacuuacuuacg

SEQ ID NO: 627975 - RNA, 19 nt, Homo sapiens
  misc_RNA (1)...(19): siRNA sense strand
gagcaagaacuagaaaaua

SEQ ID NO: 627976 - RNA, 19 nt, Homo sapiens
  misc_RNA (1)...(19): siRNA sense strand
ccuuucaaccuaauaagua

SEQ ID NO: 627977 - RNA, 19 nt, Homo sapiens
  misc_RNA (1)...(19): siRNA sense strand
cuacagcugcuauacagaa

SEQ ID NO: 627978 - RNA, 19 nt, Homo sapiens
  misc_RNA (1)...(19): siRNA sense strand
aggauggaaucaacagaaa

SEQ ID NO: 627979 - RNA, 19 nt, Homo sapiens
  misc_RNA (1)...(19): siRNA sense strand
gaugagcaagaacuagaaa

SEQ ID NO: 627980 - RNA, 19 nt, Homo sapiens
  misc_RNA (1)...(19): siRNA sense strand
gaugggaucagcucagcaa

SEQ ID NO: 627981 - RNA, 19 nt, Homo sapiens
  misc_RNA (1)...(19): siRNA sense strand
ccuaccaaccucuacauuu

SEQ ID NO: 627982 - RNA, 19 nt, Homo sapiens
  misc_RNA (1)...(19): siRNA sense strand
gaaugaucacucaaacuuc

SEQ ID NO: 627983 - RNA, 19 nt, Homo sapiens
  misc_RNA (1)...(19): siRNA sense strand
uagcagcaguagcaacuca

SEQ ID NO: 627984 - RNA, 19 nt, Homo sapiens
  misc_RNA (1)...(19): siRNA sense strand
caaauacaucccuaaugga

SEQ ID NO: 627985 - RNA, 19 nt, Homo sapiens
  misc_RNA (1)...(19): siRNA sense strand
ggaugagcaagaacuagaa

SEQ ID NO: 627986 - RNA, 19 nt, Homo sapiens
  misc_RNA (1)...(19): siRNA sense strand
gauuuuauccuucaccaua

SEQ ID NO: 627987 - RNA, 19 nt, Homo sapiens
  misc_RNA (1)...(19): siRNA sense strand
caaggauacuacgugauuc

SEQ ID NO: 627988 - RNA, 19 nt, Homo sapiens
  misc_RNA (1)...(19): siRNA sense strand
aaugaucacucaaacuucu

SEQ ID NO: 627989 - RNA, 19 nt, Homo sapiens
  misc_RNA (1)...(19): siRNA sense strand
gaagaccauggcauagaga

SEQ ID NO: 627990 - RNA, 19 nt, Homo sapiens
  misc_RNA (1)...(19): siRNA sense strand
ccauuuggacaaguuauuu

SEQ ID NO: 627991 - RNA, 19 nt, Homo sapiens
  misc_RNA (1)...(19): siRNA sense strand
ccucaaccauauauucuac

SEQ ID NO: 627992 - RNA, 19 nt, Homo sapiens
  misc_RNA (1)...(19): siRNA sense strand
uauugcaucuccuguaucu

SEQ ID NO: 627993 - RNA, 19 nt, Homo sapiens
  misc_RNA (1)...(19): siRNA sense strand
cgagacgucuaaugaccau

SEQ ID NO: 627994 - RNA, 19 nt, Homo sapiens
  misc_RNA (1)...(19): siRNA sense strand
aagcuguuauuggucauuu

SEQ ID NO: 627995 - RNA, 19 nt, Homo sapiens
  misc_RNA (1)...(19): siRNA sense strand
cacucaaacuucuauuaca

SEQ ID NO: 627996 - RNA, 19 nt, Homo sapiens
  misc_RNA (1)...(19): siRNA sense strand
gcuggaaugacacuuacuu

SEQ ID NO: 627997 - RNA, 19 nt, Homo sapiens
  misc_RNA (1)...(19): siRNA sense strand
aagcucaaauggcaaagca

SEQ ID NO: 627998 - RNA, 19 nt, Homo sapiens
  misc_RNA (1)...(19): siRNA sense strand
ucacucaaacuucuauuac

SEQ ID NO: 627999 - RNA, 19 nt, Homo sapiens
  misc_RNA (1)...(19): siRNA sense strand
aaaauagucuccacaaagg

SEQ ID NO: 628000 - RNA, 19 nt, Homo sapiens
  misc_RNA (1)...(19): siRNA sense strand
cagcaguaauaacaacagu

SEQ ID NO: 628001 - RNA, 19 nt, Homo sapiens
  misc_RNA (1)...(19): siRNA sense strand
cuccauggaugagcaagaa

SEQ ID NO: 628002 - RNA, 19 nt, Homo sapiens
  misc_RNA (1)...(19): siRNA sense strand
agagacagaacccaaacaa

SEQ ID NO: 628003 - RNA, 19 nt, Homo sapiens
  misc_RNA (1)...(19): siRNA sense strand
uaggauggaaucaacagaa

SEQ ID NO: 628004 - RNA, 19 nt, Homo sapiens
  misc_RNA (1)...(19): siRNA sense strand
ucaaccauaugggaaaaua

SEQ ID NO: 628005 - RNA, 19 nt, Homo sapiens
  misc_RNA (1)...(19): siRNA sense strand
gcaaagcaacaggaacaag

SEQ ID NO: 628006 - RNA, 19 nt, Homo sapiens
  misc_RNA (1)...(19): siRNA sense strand
ggagccuacuugccacagu

SEQ ID NO: 628007 - RNA, 19 nt, Homo sapiens
  misc_RNA (1)...(19): siRNA sense strand
ggaacauacaugccugcaa

SEQ ID NO: 628008 - RNA, 19 nt, Homo sapiens
  misc_RNA (1)...(19): siRNA sense strand
aaaccauuuggacaaguua

SEQ ID NO: 628009 - RNA, 19 nt, Homo sapiens
  misc_RNA (1)...(19): siRNA sense strand
augcaaagguuaugguuuu

SEQ ID NO: 628010 - RNA, 19 nt, Homo sapiens
  misc_RNA (1)...(19): siRNA sense strand
caaaugcaaagguuauggu

SEQ ID NO: 628011 - RNA, 19 nt, Homo sapiens
  misc_RNA (1)...(19): siRNA sense strand
cuauauugcaucuccugua

SEQ ID NO: 628012 - RNA, 19 nt, Homo sapiens
  misc_RNA (1)...(19): siRNA sense strand
cuggaaugacacuuacuua

SEQ ID NO: 628013 - RNA, 19 nt, Homo sapiens
  misc_RNA (1)...(19): siRNA sense strand
gguacaagucgugguguug

SEQ ID NO: 628014 - RNA, 19 nt, Homo sapiens
  misc_RNA (1)...(19): siRNA sense strand
uggcaaagcaacaggaaca

SEQ ID NO: 628015 - RNA, 19 nt, Homo sapiens
  misc_RNA (1)...(19): siRNA sense strand
caaccucuacauuucuaau

SEQ ID NO: 628016 - RNA, 19 nt, Homo sapiens
  misc_RNA (1)...(19): siRNA sense strand
accaaccucuacauuucua

SEQ ID NO: 628017 - RNA, 19 nt, Homo sapiens
  misc_RNA (1)...(19): siRNA sense strand
gcaagaacuagaaaauaug

SEQ ID NO: 628018 - RNA, 19 nt, Homo sapiens
  misc_RNA (1)...(19): siRNA sense strand
ggagcacaccaugucacua

SEQ ID NO: 628019 - RNA, 19 nt, Homo sapiens
  misc_RNA (1)...(19): siRNA sense strand
gcaaccucaaccauauauu

SEQ ID NO: 628020 - RNA, 19 nt, Homo sapiens
  misc_RNA (1)...(19): siRNA sense strand
ccaccagcaguaauaacaa

SEQ ID NO: 628021 - RNA, 19 nt, Homo sapiens
  misc_RNA (1)...(19): siRNA sense strand
gaagcuguuauuggucauu

SEQ ID NO: 628022 - RNA, 19 nt, Homo sapiens
  misc_RNA (1)...(19): siRNA sense strand
cauggaugagcaagaacua

SEQ ID NO: 628023 - RNA, 19 nt, Homo sapiens
  misc_RNA (1)...(19): siRNA sense strand
ucaaccauauauucuacag

SEQ ID NO: 628024 - RNA, 19 nt, Homo sapiens
  misc_RNA (1)...(19): siRNA sense strand
gcuguuauuggucauuuua

SEQ ID NO: 628025 - RNA, 19 nt, Homo sapiens
  misc_RNA (1)...(19): siRNA sense strand
guguaaguuugcugaugga

SEQ ID NO: 628026 - RNA, 19 nt, Homo sapiens
  misc_RNA (1)...(19): siRNA sense strand
cacuacagcccgcaucaau

SEQ ID NO: 628027 - RNA, 19 nt, Homo sapiens
  misc_RNA (1)...(19): siRNA sense strand
caccagcaguaauaacaac

SEQ ID NO: 628028 - RNA, 19 nt, Homo sapiens
  misc_RNA (1)...(19): siRNA sense strand
ccauauaccuuucaaccua

SEQ ID NO: 628029 - RNA, 19 nt, Homo sapiens
  misc_RNA (1)...(19): siRNA sense strand
gacagaacccaaacaaaua

SEQ ID NO: 628030 - RNA, 19 nt, Homo sapiens
  misc_RNA (1)...(19): siRNA sense strand
gaaugacacuuacuuacga

SEQ ID NO: 628031 - RNA, 19 nt, Homo sapiens
  misc_RNA (1)...(19): siRNA sense strand
gaugcaaccucaaccauau

SEQ ID NO: 628032 - RNA, 19 nt, Homo sapiens
  misc_RNA (1)...(19): siRNA sense strand
gaagcucugucaaccauau

SEQ ID NO: 628033 - RNA, 19 nt, Homo sapiens
  misc_RNA (1)...(19): siRNA sense strand
caaguuauuucuacaagga

SEQ ID NO: 628034 - RNA, 19 nt, Homo sapiens
  misc_RNA (1)...(19): siRNA sense strand
acaaauacaucccuaaugg

SEQ ID NO: 628035 - RNA, 19 nt, Homo sapiens
  misc_RNA (1)...(19): siRNA sense strand
gaaccuuuauuguguaagu

SEQ ID NO: 628036 - RNA, 19 nt, Homo sapiens
  misc_RNA (1)...(19): siRNA sense strand
cuaccaaccucuacauuuc

SEQ ID NO: 628037 - RNA, 19 nt, Homo sapiens
  misc_RNA (1)...(19): siRNA sense strand
ggaagaccauggcauagag

SEQ ID NO: 628038 - RNA, 19 nt, Homo sapiens
  misc_RNA (1)...(19): siRNA sense strand
ggaugcaaccucaaccaua

SEQ ID NO: 628039 - RNA, 19 nt, Homo sapiens
  misc_RNA (1)...(19): siRNA sense strand
agacagaacccaaacaaau

SEQ ID NO: 628040 - RNA, 19 nt, Homo sapiens
  misc_RNA (1)...(19): siRNA sense strand
cgaaugaucacucaaacuu

SEQ ID NO: 628041 - RNA, 19 nt, Homo sapiens
  misc_RNA (1)...(19): siRNA sense strand
cauauaccuuucaaccuaa

SEQ ID NO: 628042 - RNA, 19 nt, Homo sapiens
  misc_RNA (1)...(19): siRNA sense strand
caaagcaacaggaacaaga

SEQ ID NO: 628043 - RNA, 19 nt, Homo sapiens
  misc_RNA (1)...(19): siRNA sense strand
cguguuaacucccucaaug

SEQ ID NO: 628044 - RNA, 19 nt, Homo sapiens
  misc_RNA (1)...(19): siRNA sense strand
uauauugcaucuccuguau

SEQ ID NO: 628045 - RNA, 19 nt, Homo sapiens
  misc_RNA (1)...(19): siRNA sense strand
ggacaaguuauuucuacaa

SEQ ID NO: 628046 - RNA, 19 nt, Homo sapiens
  misc_RNA (1)...(19): siRNA sense strand
ggaaaauagucuccacaaa

SEQ ID NO: 628047 - RNA, 19 nt, Homo sapiens
  misc_RNA (1)...(19): siRNA sense strand
gguguuggcuuugcuagga

SEQ ID NO: 628048 - RNA, 19 nt, Homo sapiens
  misc_RNA (1)...(19): siRNA sense strand
cagaaccuuuauuguguaa

SEQ ID NO: 628049 - RNA, 19 nt, Homo sapiens
  misc_RNA (1)...(19): siRNA sense strand
cuacagcccgcaucaauga

SEQ ID NO: 628050 - RNA, 19 nt, Homo sapiens
  misc_RNA (1)...(19): siRNA sense strand
gcaguaauaacaacaguag

SEQ ID NO: 628051 - RNA, 19 nt, Homo sapiens
  misc_RNA (1)...(19): siRNA sense strand
auacaucccuaauggaaga

SEQ ID NO: 628052 - RNA, 19 nt, Homo sapiens
  misc_RNA (1)...(19): siRNA sense strand
cuacgugauuccaguggua

SEQ ID NO: 628053 - RNA, 19 nt, Homo sapiens
  misc_RNA (1)...(19): siRNA sense strand
caaccucaaccauauauuc

SEQ ID NO: 628054 - RNA, 19 nt, Homo sapiens
  misc_RNA (1)...(19): siRNA sense strand
gcuacaaaccgaaugauca

SEQ ID NO: 628055 - RNA, 19 nt, Homo sapiens
  misc_RNA (1)...(19): siRNA sense strand
acagaaccuuuauugugua

SEQ ID NO: 628056 - RNA, 19 nt, Homo sapiens
  misc_RNA (1)...(19): siRNA sense strand
gacaaguuauuucuacaag

SEQ ID NO: 628057 - RNA, 19 nt, Homo sapiens
  misc_RNA (1)...(19): siRNA sense strand
caaaccgaaugaucacuca

SEQ ID NO: 628058 - RNA, 19 nt, Homo sapiens
  misc_RNA (1)...(19): siRNA sense strand
acaaggauacuacgugauu

SEQ ID NO: 628059 - RNA, 19 nt, Homo sapiens
  misc_RNA (1)...(19): siRNA sense strand
gcaaaacgaaccucuauau

SEQ ID NO: 628060 - RNA, 19 nt, Homo sapiens
  misc_RNA (1)...(19): siRNA sense strand
gugaagcucugucaaccau

SEQ ID NO: 628061 - RNA, 19 nt, Homo sapiens
  misc_RNA (1)...(19): siRNA sense strand
ucuauuacacccuauauug

SEQ ID NO: 628062 - RNA, 19 nt, Homo sapiens
  misc_RNA (1)...(19): siRNA sense strand
caaacaaauacaucccuaa

SEQ ID NO: 628063 - RNA, 19 nt, Homo sapiens
  misc_RNA (1)...(19): siRNA sense strand
ccucuacauuucuaauuug

SEQ ID NO: 628064 - RNA, 19 nt, Homo sapiens
  misc_RNA (1)...(19): siRNA sense strand
gaaaauagucuccacaaag

SEQ ID NO: 628065 - RNA, 19 nt, Homo sapiens
  misc_RNA (1)...(19): siRNA sense strand
aaauacaucccuaauggaa

SEQ ID NO: 628066 - RNA, 19 nt, Homo sapiens
  misc_RNA (1)...(19): siRNA sense strand
gagacagaacccaaacaaa

SEQ ID NO: 628067 - RNA, 19 nt, Homo sapiens
  misc_RNA (1)...(19): siRNA sense strand
gaaaauaugcucaaaccau

SEQ ID NO: 628068 - RNA, 19 nt, Homo sapiens
  misc_RNA (1)...(19): siRNA sense strand
ggaggcaaguggucaacag

SEQ ID NO: 628069 - RNA, 19 nt, Homo sapiens
  misc_RNA (1)...(19): siRNA sense strand
uaagacaccaccaggaguu

SEQ ID NO: 628070 - RNA, 19 nt, Homo sapiens
  misc_RNA (1)...(19): siRNA sense strand
gcaccaccagcaguaauaa

SEQ ID NO: 628071 - RNA, 19 nt, Homo sapiens
  misc_RNA (1)...(19): siRNA sense strand
gaacccaaacaaauacauc

SEQ ID NO: 628072 - RNA, 19 nt, Homo sapiens
  misc_RNA (1)...(19): siRNA sense strand
gagcacaccaugucacuac

SEQ ID NO: 628073 - RNA, 19 nt, Homo sapiens
  misc_RNA (1)...(19): siRNA sense strand
caacuacagcugcuauaca

SEQ ID NO: 628074 - RNA, 19 nt, Homo sapiens
  misc_RNA (1)...(19): siRNA sense strand
ggaaugacacuuacuuacg

SEQ ID NO: 628075 - RNA, 19 nt, Homo sapiens
  misc_RNA (1)...(19): siRNA sense strand
gagcaagaacuagaaaaua

SEQ ID NO: 628076 - RNA, 19 nt, Homo sapiens
  misc_RNA (1)...(19): siRNA sense strand
ccuuucaaccuaauaagua

SEQ ID NO: 628077 - RNA, 19 nt, Homo sapiens
  misc_RNA (1)...(19): siRNA sense strand
cuacagcugcuauacagaa

SEQ ID NO: 628078 - RNA, 19 nt, Homo sapiens
  misc_RNA (1)...(19): siRNA sense strand
aggauggaaucaacagaaa

SEQ ID NO: 628079 - RNA, 19 nt, Homo sapiens
  misc_RNA (1)...(19): siRNA sense strand
gaugagcaagaacuagaaa

SEQ ID NO: 628080 - RNA, 19 nt, Homo sapiens
  misc_RNA (1)...(19): siRNA sense strand
gaugggaucagcucagcaa

SEQ ID NO: 628081 - RNA, 19 nt, Homo sapiens
  misc_RNA (1)...(19): siRNA sense strand
ccuaccaaccucuacauuu

SEQ ID NO: 628082 - RNA, 19 nt, Homo sapiens
  misc_RNA (1)...(19): siRNA sense strand
gaaugaucacucaaacuuc

SEQ ID NO: 628083 - RNA, 19 nt, Homo sapiens
  misc_RNA (1)...(19): siRNA sense strand
uagcagcaguagcaacuca

SEQ ID NO: 628084 - RNA, 19 nt, Homo sapiens
  misc_RNA (1)...(19): siRNA sense strand
caaauacaucccuaaugga

SEQ ID NO: 628085 - RNA, 19 nt, Homo sapiens
  misc_RNA (1)...(19): siRNA sense strand
ggaugagcaagaacuagaa

SEQ ID NO: 628086 - RNA, 19 nt, Homo sapiens
  misc_RNA (1)...(19): siRNA sense strand
gauuuuauccuucaccaua

SEQ ID NO: 628087 - RNA, 19 nt, Homo sapiens
  misc_RNA (1)...(19): siRNA sense strand
caaggauacuacgugauuc

SEQ ID NO: 628088 - RNA, 19 nt, Homo sapiens
  misc_RNA (1)...(19): siRNA sense strand
aaugaucacucaaacuucu

SEQ ID NO: 628089 - RNA, 19 nt, Homo sapiens
  misc_RNA (1)...(19): siRNA sense strand
gaagaccauggcauagaga

SEQ ID NO: 628090 - RNA, 19 nt, Homo sapiens
  misc_RNA (1)...(19): siRNA sense strand
ccauuuggacaaguuauuu

SEQ ID NO: 628091 - RNA, 19 nt, Homo sapiens
  misc_RNA (1)...(19): siRNA sense strand
ccucaaccauauauucuac

SEQ ID NO: 628092 - RNA, 19 nt, Homo sapiens
  misc_RNA (1)...(19): siRNA sense strand
uauugcaucuccuguaucu

SEQ ID NO: 628093 - RNA, 19 nt, Homo sapiens
  misc_RNA (1)...(19): siRNA sense strand
cgagacgucuaaugaccau

SEQ ID NO: 628094 - RNA, 19 nt, Homo sapiens
  misc_RNA (1)...(19): siRNA sense strand
aagcuguuauuggucauuu

SEQ ID NO: 628095 - RNA, 19 nt, Homo sapiens
  misc_RNA (1)...(19): siRNA sense strand
cacucaaacuucuauuaca

SEQ ID NO: 628096 - RNA, 19 nt, Homo sapiens
  misc_RNA (1)...(19): siRNA sense strand
gcuggaaugacacuuacuu

SEQ ID NO: 628097 - RNA, 19 nt, Homo sapiens
  misc_RNA (1)...(19): siRNA sense strand
aagcucaaauggcaaagca

SEQ ID NO: 628098 - RNA, 19 nt, Homo sapiens
  misc_RNA (1)...(19): siRNA sense strand
ucacucaaacuucuauuac

SEQ ID NO: 628099 - RNA, 19 nt, Homo sapiens
  misc_RNA (1)...(19): siRNA sense strand
aaaauagucuccacaaagg

SEQ ID NO: 628100 - RNA, 19 nt, Homo sapiens
  misc_RNA (1)...(19): siRNA sense strand
cagcaguaauaacaacagu

SEQ ID NO: 628101 - RNA, 19 nt, Homo sapiens
  misc_RNA (1)...(19): siRNA sense strand
cuccauggaugagcaagaa

SEQ ID NO: 628102 - RNA, 19 nt, Homo sapiens
  misc_RNA (1)...(19): siRNA sense strand
agagacagaacccaaacaa

SEQ ID NO: 628103 - RNA, 19 nt, Homo sapiens
  misc_RNA (1)...(19): siRNA sense strand
uaggauggaaucaacagaa

SEQ ID NO: 628104 - RNA, 19 nt, Homo sapiens
  misc_RNA (1)...(19): siRNA sense strand
ucaaccauaugggaaaaua

SEQ ID NO: 628105 - RNA, 19 nt, Homo sapiens
  misc_RNA (1)...(19): siRNA sense strand
gcaaagcaacaggaacaag

SEQ ID NO: 628106 - RNA, 19 nt, Homo sapiens
  misc_RNA (1)...(19): siRNA sense strand
ggagccuacuugccacagu

SEQ ID NO: 628107 - RNA, 19 nt, Homo sapiens
  misc_RNA (1)...(19): siRNA sense strand
ggaacauacaugccugcaa

SEQ ID NO: 628108 - RNA, 19 nt, Homo sapiens
  misc_RNA (1)...(19): siRNA sense strand
aaaccauuuggacaaguua

SEQ ID NO: 628109 - RNA, 19 nt, Homo sapiens
  misc_RNA (1)...(19): siRNA sense strand
augcaaagguuaugguuuu

SEQ ID NO: 628110 - RNA, 19 nt, Homo sapiens
  misc_RNA (1)...(19): siRNA sense strand
caaaugcaaagguuauggu

SEQ ID NO: 628111 - RNA, 19 nt, Homo sapiens
  misc_RNA (1)...(19): siRNA sense strand
cuauauugcaucuccugua

SEQ ID NO: 628112 - RNA, 19 nt, Homo sapiens
  misc_RNA (1)...(19): siRNA sense strand
cuggaaugacacuuacuua

SEQ ID NO: 628113 - RNA, 19 nt, Homo sapiens
  misc_RNA (1)...(19): siRNA sense strand
gguacaagucgugguguug

SEQ ID NO: 628114 - RNA, 19 nt, Homo sapiens
  misc_RNA (1)...(19): siRNA sense strand
uggcaaagcaacaggaaca

SEQ ID NO: 628115 - RNA, 19 nt, Homo sapiens
  misc_RNA (1)...(19): siRNA sense strand
caaccucuacauuucuaau

SEQ ID NO: 628116 - RNA, 19 nt, Homo sapiens
  misc_RNA (1)...(19): siRNA sense strand
accaaccucuacauuucua

SEQ ID NO: 628117 - RNA, 19 nt, Homo sapiens
  misc_RNA (1)...(19): siRNA sense strand
gcaagaacuagaaaauaug

SEQ ID NO: 628118 - RNA, 19 nt, Homo sapiens
  misc_RNA (1)...(19): siRNA sense strand
ggagcacaccaugucacua

SEQ ID NO: 628119 - RNA, 19 nt, Homo sapiens
  misc_RNA (1)...(19): siRNA sense strand
gcaaccucaaccauauauu

SEQ ID NO: 628120 - RNA, 19 nt, Homo sapiens
  misc_RNA (1)...(19): siRNA sense strand
ccaccagcaguaauaacaa

SEQ ID NO: 628121 - RNA, 19 nt, Homo sapiens
  misc_RNA (1)...(19): siRNA sense strand
gaagcuguuauuggucauu

SEQ ID NO: 628122 - RNA, 19 nt, Homo sapiens
  misc_RNA (1)...(19): siRNA sense strand
cauggaugagcaagaacua

SEQ ID NO: 628123 - RNA, 19 nt, Homo sapiens
  misc_RNA (1)...(19): siRNA sense strand
ucaaccauauauucuacag

SEQ ID NO: 628124 - RNA, 19 nt, Homo sapiens
  misc_RNA (1)...(19): siRNA sense strand
gcuguuauuggucauuuua

SEQ ID NO: 628125 - RNA, 19 nt, Homo sapiens
  misc_RNA (1)...(19): siRNA sense strand
guguaaguuugcugaugga

SEQ ID NO: 628126 - RNA, 19 nt, Homo sapiens
  misc_RNA (1)...(19): siRNA sense strand
cacuacagcccgcaucaau

SEQ ID NO: 628127 - RNA, 19 nt, Homo sapiens
  misc_RNA (1)...(19): siRNA sense strand
caccagcaguaauaacaac

SEQ ID NO: 628128 - RNA, 19 nt, Homo sapiens
  misc_RNA (1)...(19): siRNA sense strand
ccauauaccuuucaaccua

SEQ ID NO: 628129 - RNA, 19 nt, Homo sapiens
  misc_RNA (1)...(19): siRNA sense strand
gacagaacccaaacaaaua

SEQ ID NO: 628130 - RNA, 19 nt, Homo sapiens
  misc_RNA (1)...(19): siRNA sense strand
gaaugacacuuacuuacga

SEQ ID NO: 628131 - RNA, 19 nt, Homo sapiens
  misc_RNA (1)...(19): siRNA sense strand
gaugcaaccucaaccauau

SEQ ID NO: 628132 - RNA, 19 nt, Homo sapiens
  misc_RNA (1)...(19): siRNA sense strand
gaagcucugucaaccauau

SEQ ID NO: 628133 - RNA, 19 nt, Homo sapiens
  misc_RNA (1)...(19): siRNA sense strand
caaguuauuucuacaagga

SEQ ID NO: 628134 - RNA, 19 nt, Homo sapiens
  misc_RNA (1)...(19): siRNA sense strand
acaaauacaucccuaaugg

SEQ ID NO: 628135 - RNA, 19 nt, Homo sapiens
  misc_RNA (1)...(19): siRNA sense strand
gaaccuuuauuguguaagu

SEQ ID NO: 628136 - RNA, 19 nt, Homo sapiens
  misc_RNA (1)...(19): siRNA sense strand
cuaccaaccucuacauuuc

SEQ ID NO: 628137 - RNA, 19 nt, Homo sapiens
  misc_RNA (1)...(19): siRNA sense strand
ggaagaccauggcauagag

SEQ ID NO: 628138 - RNA, 19 nt, Homo sapiens
  misc_RNA (1)...(19): siRNA sense strand
ggaugcaaccucaaccaua

SEQ ID NO: 628139 - RNA, 19 nt, Homo sapiens
  misc_RNA (1)...(19): siRNA sense strand
agacagaacccaaacaaau

SEQ ID NO: 628140 - RNA, 19 nt, Homo sapiens
  misc_RNA (1)...(19): siRNA sense strand
cgaaugaucacucaaacuu

SEQ ID NO: 628141 - RNA, 19 nt, Homo sapiens
  misc_RNA (1)...(19): siRNA sense strand
cauauaccuuucaaccuaa

SEQ ID NO: 628142 - RNA, 19 nt, Homo sapiens
  misc_RNA (1)...(19): siRNA sense strand
caaagcaacaggaacaaga

SEQ ID NO: 628143 - RNA, 19 nt, Homo sapiens
  misc_RNA (1)...(19): siRNA sense strand
cguguuaacucccucaaug

SEQ ID NO: 628144 - RNA, 19 nt, Homo sapiens
  misc_RNA (1)...(19): siRNA sense strand
uauauugcaucuccuguau

SEQ ID NO: 628145 - RNA, 19 nt, Homo sapiens
  misc_RNA (1)...(19): siRNA sense strand
ggacaaguuauuucuacaa

SEQ ID NO: 628146 - RNA, 19 nt, Homo sapiens
  misc_RNA (1)...(19): siRNA sense strand
ggaaaauagucuccacaaa

SEQ ID NO: 628147 - RNA, 19 nt, Homo sapiens
  misc_RNA (1)...(19): siRNA sense strand
gguguuggcuuugcuagga

SEQ ID NO: 628148 - RNA, 19 nt, Homo sapiens
  misc_RNA (1)...(19): siRNA sense strand
cagaaccuuuauuguguaa

SEQ ID NO: 628149 - RNA, 19 nt, Homo sapiens
  misc_RNA (1)...(19): siRNA sense strand
cuacagcccgcaucaauga

SEQ ID NO: 628150 - RNA, 19 nt, Homo sapiens
  misc_RNA (1)...(19): siRNA sense strand
gcaguaauaacaacaguag

SEQ ID NO: 628151 - RNA, 19 nt, Homo sapiens
  misc_RNA (1)...(19): siRNA sense strand
auacaucccuaauggaaga

SEQ ID NO: 628152 - RNA, 19 nt, Homo sapiens
  misc_RNA (1)...(19): siRNA sense strand
cuacgugauuccaguggua

SEQ ID NO: 628153 - RNA, 19 nt, Homo sapiens
  misc_RNA (1)...(19): siRNA sense strand
caaccucaaccauauauuc

SEQ ID NO: 628154 - RNA, 19 nt, Homo sapiens
  misc_RNA (1)...(19): siRNA sense strand
gcuacaaaccgaaugauca

SEQ ID NO: 628155 - RNA, 19 nt, Homo sapiens
  misc_RNA (1)...(19): siRNA sense strand
acagaaccuuuauugugua

SEQ ID NO: 628156 - RNA, 19 nt, Homo sapiens
  misc_RNA (1)...(19): siRNA sense strand
gacaaguuauuucuacaag

SEQ ID NO: 628157 - RNA, 19 nt, Homo sapiens
  misc_RNA (1)...(19): siRNA sense strand
caaaccgaaugaucacuca

SEQ ID NO: 628158 - RNA, 19 nt, Homo sapiens
  misc_RNA (1)...(19): siRNA sense strand
acaaggauacuacgugauu

SEQ ID NO: 628159 - RNA, 19 nt, Homo sapiens
  misc_RNA (1)...(19): siRNA sense strand
gcaaaacgaaccucuauau

SEQ ID NO: 628160 - RNA, 19 nt, Homo sapiens
  misc_RNA (1)...(19): siRNA sense strand
gugaagcucugucaaccau

SEQ ID NO: 628161 - RNA, 19 nt, Homo sapiens
  misc_RNA (1)...(19): siRNA sense strand
ucuauuacacccuauauug

SEQ ID NO: 628162 - RNA, 19 nt, Homo sapiens
  misc_RNA (1)...(19): siRNA sense strand
caaacaaauacaucccuaa

SEQ ID NO: 628163 - RNA, 19 nt, Homo sapiens
  misc_RNA (1)...(19): siRNA sense strand
ccucuacauuucuaauuug

SEQ ID NO: 628164 - RNA, 19 nt, Homo sapiens
  misc_RNA (1)...(19): siRNA sense strand
gaaaauagucuccacaaag

SEQ ID NO: 628165 - RNA, 19 nt, Homo sapiens
  misc_RNA (1)...(19): siRNA sense strand
aaauacaucccuaauggaa

SEQ ID NO: 628166 - RNA, 19 nt, Homo sapiens
  misc_RNA (1)...(19): siRNA sense strand
gagacagaacccaaacaaa

SEQ ID NO: 628167 - RNA, 19 nt, Homo sapiens
  misc_RNA (1)...(19): siRNA sense strand
gaaaauaugcucaaaccau

SEQ ID NO: 628168 - RNA, 19 nt, Homo sapiens
  misc_RNA (1)...(19): siRNA sense strand
ggaggcaaguggucaacag

SEQ ID NO: 628169 - RNA, 19 nt, Homo sapiens
  misc_RNA (1)...(19): siRNA sense strand
uaagacaccaccaggaguu

SEQ ID NO: 628170 - RNA, 19 nt, Homo sapiens
  misc_RNA (1)...(19): siRNA sense strand
gcaccaccagcaguaauaa

SEQ ID NO: 628171 - RNA, 19 nt, Homo sapiens
  misc_RNA (1)...(19): siRNA sense strand
gaacccaaacaaauacauc

SEQ ID NO: 628172 - RNA, 19 nt, Homo sapiens
  misc_RNA (1)...(19): siRNA sense strand
gagcacaccaugucacuac

SEQ ID NO: 628173 - RNA, 19 nt, Homo sapiens
  misc_RNA (1)...(19): siRNA sense strand
caacuacagcugcuauaca

SEQ ID NO: 628174 - RNA, 19 nt, Homo sapiens
  misc_RNA (1)...(19): siRNA sense strand
ggaaugacacuuacuuacg

SEQ ID NO: 628175 - RNA, 19 nt, Homo sapiens
  misc_RNA (1)...(19): siRNA sense strand
gagcaagaacuagaaaaua

SEQ ID NO: 628176 - RNA, 19 nt, Homo sapiens
  misc_RNA (1)...(19): siRNA sense strand
ccuuucaaccuaauaagua

SEQ ID NO: 628177 - RNA, 19 nt, Homo sapiens
  misc_RNA (1)...(19): siRNA sense strand
cuacagcugcuauacagaa

SEQ ID NO: 628178 - RNA, 19 nt, Homo sapiens
  misc_RNA (1)...(19): siRNA sense strand
aggauggaaucaacagaaa

SEQ ID NO: 628179 - RNA, 19 nt, Homo sapiens
  misc_RNA (1)...(19): siRNA sense strand
gaugagcaagaacuagaaa

SEQ ID NO: 628180 - RNA, 19 nt, Homo sapiens
  misc_RNA (1)...(19): siRNA sense strand
gaugggaucagcucagcaa

SEQ ID NO: 628181 - RNA, 19 nt, Homo sapiens
  misc_RNA (1)...(19): siRNA sense strand
ccuaccaaccucuacauuu

SEQ ID NO: 628182 - RNA, 19 nt, Homo sapiens
  misc_RNA (1)...(19): siRNA sense strand
gaaugaucacucaaacuuc

SEQ ID NO: 628183 - RNA, 19 nt, Homo sapiens
  misc_RNA (1)...(19): siRNA sense strand
uagcagcaguagcaacuca

SEQ ID NO: 628184 - RNA, 19 nt, Homo sapiens
  misc_RNA (1)...(19): siRNA sense strand
caaauacaucccuaaugga

SEQ ID NO: 628185 - RNA, 19 nt, Homo sapiens
  misc_RNA (1)...(19): siRNA sense strand
ggaugagcaagaacuagaa

SEQ ID NO: 628186 - RNA, 19 nt, Homo sapiens
  misc_RNA (1)...(19): siRNA sense strand
gauuuuauccuucaccaua

SEQ ID NO: 628187 - RNA, 19 nt, Homo sapiens
  misc_RNA (1)...(19): siRNA sense strand
caaggauacuacgugauuc

SEQ ID NO: 628188 - RNA, 19 nt, Homo sapiens
  misc_RNA (1)...(19): siRNA sense strand
aaugaucacucaaacuucu

SEQ ID NO: 628189 - RNA, 19 nt, Homo sapiens
  misc_RNA (1)...(19): siRNA sense strand
gaagaccauggcauagaga

SEQ ID NO: 628190 - RNA, 19 nt, Homo sapiens
  misc_RNA (1)...(19): siRNA sense strand
ccauuuggacaaguuauuu

SEQ ID NO: 628191 - RNA, 19 nt, Homo sapiens
  misc_RNA (1)...(19): siRNA sense strand
ccucaaccauauauucuac

SEQ ID NO: 628192 - RNA, 19 nt, Homo sapiens
  misc_RNA (1)...(19): siRNA sense strand
uauugcaucuccuguaucu

SEQ ID NO: 628193 - RNA, 19 nt, Homo sapiens
  misc_RNA (1)...(19): siRNA sense strand
cgagacgucuaaugaccau

SEQ ID NO: 628194 - RNA, 19 nt, Homo sapiens
  misc_RNA (1)...(19): siRNA sense strand
aagcuguuauuggucauuu

SEQ ID NO: 628195 - RNA, 19 nt, Homo sapiens
  misc_RNA (1)...(19): siRNA sense strand
cacucaaacuucuauuaca

SEQ ID NO: 628196 - RNA, 19 nt, Homo sapiens
  misc_RNA (1)...(19): siRNA sense strand
gcuggaaugacacuuacuu

SEQ ID NO: 628197 - RNA, 19 nt, Homo sapiens
  misc_RNA (1)...(19): siRNA sense strand
aagcucaaauggcaaagca

SEQ ID NO: 628198 - RNA, 19 nt, Homo sapiens
  misc_RNA (1)...(19): siRNA sense strand
ucacucaaacuucuauuac

SEQ ID NO: 628199 - RNA, 19 nt, Homo sapiens
  misc_RNA (1)...(19): siRNA sense strand
aaaauagucuccacaaagg

SEQ ID NO: 628200 - RNA, 19 nt, Homo sapiens
  misc_RNA (1)...(19): siRNA sense strand
cagcaguaauaacaacagu

SEQ ID NO: 628201 - RNA, 19 nt, Homo sapiens
  misc_RNA (1)...(19): siRNA sense strand
cuccauggaugagcaagaa

SEQ ID NO: 628202 - RNA, 19 nt, Homo sapiens
  misc_RNA (1)...(19): siRNA sense strand
agagacagaacccaaacaa

SEQ ID NO: 628203 - RNA, 19 nt, Homo sapiens
  misc_RNA (1)...(19): siRNA sense strand
uaggauggaaucaacagaa

SEQ ID NO: 628204 - RNA, 19 nt, Homo sapiens
  misc_RNA (1)...(19): siRNA sense strand
ucaaccauaugggaaaaua

SEQ ID NO: 628205 - RNA, 19 nt, Homo sapiens
  misc_RNA (1)...(19): siRNA sense strand
gcaaagcaacaggaacaag

SEQ ID NO: 628206 - RNA, 19 nt, Homo sapiens
  misc_RNA (1)...(19): siRNA sense strand
ggagccuacuugccacagu

SEQ ID NO: 628207 - RNA, 19 nt, Homo sapiens
  misc_RNA (1)...(19): siRNA sense strand
ggaacauacaugccugcaa

SEQ ID NO: 628208 - RNA, 19 nt, Homo sapiens
  misc_RNA (1)...(19): siRNA sense strand
aaaccauuuggacaaguua

SEQ ID NO: 628209 - RNA, 19 nt, Homo sapiens
  misc_RNA (1)...(19): siRNA sense strand
augcaaagguuaugguuuu

SEQ ID NO: 628210 - RNA, 19 nt, Homo sapiens
  misc_RNA (1)...(19): siRNA sense strand
caaaugcaaagguuauggu

SEQ ID NO: 628211 - RNA, 19 nt, Homo sapiens
  misc_RNA (1)...(19): siRNA sense strand
cuauauugcaucuccugua

SEQ ID NO: 628212 - RNA, 19 nt, Homo sapiens
  misc_RNA (1)...(19): siRNA sense strand
cuggaaugacacuuacuua

SEQ ID NO: 628213 - RNA, 19 nt, Homo sapiens
  misc_RNA (1)...(19): siRNA sense strand
gguacaagucgugguguug

SEQ ID NO: 628214 - RNA, 19 nt, Homo sapiens
  misc_RNA (1)...(19): siRNA sense strand
uggcaaagcaacaggaaca

SEQ ID NO: 628215 - RNA, 19 nt, Homo sapiens
  misc_RNA (1)...(19): siRNA sense strand
caaccucuacauuucuaau

SEQ ID NO: 628216 - RNA, 19 nt, Homo sapiens
  misc_RNA (1)...(19): siRNA sense strand
accaaccucuacauuucua

SEQ ID NO: 628217 - RNA, 19 nt, Homo sapiens
  misc_RNA (1)...(19): siRNA sense strand
gcaagaacuagaaaauaug

SEQ ID NO: 628218 - RNA, 19 nt, Homo sapiens
  misc_RNA (1)...(19): siRNA sense strand
ggagcacaccaugucacua

SEQ ID NO: 628219 - RNA, 19 nt, Homo sapiens
  misc_RNA (1)...(19): siRNA sense strand
gcaaccucaaccauauauu

SEQ ID NO: 628220 - RNA, 19 nt, Homo sapiens
  misc_RNA (1)...(19): siRNA sense strand
ccaccagcaguaauaacaa

SEQ ID NO: 628221 - RNA, 19 nt, Homo sapiens
  misc_RNA (1)...(19): siRNA sense strand
gaagcuguuauuggucauu

SEQ ID NO: 628222 - RNA, 19 nt, Homo sapiens
  misc_RNA (1)...(19): siRNA sense strand
cauggaugagcaagaacua

SEQ ID NO: 628223 - RNA, 19 nt, Homo sapiens
  misc_RNA (1)...(19): siRNA sense strand
ucaaccauauauucuacag

SEQ ID NO: 628224 - RNA, 19 nt, Homo sapiens
  misc_RNA (1)...(19): siRNA sense strand
gcuguuauuggucauuuua

SEQ ID NO: 628225 - RNA, 19 nt, Homo sapiens
  misc_RNA (1)...(19): siRNA sense strand
guguaaguuugcugaugga

SEQ ID NO: 628226 - RNA, 19 nt, Homo sapiens
  misc_RNA (1)...(19): siRNA sense strand
cacuacagcccgcaucaau

SEQ ID NO: 628227 - RNA, 19 nt, Homo sapiens
  misc_RNA (1)...(19): siRNA sense strand
caccagcaguaauaacaac

SEQ ID NO: 628228 - RNA, 19 nt, Homo sapiens
  misc_RNA (1)...(19): siRNA sense strand
ccauauaccuuucaaccua

SEQ ID NO: 628229 - RNA, 19 nt, Homo sapiens
  misc_RNA (1)...(19): siRNA sense strand
gacagaacccaaacaaaua

SEQ ID NO: 628230 - RNA, 19 nt, Homo sapiens
  misc_RNA (1)...(19): siRNA sense strand
gaaugacacuuacuuacga

SEQ ID NO: 628231 - RNA, 19 nt, Homo sapiens
  misc_RNA (1)...(19): siRNA sense strand
gaugcaaccucaaccauau

SEQ ID NO: 628232 - RNA, 19 nt, Homo sapiens
  misc_RNA (1)...(19): siRNA sense strand
gaagcucugucaaccauau

SEQ ID NO: 628233 - RNA, 19 nt, Homo sapiens
  misc_RNA (1)...(19): siRNA sense strand
caaguuauuucuacaagga

SEQ ID NO: 628234 - RNA, 19 nt, Homo sapiens
  misc_RNA (1)...(19): siRNA sense strand
acaaauacaucccuaaugg

SEQ ID NO: 628235 - RNA, 19 nt, Homo sapiens
  misc_RNA (1)...(19): siRNA sense strand
gaaccuuuauuguguaagu

SEQ ID NO: 628236 - RNA, 19 nt, Homo sapiens
  misc_RNA (1)...(19): siRNA sense strand
cuaccaaccucuacauuuc

SEQ ID NO: 628237 - RNA, 19 nt, Homo sapiens
  misc_RNA (1)...(19): siRNA sense strand
ggaagaccauggcauagag

SEQ ID NO: 628238 - RNA, 19 nt, Homo sapiens
  misc_RNA (1)...(19): siRNA sense strand
ggaugcaaccucaaccaua

SEQ ID NO: 628239 - RNA, 19 nt, Homo sapiens
  misc_RNA (1)...(19): siRNA sense strand
agacagaacccaaacaaau

SEQ ID NO: 628240 - RNA, 19 nt, Homo sapiens
  misc_RNA (1)...(19): siRNA sense strand
cgaaugaucacucaaacuu

SEQ ID NO: 628241 - RNA, 19 nt, Homo sapiens
  misc_RNA (1)...(19): siRNA sense strand
cauauaccuuucaaccuaa

SEQ ID NO: 628242 - RNA, 19 nt, Homo sapiens
  misc_RNA (1)...(19): siRNA sense strand
caaagcaacaggaacaaga

SEQ ID NO: 628243 - RNA, 19 nt, Homo sapiens
  misc_RNA (1)...(19): siRNA sense strand
cguguuaacucccucaaug

SEQ ID NO: 628244 - RNA, 19 nt, Homo sapiens
  misc_RNA (1)...(19): siRNA sense strand
uauauugcaucuccuguau

SEQ ID NO: 628245 - RNA, 19 nt, Homo sapiens
  misc_RNA (1)...(19): siRNA sense strand
ggacaaguuauuucuacaa

SEQ ID NO: 628246 - RNA, 19 nt, Homo sapiens
  misc_RNA (1)...(19): siRNA sense strand
ggaaaauagucuccacaaa

SEQ ID NO: 628247 - RNA, 19 nt, Homo sapiens
  misc_RNA (1)...(19): siRNA sense strand
gguguuggcuuugcuagga

SEQ ID NO: 628248 - RNA, 19 nt, Homo sapiens
  misc_RNA (1)...(19): siRNA sense strand
cagaaccuuuauuguguaa

SEQ ID NO: 628249 - RNA, 19 nt, Homo sapiens
  misc_RNA (1)...(19): siRNA sense strand
cuacagcccgcaucaauga

SEQ ID NO: 628250 - RNA, 19 nt, Homo sapiens
  misc_RNA (1)...(19): siRNA sense strand
gcaguaauaacaacaguag

SEQ ID NO: 628251 - RNA, 19 nt, Homo sapiens
  misc_RNA (1)...(19): siRNA sense strand
auacaucccuaauggaaga

SEQ ID NO: 628252 - RNA, 19 nt, Homo sapiens
  misc_RNA (1)...(19): siRNA sense strand
cuacgugauuccaguggua

SEQ ID NO: 628253 - RNA, 19 nt, Homo sapiens
  misc_RNA (1)...(19): siRNA sense strand
caaccucaaccauauauuc

SEQ ID NO: 628254 - RNA, 19 nt, Homo sapiens
  misc_RNA (1)...(19): siRNA sense strand
gcuacaaaccgaaugauca

SEQ ID NO: 628255 - RNA, 19 nt, Homo sapiens
  misc_RNA (1)...(19): siRNA sense strand
acagaaccuuuauugugua

SEQ ID NO: 628256 - RNA, 19 nt, Homo sapiens
  misc_RNA (1)...(19): siRNA sense strand
gacaaguuauuucuacaag

SEQ ID NO: 628257 - RNA, 19 nt, Homo sapiens
  misc_RNA (1)...(19): siRNA sense strand
caaaccgaaugaucacuca

SEQ ID NO: 628258 - RNA, 19 nt, Homo sapiens
  misc_RNA (1)...(19): siRNA sense strand
acaaggauacuacgugauu

SEQ ID NO: 628259 - RNA, 19 nt, Homo sapiens
  misc_RNA (1)...(19): siRNA sense strand
gcaaaacgaaccucuauau

SEQ ID NO: 628260 - RNA, 19 nt, Homo sapiens
  misc_RNA (1)...(19): siRNA sense strand
gugaagcucugucaaccau

SEQ ID NO: 628261 - RNA, 19 nt, Homo sapiens
  misc_RNA (1)...(19): siRNA sense strand
ucuauuacacccuauauug

SEQ ID NO: 628262 - RNA, 19 nt, Homo sapiens
  misc_RNA (1)...(19): siRNA sense strand
caaacaaauacaucccuaa

SEQ ID NO: 628263 - RNA, 19 nt, Homo sapiens
  misc_RNA (1)...(19): siRNA sense strand
ccucuacauuucuaauuug

SEQ ID NO: 628264 - RNA, 19 nt, Homo sapiens
  misc_RNA (1)...(19): siRNA sense strand
gaaaauagucuccacaaag

SEQ ID NO: 628265 - RNA, 19 nt, Homo sapiens
  misc_RNA (1)...(19): siRNA sense strand
aaauacaucccuaauggaa

SEQ ID NO: 628266 - RNA, 19 nt, Homo sapiens
  misc_RNA (1)...(19): siRNA sense strand
gagacagaacccaaacaaa

SEQ ID NO: 628267 - RNA, 19 nt, Homo sapiens
  misc_RNA (1)...(19): siRNA sense strand
gaaaauaugcucaaaccau

SEQ ID NO: 628268 - RNA, 19 nt, Homo sapiens
  misc_RNA (1)...(19): siRNA sense strand
ggaggcaaguggucaacag

SEQ ID NO: 628269 - RNA, 19 nt, Homo sapiens
  misc_RNA (1)...(19): siRNA sense strand
uaagacaccaccaggaguu

SEQ ID NO: 628270 - RNA, 19 nt, Homo sapiens
  misc_RNA (1)...(19): siRNA sense strand
gcaccaccagcaguaauaa

SEQ ID NO: 628271 - RNA, 19 nt, Homo sapiens
  misc_RNA (1)...(19): siRNA sense strand
gaacccaaacaaauacauc

SEQ ID NO: 628272 - RNA, 19 nt, Homo sapiens
  misc_RNA (1)...(19): siRNA sense strand
gagcacaccaugucacuac

SEQ ID NO: 628273 - RNA, 19 nt, Homo sapiens
  misc_RNA (1)...(19): siRNA sense strand
caacuacagcugcuauaca

SEQ ID NO: 628274 - RNA, 19 nt, Homo sapiens
  misc_RNA (1)...(19): siRNA sense strand
ggaaugacacuuacuuacg

SEQ ID NO: 628275 - RNA, 19 nt, Homo sapiens
  misc_RNA (1)...(19): siRNA sense strand
gagcaagaacuagaaaaua

SEQ ID NO: 628276 - RNA, 19 nt, Homo sapiens
  misc_RNA (1)...(19): siRNA sense strand
ccuuucaaccuaauaagua

SEQ ID NO: 628277 - RNA, 19 nt, Homo sapiens
  misc_RNA (1)...(19): siRNA sense strand
cuacagcugcuauacagaa

SEQ ID NO: 628278 - RNA, 19 nt, Homo sapiens
  misc_RNA (1)...(19): siRNA sense strand
aggauggaaucaacagaaa

SEQ ID NO: 628279 - RNA, 19 nt, Homo sapiens
  misc_RNA (1)...(19): siRNA sense strand
gaugagcaagaacuagaaa

SEQ ID NO: 628280 - RNA, 19 nt, Homo sapiens
  misc_RNA (1)...(19): siRNA sense strand
gaugggaucagcucagcaa

SEQ ID NO: 628281 - RNA, 19 nt, Homo sapiens
  misc_RNA (1)...(19): siRNA sense strand
ccuaccaaccucuacauuu

SEQ ID NO: 628282 - RNA, 19 nt, Homo sapiens
  misc_RNA (1)...(19): siRNA sense strand
gaaugaucacucaaacuuc

SEQ ID NO: 628283 - RNA, 19 nt, Homo sapiens
  misc_RNA (1)...(19): siRNA sense strand
uagcagcaguagcaacuca

SEQ ID NO: 628284 - RNA, 19 nt, Homo sapiens
  misc_RNA (1)...(19): siRNA sense strand
caaauacaucccuaaugga

SEQ ID NO: 628285 - RNA, 19 nt, Homo sapiens
  misc_RNA (1)...(19): siRNA sense strand
ggaugagcaagaacuagaa

SEQ ID NO: 628286 - RNA, 19 nt, Homo sapiens
  misc_RNA (1)...(19): siRNA sense strand
gauuuuauccuucaccaua

SEQ ID NO: 628287 - RNA, 19 nt, Homo sapiens
  misc_RNA (1)...(19): siRNA sense strand
caaggauacuacgugauuc

SEQ ID NO: 628288 - RNA, 19 nt, Homo sapiens
  misc_RNA (1)...(19): siRNA sense strand
aaugaucacucaaacuucu

SEQ ID NO: 628289 - RNA, 19 nt, Homo sapiens
  misc_RNA (1)...(19): siRNA sense strand
gaagaccauggcauagaga

SEQ ID NO: 628290 - RNA, 19 nt, Homo sapiens
  misc_RNA (1)...(19): siRNA sense strand
ccauuuggacaaguuauuu

SEQ ID NO: 628291 - RNA, 19 nt, Homo sapiens
  misc_RNA (1)...(19): siRNA sense strand
ccucaaccauauauucuac

SEQ ID NO: 628292 - RNA, 19 nt, Homo sapiens
  misc_RNA (1)...(19): siRNA sense strand
uauugcaucuccuguaucu

SEQ ID NO: 628293 - RNA, 19 nt, Homo sapiens
  misc_RNA (1)...(19): siRNA sense strand
cgagacgucuaaugaccau

SEQ ID NO: 628294 - RNA, 19 nt, Homo sapiens
  misc_RNA (1)...(19): siRNA sense strand
aagcuguuauuggucauuu

SEQ ID NO: 628295 - RNA, 19 nt, Homo sapiens
  misc_RNA (1)...(19): siRNA sense strand
cacucaaacuucuauuaca

SEQ ID NO: 628296 - RNA, 19 nt, Homo sapiens
  misc_RNA (1)...(19): siRNA sense strand
gcuggaaugacacuuacuu

SEQ ID NO: 628297 - RNA, 19 nt, Homo sapiens
  misc_RNA (1)...(19): siRNA sense strand
aagcucaaauggcaaagca

SEQ ID NO: 628298 - RNA, 19 nt, Homo sapiens
  misc_RNA (1)...(19): siRNA sense strand
ucacucaaacuucuauuac

SEQ ID NO: 628299 - RNA, 19 nt, Homo sapiens
  misc_RNA (1)...(19): siRNA sense strand
aaaauagucuccacaaagg

SEQ ID NO: 628300 - RNA, 19 nt, Homo sapiens
  misc_RNA (1)...(19): siRNA sense strand
cagcaguaauaacaacagu

SEQ ID NO: 628301 - RNA, 19 nt, Homo sapiens
  misc_RNA (1)...(19): siRNA sense strand
cuccauggaugagcaagaa

SEQ ID NO: 628302 - RNA, 19 nt, Homo sapiens
  misc_RNA (1)...(19): siRNA sense strand
agagacagaacccaaacaa

SEQ ID NO: 628303 - RNA, 19 nt, Homo sapiens
  misc_RNA (1)...(19): siRNA sense strand
uaggauggaaucaacagaa

SEQ ID NO: 628304 - RNA, 19 nt, Homo sapiens
  misc_RNA (1)...(19): siRNA sense strand
ucaaccauaugggaaaaua

SEQ ID NO: 628305 - RNA, 19 nt, Homo sapiens
  misc_RNA (1)...(19): siRNA sense strand
gcaaagcaacaggaacaag

SEQ ID NO: 628306 - RNA, 19 nt, Homo sapiens
  misc_RNA (1)...(19): siRNA sense strand
ggagccuacuugccacagu

SEQ ID NO: 628307 - RNA, 19 nt, Homo sapiens
  misc_RNA (1)...(19): siRNA sense strand
ggaacauacaugccugcaa

SEQ ID NO: 628308 - RNA, 19 nt, Homo sapiens
  misc_RNA (1)...(19): siRNA sense strand
aaaccauuuggacaaguua

SEQ ID NO: 628309 - RNA, 19 nt, Homo sapiens
  misc_RNA (1)...(19): siRNA sense strand
augcaaagguuaugguuuu

SEQ ID NO: 628310 - RNA, 19 nt, Homo sapiens
  misc_RNA (1)...(19): siRNA sense strand
caaaugcaaagguuauggu

SEQ ID NO: 628311 - RNA, 19 nt, Homo sapiens
  misc_RNA (1)...(19): siRNA sense strand
cuauauugcaucuccugua

SEQ ID NO: 628312 - RNA, 19 nt, Homo sapiens
  misc_RNA (1)...(19): siRNA sense strand
cuggaaugacacuuacuua

SEQ ID NO: 628313 - RNA, 19 nt, Homo sapiens
  misc_RNA (1)...(19): siRNA sense strand
gguacaagucgugguguug

SEQ ID NO: 628314 - RNA, 19 nt, Homo sapiens
  misc_RNA (1)...(19): siRNA sense strand
uggcaaagcaacaggaaca

SEQ ID NO: 628315 - RNA, 19 nt, Homo sapiens
  misc_RNA (1)...(19): siRNA sense strand
caaccucuacauuucuaau

SEQ ID NO: 628316 - RNA, 19 nt, Homo sapiens
  misc_RNA (1)...(19): siRNA sense strand
accaaccucuacauuucua

SEQ ID NO: 628317 - RNA, 19 nt, Homo sapiens
  misc_RNA (1)...(19): siRNA sense strand
gcaagaacuagaaaauaug

SEQ ID NO: 628318 - RNA, 19 nt, Homo sapiens
  misc_RNA (1)...(19): siRNA sense strand
ggagcacaccaugucacua

SEQ ID NO: 628319 - RNA, 19 nt, Homo sapiens
  misc_RNA (1)...(19): siRNA sense strand
gcaaccucaaccauauauu

SEQ ID NO: 628320 - RNA, 19 nt, Homo sapiens
  misc_RNA (1)...(19): siRNA sense strand
ccaccagcaguaauaacaa

SEQ ID NO: 628321 - RNA, 19 nt, Homo sapiens
  misc_RNA (1)...(19): siRNA sense strand
gaagcuguuauuggucauu

SEQ ID NO: 628322 - RNA, 19 nt, Homo sapiens
  misc_RNA (1)...(19): siRNA sense strand
cauggaugagcaagaacua

SEQ ID NO: 628323 - RNA, 19 nt, Homo sapiens
  misc_RNA (1)...(19): siRNA sense strand
ucaaccauauauucuacag

SEQ ID NO: 628324 - RNA, 19 nt, Homo sapiens
  misc_RNA (1)...(19): siRNA sense strand
gcuguuauuggucauuuua

SEQ ID NO: 628325 - RNA, 19 nt, Homo sapiens
  misc_RNA (1)...(19): siRNA sense strand
guguaaguuugcugaugga

SEQ ID NO: 628326 - RNA, 19 nt, Homo sapiens
  misc_RNA (1)...(19): siRNA sense strand
cacuacagcccgcaucaau

SEQ ID NO: 628327 - RNA, 19 nt, Homo sapiens
  misc_RNA (1)...(19): siRNA sense strand
caccagcaguaauaacaac

SEQ ID NO: 628328 - RNA, 19 nt, Homo sapiens
  misc_RNA (1)...(19): siRNA sense strand
ccauauaccuuucaaccua

SEQ ID NO: 628329 - RNA, 19 nt, Homo sapiens
  misc_RNA (1)...(19): siRNA sense strand
gacagaacccaaacaaaua

SEQ ID NO: 628330 - RNA, 19 nt, Homo sapiens
  misc_RNA (1)...(19): siRNA sense strand
gaaugacacuuacuuacga

SEQ ID NO: 628331 - RNA, 19 nt, Homo sapiens
  misc_RNA (1)...(19): siRNA sense strand
gaugcaaccucaaccauau

SEQ ID NO: 628332 - RNA, 19 nt, Homo sapiens
  misc_RNA (1)...(19): siRNA sense strand
gaagcucugucaaccauau

SEQ ID NO: 628333 - RNA, 19 nt, Homo sapiens
  misc_RNA (1)...(19): siRNA sense strand
caaguuauuucuacaagga

SEQ ID NO: 628334 - RNA, 19 nt, Homo sapiens
  misc_RNA (1)...(19): siRNA sense strand
acaaauacaucccuaaugg

SEQ ID NO: 628335 - RNA, 19 nt, Homo sapiens
  misc_RNA (1)...(19): siRNA sense strand
gaaccuuuauuguguaagu

SEQ ID NO: 628336 - RNA, 19 nt, Homo sapiens
  misc_RNA (1)...(19): siRNA sense strand
cuaccaaccucuacauuuc

SEQ ID NO: 628337 - RNA, 19 nt, Homo sapiens
  misc_RNA (1)...(19): siRNA sense strand
ggaagaccauggcauagag

SEQ ID NO: 628338 - RNA, 19 nt, Homo sapiens
  misc_RNA (1)...(19): siRNA sense strand
ggaugcaaccucaaccaua

SEQ ID NO: 628339 - RNA, 19 nt, Homo sapiens
  misc_RNA (1)...(19): siRNA sense strand
agacagaacccaaacaaau

SEQ ID NO: 628340 - RNA, 19 nt, Homo sapiens
  misc_RNA (1)...(19): siRNA sense strand
cgaaugaucacucaaacuu

SEQ ID NO: 628341 - RNA, 19 nt, Homo sapiens
  misc_RNA (1)...(19): siRNA sense strand
cauauaccuuucaaccuaa

SEQ ID NO: 628342 - RNA, 19 nt, Homo sapiens
  misc_RNA (1)...(19): siRNA sense strand
caaagcaacaggaacaaga

SEQ ID NO: 628343 - RNA, 19 nt, Homo sapiens
  misc_RNA (1)...(19): siRNA sense strand
cguguuaacucccucaaug

SEQ ID NO: 628344 - RNA, 19 nt, Homo sapiens
  misc_RNA (1)...(19): siRNA sense strand
uauauugcaucuccuguau

SEQ ID NO: 628345 - RNA, 19 nt, Homo sapiens
  misc_RNA (1)...(19): siRNA sense strand
ggacaaguuauuucuacaa

SEQ ID NO: 628346 - RNA, 19 nt, Homo sapiens
  misc_RNA (1)...(19): siRNA sense strand
ggaaaauagucuccacaaa

SEQ ID NO: 628347 - RNA, 19 nt, Homo sapiens
  misc_RNA (1)...(19): siRNA sense strand
gguguuggcuuugcuagga

SEQ ID NO: 628348 - RNA, 19 nt, Homo sapiens
  misc_RNA (1)...(19): siRNA sense strand
cagaaccuuuauuguguaa

SEQ ID NO: 628349 - RNA, 19 nt, Homo sapiens
  misc_RNA (1)...(19): siRNA sense strand
cuacagcccgcaucaauga

SEQ ID NO: 628350 - RNA, 19 nt, Homo sapiens
  misc_RNA (1)...(19): siRNA sense strand
gcaguaauaacaacaguag

SEQ ID NO: 628351 - RNA, 19 nt, Homo sapiens
  misc_RNA (1)...(19): siRNA sense strand
auacaucccuaauggaaga

SEQ ID NO: 628352 - RNA, 19 nt, Homo sapiens
  misc_RNA (1)...(19): siRNA sense strand
cuacgugauuccaguggua

SEQ ID NO: 628353 - RNA, 19 nt, Homo sapiens
  misc_RNA (1)...(19): siRNA sense strand
caaccucaaccauauauuc

SEQ ID NO: 628354 - RNA, 19 nt, Homo sapiens
  misc_RNA (1)...(19): siRNA sense strand
gcuacaaaccgaaugauca

SEQ ID NO: 628355 - RNA, 19 nt, Homo sapiens
  misc_RNA (1)...(19): siRNA sense strand
acagaaccuuuauugugua

SEQ ID NO: 628356 - RNA, 19 nt, Homo sapiens
  misc_RNA (1)...(19): siRNA sense strand
gacaaguuauuucuacaag

SEQ ID NO: 628357 - RNA, 19 nt, Homo sapiens
  misc_RNA (1)...(19): siRNA sense strand
caaaccgaaugaucacuca

SEQ ID NO: 628358 - RNA, 19 nt, Homo sapiens
  misc_RNA (1)...(19): siRNA sense strand
acaaggauacuacgugauu

SEQ ID NO: 628359 - RNA, 19 nt, Homo sapiens
  misc_RNA (1)...(19): siRNA sense strand
gcaaaacgaaccucuauau

SEQ ID NO: 628360 - RNA, 19 nt, Homo sapiens
  misc_RNA (1)...(19): siRNA sense strand
gugaagcucugucaaccau

SEQ ID NO: 628361 - RNA, 19 nt, Homo sapiens
  misc_RNA (1)...(19): siRNA sense strand
ucuauuacacccuauauug

SEQ ID NO: 628362 - RNA, 19 nt, Homo sapiens
  misc_RNA (1)...(19): siRNA sense strand
caaacaaauacaucccuaa

SEQ ID NO: 628363 - RNA, 19 nt, Homo sapiens
  misc_RNA (1)...(19): siRNA sense strand
ccucuacauuucuaauuug

SEQ ID NO: 628364 - RNA, 19 nt, Homo sapiens
  misc_RNA (1)...(19): siRNA sense strand
gaaaauagucuccacaaag

SEQ ID NO: 628365 - RNA, 19 nt, Homo sapiens
  misc_RNA (1)...(19): siRNA sense strand
aaauacaucccuaauggaa

SEQ ID NO: 628366 - RNA, 19 nt, Homo sapiens
  misc_RNA (1)...(19): siRNA sense strand
gagacagaacccaaacaaa

SEQ ID NO: 628367 - RNA, 19 nt, Homo sapiens
  misc_RNA (1)...(19): siRNA sense strand
gaaaauaugcucaaaccau

SEQ ID NO: 628368 - RNA, 19 nt, Homo sapiens
  misc_RNA (1)...(19): siRNA sense strand
ggaggcaaguggucaacag

SEQ ID NO: 628369 - RNA, 19 nt, Homo sapiens
  misc_RNA (1)...(19): siRNA sense strand
uaagacaccaccaggaguu

SEQ ID NO: 628370 - RNA, 19 nt, Homo sapiens
  misc_RNA (1)...(19): siRNA sense strand
gcaccaccagcaguaauaa

SEQ ID NO: 628371 - RNA, 19 nt, Homo sapiens
  misc_RNA (1)...(19): siRNA sense strand
gaacccaaacaaauacauc

SEQ ID NO: 628372 - RNA, 19 nt, Homo sapiens
  misc_RNA (1)...(19): siRNA sense strand
gagcacaccaugucacuac

SEQ ID NO: 628373 - RNA, 19 nt, Homo sapiens
  misc_RNA (1)...(19): siRNA sense strand
caacuacagcugcuauaca

SEQ ID NO: 628374 - RNA, 19 nt, Homo sapiens
  misc_RNA (1)...(19): siRNA sense strand
ggaaugacacuuacuuacg

SEQ ID NO: 628375 - RNA, 19 nt, Homo sapiens
  misc_RNA (1)...(19): siRNA sense strand
gagcaagaacuagaaaaua

SEQ ID NO: 628376 - RNA, 19 nt, Homo sapiens
  misc_RNA (1)...(19): siRNA sense strand
ccuuucaaccuaauaagua

SEQ ID NO: 628377 - RNA, 19 nt, Homo sapiens
  misc_RNA (1)...(19): siRNA sense strand
cuacagcugcuauacagaa

SEQ ID NO: 628378 - RNA, 19 nt, Homo sapiens
  misc_RNA (1)...(19): siRNA sense strand
aggauggaaucaacagaaa

SEQ ID NO: 628379 - RNA, 19 nt, Homo sapiens
  misc_RNA (1)...(19): siRNA sense strand
gaugagcaagaacuagaaa

SEQ ID NO: 628380 - RNA, 19 nt, Homo sapiens
  misc_RNA (1)...(19): siRNA sense strand
gaugggaucagcucagcaa

SEQ ID NO: 628381 - RNA, 19 nt, Homo sapiens
  misc_RNA (1)...(19): siRNA sense strand
ccuaccaaccucuacauuu

SEQ ID NO: 628382 - RNA, 19 nt, Homo sapiens
  misc_RNA (1)...(19): siRNA sense strand
gaaugaucacucaaacuuc

SEQ ID NO: 628383 - RNA, 19 nt, Homo sapiens
  misc_RNA (1)...(19): siRNA sense strand
uagcagcaguagcaacuca

SEQ ID NO: 628384 - RNA, 19 nt, Homo sapiens
  misc_RNA (1)...(19): siRNA sense strand
caaauacaucccuaaugga

SEQ ID NO: 628385 - RNA, 19 nt, Homo sapiens
  misc_RNA (1)...(19): siRNA sense strand
ggaugagcaagaacuagaa

SEQ ID NO: 628386 - RNA, 19 nt, Homo sapiens
  misc_RNA (1)...(19): siRNA sense strand
gauuuuauccuucaccaua

SEQ ID NO: 628387 - RNA, 19 nt, Homo sapiens
  misc_RNA (1)...(19): siRNA sense strand
caaggauacuacgugauuc

SEQ ID NO: 628388 - RNA, 19 nt, Homo sapiens
  misc_RNA (1)...(19): siRNA sense strand
aaugaucacucaaacuucu

SEQ ID NO: 628389 - RNA, 19 nt, Homo sapiens
  misc_RNA (1)...(19): siRNA sense strand
gaagaccauggcauagaga

SEQ ID NO: 628390 - RNA, 19 nt, Homo sapiens
  misc_RNA (1)...(19): siRNA sense strand
ccauuuggacaaguuauuu

SEQ ID NO: 628391 - RNA, 19 nt, Homo sapiens
  misc_RNA (1)...(19): siRNA sense strand
ccucaaccauauauucuac

SEQ ID NO: 628392 - RNA, 19 nt, Homo sapiens
  misc_RNA (1)...(19): siRNA sense strand
uauugcaucuccuguaucu

SEQ ID NO: 628393 - RNA, 19 nt, Homo sapiens
  misc_RNA (1)...(19): siRNA sense strand
cgagacgucuaaugaccau

SEQ ID NO: 628394 - RNA, 19 nt, Homo sapiens
  misc_RNA (1)...(19): siRNA sense strand
aagcuguuauuggucauuu

SEQ ID NO: 628395 - RNA, 19 nt, Homo sapiens
  misc_RNA (1)...(19): siRNA sense strand
cacucaaacuucuauuaca

SEQ ID NO: 628396 - RNA, 19 nt, Homo sapiens
  misc_RNA (1)...(19): siRNA sense strand
gcuggaaugacacuuacuu

SEQ ID NO: 628397 - RNA, 19 nt, Homo sapiens
  misc_RNA (1)...(19): siRNA sense strand
aagcucaaauggcaaagca

SEQ ID NO: 628398 - RNA, 19 nt, Homo sapiens
  misc_RNA (1)...(19): siRNA sense strand
ucacucaaacuucuauuac

SEQ ID NO: 628399 - RNA, 19 nt, Homo sapiens
  misc_RNA (1)...(19): siRNA sense strand
aaaauagucuccacaaagg

SEQ ID NO: 628400 - RNA, 19 nt, Homo sapiens
  misc_RNA (1)...(19): siRNA sense strand
cagcaguaauaacaacagu

SEQ ID NO: 628401 - RNA, 19 nt, Homo sapiens
  misc_RNA (1)...(19): siRNA sense strand
cuccauggaugagcaagaa

SEQ ID NO: 628402 - RNA, 19 nt, Homo sapiens
  misc_RNA (1)...(19): siRNA sense strand
agagacagaacccaaacaa

SEQ ID NO: 628403 - RNA, 19 nt, Homo sapiens
  misc_RNA (1)...(19): siRNA sense strand
uaggauggaaucaacagaa

SEQ ID NO: 628404 - RNA, 19 nt, Homo sapiens
  misc_RNA (1)...(19): siRNA sense strand
ucaaccauaugggaaaaua

SEQ ID NO: 628405 - RNA, 19 nt, Homo sapiens
  misc_RNA (1)...(19): siRNA sense strand
gcaaagcaacaggaacaag

SEQ ID NO: 628406 - RNA, 19 nt, Homo sapiens
  misc_RNA (1)...(19): siRNA sense strand
ggagccuacuugccacagu

SEQ ID NO: 628407 - RNA, 19 nt, Homo sapiens
  misc_RNA (1)...(19): siRNA sense strand
ggaacauacaugccugcaa

SEQ ID NO: 628408 - RNA, 19 nt, Homo sapiens
  misc_RNA (1)...(19): siRNA sense strand
aaaccauuuggacaaguua

SEQ ID NO: 628409 - RNA, 19 nt, Homo sapiens
  misc_RNA (1)...(19): siRNA sense strand
augcaaagguuaugguuuu

SEQ ID NO: 628410 - RNA, 19 nt, Homo sapiens
  misc_RNA (1)...(19): siRNA sense strand
caaaugcaaagguuauggu

SEQ ID NO: 628411 - RNA, 19 nt, Homo sapiens
  misc_RNA (1)...(19): siRNA sense strand
cuauauugcaucuccugua

SEQ ID NO: 628412 - RNA, 19 nt, Homo sapiens
  misc_RNA (1)...(19): siRNA sense strand
cuggaaugacacuuacuua

SEQ ID NO: 628413 - RNA, 19 nt, Homo sapiens
  misc_RNA (1)...(19): siRNA sense strand
gguacaagucgugguguug

SEQ ID NO: 628414 - RNA, 19 nt, Homo sapiens
  misc_RNA (1)...(19): siRNA sense strand
uggcaaagcaacaggaaca

SEQ ID NO: 628415 - RNA, 19 nt, Homo sapiens
  misc_RNA (1)...(19): siRNA sense strand
caaccucuacauuucuaau

SEQ ID NO: 628416 - RNA, 19 nt, Homo sapiens
  misc_RNA (1)...(19): siRNA sense strand
accaaccucuacauuucua

SEQ ID NO: 628417 - RNA, 19 nt, Homo sapiens
  misc_RNA (1)...(19): siRNA sense strand
gcaagaacuagaaaauaug

SEQ ID NO: 628418 - RNA, 19 nt, Homo sapiens
  misc_RNA (1)...(19): siRNA sense strand
ggagcacaccaugucacua

SEQ ID NO: 628419 - RNA, 19 nt, Homo sapiens
  misc_RNA (1)...(19): siRNA sense strand
gcaaccucaaccauauauu

SEQ ID NO: 628420 - RNA, 19 nt, Homo sapiens
  misc_RNA (1)...(19): siRNA sense strand
ccaccagcaguaauaacaa

SEQ ID NO: 628421 - RNA, 19 nt, Homo sapiens
  misc_RNA (1)...(19): siRNA sense strand
gaagcuguuauuggucauu

SEQ ID NO: 628422 - RNA, 19 nt, Homo sapiens
  misc_RNA (1)...(19): siRNA sense strand
cauggaugagcaagaacua

SEQ ID NO: 628423 - RNA, 19 nt, Homo sapiens
  misc_RNA (1)...(19): siRNA sense strand
ucaaccauauauucuacag

SEQ ID NO: 628424 - RNA, 19 nt, Homo sapiens
  misc_RNA (1)...(19): siRNA sense strand
gcuguuauuggucauuuua

SEQ ID NO: 628425 - RNA, 19 nt, Homo sapiens
  misc_RNA (1)...(19): siRNA sense strand
guguaaguuugcugaugga

SEQ ID NO: 628426 - RNA, 19 nt, Homo sapiens
  misc_RNA (1)...(19): siRNA sense strand
cacuacagcccgcaucaau

SEQ ID NO: 628427 - RNA, 19 nt, Homo sapiens
  misc_RNA (1)...(19): siRNA sense strand
caccagcaguaauaacaac

SEQ ID NO: 628428 - RNA, 19 nt, Homo sapiens
  misc_RNA (1)...(19): siRNA sense strand
ccauauaccuuucaaccua

SEQ ID NO: 628429 - RNA, 19 nt, Homo sapiens
  misc_RNA (1)...(19): siRNA sense strand
gacagaacccaaacaaaua

SEQ ID NO: 628430 - RNA, 19 nt, Homo sapiens
  misc_RNA (1)...(19): siRNA sense strand
gaaugacacuuacuuacga

SEQ ID NO: 628431 - RNA, 19 nt, Homo sapiens
  misc_RNA (1)...(19): siRNA sense strand
gaugcaaccucaaccauau

SEQ ID NO: 628432 - RNA, 19 nt, Homo sapiens
  misc_RNA (1)...(19): siRNA sense strand
gaagcucugucaaccauau

SEQ ID NO: 628433 - RNA, 19 nt, Homo sapiens
  misc_RNA (1)...(19): siRNA sense strand
caaguuauuucuacaagga

SEQ ID NO: 628434 - RNA, 19 nt, Homo sapiens
  misc_RNA (1)...(19): siRNA sense strand
acaaauacaucccuaaugg

SEQ ID NO: 628435 - RNA, 19 nt, Homo sapiens
  misc_RNA (1)...(19): siRNA sense strand
gaaccuuuauuguguaagu

SEQ ID NO: 628436 - RNA, 19 nt, Homo sapiens
  misc_RNA (1)...(19): siRNA sense strand
cuaccaaccucuacauuuc

SEQ ID NO: 628437 - RNA, 19 nt, Homo sapiens
  misc_RNA (1)...(19): siRNA sense strand
ggaagaccauggcauagag

SEQ ID NO: 628438 - RNA, 19 nt, Homo sapiens
  misc_RNA (1)...(19): siRNA sense strand
ggaugcaaccucaaccaua

SEQ ID NO: 628439 - RNA, 19 nt, Homo sapiens
  misc_RNA (1)...(19): siRNA sense strand
agacagaacccaaacaaau

SEQ ID NO: 628440 - RNA, 19 nt, Homo sapiens
  misc_RNA (1)...(19): siRNA sense strand
cgaaugaucacucaaacuu

SEQ ID NO: 628441 - RNA, 19 nt, Homo sapiens
  misc_RNA (1)...(19): siRNA sense strand
cauauaccuuucaaccuaa

SEQ ID NO: 628442 - RNA, 19 nt, Homo sapiens
  misc_RNA (1)...(19): siRNA sense strand
caaagcaacaggaacaaga

SEQ ID NO: 628443 - RNA, 19 nt, Homo sapiens
  misc_RNA (1)...(19): siRNA sense strand
cguguuaacucccucaaug

SEQ ID NO: 628444 - RNA, 19 nt, Homo sapiens
  misc_RNA (1)...(19): siRNA sense strand
uauauugcaucuccuguau

SEQ ID NO: 628445 - RNA, 19 nt, Homo sapiens
  misc_RNA (1)...(19): siRNA sense strand
ggacaaguuauuucuacaa

SEQ ID NO: 628446 - RNA, 19 nt, Homo sapiens
  misc_RNA (1)...(19): siRNA sense strand
ggaaaauagucuccacaaa

SEQ ID NO: 628447 - RNA, 19 nt, Homo sapiens
  misc_RNA (1)...(19): siRNA sense strand
gguguuggcuuugcuagga

SEQ ID NO: 628448 - RNA, 19 nt, Homo sapiens
  misc_RNA (1)...(19): siRNA sense strand
cagaaccuuuauuguguaa

SEQ ID NO: 628449 - RNA, 19 nt, Homo sapiens
  misc_RNA (1)...(19): siRNA sense strand
cuacagcccgcaucaauga

SEQ ID NO: 628450 - RNA, 19 nt, Homo sapiens
  misc_RNA (1)...(19): siRNA sense strand
gcaguaauaacaacaguag

SEQ ID NO: 628451 - RNA, 19 nt, Homo sapiens
  misc_RNA (1)...(19): siRNA sense strand
auacaucccuaauggaaga

SEQ ID NO: 628452 - RNA, 19 nt, Homo sapiens
  misc_RNA (1)...(19): siRNA sense strand
cuacgugauuccaguggua

SEQ ID NO: 628453 - RNA, 19 nt, Homo sapiens
  misc_RNA (1)...(19): siRNA sense strand
caaccucaaccauauauuc

SEQ ID NO: 628454 - RNA, 19 nt, Homo sapiens
  misc_RNA (1)...(19): siRNA sense strand
gcuacaaaccgaaugauca

SEQ ID NO: 628455 - RNA, 19 nt, Homo sapiens
  misc_RNA (1)...(19): siRNA sense strand
acagaaccuuuauugugua

SEQ ID NO: 628456 - RNA, 19 nt, Homo sapiens
  misc_RNA (1)...(19): siRNA sense strand
gacaaguuauuucuacaag

SEQ ID NO: 628457 - RNA, 19 nt, Homo sapiens
  misc_RNA (1)...(19): siRNA sense strand
caaaccgaaugaucacuca

SEQ ID NO: 628458 - RNA, 19 nt, Homo sapiens
  misc_RNA (1)...(19): siRNA sense strand
acaaggauacuacgugauu

SEQ ID NO: 628459 - RNA, 19 nt, Homo sapiens
  misc_RNA (1)...(19): siRNA sense strand
gcaaaacgaaccucuauau

SEQ ID NO: 628460 - RNA, 19 nt, Homo sapiens
  misc_RNA (1)...(19): siRNA sense strand
gugaagcucugucaaccau

SEQ ID NO: 628461 - RNA, 19 nt, Homo sapiens
  misc_RNA (1)...(19): siRNA sense strand
ucuauuacacccuauauug

SEQ ID NO: 628462 - RNA, 19 nt, Homo sapiens
  misc_RNA (1)...(19): siRNA sense strand
caaacaaauacaucccuaa

SEQ ID NO: 628463 - RNA, 19 nt, Homo sapiens
  misc_RNA (1)...(19): siRNA sense strand
ccucuacauuucuaauuug

SEQ ID NO: 628464 - RNA, 19 nt, Homo sapiens
  misc_RNA (1)...(19): siRNA sense strand
gaaaauagucuccacaaag

SEQ ID NO: 628465 - RNA, 19 nt, Homo sapiens
  misc_RNA (1)...(19): siRNA sense strand
aaauacaucccuaauggaa

SEQ ID NO: 628466 - RNA, 19 nt, Homo sapiens
  misc_RNA (1)...(19): siRNA sense strand
gagacagaacccaaacaaa

SEQ ID NO: 628467 - RNA, 19 nt, Homo sapiens
  misc_RNA (1)...(19): siRNA sense strand
gaaaauaugcucaaaccau

SEQ ID NO: 628468 - RNA, 19 nt, Homo sapiens
  misc_RNA (1)...(19): siRNA sense strand
ggaggcaaguggucaacag

SEQ ID NO: 628469 - RNA, 19 nt, Homo sapiens
  misc_RNA (1)...(19): siRNA sense strand
uaagacaccaccaggaguu

SEQ ID NO: 628470 - RNA, 19 nt, Homo sapiens
  misc_RNA (1)...(19): siRNA sense strand
gcaccaccagcaguaauaa

SEQ ID NO: 628471 - RNA, 19 nt, Homo sapiens
  misc_RNA (1)...(19): siRNA sense strand
gaacccaaacaaauacauc

SEQ ID NO: 628472 - RNA, 19 nt, Homo sapiens
  misc_RNA (1)...(19): siRNA sense strand
gagcacaccaugucacuac

SEQ ID NO: 628473 - RNA, 19 nt, Homo sapiens
  misc_RNA (1)...(19): siRNA sense strand
caacuacagcugcuauaca

SEQ ID NO: 628474 - RNA, 19 nt, Homo sapiens
  misc_RNA (1)...(19): siRNA sense strand
ggaaugacacuuacuuacg

SEQ ID NO: 628475 - RNA, 19 nt, Homo sapiens
  misc_RNA (1)...(19): siRNA sense strand
gagcaagaacuagaaaaua

SEQ ID NO: 628476 - RNA, 19 nt, Homo sapiens
  misc_RNA (1)...(19): siRNA sense strand
ccuuucaaccuaauaagua

SEQ ID NO: 628477 - RNA, 19 nt, Homo sapiens
  misc_RNA (1)...(19): siRNA sense strand
cuacagcugcuauacagaa

SEQ ID NO: 628478 - RNA, 19 nt, Homo sapiens
  misc_RNA (1)...(19): siRNA sense strand
aggauggaaucaacagaaa

SEQ ID NO: 628479 - RNA, 19 nt, Homo sapiens
  misc_RNA (1)...(19): siRNA sense strand
gaugagcaagaacuagaaa

SEQ ID NO: 628480 - RNA, 19 nt, Homo sapiens
  misc_RNA (1)...(19): siRNA sense strand
gaugggaucagcucagcaa

SEQ ID NO: 628481 - RNA, 19 nt, Homo sapiens
  misc_RNA (1)...(19): siRNA sense strand
ccuaccaaccucuacauuu

SEQ ID NO: 628482 - RNA, 19 nt, Homo sapiens
  misc_RNA (1)...(19): siRNA sense strand
gaaugaucacucaaacuuc

SEQ ID NO: 628483 - RNA, 19 nt, Homo sapiens
  misc_RNA (1)...(19): siRNA sense strand
uagcagcaguagcaacuca

SEQ ID NO: 628484 - RNA, 19 nt, Homo sapiens
  misc_RNA (1)...(19): siRNA sense strand
caaauacaucccuaaugga

SEQ ID NO: 628485 - RNA, 19 nt, Homo sapiens
  misc_RNA (1)...(19): siRNA sense strand
ggaugagcaagaacuagaa

SEQ ID NO: 628486 - RNA, 19 nt, Homo sapiens
  misc_RNA (1)...(19): siRNA sense strand
gauuuuauccuucaccaua

SEQ ID NO: 628487 - RNA, 19 nt, Homo sapiens
  misc_RNA (1)...(19): siRNA sense strand
caaggauacuacgugauuc

SEQ ID NO: 628488 - RNA, 19 nt, Homo sapiens
  misc_RNA (1)...(19): siRNA sense strand
aaugaucacucaaacuucu

SEQ ID NO: 628489 - RNA, 19 nt, Homo sapiens
  misc_RNA (1)...(19): siRNA sense strand
gaagaccauggcauagaga

SEQ ID NO: 628490 - RNA, 19 nt, Homo sapiens
  misc_RNA (1)...(19): siRNA sense strand
ccauuuggacaaguuauuu

SEQ ID NO: 628491 - RNA, 19 nt, Homo sapiens
  misc_RNA (1)...(19): siRNA sense strand
ccucaaccauauauucuac

SEQ ID NO: 628492 - RNA, 19 nt, Homo sapiens
  misc_RNA (1)...(19): siRNA sense strand
uauugcaucuccuguaucu

SEQ ID NO: 628493 - RNA, 19 nt, Homo sapiens
  misc_RNA (1)...(19): siRNA sense strand
cgagacgucuaaugaccau

SEQ ID NO: 628494 - RNA, 19 nt, Homo sapiens
  misc_RNA (1)...(19): siRNA sense strand
aagcuguuauuggucauuu

SEQ ID NO: 628495 - RNA, 19 nt, Homo sapiens
  misc_RNA (1)...(19): siRNA sense strand
cacucaaacuucuauuaca

SEQ ID NO: 628496 - RNA, 19 nt, Homo sapiens
  misc_RNA (1)...(19): siRNA sense strand
gcuggaaugacacuuacuu

SEQ ID NO: 628497 - RNA, 19 nt, Homo sapiens
  misc_RNA (1)...(19): siRNA sense strand
aagcucaaauggcaaagca

SEQ ID NO: 628498 - RNA, 19 nt, Homo sapiens
  misc_RNA (1)...(19): siRNA sense strand
ucacucaaacuucuauuac

SEQ ID NO: 628499 - RNA, 19 nt, Homo sapiens
  misc_RNA (1)...(19): siRNA sense strand
aaaauagucuccacaaagg

SEQ ID NO: 628500 - RNA, 19 nt, Homo sapiens
  misc_RNA (1)...(19): siRNA sense strand
cagcaguaauaacaacagu

SEQ ID NO: 628501 - RNA, 19 nt, Homo sapiens
  misc_RNA (1)...(19): siRNA sense strand
cuccauggaugagcaagaa

SEQ ID NO: 628502 - RNA, 19 nt, Homo sapiens
  misc_RNA (1)...(19): siRNA sense strand
agagacagaacccaaacaa

SEQ ID NO: 628503 - RNA, 19 nt, Homo sapiens
  misc_RNA (1)...(19): siRNA sense strand
uaggauggaaucaacagaa

SEQ ID NO: 628504 - RNA, 19 nt, Homo sapiens
  misc_RNA (1)...(19): siRNA sense strand
ucaaccauaugggaaaaua

SEQ ID NO: 628505 - RNA, 19 nt, Homo sapiens
  misc_RNA (1)...(19): siRNA sense strand
gcaaagcaacaggaacaag

SEQ ID NO: 628506 - RNA, 19 nt, Homo sapiens
  misc_RNA (1)...(19): siRNA sense strand
ggagccuacuugccacagu

SEQ ID NO: 628507 - RNA, 19 nt, Homo sapiens
  misc_RNA (1)...(19): siRNA sense strand
ggaacauacaugccugcaa

SEQ ID NO: 628508 - RNA, 19 nt, Homo sapiens
  misc_RNA (1)...(19): siRNA sense strand
aaaccauuuggacaaguua

SEQ ID NO: 628509 - RNA, 19 nt, Homo sapiens
  misc_RNA (1)...(19): siRNA sense strand
augcaaagguuaugguuuu

SEQ ID NO: 628510 - RNA, 19 nt, Homo sapiens
  misc_RNA (1)...(19): siRNA sense strand
caaaugcaaagguuauggu

SEQ ID NO: 628511 - RNA, 19 nt, Homo sapiens
  misc_RNA (1)...(19): siRNA sense strand
cuauauugcaucuccugua

SEQ ID NO: 628512 - RNA, 19 nt, Homo sapiens
  misc_RNA (1)...(19): siRNA sense strand
cuggaaugacacuuacuua

SEQ ID NO: 628513 - RNA, 19 nt, Homo sapiens
  misc_RNA (1)...(19): siRNA sense strand
gguacaagucgugguguug

SEQ ID NO: 628514 - RNA, 19 nt, Homo sapiens
  misc_RNA (1)...(19): siRNA sense strand
uggcaaagcaacaggaaca

SEQ ID NO: 628515 - RNA, 19 nt, Homo sapiens
  misc_RNA (1)...(19): siRNA sense strand
caaccucuacauuucuaau

SEQ ID NO: 628516 - RNA, 19 nt, Homo sapiens
  misc_RNA (1)...(19): siRNA sense strand
accaaccucuacauuucua

SEQ ID NO: 628517 - RNA, 19 nt, Homo sapiens
  misc_RNA (1)...(19): siRNA sense strand
gcaagaacuagaaaauaug

SEQ ID NO: 628518 - RNA, 19 nt, Homo sapiens
  misc_RNA (1)...(19): siRNA sense strand
ggagcacaccaugucacua

SEQ ID NO: 628519 - RNA, 19 nt, Homo sapiens
  misc_RNA (1)...(19): siRNA sense strand
gcaaccucaaccauauauu

SEQ ID NO: 628520 - RNA, 19 nt, Homo sapiens
  misc_RNA (1)...(19): siRNA sense strand
ccaccagcaguaauaacaa

SEQ ID NO: 628521 - RNA, 19 nt, Homo sapiens
  misc_RNA (1)...(19): siRNA sense strand
gaagcuguuauuggucauu

SEQ ID NO: 628522 - RNA, 19 nt, Homo sapiens
  misc_RNA (1)...(19): siRNA sense strand
cauggaugagcaagaacua

SEQ ID NO: 628523 - RNA, 19 nt, Homo sapiens
  misc_RNA (1)...(19): siRNA sense strand
ucaaccauauauucuacag

SEQ ID NO: 628524 - RNA, 19 nt, Homo sapiens
  misc_RNA (1)...(19): siRNA sense strand
gcuguuauuggucauuuua

SEQ ID NO: 628525 - RNA, 19 nt, Homo sapiens
  misc_RNA (1)...(19): siRNA sense strand
guguaaguuugcugaugga

SEQ ID NO: 628526 - RNA, 19 nt, Homo sapiens
  misc_RNA (1)...(19): siRNA sense strand
cacuacagcccgcaucaau

SEQ ID NO: 628527 - RNA, 19 nt, Homo sapiens
  misc_RNA (1)...(19): siRNA sense strand
caccagcaguaauaacaac

SEQ ID NO: 628528 - RNA, 19 nt, Homo sapiens
  misc_RNA (1)...(19): siRNA sense strand
ccauauaccuuucaaccua

SEQ ID NO: 628529 - RNA, 19 nt, Homo sapiens
  misc_RNA (1)...(19): siRNA sense strand
gacagaacccaaacaaaua

SEQ ID NO: 628530 - RNA, 19 nt, Homo sapiens
  misc_RNA (1)...(19): siRNA sense strand
gaaugacacuuacuuacga

SEQ ID NO: 628531 - RNA, 19 nt, Homo sapiens
  misc_RNA (1)...(19): siRNA sense strand
gaugcaaccucaaccauau

SEQ ID NO: 628532 - RNA, 19 nt, Homo sapiens
  misc_RNA (1)...(19): siRNA sense strand
gaagcucugucaaccauau

SEQ ID NO: 628533 - RNA, 19 nt, Homo sapiens
  misc_RNA (1)...(19): siRNA sense strand
caaguuauuucuacaagga

SEQ ID NO: 628534 - RNA, 19 nt, Homo sapiens
  misc_RNA (1)...(19): siRNA sense strand
acaaauacaucccuaaugg

SEQ ID NO: 628535 - RNA, 19 nt, Homo sapiens
  misc_RNA (1)...(19): siRNA sense strand
gaaccuuuauuguguaagu

SEQ ID NO: 628536 - RNA, 19 nt, Homo sapiens
  misc_RNA (1)...(19): siRNA sense strand
cuaccaaccucuacauuuc

SEQ ID NO: 628537 - RNA, 19 nt, Homo sapiens
  misc_RNA (1)...(19): siRNA sense strand
ggaagaccauggcauagag

SEQ ID NO: 628538 - RNA, 19 nt, Homo sapiens
  misc_RNA (1)...(19): siRNA sense strand
ggaugcaaccucaaccaua

SEQ ID NO: 628539 - RNA, 19 nt, Homo sapiens
  misc_RNA (1)...(19): siRNA sense strand
agacagaacccaaacaaau

SEQ ID NO: 628540 - RNA, 19 nt, Homo sapiens
  misc_RNA (1)...(19): siRNA sense strand
cgaaugaucacucaaacuu

SEQ ID NO: 628541 - RNA, 19 nt, Homo sapiens
  misc_RNA (1)...(19): siRNA sense strand
cauauaccuuucaaccuaa

SEQ ID NO: 628542 - RNA, 19 nt, Homo sapiens
  misc_RNA (1)...(19): siRNA sense strand
caaagcaacaggaacaaga

SEQ ID NO: 628543 - RNA, 19 nt, Homo sapiens
  misc_RNA (1)...(19): siRNA sense strand
cguguuaacucccucaaug

SEQ ID NO: 628544 - RNA, 19 nt, Homo sapiens
  misc_RNA (1)...(19): siRNA sense strand
uauauugcaucuccuguau

SEQ ID NO: 628545 - RNA, 19 nt, Homo sapiens
  misc_RNA (1)...(19): siRNA sense strand
ggacaaguuauuucuacaa

SEQ ID NO: 628546 - RNA, 19 nt, Homo sapiens
  misc_RNA (1)...(19): siRNA sense strand
ggaaaauagucuccacaaa

SEQ ID NO: 628547 - RNA, 19 nt, Homo sapiens
  misc_RNA (1)...(19): siRNA sense strand
gguguuggcuuugcuagga

SEQ ID NO: 628548 - RNA, 19 nt, Homo sapiens
  misc_RNA (1)...(19): siRNA sense strand
cagaaccuuuauuguguaa

SEQ ID NO: 628549 - RNA, 19 nt, Homo sapiens
  misc_RNA (1)...(19): siRNA sense strand
cuacagcccgcaucaauga

SEQ ID NO: 628550 - RNA, 19 nt, Homo sapiens
  misc_RNA (1)...(19): siRNA sense strand
gcaguaauaacaacaguag

SEQ ID NO: 628551 - RNA, 19 nt, Homo sapiens
  misc_RNA (1)...(19): siRNA sense strand
auacaucccuaauggaaga

SEQ ID NO: 628552 - RNA, 19 nt, Homo sapiens
  misc_RNA (1)...(19): siRNA sense strand
cuacgugauuccaguggua

SEQ ID NO: 628553 - RNA, 19 nt, Homo sapiens
  misc_RNA (1)...(19): siRNA sense strand
caaccucaaccauauauuc

SEQ ID NO: 628554 - RNA, 19 nt, Homo sapiens
  misc_RNA (1)...(19): siRNA sense strand
gcuacaaaccgaaugauca

SEQ ID NO: 628555 - RNA, 19 nt, Homo sapiens
  misc_RNA (1)...(19): siRNA sense strand
acagaaccuuuauugugua

SEQ ID NO: 628556 - RNA, 19 nt, Homo sapiens
  misc_RNA (1)...(19): siRNA sense strand
gacaaguuauuucuacaag

SEQ ID NO: 628557 - RNA, 19 nt, Homo sapiens
  misc_RNA (1)...(19): siRNA sense strand
caaaccgaaugaucacuca

SEQ ID NO: 628558 - RNA, 19 nt, Homo sapiens
  misc_RNA (1)...(19): siRNA sense strand
acaaggauacuacgugauu

SEQ ID NO: 628559 - RNA, 19 nt, Homo sapiens
  misc_RNA (1)...(19): siRNA sense strand
gcaaaacgaaccucuauau

SEQ ID NO: 628560 - RNA, 19 nt, Homo sapiens
  misc_RNA (1)...(19): siRNA sense strand
gugaagcucugucaaccau

SEQ ID NO: 628561 - RNA, 19 nt, Homo sapiens
  misc_RNA (1)...(19): siRNA sense strand
ucuauuacacccuauauug

SEQ ID NO: 628562 - RNA, 19 nt, Homo sapiens
  misc_RNA (1)...(19): siRNA sense strand
caaacaaauacaucccuaa

SEQ ID NO: 628563 - RNA, 19 nt, Homo sapiens
  misc_RNA (1)...(19): siRNA sense strand
ccucuacauuucuaauuug

SEQ ID NO: 628564 - RNA, 19 nt, Homo sapiens
  misc_RNA (1)...(19): siRNA sense strand
gaaaauagucuccacaaag

SEQ ID NO: 628565 - RNA, 19 nt, Homo sapiens
  misc_RNA (1)...(19): siRNA sense strand
aaauacaucccuaauggaa

SEQ ID NO: 628566 - RNA, 19 nt, Homo sapiens
  misc_RNA (1)...(19): siRNA sense strand
gagacagaacccaaacaaa

SEQ ID NO: 628567 - RNA, 19 nt, Homo sapiens
  misc_RNA (1)...(19): siRNA sense strand
gaaaauaugcucaaaccau

SEQ ID NO: 628568 - RNA, 19 nt, Homo sapiens
  misc_RNA (1)...(19): siRNA sense strand
ggaggcaaguggucaacag

SEQ ID NO: 628569 - RNA, 19 nt, Homo sapiens
  misc_RNA (1)...(19): siRNA sense strand
uaagacaccaccaggaguu

SEQ ID NO: 628570 - RNA, 19 nt, Homo sapiens
  misc_RNA (1)...(19): siRNA sense strand
gcaccaccagcaguaauaa

SEQ ID NO: 628571 - RNA, 19 nt, Homo sapiens
  misc_RNA (1)...(19): siRNA sense strand
gaacccaaacaaauacauc

SEQ ID NO: 628572 - RNA, 19 nt, Homo sapiens
  misc_RNA (1)...(19): siRNA sense strand
gagcacaccaugucacuac

SEQ ID NO: 628573 - RNA, 19 nt, Homo sapiens
  misc_RNA (1)...(19): siRNA sense strand
caacuacagcugcuauaca

SEQ ID NO: 628574 - RNA, 19 nt, Homo sapiens
  misc_RNA (1)...(19): siRNA sense strand
ggaaugacacuuacuuacg

SEQ ID NO: 628575 - RNA, 19 nt, Homo sapiens
  misc_RNA (1)...(19): siRNA sense strand
gagcaagaacuagaaaaua

SEQ ID NO: 628576 - RNA, 19 nt, Homo sapiens
  misc_RNA (1)...(19): siRNA sense strand
ccuuucaaccuaauaagua

SEQ ID NO: 628577 - RNA, 19 nt, Homo sapiens
  misc_RNA (1)...(19): siRNA sense strand
cuacagcugcuauacagaa

SEQ ID NO: 628578 - RNA, 19 nt, Homo sapiens
  misc_RNA (1)...(19): siRNA sense strand
aggauggaaucaacagaaa

SEQ ID NO: 628579 - RNA, 19 nt, Homo sapiens
  misc_RNA (1)...(19): siRNA sense strand
gaugagcaagaacuagaaa

SEQ ID NO: 628580 - RNA, 19 nt, Homo sapiens
  misc_RNA (1)...(19): siRNA sense strand
gaugggaucagcucagcaa

SEQ ID NO: 628581 - RNA, 19 nt, Homo sapiens
  misc_RNA (1)...(19): siRNA sense strand
ccuaccaaccucuacauuu

SEQ ID NO: 628582 - RNA, 19 nt, Homo sapiens
  misc_RNA (1)...(19): siRNA sense strand
gaaugaucacucaaacuuc

SEQ ID NO: 628583 - RNA, 19 nt, Homo sapiens
  misc_RNA (1)...(19): siRNA sense strand
uagcagcaguagcaacuca

SEQ ID NO: 628584 - RNA, 19 nt, Homo sapiens
  misc_RNA (1)...(19): siRNA sense strand
caaauacaucccuaaugga

SEQ ID NO: 628585 - RNA, 19 nt, Homo sapiens
  misc_RNA (1)...(19): siRNA sense strand
ggaugagcaagaacuagaa

SEQ ID NO: 628586 - RNA, 19 nt, Homo sapiens
  misc_RNA (1)...(19): siRNA sense strand
gauuuuauccuucaccaua

SEQ ID NO: 628587 - RNA, 19 nt, Homo sapiens
  misc_RNA (1)...(19): siRNA sense strand
caaggauacuacgugauuc

SEQ ID NO: 628588 - RNA, 19 nt, Homo sapiens
  misc_RNA (1)...(19): siRNA sense strand
aaugaucacucaaacuucu

SEQ ID NO: 628589 - RNA, 19 nt, Homo sapiens
  misc_RNA (1)...(19): siRNA sense strand
gaagaccauggcauagaga

SEQ ID NO: 628590 - RNA, 19 nt, Homo sapiens
  misc_RNA (1)...(19): siRNA sense strand
ccauuuggacaaguuauuu

SEQ ID NO: 628591 - RNA, 19 nt, Homo sapiens
  misc_RNA (1)...(19): siRNA sense strand
ccucaaccauauauucuac

SEQ ID NO: 628592 - RNA, 19 nt, Homo sapiens
  misc_RNA (1)...(19): siRNA sense strand
uauugcaucuccuguaucu

SEQ ID NO: 628593 - RNA, 19 nt, Homo sapiens
  misc_RNA (1)...(19): siRNA sense strand
cgagacgucuaaugaccau

SEQ ID NO: 628594 - RNA, 19 nt, Homo sapiens
  misc_RNA (1)...(19): siRNA sense strand
aagcuguuauuggucauuu

SEQ ID NO: 628595 - RNA, 19 nt, Homo sapiens
  misc_RNA (1)...(19): siRNA sense strand
cacucaaacuucuauuaca

SEQ ID NO: 628596 - RNA, 19 nt, Homo sapiens
  misc_RNA (1)...(19): siRNA sense strand
gcuggaaugacacuuacuu

SEQ ID NO: 628597 - RNA, 19 nt, Homo sapiens
  misc_RNA (1)...(19): siRNA sense strand
aagcucaaauggcaaagca

SEQ ID NO: 628598 - RNA, 19 nt, Homo sapiens
  misc_RNA (1)...(19): siRNA sense strand
ucacucaaacuucuauuac

SEQ ID NO: 628599 - RNA, 19 nt, Homo sapiens
  misc_RNA (1)...(19): siRNA sense strand
aaaauagucuccacaaagg

SEQ ID NO: 628600 - RNA, 19 nt, Homo sapiens
  misc_RNA (1)...(19): siRNA sense strand
cagcaguaauaacaacagu

SEQ ID NO: 628601 - RNA, 19 nt, Homo sapiens
  misc_RNA (1)...(19): siRNA sense strand
cuccauggaugagcaagaa

SEQ ID NO: 628602 - RNA, 19 nt, Homo sapiens
  misc_RNA (1)...(19): siRNA sense strand
agagacagaacccaaacaa

SEQ ID NO: 628603 - RNA, 19 nt, Homo sapiens
  misc_RNA (1)...(19): siRNA sense strand
uaggauggaaucaacagaa

SEQ ID NO: 628604 - RNA, 19 nt, Homo sapiens
  misc_RNA (1)...(19): siRNA sense strand
ucaaccauaugggaaaaua

SEQ ID NO: 628605 - RNA, 19 nt, Homo sapiens
  misc_RNA (1)...(19): siRNA sense strand
gcaaagcaacaggaacaag

SEQ ID NO: 628606 - RNA, 19 nt, Homo sapiens
  misc_RNA (1)...(19): siRNA sense strand
ggagccuacuugccacagu

SEQ ID NO: 628607 - RNA, 19 nt, Homo sapiens
  misc_RNA (1)...(19): siRNA sense strand
ggaacauacaugccugcaa

SEQ ID NO: 628608 - RNA, 19 nt, Homo sapiens
  misc_RNA (1)...(19): siRNA sense strand
aaaccauuuggacaaguua

SEQ ID NO: 628609 - RNA, 19 nt, Homo sapiens
  misc_RNA (1)...(19): siRNA sense strand
augcaaagguuaugguuuu

SEQ ID NO: 628610 - RNA, 19 nt, Homo sapiens
  misc_RNA (1)...(19): siRNA sense strand
caaaugcaaagguuauggu

SEQ ID NO: 628611 - RNA, 19 nt, Homo sapiens
  misc_RNA (1)...(19): siRNA sense strand
cuauauugcaucuccugua

SEQ ID NO: 628612 - RNA, 19 nt, Homo sapiens
  misc_RNA (1)...(19): siRNA sense strand
cuggaaugacacuuacuua

SEQ ID NO: 628613 - RNA, 19 nt, Homo sapiens
  misc_RNA (1)...(19): siRNA sense strand
gguacaagucgugguguug

SEQ ID NO: 628614 - RNA, 19 nt, Homo sapiens
  misc_RNA (1)...(19): siRNA sense strand
uggcaaagcaacaggaaca

SEQ ID NO: 628615 - RNA, 19 nt, Homo sapiens
  misc_RNA (1)...(19): siRNA sense strand
caaccucuacauuucuaau

SEQ ID NO: 628616 - RNA, 19 nt, Homo sapiens
  misc_RNA (1)...(19): siRNA sense strand
accaaccucuacauuucua

SEQ ID NO: 628617 - RNA, 19 nt, Homo sapiens
  misc_RNA (1)...(19): siRNA sense strand
gcaagaacuagaaaauaug

SEQ ID NO: 628618 - RNA, 19 nt, Homo sapiens
  misc_RNA (1)...(19): siRNA sense strand
ggagcacaccaugucacua

SEQ ID NO: 628619 - RNA, 19 nt, Homo sapiens
  misc_RNA (1)...(19): siRNA sense strand
gcaaccucaaccauauauu

SEQ ID NO: 628620 - RNA, 19 nt, Homo sapiens
  misc_RNA (1)...(19): siRNA sense strand
ccaccagcaguaauaacaa

SEQ ID NO: 628621 - RNA, 19 nt, Homo sapiens
  misc_RNA (1)...(19): siRNA sense strand
gaagcuguuauuggucauu

SEQ ID NO: 628622 - RNA, 19 nt, Homo sapiens
  misc_RNA (1)...(19): siRNA sense strand
cauggaugagcaagaacua

SEQ ID NO: 628623 - RNA, 19 nt, Homo sapiens
  misc_RNA (1)...(19): siRNA sense strand
ucaaccauauauucuacag

SEQ ID NO: 628624 - RNA, 19 nt, Homo sapiens
  misc_RNA (1)...(19): siRNA sense strand
gcuguuauuggucauuuua

SEQ ID NO: 628625 - RNA, 19 nt, Homo sapiens
  misc_RNA (1)...(19): siRNA sense strand
guguaaguuugcugaugga

SEQ ID NO: 628626 - RNA, 19 nt, Homo sapiens
  misc_RNA (1)...(19): siRNA sense strand
cacuacagcccgcaucaau

SEQ ID NO: 628627 - RNA, 19 nt, Homo sapiens
  misc_RNA (1)...(19): siRNA sense strand
caccagcaguaauaacaac

SEQ ID NO: 628628 - RNA, 19 nt, Homo sapiens
  misc_RNA (1)...(19): siRNA sense strand
ccauauaccuuucaaccua

SEQ ID NO: 628629 - RNA, 19 nt, Homo sapiens
  misc_RNA (1)...(19): siRNA sense strand
gacagaacccaaacaaaua

SEQ ID NO: 628630 - RNA, 19 nt, Homo sapiens
  misc_RNA (1)...(19): siRNA sense strand
gaaugacacuuacuuacga

SEQ ID NO: 628631 - RNA, 19 nt, Homo sapiens
  misc_RNA (1)...(19): siRNA sense strand
gaugcaaccucaaccauau

SEQ ID NO: 628632 - RNA, 19 nt, Homo sapiens
  misc_RNA (1)...(19): siRNA sense strand
gaagcucugucaaccauau

SEQ ID NO: 628633 - RNA, 19 nt, Homo sapiens
  misc_RNA (1)...(19): siRNA sense strand
caaguuauuucuacaagga

SEQ ID NO: 628634 - RNA, 19 nt, Homo sapiens
  misc_RNA (1)...(19): siRNA sense strand
acaaauacaucccuaaugg

SEQ ID NO: 628635 - RNA, 19 nt, Homo sapiens
  misc_RNA (1)...(19): siRNA sense strand
gaaccuuuauuguguaagu

SEQ ID NO: 628636 - RNA, 19 nt, Homo sapiens
  misc_RNA (1)...(19): siRNA sense strand
cuaccaaccucuacauuuc

SEQ ID NO: 628637 - RNA, 19 nt, Homo sapiens
  misc_RNA (1)...(19): siRNA sense strand
ggaagaccauggcauagag

SEQ ID NO: 628638 - RNA, 19 nt, Homo sapiens
  misc_RNA (1)...(19): siRNA sense strand
ggaugcaaccucaaccaua

SEQ ID NO: 628639 - RNA, 19 nt, Homo sapiens
  misc_RNA (1)...(19): siRNA sense strand
agacagaacccaaacaaau

SEQ ID NO: 628640 - RNA, 19 nt, Homo sapiens
  misc_RNA (1)...(19): siRNA sense strand
cgaaugaucacucaaacuu

SEQ ID NO: 628641 - RNA, 19 nt, Homo sapiens
  misc_RNA (1)...(19): siRNA sense strand
cauauaccuuucaaccuaa

SEQ ID NO: 628642 - RNA, 19 nt, Homo sapiens
  misc_RNA (1)...(19): siRNA sense strand
caaagcaacaggaacaaga

SEQ ID NO: 628643 - RNA, 19 nt, Homo sapiens
  misc_RNA (1)...(19): siRNA sense strand
cguguuaacucccucaaug

SEQ ID NO: 628644 - RNA, 19 nt, Homo sapiens
  misc_RNA (1)...(19): siRNA sense strand
uauauugcaucuccuguau

SEQ ID NO: 628645 - RNA, 19 nt, Homo sapiens
  misc_RNA (1)...(19): siRNA sense strand
ggacaaguuauuucuacaa

SEQ ID NO: 628646 - RNA, 19 nt, Homo sapiens
  misc_RNA (1)...(19): siRNA sense strand
ggaaaauagucuccacaaa

SEQ ID NO: 628647 - RNA, 19 nt, Homo sapiens
  misc_RNA (1)...(19): siRNA sense strand
gguguuggcuuugcuagga

SEQ ID NO: 628648 - RNA, 19 nt, Homo sapiens
  misc_RNA (1)...(19): siRNA sense strand
cagaaccuuuauuguguaa

SEQ ID NO: 628649 - RNA, 19 nt, Homo sapiens
  misc_RNA (1)...(19): siRNA sense strand
cuacagcccgcaucaauga

SEQ ID NO: 628650 - RNA, 19 nt, Homo sapiens
  misc_RNA (1)...(19): siRNA sense strand
gcaguaauaacaacaguag

SEQ ID NO: 628651 - RNA, 19 nt, Homo sapiens
  misc_RNA (1)...(19): siRNA sense strand
auacaucccuaauggaaga

SEQ ID NO: 628652 - RNA, 19 nt, Homo sapiens
  misc_RNA (1)...(19): siRNA sense strand
cuacgugauuccaguggua

SEQ ID NO: 628653 - RNA, 19 nt, Homo sapiens
  misc_RNA (1)...(19): siRNA sense strand
caaccucaaccauauauuc

SEQ ID NO: 628654 - RNA, 19 nt, Homo sapiens
  misc_RNA (1)...(19): siRNA sense strand
gcuacaaaccgaaugauca

SEQ ID NO: 628655 - RNA, 19 nt, Homo sapiens
  misc_RNA (1)...(19): siRNA sense strand
acagaaccuuuauugugua

SEQ ID NO: 628656 - RNA, 19 nt, Homo sapiens
  misc_RNA (1)...(19): siRNA sense strand
gacaaguuauuucuacaag

SEQ ID NO: 628657 - RNA, 19 nt, Homo sapiens
  misc_RNA (1)...(19): siRNA sense strand
caaaccgaaugaucacuca

SEQ ID NO: 628658 - RNA, 19 nt, Homo sapiens
  misc_RNA (1)...(19): siRNA sense strand
acaaggauacuacgugauu

SEQ ID NO: 628659 - RNA, 19 nt, Homo sapiens
  misc_RNA (1)...(19): siRNA sense strand
gcaaaacgaaccucuauau

SEQ ID NO: 628660 - RNA, 19 nt, Homo sapiens
  misc_RNA (1)...(19): siRNA sense strand
gugaagcucugucaaccau

SEQ ID NO: 628661 - RNA, 19 nt, Homo sapiens
  misc_RNA (1)...(19): siRNA sense strand
ucuauuacacccuauauug

SEQ ID NO: 628662 - RNA, 19 nt, Homo sapiens
  misc_RNA (1)...(19): siRNA sense strand
caaacaaauacaucccuaa

SEQ ID NO: 628663 - RNA, 19 nt, Homo sapiens
  misc_RNA (1)...(19): siRNA sense strand
ccucuacauuucuaauuug

SEQ ID NO: 628664 - RNA, 19 nt, Homo sapiens
  misc_RNA (1)...(19): siRNA sense strand
gaaaauagucuccacaaag

SEQ ID NO: 628665 - RNA, 19 nt, Homo sapiens
  misc_RNA (1)...(19): siRNA sense strand
aaauacaucccuaauggaa

SEQ ID NO: 628666 - RNA, 19 nt, Homo sapiens
  misc_RNA (1)...(19): siRNA sense strand
gagacagaacccaaacaaa

SEQ ID NO: 628667 - RNA, 19 nt, Homo sapiens
  misc_RNA (1)...(19): siRNA sense strand
gaaaauaugcucaaaccau

SEQ ID NO: 628668 - RNA, 19 nt, Homo sapiens
  misc_RNA (1)...(19): siRNA sense strand
ggaggcaaguggucaacag

SEQ ID NO: 628669 - RNA, 19 nt, Homo sapiens
  misc_RNA (1)...(19): siRNA sense strand
uaagacaccaccaggaguu

SEQ ID NO: 628670 - RNA, 19 nt, Homo sapiens
  misc_RNA (1)...(19): siRNA sense strand
gcaccaccagcaguaauaa

SEQ ID NO: 628671 - RNA, 19 nt, Homo sapiens
  misc_RNA (1)...(19): siRNA sense strand
gaacccaaacaaauacauc

SEQ ID NO: 628672 - RNA, 19 nt, Homo sapiens
  misc_RNA (1)...(19): siRNA sense strand
gagcacaccaugucacuac

SEQ ID NO: 628673 - RNA, 19 nt, Homo sapiens
  misc_RNA (1)...(19): siRNA sense strand
caacuacagcugcuauaca

SEQ ID NO: 628674 - RNA, 19 nt, Homo sapiens
  misc_RNA (1)...(19): siRNA sense strand
ggaaugacacuuacuuacg

SEQ ID NO: 628675 - RNA, 19 nt, Homo sapiens
  misc_RNA (1)...(19): siRNA sense strand
gagcaagaacuagaaaaua

SEQ ID NO: 628676 - RNA, 19 nt, Homo sapiens
  misc_RNA (1)...(19): siRNA sense strand
ccuuucaaccuaauaagua

SEQ ID NO: 628677 - RNA, 19 nt, Homo sapiens
  misc_RNA (1)...(19): siRNA sense strand
cuacagcugcuauacagaa

SEQ ID NO: 628678 - RNA, 19 nt, Homo sapiens
  misc_RNA (1)...(19): siRNA sense strand
aggauggaaucaacagaaa

SEQ ID NO: 628679 - RNA, 19 nt, Homo sapiens
  misc_RNA (1)...(19): siRNA sense strand
gaugagcaagaacuagaaa

SEQ ID NO: 628680 - RNA, 19 nt, Homo sapiens
  misc_RNA (1)...(19): siRNA sense strand
gaugggaucagcucagcaa

SEQ ID NO: 628681 - RNA, 19 nt, Homo sapiens
  misc_RNA (1)...(19): siRNA sense strand
ccuaccaaccucuacauuu

SEQ ID NO: 628682 - RNA, 19 nt, Homo sapiens
  misc_RNA (1)...(19): siRNA sense strand
gaaugaucacucaaacuuc

SEQ ID NO: 628683 - RNA, 19 nt, Homo sapiens
  misc_RNA (1)...(19): siRNA sense strand
uagcagcaguagcaacuca

SEQ ID NO: 628684 - RNA, 19 nt, Homo sapiens
  misc_RNA (1)...(19): siRNA sense strand
caaauacaucccuaaugga

SEQ ID NO: 628685 - RNA, 19 nt, Homo sapiens
  misc_RNA (1)...(19): siRNA sense strand
ggaugagcaagaacuagaa

SEQ ID NO: 628686 - RNA, 19 nt, Homo sapiens
  misc_RNA (1)...(19): siRNA sense strand
gauuuuauccuucaccaua

SEQ ID NO: 628687 - RNA, 19 nt, Homo sapiens
  misc_RNA (1)...(19): siRNA sense strand
caaggauacuacgugauuc

SEQ ID NO: 628688 - RNA, 19 nt, Homo sapiens
  misc_RNA (1)...(19): siRNA sense strand
aaugaucacucaaacuucu

SEQ ID NO: 628689 - RNA, 19 nt, Homo sapiens
  misc_RNA (1)...(19): siRNA sense strand
gaagaccauggcauagaga

SEQ ID NO: 628690 - RNA, 19 nt, Homo sapiens
  misc_RNA (1)...(19): siRNA sense strand
ccauuuggacaaguuauuu

SEQ ID NO: 628691 - RNA, 19 nt, Homo sapiens
  misc_RNA (1)...(19): siRNA sense strand
ccucaaccauauauucuac

SEQ ID NO: 628692 - RNA, 19 nt, Homo sapiens
  misc_RNA (1)...(19): siRNA sense strand
uauugcaucuccuguaucu

SEQ ID NO: 628693 - RNA, 19 nt, Homo sapiens
  misc_RNA (1)...(19): siRNA sense strand
cgagacgucuaaugaccau

SEQ ID NO: 628694 - RNA, 19 nt, Homo sapiens
  misc_RNA (1)...(19): siRNA sense strand
aagcuguuauuggucauuu

SEQ ID NO: 628695 - RNA, 19 nt, Homo sapiens
  misc_RNA (1)...(19): siRNA sense strand
cacucaaacuucuauuaca

SEQ ID NO: 628696 - RNA, 19 nt, Homo sapiens
  misc_RNA (1)...(19): siRNA sense strand
gcuggaaugacacuuacuu

SEQ ID NO: 628697 - RNA, 19 nt, Homo sapiens
  misc_RNA (1)...(19): siRNA sense strand
aagcucaaauggcaaagca

SEQ ID NO: 628698 - RNA, 19 nt, Homo sapiens
  misc_RNA (1)...(19): siRNA sense strand
ucacucaaacuucuauuac

SEQ ID NO: 628699 - RNA, 19 nt, Homo sapiens
  misc_RNA (1)...(19): siRNA sense strand
aaaauagucuccacaaagg

SEQ ID NO: 628700 - RNA, 19 nt, Homo sapiens
  misc_RNA (1)...(19): siRNA sense strand
cagcaguaauaacaacagu

SEQ ID NO: 628701 - RNA, 19 nt, Homo sapiens
  misc_RNA (1)...(19): siRNA sense strand
cuccauggaugagcaagaa

SEQ ID NO: 628702 - RNA, 19 nt, Homo sapiens
  misc_RNA (1)...(19): siRNA sense strand
agagacagaacccaaacaa

SEQ ID NO: 628703 - RNA, 19 nt, Homo sapiens
  misc_RNA (1)...(19): siRNA sense strand
uaggauggaaucaacagaa

SEQ ID NO: 628704 - RNA, 19 nt, Homo sapiens
  misc_RNA (1)...(19): siRNA sense strand
ucaaccauaugggaaaaua

SEQ ID NO: 628705 - RNA, 19 nt, Homo sapiens
  misc_RNA (1)...(19): siRNA sense strand
gcaaagcaacaggaacaag

SEQ ID NO: 628706 - RNA, 19 nt, Homo sapiens
  misc_RNA (1)...(19): siRNA sense strand
ggagccuacuugccacagu

SEQ ID NO: 628707 - RNA, 19 nt, Homo sapiens
  misc_RNA (1)...(19): siRNA sense strand
ggaacauacaugccugcaa

SEQ ID NO: 628708 - RNA, 19 nt, Homo sapiens
  misc_RNA (1)...(19): siRNA sense strand
aaaccauuuggacaaguua

SEQ ID NO: 628709 - RNA, 19 nt, Homo sapiens
  misc_RNA (1)...(19): siRNA sense strand
augcaaagguuaugguuuu

SEQ ID NO: 628710 - RNA, 19 nt, Homo sapiens
  misc_RNA (1)...(19): siRNA sense strand
caaaugcaaagguuauggu

SEQ ID NO: 628711 - RNA, 19 nt, Homo sapiens
  misc_RNA (1)...(19): siRNA sense strand
cuauauugcaucuccugua

SEQ ID NO: 628712 - RNA, 19 nt, Homo sapiens
  misc_RNA (1)...(19): siRNA sense strand
cuggaaugacacuuacuua

SEQ ID NO: 628713 - RNA, 19 nt, Homo sapiens
  misc_RNA (1)...(19): siRNA sense strand
gguacaagucgugguguug

SEQ ID NO: 628714 - RNA, 19 nt, Homo sapiens
  misc_RNA (1)...(19): siRNA sense strand
uggcaaagcaacaggaaca

SEQ ID NO: 628715 - RNA, 19 nt, Homo sapiens
  misc_RNA (1)...(19): siRNA sense strand
caaccucuacauuucuaau

SEQ ID NO: 628716 - RNA, 19 nt, Homo sapiens
  misc_RNA (1)...(19): siRNA sense strand
accaaccucuacauuucua

SEQ ID NO: 628717 - RNA, 19 nt, Homo sapiens
  misc_RNA (1)...(19): siRNA sense strand
gcaagaacuagaaaauaug

SEQ ID NO: 628718 - RNA, 19 nt, Homo sapiens
  misc_RNA (1)...(19): siRNA sense strand
ggagcacaccaugucacua

SEQ ID NO: 628719 - RNA, 19 nt, Homo sapiens
  misc_RNA (1)...(19): siRNA sense strand
gcaaccucaaccauauauu

SEQ ID NO: 628720 - RNA, 19 nt, Homo sapiens
  misc_RNA (1)...(19): siRNA sense strand
ccaccagcaguaauaacaa

SEQ ID NO: 628721 - RNA, 19 nt, Homo sapiens
  misc_RNA (1)...(19): siRNA sense strand
gaagcuguuauuggucauu

SEQ ID NO: 628722 - RNA, 19 nt, Homo sapiens
  misc_RNA (1)...(19): siRNA sense strand
cauggaugagcaagaacua

SEQ ID NO: 628723 - RNA, 19 nt, Homo sapiens
  misc_RNA (1)...(19): siRNA sense strand
ucaaccauauauucuacag

SEQ ID NO: 628724 - RNA, 19 nt, Homo sapiens
  misc_RNA (1)...(19): siRNA sense strand
gcuguuauuggucauuuua

SEQ ID NO: 628725 - RNA, 19 nt, Homo sapiens
  misc_RNA (1)...(19): siRNA sense strand
guguaaguuugcugaugga

SEQ ID NO: 628726 - RNA, 19 nt, Homo sapiens
  misc_RNA (1)...(19): siRNA sense strand
cacuacagcccgcaucaau

SEQ ID NO: 628727 - RNA, 19 nt, Homo sapiens
  misc_RNA (1)...(19): siRNA sense strand
caccagcaguaauaacaac

SEQ ID NO: 628728 - RNA, 19 nt, Homo sapiens
  misc_RNA (1)...(19): siRNA sense strand
ccauauaccuuucaaccua

SEQ ID NO: 628729 - RNA, 19 nt, Homo sapiens
  misc_RNA (1)...(19): siRNA sense strand
gacagaacccaaacaaaua

SEQ ID NO: 628730 - RNA, 19 nt, Homo sapiens
  misc_RNA (1)...(19): siRNA sense strand
gaaugacacuuacuuacga

SEQ ID NO: 628731 - RNA, 19 nt, Homo sapiens
  misc_RNA (1)...(19): siRNA sense strand
gaugcaaccucaaccauau

SEQ ID NO: 628732 - RNA, 19 nt, Homo sapiens
  misc_RNA (1)...(19): siRNA sense strand
gaagcucugucaaccauau

SEQ ID NO: 628733 - RNA, 19 nt, Homo sapiens
  misc_RNA (1)...(19): siRNA sense strand
caaguuauuucuacaagga

SEQ ID NO: 628734 - RNA, 19 nt, Homo sapiens
  misc_RNA (1)...(19): siRNA sense strand
acaaauacaucccuaaugg

SEQ ID NO: 628735 - RNA, 19 nt, Homo sapiens
  misc_RNA (1)...(19): siRNA sense strand
gaaccuuuauuguguaagu

SEQ ID NO: 628736 - RNA, 19 nt, Homo sapiens
  misc_RNA (1)...(19): siRNA sense strand
cuaccaaccucuacauuuc

SEQ ID NO: 628737 - RNA, 19 nt, Homo sapiens
  misc_RNA (1)...(19): siRNA sense strand
ggaagaccauggcauagag

SEQ ID NO: 628738 - RNA, 19 nt, Homo sapiens
  misc_RNA (1)...(19): siRNA sense strand
ggaugcaaccucaaccaua

SEQ ID NO: 628739 - RNA, 19 nt, Homo sapiens
  misc_RNA (1)...(19): siRNA sense strand
agacagaacccaaacaaau

SEQ ID NO: 628740 - RNA, 19 nt, Homo sapiens
  misc_RNA (1)...(19): siRNA sense strand
cgaaugaucacucaaacuu

SEQ ID NO: 628741 - RNA, 19 nt, Homo sapiens
  misc_RNA (1)...(19): siRNA sense strand
cauauaccuuucaaccuaa

SEQ ID NO: 628742 - RNA, 19 nt, Homo sapiens
  misc_RNA (1)...(19): siRNA sense strand
caaagcaacaggaacaaga

SEQ ID NO: 628743 - RNA, 19 nt, Homo sapiens
  misc_RNA (1)...(19): siRNA sense strand
cguguuaacucccucaaug

SEQ ID NO: 628744 - RNA, 19 nt, Homo sapiens
  misc_RNA (1)...(19): siRNA sense strand
uauauugcaucuccuguau

SEQ ID NO: 628745 - RNA, 19 nt, Homo sapiens
  misc_RNA (1)...(19): siRNA sense strand
ggacaaguuauuucuacaa

SEQ ID NO: 628746 - RNA, 19 nt, Homo sapiens
  misc_RNA (1)...(19): siRNA sense strand
ggaaaauagucuccacaaa

SEQ ID NO: 628747 - RNA, 19 nt, Homo sapiens
  misc_RNA (1)...(19): siRNA sense strand
gguguuggcuuugcuagga

SEQ ID NO: 628748 - RNA, 19 nt, Homo sapiens
  misc_RNA (1)...(19): siRNA sense strand
cagaaccuuuauuguguaa

SEQ ID NO: 628749 - RNA, 19 nt, Homo sapiens
  misc_RNA (1)...(19): siRNA sense strand
cuacagcccgcaucaauga

SEQ ID NO: 628750 - RNA, 19 nt, Homo sapiens
  misc_RNA (1)...(19): siRNA sense strand
gcaguaauaacaacaguag

SEQ ID NO: 628751 - RNA, 19 nt, Homo sapiens
  misc_RNA (1)...(19): siRNA sense strand
auacaucccuaauggaaga

SEQ ID NO: 628752 - RNA, 19 nt, Homo sapiens
  misc_RNA (1)...(19): siRNA sense strand
cuacgugauuccaguggua

SEQ ID NO: 628753 - RNA, 19 nt, Homo sapiens
  misc_RNA (1)...(19): siRNA sense strand
caaccucaaccauauauuc

SEQ ID NO: 628754 - RNA, 19 nt, Homo sapiens
  misc_RNA (1)...(19): siRNA sense strand
gcuacaaaccgaaugauca

SEQ ID NO: 628755 - RNA, 19 nt, Homo sapiens
  misc_RNA (1)...(19): siRNA sense strand
acagaaccuuuauugugua

SEQ ID NO: 628756 - RNA, 19 nt, Homo sapiens
  misc_RNA (1)...(19): siRNA sense strand
gacaaguuauuucuacaag

SEQ ID NO: 628757 - RNA, 19 nt, Homo sapiens
  misc_RNA (1)...(19): siRNA sense strand
caaaccgaaugaucacuca

SEQ ID NO: 628758 - RNA, 19 nt, Homo sapiens
  misc_RNA (1)...(19): siRNA sense strand
acaaggauacuacgugauu

SEQ ID NO: 628759 - RNA, 19 nt, Homo sapiens
  misc_RNA (1)...(19): siRNA sense strand
gcaaaacgaaccucuauau

SEQ ID NO: 628760 - RNA, 19 nt, Homo sapiens
  misc_RNA (1)...(19): siRNA sense strand
gugaagcucugucaaccau

SEQ ID NO: 628761 - RNA, 19 nt, Homo sapiens
  misc_RNA (1)...(19): siRNA sense strand
ucuauuacacccuauauug

SEQ ID NO: 628762 - RNA, 19 nt, Homo sapiens
  misc_RNA (1)...(19): siRNA sense strand
caaacaaauacaucccuaa

SEQ ID NO: 628763 - RNA, 19 nt, Homo sapiens
  misc_RNA (1)...(19): siRNA sense strand
ccucuacauuucuaauuug

SEQ ID NO: 628764 - RNA, 19 nt, Homo sapiens
  misc_RNA (1)...(19): siRNA sense strand
gaaaauagucuccacaaag

SEQ ID NO: 628765 - RNA, 19 nt, Homo sapiens
  misc_RNA (1)...(19): siRNA sense strand
aaauacaucccuaauggaa

SEQ ID NO: 628766 - RNA, 19 nt, Homo sapiens
  misc_RNA (1)...(19): siRNA sense strand
gagacagaacccaaacaaa

SEQ ID NO: 628767 - RNA, 19 nt, Homo sapiens
  misc_RNA (1)...(19): siRNA sense strand
gaaaauaugcucaaaccau

SEQ ID NO: 628768 - RNA, 19 nt, Homo sapiens
  misc_RNA (1)...(19): siRNA sense strand
ggaggcaaguggucaacag

SEQ ID NO: 628769 - RNA, 19 nt, Homo sapiens
  misc_RNA (1)...(19): siRNA sense strand
uaagacaccaccaggaguu

SEQ ID NO: 628770 - RNA, 19 nt, Homo sapiens
  misc_RNA (1)...(19): siRNA sense strand
gcaccaccagcaguaauaa

SEQ ID NO: 628771 - RNA, 19 nt, Homo sapiens
  misc_RNA (1)...(19): siRNA sense strand
gaacccaaacaaauacauc

SEQ ID NO: 628772 - RNA, 19 nt, Homo sapiens
  misc_RNA (1)...(19): siRNA sense strand
gagcacaccaugucacuac

SEQ ID NO: 628773 - RNA, 19 nt, Homo sapiens
  misc_RNA (1)...(19): siRNA sense strand
caacuacagcugcuauaca

SEQ ID NO: 628774 - RNA, 19 nt, Homo sapiens
  misc_RNA (1)...(19): siRNA sense strand
ggaaugacacuuacuuacg

SEQ ID NO: 628775 - RNA, 19 nt, Homo sapiens
  misc_RNA (1)...(19): siRNA sense strand
gagcaagaacuagaaaaua

SEQ ID NO: 628776 - RNA, 19 nt, Homo sapiens
  misc_RNA (1)...(19): siRNA sense strand
ccuuucaaccuaauaagua

SEQ ID NO: 628777 - RNA, 19 nt, Homo sapiens
  misc_RNA (1)...(19): siRNA sense strand
cuacagcugcuauacagaa

SEQ ID NO: 628778 - RNA, 19 nt, Homo sapiens
  misc_RNA (1)...(19): siRNA sense strand
aggauggaaucaacagaaa

SEQ ID NO: 628779 - RNA, 19 nt, Homo sapiens
  misc_RNA (1)...(19): siRNA sense strand
gaugagcaagaacuagaaa

SEQ ID NO: 628780 - RNA, 19 nt, Homo sapiens
  misc_RNA (1)...(19): siRNA sense strand
gaugggaucagcucagcaa

SEQ ID NO: 628781 - RNA, 19 nt, Homo sapiens
  misc_RNA (1)...(19): siRNA sense strand
ccuaccaaccucuacauuu

SEQ ID NO: 628782 - RNA, 19 nt, Homo sapiens
  misc_RNA (1)...(19): siRNA sense strand
gaaugaucacucaaacuuc

SEQ ID NO: 628783 - RNA, 19 nt, Homo sapiens
  misc_RNA (1)...(19): siRNA sense strand
uagcagcaguagcaacuca

SEQ ID NO: 628784 - RNA, 19 nt, Homo sapiens
  misc_RNA (1)...(19): siRNA sense strand
caaauacaucccuaaugga

SEQ ID NO: 628785 - RNA, 19 nt, Homo sapiens
  misc_RNA (1)...(19): siRNA sense strand
ggaugagcaagaacuagaa

SEQ ID NO: 628786 - RNA, 19 nt, Homo sapiens
  misc_RNA (1)...(19): siRNA sense strand
gauuuuauccuucaccaua

SEQ ID NO: 628787 - RNA, 19 nt, Homo sapiens
  misc_RNA (1)...(19): siRNA sense strand
caaggauacuacgugauuc

SEQ ID NO: 628788 - RNA, 19 nt, Homo sapiens
  misc_RNA (1)...(19): siRNA sense strand
aaugaucacucaaacuucu

SEQ ID NO: 628789 - RNA, 19 nt, Homo sapiens
  misc_RNA (1)...(19): siRNA sense strand
gaagaccauggcauagaga

SEQ ID NO: 628790 - RNA, 19 nt, Homo sapiens
  misc_RNA (1)...(19): siRNA sense strand
ccauuuggacaaguuauuu

SEQ ID NO: 628791 - RNA, 19 nt, Homo sapiens
  misc_RNA (1)...(19): siRNA sense strand
ccucaaccauauauucuac

SEQ ID NO: 628792 - RNA, 19 nt, Homo sapiens
  misc_RNA (1)...(19): siRNA sense strand
uauugcaucuccuguaucu

SEQ ID NO: 628793 - RNA, 19 nt, Homo sapiens
  misc_RNA (1)...(19): siRNA sense strand
cgagacgucuaaugaccau

SEQ ID NO: 628794 - RNA, 19 nt, Homo sapiens
  misc_RNA (1)...(19): siRNA sense strand
aagcuguuauuggucauuu

SEQ ID NO: 628795 - RNA, 19 nt, Homo sapiens
  misc_RNA (1)...(19): siRNA sense strand
cacucaaacuucuauuaca

SEQ ID NO: 628796 - RNA, 19 nt, Homo sapiens
  misc_RNA (1)...(19): siRNA sense strand
gcuggaaugacacuuacuu

SEQ ID NO: 628797 - RNA, 19 nt, Homo sapiens
  misc_RNA (1)...(19): siRNA sense strand
aagcucaaauggcaaagca

SEQ ID NO: 628798 - RNA, 19 nt, Homo sapiens
  misc_RNA (1)...(19): siRNA sense strand
ucacucaaacuucuauuac

SEQ ID NO: 628799 - RNA, 19 nt, Homo sapiens
  misc_RNA (1)...(19): siRNA sense strand
aaaauagucuccacaaagg

SEQ ID NO: 628800 - RNA, 19 nt, Homo sapiens
  misc_RNA (1)...(19): siRNA sense strand
cagcaguaauaacaacagu

SEQ ID NO: 628801 - RNA, 19 nt, Homo sapiens
  misc_RNA (1)...(19): siRNA sense strand
cuccauggaugagcaagaa

SEQ ID NO: 628802 - RNA, 19 nt, Homo sapiens
  misc_RNA (1)...(19): siRNA sense strand
agagacagaacccaaacaa

SEQ ID NO: 628803 - RNA, 19 nt, Homo sapiens
  misc_RNA (1)...(19): siRNA sense strand
uaggauggaaucaacagaa

SEQ ID NO: 628804 - RNA, 19 nt, Homo sapiens
  misc_RNA (1)...(19): siRNA sense strand
ucaaccauaugggaaaaua

SEQ ID NO: 628805 - RNA, 19 nt, Homo sapiens
  misc_RNA (1)...(19): siRNA sense strand
gcaaagcaacaggaacaag

SEQ ID NO: 628806 - RNA, 19 nt, Homo sapiens
  misc_RNA (1)...(19): siRNA sense strand
ggagccuacuugccacagu

SEQ ID NO: 628807 - RNA, 19 nt, Homo sapiens
  misc_RNA (1)...(19): siRNA sense strand
ggaacauacaugccugcaa

SEQ ID NO: 628808 - RNA, 19 nt, Homo sapiens
  misc_RNA (1)...(19): siRNA sense strand
aaaccauuuggacaaguua

SEQ ID NO: 628809 - RNA, 19 nt, Homo sapiens
  misc_RNA (1)...(19): siRNA sense strand
augcaaagguuaugguuuu

SEQ ID NO: 628810 - RNA, 19 nt, Homo sapiens
  misc_RNA (1)...(19): siRNA sense strand
caaaugcaaagguuauggu

SEQ ID NO: 628811 - RNA, 19 nt, Homo sapiens
  misc_RNA (1)...(19): siRNA sense strand
cuauauugcaucuccugua

SEQ ID NO: 628812 - RNA, 19 nt, Homo sapiens
  misc_RNA (1)...(19): siRNA sense strand
cuggaaugacacuuacuua

SEQ ID NO: 628813 - RNA, 19 nt, Homo sapiens
  misc_RNA (1)...(19): siRNA sense strand
gguacaagucgugguguug

SEQ ID NO: 628814 - RNA, 19 nt, Homo sapiens
  misc_RNA (1)...(19): siRNA sense strand
uggcaaagcaacaggaaca

SEQ ID NO: 628815 - RNA, 19 nt, Homo sapiens
  misc_RNA (1)...(19): siRNA sense strand
caaccucuacauuucuaau

SEQ ID NO: 628816 - RNA, 19 nt, Homo sapiens
  misc_RNA (1)...(19): siRNA sense strand
accaaccucuacauuucua

SEQ ID NO: 628817 - RNA, 19 nt, Homo sapiens
  misc_RNA (1)...(19): siRNA sense strand
gcaagaacuagaaaauaug

SEQ ID NO: 628818 - RNA, 19 nt, Homo sapiens
  misc_RNA (1)...(19): siRNA sense strand
ggagcacaccaugucacua

SEQ ID NO: 628819 - RNA, 19 nt, Homo sapiens
  misc_RNA (1)...(19): siRNA sense strand
gcaaccucaaccauauauu

SEQ ID NO: 628820 - RNA, 19 nt, Homo sapiens
  misc_RNA (1)...(19): siRNA sense strand
ccaccagcaguaauaacaa

SEQ ID NO: 628821 - RNA, 19 nt, Homo sapiens
  misc_RNA (1)...(19): siRNA sense strand
gaagcuguuauuggucauu

SEQ ID NO: 628822 - RNA, 19 nt, Homo sapiens
  misc_RNA (1)...(19): siRNA sense strand
cauggaugagcaagaacua

SEQ ID NO: 628823 - RNA, 19 nt, Homo sapiens
  misc_RNA (1)...(19): siRNA sense strand
ucaaccauauauucuacag

SEQ ID NO: 628824 - RNA, 19 nt, Homo sapiens
  misc_RNA (1)...(19): siRNA sense strand
gcuguuauuggucauuuua

SEQ ID NO: 628825 - RNA, 19 nt, Homo sapiens
  misc_RNA (1)...(19): siRNA sense strand
guguaaguuugcugaugga

SEQ ID NO: 628826 - RNA, 19 nt, Homo sapiens
  misc_RNA (1)...(19): siRNA sense strand
cacuacagcccgcaucaau

SEQ ID NO: 628827 - RNA, 19 nt, Homo sapiens
  misc_RNA (1)...(19): siRNA sense strand
caccagcaguaauaacaac

SEQ ID NO: 628828 - RNA, 19 nt, Homo sapiens
  misc_RNA (1)...(19): siRNA sense strand
ccauauaccuuucaaccua

SEQ ID NO: 628829 - RNA, 19 nt, Homo sapiens
  misc_RNA (1)...(19): siRNA sense strand
gacagaacccaaacaaaua

SEQ ID NO: 628830 - RNA, 19 nt, Homo sapiens
  misc_RNA (1)...(19): siRNA sense strand
gaaugacacuuacuuacga

SEQ ID NO: 628831 - RNA, 19 nt, Homo sapiens
  misc_RNA (1)...(19): siRNA sense strand
gaugcaaccucaaccauau

SEQ ID NO: 628832 - RNA, 19 nt, Homo sapiens
  misc_RNA (1)...(19): siRNA sense strand
gaagcucugucaaccauau

SEQ ID NO: 628833 - RNA, 19 nt, Homo sapiens
  misc_RNA (1)...(19): siRNA sense strand
caaguuauuucuacaagga

SEQ ID NO: 628834 - RNA, 19 nt, Homo sapiens
  misc_RNA (1)...(19): siRNA sense strand
acaaauacaucccuaaugg

SEQ ID NO: 628835 - RNA, 19 nt, Homo sapiens
  misc_RNA (1)...(19): siRNA sense strand
gaaccuuuauuguguaagu

SEQ ID NO: 628836 - RNA, 19 nt, Homo sapiens
  misc_RNA (1)...(19): siRNA sense strand
cuaccaaccucuacauuuc

SEQ ID NO: 628837 - RNA, 19 nt, Homo sapiens
  misc_RNA (1)...(19): siRNA sense strand
ggaagaccauggcauagag

SEQ ID NO: 628838 - RNA, 19 nt, Homo sapiens
  misc_RNA (1)...(19): siRNA sense strand
ggaugcaaccucaaccaua

SEQ ID NO: 628839 - RNA, 19 nt, Homo sapiens
  misc_RNA (1)...(19): siRNA sense strand
agacagaacccaaacaaau

SEQ ID NO: 628840 - RNA, 19 nt, Homo sapiens
  misc_RNA (1)...(19): siRNA sense strand
cgaaugaucacucaaacuu

SEQ ID NO: 628841 - RNA, 19 nt, Homo sapiens
  misc_RNA (1)...(19): siRNA sense strand
cauauaccuuucaaccuaa

SEQ ID NO: 628842 - RNA, 19 nt, Homo sapiens
  misc_RNA (1)...(19): siRNA sense strand
caaagcaacaggaacaaga

SEQ ID NO: 628843 - RNA, 19 nt, Homo sapiens
  misc_RNA (1)...(19): siRNA sense strand
cguguuaacucccucaaug

SEQ ID NO: 628844 - RNA, 19 nt, Homo sapiens
  misc_RNA (1)...(19): siRNA sense strand
uauauugcaucuccuguau

SEQ ID NO: 628845 - RNA, 19 nt, Homo sapiens
  misc_RNA (1)...(19): siRNA sense strand
ggacaaguuauuucuacaa

SEQ ID NO: 628846 - RNA, 19 nt, Homo sapiens
  misc_RNA (1)...(19): siRNA sense strand
ggaaaauagucuccacaaa

SEQ ID NO: 628847 - RNA, 19 nt, Homo sapiens
  misc_RNA (1)...(19): siRNA sense strand
gguguuggcuuugcuagga

SEQ ID NO: 628848 - RNA, 19 nt, Homo sapiens
  misc_RNA (1)...(19): siRNA sense strand
cagaaccuuuauuguguaa

SEQ ID NO: 628849 - RNA, 19 nt, Homo sapiens
  misc_RNA (1)...(19): siRNA sense strand
cuacagcccgcaucaauga

SEQ ID NO: 628850 - RNA, 19 nt, Homo sapiens
  misc_RNA (1)...(19): siRNA sense strand
gcaguaauaacaacaguag

SEQ ID NO: 628851 - RNA, 19 nt, Homo sapiens
  misc_RNA (1)...(19): siRNA sense strand
auacaucccuaauggaaga

SEQ ID NO: 628852 - RNA, 19 nt, Homo sapiens
  misc_RNA (1)...(19): siRNA sense strand
cuacgugauuccaguggua

SEQ ID NO: 628853 - RNA, 19 nt, Homo sapiens
  misc_RNA (1)...(19): siRNA sense strand
caaccucaaccauauauuc

SEQ ID NO: 628854 - RNA, 19 nt, Homo sapiens
  misc_RNA (1)...(19): siRNA sense strand
gcuacaaaccgaaugauca

SEQ ID NO: 628855 - RNA, 19 nt, Homo sapiens
  misc_RNA (1)...(19): siRNA sense strand
acagaaccuuuauugugua

SEQ ID NO: 628856 - RNA, 19 nt, Homo sapiens
  misc_RNA (1)...(19): siRNA sense strand
gacaaguuauuucuacaag

SEQ ID NO: 628857 - RNA, 19 nt, Homo sapiens
  misc_RNA (1)...(19): siRNA sense strand
caaaccgaaugaucacuca

SEQ ID NO: 628858 - RNA, 19 nt, Homo sapiens
  misc_RNA (1)...(19): siRNA sense strand
acaaggauacuacgugauu

SEQ ID NO: 628859 - RNA, 19 nt, Homo sapiens
  misc_RNA (1)...(19): siRNA sense strand
gcaaaacgaaccucuauau

SEQ ID NO: 628860 - RNA, 19 nt, Homo sapiens
  misc_RNA (1)...(19): siRNA sense strand
gugaagcucugucaaccau

SEQ ID NO: 628861 - RNA, 19 nt, Homo sapiens
  misc_RNA (1)...(19): siRNA sense strand
ucuauuacacccuauauug

SEQ ID NO: 628862 - RNA, 19 nt, Homo sapiens
  misc_RNA (1)...(19): siRNA sense strand
caaacaaauacaucccuaa

SEQ ID NO: 628863 - RNA, 19 nt, Homo sapiens
  misc_RNA (1)...(19): siRNA sense strand
ccucuacauuucuaauuug

SEQ ID NO: 628864 - RNA, 19 nt, Homo sapiens
  misc_RNA (1)...(19): siRNA sense strand
gaaaauagucuccacaaag

SEQ ID NO: 628865 - RNA, 19 nt, Homo sapiens
  misc_RNA (1)...(19): siRNA sense strand
aaauacaucccuaauggaa

SEQ ID NO: 628866 - RNA, 19 nt, Homo sapiens
  misc_RNA (1)...(19): siRNA sense strand
gagacagaacccaaacaaa

SEQ ID NO: 628867 - RNA, 19 nt, Homo sapiens
  misc_RNA (1)...(19): siRNA sense strand
gaaaauaugcucaaaccau

SEQ ID NO: 628868 - RNA, 19 nt, Homo sapiens
  misc_RNA (1)...(19): siRNA sense strand
ggaggcaaguggucaacag

SEQ ID NO: 628869 - RNA, 19 nt, Homo sapiens
  misc_RNA (1)...(19): siRNA sense strand
uaagacaccaccaggaguu

SEQ ID NO: 628870 - RNA, 19 nt, Homo sapiens
  misc_RNA (1)...(19): siRNA sense strand
gcaccaccagcaguaauaa

SEQ ID NO: 628871 - RNA, 19 nt, Homo sapiens
  misc_RNA (1)...(19): siRNA sense strand
gaacccaaacaaauacauc

SEQ ID NO: 628872 - RNA, 19 nt, Homo sapiens
  misc_RNA (1)...(19): siRNA sense strand
gagcacaccaugucacuac

SEQ ID NO: 628873 - RNA, 19 nt, Homo sapiens
  misc_RNA (1)...(19): siRNA sense strand
caacuacagcugcuauaca

SEQ ID NO: 628874 - RNA, 19 nt, Homo sapiens
  misc_RNA (1)...(19): siRNA sense strand
ggaaugacacuuacuuacg

SEQ ID NO: 628875 - RNA, 19 nt, Homo sapiens
  misc_RNA (1)...(19): siRNA sense strand
gagcaagaacuagaaaaua

SEQ ID NO: 628876 - RNA, 19 nt, Homo sapiens
  misc_RNA (1)...(19): siRNA sense strand
ccuuucaaccuaauaagua

SEQ ID NO: 628877 - RNA, 19 nt, Homo sapiens
  misc_RNA (1)...(19): siRNA sense strand
cuacagcugcuauacagaa

SEQ ID NO: 628878 - RNA, 19 nt, Homo sapiens
  misc_RNA (1)...(19): siRNA sense strand
aggauggaaucaacagaaa

SEQ ID NO: 628879 - RNA, 19 nt, Homo sapiens
  misc_RNA (1)...(19): siRNA sense strand
gaugagcaagaacuagaaa

SEQ ID NO: 628880 - RNA, 19 nt, Homo sapiens
  misc_RNA (1)...(19): siRNA sense strand
gaugggaucagcucagcaa

SEQ ID NO: 628881 - RNA, 19 nt, Homo sapiens
  misc_RNA (1)...(19): siRNA sense strand
ccuaccaaccucuacauuu

SEQ ID NO: 628882 - RNA, 19 nt, Homo sapiens
  misc_RNA (1)...(19): siRNA sense strand
gaaugaucacucaaacuuc

SEQ ID NO: 628883 - RNA, 19 nt, Homo sapiens
  misc_RNA (1)...(19): siRNA sense strand
uagcagcaguagcaacuca

SEQ ID NO: 628884 - RNA, 19 nt, Homo sapiens
  misc_RNA (1)...(19): siRNA sense strand
caaauacaucccuaaugga

SEQ ID NO: 628885 - RNA, 19 nt, Homo sapiens
  misc_RNA (1)...(19): siRNA sense strand
ggaugagcaagaacuagaa

SEQ ID NO: 628886 - RNA, 19 nt, Homo sapiens
  misc_RNA (1)...(19): siRNA sense strand
gauuuuauccuucaccaua

SEQ ID NO: 628887 - RNA, 19 nt, Homo sapiens
  misc_RNA (1)...(19): siRNA sense strand
caaggauacuacgugauuc

SEQ ID NO: 628888 - RNA, 19 nt, Homo sapiens
  misc_RNA (1)...(19): siRNA sense strand
aaugaucacucaaacuucu

SEQ ID NO: 628889 - RNA, 19 nt, Homo sapiens
  misc_RNA (1)...(19): siRNA sense strand
gaagaccauggcauagaga

SEQ ID NO: 628890 - RNA, 19 nt, Homo sapiens
  misc_RNA (1)...(19): siRNA sense strand
ccauuuggacaaguuauuu

SEQ ID NO: 628891 - RNA, 19 nt, Homo sapiens
  misc_RNA (1)...(19): siRNA sense strand
ccucaaccauauauucuac

SEQ ID NO: 628892 - RNA, 19 nt, Homo sapiens
  misc_RNA (1)...(19): siRNA sense strand
uauugcaucuccuguaucu

SEQ ID NO: 628893 - RNA, 19 nt, Homo sapiens
  misc_RNA (1)...(19): siRNA sense strand
cgagacgucuaaugaccau

SEQ ID NO: 628894 - RNA, 19 nt, Homo sapiens
  misc_RNA (1)...(19): siRNA sense strand
aagcuguuauuggucauuu

SEQ ID NO: 628895 - RNA, 19 nt, Homo sapiens
  misc_RNA (1)...(19): siRNA sense strand
cacucaaacuucuauuaca

SEQ ID NO: 628896 - RNA, 19 nt, Homo sapiens
  misc_RNA (1)...(19): siRNA sense strand
gcuggaaugacacuuacuu

SEQ ID NO: 628897 - RNA, 19 nt, Homo sapiens
  misc_RNA (1)...(19): siRNA sense strand
aagcucaaauggcaaagca

SEQ ID NO: 628898 - RNA, 19 nt, Homo sapiens
  misc_RNA (1)...(19): siRNA sense strand
ucacucaaacuucuauuac

SEQ ID NO: 628899 - RNA, 19 nt, Homo sapiens
  misc_RNA (1)...(19): siRNA sense strand
aaaauagucuccacaaagg

SEQ ID NO: 628900 - RNA, 19 nt, Homo sapiens
  misc_RNA (1)...(19): siRNA sense strand
cagcaguaauaacaacagu

SEQ ID NO: 628901 - RNA, 19 nt, Homo sapiens
  misc_RNA (1)...(19): siRNA sense strand
cuccauggaugagcaagaa

SEQ ID NO: 628902 - RNA, 19 nt, Homo sapiens
  misc_RNA (1)...(19): siRNA sense strand
agagacagaacccaaacaa

SEQ ID NO: 628903 - RNA, 19 nt, Homo sapiens
  misc_RNA (1)...(19): siRNA sense strand
uaggauggaaucaacagaa

SEQ ID NO: 628904 - RNA, 19 nt, Homo sapiens
  misc_RNA (1)...(19): siRNA sense strand
ucaaccauaugggaaaaua

SEQ ID NO: 628905 - RNA, 19 nt, Homo sapiens
  misc_RNA (1)...(19): siRNA sense strand
gcaaagcaacaggaacaag

SEQ ID NO: 628906 - RNA, 19 nt, Homo sapiens
  misc_RNA (1)...(19): siRNA sense strand
ggagccuacuugccacagu

SEQ ID NO: 628907 - RNA, 19 nt, Homo sapiens
  misc_RNA (1)...(19): siRNA sense strand
ggaacauacaugccugcaa

SEQ ID NO: 628908 - RNA, 19 nt, Homo sapiens
  misc_RNA (1)...(19): siRNA sense strand
aaaccauuuggacaaguua

SEQ ID NO: 628909 - RNA, 19 nt, Homo sapiens
  misc_RNA (1)...(19): siRNA sense strand
augcaaagguuaugguuuu

SEQ ID NO: 628910 - RNA, 19 nt, Homo sapiens
  misc_RNA (1)...(19): siRNA sense strand
caaaugcaaagguuauggu

SEQ ID NO: 628911 - RNA, 19 nt, Homo sapiens
  misc_RNA (1)...(19): siRNA sense strand
cuauauugcaucuccugua

SEQ ID NO: 628912 - RNA, 19 nt, Homo sapiens
  misc_RNA (1)...(19): siRNA sense strand
cuggaaugacacuuacuua

SEQ ID NO: 628913 - RNA, 19 nt, Homo sapiens
  misc_RNA (1)...(19): siRNA sense strand
gguacaagucgugguguug

SEQ ID NO: 628914 - RNA, 19 nt, Homo sapiens
  misc_RNA (1)...(19): siRNA sense strand
uggcaaagcaacaggaaca

SEQ ID NO: 628915 - RNA, 19 nt, Homo sapiens
  misc_RNA (1)...(19): siRNA sense strand
caaccucuacauuucuaau

SEQ ID NO: 628916 - RNA, 19 nt, Homo sapiens
  misc_RNA (1)...(19): siRNA sense strand
accaaccucuacauuucua

SEQ ID NO: 628917 - RNA, 19 nt, Homo sapiens
  misc_RNA (1)...(19): siRNA sense strand
gcaagaacuagaaaauaug

SEQ ID NO: 628918 - RNA, 19 nt, Homo sapiens
  misc_RNA (1)...(19): siRNA sense strand
ggagcacaccaugucacua

SEQ ID NO: 628919 - RNA, 19 nt, Homo sapiens
  misc_RNA (1)...(19): siRNA sense strand
gcaaccucaaccauauauu

SEQ ID NO: 628920 - RNA, 19 nt, Homo sapiens
  misc_RNA (1)...(19): siRNA sense strand
ccaccagcaguaauaacaa

SEQ ID NO: 628921 - RNA, 19 nt, Homo sapiens
  misc_RNA (1)...(19): siRNA sense strand
gaagcuguuauuggucauu

SEQ ID NO: 628922 - RNA, 19 nt, Homo sapiens
  misc_RNA (1)...(19): siRNA sense strand
cauggaugagcaagaacua

SEQ ID NO: 628923 - RNA, 19 nt, Homo sapiens
  misc_RNA (1)...(19): siRNA sense strand
ucaaccauauauucuacag

SEQ ID NO: 628924 - RNA, 19 nt, Homo sapiens
  misc_RNA (1)...(19): siRNA sense strand
gcuguuauuggucauuuua

SEQ ID NO: 628925 - RNA, 19 nt, Homo sapiens
  misc_RNA (1)...(19): siRNA sense strand
guguaaguuugcugaugga

SEQ ID NO: 628926 - RNA, 19 nt, Homo sapiens
  misc_RNA (1)...(19): siRNA sense strand
cacuacagcccgcaucaau

SEQ ID NO: 628927 - RNA, 19 nt, Homo sapiens
  misc_RNA (1)...(19): siRNA sense strand
caccagcaguaauaacaac

SEQ ID NO: 628928 - RNA, 19 nt, Homo sapiens
  misc_RNA (1)...(19): siRNA sense strand
ccauauaccuuucaaccua

SEQ ID NO: 628929 - RNA, 19 nt, Homo sapiens
  misc_RNA (1)...(19): siRNA sense strand
gacagaacccaaacaaaua

SEQ ID NO: 628930 - RNA, 19 nt, Homo sapiens
  misc_RNA (1)...(19): siRNA sense strand
gaaugacacuuacuuacga

SEQ ID NO: 628931 - RNA, 19 nt, Homo sapiens
  misc_RNA (1)...(19): siRNA sense strand
gaugcaaccucaaccauau

SEQ ID NO: 628932 - RNA, 19 nt, Homo sapiens
  misc_RNA (1)...(19): siRNA sense strand
gaagcucugucaaccauau

SEQ ID NO: 628933 - RNA, 19 nt, Homo sapiens
  misc_RNA (1)...(19): siRNA sense strand
caaguuauuucuacaagga

SEQ ID NO: 628934 - RNA, 19 nt, Homo sapiens
  misc_RNA (1)...(19): siRNA sense strand
acaaauacaucccuaaugg

SEQ ID NO: 628935 - RNA, 19 nt, Homo sapiens
  misc_RNA (1)...(19): siRNA sense strand
gaaccuuuauuguguaagu

SEQ ID NO: 628936 - RNA, 19 nt, Homo sapiens
  misc_RNA (1)...(19): siRNA sense strand
cuaccaaccucuacauuuc

SEQ ID NO: 628937 - RNA, 19 nt, Homo sapiens
  misc_RNA (1)...(19): siRNA sense strand
ggaagaccauggcauagag

SEQ ID NO: 628938 - RNA, 19 nt, Homo sapiens
  misc_RNA (1)...(19): siRNA sense strand
ggaugcaaccucaaccaua

SEQ ID NO: 628939 - RNA, 19 nt, Homo sapiens
  misc_RNA (1)...(19): siRNA sense strand
agacagaacccaaacaaau

SEQ ID NO: 628940 - RNA, 19 nt, Homo sapiens
  misc_RNA (1)...(19): siRNA sense strand
cgaaugaucacucaaacuu

SEQ ID NO: 628941 - RNA, 19 nt, Homo sapiens
  misc_RNA (1)...(19): siRNA sense strand
cauauaccuuucaaccuaa

SEQ ID NO: 628942 - RNA, 19 nt, Homo sapiens
  misc_RNA (1)...(19): siRNA sense strand
caaagcaacaggaacaaga

SEQ ID NO: 628943 - RNA, 19 nt, Homo sapiens
  misc_RNA (1)...(19): siRNA sense strand
cguguuaacucccucaaug

SEQ ID NO: 628944 - RNA, 19 nt, Homo sapiens
  misc_RNA (1)...(19): siRNA sense strand
uauauugcaucuccuguau

SEQ ID NO: 628945 - RNA, 19 nt, Homo sapiens
  misc_RNA (1)...(19): siRNA sense strand
ggacaaguuauuucuacaa

SEQ ID NO: 628946 - RNA, 19 nt, Homo sapiens
  misc_RNA (1)...(19): siRNA sense strand
ggaaaauagucuccacaaa

SEQ ID NO: 628947 - RNA, 19 nt, Homo sapiens
  misc_RNA (1)...(19): siRNA sense strand
gguguuggcuuugcuagga

SEQ ID NO: 628948 - RNA, 19 nt, Homo sapiens
  misc_RNA (1)...(19): siRNA sense strand
cagaaccuuuauuguguaa

SEQ ID NO: 628949 - RNA, 19 nt, Homo sapiens
  misc_RNA (1)...(19): siRNA sense strand
cuacagcccgcaucaauga

SEQ ID NO: 628950 - RNA, 19 nt, Homo sapiens
  misc_RNA (1)...(19): siRNA sense strand
gcaguaauaacaacaguag

SEQ ID NO: 628951 - RNA, 19 nt, Homo sapiens
  misc_RNA (1)...(19): siRNA sense strand
auacaucccuaauggaaga

SEQ ID NO: 628952 - RNA, 19 nt, Homo sapiens
  misc_RNA (1)...(19): siRNA sense strand
cuacgugauuccaguggua

SEQ ID NO: 628953 - RNA, 19 nt, Homo sapiens
  misc_RNA (1)...(19): siRNA sense strand
caaccucaaccauauauuc

SEQ ID NO: 628954 - RNA, 19 nt, Homo sapiens
  misc_RNA (1)...(19): siRNA sense strand
gcuacaaaccgaaugauca

SEQ ID NO: 628955 - RNA, 19 nt, Homo sapiens
  misc_RNA (1)...(19): siRNA sense strand
acagaaccuuuauugugua

SEQ ID NO: 628956 - RNA, 19 nt, Homo sapiens
  misc_RNA (1)...(19): siRNA sense strand
gacaaguuauuucuacaag

SEQ ID NO: 628957 - RNA, 19 nt, Homo sapiens
  misc_RNA (1)...(19): siRNA sense strand
caaaccgaaugaucacuca

SEQ ID NO: 628958 - RNA, 19 nt, Homo sapiens
  misc_RNA (1)...(19): siRNA sense strand
acaaggauacuacgugauu

SEQ ID NO: 628959 - RNA, 19 nt, Homo sapiens
  misc_RNA (1)...(19): siRNA sense strand
gcaaaacgaaccucuauau

SEQ ID NO: 628960 - RNA, 19 nt, Homo sapiens
  misc_RNA (1)...(19): siRNA sense strand
gugaagcucugucaaccau

SEQ ID NO: 628961 - RNA, 19 nt, Homo sapiens
  misc_RNA (1)...(19): siRNA sense strand
ucuauuacacccuauauug

SEQ ID NO: 628962 - RNA, 19 nt, Homo sapiens
  misc_RNA (1)...(19): siRNA sense strand
caaacaaauacaucccuaa

SEQ ID NO: 628963 - RNA, 19 nt, Homo sapiens
  misc_RNA (1)...(19): siRNA sense strand
ccucuacauuucuaauuug

SEQ ID NO: 628964 - RNA, 19 nt, Homo sapiens
  misc_RNA (1)...(19): siRNA sense strand
gaaaauagucuccacaaag

SEQ ID NO: 628965 - RNA, 19 nt, Homo sapiens
  misc_RNA (1)...(19): siRNA sense strand
aaauacaucccuaauggaa

SEQ ID NO: 628966 - RNA, 19 nt, Homo sapiens
  misc_RNA (1)...(19): siRNA sense strand
gagacagaacccaaacaaa

SEQ ID NO: 628967 - RNA, 19 nt, Homo sapiens
  misc_RNA (1)...(19): siRNA sense strand
gaaaauaugcucaaaccau

SEQ ID NO: 628968 - RNA, 19 nt, Homo sapiens
  misc_RNA (1)...(19): siRNA sense strand
ggaggcaaguggucaacag

SEQ ID NO: 628969 - RNA, 19 nt, Homo sapiens
  misc_RNA (1)...(19): siRNA sense strand
uaagacaccaccaggaguu

SEQ ID NO: 628970 - RNA, 19 nt, Homo sapiens
  misc_RNA (1)...(19): siRNA sense strand
gcaccaccagcaguaauaa

SEQ ID NO: 628971 - RNA, 19 nt, Homo sapiens
  misc_RNA (1)...(19): siRNA sense strand
gaacccaaacaaauacauc

SEQ ID NO: 628972 - RNA, 19 nt, Homo sapiens
  misc_RNA (1)...(19): siRNA sense strand
gagcacaccaugucacuac

SEQ ID NO: 628973 - RNA, 19 nt, Homo sapiens
  misc_RNA (1)...(19): siRNA sense strand
caacuacagcugcuauaca

SEQ ID NO: 628974 - RNA, 19 nt, Homo sapiens
  misc_RNA (1)...(19): siRNA sense strand
ggaaugacacuuacuuacg

SEQ ID NO: 628975 - RNA, 19 nt, Homo sapiens
  misc_RNA (1)...(19): siRNA sense strand
gagcaagaacuagaaaaua

SEQ ID NO: 628976 - RNA, 19 nt, Homo sapiens
  misc_RNA (1)...(19): siRNA sense strand
ccuuucaaccuaauaagua

SEQ ID NO: 628977 - RNA, 19 nt, Homo sapiens
  misc_RNA (1)...(19): siRNA sense strand
cuacagcugcuauacagaa

SEQ ID NO: 628978 - RNA, 19 nt, Homo sapiens
  misc_RNA (1)...(19): siRNA sense strand
aggauggaaucaacagaaa

SEQ ID NO: 628979 - RNA, 19 nt, Homo sapiens
  misc_RNA (1)...(19): siRNA sense strand
gaugagcaagaacuagaaa

SEQ ID NO: 628980 - RNA, 19 nt, Homo sapiens
  misc_RNA (1)...(19): siRNA sense strand
gaugggaucagcucagcaa

SEQ ID NO: 628981 - RNA, 19 nt, Homo sapiens
  misc_RNA (1)...(19): siRNA sense strand
ccuaccaaccucuacauuu

SEQ ID NO: 628982 - RNA, 19 nt, Homo sapiens
  misc_RNA (1)...(19): siRNA sense strand
gaaugaucacucaaacuuc

SEQ ID NO: 628983 - RNA, 19 nt, Homo sapiens
  misc_RNA (1)...(19): siRNA sense strand
uagcagcaguagcaacuca

SEQ ID NO: 628984 - RNA, 19 nt, Homo sapiens
  misc_RNA (1)...(19): siRNA sense strand
caaauacaucccuaaugga

SEQ ID NO: 628985 - RNA, 19 nt, Homo sapiens
  misc_RNA (1)...(19): siRNA sense strand
ggaugagcaagaacuagaa

SEQ ID NO: 628986 - RNA, 19 nt, Homo sapiens
  misc_RNA (1)...(19): siRNA sense strand
gauuuuauccuucaccaua

SEQ ID NO: 628987 - RNA, 19 nt, Homo sapiens
  misc_RNA (1)...(19): siRNA sense strand
caaggauacuacgugauuc

SEQ ID NO: 628988 - RNA, 19 nt, Homo sapiens
  misc_RNA (1)...(19): siRNA sense strand
aaugaucacucaaacuucu

SEQ ID NO: 628989 - RNA, 19 nt, Homo sapiens
  misc_RNA (1)...(19): siRNA sense strand
gaagaccauggcauagaga

SEQ ID NO: 628990 - RNA, 19 nt, Homo sapiens
  misc_RNA (1)...(19): siRNA sense strand
ccauuuggacaaguuauuu

SEQ ID NO: 628991 - RNA, 19 nt, Homo sapiens
  misc_RNA (1)...(19): siRNA sense strand
ccucaaccauauauucuac

SEQ ID NO: 628992 - RNA, 19 nt, Homo sapiens
  misc_RNA (1)...(19): siRNA sense strand
uauugcaucuccuguaucu

SEQ ID NO: 628993 - RNA, 19 nt, Homo sapiens
  misc_RNA (1)...(19): siRNA sense strand
cgagacgucuaaugaccau

SEQ ID NO: 628994 - RNA, 19 nt, Homo sapiens
  misc_RNA (1)...(19): siRNA sense strand
aagcuguuauuggucauuu

SEQ ID NO: 628995 - RNA, 19 nt, Homo sapiens
  misc_RNA (1)...(19): siRNA sense strand
cacucaaacuucuauuaca

SEQ ID NO: 628996 - RNA, 19 nt, Homo sapiens
  misc_RNA (1)...(19): siRNA sense strand
gcuggaaugacacuuacuu

SEQ ID NO: 628997 - RNA, 19 nt, Homo sapiens
  misc_RNA (1)...(19): siRNA sense strand
aagcucaaauggcaaagca

SEQ ID NO: 628998 - RNA, 19 nt, Homo sapiens
  misc_RNA (1)...(19): siRNA sense strand
ucacucaaacuucuauuac

SEQ ID NO: 628999 - RNA, 19 nt, Homo sapiens
  misc_RNA (1)...(19): siRNA sense strand
aaaauagucuccacaaagg

SEQ ID NO: 629000 - RNA, 19 nt, Homo sapiens
  misc_RNA (1)...(19): siRNA sense strand
cagcaguaauaacaacagu

SEQ ID NO: 629001 - RNA, 19 nt, Homo sapiens
  misc_RNA (1)...(19): siRNA sense strand
cuccauggaugagcaagaa

SEQ ID NO: 629002 - RNA, 19 nt, Homo sapiens
  misc_RNA (1)...(19): siRNA sense strand
agagacagaacccaaacaa

SEQ ID NO: 629003 - RNA, 19 nt, Homo sapiens
  misc_RNA (1)...(19): siRNA sense strand
uaggauggaaucaacagaa

SEQ ID NO: 629004 - RNA, 19 nt, Homo sapiens
  misc_RNA (1)...(19): siRNA sense strand
ucaaccauaugggaaaaua

SEQ ID NO: 629005 - RNA, 19 nt, Homo sapiens
  misc_RNA (1)...(19): siRNA sense strand
gcaaagcaacaggaacaag

SEQ ID NO: 629006 - RNA, 19 nt, Homo sapiens
  misc_RNA (1)...(19): siRNA sense strand
ggagccuacuugccacagu

SEQ ID NO: 629007 - RNA, 19 nt, Homo sapiens
  misc_RNA (1)...(19): siRNA sense strand
ggaacauacaugccugcaa

SEQ ID NO: 629008 - RNA, 19 nt, Homo sapiens
  misc_RNA (1)...(19): siRNA sense strand
aaaccauuuggacaaguua

SEQ ID NO: 629009 - RNA, 19 nt, Homo sapiens
  misc_RNA (1)...(19): siRNA sense strand
augcaaagguuaugguuuu

SEQ ID NO: 629010 - RNA, 19 nt, Homo sapiens
  misc_RNA (1)...(19): siRNA sense strand
caaaugcaaagguuauggu

SEQ ID NO: 629011 - RNA, 19 nt, Homo sapiens
  misc_RNA (1)...(19): siRNA sense strand
cuauauugcaucuccugua

SEQ ID NO: 629012 - RNA, 19 nt, Homo sapiens
  misc_RNA (1)...(19): siRNA sense strand
cuggaaugacacuuacuua

SEQ ID NO: 629013 - RNA, 19 nt, Homo sapiens
  misc_RNA (1)...(19): siRNA sense strand
gguacaagucgugguguug

SEQ ID NO: 629014 - RNA, 19 nt, Homo sapiens
  misc_RNA (1)...(19): siRNA sense strand
uggcaaagcaacaggaaca

SEQ ID NO: 629015 - RNA, 19 nt, Homo sapiens
  misc_RNA (1)...(19): siRNA sense strand
caaccucuacauuucuaau

SEQ ID NO: 629016 - RNA, 19 nt, Homo sapiens
  misc_RNA (1)...(19): siRNA sense strand
accaaccucuacauuucua

SEQ ID NO: 629017 - RNA, 19 nt, Homo sapiens
  misc_RNA (1)...(19): siRNA sense strand
gcaagaacuagaaaauaug

SEQ ID NO: 629018 - RNA, 19 nt, Homo sapiens
  misc_RNA (1)...(19): siRNA sense strand
ggagcacaccaugucacua

SEQ ID NO: 629019 - RNA, 19 nt, Homo sapiens
  misc_RNA (1)...(19): siRNA sense strand
gcaaccucaaccauauauu

SEQ ID NO: 629020 - RNA, 19 nt, Homo sapiens
  misc_RNA (1)...(19): siRNA sense strand
ccaccagcaguaauaacaa

SEQ ID NO: 629021 - RNA, 19 nt, Homo sapiens
  misc_RNA (1)...(19): siRNA sense strand
gaagcuguuauuggucauu

SEQ ID NO: 629022 - RNA, 19 nt, Homo sapiens
  misc_RNA (1)...(19): siRNA sense strand
cauggaugagcaagaacua

SEQ ID NO: 629023 - RNA, 19 nt, Homo sapiens
  misc_RNA (1)...(19): siRNA sense strand
ucaaccauauauucuacag

SEQ ID NO: 629024 - RNA, 19 nt, Homo sapiens
  misc_RNA (1)...(19): siRNA sense strand
gcuguuauuggucauuuua

SEQ ID NO: 629025 - RNA, 19 nt, Homo sapiens
  misc_RNA (1)...(19): siRNA sense strand
guguaaguuugcugaugga

SEQ ID NO: 629026 - RNA, 19 nt, Homo sapiens
  misc_RNA (1)...(19): siRNA sense strand
cacuacagcccgcaucaau

SEQ ID NO: 629027 - RNA, 19 nt, Homo sapiens
  misc_RNA (1)...(19): siRNA sense strand
caccagcaguaauaacaac

SEQ ID NO: 629028 - RNA, 19 nt, Homo sapiens
  misc_RNA (1)...(19): siRNA sense strand
ccauauaccuuucaaccua

SEQ ID NO: 629029 - RNA, 19 nt, Homo sapiens
  misc_RNA (1)...(19): siRNA sense strand
gacagaacccaaacaaaua

SEQ ID NO: 629030 - RNA, 19 nt, Homo sapiens
  misc_RNA (1)...(19): siRNA sense strand
gaaugacacuuacuuacga

SEQ ID NO: 629031 - RNA, 19 nt, Homo sapiens
  misc_RNA (1)...(19): siRNA sense strand
gaugcaaccucaaccauau

SEQ ID NO: 629032 - RNA, 19 nt, Homo sapiens
  misc_RNA (1)...(19): siRNA sense strand
gaagcucugucaaccauau

SEQ ID NO: 629033 - RNA, 19 nt, Homo sapiens
  misc_RNA (1)...(19): siRNA sense strand
caaguuauuucuacaagga

SEQ ID NO: 629034 - RNA, 19 nt, Homo sapiens
  misc_RNA (1)...(19): siRNA sense strand
acaaauacaucccuaaugg

SEQ ID NO: 629035 - RNA, 19 nt, Homo sapiens
  misc_RNA (1)...(19): siRNA sense strand
gaaccuuuauuguguaagu

SEQ ID NO: 629036 - RNA, 19 nt, Homo sapiens
  misc_RNA (1)...(19): siRNA sense strand
cuaccaaccucuacauuuc

SEQ ID NO: 629037 - RNA, 19 nt, Homo sapiens
  misc_RNA (1)...(19): siRNA sense strand
ggaagaccauggcauagag

SEQ ID NO: 629038 - RNA, 19 nt, Homo sapiens
  misc_RNA (1)...(19): siRNA sense strand
ggaugcaaccucaaccaua

SEQ ID NO: 629039 - RNA, 19 nt, Homo sapiens
  misc_RNA (1)...(19): siRNA sense strand
agacagaacccaaacaaau

SEQ ID NO: 629040 - RNA, 19 nt, Homo sapiens
  misc_RNA (1)...(19): siRNA sense strand
cgaaugaucacucaaacuu

SEQ ID NO: 629041 - RNA, 19 nt, Homo sapiens
  misc_RNA (1)...(19): siRNA sense strand
cauauaccuuucaaccuaa

SEQ ID NO: 629042 - RNA, 19 nt, Homo sapiens
  misc_RNA (1)...(19): siRNA sense strand
caaagcaacaggaacaaga

SEQ ID NO: 629043 - RNA, 19 nt, Homo sapiens
  misc_RNA (1)...(19): siRNA sense strand
cguguuaacucccucaaug

SEQ ID NO: 629044 - RNA, 19 nt, Homo sapiens
  misc_RNA (1)...(19): siRNA sense strand
uauauugcaucuccuguau

SEQ ID NO: 629045 - RNA, 19 nt, Homo sapiens
  misc_RNA (1)...(19): siRNA sense strand
ggacaaguuauuucuacaa

SEQ ID NO: 629046 - RNA, 19 nt, Homo sapiens
  misc_RNA (1)...(19): siRNA sense strand
ggaaaauagucuccacaaa

SEQ ID NO: 629047 - RNA, 19 nt, Homo sapiens
  misc_RNA (1)...(19): siRNA sense strand
gguguuggcuuugcuagga

SEQ ID NO: 629048 - RNA, 19 nt, Homo sapiens
  misc_RNA (1)...(19): siRNA sense strand
cagaaccuuuauuguguaa

SEQ ID NO: 629049 - RNA, 19 nt, Homo sapiens
  misc_RNA (1)...(19): siRNA sense strand
cuacagcccgcaucaauga

SEQ ID NO: 629050 - RNA, 19 nt, Homo sapiens
  misc_RNA (1)...(19): siRNA sense strand
gcaguaauaacaacaguag

SEQ ID NO: 629051 - RNA, 19 nt, Homo sapiens
  misc_RNA (1)...(19): siRNA sense strand
auacaucccuaauggaaga

SEQ ID NO: 629052 - RNA, 19 nt, Homo sapiens
  misc_RNA (1)...(19): siRNA sense strand
cuacgugauuccaguggua

SEQ ID NO: 629053 - RNA, 19 nt, Homo sapiens
  misc_RNA (1)...(19): siRNA sense strand
caaccucaaccauauauuc

SEQ ID NO: 629054 - RNA, 19 nt, Homo sapiens
  misc_RNA (1)...(19): siRNA sense strand
gcuacaaaccgaaugauca

SEQ ID NO: 629055 - RNA, 19 nt, Homo sapiens
  misc_RNA (1)...(19): siRNA sense strand
acagaaccuuuauugugua

SEQ ID NO: 629056 - RNA, 19 nt, Homo sapiens
  misc_RNA (1)...(19): siRNA sense strand
gacaaguuauuucuacaag

SEQ ID NO: 629057 - RNA, 19 nt, Homo sapiens
  misc_RNA (1)...(19): siRNA sense strand
caaaccgaaugaucacuca

SEQ ID NO: 629058 - RNA, 19 nt, Homo sapiens
  misc_RNA (1)...(19): siRNA sense strand
acaaggauacuacgugauu

SEQ ID NO: 629059 - RNA, 19 nt, Homo sapiens
  misc_RNA (1)...(19): siRNA sense strand
gcaaaacgaaccucuauau

SEQ ID NO: 629060 - RNA, 19 nt, Homo sapiens
  misc_RNA (1)...(19): siRNA sense strand
gugaagcucugucaaccau

SEQ ID NO: 629061 - RNA, 19 nt, Homo sapiens
  misc_RNA (1)...(19): siRNA sense strand
ucuauuacacccuauauug

SEQ ID NO: 629062 - RNA, 19 nt, Homo sapiens
  misc_RNA (1)...(19): siRNA sense strand
caaacaaauacaucccuaa

SEQ ID NO: 629063 - RNA, 19 nt, Homo sapiens
  misc_RNA (1)...(19): siRNA sense strand
ccucuacauuucuaauuug

SEQ ID NO: 629064 - RNA, 19 nt, Homo sapiens
  misc_RNA (1)...(19): siRNA sense strand
gaaaauagucuccacaaag

SEQ ID NO: 629065 - RNA, 19 nt, Homo sapiens
  misc_RNA (1)...(19): siRNA sense strand
aaauacaucccuaauggaa

SEQ ID NO: 629066 - RNA, 19 nt, Homo sapiens
  misc_RNA (1)...(19): siRNA sense strand
gagacagaacccaaacaaa

SEQ ID NO: 629067 - RNA, 19 nt, Homo sapiens
  misc_RNA (1)...(19): siRNA sense strand
gaaaauaugcucaaaccau

SEQ ID NO: 629068 - RNA, 19 nt, Homo sapiens
  misc_RNA (1)...(19): siRNA sense strand
ggaggcaaguggucaacag

SEQ ID NO: 629069 - RNA, 19 nt, Homo sapiens
  misc_RNA (1)...(19): siRNA sense strand
uaagacaccaccaggaguu

SEQ ID NO: 629070 - RNA, 19 nt, Homo sapiens
  misc_RNA (1)...(19): siRNA sense strand
gcaccaccagcaguaauaa

SEQ ID NO: 629071 - RNA, 19 nt, Homo sapiens
  misc_RNA (1)...(19): siRNA sense strand
gaacccaaacaaauacauc

SEQ ID NO: 629072 - RNA, 19 nt, Homo sapiens
  misc_RNA (1)...(19): siRNA sense strand
gagcacaccaugucacuac

SEQ ID NO: 629073 - RNA, 19 nt, Homo sapiens
  misc_RNA (1)...(19): siRNA sense strand
caacuacagcugcuauaca

SEQ ID NO: 629074 - RNA, 19 nt, Homo sapiens
  misc_RNA (1)...(19): siRNA sense strand
ggaaugacacuuacuuacg

SEQ ID NO: 629075 - RNA, 19 nt, Homo sapiens
  misc_RNA (1)...(19): siRNA sense strand
gagcaagaacuagaaaaua

SEQ ID NO: 629076 - RNA, 19 nt, Homo sapiens
  misc_RNA (1)...(19): siRNA sense strand
ccuuucaaccuaauaagua

SEQ ID NO: 629077 - RNA, 19 nt, Homo sapiens
  misc_RNA (1)...(19): siRNA sense strand
cuacagcugcuauacagaa

SEQ ID NO: 629078 - RNA, 19 nt, Homo sapiens
  misc_RNA (1)...(19): siRNA sense strand
aggauggaaucaacagaaa

SEQ ID NO: 629079 - RNA, 19 nt, Homo sapiens
  misc_RNA (1)...(19): siRNA sense strand
gaugagcaagaacuagaaa

SEQ ID NO: 629080 - RNA, 19 nt, Homo sapiens
  misc_RNA (1)...(19): siRNA sense strand
gaugggaucagcucagcaa

SEQ ID NO: 629081 - RNA, 19 nt, Homo sapiens
  misc_RNA (1)...(19): siRNA sense strand
ccuaccaaccucuacauuu

SEQ ID NO: 629082 - RNA, 19 nt, Homo sapiens
  misc_RNA (1)...(19): siRNA sense strand
gaaugaucacucaaacuuc

SEQ ID NO: 629083 - RNA, 19 nt, Homo sapiens
  misc_RNA (1)...(19): siRNA sense strand
uagcagcaguagcaacuca

SEQ ID NO: 629084 - RNA, 19 nt, Homo sapiens
  misc_RNA (1)...(19): siRNA sense strand
caaauacaucccuaaugga

SEQ ID NO: 629085 - RNA, 19 nt, Homo sapiens
  misc_RNA (1)...(19): siRNA sense strand
ggaugagcaagaacuagaa

SEQ ID NO: 629086 - RNA, 19 nt, Homo sapiens
  misc_RNA (1)...(19): siRNA sense strand
gauuuuauccuucaccaua

SEQ ID NO: 629087 - RNA, 19 nt, Homo sapiens
  misc_RNA (1)...(19): siRNA sense strand
caaggauacuacgugauuc

SEQ ID NO: 629088 - RNA, 19 nt, Homo sapiens
  misc_RNA (1)...(19): siRNA sense strand
aaugaucacucaaacuucu

SEQ ID NO: 629089 - RNA, 19 nt, Homo sapiens
  misc_RNA (1)...(19): siRNA sense strand
gaagaccauggcauagaga

SEQ ID NO: 629090 - RNA, 19 nt, Homo sapiens
  misc_RNA (1)...(19): siRNA sense strand
ccauuuggacaaguuauuu

SEQ ID NO: 629091 - RNA, 19 nt, Homo sapiens
  misc_RNA (1)...(19): siRNA sense strand
ccucaaccauauauucuac

SEQ ID NO: 629092 - RNA, 19 nt, Homo sapiens
  misc_RNA (1)...(19): siRNA sense strand
uauugcaucuccuguaucu

SEQ ID NO: 629093 - RNA, 19 nt, Homo sapiens
  misc_RNA (1)...(19): siRNA sense strand
cgagacgucuaaugaccau

SEQ ID NO: 629094 - RNA, 19 nt, Homo sapiens
  misc_RNA (1)...(19): siRNA sense strand
aagcuguuauuggucauuu

SEQ ID NO: 629095 - RNA, 19 nt, Homo sapiens
  misc_RNA (1)...(19): siRNA sense strand
cacucaaacuucuauuaca

SEQ ID NO: 629096 - RNA, 19 nt, Homo sapiens
  misc_RNA (1)...(19): siRNA sense strand
gcuggaaugacacuuacuu

SEQ ID NO: 629097 - RNA, 19 nt, Homo sapiens
  misc_RNA (1)...(19): siRNA sense strand
aagcucaaauggcaaagca

SEQ ID NO: 629098 - RNA, 19 nt, Homo sapiens
  misc_RNA (1)...(19): siRNA sense strand
ucacucaaacuucuauuac

SEQ ID NO: 629099 - RNA, 19 nt, Homo sapiens
  misc_RNA (1)...(19): siRNA sense strand
aaaauagucuccacaaagg

SEQ ID NO: 629100 - RNA, 19 nt, Homo sapiens
  misc_RNA (1)...(19): siRNA sense strand
cagcaguaauaacaacagu

SEQ ID NO: 629101 - RNA, 19 nt, Homo sapiens
  misc_RNA (1)...(19): siRNA sense strand
cuccauggaugagcaagaa

SEQ ID NO: 629102 - RNA, 19 nt, Homo sapiens
  misc_RNA (1)...(19): siRNA sense strand
agagacagaacccaaacaa

SEQ ID NO: 629103 - RNA, 19 nt, Homo sapiens
  misc_RNA (1)...(19): siRNA sense strand
uaggauggaaucaacagaa

SEQ ID NO: 629104 - RNA, 19 nt, Homo sapiens
  misc_RNA (1)...(19): siRNA sense strand
ucaaccauaugggaaaaua

SEQ ID NO: 629105 - RNA, 19 nt, Homo sapiens
  misc_RNA (1)...(19): siRNA sense strand
gcaaagcaacaggaacaag

SEQ ID NO: 629106 - RNA, 19 nt, Homo sapiens
  misc_RNA (1)...(19): siRNA sense strand
ggagccuacuugccacagu

SEQ ID NO: 629107 - RNA, 19 nt, Homo sapiens
  misc_RNA (1)...(19): siRNA sense strand
ggaacauacaugccugcaa

SEQ ID NO: 629108 - RNA, 19 nt, Homo sapiens
  misc_RNA (1)...(19): siRNA sense strand
aaaccauuuggacaaguua

SEQ ID NO: 629109 - RNA, 19 nt, Homo sapiens
  misc_RNA (1)...(19): siRNA sense strand
augcaaagguuaugguuuu

SEQ ID NO: 629110 - RNA, 19 nt, Homo sapiens
  misc_RNA (1)...(19): siRNA sense strand
caaaugcaaagguuauggu

SEQ ID NO: 629111 - RNA, 19 nt, Homo sapiens
  misc_RNA (1)...(19): siRNA sense strand
cuauauugcaucuccugua

SEQ ID NO: 629112 - RNA, 19 nt, Homo sapiens
  misc_RNA (1)...(19): siRNA sense strand
cuggaaugacacuuacuua

SEQ ID NO: 629113 - RNA, 19 nt, Homo sapiens
  misc_RNA (1)...(19): siRNA sense strand
gguacaagucgugguguug

SEQ ID NO: 629114 - RNA, 19 nt, Homo sapiens
  misc_RNA (1)...(19): siRNA sense strand
uggcaaagcaacaggaaca

SEQ ID NO: 629115 - RNA, 19 nt, Homo sapiens
  misc_RNA (1)...(19): siRNA sense strand
caaccucuacauuucuaau

SEQ ID NO: 629116 - RNA, 19 nt, Homo sapiens
  misc_RNA (1)...(19): siRNA sense strand
accaaccucuacauuucua

SEQ ID NO: 629117 - RNA, 19 nt, Homo sapiens
  misc_RNA (1)...(19): siRNA sense strand
gcaagaacuagaaaauaug

SEQ ID NO: 629118 - RNA, 19 nt, Homo sapiens
  misc_RNA (1)...(19): siRNA sense strand
ggagcacaccaugucacua

SEQ ID NO: 629119 - RNA, 19 nt, Homo sapiens
  misc_RNA (1)...(19): siRNA sense strand
gcaaccucaaccauauauu

SEQ ID NO: 629120 - RNA, 19 nt, Homo sapiens
  misc_RNA (1)...(19): siRNA sense strand
ccaccagcaguaauaacaa

SEQ ID NO: 629121 - RNA, 19 nt, Homo sapiens
  misc_RNA (1)...(19): siRNA sense strand
gaagcuguuauuggucauu

SEQ ID NO: 629122 - RNA, 19 nt, Homo sapiens
  misc_RNA (1)...(19): siRNA sense strand
cauggaugagcaagaacua

SEQ ID NO: 629123 - RNA, 19 nt, Homo sapiens
  misc_RNA (1)...(19): siRNA sense strand
ucaaccauauauucuacag

SEQ ID NO: 629124 - RNA, 19 nt, Homo sapiens
  misc_RNA (1)...(19): siRNA sense strand
gcuguuauuggucauuuua

SEQ ID NO: 629125 - RNA, 19 nt, Homo sapiens
  misc_RNA (1)...(19): siRNA sense strand
guguaaguuugcugaugga

SEQ ID NO: 629126 - RNA, 19 nt, Homo sapiens
  misc_RNA (1)...(19): siRNA sense strand
cacuacagcccgcaucaau

SEQ ID NO: 629127 - RNA, 19 nt, Homo sapiens
  misc_RNA (1)...(19): siRNA sense strand
caccagcaguaauaacaac

SEQ ID NO: 629128 - RNA, 19 nt, Homo sapiens
  misc_RNA (1)...(19): siRNA sense strand
ccauauaccuuucaaccua

SEQ ID NO: 629129 - RNA, 19 nt, Homo sapiens
  misc_RNA (1)...(19): siRNA sense strand
gacagaacccaaacaaaua

SEQ ID NO: 629130 - RNA, 19 nt, Homo sapiens
  misc_RNA (1)...(19): siRNA sense strand
gaaugacacuuacuuacga

SEQ ID NO: 629131 - RNA, 19 nt, Homo sapiens
  misc_RNA (1)...(19): siRNA sense strand
gaugcaaccucaaccauau

SEQ ID NO: 629132 - RNA, 19 nt, Homo sapiens
  misc_RNA (1)...(19): siRNA sense strand
gaagcucugucaaccauau

SEQ ID NO: 629133 - RNA, 19 nt, Homo sapiens
  misc_RNA (1)...(19): siRNA sense strand
caaguuauuucuacaagga

SEQ ID NO: 629134 - RNA, 19 nt, Homo sapiens
  misc_RNA (1)...(19): siRNA sense strand
acaaauacaucccuaaugg

SEQ ID NO: 629135 - RNA, 19 nt, Homo sapiens
  misc_RNA (1)...(19): siRNA sense strand
gaaccuuuauuguguaagu

SEQ ID NO: 629136 - RNA, 19 nt, Homo sapiens
  misc_RNA (1)...(19): siRNA sense strand
cuaccaaccucuacauuuc

SEQ ID NO: 629137 - RNA, 19 nt, Homo sapiens
  misc_RNA (1)...(19): siRNA sense strand
ggaagaccauggcauagag

SEQ ID NO: 629138 - RNA, 19 nt, Homo sapiens
  misc_RNA (1)...(19): siRNA sense strand
ggaugcaaccucaaccaua

SEQ ID NO: 629139 - RNA, 19 nt, Homo sapiens
  misc_RNA (1)...(19): siRNA sense strand
agacagaacccaaacaaau

SEQ ID NO: 629140 - RNA, 19 nt, Homo sapiens
  misc_RNA (1)...(19): siRNA sense strand
cgaaugaucacucaaacuu

SEQ ID NO: 629141 - RNA, 19 nt, Homo sapiens
  misc_RNA (1)...(19): siRNA sense strand
cauauaccuuucaaccuaa

SEQ ID NO: 629142 - RNA, 19 nt, Homo sapiens
  misc_RNA (1)...(19): siRNA sense strand
caaagcaacaggaacaaga

SEQ ID NO: 629143 - RNA, 19 nt, Homo sapiens
  misc_RNA (1)...(19): siRNA sense strand
cguguuaacucccucaaug

SEQ ID NO: 629144 - RNA, 19 nt, Homo sapiens
  misc_RNA (1)...(19): siRNA sense strand
uauauugcaucuccuguau

SEQ ID NO: 629145 - RNA, 19 nt, Homo sapiens
  misc_RNA (1)...(19): siRNA sense strand
ggacaaguuauuucuacaa

SEQ ID NO: 629146 - RNA, 19 nt, Homo sapiens
  misc_RNA (1)...(19): siRNA sense strand
ggaaaauagucuccacaaa

SEQ ID NO: 629147 - RNA, 19 nt, Homo sapiens
  misc_RNA (1)...(19): siRNA sense strand
gguguuggcuuugcuagga

SEQ ID NO: 629148 - RNA, 19 nt, Homo sapiens
  misc_RNA (1)...(19): siRNA sense strand
cagaaccuuuauuguguaa

SEQ ID NO: 629149 - RNA, 19 nt, Homo sapiens
  misc_RNA (1)...(19): siRNA sense strand
cuacagcccgcaucaauga

SEQ ID NO: 629150 - RNA, 19 nt, Homo sapiens
  misc_RNA (1)...(19): siRNA sense strand
gcaguaauaacaacaguag

SEQ ID NO: 629151 - RNA, 19 nt, Homo sapiens
  misc_RNA (1)...(19): siRNA sense strand
auacaucccuaauggaaga

SEQ ID NO: 629152 - RNA, 19 nt, Homo sapiens
  misc_RNA (1)...(19): siRNA sense strand
cuacgugauuccaguggua

SEQ ID NO: 629153 - RNA, 19 nt, Homo sapiens
  misc_RNA (1)...(19): siRNA sense strand
caaccucaaccauauauuc

SEQ ID NO: 629154 - RNA, 19 nt, Homo sapiens
  misc_RNA (1)...(19): siRNA sense strand
gcuacaaaccgaaugauca

SEQ ID NO: 629155 - RNA, 19 nt, Homo sapiens
  misc_RNA (1)...(19): siRNA sense strand
acagaaccuuuauugugua

SEQ ID NO: 629156 - RNA, 19 nt, Homo sapiens
  misc_RNA (1)...(19): siRNA sense strand
gacaaguuauuucuacaag

SEQ ID NO: 629157 - RNA, 19 nt, Homo sapiens
  misc_RNA (1)...(19): siRNA sense strand
caaaccgaaugaucacuca

SEQ ID NO: 629158 - RNA, 19 nt, Homo sapiens
  misc_RNA (1)...(19): siRNA sense strand
acaaggauacuacgugauu

SEQ ID NO: 629159 - RNA, 19 nt, Homo sapiens
  misc_RNA (1)...(19): siRNA sense strand
gcaaaacgaaccucuauau

SEQ ID NO: 629160 - RNA, 19 nt, Homo sapiens
  misc_RNA (1)...(19): siRNA sense strand
gugaagcucugucaaccau

SEQ ID NO: 629161 - RNA, 19 nt, Homo sapiens
  misc_RNA (1)...(19): siRNA sense strand
ucuauuacacccuauauug

SEQ ID NO: 629162 - RNA, 19 nt, Homo sapiens
  misc_RNA (1)...(19): siRNA sense strand
caaacaaauacaucccuaa

SEQ ID NO: 629163 - RNA, 19 nt, Homo sapiens
  misc_RNA (1)...(19): siRNA sense strand
ccucuacauuucuaauuug

SEQ ID NO: 629164 - RNA, 19 nt, Homo sapiens
  misc_RNA (1)...(19): siRNA sense strand
gaaaauagucuccacaaag

SEQ ID NO: 629165 - RNA, 19 nt, Homo sapiens
  misc_RNA (1)...(19): siRNA sense strand
aaauacaucccuaauggaa

SEQ ID NO: 629166 - RNA, 19 nt, Homo sapiens
  misc_RNA (1)...(19): siRNA sense strand
gagacagaacccaaacaaa

SEQ ID NO: 629167 - RNA, 19 nt, Homo sapiens
  misc_RNA (1)...(19): siRNA sense strand
gaaaauaugcucaaaccau

SEQ ID NO: 629168 - RNA, 19 nt, Homo sapiens
  misc_RNA (1)...(19): siRNA sense strand
ggaggcaaguggucaacag

SEQ ID NO: 629169 - RNA, 19 nt, Homo sapiens
  misc_RNA (1)...(19): siRNA sense strand
uaagacaccaccaggaguu

SEQ ID NO: 629170 - RNA, 19 nt, Homo sapiens
  misc_RNA (1)...(19): siRNA sense strand
gcaccaccagcaguaauaa

SEQ ID NO: 629171 - RNA, 19 nt, Homo sapiens
  misc_RNA (1)...(19): siRNA sense strand
gaacccaaacaaauacauc

SEQ ID NO: 629172 - RNA, 19 nt, Homo sapiens
  misc_RNA (1)...(19): siRNA sense strand
gagcacaccaugucacuac

SEQ ID NO: 629173 - RNA, 19 nt, Homo sapiens
  misc_RNA (1)...(19): siRNA sense strand
caacuacagcugcuauaca

SEQ ID NO: 629174 - RNA, 19 nt, Homo sapiens
  misc_RNA (1)...(19): siRNA sense strand
ggaaugacacuuacuuacg

SEQ ID NO: 629175 - RNA, 19 nt, Homo sapiens
  misc_RNA (1)...(19): siRNA sense strand
gagcaagaacuagaaaaua

SEQ ID NO: 629176 - RNA, 19 nt, Homo sapiens
  misc_RNA (1)...(19): siRNA sense strand
ccuuucaaccuaauaagua

SEQ ID NO: 629177 - RNA, 19 nt, Homo sapiens
  misc_RNA (1)...(19): siRNA sense strand
cuacagcugcuauacagaa

SEQ ID NO: 629178 - RNA, 19 nt, Homo sapiens
  misc_RNA (1)...(19): siRNA sense strand
aggauggaaucaacagaaa

SEQ ID NO: 629179 - RNA, 19 nt, Homo sapiens
  misc_RNA (1)...(19): siRNA sense strand
gaugagcaagaacuagaaa

SEQ ID NO: 629180 - RNA, 19 nt, Homo sapiens
  misc_RNA (1)...(19): siRNA sense strand
gaugggaucagcucagcaa

SEQ ID NO: 629181 - RNA, 19 nt, Homo sapiens
  misc_RNA (1)...(19): siRNA sense strand
ccuaccaaccucuacauuu

SEQ ID NO: 629182 - RNA, 19 nt, Homo sapiens
  misc_RNA (1)...(19): siRNA sense strand
gaaugaucacucaaacuuc

SEQ ID NO: 629183 - RNA, 19 nt, Homo sapiens
  misc_RNA (1)...(19): siRNA sense strand
uagcagcaguagcaacuca

SEQ ID NO: 629184 - RNA, 19 nt, Homo sapiens
  misc_RNA (1)...(19): siRNA sense strand
caaauacaucccuaaugga

SEQ ID NO: 629185 - RNA, 19 nt, Homo sapiens
  misc_RNA (1)...(19): siRNA sense strand
ggaugagcaagaacuagaa

SEQ ID NO: 629186 - RNA, 19 nt, Homo sapiens
  misc_RNA (1)...(19): siRNA sense strand
gauuuuauccuucaccaua

SEQ ID NO: 629187 - RNA, 19 nt, Homo sapiens
  misc_RNA (1)...(19): siRNA sense strand
caaggauacuacgugauuc

SEQ ID NO: 629188 - RNA, 19 nt, Homo sapiens
  misc_RNA (1)...(19): siRNA sense strand
aaugaucacucaaacuucu

SEQ ID NO: 629189 - RNA, 19 nt, Homo sapiens
  misc_RNA (1)...(19): siRNA sense strand
gaagaccauggcauagaga

SEQ ID NO: 629190 - RNA, 19 nt, Homo sapiens
  misc_RNA (1)...(19): siRNA sense strand
ccauuuggacaaguuauuu

SEQ ID NO: 629191 - RNA, 19 nt, Homo sapiens
  misc_RNA (1)...(19): siRNA sense strand
ccucaaccauauauucuac

SEQ ID NO: 629192 - RNA, 19 nt, Homo sapiens
  misc_RNA (1)...(19): siRNA sense strand
uauugcaucuccuguaucu

SEQ ID NO: 629193 - RNA, 19 nt, Homo sapiens
  misc_RNA (1)...(19): siRNA sense strand
cgagacgucuaaugaccau

SEQ ID NO: 629194 - RNA, 19 nt, Homo sapiens
  misc_RNA (1)...(19): siRNA sense strand
aagcuguuauuggucauuu

SEQ ID NO: 629195 - RNA, 19 nt, Homo sapiens
  misc_RNA (1)...(19): siRNA sense strand
cacucaaacuucuauuaca

SEQ ID NO: 629196 - RNA, 19 nt, Homo sapiens
  misc_RNA (1)...(19): siRNA sense strand
gcuggaaugacacuuacuu

SEQ ID NO: 629197 - RNA, 19 nt, Homo sapiens
  misc_RNA (1)...(19): siRNA sense strand
aagcucaaauggcaaagca

SEQ ID NO: 629198 - RNA, 19 nt, Homo sapiens
  misc_RNA (1)...(19): siRNA sense strand
ucacucaaacuucuauuac

SEQ ID NO: 629199 - RNA, 19 nt, Homo sapiens
  misc_RNA (1)...(19): siRNA sense strand
aaaauagucuccacaaagg

SEQ ID NO: 629200 - RNA, 19 nt, Homo sapiens
  misc_RNA (1)...(19): siRNA sense strand
cagcaguaauaacaacagu

SEQ ID NO: 629201 - RNA, 19 nt, Homo sapiens
  misc_RNA (1)...(19): siRNA sense strand
cuccauggaugagcaagaa

SEQ ID NO: 629202 - RNA, 19 nt, Homo sapiens
  misc_RNA (1)...(19): siRNA sense strand
agagacagaacccaaacaa

SEQ ID NO: 629203 - RNA, 19 nt, Homo sapiens
  misc_RNA (1)...(19): siRNA sense strand
uaggauggaaucaacagaa

SEQ ID NO: 629204 - RNA, 19 nt, Homo sapiens
  misc_RNA (1)...(19): siRNA sense strand
ucaaccauaugggaaaaua

SEQ ID NO: 629205 - RNA, 19 nt, Homo sapiens
  misc_RNA (1)...(19): siRNA sense strand
gcaaagcaacaggaacaag

SEQ ID NO: 629206 - RNA, 19 nt, Homo sapiens
  misc_RNA (1)...(19): siRNA sense strand
ggagccuacuugccacagu

SEQ ID NO: 629207 - RNA, 19 nt, Homo sapiens
  misc_RNA (1)...(19): siRNA sense strand
ggaacauacaugccugcaa

SEQ ID NO: 629208 - RNA, 19 nt, Homo sapiens
  misc_RNA (1)...(19): siRNA sense strand
aaaccauuuggacaaguua

SEQ ID NO: 629209 - RNA, 19 nt, Homo sapiens
  misc_RNA (1)...(19): siRNA sense strand
augcaaagguuaugguuuu

SEQ ID NO: 629210 - RNA, 19 nt, Homo sapiens
  misc_RNA (1)...(19): siRNA sense strand
caaaugcaaagguuauggu

SEQ ID NO: 629211 - RNA, 19 nt, Homo sapiens
  misc_RNA (1)...(19): siRNA sense strand
cuauauugcaucuccugua

SEQ ID NO: 629212 - RNA, 19 nt, Homo sapiens
  misc_RNA (1)...(19): siRNA sense strand
cuggaaugacacuuacuua

SEQ ID NO: 629213 - RNA, 19 nt, Homo sapiens
  misc_RNA (1)...(19): siRNA sense strand
gguacaagucgugguguug

SEQ ID NO: 629214 - RNA, 19 nt, Homo sapiens
  misc_RNA (1)...(19): siRNA sense strand
uggcaaagcaacaggaaca

SEQ ID NO: 629215 - RNA, 19 nt, Homo sapiens
  misc_RNA (1)...(19): siRNA sense strand
caaccucuacauuucuaau

SEQ ID NO: 629216 - RNA, 19 nt, Homo sapiens
  misc_RNA (1)...(19): siRNA sense strand
accaaccucuacauuucua

SEQ ID NO: 629217 - RNA, 19 nt, Homo sapiens
  misc_RNA (1)...(19): siRNA sense strand
gcaagaacuagaaaauaug

SEQ ID NO: 629218 - RNA, 19 nt, Homo sapiens
  misc_RNA (1)...(19): siRNA sense strand
ggagcacaccaugucacua

SEQ ID NO: 629219 - RNA, 19 nt, Homo sapiens
  misc_RNA (1)...(19): siRNA sense strand
gcaaccucaaccauauauu

SEQ ID NO: 629220 - RNA, 19 nt, Homo sapiens
  misc_RNA (1)...(19): siRNA sense strand
ccaccagcaguaauaacaa

SEQ ID NO: 629221 - RNA, 19 nt, Homo sapiens
  misc_RNA (1)...(19): siRNA sense strand
gaagcuguuauuggucauu

SEQ ID NO: 629222 - RNA, 19 nt, Homo sapiens
  misc_RNA (1)...(19): siRNA sense strand
cauggaugagcaagaacua

SEQ ID NO: 629223 - RNA, 19 nt, Homo sapiens
  misc_RNA (1)...(19): siRNA sense strand
ucaaccauauauucuacag

SEQ ID NO: 629224 - RNA, 19 nt, Homo sapiens
  misc_RNA (1)...(19): siRNA sense strand
gcuguuauuggucauuuua

SEQ ID NO: 629225 - RNA, 19 nt, Homo sapiens
  misc_RNA (1)...(19): siRNA sense strand
guguaaguuugcugaugga

SEQ ID NO: 629226 - RNA, 19 nt, Homo sapiens
  misc_RNA (1)...(19): siRNA sense strand
cacuacagcccgcaucaau

SEQ ID NO: 629227 - RNA, 19 nt, Homo sapiens
  misc_RNA (1)...(19): siRNA sense strand
caccagcaguaauaacaac

SEQ ID NO: 629228 - RNA, 19 nt, Homo sapiens
  misc_RNA (1)...(19): siRNA sense strand
ccauauaccuuucaaccua

SEQ ID NO: 629229 - RNA, 19 nt, Homo sapiens
  misc_RNA (1)...(19): siRNA sense strand
gacagaacccaaacaaaua

SEQ ID NO: 629230 - RNA, 19 nt, Homo sapiens
  misc_RNA (1)...(19): siRNA sense strand
gaaugacacuuacuuacga

SEQ ID NO: 629231 - RNA, 19 nt, Homo sapiens
  misc_RNA (1)...(19): siRNA sense strand
gaugcaaccucaaccauau

SEQ ID NO: 629232 - RNA, 19 nt, Homo sapiens
  misc_RNA (1)...(19): siRNA sense strand
gaagcucugucaaccauau

SEQ ID NO: 629233 - RNA, 19 nt, Homo sapiens
  misc_RNA (1)...(19): siRNA sense strand
caaguuauuucuacaagga

SEQ ID NO: 629234 - RNA, 19 nt, Homo sapiens
  misc_RNA (1)...(19): siRNA sense strand
acaaauacaucccuaaugg

SEQ ID NO: 629235 - RNA, 19 nt, Homo sapiens
  misc_RNA (1)...(19): siRNA sense strand
gaaccuuuauuguguaagu

SEQ ID NO: 629236 - RNA, 19 nt, Homo sapiens
  misc_RNA (1)...(19): siRNA sense strand
cuaccaaccucuacauuuc

SEQ ID NO: 629237 - RNA, 19 nt, Homo sapiens
  misc_RNA (1)...(19): siRNA sense strand
ggaagaccauggcauagag

SEQ ID NO: 629238 - RNA, 19 nt, Homo sapiens
  misc_RNA (1)...(19): siRNA sense strand
ggaugcaaccucaaccaua

SEQ ID NO: 629239 - RNA, 19 nt, Homo sapiens
  misc_RNA (1)...(19): siRNA sense strand
agacagaacccaaacaaau

SEQ ID NO: 629240 - RNA, 19 nt, Homo sapiens
  misc_RNA (1)...(19): siRNA sense strand
cgaaugaucacucaaacuu

SEQ ID NO: 629241 - RNA, 19 nt, Homo sapiens
  misc_RNA (1)...(19): siRNA sense strand
cauauaccuuucaaccuaa

SEQ ID NO: 629242 - RNA, 19 nt, Homo sapiens
  misc_RNA (1)...(19): siRNA sense strand
caaagcaacaggaacaaga

SEQ ID NO: 629243 - RNA, 19 nt, Homo sapiens
  misc_RNA (1)...(19): siRNA sense strand
cguguuaacucccucaaug

SEQ ID NO: 629244 - RNA, 19 nt, Homo sapiens
  misc_RNA (1)...(19): siRNA sense strand
uauauugcaucuccuguau

SEQ ID NO: 629245 - RNA, 19 nt, Homo sapiens
  misc_RNA (1)...(19): siRNA sense strand
ggacaaguuauuucuacaa

SEQ ID NO: 629246 - RNA, 19 nt, Homo sapiens
  misc_RNA (1)...(19): siRNA sense strand
ggaaaauagucuccacaaa

SEQ ID NO: 629247 - RNA, 19 nt, Homo sapiens
  misc_RNA (1)...(19): siRNA sense strand
gguguuggcuuugcuagga

SEQ ID NO: 629248 - RNA, 19 nt, Homo sapiens
  misc_RNA (1)...(19): siRNA sense strand
cagaaccuuuauuguguaa

SEQ ID NO: 629249 - RNA, 19 nt, Homo sapiens
  misc_RNA (1)...(19): siRNA sense strand
cuacagcccgcaucaauga

SEQ ID NO: 629250 - RNA, 19 nt, Homo sapiens
  misc_RNA (1)...(19): siRNA sense strand
gcaguaauaacaacaguag

SEQ ID NO: 629251 - RNA, 19 nt, Homo sapiens
  misc_RNA (1)...(19): siRNA sense strand
auacaucccuaauggaaga

SEQ ID NO: 629252 - RNA, 19 nt, Homo sapiens
  misc_RNA (1)...(19): siRNA sense strand
cuacgugauuccaguggua

SEQ ID NO: 629253 - RNA, 19 nt, Homo sapiens
  misc_RNA (1)...(19): siRNA sense strand
caaccucaaccauauauuc

SEQ ID NO: 629254 - RNA, 19 nt, Homo sapiens
  misc_RNA (1)...(19): siRNA sense strand
gcuacaaaccgaaugauca

SEQ ID NO: 629255 - RNA, 19 nt, Homo sapiens
  misc_RNA (1)...(19): siRNA sense strand
acagaaccuuuauugugua

SEQ ID NO: 629256 - RNA, 19 nt, Homo sapiens
  misc_RNA (1)...(19): siRNA sense strand
gacaaguuauuucuacaag

SEQ ID NO: 629257 - RNA, 19 nt, Homo sapiens
  misc_RNA (1)...(19): siRNA sense strand
caaaccgaaugaucacuca

SEQ ID NO: 629258 - RNA, 19 nt, Homo sapiens
  misc_RNA (1)...(19): siRNA sense strand
acaaggauacuacgugauu

SEQ ID NO: 629259 - RNA, 19 nt, Homo sapiens
  misc_RNA (1)...(19): siRNA sense strand
gcaaaacgaaccucuauau

SEQ ID NO: 629260 - RNA, 19 nt, Homo sapiens
  misc_RNA (1)...(19): siRNA sense strand
gugaagcucugucaaccau

SEQ ID NO: 629261 - RNA, 19 nt, Homo sapiens
  misc_RNA (1)...(19): siRNA sense strand
ucuauuacacccuauauug

SEQ ID NO: 629262 - RNA, 19 nt, Homo sapiens
  misc_RNA (1)...(19): siRNA sense strand
caaacaaauacaucccuaa

SEQ ID NO: 629263 - RNA, 19 nt, Homo sapiens
  misc_RNA (1)...(19): siRNA sense strand
ccucuacauuucuaauuug

SEQ ID NO: 629264 - RNA, 19 nt, Homo sapiens
  misc_RNA (1)...(19): siRNA sense strand
gaaaauagucuccacaaag

SEQ ID NO: 629265 - RNA, 19 nt, Homo sapiens
  misc_RNA (1)...(19): siRNA sense strand
aaauacaucccuaauggaa

SEQ ID NO: 629266 - RNA, 19 nt, Homo sapiens
  misc_RNA (1)...(19): siRNA sense strand
gagacagaacccaaacaaa

SEQ ID NO: 629267 - RNA, 19 nt, Homo sapiens
  misc_RNA (1)...(19): siRNA sense strand
gaaaauaugcucaaaccau

SEQ ID NO: 629268 - RNA, 19 nt, Homo sapiens
  misc_RNA (1)...(19): siRNA sense strand
ggaggcaaguggucaacag

SEQ ID NO: 629269 - RNA, 19 nt, Homo sapiens
  misc_RNA (1)...(19): siRNA sense strand
uaagacaccaccaggaguu

SEQ ID NO: 629270 - RNA, 19 nt, Homo sapiens
  misc_RNA (1)...(19): siRNA sense strand
gcaccaccagcaguaauaa

SEQ ID NO: 629271 - RNA, 19 nt, Homo sapiens
  misc_RNA (1)...(19): siRNA sense strand
gaacccaaacaaauacauc

SEQ ID NO: 629272 - RNA, 19 nt, Homo sapiens
  misc_RNA (1)...(19): siRNA sense strand
gagcacaccaugucacuac

SEQ ID NO: 629273 - RNA, 19 nt, Homo sapiens
  misc_RNA (1)...(19): siRNA sense strand
caacuacagcugcuauaca

SEQ ID NO: 629274 - RNA, 19 nt, Homo sapiens
  misc_RNA (1)...(19): siRNA sense strand
ggaaugacacuuacuuacg

SEQ ID NO: 629275 - RNA, 19 nt, Homo sapiens
  misc_RNA (1)...(19): siRNA sense strand
gagcaagaacuagaaaaua

SEQ ID NO: 629276 - RNA, 19 nt, Homo sapiens
  misc_RNA (1)...(19): siRNA sense strand
ccuuucaaccuaauaagua

SEQ ID NO: 629277 - RNA, 19 nt, Homo sapiens
  misc_RNA (1)...(19): siRNA sense strand
cuacagcugcuauacagaa

SEQ ID NO: 629278 - RNA, 19 nt, Homo sapiens
  misc_RNA (1)...(19): siRNA sense strand
aggauggaaucaacagaaa

SEQ ID NO: 629279 - RNA, 19 nt, Homo sapiens
  misc_RNA (1)...(19): siRNA sense strand
gaugagcaagaacuagaaa

SEQ ID NO: 629280 - RNA, 19 nt, Homo sapiens
  misc_RNA (1)...(19): siRNA sense strand
gaugggaucagcucagcaa

SEQ ID NO: 629281 - RNA, 19 nt, Homo sapiens
  misc_RNA (1)...(19): siRNA sense strand
ccuaccaaccucuacauuu

SEQ ID NO: 629282 - RNA, 19 nt, Homo sapiens
  misc_RNA (1)...(19): siRNA sense strand
gaaugaucacucaaacuuc

SEQ ID NO: 629283 - RNA, 19 nt, Homo sapiens
  misc_RNA (1)...(19): siRNA sense strand
uagcagcaguagcaacuca

SEQ ID NO: 629284 - RNA, 19 nt, Homo sapiens
  misc_RNA (1)...(19): siRNA sense strand
caaauacaucccuaaugga

SEQ ID NO: 629285 - RNA, 19 nt, Homo sapiens
  misc_RNA (1)...(19): siRNA sense strand
ggaugagcaagaacuagaa

SEQ ID NO: 629286 - RNA, 19 nt, Homo sapiens
  misc_RNA (1)...(19): siRNA sense strand
gauuuuauccuucaccaua

SEQ ID NO: 629287 - RNA, 19 nt, Homo sapiens
  misc_RNA (1)...(19): siRNA sense strand
caaggauacuacgugauuc

SEQ ID NO: 629288 - RNA, 19 nt, Homo sapiens
  misc_RNA (1)...(19): siRNA sense strand
aaugaucacucaaacuucu

SEQ ID NO: 629289 - RNA, 19 nt, Homo sapiens
  misc_RNA (1)...(19): siRNA sense strand
gaagaccauggcauagaga

SEQ ID NO: 629290 - RNA, 19 nt, Homo sapiens
  misc_RNA (1)...(19): siRNA sense strand
ccauuuggacaaguuauuu

SEQ ID NO: 629291 - RNA, 19 nt, Homo sapiens
  misc_RNA (1)...(19): siRNA sense strand
ccucaaccauauauucuac

SEQ ID NO: 629292 - RNA, 19 nt, Homo sapiens
  misc_RNA (1)...(19): siRNA sense strand
uauugcaucuccuguaucu

SEQ ID NO: 629293 - RNA, 19 nt, Homo sapiens
  misc_RNA (1)...(19): siRNA sense strand
cgagacgucuaaugaccau

SEQ ID NO: 629294 - RNA, 19 nt, Homo sapiens
  misc_RNA (1)...(19): siRNA sense strand
aagcuguuauuggucauuu

SEQ ID NO: 629295 - RNA, 19 nt, Homo sapiens
  misc_RNA (1)...(19): siRNA sense strand
cacucaaacuucuauuaca

SEQ ID NO: 629296 - RNA, 19 nt, Homo sapiens
  misc_RNA (1)...(19): siRNA sense strand
gcuggaaugacacuuacuu

SEQ ID NO: 629297 - RNA, 19 nt, Homo sapiens
  misc_RNA (1)...(19): siRNA sense strand
aagcucaaauggcaaagca

SEQ ID NO: 629298 - RNA, 19 nt, Homo sapiens
  misc_RNA (1)...(19): siRNA sense strand
ucacucaaacuucuauuac

SEQ ID NO: 629299 - RNA, 19 nt, Homo sapiens
  misc_RNA (1)...(19): siRNA sense strand
aaaauagucuccacaaagg

SEQ ID NO: 629300 - RNA, 19 nt, Homo sapiens
  misc_RNA (1)...(19): siRNA sense strand
cagcaguaauaacaacagu

SEQ ID NO: 629301 - RNA, 19 nt, Homo sapiens
  misc_RNA (1)...(19): siRNA sense strand
cuccauggaugagcaagaa

SEQ ID NO: 629302 - RNA, 19 nt, Homo sapiens
  misc_RNA (1)...(19): siRNA sense strand
agagacagaacccaaacaa

SEQ ID NO: 629303 - RNA, 19 nt, Homo sapiens
  misc_RNA (1)...(19): siRNA sense strand
uaggauggaaucaacagaa

SEQ ID NO: 629304 - RNA, 19 nt, Homo sapiens
  misc_RNA (1)...(19): siRNA sense strand
ucaaccauaugggaaaaua

SEQ ID NO: 629305 - RNA, 19 nt, Homo sapiens
  misc_RNA (1)...(19): siRNA sense strand
gcaaagcaacaggaacaag

SEQ ID NO: 629306 - RNA, 19 nt, Homo sapiens
  misc_RNA (1)...(19): siRNA sense strand
ggagccuacuugccacagu

SEQ ID NO: 629307 - RNA, 19 nt, Homo sapiens
  misc_RNA (1)...(19): siRNA sense strand
ggaacauacaugccugcaa

SEQ ID NO: 629308 - RNA, 19 nt, Homo sapiens
  misc_RNA (1)...(19): siRNA sense strand
aaaccauuuggacaaguua

SEQ ID NO: 629309 - RNA, 19 nt, Homo sapiens
  misc_RNA (1)...(19): siRNA sense strand
augcaaagguuaugguuuu

SEQ ID NO: 629310 - RNA, 19 nt, Homo sapiens
  misc_RNA (1)...(19): siRNA sense strand
caaaugcaaagguuauggu

SEQ ID NO: 629311 - RNA, 19 nt, Homo sapiens
  misc_RNA (1)...(19): siRNA sense strand
cuauauugcaucuccugua

SEQ ID NO: 629312 - RNA, 19 nt, Homo sapiens
  misc_RNA (1)...(19): siRNA sense strand
cuggaaugacacuuacuua

SEQ ID NO: 629313 - RNA, 19 nt, Homo sapiens
  misc_RNA (1)...(19): siRNA sense strand
gguacaagucgugguguug

SEQ ID NO: 629314 - RNA, 19 nt, Homo sapiens
  misc_RNA (1)...(19): siRNA sense strand
uggcaaagcaacaggaaca

SEQ ID NO: 629315 - RNA, 19 nt, Homo sapiens
  misc_RNA (1)...(19): siRNA sense strand
caaccucuacauuucuaau

SEQ ID NO: 629316 - RNA, 19 nt, Homo sapiens
  misc_RNA (1)...(19): siRNA sense strand
accaaccucuacauuucua

SEQ ID NO: 629317 - RNA, 19 nt, Homo sapiens
  misc_RNA (1)...(19): siRNA sense strand
gcaagaacuagaaaauaug

SEQ ID NO: 629318 - RNA, 19 nt, Homo sapiens
  misc_RNA (1)...(19): siRNA sense strand
ggagcacaccaugucacua

SEQ ID NO: 629319 - RNA, 19 nt, Homo sapiens
  misc_RNA (1)...(19): siRNA sense strand
gcaaccucaaccauauauu

SEQ ID NO: 629320 - RNA, 19 nt, Homo sapiens
  misc_RNA (1)...(19): siRNA sense strand
ccaccagcaguaauaacaa

SEQ ID NO: 629321 - RNA, 19 nt, Homo sapiens
  misc_RNA (1)...(19): siRNA sense strand
gaagcuguuauuggucauu

SEQ ID NO: 629322 - RNA, 19 nt, Homo sapiens
  misc_RNA (1)...(19): siRNA sense strand
cauggaugagcaagaacua

SEQ ID NO: 629323 - RNA, 19 nt, Homo sapiens
  misc_RNA (1)...(19): siRNA sense strand
ucaaccauauauucuacag

SEQ ID NO: 629324 - RNA, 19 nt, Homo sapiens
  misc_RNA (1)...(19): siRNA sense strand
gcuguuauuggucauuuua

SEQ ID NO: 629325 - RNA, 19 nt, Homo sapiens
  misc_RNA (1)...(19): siRNA sense strand
guguaaguuugcugaugga

SEQ ID NO: 629326 - RNA, 19 nt, Homo sapiens
  misc_RNA (1)...(19): siRNA sense strand
cacuacagcccgcaucaau

SEQ ID NO: 629327 - RNA, 19 nt, Homo sapiens
  misc_RNA (1)...(19): siRNA sense strand
caccagcaguaauaacaac

SEQ ID NO: 629328 - RNA, 19 nt, Homo sapiens
  misc_RNA (1)...(19): siRNA sense strand
ccauauaccuuucaaccua

SEQ ID NO: 629329 - RNA, 19 nt, Homo sapiens
  misc_RNA (1)...(19): siRNA sense strand
gacagaacccaaacaaaua

SEQ ID NO: 629330 - RNA, 19 nt, Homo sapiens
  misc_RNA (1)...(19): siRNA sense strand
gaaugacacuuacuuacga

SEQ ID NO: 629331 - RNA, 19 nt, Homo sapiens
  misc_RNA (1)...(19): siRNA sense strand
gaugcaaccucaaccauau

SEQ ID NO: 629332 - RNA, 19 nt, Homo sapiens
  misc_RNA (1)...(19): siRNA sense strand
gaagcucugucaaccauau

SEQ ID NO: 629333 - RNA, 19 nt, Homo sapiens
  misc_RNA (1)...(19): siRNA sense strand
caaguuauuucuacaagga

SEQ ID NO: 629334 - RNA, 19 nt, Homo sapiens
  misc_RNA (1)...(19): siRNA sense strand
acaaauacaucccuaaugg

SEQ ID NO: 629335 - RNA, 19 nt, Homo sapiens
  misc_RNA (1)...(19): siRNA sense strand
gaaccuuuauuguguaagu

SEQ ID NO: 629336 - RNA, 19 nt, Homo sapiens
  misc_RNA (1)...(19): siRNA sense strand
cuaccaaccucuacauuuc

SEQ ID NO: 629337 - RNA, 19 nt, Homo sapiens
  misc_RNA (1)...(19): siRNA sense strand
ggaagaccauggcauagag

SEQ ID NO: 629338 - RNA, 19 nt, Homo sapiens
  misc_RNA (1)...(19): siRNA sense strand
ggaugcaaccucaaccaua

SEQ ID NO: 629339 - RNA, 19 nt, Homo sapiens
  misc_RNA (1)...(19): siRNA sense strand
agacagaacccaaacaaau

SEQ ID NO: 629340 - RNA, 19 nt, Homo sapiens
  misc_RNA (1)...(19): siRNA sense strand
cgaaugaucacucaaacuu

SEQ ID NO: 629341 - RNA, 19 nt, Homo sapiens
  misc_RNA (1)...(19): siRNA sense strand
cauauaccuuucaaccuaa

SEQ ID NO: 629342 - RNA, 19 nt, Homo sapiens
  misc_RNA (1)...(19): siRNA sense strand
caaagcaacaggaacaaga

SEQ ID NO: 629343 - RNA, 19 nt, Homo sapiens
  misc_RNA (1)...(19): siRNA sense strand
cguguuaacucccucaaug

SEQ ID NO: 629344 - RNA, 19 nt, Homo sapiens
  misc_RNA (1)...(19): siRNA sense strand
uauauugcaucuccuguau

SEQ ID NO: 629345 - RNA, 19 nt, Homo sapiens
  misc_RNA (1)...(19): siRNA sense strand
ggacaaguuauuucuacaa

SEQ ID NO: 629346 - RNA, 19 nt, Homo sapiens
  misc_RNA (1)...(19): siRNA sense strand
ggaaaauagucuccacaaa

SEQ ID NO: 629347 - RNA, 19 nt, Homo sapiens
  misc_RNA (1)...(19): siRNA sense strand
gguguuggcuuugcuagga

SEQ ID NO: 629348 - RNA, 19 nt, Homo sapiens
  misc_RNA (1)...(19): siRNA sense strand
cagaaccuuuauuguguaa

SEQ ID NO: 629349 - RNA, 19 nt, Homo sapiens
  misc_RNA (1)...(19): siRNA sense strand
cuacagcccgcaucaauga

SEQ ID NO: 629350 - RNA, 19 nt, Homo sapiens
  misc_RNA (1)...(19): siRNA sense strand
gcaguaauaacaacaguag

SEQ ID NO: 629351 - RNA, 19 nt, Homo sapiens
  misc_RNA (1)...(19): siRNA sense strand
auacaucccuaauggaaga

SEQ ID NO: 629352 - RNA, 19 nt, Homo sapiens
  misc_RNA (1)...(19): siRNA sense strand
cuacgugauuccaguggua

SEQ ID NO: 629353 - RNA, 19 nt, Homo sapiens
  misc_RNA (1)...(19): siRNA sense strand
caaccucaaccauauauuc

SEQ ID NO: 629354 - RNA, 19 nt, Homo sapiens
  misc_RNA (1)...(19): siRNA sense strand
gcuacaaaccgaaugauca

SEQ ID NO: 629355 - RNA, 19 nt, Homo sapiens
  misc_RNA (1)...(19): siRNA sense strand
acagaaccuuuauugugua

SEQ ID NO: 629356 - RNA, 19 nt, Homo sapiens
  misc_RNA (1)...(19): siRNA sense strand
gacaaguuauuucuacaag

SEQ ID NO: 629357 - RNA, 19 nt, Homo sapiens
  misc_RNA (1)...(19): siRNA sense strand
caaaccgaaugaucacuca

SEQ ID NO: 629358 - RNA, 19 nt, Homo sapiens
  misc_RNA (1)...(19): siRNA sense strand
acaaggauacuacgugauu

SEQ ID NO: 629359 - RNA, 19 nt, Homo sapiens
  misc_RNA (1)...(19): siRNA sense strand
gcaaaacgaaccucuauau

SEQ ID NO: 629360 - RNA, 19 nt, Homo sapiens
  misc_RNA (1)...(19): siRNA sense strand
gugaagcucugucaaccau

SEQ ID NO: 629361 - RNA, 19 nt, Homo sapiens
  misc_RNA (1)...(19): siRNA sense strand
ucuauuacacccuauauug

SEQ ID NO: 629362 - RNA, 19 nt, Homo sapiens
  misc_RNA (1)...(19): siRNA sense strand
caaacaaauacaucccuaa

SEQ ID NO: 629363 - RNA, 19 nt, Homo sapiens
  misc_RNA (1)...(19): siRNA sense strand
ccucuacauuucuaauuug

SEQ ID NO: 629364 - RNA, 19 nt, Homo sapiens
  misc_RNA (1)...(19): siRNA sense strand
gaaaauagucuccacaaag

SEQ ID NO: 629365 - RNA, 19 nt, Homo sapiens
  misc_RNA (1)...(19): siRNA sense strand
aaauacaucccuaauggaa

SEQ ID NO: 629366 - RNA, 19 nt, Homo sapiens
  misc_RNA (1)...(19): siRNA sense strand
gagacagaacccaaacaaa

SEQ ID NO: 629367 - RNA, 19 nt, Homo sapiens
  misc_RNA (1)...(19): siRNA sense strand
gaaaauaugcucaaaccau

SEQ ID NO: 629368 - RNA, 19 nt, Homo sapiens
  misc_RNA (1)...(19): siRNA sense strand
ggaggcaaguggucaacag

SEQ ID NO: 629369 - RNA, 19 nt, Homo sapiens
  misc_RNA (1)...(19): siRNA sense strand
uaagacaccaccaggaguu

SEQ ID NO: 629370 - RNA, 19 nt, Homo sapiens
  misc_RNA (1)...(19): siRNA sense strand
gcaccaccagcaguaauaa

SEQ ID NO: 629371 - RNA, 19 nt, Homo sapiens
  misc_RNA (1)...(19): siRNA sense strand
gaacccaaacaaauacauc

SEQ ID NO: 629372 - RNA, 19 nt, Homo sapiens
  misc_RNA (1)...(19): siRNA sense strand
gagcacaccaugucacuac

SEQ ID NO: 629373 - RNA, 19 nt, Homo sapiens
  misc_RNA (1)...(19): siRNA sense strand
caacuacagcugcuauaca

SEQ ID NO: 629374 - RNA, 19 nt, Homo sapiens
  misc_RNA (1)...(19): siRNA sense strand
ggaaugacacuuacuuacg

SEQ ID NO: 629375 - RNA, 19 nt, Homo sapiens
  misc_RNA (1)...(19): siRNA sense strand
gagcaagaacuagaaaaua

SEQ ID NO: 629376 - RNA, 19 nt, Homo sapiens
  misc_RNA (1)...(19): siRNA sense strand
ccuuucaaccuaauaagua

SEQ ID NO: 629377 - RNA, 19 nt, Homo sapiens
  misc_RNA (1)...(19): siRNA sense strand
cuacagcugcuauacagaa

SEQ ID NO: 629378 - RNA, 19 nt, Homo sapiens
  misc_RNA (1)...(19): siRNA sense strand
aggauggaaucaacagaaa

SEQ ID NO: 629379 - RNA, 19 nt, Homo sapiens
  misc_RNA (1)...(19): siRNA sense strand
gaugagcaagaacuagaaa

SEQ ID NO: 629380 - RNA, 19 nt, Homo sapiens
  misc_RNA (1)...(19): siRNA sense strand
gaugggaucagcucagcaa

SEQ ID NO: 629381 - RNA, 19 nt, Homo sapiens
  misc_RNA (1)...(19): siRNA sense strand
ccuaccaaccucuacauuu

SEQ ID NO: 629382 - RNA, 19 nt, Homo sapiens
  misc_RNA (1)...(19): siRNA sense strand
gaaugaucacucaaacuuc

SEQ ID NO: 629383 - RNA, 19 nt, Homo sapiens
  misc_RNA (1)...(19): siRNA sense strand
uagcagcaguagcaacuca

SEQ ID NO: 629384 - RNA, 19 nt, Homo sapiens
  misc_RNA (1)...(19): siRNA sense strand
caaauacaucccuaaugga

SEQ ID NO: 629385 - RNA, 19 nt, Homo sapiens
  misc_RNA (1)...(19): siRNA sense strand
ggaugagcaagaacuagaa

SEQ ID NO: 629386 - RNA, 19 nt, Homo sapiens
  misc_RNA (1)...(19): siRNA sense strand
gauuuuauccuucaccaua

SEQ ID NO: 629387 - RNA, 19 nt, Homo sapiens
  misc_RNA (1)...(19): siRNA sense strand
caaggauacuacgugauuc

SEQ ID NO: 629388 - RNA, 19 nt, Homo sapiens
  misc_RNA (1)...(19): siRNA sense strand
aaugaucacucaaacuucu

SEQ ID NO: 629389 - RNA, 19 nt, Homo sapiens
  misc_RNA (1)...(19): siRNA sense strand
gaagaccauggcauagaga

SEQ ID NO: 629390 - RNA, 19 nt, Homo sapiens
  misc_RNA (1)...(19): siRNA sense strand
ccauuuggacaaguuauuu

SEQ ID NO: 629391 - RNA, 19 nt, Homo sapiens
  misc_RNA (1)...(19): siRNA sense strand
ccucaaccauauauucuac

SEQ ID NO: 629392 - RNA, 19 nt, Homo sapiens
  misc_RNA (1)...(19): siRNA sense strand
uauugcaucuccuguaucu

SEQ ID NO: 629393 - RNA, 19 nt, Homo sapiens
  misc_RNA (1)...(19): siRNA sense strand
cgagacgucuaaugaccau

SEQ ID NO: 629394 - RNA, 19 nt, Homo sapiens
  misc_RNA (1)...(19): siRNA sense strand
aagcuguuauuggucauuu

SEQ ID NO: 629395 - RNA, 19 nt, Homo sapiens
  misc_RNA (1)...(19): siRNA sense strand
cacucaaacuucuauuaca

SEQ ID NO: 629396 - RNA, 19 nt, Homo sapiens
  misc_RNA (1)...(19): siRNA sense strand
gcuggaaugacacuuacuu

SEQ ID NO: 629397 - RNA, 19 nt, Homo sapiens
  misc_RNA (1)...(19): siRNA sense strand
aagcucaaauggcaaagca

SEQ ID NO: 629398 - RNA, 19 nt, Homo sapiens
  misc_RNA (1)...(19): siRNA sense strand
ucacucaaacuucuauuac

SEQ ID NO: 629399 - RNA, 19 nt, Homo sapiens
  misc_RNA (1)...(19): siRNA sense strand
aaaauagucuccacaaagg

SEQ ID NO: 629400 - RNA, 19 nt, Homo sapiens
  misc_RNA (1)...(19): siRNA sense strand
cagcaguaauaacaacagu

SEQ ID NO: 629401 - RNA, 19 nt, Homo sapiens
  misc_RNA (1)...(19): siRNA sense strand
cuccauggaugagcaagaa

SEQ ID NO: 629402 - RNA, 19 nt, Homo sapiens
  misc_RNA (1)...(19): siRNA sense strand
agagacagaacccaaacaa

SEQ ID NO: 629403 - RNA, 19 nt, Homo sapiens
  misc_RNA (1)...(19): siRNA sense strand
uaggauggaaucaacagaa

SEQ ID NO: 629404 - RNA, 19 nt, Homo sapiens
  misc_RNA (1)...(19): siRNA sense strand
ucaaccauaugggaaaaua

SEQ ID NO: 629405 - RNA, 19 nt, Homo sapiens
  misc_RNA (1)...(19): siRNA sense strand
gcaaagcaacaggaacaag

SEQ ID NO: 629406 - RNA, 19 nt, Homo sapiens
  misc_RNA (1)...(19): siRNA sense strand
ggagccuacuugccacagu

SEQ ID NO: 629407 - RNA, 19 nt, Homo sapiens
  misc_RNA (1)...(19): siRNA sense strand
ggaacauacaugccugcaa

SEQ ID NO: 629408 - RNA, 19 nt, Homo sapiens
  misc_RNA (1)...(19): siRNA sense strand
aaaccauuuggacaaguua

SEQ ID NO: 629409 - RNA, 19 nt, Homo sapiens
  misc_RNA (1)...(19): siRNA sense strand
augcaaagguuaugguuuu

SEQ ID NO: 629410 - RNA, 19 nt, Homo sapiens
  misc_RNA (1)...(19): siRNA sense strand
caaaugcaaagguuauggu

SEQ ID NO: 629411 - RNA, 19 nt, Homo sapiens
  misc_RNA (1)...(19): siRNA sense strand
cuauauugcaucuccugua

SEQ ID NO: 629412 - RNA, 19 nt, Homo sapiens
  misc_RNA (1)...(19): siRNA sense strand
cuggaaugacacuuacuua

SEQ ID NO: 629413 - RNA, 19 nt, Homo sapiens
  misc_RNA (1)...(19): siRNA sense strand
gguacaagucgugguguug

SEQ ID NO: 629414 - RNA, 19 nt, Homo sapiens
  misc_RNA (1)...(19): siRNA sense strand
uggcaaagcaacaggaaca

SEQ ID NO: 629415 - RNA, 19 nt, Homo sapiens
  misc_RNA (1)...(19): siRNA sense strand
caaccucuacauuucuaau

SEQ ID NO: 629416 - RNA, 19 nt, Homo sapiens
  misc_RNA (1)...(19): siRNA sense strand
accaaccucuacauuucua

SEQ ID NO: 629417 - RNA, 19 nt, Homo sapiens
  misc_RNA (1)...(19): siRNA sense strand
gcaagaacuagaaaauaug

SEQ ID NO: 629418 - RNA, 19 nt, Homo sapiens
  misc_RNA (1)...(19): siRNA sense strand
ggagcacaccaugucacua

SEQ ID NO: 629419 - RNA, 19 nt, Homo sapiens
  misc_RNA (1)...(19): siRNA sense strand
gcaaccucaaccauauauu

SEQ ID NO: 629420 - RNA, 19 nt, Homo sapiens
  misc_RNA (1)...(19): siRNA sense strand
ccaccagcaguaauaacaa

SEQ ID NO: 629421 - RNA, 19 nt, Homo sapiens
  misc_RNA (1)...(19): siRNA sense strand
gaagcuguuauuggucauu

SEQ ID NO: 629422 - RNA, 19 nt, Homo sapiens
  misc_RNA (1)...(19): siRNA sense strand
cauggaugagcaagaacua

SEQ ID NO: 629423 - RNA, 19 nt, Homo sapiens
  misc_RNA (1)...(19): siRNA sense strand
ucaaccauauauucuacag

SEQ ID NO: 629424 - RNA, 19 nt, Homo sapiens
  misc_RNA (1)...(19): siRNA sense strand
gcuguuauuggucauuuua

SEQ ID NO: 629425 - RNA, 19 nt, Homo sapiens
  misc_RNA (1)...(19): siRNA sense strand
guguaaguuugcugaugga

SEQ ID NO: 629426 - RNA, 19 nt, Homo sapiens
  misc_RNA (1)...(19): siRNA sense strand
cacuacagcccgcaucaau

SEQ ID NO: 629427 - RNA, 19 nt, Homo sapiens
  misc_RNA (1)...(19): siRNA sense strand
caccagcaguaauaacaac

SEQ ID NO: 629428 - RNA, 19 nt, Homo sapiens
  misc_RNA (1)...(19): siRNA sense strand
ccauauaccuuucaaccua

SEQ ID NO: 629429 - RNA, 19 nt, Homo sapiens
  misc_RNA (1)...(19): siRNA sense strand
gacagaacccaaacaaaua

SEQ ID NO: 629430 - RNA, 19 nt, Homo sapiens
  misc_RNA (1)...(19): siRNA sense strand
gaaugacacuuacuuacga

SEQ ID NO: 629431 - RNA, 19 nt, Homo sapiens
  misc_RNA (1)...(19): siRNA sense strand
gaugcaaccucaaccauau

SEQ ID NO: 629432 - RNA, 19 nt, Homo sapiens
  misc_RNA (1)...(19): siRNA sense strand
gaagcucugucaaccauau

SEQ ID NO: 629433 - RNA, 19 nt, Homo sapiens
  misc_RNA (1)...(19): siRNA sense strand
caaguuauuucuacaagga

SEQ ID NO: 629434 - RNA, 19 nt, Homo sapiens
  misc_RNA (1)...(19): siRNA sense strand
acaaauacaucccuaaugg

SEQ ID NO: 629435 - RNA, 19 nt, Homo sapiens
  misc_RNA (1)...(19): siRNA sense strand
gaaccuuuauuguguaagu

SEQ ID NO: 629436 - RNA, 19 nt, Homo sapiens
  misc_RNA (1)...(19): siRNA sense strand
cuaccaaccucuacauuuc

SEQ ID NO: 629437 - RNA, 19 nt, Homo sapiens
  misc_RNA (1)...(19): siRNA sense strand
ggaagaccauggcauagag

SEQ ID NO: 629438 - RNA, 19 nt, Homo sapiens
  misc_RNA (1)...(19): siRNA sense strand
ggaugcaaccucaaccaua

SEQ ID NO: 629439 - RNA, 19 nt, Homo sapiens
  misc_RNA (1)...(19): siRNA sense strand
agacagaacccaaacaaau

SEQ ID NO: 629440 - RNA, 19 nt, Homo sapiens
  misc_RNA (1)...(19): siRNA sense strand
cgaaugaucacucaaacuu

SEQ ID NO: 629441 - RNA, 19 nt, Homo sapiens
  misc_RNA (1)...(19): siRNA sense strand
cauauaccuuucaaccuaa

SEQ ID NO: 629442 - RNA, 19 nt, Homo sapiens
  misc_RNA (1)...(19): siRNA sense strand
caaagcaacaggaacaaga

SEQ ID NO: 629443 - RNA, 19 nt, Homo sapiens
  misc_RNA (1)...(19): siRNA sense strand
cguguuaacucccucaaug

SEQ ID NO: 629444 - RNA, 19 nt, Homo sapiens
  misc_RNA (1)...(19): siRNA sense strand
uauauugcaucuccuguau

SEQ ID NO: 629445 - RNA, 19 nt, Homo sapiens
  misc_RNA (1)...(19): siRNA sense strand
ggacaaguuauuucuacaa

SEQ ID NO: 629446 - RNA, 19 nt, Homo sapiens
  misc_RNA (1)...(19): siRNA sense strand
ggaaaauagucuccacaaa

SEQ ID NO: 629447 - RNA, 19 nt, Homo sapiens
  misc_RNA (1)...(19): siRNA sense strand
gguguuggcuuugcuagga

SEQ ID NO: 629448 - RNA, 19 nt, Homo sapiens
  misc_RNA (1)...(19): siRNA sense strand
cagaaccuuuauuguguaa

SEQ ID NO: 629449 - RNA, 19 nt, Homo sapiens
  misc_RNA (1)...(19): siRNA sense strand
cuacagcccgcaucaauga

SEQ ID NO: 629450 - RNA, 19 nt, Homo sapiens
  misc_RNA (1)...(19): siRNA sense strand
gcaguaauaacaacaguag

SEQ ID NO: 629451 - RNA, 19 nt, Homo sapiens
  misc_RNA (1)...(19): siRNA sense strand
auacaucccuaauggaaga

SEQ ID NO: 629452 - RNA, 19 nt, Homo sapiens
  misc_RNA (1)...(19): siRNA sense strand
cuacgugauuccaguggua

SEQ ID NO: 629453 - RNA, 19 nt, Homo sapiens
  misc_RNA (1)...(19): siRNA sense strand
caaccucaaccauauauuc

SEQ ID NO: 629454 - RNA, 19 nt, Homo sapiens
  misc_RNA (1)...(19): siRNA sense strand
gcuacaaaccgaaugauca

SEQ ID NO: 629455 - RNA, 19 nt, Homo sapiens
  misc_RNA (1)...(19): siRNA sense strand
acagaaccuuuauugugua

SEQ ID NO: 629456 - RNA, 19 nt, Homo sapiens
  misc_RNA (1)...(19): siRNA sense strand
gacaaguuauuucuacaag

SEQ ID NO: 629457 - RNA, 19 nt, Homo sapiens
  misc_RNA (1)...(19): siRNA sense strand
caaaccgaaugaucacuca

SEQ ID NO: 629458 - RNA, 19 nt, Homo sapiens
  misc_RNA (1)...(19): siRNA sense strand
acaaggauacuacgugauu

SEQ ID NO: 629459 - RNA, 19 nt, Homo sapiens
  misc_RNA (1)...(19): siRNA sense strand
gcaaaacgaaccucuauau

SEQ ID NO: 629460 - RNA, 19 nt, Homo sapiens
  misc_RNA (1)...(19): siRNA sense strand
gugaagcucugucaaccau

SEQ ID NO: 629461 - RNA, 19 nt, Homo sapiens
  misc_RNA (1)...(19): siRNA sense strand
ucuauuacacccuauauug

SEQ ID NO: 629462 - RNA, 19 nt, Homo sapiens
  misc_RNA (1)...(19): siRNA sense strand
caaacaaauacaucccuaa

SEQ ID NO: 629463 - RNA, 19 nt, Homo sapiens
  misc_RNA (1)...(19): siRNA sense strand
ccucuacauuucuaauuug

SEQ ID NO: 629464 - RNA, 19 nt, Homo sapiens
  misc_RNA (1)...(19): siRNA sense strand
gaaaauagucuccacaaag

SEQ ID NO: 629465 - RNA, 19 nt, Homo sapiens
  misc_RNA (1)...(19): siRNA sense strand
aaauacaucccuaauggaa

SEQ ID NO: 629466 - RNA, 19 nt, Homo sapiens
  misc_RNA (1)...(19): siRNA sense strand
gagacagaacccaaacaaa

SEQ ID NO: 629467 - RNA, 19 nt, Homo sapiens
  misc_RNA (1)...(19): siRNA sense strand
gaaaauaugcucaaaccau

SEQ ID NO: 629468 - RNA, 19 nt, Homo sapiens
  misc_RNA (1)...(19): siRNA sense strand
ggaggcaaguggucaacag

SEQ ID NO: 629469 - RNA, 19 nt, Homo sapiens
  misc_RNA (1)...(19): siRNA sense strand
uaagacaccaccaggaguu

SEQ ID NO: 629470 - RNA, 19 nt, Homo sapiens
  misc_RNA (1)...(19): siRNA sense strand
gcaccaccagcaguaauaa

SEQ ID NO: 629471 - RNA, 19 nt, Homo sapiens
  misc_RNA (1)...(19): siRNA sense strand
gaacccaaacaaauacauc

SEQ ID NO: 629472 - RNA, 19 nt, Homo sapiens
  misc_RNA (1)...(19): siRNA sense strand
gagcacaccaugucacuac

SEQ ID NO: 629473 - RNA, 19 nt, Homo sapiens
  misc_RNA (1)...(19): siRNA sense strand
caacuacagcugcuauaca

SEQ ID NO: 629474 - RNA, 19 nt, Homo sapiens
  misc_RNA (1)...(19): siRNA sense strand
ggaaugacacuuacuuacg

SEQ ID NO: 629475 - RNA, 19 nt, Homo sapiens
  misc_RNA (1)...(19): siRNA sense strand
gagcaagaacuagaaaaua

SEQ ID NO: 629476 - RNA, 19 nt, Homo sapiens
  misc_RNA (1)...(19): siRNA sense strand
ccuuucaaccuaauaagua

SEQ ID NO: 629477 - RNA, 19 nt, Homo sapiens
  misc_RNA (1)...(19): siRNA sense strand
cuacagcugcuauacagaa

SEQ ID NO: 629478 - RNA, 19 nt, Homo sapiens
  misc_RNA (1)...(19): siRNA sense strand
aggauggaaucaacagaaa

SEQ ID NO: 629479 - RNA, 19 nt, Homo sapiens
  misc_RNA (1)...(19): siRNA sense strand
gaugagcaagaacuagaaa

SEQ ID NO: 629480 - RNA, 19 nt, Homo sapiens
  misc_RNA (1)...(19): siRNA sense strand
gaugggaucagcucagcaa

SEQ ID NO: 629481 - RNA, 19 nt, Homo sapiens
  misc_RNA (1)...(19): siRNA sense strand
ccuaccaaccucuacauuu

SEQ ID NO: 629482 - RNA, 19 nt, Homo sapiens
  misc_RNA (1)...(19): siRNA sense strand
gaaugaucacucaaacuuc

SEQ ID NO: 629483 - RNA, 19 nt, Homo sapiens
  misc_RNA (1)...(19): siRNA sense strand
uagcagcaguagcaacuca

SEQ ID NO: 629484 - RNA, 19 nt, Homo sapiens
  misc_RNA (1)...(19): siRNA sense strand
caaauacaucccuaaugga

SEQ ID NO: 629485 - RNA, 19 nt, Homo sapiens
  misc_RNA (1)...(19): siRNA sense strand
ggaugagcaagaacuagaa

SEQ ID NO: 629486 - RNA, 19 nt, Homo sapiens
  misc_RNA (1)...(19): siRNA sense strand
gauuuuauccuucaccaua

SEQ ID NO: 629487 - RNA, 19 nt, Homo sapiens
  misc_RNA (1)...(19): siRNA sense strand
caaggauacuacgugauuc

SEQ ID NO: 629488 - RNA, 19 nt, Homo sapiens
  misc_RNA (1)...(19): siRNA sense strand
aaugaucacucaaacuucu

SEQ ID NO: 629489 - RNA, 19 nt, Homo sapiens
  misc_RNA (1)...(19): siRNA sense strand
gaagaccauggcauagaga

SEQ ID NO: 629490 - RNA, 19 nt, Homo sapiens
  misc_RNA (1)...(19): siRNA sense strand
ccauuuggacaaguuauuu

SEQ ID NO: 629491 - RNA, 19 nt, Homo sapiens
  misc_RNA (1)...(19): siRNA sense strand
ccucaaccauauauucuac

SEQ ID NO: 629492 - RNA, 19 nt, Homo sapiens
  misc_RNA (1)...(19): siRNA sense strand
uauugcaucuccuguaucu

SEQ ID NO: 629493 - RNA, 19 nt, Homo sapiens
  misc_RNA (1)...(19): siRNA sense strand
cgagacgucuaaugaccau

SEQ ID NO: 629494 - RNA, 19 nt, Homo sapiens
  misc_RNA (1)...(19): siRNA sense strand
aagcuguuauuggucauuu

SEQ ID NO: 629495 - RNA, 19 nt, Homo sapiens
  misc_RNA (1)...(19): siRNA sense strand
cacucaaacuucuauuaca

SEQ ID NO: 629496 - RNA, 19 nt, Homo sapiens
  misc_RNA (1)...(19): siRNA sense strand
gcuggaaugacacuuacuu

SEQ ID NO: 629497 - RNA, 19 nt, Homo sapiens
  misc_RNA (1)...(19): siRNA sense strand
aagcucaaauggcaaagca

SEQ ID NO: 629498 - RNA, 19 nt, Homo sapiens
  misc_RNA (1)...(19): siRNA sense strand
ucacucaaacuucuauuac

SEQ ID NO: 629499 - RNA, 19 nt, Homo sapiens
  misc_RNA (1)...(19): siRNA sense strand
aaaauagucuccacaaagg

SEQ ID NO: 629500 - RNA, 19 nt, Homo sapiens
  misc_RNA (1)...(19): siRNA sense strand
cagcaguaauaacaacagu

SEQ ID NO: 629501 - RNA, 19 nt, Homo sapiens
  misc_RNA (1)...(19): siRNA sense strand
cuccauggaugagcaagaa

SEQ ID NO: 629502 - RNA, 19 nt, Homo sapiens
  misc_RNA (1)...(19): siRNA sense strand
agagacagaacccaaacaa

SEQ ID NO: 629503 - RNA, 19 nt, Homo sapiens
  misc_RNA (1)...(19): siRNA sense strand
uaggauggaaucaacagaa

SEQ ID NO: 629504 - RNA, 19 nt, Homo sapiens
  misc_RNA (1)...(19): siRNA sense strand
ucaaccauaugggaaaaua

SEQ ID NO: 629505 - RNA, 19 nt, Homo sapiens
  misc_RNA (1)...(19): siRNA sense strand
gcaaagcaacaggaacaag

SEQ ID NO: 629506 - RNA, 19 nt, Homo sapiens
  misc_RNA (1)...(19): siRNA sense strand
ggagccuacuugccacagu

SEQ ID NO: 629507 - RNA, 19 nt, Homo sapiens
  misc_RNA (1)...(19): siRNA sense strand
ggaacauacaugccugcaa

SEQ ID NO: 629508 - RNA, 19 nt, Homo sapiens
  misc_RNA (1)...(19): siRNA sense strand
aaaccauuuggacaaguua

SEQ ID NO: 629509 - RNA, 19 nt, Homo sapiens
  misc_RNA (1)...(19): siRNA sense strand
augcaaagguuaugguuuu

SEQ ID NO: 629510 - RNA, 19 nt, Homo sapiens
  misc_RNA (1)...(19): siRNA sense strand
caaaugcaaagguuauggu

SEQ ID NO: 629511 - RNA, 19 nt, Homo sapiens
  misc_RNA (1)...(19): siRNA sense strand
cuauauugcaucuccugua

SEQ ID NO: 629512 - RNA, 19 nt, Homo sapiens
  misc_RNA (1)...(19): siRNA sense strand
cuggaaugacacuuacuua

SEQ ID NO: 629513 - RNA, 19 nt, Homo sapiens
  misc_RNA (1)...(19): siRNA sense strand
gguacaagucgugguguug

SEQ ID NO: 629514 - RNA, 19 nt, Homo sapiens
  misc_RNA (1)...(19): siRNA sense strand
uggcaaagcaacaggaaca

SEQ ID NO: 629515 - RNA, 19 nt, Homo sapiens
  misc_RNA (1)...(19): siRNA sense strand
caaccucuacauuucuaau

SEQ ID NO: 629516 - RNA, 19 nt, Homo sapiens
  misc_RNA (1)...(19): siRNA sense strand
accaaccucuacauuucua

SEQ ID NO: 629517 - RNA, 19 nt, Homo sapiens
  misc_RNA (1)...(19): siRNA sense strand
gcaagaacuagaaaauaug

SEQ ID NO: 629518 - RNA, 19 nt, Homo sapiens
  misc_RNA (1)...(19): siRNA sense strand
ggagcacaccaugucacua

SEQ ID NO: 629519 - RNA, 19 nt, Homo sapiens
  misc_RNA (1)...(19): siRNA sense strand
gcaaccucaaccauauauu

SEQ ID NO: 629520 - RNA, 19 nt, Homo sapiens
  misc_RNA (1)...(19): siRNA sense strand
ccaccagcaguaauaacaa

SEQ ID NO: 629521 - RNA, 19 nt, Homo sapiens
  misc_RNA (1)...(19): siRNA sense strand
gaagcuguuauuggucauu

SEQ ID NO: 629522 - RNA, 19 nt, Homo sapiens
  misc_RNA (1)...(19): siRNA sense strand
cauggaugagcaagaacua

SEQ ID NO: 629523 - RNA, 19 nt, Homo sapiens
  misc_RNA (1)...(19): siRNA sense strand
ucaaccauauauucuacag

SEQ ID NO: 629524 - RNA, 19 nt, Homo sapiens
  misc_RNA (1)...(19): siRNA sense strand
gcuguuauuggucauuuua

SEQ ID NO: 629525 - RNA, 19 nt, Homo sapiens
  misc_RNA (1)...(19): siRNA sense strand
guguaaguuugcugaugga

SEQ ID NO: 629526 - RNA, 19 nt, Homo sapiens
  misc_RNA (1)...(19): siRNA sense strand
cacuacagcccgcaucaau

SEQ ID NO: 629527 - RNA, 19 nt, Homo sapiens
  misc_RNA (1)...(19): siRNA sense strand
caccagcaguaauaacaac

SEQ ID NO: 629528 - RNA, 19 nt, Homo sapiens
  misc_RNA (1)...(19): siRNA sense strand
acacagcucuggugaagaa

SEQ ID NO: 629529 - RNA, 19 nt, Homo sapiens
  misc_RNA (1)...(19): siRNA sense strand
cagccaagaucaaguuaaa

SEQ ID NO: 629530 - RNA, 19 nt, Homo sapiens
  misc_RNA (1)...(19): siRNA sense strand
caacacagcucuggugaag

SEQ ID NO: 629531 - RNA, 19 nt, Homo sapiens
  misc_RNA (1)...(19): siRNA sense strand
ugacacagaucaaguccaa

SEQ ID NO: 629532 - RNA, 19 nt, Homo sapiens
  misc_RNA (1)...(19): siRNA sense strand
agacggagcugacacagau

SEQ ID NO: 629533 - RNA, 19 nt, Homo sapiens
  misc_RNA (1)...(19): siRNA sense strand
gcuaugccuuuguucagua

SEQ ID NO: 629534 - RNA, 19 nt, Homo sapiens
  misc_RNA (1)...(19): siRNA sense strand
acacagaucaaguccaaua

SEQ ID NO: 629535 - RNA, 19 nt, Homo sapiens
  misc_RNA (1)...(19): siRNA sense strand
gcaauguaaccaacaagaa

SEQ ID NO: 629536 - RNA, 19 nt, Homo sapiens
  misc_RNA (1)...(19): siRNA sense strand
caagcaauguaaccaacaa

SEQ ID NO: 629537 - RNA, 19 nt, Homo sapiens
  misc_RNA (1)...(19): siRNA sense strand
gaagggcuccugacacaca

SEQ ID NO: 629538 - RNA, 19 nt, Homo sapiens
  misc_RNA (1)...(19): siRNA sense strand
gccaagaucaaguuaaaga

SEQ ID NO: 629539 - RNA, 19 nt, Homo sapiens
  misc_RNA (1)...(19): siRNA sense strand
gaucaaguccaauaucgau

SEQ ID NO: 629540 - RNA, 19 nt, Homo sapiens
  misc_RNA (1)...(19): siRNA sense strand
ucucgagucuucauuggaa

SEQ ID NO: 629541 - RNA, 19 nt, Homo sapiens
  misc_RNA (1)...(19): siRNA sense strand
aaacuaacguaccugucaa

SEQ ID NO: 629542 - RNA, 19 nt, Homo sapiens
  misc_RNA (1)...(19): siRNA sense strand
caauguaaccaacaagaau

SEQ ID NO: 629543 - RNA, 19 nt, Homo sapiens
  misc_RNA (1)...(19): siRNA sense strand
ggcagacccuggacaucaa

SEQ ID NO: 629544 - RNA, 19 nt, Homo sapiens
  misc_RNA (1)...(19): siRNA sense strand
gaccaucuucucuaaguau

SEQ ID NO: 629545 - RNA, 19 nt, Homo sapiens
  misc_RNA (1)...(19): siRNA sense strand
gggcagacccuggacauca

SEQ ID NO: 629546 - RNA, 19 nt, Homo sapiens
  misc_RNA (1)...(19): siRNA sense strand
gcucagccaagaucaaguu

SEQ ID NO: 629547 - RNA, 19 nt, Homo sapiens
  misc_RNA (1)...(19): siRNA sense strand
ggacacagacgcggaugau

SEQ ID NO: 629548 - RNA, 19 nt, Homo sapiens
  misc_RNA (1)...(19): siRNA sense strand
aaucagauguggagaccau

SEQ ID NO: 629549 - RNA, 19 nt, Homo sapiens
  misc_RNA (1)...(19): siRNA sense strand
cagaucaaguccaauaucg

SEQ ID NO: 629550 - RNA, 19 nt, Homo sapiens
  misc_RNA (1)...(19): siRNA sense strand
agaccaucuucucuaagua

SEQ ID NO: 629551 - RNA, 19 nt, Homo sapiens
  misc_RNA (1)...(19): siRNA sense strand
caauccagauggcaagaag

SEQ ID NO: 629552 - RNA, 19 nt, Homo sapiens
  misc_RNA (1)...(19): siRNA sense strand
cagcucuggugaagaaauc

SEQ ID NO: 629553 - RNA, 19 nt, Homo sapiens
  misc_RNA (1)...(19): siRNA sense strand
gagcugacacagaucaagu

SEQ ID NO: 629554 - RNA, 19 nt, Homo sapiens
  misc_RNA (1)...(19): siRNA sense strand
caagaagaagggugaugga

SEQ ID NO: 629555 - RNA, 19 nt, Homo sapiens
  misc_RNA (1)...(19): siRNA sense strand
gcaagcaauguaaccaaca

SEQ ID NO: 629556 - RNA, 19 nt, Homo sapiens
  misc_RNA (1)...(19): siRNA sense strand
gcaaaaggccaauccagau

SEQ ID NO: 629557 - RNA, 19 nt, Homo sapiens
  misc_RNA (1)...(19): siRNA sense strand
gagcugcaggccaucaaga

SEQ ID NO: 629558 - RNA, 19 nt, Homo sapiens
  misc_RNA (1)...(19): siRNA sense strand
agacgacggcgaugaggaa

SEQ ID NO: 629559 - RNA, 19 nt, Homo sapiens
  misc_RNA (1)...(19): siRNA sense strand
ugacacacagcgaggaaga

SEQ ID NO: 629560 - RNA, 19 nt, Homo sapiens
  misc_RNA (1)...(19): siRNA sense strand
cccaagagaacacaacuuc

SEQ ID NO: 629561 - RNA, 19 nt, Homo sapiens
  misc_RNA (1)...(19): siRNA sense strand
cuucaggcaagcaauguaa

SEQ ID NO: 629562 - RNA, 19 nt, Homo sapiens
  misc_RNA (1)...(19): siRNA sense strand
guaccugucaagcucuuug

SEQ ID NO: 629563 - RNA, 19 nt, Homo sapiens
  misc_RNA (1)...(19): siRNA sense strand
ggugaagaaaucagaugug

SEQ ID NO: 629564 - RNA, 19 nt, Homo sapiens
  misc_RNA (1)...(19): siRNA sense strand
gcgaggaagagcuggaaca

SEQ ID NO: 629565 - RNA, 19 nt, Homo sapiens
  misc_RNA (1)...(19): siRNA sense strand
gcuaaagagagcagcaucu

SEQ ID NO: 629566 - RNA, 19 nt, Homo sapiens
  misc_RNA (1)...(19): siRNA sense strand
ggcuaugccuuuguucagu

SEQ ID NO: 629567 - RNA, 19 nt, Homo sapiens
  misc_RNA (1)...(19): siRNA sense strand
acacagcucuggugaagaa

SEQ ID NO: 629568 - RNA, 19 nt, Homo sapiens
  misc_RNA (1)...(19): siRNA sense strand
cagccaagaucaaguuaaa

SEQ ID NO: 629569 - RNA, 19 nt, Homo sapiens
  misc_RNA (1)...(19): siRNA sense strand
caacacagcucuggugaag

SEQ ID NO: 629570 - RNA, 19 nt, Homo sapiens
  misc_RNA (1)...(19): siRNA sense strand
ugacacagaucaaguccaa

SEQ ID NO: 629571 - RNA, 19 nt, Homo sapiens
  misc_RNA (1)...(19): siRNA sense strand
agacggagcugacacagau

SEQ ID NO: 629572 - RNA, 19 nt, Homo sapiens
  misc_RNA (1)...(19): siRNA sense strand
gcuaugccuuuguucagua

SEQ ID NO: 629573 - RNA, 19 nt, Homo sapiens
  misc_RNA (1)...(19): siRNA sense strand
acacagaucaaguccaaua

SEQ ID NO: 629574 - RNA, 19 nt, Homo sapiens
  misc_RNA (1)...(19): siRNA sense strand
gcaauguaaccaacaagaa

SEQ ID NO: 629575 - RNA, 19 nt, Homo sapiens
  misc_RNA (1)...(19): siRNA sense strand
caagcaauguaaccaacaa

SEQ ID NO: 629576 - RNA, 19 nt, Homo sapiens
  misc_RNA (1)...(19): siRNA sense strand
gaagggcuccugacacaca

SEQ ID NO: 629577 - RNA, 19 nt, Homo sapiens
  misc_RNA (1)...(19): siRNA sense strand
gccaagaucaaguuaaaga

SEQ ID NO: 629578 - RNA, 19 nt, Homo sapiens
  misc_RNA (1)...(19): siRNA sense strand
gaucaaguccaauaucgau

SEQ ID NO: 629579 - RNA, 19 nt, Homo sapiens
  misc_RNA (1)...(19): siRNA sense strand
ucucgagucuucauuggaa

SEQ ID NO: 629580 - RNA, 19 nt, Homo sapiens
  misc_RNA (1)...(19): siRNA sense strand
aaacuaacguaccugucaa

SEQ ID NO: 629581 - RNA, 19 nt, Homo sapiens
  misc_RNA (1)...(19): siRNA sense strand
caauguaaccaacaagaau

SEQ ID NO: 629582 - RNA, 19 nt, Homo sapiens
  misc_RNA (1)...(19): siRNA sense strand
ggcagacccuggacaucaa

SEQ ID NO: 629583 - RNA, 19 nt, Homo sapiens
  misc_RNA (1)...(19): siRNA sense strand
gaccaucuucucuaaguau

SEQ ID NO: 629584 - RNA, 19 nt, Homo sapiens
  misc_RNA (1)...(19): siRNA sense strand
gggcagacccuggacauca

SEQ ID NO: 629585 - RNA, 19 nt, Homo sapiens
  misc_RNA (1)...(19): siRNA sense strand
gcucagccaagaucaaguu

SEQ ID NO: 629586 - RNA, 19 nt, Homo sapiens
  misc_RNA (1)...(19): siRNA sense strand
ggacacagacgcggaugau

SEQ ID NO: 629587 - RNA, 19 nt, Homo sapiens
  misc_RNA (1)...(19): siRNA sense strand
aaucagauguggagaccau

SEQ ID NO: 629588 - RNA, 19 nt, Homo sapiens
  misc_RNA (1)...(19): siRNA sense strand
cagaucaaguccaauaucg

SEQ ID NO: 629589 - RNA, 19 nt, Homo sapiens
  misc_RNA (1)...(19): siRNA sense strand
agaccaucuucucuaagua

SEQ ID NO: 629590 - RNA, 19 nt, Homo sapiens
  misc_RNA (1)...(19): siRNA sense strand
caauccagauggcaagaag

SEQ ID NO: 629591 - RNA, 19 nt, Homo sapiens
  misc_RNA (1)...(19): siRNA sense strand
cagcucuggugaagaaauc

SEQ ID NO: 629592 - RNA, 19 nt, Homo sapiens
  misc_RNA (1)...(19): siRNA sense strand
gagcugacacagaucaagu

SEQ ID NO: 629593 - RNA, 19 nt, Homo sapiens
  misc_RNA (1)...(19): siRNA sense strand
caagaagaagggugaugga

SEQ ID NO: 629594 - RNA, 19 nt, Homo sapiens
  misc_RNA (1)...(19): siRNA sense strand
gcaagcaauguaaccaaca

SEQ ID NO: 629595 - RNA, 19 nt, Homo sapiens
  misc_RNA (1)...(19): siRNA sense strand
gcaaaaggccaauccagau

SEQ ID NO: 629596 - RNA, 19 nt, Homo sapiens
  misc_RNA (1)...(19): siRNA sense strand
gagcugcaggccaucaaga

SEQ ID NO: 629597 - RNA, 19 nt, Homo sapiens
  misc_RNA (1)...(19): siRNA sense strand
agacgacggcgaugaggaa

SEQ ID NO: 629598 - RNA, 19 nt, Homo sapiens
  misc_RNA (1)...(19): siRNA sense strand
ugacacacagcgaggaaga

SEQ ID NO: 629599 - RNA, 19 nt, Homo sapiens
  misc_RNA (1)...(19): siRNA sense strand
cccaagagaacacaacuuc

SEQ ID NO: 629600 - RNA, 19 nt, Homo sapiens
  misc_RNA (1)...(19): siRNA sense strand
cuucaggcaagcaauguaa

SEQ ID NO: 629601 - RNA, 19 nt, Homo sapiens
  misc_RNA (1)...(19): siRNA sense strand
guaccugucaagcucuuug

SEQ ID NO: 629602 - RNA, 19 nt, Homo sapiens
  misc_RNA (1)...(19): siRNA sense strand
ggugaagaaaucagaugug

SEQ ID NO: 629603 - RNA, 19 nt, Homo sapiens
  misc_RNA (1)...(19): siRNA sense strand
gcgaggaagagcuggaaca

SEQ ID NO: 629604 - RNA, 19 nt, Homo sapiens
  misc_RNA (1)...(19): siRNA sense strand
gcuaaagagagcagcaucu

SEQ ID NO: 629605 - RNA, 19 nt, Homo sapiens
  misc_RNA (1)...(19): siRNA sense strand
ggcuaugccuuuguucagu

SEQ ID NO: 629606 - RNA, 19 nt, Homo sapiens
  misc_RNA (1)...(19): siRNA sense strand
ggaaagagcuaugaugaga

SEQ ID NO: 629607 - RNA, 19 nt, Homo sapiens
  misc_RNA (1)...(19): siRNA sense strand
gcaaagugauggucaugaa

SEQ ID NO: 629608 - RNA, 19 nt, Homo sapiens
  misc_RNA (1)...(19): siRNA sense strand
gcacaucagucccaacaau

SEQ ID NO: 629609 - RNA, 19 nt, Homo sapiens
  misc_RNA (1)...(19): siRNA sense strand
guggauaucuucuccuuug

SEQ ID NO: 629610 - RNA, 19 nt, Homo sapiens
  misc_RNA (1)...(19): siRNA sense strand
gaccagcauucucgaaauu

SEQ ID NO: 629611 - RNA, 19 nt, Homo sapiens
  misc_RNA (1)...(19): siRNA sense strand
gaucugaacucgcacaacu

SEQ ID NO: 629612 - RNA, 19 nt, Homo sapiens
  misc_RNA (1)...(19): siRNA sense strand
gcugcaaggugaucauuga

SEQ ID NO: 629613 - RNA, 19 nt, Homo sapiens
  misc_RNA (1)...(19): siRNA sense strand
cugcagagcuggaggaguu

SEQ ID NO: 629614 - RNA, 19 nt, Homo sapiens
  misc_RNA (1)...(19): siRNA sense strand
gaggagacguucccuaagg

SEQ ID NO: 629615 - RNA, 19 nt, Homo sapiens
  misc_RNA (1)...(19): siRNA sense strand
ugacugaggugaaagugau

SEQ ID NO: 629616 - RNA, 19 nt, Homo sapiens
  misc_RNA (1)...(19): siRNA sense strand
gaaguuuguucccacagau

SEQ ID NO: 629617 - RNA, 19 nt, Homo sapiens
  misc_RNA (1)...(19): siRNA sense strand
ccagagugcuuugccugua

SEQ ID NO: 629618 - RNA, 19 nt, Homo sapiens
  misc_RNA (1)...(19): siRNA sense strand
cagaaucccuucguuguuc

SEQ ID NO: 629619 - RNA, 19 nt, Homo sapiens
  misc_RNA (1)...(19): siRNA sense strand
ccaaugugcucaaguucau

SEQ ID NO: 629620 - RNA, 19 nt, Homo sapiens
  misc_RNA (1)...(19): siRNA sense strand
ggagguggaggaugcaauu

SEQ ID NO: 629621 - RNA, 19 nt, Homo sapiens
  misc_RNA (1)...(19): siRNA sense strand
cuaaggcgcaguaacagua

SEQ ID NO: 629622 - RNA, 19 nt, Homo sapiens
  misc_RNA (1)...(19): siRNA sense strand
cacuucagcuguugauuga

SEQ ID NO: 629623 - RNA, 19 nt, Homo sapiens
  misc_RNA (1)...(19): siRNA sense strand
gagagugccugcuccaacu

SEQ ID NO: 629624 - RNA, 19 nt, Homo sapiens
  misc_RNA (1)...(19): siRNA sense strand
gcuacacgguggugggaaa

SEQ ID NO: 629625 - RNA, 19 nt, Homo sapiens
  misc_RNA (1)...(19): siRNA sense strand
gaaggccaccaccaagaaa

SEQ ID NO: 629626 - RNA, 19 nt, Homo sapiens
  misc_RNA (1)...(19): siRNA sense strand
gagaaggccaccaccaaga

SEQ ID NO: 629627 - RNA, 19 nt, Homo sapiens
  misc_RNA (1)...(19): siRNA sense strand
gcacaacugccucaucaag

SEQ ID NO: 629628 - RNA, 19 nt, Homo sapiens
  misc_RNA (1)...(19): siRNA sense strand
guaacaguaucuccaaguc

SEQ ID NO: 629629 - RNA, 19 nt, Homo sapiens
  misc_RNA (1)...(19): siRNA sense strand
ucgcacaacugccucauca

SEQ ID NO: 629630 - RNA, 19 nt, Homo sapiens
  misc_RNA (1)...(19): siRNA sense strand
ggaaucgccuccggaaugg

SEQ ID NO: 629631 - RNA, 19 nt, Homo sapiens
  misc_RNA (1)...(19): siRNA sense strand
ggugugcuguacaaggaua

SEQ ID NO: 629632 - RNA, 19 nt, Homo sapiens
  misc_RNA (1)...(19): siRNA sense strand
gccagacacuucagcuguu

SEQ ID NO: 629633 - RNA, 19 nt, Homo sapiens
  misc_RNA (1)...(19): siRNA sense strand
gaacggaaagagcuaugau

SEQ ID NO: 629634 - RNA, 19 nt, Homo sapiens
  misc_RNA (1)...(19): siRNA sense strand
ccuccggaauggccuauuu

SEQ ID NO: 629635 - RNA, 19 nt, Homo sapiens
  misc_RNA (1)...(19): siRNA sense strand
gcaguaacaguaucuccaa

SEQ ID NO: 629636 - RNA, 19 nt, Homo sapiens
  misc_RNA (1)...(19): siRNA sense strand
gcaagaacgaccgcaagaa

SEQ ID NO: 629637 - RNA, 19 nt, Homo sapiens
  misc_RNA (1)...(19): siRNA sense strand
caaagugauggucaugaaa

SEQ ID NO: 629638 - RNA, 19 nt, Homo sapiens
  misc_RNA (1)...(19): siRNA sense strand
caagaacgaccgcaagaag

SEQ ID NO: 629639 - RNA, 19 nt, Homo sapiens
  misc_RNA (1)...(19): siRNA sense strand
cagagugcuuugccuguau

SEQ ID NO: 629640 - RNA, 19 nt, Homo sapiens
  misc_RNA (1)...(19): siRNA sense strand
ggucaugaaagaguuaauu

SEQ ID NO: 629641 - RNA, 19 nt, Homo sapiens
  misc_RNA (1)...(19): siRNA sense strand
cagcugcccuacucuguca

SEQ ID NO: 629642 - RNA, 19 nt, Homo sapiens
  misc_RNA (1)...(19): siRNA sense strand
caacugguacuaugagaag

SEQ ID NO: 629643 - RNA, 19 nt, Homo sapiens
  misc_RNA (1)...(19): siRNA sense strand
gaaagaguuaauucgaugu

SEQ ID NO: 629644 - RNA, 19 nt, Homo sapiens
  misc_RNA (1)...(19): siRNA sense strand
ccagacacuucagcuguug

SEQ ID NO: 629645 - RNA, 19 nt, Homo sapiens
  misc_RNA (1)...(19): siRNA sense strand
gauggucaugaaagaguua

SEQ ID NO: 629646 - RNA, 19 nt, Homo sapiens
  misc_RNA (1)...(19): siRNA sense strand
acacaaagccacgggcaaa

SEQ ID NO: 629647 - RNA, 19 nt, Homo sapiens
  misc_RNA (1)...(19): siRNA sense strand
cugagaugcugaacggaaa

SEQ ID NO: 629648 - RNA, 19 nt, Homo sapiens
  misc_RNA (1)...(19): siRNA sense strand
agaaguuuguucccacaga

SEQ ID NO: 629649 - RNA, 19 nt, Homo sapiens
  misc_RNA (1)...(19): siRNA sense strand
acacuucagcuguugauug

SEQ ID NO: 629650 - RNA, 19 nt, Homo sapiens
  misc_RNA (1)...(19): siRNA sense strand
cagcagaaggucagguuug

SEQ ID NO: 629651 - RNA, 19 nt, Homo sapiens
  misc_RNA (1)...(19): siRNA sense strand
ucauuggugugcuguacaa

SEQ ID NO: 629652 - RNA, 19 nt, Homo sapiens
  misc_RNA (1)...(19): siRNA sense strand
caugaaagaguuaauucga

SEQ ID NO: 629653 - RNA, 19 nt, Homo sapiens
  misc_RNA (1)...(19): siRNA sense strand
cuaucaaggugacacacaa

SEQ ID NO: 629654 - RNA, 19 nt, Homo sapiens
  misc_RNA (1)...(19): siRNA sense strand
gagguggaggaugcaauua

SEQ ID NO: 629655 - RNA, 19 nt, Homo sapiens
  misc_RNA (1)...(19): siRNA sense strand
agaccagcauucucgaaau

SEQ ID NO: 629656 - RNA, 19 nt, Homo sapiens
  misc_RNA (1)...(19): siRNA sense strand
caaagccacgggcaaagug

SEQ ID NO: 629657 - RNA, 19 nt, Homo sapiens
  misc_RNA (1)...(19): siRNA sense strand
caaaggagccccugcuguu

SEQ ID NO: 629658 - RNA, 19 nt, Homo sapiens
  misc_RNA (1)...(19): siRNA sense strand
cugaggagacguucccuaa

SEQ ID NO: 629659 - RNA, 19 nt, Homo sapiens
  misc_RNA (1)...(19): siRNA sense strand
cagacgagccagacacuuc

SEQ ID NO: 629660 - RNA, 19 nt, Homo sapiens
  misc_RNA (1)...(19): siRNA sense strand
ggccucaacgugaagcuuu

SEQ ID NO: 629661 - RNA, 19 nt, Homo sapiens
  misc_RNA (1)...(19): siRNA sense strand
gugaugaggagacccagaa

SEQ ID NO: 629662 - RNA, 19 nt, Homo sapiens
  misc_RNA (1)...(19): siRNA sense strand
gaguuaauucgaugugaug

SEQ ID NO: 629663 - RNA, 19 nt, Homo sapiens
  misc_RNA (1)...(19): siRNA sense strand
gcuauucacagcagaucuu

SEQ ID NO: 629664 - RNA, 19 nt, Homo sapiens
  misc_RNA (1)...(19): siRNA sense strand
ucagaaucccuucguuguu

SEQ ID NO: 629665 - RNA, 19 nt, Homo sapiens
  misc_RNA (1)...(19): siRNA sense strand
ucagcacccuggacaccaa

SEQ ID NO: 629666 - RNA, 19 nt, Homo sapiens
  misc_RNA (1)...(19): siRNA sense strand
gcagaccagcauucucgaa

SEQ ID NO: 629667 - RNA, 19 nt, Homo sapiens
  misc_RNA (1)...(19): siRNA sense strand
gcagcagaaggucagguuu

SEQ ID NO: 629668 - RNA, 19 nt, Homo sapiens
  misc_RNA (1)...(19): siRNA sense strand
cagaccagcauucucgaaa

SEQ ID NO: 629669 - RNA, 19 nt, Homo sapiens
  misc_RNA (1)...(19): siRNA sense strand
ccaacuacgccaccacugu

SEQ ID NO: 629670 - RNA, 19 nt, Homo sapiens
  misc_RNA (1)...(19): siRNA sense strand
gaucauugggcagguguau

SEQ ID NO: 629671 - RNA, 19 nt, Homo sapiens
  misc_RNA (1)...(19): siRNA sense strand
acggaaagagcuaugauga

SEQ ID NO: 629672 - RNA, 19 nt, Homo sapiens
  misc_RNA (1)...(19): siRNA sense strand
agaaggccaccaccaagaa

SEQ ID NO: 629673 - RNA, 19 nt, Homo sapiens
  misc_RNA (1)...(19): siRNA sense strand
uggccuauuugcacucuau

SEQ ID NO: 629674 - RNA, 19 nt, Homo sapiens
  misc_RNA (1)...(19): siRNA sense strand
aggaaucgccuccggaaug

SEQ ID NO: 629675 - RNA, 19 nt, Homo sapiens
  misc_RNA (1)...(19): siRNA sense strand
agaguuaauucgaugugau

SEQ ID NO: 629676 - RNA, 19 nt, Homo sapiens
  misc_RNA (1)...(19): siRNA sense strand
gguggaggaugcaauuagc

SEQ ID NO: 629677 - RNA, 19 nt, Homo sapiens
  misc_RNA (1)...(19): siRNA sense strand
ccagcauucucgaaauugg

SEQ ID NO: 629678 - RNA, 19 nt, Homo sapiens
  misc_RNA (1)...(19): siRNA sense strand
gcagguguaugcagauccu

SEQ ID NO: 629679 - RNA, 19 nt, Homo sapiens
  misc_RNA (1)...(19): siRNA sense strand
gcaugccacccucuacugu

SEQ ID NO: 629680 - RNA, 19 nt, Homo sapiens
  misc_RNA (1)...(19): siRNA sense strand
aggauucccucaccaacug

SEQ ID NO: 629681 - RNA, 19 nt, Homo sapiens
  misc_RNA (1)...(19): siRNA sense strand
gagcugcaaggugaucauu

SEQ ID NO: 629682 - RNA, 19 nt, Homo sapiens
  misc_RNA (1)...(19): siRNA sense strand
aagugauggucaugaaaga

SEQ ID NO: 629683 - RNA, 19 nt, Homo sapiens
  misc_RNA (1)...(19): siRNA sense strand
gcacacugaaggacuuucu

SEQ ID NO: 629684 - RNA, 19 nt, Homo sapiens
  misc_RNA (1)...(19): siRNA sense strand
acaaggauaagaagcugaa

SEQ ID NO: 629685 - RNA, 19 nt, Homo sapiens
  misc_RNA (1)...(19): siRNA sense strand
ugauggucaugaaagaguu

SEQ ID NO: 629686 - RNA, 19 nt, Homo sapiens
  misc_RNA (1)...(19): siRNA sense strand
aagaguuaauucgauguga

SEQ ID NO: 629687 - RNA, 19 nt, Homo sapiens
  misc_RNA (1)...(19): siRNA sense strand
gggcagguguaugcagauc

SEQ ID NO: 629688 - RNA, 19 nt, Homo sapiens
  misc_RNA (1)...(19): siRNA sense strand
gaugagacgguggauaucu

SEQ ID NO: 629689 - RNA, 19 nt, Homo sapiens
  misc_RNA (1)...(19): siRNA sense strand
gcuccucacaugcagaaug

SEQ ID NO: 629690 - RNA, 19 nt, Homo sapiens
  misc_RNA (1)...(19): siRNA sense strand
agaaggaugggaagcucua

SEQ ID NO: 629691 - RNA, 19 nt, Homo sapiens
  misc_RNA (1)...(19): siRNA sense strand
cccgaacacuggacuuugg

SEQ ID NO: 629692 - RNA, 19 nt, Homo sapiens
  misc_RNA (1)...(19): siRNA sense strand
cgguggauaucuucuccuu

SEQ ID NO: 629693 - RNA, 19 nt, Homo sapiens
  misc_RNA (1)...(19): siRNA sense strand
guucauuggugugcuguac

SEQ ID NO: 629694 - RNA, 19 nt, Homo sapiens
  misc_RNA (1)...(19): siRNA sense strand
guaccacccagagugcuuu

SEQ ID NO: 629695 - RNA, 19 nt, Homo sapiens
  misc_RNA (1)...(19): siRNA sense strand
uaucaaggugacacacaaa

SEQ ID NO: 629696 - RNA, 19 nt, Homo sapiens
  misc_RNA (1)...(19): siRNA sense strand
gaccgcauccuggagauca

SEQ ID NO: 629697 - RNA, 19 nt, Homo sapiens
  misc_RNA (1)...(19): siRNA sense strand
ccaacugguacuaugagaa

SEQ ID NO: 629698 - RNA, 19 nt, Homo sapiens
  misc_RNA (1)...(19): siRNA sense strand
gaggagacccagaaaacuu

SEQ ID NO: 629699 - RNA, 19 nt, Homo sapiens
  misc_RNA (1)...(19): siRNA sense strand
aaagugauggucaugaaag

SEQ ID NO: 629700 - RNA, 19 nt, Homo sapiens
  misc_RNA (1)...(19): siRNA sense strand
aggagcagcugcccuacuc

SEQ ID NO: 629701 - RNA, 19 nt, Homo sapiens
  misc_RNA (1)...(19): siRNA sense strand
uuggugugcuguacaagga

SEQ ID NO: 629702 - RNA, 19 nt, Homo sapiens
  misc_RNA (1)...(19): siRNA sense strand
gagagcagaccagcauucu

SEQ ID NO: 629703 - RNA, 19 nt, Homo sapiens
  misc_RNA (1)...(19): siRNA sense strand
gucaugaaagaguuaauuc

SEQ ID NO: 629704 - RNA, 19 nt, Homo sapiens
  misc_RNA (1)...(19): siRNA sense strand
augaugagacgguggauau

SEQ ID NO: 629705 - RNA, 19 nt, Homo sapiens
  misc_RNA (1)...(19): siRNA sense strand
ggaaagagcuaugaugaga

SEQ ID NO: 629706 - RNA, 19 nt, Homo sapiens
  misc_RNA (1)...(19): siRNA sense strand
gcaaagugauggucaugaa

SEQ ID NO: 629707 - RNA, 19 nt, Homo sapiens
  misc_RNA (1)...(19): siRNA sense strand
gcacaucagucccaacaau

SEQ ID NO: 629708 - RNA, 19 nt, Homo sapiens
  misc_RNA (1)...(19): siRNA sense strand
guggauaucuucuccuuug

SEQ ID NO: 629709 - RNA, 19 nt, Homo sapiens
  misc_RNA (1)...(19): siRNA sense strand
gaccagcauucucgaaauu

SEQ ID NO: 629710 - RNA, 19 nt, Homo sapiens
  misc_RNA (1)...(19): siRNA sense strand
gaucugaacucgcacaacu

SEQ ID NO: 629711 - RNA, 19 nt, Homo sapiens
  misc_RNA (1)...(19): siRNA sense strand
gcugcaaggugaucauuga

SEQ ID NO: 629712 - RNA, 19 nt, Homo sapiens
  misc_RNA (1)...(19): siRNA sense strand
cugcagagcuggaggaguu

SEQ ID NO: 629713 - RNA, 19 nt, Homo sapiens
  misc_RNA (1)...(19): siRNA sense strand
gaggagacguucccuaagg

SEQ ID NO: 629714 - RNA, 19 nt, Homo sapiens
  misc_RNA (1)...(19): siRNA sense strand
ugacugaggugaaagugau

SEQ ID NO: 629715 - RNA, 19 nt, Homo sapiens
  misc_RNA (1)...(19): siRNA sense strand
gaaguuuguucccacagau

SEQ ID NO: 629716 - RNA, 19 nt, Homo sapiens
  misc_RNA (1)...(19): siRNA sense strand
ccagagugcuuugccugua

SEQ ID NO: 629717 - RNA, 19 nt, Homo sapiens
  misc_RNA (1)...(19): siRNA sense strand
cagaaucccuucguuguuc

SEQ ID NO: 629718 - RNA, 19 nt, Homo sapiens
  misc_RNA (1)...(19): siRNA sense strand
ccaaugugcucaaguucau

SEQ ID NO: 629719 - RNA, 19 nt, Homo sapiens
  misc_RNA (1)...(19): siRNA sense strand
ggagguggaggaugcaauu

SEQ ID NO: 629720 - RNA, 19 nt, Homo sapiens
  misc_RNA (1)...(19): siRNA sense strand
cuaaggcgcaguaacagua

SEQ ID NO: 629721 - RNA, 19 nt, Homo sapiens
  misc_RNA (1)...(19): siRNA sense strand
cacuucagcuguugauuga

SEQ ID NO: 629722 - RNA, 19 nt, Homo sapiens
  misc_RNA (1)...(19): siRNA sense strand
gagagugccugcuccaacu

SEQ ID NO: 629723 - RNA, 19 nt, Homo sapiens
  misc_RNA (1)...(19): siRNA sense strand
gcuacacgguggugggaaa

SEQ ID NO: 629724 - RNA, 19 nt, Homo sapiens
  misc_RNA (1)...(19): siRNA sense strand
gaaggccaccaccaagaaa

SEQ ID NO: 629725 - RNA, 19 nt, Homo sapiens
  misc_RNA (1)...(19): siRNA sense strand
gagaaggccaccaccaaga

SEQ ID NO: 629726 - RNA, 19 nt, Homo sapiens
  misc_RNA (1)...(19): siRNA sense strand
gcacaacugccucaucaag

SEQ ID NO: 629727 - RNA, 19 nt, Homo sapiens
  misc_RNA (1)...(19): siRNA sense strand
guaacaguaucuccaaguc

SEQ ID NO: 629728 - RNA, 19 nt, Homo sapiens
  misc_RNA (1)...(19): siRNA sense strand
ucgcacaacugccucauca

SEQ ID NO: 629729 - RNA, 19 nt, Homo sapiens
  misc_RNA (1)...(19): siRNA sense strand
ggaaucgccuccggaaugg

SEQ ID NO: 629730 - RNA, 19 nt, Homo sapiens
  misc_RNA (1)...(19): siRNA sense strand
ggugugcuguacaaggaua

SEQ ID NO: 629731 - RNA, 19 nt, Homo sapiens
  misc_RNA (1)...(19): siRNA sense strand
gccagacacuucagcuguu

SEQ ID NO: 629732 - RNA, 19 nt, Homo sapiens
  misc_RNA (1)...(19): siRNA sense strand
gaacggaaagagcuaugau

SEQ ID NO: 629733 - RNA, 19 nt, Homo sapiens
  misc_RNA (1)...(19): siRNA sense strand
ccuccggaauggccuauuu

SEQ ID NO: 629734 - RNA, 19 nt, Homo sapiens
  misc_RNA (1)...(19): siRNA sense strand
gcaguaacaguaucuccaa

SEQ ID NO: 629735 - RNA, 19 nt, Homo sapiens
  misc_RNA (1)...(19): siRNA sense strand
gcaagaacgaccgcaagaa

SEQ ID NO: 629736 - RNA, 19 nt, Homo sapiens
  misc_RNA (1)...(19): siRNA sense strand
caaagugauggucaugaaa

SEQ ID NO: 629737 - RNA, 19 nt, Homo sapiens
  misc_RNA (1)...(19): siRNA sense strand
caagaacgaccgcaagaag

SEQ ID NO: 629738 - RNA, 19 nt, Homo sapiens
  misc_RNA (1)...(19): siRNA sense strand
cagagugcuuugccuguau

SEQ ID NO: 629739 - RNA, 19 nt, Homo sapiens
  misc_RNA (1)...(19): siRNA sense strand
ggucaugaaagaguuaauu

SEQ ID NO: 629740 - RNA, 19 nt, Homo sapiens
  misc_RNA (1)...(19): siRNA sense strand
cagcugcccuacucuguca

SEQ ID NO: 629741 - RNA, 19 nt, Homo sapiens
  misc_RNA (1)...(19): siRNA sense strand
caacugguacuaugagaag

SEQ ID NO: 629742 - RNA, 19 nt, Homo sapiens
  misc_RNA (1)...(19): siRNA sense strand
gaaagaguuaauucgaugu

SEQ ID NO: 629743 - RNA, 19 nt, Homo sapiens
  misc_RNA (1)...(19): siRNA sense strand
ccagacacuucagcuguug

SEQ ID NO: 629744 - RNA, 19 nt, Homo sapiens
  misc_RNA (1)...(19): siRNA sense strand
gauggucaugaaagaguua

SEQ ID NO: 629745 - RNA, 19 nt, Homo sapiens
  misc_RNA (1)...(19): siRNA sense strand
acacaaagccacgggcaaa

SEQ ID NO: 629746 - RNA, 19 nt, Homo sapiens
  misc_RNA (1)...(19): siRNA sense strand
cugagaugcugaacggaaa

SEQ ID NO: 629747 - RNA, 19 nt, Homo sapiens
  misc_RNA (1)...(19): siRNA sense strand
agaaguuuguucccacaga

SEQ ID NO: 629748 - RNA, 19 nt, Homo sapiens
  misc_RNA (1)...(19): siRNA sense strand
acacuucagcuguugauug

SEQ ID NO: 629749 - RNA, 19 nt, Homo sapiens
  misc_RNA (1)...(19): siRNA sense strand
cagcagaaggucagguuug

SEQ ID NO: 629750 - RNA, 19 nt, Homo sapiens
  misc_RNA (1)...(19): siRNA sense strand
ucauuggugugcuguacaa

SEQ ID NO: 629751 - RNA, 19 nt, Homo sapiens
  misc_RNA (1)...(19): siRNA sense strand
caugaaagaguuaauucga

SEQ ID NO: 629752 - RNA, 19 nt, Homo sapiens
  misc_RNA (1)...(19): siRNA sense strand
cuaucaaggugacacacaa

SEQ ID NO: 629753 - RNA, 19 nt, Homo sapiens
  misc_RNA (1)...(19): siRNA sense strand
gagguggaggaugcaauua

SEQ ID NO: 629754 - RNA, 19 nt, Homo sapiens
  misc_RNA (1)...(19): siRNA sense strand
agaccagcauucucgaaau

SEQ ID NO: 629755 - RNA, 19 nt, Homo sapiens
  misc_RNA (1)...(19): siRNA sense strand
caaagccacgggcaaagug

SEQ ID NO: 629756 - RNA, 19 nt, Homo sapiens
  misc_RNA (1)...(19): siRNA sense strand
caaaggagccccugcuguu

SEQ ID NO: 629757 - RNA, 19 nt, Homo sapiens
  misc_RNA (1)...(19): siRNA sense strand
cugaggagacguucccuaa

SEQ ID NO: 629758 - RNA, 19 nt, Homo sapiens
  misc_RNA (1)...(19): siRNA sense strand
cagacgagccagacacuuc

SEQ ID NO: 629759 - RNA, 19 nt, Homo sapiens
  misc_RNA (1)...(19): siRNA sense strand
ggccucaacgugaagcuuu

SEQ ID NO: 629760 - RNA, 19 nt, Homo sapiens
  misc_RNA (1)...(19): siRNA sense strand
gugaugaggagacccagaa

SEQ ID NO: 629761 - RNA, 19 nt, Homo sapiens
  misc_RNA (1)...(19): siRNA sense strand
gaguuaauucgaugugaug

SEQ ID NO: 629762 - RNA, 19 nt, Homo sapiens
  misc_RNA (1)...(19): siRNA sense strand
gcuauucacagcagaucuu

SEQ ID NO: 629763 - RNA, 19 nt, Homo sapiens
  misc_RNA (1)...(19): siRNA sense strand
ucagaaucccuucguuguu

SEQ ID NO: 629764 - RNA, 19 nt, Homo sapiens
  misc_RNA (1)...(19): siRNA sense strand
ucagcacccuggacaccaa

SEQ ID NO: 629765 - RNA, 19 nt, Homo sapiens
  misc_RNA (1)...(19): siRNA sense strand
gcagaccagcauucucgaa

SEQ ID NO: 629766 - RNA, 19 nt, Homo sapiens
  misc_RNA (1)...(19): siRNA sense strand
gcagcagaaggucagguuu

SEQ ID NO: 629767 - RNA, 19 nt, Homo sapiens
  misc_RNA (1)...(19): siRNA sense strand
cagaccagcauucucgaaa

SEQ ID NO: 629768 - RNA, 19 nt, Homo sapiens
  misc_RNA (1)...(19): siRNA sense strand
ccaacuacgccaccacugu

SEQ ID NO: 629769 - RNA, 19 nt, Homo sapiens
  misc_RNA (1)...(19): siRNA sense strand
gaucauugggcagguguau

SEQ ID NO: 629770 - RNA, 19 nt, Homo sapiens
  misc_RNA (1)...(19): siRNA sense strand
acggaaagagcuaugauga

SEQ ID NO: 629771 - RNA, 19 nt, Homo sapiens
  misc_RNA (1)...(19): siRNA sense strand
agaaggccaccaccaagaa

SEQ ID NO: 629772 - RNA, 19 nt, Homo sapiens
  misc_RNA (1)...(19): siRNA sense strand
uggccuauuugcacucuau

SEQ ID NO: 629773 - RNA, 19 nt, Homo sapiens
  misc_RNA (1)...(19): siRNA sense strand
aggaaucgccuccggaaug

SEQ ID NO: 629774 - RNA, 19 nt, Homo sapiens
  misc_RNA (1)...(19): siRNA sense strand
agaguuaauucgaugugau

SEQ ID NO: 629775 - RNA, 19 nt, Homo sapiens
  misc_RNA (1)...(19): siRNA sense strand
gguggaggaugcaauuagc

SEQ ID NO: 629776 - RNA, 19 nt, Homo sapiens
  misc_RNA (1)...(19): siRNA sense strand
ccagcauucucgaaauugg

SEQ ID NO: 629777 - RNA, 19 nt, Homo sapiens
  misc_RNA (1)...(19): siRNA sense strand
gcagguguaugcagauccu

SEQ ID NO: 629778 - RNA, 19 nt, Homo sapiens
  misc_RNA (1)...(19): siRNA sense strand
gcaugccacccucuacugu

SEQ ID NO: 629779 - RNA, 19 nt, Homo sapiens
  misc_RNA (1)...(19): siRNA sense strand
aggauucccucaccaacug

SEQ ID NO: 629780 - RNA, 19 nt, Homo sapiens
  misc_RNA (1)...(19): siRNA sense strand
gagcugcaaggugaucauu

SEQ ID NO: 629781 - RNA, 19 nt, Homo sapiens
  misc_RNA (1)...(19): siRNA sense strand
aagugauggucaugaaaga

SEQ ID NO: 629782 - RNA, 19 nt, Homo sapiens
  misc_RNA (1)...(19): siRNA sense strand
gcacacugaaggacuuucu

SEQ ID NO: 629783 - RNA, 19 nt, Homo sapiens
  misc_RNA (1)...(19): siRNA sense strand
acaaggauaagaagcugaa

SEQ ID NO: 629784 - RNA, 19 nt, Homo sapiens
  misc_RNA (1)...(19): siRNA sense strand
ugauggucaugaaagaguu

SEQ ID NO: 629785 - RNA, 19 nt, Homo sapiens
  misc_RNA (1)...(19): siRNA sense strand
aagaguuaauucgauguga

SEQ ID NO: 629786 - RNA, 19 nt, Homo sapiens
  misc_RNA (1)...(19): siRNA sense strand
gggcagguguaugcagauc

SEQ ID NO: 629787 - RNA, 19 nt, Homo sapiens
  misc_RNA (1)...(19): siRNA sense strand
gaugagacgguggauaucu

SEQ ID NO: 629788 - RNA, 19 nt, Homo sapiens
  misc_RNA (1)...(19): siRNA sense strand
gcuccucacaugcagaaug

SEQ ID NO: 629789 - RNA, 19 nt, Homo sapiens
  misc_RNA (1)...(19): siRNA sense strand
agaaggaugggaagcucua

SEQ ID NO: 629790 - RNA, 19 nt, Homo sapiens
  misc_RNA (1)...(19): siRNA sense strand
cccgaacacuggacuuugg

SEQ ID NO: 629791 - RNA, 19 nt, Homo sapiens
  misc_RNA (1)...(19): siRNA sense strand
cgguggauaucuucuccuu

SEQ ID NO: 629792 - RNA, 19 nt, Homo sapiens
  misc_RNA (1)...(19): siRNA sense strand
guucauuggugugcuguac

SEQ ID NO: 629793 - RNA, 19 nt, Homo sapiens
  misc_RNA (1)...(19): siRNA sense strand
guaccacccagagugcuuu

SEQ ID NO: 629794 - RNA, 19 nt, Homo sapiens
  misc_RNA (1)...(19): siRNA sense strand
uaucaaggugacacacaaa

SEQ ID NO: 629795 - RNA, 19 nt, Homo sapiens
  misc_RNA (1)...(19): siRNA sense strand
gaccgcauccuggagauca

SEQ ID NO: 629796 - RNA, 19 nt, Homo sapiens
  misc_RNA (1)...(19): siRNA sense strand
ccaacugguacuaugagaa

SEQ ID NO: 629797 - RNA, 19 nt, Homo sapiens
  misc_RNA (1)...(19): siRNA sense strand
gaggagacccagaaaacuu

SEQ ID NO: 629798 - RNA, 19 nt, Homo sapiens
  misc_RNA (1)...(19): siRNA sense strand
aaagugauggucaugaaag

SEQ ID NO: 629799 - RNA, 19 nt, Homo sapiens
  misc_RNA (1)...(19): siRNA sense strand
aggagcagcugcccuacuc

SEQ ID NO: 629800 - RNA, 19 nt, Homo sapiens
  misc_RNA (1)...(19): siRNA sense strand
uuggugugcuguacaagga

SEQ ID NO: 629801 - RNA, 19 nt, Homo sapiens
  misc_RNA (1)...(19): siRNA sense strand
gagagcagaccagcauucu

SEQ ID NO: 629802 - RNA, 19 nt, Homo sapiens
  misc_RNA (1)...(19): siRNA sense strand
gucaugaaagaguuaauuc

SEQ ID NO: 629803 - RNA, 19 nt, Homo sapiens
  misc_RNA (1)...(19): siRNA sense strand
augaugagacgguggauau

SEQ ID NO: 629804 - RNA, 19 nt, Homo sapiens
  misc_RNA (1)...(19): siRNA sense strand
gaucaaguauggacacuga

SEQ ID NO: 629805 - RNA, 19 nt, Homo sapiens
  misc_RNA (1)...(19): siRNA sense strand
agagguggcucagaaauuc

SEQ ID NO: 629806 - RNA, 19 nt, Homo sapiens
  misc_RNA (1)...(19): siRNA sense strand
uccaagagguggcucagaa

SEQ ID NO: 629807 - RNA, 19 nt, Homo sapiens
  misc_RNA (1)...(19): siRNA sense strand
gaaugccuuuucucuuuua

SEQ ID NO: 629808 - RNA, 19 nt, Homo sapiens
  misc_RNA (1)...(19): siRNA sense strand
uacccuggcucaacuguau

SEQ ID NO: 629809 - RNA, 19 nt, Homo sapiens
  misc_RNA (1)...(19): siRNA sense strand
ucgaaugccuuuucucuuu

SEQ ID NO: 629810 - RNA, 19 nt, Homo sapiens
  misc_RNA (1)...(19): siRNA sense strand
cagcuccacugcacugugu

SEQ ID NO: 629811 - RNA, 19 nt, Homo sapiens
  misc_RNA (1)...(19): siRNA sense strand
ccaagagguggcucagaaa

SEQ ID NO: 629812 - RNA, 19 nt, Homo sapiens
  misc_RNA (1)...(19): siRNA sense strand
caagagguggcucagaaau

SEQ ID NO: 629813 - RNA, 19 nt, Homo sapiens
  misc_RNA (1)...(19): siRNA sense strand
cgaaugccuuuucucuuuu

SEQ ID NO: 629814 - RNA, 19 nt, Homo sapiens
  misc_RNA (1)...(19): siRNA sense strand
gacaagaccccaucgaaug

SEQ ID NO: 629815 - RNA, 19 nt, Homo sapiens
  misc_RNA (1)...(19): siRNA sense strand
gguucugccuucuggacaa

SEQ ID NO: 629816 - RNA, 19 nt, Homo sapiens
  misc_RNA (1)...(19): siRNA sense strand
ggacucccacuuccaagag

SEQ ID NO: 629817 - RNA, 19 nt, Homo sapiens
  misc_RNA (1)...(19): siRNA sense strand
aagagguggcucagaaauu

SEQ ID NO: 629818 - RNA, 19 nt, Homo sapiens
  misc_RNA (1)...(19): siRNA sense strand
gagcaaaguccugcacacu

SEQ ID NO: 629819 - RNA, 19 nt, Homo sapiens
  misc_RNA (1)...(19): siRNA sense strand
ggaccugguucugccuucu

SEQ ID NO: 629820 - RNA, 19 nt, Homo sapiens
  misc_RNA (1)...(19): siRNA sense strand
acuagcggaucaaguaugg

SEQ ID NO: 629821 - RNA, 19 nt, Homo sapiens
  misc_RNA (1)...(19): siRNA sense strand
gauguuacccuggcucaac

SEQ ID NO: 629822 - RNA, 19 nt, Homo sapiens
  misc_RNA (1)...(19): siRNA sense strand
gaucaaguauggacacuga

SEQ ID NO: 629823 - RNA, 19 nt, Homo sapiens
  misc_RNA (1)...(19): siRNA sense strand
agagguggcucagaaauuc

SEQ ID NO: 629824 - RNA, 19 nt, Homo sapiens
  misc_RNA (1)...(19): siRNA sense strand
uccaagagguggcucagaa

SEQ ID NO: 629825 - RNA, 19 nt, Homo sapiens
  misc_RNA (1)...(19): siRNA sense strand
gaaugccuuuucucuuuua

SEQ ID NO: 629826 - RNA, 19 nt, Homo sapiens
  misc_RNA (1)...(19): siRNA sense strand
uacccuggcucaacuguau

SEQ ID NO: 629827 - RNA, 19 nt, Homo sapiens
  misc_RNA (1)...(19): siRNA sense strand
ucgaaugccuuuucucuuu

SEQ ID NO: 629828 - RNA, 19 nt, Homo sapiens
  misc_RNA (1)...(19): siRNA sense strand
cagcuccacugcacugugu

SEQ ID NO: 629829 - RNA, 19 nt, Homo sapiens
  misc_RNA (1)...(19): siRNA sense strand
ccaagagguggcucagaaa

SEQ ID NO: 629830 - RNA, 19 nt, Homo sapiens
  misc_RNA (1)...(19): siRNA sense strand
caagagguggcucagaaau

SEQ ID NO: 629831 - RNA, 19 nt, Homo sapiens
  misc_RNA (1)...(19): siRNA sense strand
cgaaugccuuuucucuuuu

SEQ ID NO: 629832 - RNA, 19 nt, Homo sapiens
  misc_RNA (1)...(19): siRNA sense strand
gacaagaccccaucgaaug

SEQ ID NO: 629833 - RNA, 19 nt, Homo sapiens
  misc_RNA (1)...(19): siRNA sense strand
gguucugccuucuggacaa

SEQ ID NO: 629834 - RNA, 19 nt, Homo sapiens
  misc_RNA (1)...(19): siRNA sense strand
ggacucccacuuccaagag

SEQ ID NO: 629835 - RNA, 19 nt, Homo sapiens
  misc_RNA (1)...(19): siRNA sense strand
aagagguggcucagaaauu

SEQ ID NO: 629836 - RNA, 19 nt, Homo sapiens
  misc_RNA (1)...(19): siRNA sense strand
gagcaaaguccugcacacu

SEQ ID NO: 629837 - RNA, 19 nt, Homo sapiens
  misc_RNA (1)...(19): siRNA sense strand
ggaccugguucugccuucu

SEQ ID NO: 629838 - RNA, 19 nt, Homo sapiens
  misc_RNA (1)...(19): siRNA sense strand
acuagcggaucaaguaugg

SEQ ID NO: 629839 - RNA, 19 nt, Homo sapiens
  misc_RNA (1)...(19): siRNA sense strand
gauguuacccuggcucaac

SEQ ID NO: 629840 - RNA, 19 nt, Homo sapiens
  misc_RNA (1)...(19): siRNA sense strand
gaucaaguauggacacuga

SEQ ID NO: 629841 - RNA, 19 nt, Homo sapiens
  misc_RNA (1)...(19): siRNA sense strand
agagguggcucagaaauuc

SEQ ID NO: 629842 - RNA, 19 nt, Homo sapiens
  misc_RNA (1)...(19): siRNA sense strand
uccaagagguggcucagaa

SEQ ID NO: 629843 - RNA, 19 nt, Homo sapiens
  misc_RNA (1)...(19): siRNA sense strand
gaaugccuuuucucuuuua

SEQ ID NO: 629844 - RNA, 19 nt, Homo sapiens
  misc_RNA (1)...(19): siRNA sense strand
uacccuggcucaacuguau

SEQ ID NO: 629845 - RNA, 19 nt, Homo sapiens
  misc_RNA (1)...(19): siRNA sense strand
ucgaaugccuuuucucuuu

SEQ ID NO: 629846 - RNA, 19 nt, Homo sapiens
  misc_RNA (1)...(19): siRNA sense strand
cagcuccacugcacugugu

SEQ ID NO: 629847 - RNA, 19 nt, Homo sapiens
  misc_RNA (1)...(19): siRNA sense strand
ccaagagguggcucagaaa

SEQ ID NO: 629848 - RNA, 19 nt, Homo sapiens
  misc_RNA (1)...(19): siRNA sense strand
caagagguggcucagaaau

SEQ ID NO: 629849 - RNA, 19 nt, Homo sapiens
  misc_RNA (1)...(19): siRNA sense strand
cgaaugccuuuucucuuuu

SEQ ID NO: 629850 - RNA, 19 nt, Homo sapiens
  misc_RNA (1)...(19): siRNA sense strand
gacaagaccccaucgaaug

SEQ ID NO: 629851 - RNA, 19 nt, Homo sapiens
  misc_RNA (1)...(19): siRNA sense strand
gguucugccuucuggacaa

SEQ ID NO: 629852 - RNA, 19 nt, Homo sapiens
  misc_RNA (1)...(19): siRNA sense strand
ggacucccacuuccaagag

SEQ ID NO: 629853 - RNA, 19 nt, Homo sapiens
  misc_RNA (1)...(19): siRNA sense strand
aagagguggcucagaaauu

SEQ ID NO: 629854 - RNA, 19 nt, Homo sapiens
  misc_RNA (1)...(19): siRNA sense strand
gagcaaaguccugcacacu

SEQ ID NO: 629855 - RNA, 19 nt, Homo sapiens
  misc_RNA (1)...(19): siRNA sense strand
ggaccugguucugccuucu

SEQ ID NO: 629856 - RNA, 19 nt, Homo sapiens
  misc_RNA (1)...(19): siRNA sense strand
acuagcggaucaaguaugg

SEQ ID NO: 629857 - RNA, 19 nt, Homo sapiens
  misc_RNA (1)...(19): siRNA sense strand
gauguuacccuggcucaac

SEQ ID NO: 629858 - RNA, 19 nt, Homo sapiens
  misc_RNA (1)...(19): siRNA sense strand
gaucaaguauggacacuga

SEQ ID NO: 629859 - RNA, 19 nt, Homo sapiens
  misc_RNA (1)...(19): siRNA sense strand
agagguggcucagaaauuc

SEQ ID NO: 629860 - RNA, 19 nt, Homo sapiens
  misc_RNA (1)...(19): siRNA sense strand
uccaagagguggcucagaa

SEQ ID NO: 629861 - RNA, 19 nt, Homo sapiens
  misc_RNA (1)...(19): siRNA sense strand
gaaugccuuuucucuuuua

SEQ ID NO: 629862 - RNA, 19 nt, Homo sapiens
  misc_RNA (1)...(19): siRNA sense strand
uacccuggcucaacuguau

SEQ ID NO: 629863 - RNA, 19 nt, Homo sapiens
  misc_RNA (1)...(19): siRNA sense strand
ucgaaugccuuuucucuuu

SEQ ID NO: 629864 - RNA, 19 nt, Homo sapiens
  misc_RNA (1)...(19): siRNA sense strand
cagcuccacugcacugugu

SEQ ID NO: 629865 - RNA, 19 nt, Homo sapiens
  misc_RNA (1)...(19): siRNA sense strand
ccaagagguggcucagaaa

SEQ ID NO: 629866 - RNA, 19 nt, Homo sapiens
  misc_RNA (1)...(19): siRNA sense strand
caagagguggcucagaaau

SEQ ID NO: 629867 - RNA, 19 nt, Homo sapiens
  misc_RNA (1)...(19): siRNA sense strand
cgaaugccuuuucucuuuu

SEQ ID NO: 629868 - RNA, 19 nt, Homo sapiens
  misc_RNA (1)...(19): siRNA sense strand
gacaagaccccaucgaaug

SEQ ID NO: 629869 - RNA, 19 nt, Homo sapiens
  misc_RNA (1)...(19): siRNA sense strand
gguucugccuucuggacaa

SEQ ID NO: 629870 - RNA, 19 nt, Homo sapiens
  misc_RNA (1)...(19): siRNA sense strand
ggacucccacuuccaagag

SEQ ID NO: 629871 - RNA, 19 nt, Homo sapiens
  misc_RNA (1)...(19): siRNA sense strand
aagagguggcucagaaauu

SEQ ID NO: 629872 - RNA, 19 nt, Homo sapiens
  misc_RNA (1)...(19): siRNA sense strand
gagcaaaguccugcacacu

SEQ ID NO: 629873 - RNA, 19 nt, Homo sapiens
  misc_RNA (1)...(19): siRNA sense strand
ggaccugguucugccuucu

SEQ ID NO: 629874 - RNA, 19 nt, Homo sapiens
  misc_RNA (1)...(19): siRNA sense strand
acuagcggaucaaguaugg

SEQ ID NO: 629875 - RNA, 19 nt, Homo sapiens
  misc_RNA (1)...(19): siRNA sense strand
gauguuacccuggcucaac

SEQ ID NO: 629876 - RNA, 19 nt, Homo sapiens
  misc_RNA (1)...(19): siRNA sense strand
gaucaaguauggacacuga

SEQ ID NO: 629877 - RNA, 19 nt, Homo sapiens
  misc_RNA (1)...(19): siRNA sense strand
agagguggcucagaaauuc

SEQ ID NO: 629878 - RNA, 19 nt, Homo sapiens
  misc_RNA (1)...(19): siRNA sense strand
uccaagagguggcucagaa

SEQ ID NO: 629879 - RNA, 19 nt, Homo sapiens
  misc_RNA (1)...(19): siRNA sense strand
gaaugccuuuucucuuuua

SEQ ID NO: 629880 - RNA, 19 nt, Homo sapiens
  misc_RNA (1)...(19): siRNA sense strand
uacccuggcucaacuguau

SEQ ID NO: 629881 - RNA, 19 nt, Homo sapiens
  misc_RNA (1)...(19): siRNA sense strand
ucgaaugccuuuucucuuu

SEQ ID NO: 629882 - RNA, 19 nt, Homo sapiens
  misc_RNA (1)...(19): siRNA sense strand
cagcuccacugcacugugu

SEQ ID NO: 629883 - RNA, 19 nt, Homo sapiens
  misc_RNA (1)...(19): siRNA sense strand
ccaagagguggcucagaaa

SEQ ID NO: 629884 - RNA, 19 nt, Homo sapiens
  misc_RNA (1)...(19): siRNA sense strand
caagagguggcucagaaau

SEQ ID NO: 629885 - RNA, 19 nt, Homo sapiens
  misc_RNA (1)...(19): siRNA sense strand
cgaaugccuuuucucuuuu

SEQ ID NO: 629886 - RNA, 19 nt, Homo sapiens
  misc_RNA (1)...(19): siRNA sense strand
gacaagaccccaucgaaug

SEQ ID NO: 629887 - RNA, 19 nt, Homo sapiens
  misc_RNA (1)...(19): siRNA sense strand
gguucugccuucuggacaa

SEQ ID NO: 629888 - RNA, 19 nt, Homo sapiens
  misc_RNA (1)...(19): siRNA sense strand
ggacucccacuuccaagag

SEQ ID NO: 629889 - RNA, 19 nt, Homo sapiens
  misc_RNA (1)...(19): siRNA sense strand
aagagguggcucagaaauu

SEQ ID NO: 629890 - RNA, 19 nt, Homo sapiens
  misc_RNA (1)...(19): siRNA sense strand
gagcaaaguccugcacacu

SEQ ID NO: 629891 - RNA, 19 nt, Homo sapiens
  misc_RNA (1)...(19): siRNA sense strand
ggaccugguucugccuucu

SEQ ID NO: 629892 - RNA, 19 nt, Homo sapiens
  misc_RNA (1)...(19): siRNA sense strand
acuagcggaucaaguaugg

SEQ ID NO: 629893 - RNA, 19 nt, Homo sapiens
  misc_RNA (1)...(19): siRNA sense strand
gauguuacccuggcucaac

SEQ ID NO: 629894 - RNA, 19 nt, Homo sapiens
  misc_RNA (1)...(19): siRNA sense strand
gaucaaguauggacacuga

SEQ ID NO: 629895 - RNA, 19 nt, Homo sapiens
  misc_RNA (1)...(19): siRNA sense strand
agagguggcucagaaauuc

SEQ ID NO: 629896 - RNA, 19 nt, Homo sapiens
  misc_RNA (1)...(19): siRNA sense strand
uccaagagguggcucagaa

SEQ ID NO: 629897 - RNA, 19 nt, Homo sapiens
  misc_RNA (1)...(19): siRNA sense strand
gaaugccuuuucucuuuua

SEQ ID NO: 629898 - RNA, 19 nt, Homo sapiens
  misc_RNA (1)...(19): siRNA sense strand
uacccuggcucaacuguau

SEQ ID NO: 629899 - RNA, 19 nt, Homo sapiens
  misc_RNA (1)...(19): siRNA sense strand
ucgaaugccuuuucucuuu

SEQ ID NO: 629900 - RNA, 19 nt, Homo sapiens
  misc_RNA (1)...(19): siRNA sense strand
cagcuccacugcacugugu

SEQ ID NO: 629901 - RNA, 19 nt, Homo sapiens
  misc_RNA (1)...(19): siRNA sense strand
ccaagagguggcucagaaa

SEQ ID NO: 629902 - RNA, 19 nt, Homo sapiens
  misc_RNA (1)...(19): siRNA sense strand
caagagguggcucagaaau

SEQ ID NO: 629903 - RNA, 19 nt, Homo sapiens
  misc_RNA (1)...(19): siRNA sense strand
cgaaugccuuuucucuuuu

SEQ ID NO: 629904 - RNA, 19 nt, Homo sapiens
  misc_RNA (1)...(19): siRNA sense strand
gacaagaccccaucgaaug

SEQ ID NO: 629905 - RNA, 19 nt, Homo sapiens
  misc_RNA (1)...(19): siRNA sense strand
gguucugccuucuggacaa

SEQ ID NO: 629906 - RNA, 19 nt, Homo sapiens
  misc_RNA (1)...(19): siRNA sense strand
ggacucccacuuccaagag

SEQ ID NO: 629907 - RNA, 19 nt, Homo sapiens
  misc_RNA (1)...(19): siRNA sense strand
aagagguggcucagaaauu

SEQ ID NO: 629908 - RNA, 19 nt, Homo sapiens
  misc_RNA (1)...(19): siRNA sense strand
gagcaaaguccugcacacu

SEQ ID NO: 629909 - RNA, 19 nt, Homo sapiens
  misc_RNA (1)...(19): siRNA sense strand
ggaccugguucugccuucu

SEQ ID NO: 629910 - RNA, 19 nt, Homo sapiens
  misc_RNA (1)...(19): siRNA sense strand
acuagcggaucaaguaugg

SEQ ID NO: 629911 - RNA, 19 nt, Homo sapiens
  misc_RNA (1)...(19): siRNA sense strand
gauguuacccuggcucaac

SEQ ID NO: 629912 - RNA, 19 nt, Homo sapiens
  misc_RNA (1)...(19): siRNA sense strand
gaucaaguauggacacuga

SEQ ID NO: 629913 - RNA, 19 nt, Homo sapiens
  misc_RNA (1)...(19): siRNA sense strand
agagguggcucagaaauuc

SEQ ID NO: 629914 - RNA, 19 nt, Homo sapiens
  misc_RNA (1)...(19): siRNA sense strand
uccaagagguggcucagaa

SEQ ID NO: 629915 - RNA, 19 nt, Homo sapiens
  misc_RNA (1)...(19): siRNA sense strand
gaaugccuuuucucuuuua

SEQ ID NO: 629916 - RNA, 19 nt, Homo sapiens
  misc_RNA (1)...(19): siRNA sense strand
uacccuggcucaacuguau

SEQ ID NO: 629917 - RNA, 19 nt, Homo sapiens
  misc_RNA (1)...(19): siRNA sense strand
ucgaaugccuuuucucuuu

SEQ ID NO: 629918 - RNA, 19 nt, Homo sapiens
  misc_RNA (1)...(19): siRNA sense strand
cagcuccacugcacugugu

SEQ ID NO: 629919 - RNA, 19 nt, Homo sapiens
  misc_RNA (1)...(19): siRNA sense strand
ccaagagguggcucagaaa

SEQ ID NO: 629920 - RNA, 19 nt, Homo sapiens
  misc_RNA (1)...(19): siRNA sense strand
caagagguggcucagaaau

SEQ ID NO: 629921 - RNA, 19 nt, Homo sapiens
  misc_RNA (1)...(19): siRNA sense strand
cgaaugccuuuucucuuuu

SEQ ID NO: 629922 - RNA, 19 nt, Homo sapiens
  misc_RNA (1)...(19): siRNA sense strand
gacaagaccccaucgaaug

SEQ ID NO: 629923 - RNA, 19 nt, Homo sapiens
  misc_RNA (1)...(19): siRNA sense strand
gguucugccuucuggacaa

SEQ ID NO: 629924 - RNA, 19 nt, Homo sapiens
  misc_RNA (1)...(19): siRNA sense strand
ggacucccacuuccaagag

SEQ ID NO: 629925 - RNA, 19 nt, Homo sapiens
  misc_RNA (1)...(19): siRNA sense strand
aagagguggcucagaaauu

SEQ ID NO: 629926 - RNA, 19 nt, Homo sapiens
  misc_RNA (1)...(19): siRNA sense strand
gagcaaaguccugcacacu

SEQ ID NO: 629927 - RNA, 19 nt, Homo sapiens
  misc_RNA (1)...(19): siRNA sense strand
ggaccugguucugccuucu

SEQ ID NO: 629928 - RNA, 19 nt, Homo sapiens
  misc_RNA (1)...(19): siRNA sense strand
acuagcggaucaaguaugg

SEQ ID NO: 629929 - RNA, 19 nt, Homo sapiens
  misc_RNA (1)...(19): siRNA sense strand
gauguuacccuggcucaac

SEQ ID NO: 629930 - RNA, 19 nt, Homo sapiens
  misc_RNA (1)...(19): siRNA sense strand
gaucaaguauggacacuga

SEQ ID NO: 629931 - RNA, 19 nt, Homo sapiens
  misc_RNA (1)...(19): siRNA sense strand
agagguggcucagaaauuc

SEQ ID NO: 629932 - RNA, 19 nt, Homo sapiens
  misc_RNA (1)...(19): siRNA sense strand
uccaagagguggcucagaa

SEQ ID NO: 629933 - RNA, 19 nt, Homo sapiens
  misc_RNA (1)...(19): siRNA sense strand
gaaugccuuuucucuuuua

SEQ ID NO: 629934 - RNA, 19 nt, Homo sapiens
  misc_RNA (1)...(19): siRNA sense strand
uacccuggcucaacuguau

SEQ ID NO: 629935 - RNA, 19 nt, Homo sapiens
  misc_RNA (1)...(19): siRNA sense strand
ucgaaugccuuuucucuuu

SEQ ID NO: 629936 - RNA, 19 nt, Homo sapiens
  misc_RNA (1)...(19): siRNA sense strand
cagcuccacugcacugugu

SEQ ID NO: 629937 - RNA, 19 nt, Homo sapiens
  misc_RNA (1)...(19): siRNA sense strand
ccaagagguggcucagaaa

SEQ ID NO: 629938 - RNA, 19 nt, Homo sapiens
  misc_RNA (1)...(19): siRNA sense strand
caagagguggcucagaaau

SEQ ID NO: 629939 - RNA, 19 nt, Homo sapiens
  misc_RNA (1)...(19): siRNA sense strand
cgaaugccuuuucucuuuu

SEQ ID NO: 629940 - RNA, 19 nt, Homo sapiens
  misc_RNA (1)...(19): siRNA sense strand
gacaagaccccaucgaaug

SEQ ID NO: 629941 - RNA, 19 nt, Homo sapiens
  misc_RNA (1)...(19): siRNA sense strand
gguucugccuucuggacaa

SEQ ID NO: 629942 - RNA, 19 nt, Homo sapiens
  misc_RNA (1)...(19): siRNA sense strand
ggacucccacuuccaagag

SEQ ID NO: 629943 - RNA, 19 nt, Homo sapiens
  misc_RNA (1)...(19): siRNA sense strand
aagagguggcucagaaauu

SEQ ID NO: 629944 - RNA, 19 nt, Homo sapiens
  misc_RNA (1)...(19): siRNA sense strand
gagcaaaguccugcacacu

SEQ ID NO: 629945 - RNA, 19 nt, Homo sapiens
  misc_RNA (1)...(19): siRNA sense strand
ggaccugguucugccuucu

SEQ ID NO: 629946 - RNA, 19 nt, Homo sapiens
  misc_RNA (1)...(19): siRNA sense strand
acuagcggaucaaguaugg

SEQ ID NO: 629947 - RNA, 19 nt, Homo sapiens
  misc_RNA (1)...(19): siRNA sense strand
gauguuacccuggcucaac

SEQ ID NO: 629948 - RNA, 19 nt, Homo sapiens
  misc_RNA (1)...(19): siRNA sense strand
gaucaaguauggacacuga

SEQ ID NO: 629949 - RNA, 19 nt, Homo sapiens
  misc_RNA (1)...(19): siRNA sense strand
agagguggcucagaaauuc

SEQ ID NO: 629950 - RNA, 19 nt, Homo sapiens
  misc_RNA (1)...(19): siRNA sense strand
uccaagagguggcucagaa

SEQ ID NO: 629951 - RNA, 19 nt, Homo sapiens
  misc_RNA (1)...(19): siRNA sense strand
gaaugccuuuucucuuuua

SEQ ID NO: 629952 - RNA, 19 nt, Homo sapiens
  misc_RNA (1)...(19): siRNA sense strand
uacccuggcucaacuguau

SEQ ID NO: 629953 - RNA, 19 nt, Homo sapiens
  misc_RNA (1)...(19): siRNA sense strand
ucgaaugccuuuucucuuu

SEQ ID NO: 629954 - RNA, 19 nt, Homo sapiens
  misc_RNA (1)...(19): siRNA sense strand
cagcuccacugcacugugu

SEQ ID NO: 629955 - RNA, 19 nt, Homo sapiens
  misc_RNA (1)...(19): siRNA sense strand
ccaagagguggcucagaaa

SEQ ID NO: 629956 - RNA, 19 nt, Homo sapiens
  misc_RNA (1)...(19): siRNA sense strand
caagagguggcucagaaau

SEQ ID NO: 629957 - RNA, 19 nt, Homo sapiens
  misc_RNA (1)...(19): siRNA sense strand
cgaaugccuuuucucuuuu

SEQ ID NO: 629958 - RNA, 19 nt, Homo sapiens
  misc_RNA (1)...(19): siRNA sense strand
gacaagaccccaucgaaug

SEQ ID NO: 629959 - RNA, 19 nt, Homo sapiens
  misc_RNA (1)...(19): siRNA sense strand
gguucugccuucuggacaa

SEQ ID NO: 629960 - RNA, 19 nt, Homo sapiens
  misc_RNA (1)...(19): siRNA sense strand
ggacucccacuuccaagag

SEQ ID NO: 629961 - RNA, 19 nt, Homo sapiens
  misc_RNA (1)...(19): siRNA sense strand
aagagguggcucagaaauu

SEQ ID NO: 629962 - RNA, 19 nt, Homo sapiens
  misc_RNA (1)...(19): siRNA sense strand
gagcaaaguccugcacacu

SEQ ID NO: 629963 - RNA, 19 nt, Homo sapiens
  misc_RNA (1)...(19): siRNA sense strand
ggaccugguucugccuucu

SEQ ID NO: 629964 - RNA, 19 nt, Homo sapiens
  misc_RNA (1)...(19): siRNA sense strand
acuagcggaucaaguaugg

SEQ ID NO: 629965 - RNA, 19 nt, Homo sapiens
  misc_RNA (1)...(19): siRNA sense strand
gauguuacccuggcucaac

SEQ ID NO: 629966 - RNA, 19 nt, Homo sapiens
  misc_RNA (1)...(19): siRNA sense strand
gaucaaguauggacacuga

SEQ ID NO: 629967 - RNA, 19 nt, Homo sapiens
  misc_RNA (1)...(19): siRNA sense strand
agagguggcucagaaauuc

SEQ ID NO: 629968 - RNA, 19 nt, Homo sapiens
  misc_RNA (1)...(19): siRNA sense strand
uccaagagguggcucagaa

SEQ ID NO: 629969 - RNA, 19 nt, Homo sapiens
  misc_RNA (1)...(19): siRNA sense strand
gaaugccuuuucucuuuua

SEQ ID NO: 629970 - RNA, 19 nt, Homo sapiens
  misc_RNA (1)...(19): siRNA sense strand
uacccuggcucaacuguau

SEQ ID NO: 629971 - RNA, 19 nt, Homo sapiens
  misc_RNA (1)...(19): siRNA sense strand
ucgaaugccuuuucucuuu

SEQ ID NO: 629972 - RNA, 19 nt, Homo sapiens
  misc_RNA (1)...(19): siRNA sense strand
cagcuccacugcacugugu

SEQ ID NO: 629973 - RNA, 19 nt, Homo sapiens
  misc_RNA (1)...(19): siRNA sense strand
ccaagagguggcucagaaa

SEQ ID NO: 629974 - RNA, 19 nt, Homo sapiens
  misc_RNA (1)...(19): siRNA sense strand
caagagguggcucagaaau

SEQ ID NO: 629975 - RNA, 19 nt, Homo sapiens
  misc_RNA (1)...(19): siRNA sense strand
cgaaugccuuuucucuuuu

SEQ ID NO: 629976 - RNA, 19 nt, Homo sapiens
  misc_RNA (1)...(19): siRNA sense strand
gacaagaccccaucgaaug

SEQ ID NO: 629977 - RNA, 19 nt, Homo sapiens
  misc_RNA (1)...(19): siRNA sense strand
gguucugccuucuggacaa

SEQ ID NO: 629978 - RNA, 19 nt, Homo sapiens
  misc_RNA (1)...(19): siRNA sense strand
ggacucccacuuccaagag

SEQ ID NO: 629979 - RNA, 19 nt, Homo sapiens
  misc_RNA (1)...(19): siRNA sense strand
aagagguggcucagaaauu

SEQ ID NO: 629980 - RNA, 19 nt, Homo sapiens
  misc_RNA (1)...(19): siRNA sense strand
gagcaaaguccugcacacu

SEQ ID NO: 629981 - RNA, 19 nt, Homo sapiens
  misc_RNA (1)...(19): siRNA sense strand
ggaccugguucugccuucu

SEQ ID NO: 629982 - RNA, 19 nt, Homo sapiens
  misc_RNA (1)...(19): siRNA sense strand
acuagcggaucaaguaugg

SEQ ID NO: 629983 - RNA, 19 nt, Homo sapiens
  misc_RNA (1)...(19): siRNA sense strand
gauguuacccuggcucaac

SEQ ID NO: 629984 - RNA, 19 nt, Homo sapiens
  misc_RNA (1)...(19): siRNA sense strand
gaucaaguauggacacuga

SEQ ID NO: 629985 - RNA, 19 nt, Homo sapiens
  misc_RNA (1)...(19): siRNA sense strand
agagguggcucagaaauuc

SEQ ID NO: 629986 - RNA, 19 nt, Homo sapiens
  misc_RNA (1)...(19): siRNA sense strand
uccaagagguggcucagaa

SEQ ID NO: 629987 - RNA, 19 nt, Homo sapiens
  misc_RNA (1)...(19): siRNA sense strand
gaaugccuuuucucuuuua

SEQ ID NO: 629988 - RNA, 19 nt, Homo sapiens
  misc_RNA (1)...(19): siRNA sense strand
uacccuggcucaacuguau

SEQ ID NO: 629989 - RNA, 19 nt, Homo sapiens
  misc_RNA (1)...(19): siRNA sense strand
ucgaaugccuuuucucuuu

SEQ ID NO: 629990 - RNA, 19 nt, Homo sapiens
  misc_RNA (1)...(19): siRNA sense strand
cagcuccacugcacugugu

SEQ ID NO: 629991 - RNA, 19 nt, Homo sapiens
  misc_RNA (1)...(19): siRNA sense strand
ccaagagguggcucagaaa

SEQ ID NO: 629992 - RNA, 19 nt, Homo sapiens
  misc_RNA (1)...(19): siRNA sense strand
caagagguggcucagaaau

SEQ ID NO: 629993 - RNA, 19 nt, Homo sapiens
  misc_RNA (1)...(19): siRNA sense strand
cgaaugccuuuucucuuuu

SEQ ID NO: 629994 - RNA, 19 nt, Homo sapiens
  misc_RNA (1)...(19): siRNA sense strand
gacaagaccccaucgaaug

SEQ ID NO: 629995 - RNA, 19 nt, Homo sapiens
  misc_RNA (1)...(19): siRNA sense strand
gguucugccuucuggacaa

SEQ ID NO: 629996 - RNA, 19 nt, Homo sapiens
  misc_RNA (1)...(19): siRNA sense strand
ggacucccacuuccaagag

SEQ ID NO: 629997 - RNA, 19 nt, Homo sapiens
  misc_RNA (1)...(19): siRNA sense strand
aagagguggcucagaaauu

SEQ ID NO: 629998 - RNA, 19 nt, Homo sapiens
  misc_RNA (1)...(19): siRNA sense strand
gagcaaaguccugcacacu

SEQ ID NO: 629999 - RNA, 19 nt, Homo sapiens
  misc_RNA (1)...(19): siRNA sense strand
ggaccugguucugccuucu

SEQ ID NO: 630000 - RNA, 19 nt, Homo sapiens
  misc_RNA (1)...(19): siRNA sense strand
acuagcggaucaaguaugg

SEQ ID NO: 630001 - RNA, 19 nt, Homo sapiens
  misc_RNA (1)...(19): siRNA sense strand
gauguuacccuggcucaac

SEQ ID NO: 630002 - RNA, 19 nt, Homo sapiens
  misc_RNA (1)...(19): siRNA sense strand
gaucaaguauggacacuga

SEQ ID NO: 630003 - RNA, 19 nt, Homo sapiens
  misc_RNA (1)...(19): siRNA sense strand
agagguggcucagaaauuc

SEQ ID NO: 630004 - RNA, 19 nt, Homo sapiens
  misc_RNA (1)...(19): siRNA sense strand
uccaagagguggcucagaa

SEQ ID NO: 630005 - RNA, 19 nt, Homo sapiens
  misc_RNA (1)...(19): siRNA sense strand
gaaugccuuuucucuuuua

SEQ ID NO: 630006 - RNA, 19 nt, Homo sapiens
  misc_RNA (1)...(19): siRNA sense strand
uacccuggcucaacuguau

SEQ ID NO: 630007 - RNA, 19 nt, Homo sapiens
  misc_RNA (1)...(19): siRNA sense strand
ucgaaugccuuuucucuuu

SEQ ID NO: 630008 - RNA, 19 nt, Homo sapiens
  misc_RNA (1)...(19): siRNA sense strand
cagcuccacugcacugugu

SEQ ID NO: 630009 - RNA, 19 nt, Homo sapiens
  misc_RNA (1)...(19): siRNA sense strand
ccaagagguggcucagaaa

SEQ ID NO: 630010 - RNA, 19 nt, Homo sapiens
  misc_RNA (1)...(19): siRNA sense strand
caagagguggcucagaaau

SEQ ID NO: 630011 - RNA, 19 nt, Homo sapiens
  misc_RNA (1)...(19): siRNA sense strand
cgaaugccuuuucucuuuu

SEQ ID NO: 630012 - RNA, 19 nt, Homo sapiens
  misc_RNA (1)...(19): siRNA sense strand
gacaagaccccaucgaaug

SEQ ID NO: 630013 - RNA, 19 nt, Homo sapiens
  misc_RNA (1)...(19): siRNA sense strand
gguucugccuucuggacaa

SEQ ID NO: 630014 - RNA, 19 nt, Homo sapiens
  misc_RNA (1)...(19): siRNA sense strand
ggacucccacuuccaagag

SEQ ID NO: 630015 - RNA, 19 nt, Homo sapiens
  misc_RNA (1)...(19): siRNA sense strand
aagagguggcucagaaauu

SEQ ID NO: 630016 - RNA, 19 nt, Homo sapiens
  misc_RNA (1)...(19): siRNA sense strand
gagcaaaguccugcacacu

SEQ ID NO: 630017 - RNA, 19 nt, Homo sapiens
  misc_RNA (1)...(19): siRNA sense strand
ggaccugguucugccuucu

SEQ ID NO: 630018 - RNA, 19 nt, Homo sapiens
  misc_RNA (1)...(19): siRNA sense strand
acuagcggaucaaguaugg

SEQ ID NO: 630019 - RNA, 19 nt, Homo sapiens
  misc_RNA (1)...(19): siRNA sense strand
gauguuacccuggcucaac

SEQ ID NO: 630020 - RNA, 19 nt, Homo sapiens
  misc_RNA (1)...(19): siRNA sense strand
gaucaaguauggacacuga

SEQ ID NO: 630021 - RNA, 19 nt, Homo sapiens
  misc_RNA (1)...(19): siRNA sense strand
agagguggcucagaaauuc

SEQ ID NO: 630022 - RNA, 19 nt, Homo sapiens
  misc_RNA (1)...(19): siRNA sense strand
uccaagagguggcucagaa

SEQ ID NO: 630023 - RNA, 19 nt, Homo sapiens
  misc_RNA (1)...(19): siRNA sense strand
gaaugccuuuucucuuuua

SEQ ID NO: 630024 - RNA, 19 nt, Homo sapiens
  misc_RNA (1)...(19): siRNA sense strand
uacccuggcucaacuguau

SEQ ID NO: 630025 - RNA, 19 nt, Homo sapiens
  misc_RNA (1)...(19): siRNA sense strand
ucgaaugccuuuucucuuu

SEQ ID NO: 630026 - RNA, 19 nt, Homo sapiens
  misc_RNA (1)...(19): siRNA sense strand
cagcuccacugcacugugu

SEQ ID NO: 630027 - RNA, 19 nt, Homo sapiens
  misc_RNA (1)...(19): siRNA sense strand
ccaagagguggcucagaaa

SEQ ID NO: 630028 - RNA, 19 nt, Homo sapiens
  misc_RNA (1)...(19): siRNA sense strand
caagagguggcucagaaau

SEQ ID NO: 630029 - RNA, 19 nt, Homo sapiens
  misc_RNA (1)...(19): siRNA sense strand
cgaaugccuuuucucuuuu

SEQ ID NO: 630030 - RNA, 19 nt, Homo sapiens
  misc_RNA (1)...(19): siRNA sense strand
gacaagaccccaucgaaug

SEQ ID NO: 630031 - RNA, 19 nt, Homo sapiens
  misc_RNA (1)...(19): siRNA sense strand
gguucugccuucuggacaa

SEQ ID NO: 630032 - RNA, 19 nt, Homo sapiens
  misc_RNA (1)...(19): siRNA sense strand
ggacucccacuuccaagag

SEQ ID NO: 630033 - RNA, 19 nt, Homo sapiens
  misc_RNA (1)...(19): siRNA sense strand
aagagguggcucagaaauu

SEQ ID NO: 630034 - RNA, 19 nt, Homo sapiens
  misc_RNA (1)...(19): siRNA sense strand
gagcaaaguccugcacacu

SEQ ID NO: 630035 - RNA, 19 nt, Homo sapiens
  misc_RNA (1)...(19): siRNA sense strand
ggaccugguucugccuucu

SEQ ID NO: 630036 - RNA, 19 nt, Homo sapiens
  misc_RNA (1)...(19): siRNA sense strand
acuagcggaucaaguaugg

SEQ ID NO: 630037 - RNA, 19 nt, Homo sapiens
  misc_RNA (1)...(19): siRNA sense strand
gauguuacccuggcucaac

SEQ ID NO: 630038 - RNA, 19 nt, Homo sapiens
  misc_RNA (1)...(19): siRNA sense strand
gaucaaguauggacacuga

SEQ ID NO: 630039 - RNA, 19 nt, Homo sapiens
  misc_RNA (1)...(19): siRNA sense strand
agagguggcucagaaauuc

SEQ ID NO: 630040 - RNA, 19 nt, Homo sapiens
  misc_RNA (1)...(19): siRNA sense strand
uccaagagguggcucagaa

SEQ ID NO: 630041 - RNA, 19 nt, Homo sapiens
  misc_RNA (1)...(19): siRNA sense strand
gaaugccuuuucucuuuua

SEQ ID NO: 630042 - RNA, 19 nt, Homo sapiens
  misc_RNA (1)...(19): siRNA sense strand
uacccuggcucaacuguau

SEQ ID NO: 630043 - RNA, 19 nt, Homo sapiens
  misc_RNA (1)...(19): siRNA sense strand
ucgaaugccuuuucucuuu

SEQ ID NO: 630044 - RNA, 19 nt, Homo sapiens
  misc_RNA (1)...(19): siRNA sense strand
cagcuccacugcacugugu

SEQ ID NO: 630045 - RNA, 19 nt, Homo sapiens
  misc_RNA (1)...(19): siRNA sense strand
ccaagagguggcucagaaa

SEQ ID NO: 630046 - RNA, 19 nt, Homo sapiens
  misc_RNA (1)...(19): siRNA sense strand
caagagguggcucagaaau

SEQ ID NO: 630047 - RNA, 19 nt, Homo sapiens
  misc_RNA (1)...(19): siRNA sense strand
cgaaugccuuuucucuuuu

SEQ ID NO: 630048 - RNA, 19 nt, Homo sapiens
  misc_RNA (1)...(19): siRNA sense strand
gacaagaccccaucgaaug

SEQ ID NO: 630049 - RNA, 19 nt, Homo sapiens
  misc_RNA (1)...(19): siRNA sense strand
gguucugccuucuggacaa

SEQ ID NO: 630050 - RNA, 19 nt, Homo sapiens
  misc_RNA (1)...(19): siRNA sense strand
ggacucccacuuccaagag

SEQ ID NO: 630051 - RNA, 19 nt, Homo sapiens
  misc_RNA (1)...(19): siRNA sense strand
aagagguggcucagaaauu

SEQ ID NO: 630052 - RNA, 19 nt, Homo sapiens
  misc_RNA (1)...(19): siRNA sense strand
gagcaaaguccugcacacu

SEQ ID NO: 630053 - RNA, 19 nt, Homo sapiens
  misc_RNA (1)...(19): siRNA sense strand
ggaccugguucugccuucu

SEQ ID NO: 630054 - RNA, 19 nt, Homo sapiens
  misc_RNA (1)...(19): siRNA sense strand
acuagcggaucaaguaugg

SEQ ID NO: 630055 - RNA, 19 nt, Homo sapiens
  misc_RNA (1)...(19): siRNA sense strand
gauguuacccuggcucaac

SEQ ID NO: 630056 - RNA, 19 nt, Homo sapiens
  misc_RNA (1)...(19): siRNA sense strand
gaucaaguauggacacuga

SEQ ID NO: 630057 - RNA, 19 nt, Homo sapiens
  misc_RNA (1)...(19): siRNA sense strand
agagguggcucagaaauuc

SEQ ID NO: 630058 - RNA, 19 nt, Homo sapiens
  misc_RNA (1)...(19): siRNA sense strand
uccaagagguggcucagaa

SEQ ID NO: 630059 - RNA, 19 nt, Homo sapiens
  misc_RNA (1)...(19): siRNA sense strand
gaaugccuuuucucuuuua

SEQ ID NO: 630060 - RNA, 19 nt, Homo sapiens
  misc_RNA (1)...(19): siRNA sense strand
uacccuggcucaacuguau

SEQ ID NO: 630061 - RNA, 19 nt, Homo sapiens
  misc_RNA (1)...(19): siRNA sense strand
ucgaaugccuuuucucuuu

SEQ ID NO: 630062 - RNA, 19 nt, Homo sapiens
  misc_RNA (1)...(19): siRNA sense strand
cagcuccacugcacugugu

SEQ ID NO: 630063 - RNA, 19 nt, Homo sapiens
  misc_RNA (1)...(19): siRNA sense strand
ccaagagguggcucagaaa

SEQ ID NO: 630064 - RNA, 19 nt, Homo sapiens
  misc_RNA (1)...(19): siRNA sense strand
caagagguggcucagaaau

SEQ ID NO: 630065 - RNA, 19 nt, Homo sapiens
  misc_RNA (1)...(19): siRNA sense strand
cgaaugccuuuucucuuuu

SEQ ID NO: 630066 - RNA, 19 nt, Homo sapiens
  misc_RNA (1)...(19): siRNA sense strand
gacaagaccccaucgaaug

SEQ ID NO: 630067 - RNA, 19 nt, Homo sapiens
  misc_RNA (1)...(19): siRNA sense strand
gguucugccuucuggacaa

SEQ ID NO: 630068 - RNA, 19 nt, Homo sapiens
  misc_RNA (1)...(19): siRNA sense strand
ggacucccacuuccaagag

SEQ ID NO: 630069 - RNA, 19 nt, Homo sapiens
  misc_RNA (1)...(19): siRNA sense strand
aagagguggcucagaaauu

SEQ ID NO: 630070 - RNA, 19 nt, Homo sapiens
  misc_RNA (1)...(19): siRNA sense strand
gagcaaaguccugcacacu

SEQ ID NO: 630071 - RNA, 19 nt, Homo sapiens
  misc_RNA (1)...(19): siRNA sense strand
ggaccugguucugccuucu

SEQ ID NO: 630072 - RNA, 19 nt, Homo sapiens
  misc_RNA (1)...(19): siRNA sense strand
acuagcggaucaaguaugg

SEQ ID NO: 630073 - RNA, 19 nt, Homo sapiens
  misc_RNA (1)...(19): siRNA sense strand
gauguuacccuggcucaac

SEQ ID NO: 630074 - RNA, 19 nt, Homo sapiens
  misc_RNA (1)...(19): siRNA sense strand
gaucaaguauggacacuga

SEQ ID NO: 630075 - RNA, 19 nt, Homo sapiens
  misc_RNA (1)...(19): siRNA sense strand
agagguggcucagaaauuc

SEQ ID NO: 630076 - RNA, 19 nt, Homo sapiens
  misc_RNA (1)...(19): siRNA sense strand
uccaagagguggcucagaa

SEQ ID NO: 630077 - RNA, 19 nt, Homo sapiens
  misc_RNA (1)...(19): siRNA sense strand
gaaugccuuuucucuuuua

SEQ ID NO: 630078 - RNA, 19 nt, Homo sapiens
  misc_RNA (1)...(19): siRNA sense strand
uacccuggcucaacuguau

SEQ ID NO: 630079 - RNA, 19 nt, Homo sapiens
  misc_RNA (1)...(19): siRNA sense strand
ucgaaugccuuuucucuuu

SEQ ID NO: 630080 - RNA, 19 nt, Homo sapiens
  misc_RNA (1)...(19): siRNA sense strand
cagcuccacugcacugugu

SEQ ID NO: 630081 - RNA, 19 nt, Homo sapiens
  misc_RNA (1)...(19): siRNA sense strand
ccaagagguggcucagaaa

SEQ ID NO: 630082 - RNA, 19 nt, Homo sapiens
  misc_RNA (1)...(19): siRNA sense strand
caagagguggcucagaaau

SEQ ID NO: 630083 - RNA, 19 nt, Homo sapiens
  misc_RNA (1)...(19): siRNA sense strand
cgaaugccuuuucucuuuu

SEQ ID NO: 630084 - RNA, 19 nt, Homo sapiens
  misc_RNA (1)...(19): siRNA sense strand
gacaagaccccaucgaaug

SEQ ID NO: 630085 - RNA, 19 nt, Homo sapiens
  misc_RNA (1)...(19): siRNA sense strand
gguucugccuucuggacaa

SEQ ID NO: 630086 - RNA, 19 nt, Homo sapiens
  misc_RNA (1)...(19): siRNA sense strand
ggacucccacuuccaagag

SEQ ID NO: 630087 - RNA, 19 nt, Homo sapiens
  misc_RNA (1)...(19): siRNA sense strand
aagagguggcucagaaauu

SEQ ID NO: 630088 - RNA, 19 nt, Homo sapiens
  misc_RNA (1)...(19): siRNA sense strand
gagcaaaguccugcacacu

SEQ ID NO: 630089 - RNA, 19 nt, Homo sapiens
  misc_RNA (1)...(19): siRNA sense strand
ggaccugguucugccuucu

SEQ ID NO: 630090 - RNA, 19 nt, Homo sapiens
  misc_RNA (1)...(19): siRNA sense strand
acuagcggaucaaguaugg

SEQ ID NO: 630091 - RNA, 19 nt, Homo sapiens
  misc_RNA (1)...(19): siRNA sense strand
gauguuacccuggcucaac

SEQ ID NO: 630092 - RNA, 19 nt, Homo sapiens
  misc_RNA (1)...(19): siRNA sense strand
gaucaaguauggacacuga

SEQ ID NO: 630093 - RNA, 19 nt, Homo sapiens
  misc_RNA (1)...(19): siRNA sense strand
agagguggcucagaaauuc

SEQ ID NO: 630094 - RNA, 19 nt, Homo sapiens
  misc_RNA (1)...(19): siRNA sense strand
uccaagagguggcucagaa

SEQ ID NO: 630095 - RNA, 19 nt, Homo sapiens
  misc_RNA (1)...(19): siRNA sense strand
gaaugccuuuucucuuuua

SEQ ID NO: 630096 - RNA, 19 nt, Homo sapiens
  misc_RNA (1)...(19): siRNA sense strand
uacccuggcucaacuguau

SEQ ID NO: 630097 - RNA, 19 nt, Homo sapiens
  misc_RNA (1)...(19): siRNA sense strand
ucgaaugccuuuucucuuu

SEQ ID NO: 630098 - RNA, 19 nt, Homo sapiens
  misc_RNA (1)...(19): siRNA sense strand
cagcuccacugcacugugu

SEQ ID NO: 630099 - RNA, 19 nt, Homo sapiens
  misc_RNA (1)...(19): siRNA sense strand
ccaagagguggcucagaaa

SEQ ID NO: 630100 - RNA, 19 nt, Homo sapiens
  misc_RNA (1)...(19): siRNA sense strand
caagagguggcucagaaau

SEQ ID NO: 630101 - RNA, 19 nt, Homo sapiens
  misc_RNA (1)...(19): siRNA sense strand
cgaaugccuuuucucuuuu

SEQ ID NO: 630102 - RNA, 19 nt, Homo sapiens
  misc_RNA (1)...(19): siRNA sense strand
gacaagaccccaucgaaug

SEQ ID NO: 630103 - RNA, 19 nt, Homo sapiens
  misc_RNA (1)...(19): siRNA sense strand
gguucugccuucuggacaa

SEQ ID NO: 630104 - RNA, 19 nt, Homo sapiens
  misc_RNA (1)...(19): siRNA sense strand
ggacucccacuuccaagag

SEQ ID NO: 630105 - RNA, 19 nt, Homo sapiens
  misc_RNA (1)...(19): siRNA sense strand
aagagguggcucagaaauu

SEQ ID NO: 630106 - RNA, 19 nt, Homo sapiens
  misc_RNA (1)...(19): siRNA sense strand
gagcaaaguccugcacacu

SEQ ID NO: 630107 - RNA, 19 nt, Homo sapiens
  misc_RNA (1)...(19): siRNA sense strand
ggaccugguucugccuucu

SEQ ID NO: 630108 - RNA, 19 nt, Homo sapiens
  misc_RNA (1)...(19): siRNA sense strand
acuagcggaucaaguaugg

SEQ ID NO: 630109 - RNA, 19 nt, Homo sapiens
  misc_RNA (1)...(19): siRNA sense strand
gauguuacccuggcucaac

SEQ ID NO: 630110 - RNA, 19 nt, Homo sapiens
  misc_RNA (1)...(19): siRNA sense strand
gaucaaguauggacacuga

SEQ ID NO: 630111 - RNA, 19 nt, Homo sapiens
  misc_RNA (1)...(19): siRNA sense strand
agagguggcucagaaauuc

SEQ ID NO: 630112 - RNA, 19 nt, Homo sapiens
  misc_RNA (1)...(19): siRNA sense strand
uccaagagguggcucagaa

SEQ ID NO: 630113 - RNA, 19 nt, Homo sapiens
  misc_RNA (1)...(19): siRNA sense strand
gaaugccuuuucucuuuua

SEQ ID NO: 630114 - RNA, 19 nt, Homo sapiens
  misc_RNA (1)...(19): siRNA sense strand
uacccuggcucaacuguau

SEQ ID NO: 630115 - RNA, 19 nt, Homo sapiens
  misc_RNA (1)...(19): siRNA sense strand
ucgaaugccuuuucucuuu

SEQ ID NO: 630116 - RNA, 19 nt, Homo sapiens
  misc_RNA (1)...(19): siRNA sense strand
cagcuccacugcacugugu

SEQ ID NO: 630117 - RNA, 19 nt, Homo sapiens
  misc_RNA (1)...(19): siRNA sense strand
ccaagagguggcucagaaa

SEQ ID NO: 630118 - RNA, 19 nt, Homo sapiens
  misc_RNA (1)...(19): siRNA sense strand
caagagguggcucagaaau

SEQ ID NO: 630119 - RNA, 19 nt, Homo sapiens
  misc_RNA (1)...(19): siRNA sense strand
cgaaugccuuuucucuuuu

SEQ ID NO: 630120 - RNA, 19 nt, Homo sapiens
  misc_RNA (1)...(19): siRNA sense strand
gacaagaccccaucgaaug

SEQ ID NO: 630121 - RNA, 19 nt, Homo sapiens
  misc_RNA (1)...(19): siRNA sense strand
gguucugccuucuggacaa

SEQ ID NO: 630122 - RNA, 19 nt, Homo sapiens
  misc_RNA (1)...(19): siRNA sense strand
ggacucccacuuccaagag

SEQ ID NO: 630123 - RNA, 19 nt, Homo sapiens
  misc_RNA (1)...(19): siRNA sense strand
aagagguggcucagaaauu

SEQ ID NO: 630124 - RNA, 19 nt, Homo sapiens
  misc_RNA (1)...(19): siRNA sense strand
gagcaaaguccugcacacu

SEQ ID NO: 630125 - RNA, 19 nt, Homo sapiens
  misc_RNA (1)...(19): siRNA sense strand
ggaccugguucugccuucu

SEQ ID NO: 630126 - RNA, 19 nt, Homo sapiens
  misc_RNA (1)...(19): siRNA sense strand
acuagcggaucaaguaugg

SEQ ID NO: 630127 - RNA, 19 nt, Homo sapiens
  misc_RNA (1)...(19): siRNA sense strand
gauguuacccuggcucaac

SEQ ID NO: 630128 - RNA, 19 nt, Homo sapiens
  misc_RNA (1)...(19): siRNA sense strand
gaucaaguauggacacuga

SEQ ID NO: 630129 - RNA, 19 nt, Homo sapiens
  misc_RNA (1)...(19): siRNA sense strand
agagguggcucagaaauuc

SEQ ID NO: 630130 - RNA, 19 nt, Homo sapiens
  misc_RNA (1)...(19): siRNA sense strand
uccaagagguggcucagaa

SEQ ID NO: 630131 - RNA, 19 nt, Homo sapiens
  misc_RNA (1)...(19): siRNA sense strand
gaaugccuuuucucuuuua

SEQ ID NO: 630132 - RNA, 19 nt, Homo sapiens
  misc_RNA (1)...(19): siRNA sense strand
uacccuggcucaacuguau

SEQ ID NO: 630133 - RNA, 19 nt, Homo sapiens
  misc_RNA (1)...(19): siRNA sense strand
ucgaaugccuuuucucuuu

SEQ ID NO: 630134 - RNA, 19 nt, Homo sapiens
  misc_RNA (1)...(19): siRNA sense strand
cagcuccacugcacugugu

SEQ ID NO: 630135 - RNA, 19 nt, Homo sapiens
  misc_RNA (1)...(19): siRNA sense strand
ccaagagguggcucagaaa

SEQ ID NO: 630136 - RNA, 19 nt, Homo sapiens
  misc_RNA (1)...(19): siRNA sense strand
caagagguggcucagaaau

SEQ ID NO: 630137 - RNA, 19 nt, Homo sapiens
  misc_RNA (1)...(19): siRNA sense strand
cgaaugccuuuucucuuuu

SEQ ID NO: 630138 - RNA, 19 nt, Homo sapiens
  misc_RNA (1)...(19): siRNA sense strand
gacaagaccccaucgaaug

SEQ ID NO: 630139 - RNA, 19 nt, Homo sapiens
  misc_RNA (1)...(19): siRNA sense strand
gguucugccuucuggacaa

SEQ ID NO: 630140 - RNA, 19 nt, Homo sapiens
  misc_RNA (1)...(19): siRNA sense strand
ggacucccacuuccaagag

SEQ ID NO: 630141 - RNA, 19 nt, Homo sapiens
  misc_RNA (1)...(19): siRNA sense strand
aagagguggcucagaaauu

SEQ ID NO: 630142 - RNA, 19 nt, Homo sapiens
  misc_RNA (1)...(19): siRNA sense strand
gagcaaaguccugcacacu

SEQ ID NO: 630143 - RNA, 19 nt, Homo sapiens
  misc_RNA (1)...(19): siRNA sense strand
ggaccugguucugccuucu

SEQ ID NO: 630144 - RNA, 19 nt, Homo sapiens
  misc_RNA (1)...(19): siRNA sense strand
acuagcggaucaaguaugg

SEQ ID NO: 630145 - RNA, 19 nt, Homo sapiens
  misc_RNA (1)...(19): siRNA sense strand
gauguuacccuggcucaac

SEQ ID NO: 630146 - RNA, 19 nt, Homo sapiens
  misc_RNA (1)...(19): siRNA sense strand
gaucaaguauggacacuga

SEQ ID NO: 630147 - RNA, 19 nt, Homo sapiens
  misc_RNA (1)...(19): siRNA sense strand
agagguggcucagaaauuc

SEQ ID NO: 630148 - RNA, 19 nt, Homo sapiens
  misc_RNA (1)...(19): siRNA sense strand
uccaagagguggcucagaa

SEQ ID NO: 630149 - RNA, 19 nt, Homo sapiens
  misc_RNA (1)...(19): siRNA sense strand
gaaugccuuuucucuuuua

SEQ ID NO: 630150 - RNA, 19 nt, Homo sapiens
  misc_RNA (1)...(19): siRNA sense strand
uacccuggcucaacuguau

SEQ ID NO: 630151 - RNA, 19 nt, Homo sapiens
  misc_RNA (1)...(19): siRNA sense strand
ucgaaugccuuuucucuuu

SEQ ID NO: 630152 - RNA, 19 nt, Homo sapiens
  misc_RNA (1)...(19): siRNA sense strand
cagcuccacugcacugugu

SEQ ID NO: 630153 - RNA, 19 nt, Homo sapiens
  misc_RNA (1)...(19): siRNA sense strand
ccaagagguggcucagaaa

SEQ ID NO: 630154 - RNA, 19 nt, Homo sapiens
  misc_RNA (1)...(19): siRNA sense strand
caagagguggcucagaaau

SEQ ID NO: 630155 - RNA, 19 nt, Homo sapiens
  misc_RNA (1)...(19): siRNA sense strand
cgaaugccuuuucucuuuu

SEQ ID NO: 630156 - RNA, 19 nt, Homo sapiens
  misc_RNA (1)...(19): siRNA sense strand
gacaagaccccaucgaaug

SEQ ID NO: 630157 - RNA, 19 nt, Homo sapiens
  misc_RNA (1)...(19): siRNA sense strand
gguucugccuucuggacaa

SEQ ID NO: 630158 - RNA, 19 nt, Homo sapiens
  misc_RNA (1)...(19): siRNA sense strand
ggacucccacuuccaagag

SEQ ID NO: 630159 - RNA, 19 nt, Homo sapiens
  misc_RNA (1)...(19): siRNA sense strand
aagagguggcucagaaauu

SEQ ID NO: 630160 - RNA, 19 nt, Homo sapiens
  misc_RNA (1)...(19): siRNA sense strand
gagcaaaguccugcacacu

SEQ ID NO: 630161 - RNA, 19 nt, Homo sapiens
  misc_RNA (1)...(19): siRNA sense strand
ggaccugguucugccuucu

SEQ ID NO: 630162 - RNA, 19 nt, Homo sapiens
  misc_RNA (1)...(19): siRNA sense strand
acuagcggaucaaguaugg

SEQ ID NO: 630163 - RNA, 19 nt, Homo sapiens
  misc_RNA (1)...(19): siRNA sense strand
gauguuacccuggcucaac

SEQ ID NO: 630164 - RNA, 19 nt, Homo sapiens
  misc_RNA (1)...(19): siRNA sense strand
gaucaaguauggacacuga

SEQ ID NO: 630165 - RNA, 19 nt, Homo sapiens
  misc_RNA (1)...(19): siRNA sense strand
agagguggcucagaaauuc

SEQ ID NO: 630166 - RNA, 19 nt, Homo sapiens
  misc_RNA (1)...(19): siRNA sense strand
uccaagagguggcucagaa

SEQ ID NO: 630167 - RNA, 19 nt, Homo sapiens
  misc_RNA (1)...(19): siRNA sense strand
gaaugccuuuucucuuuua

SEQ ID NO: 630168 - RNA, 19 nt, Homo sapiens
  misc_RNA (1)...(19): siRNA sense strand
uacccuggcucaacuguau

SEQ ID NO: 630169 - RNA, 19 nt, Homo sapiens
  misc_RNA (1)...(19): siRNA sense strand
ucgaaugccuuuucucuuu

SEQ ID NO: 630170 - RNA, 19 nt, Homo sapiens
  misc_RNA (1)...(19): siRNA sense strand
cagcuccacugcacugugu

SEQ ID NO: 630171 - RNA, 19 nt, Homo sapiens
  misc_RNA (1)...(19): siRNA sense strand
ccaagagguggcucagaaa

SEQ ID NO: 630172 - RNA, 19 nt, Homo sapiens
  misc_RNA (1)...(19): siRNA sense strand
caagagguggcucagaaau

SEQ ID NO: 630173 - RNA, 19 nt, Homo sapiens
  misc_RNA (1)...(19): siRNA sense strand
cgaaugccuuuucucuuuu

SEQ ID NO: 630174 - RNA, 19 nt, Homo sapiens
  misc_RNA (1)...(19): siRNA sense strand
gacaagaccccaucgaaug

SEQ ID NO: 630175 - RNA, 19 nt, Homo sapiens
  misc_RNA (1)...(19): siRNA sense strand
gguucugccuucuggacaa

SEQ ID NO: 630176 - RNA, 19 nt, Homo sapiens
  misc_RNA (1)...(19): siRNA sense strand
ggacucccacuuccaagag

SEQ ID NO: 630177 - RNA, 19 nt, Homo sapiens
  misc_RNA (1)...(19): siRNA sense strand
aagagguggcucagaaauu

SEQ ID NO: 630178 - RNA, 19 nt, Homo sapiens
  misc_RNA (1)...(19): siRNA sense strand
gagcaaaguccugcacacu

SEQ ID NO: 630179 - RNA, 19 nt, Homo sapiens
  misc_RNA (1)...(19): siRNA sense strand
ggaccugguucugccuucu

SEQ ID NO: 630180 - RNA, 19 nt, Homo sapiens
  misc_RNA (1)...(19): siRNA sense strand
acuagcggaucaaguaugg

SEQ ID NO: 630181 - RNA, 19 nt, Homo sapiens
  misc_RNA (1)...(19): siRNA sense strand
gauguuacccuggcucaac

SEQ ID NO: 630182 - RNA, 19 nt, Homo sapiens
  misc_RNA (1)...(19): siRNA sense strand
gaucaaguauggacacuga

SEQ ID NO: 630183 - RNA, 19 nt, Homo sapiens
  misc_RNA (1)...(19): siRNA sense strand
agagguggcucagaaauuc

SEQ ID NO: 630184 - RNA, 19 nt, Homo sapiens
  misc_RNA (1)...(19): siRNA sense strand
uccaagagguggcucagaa

SEQ ID NO: 630185 - RNA, 19 nt, Homo sapiens
  misc_RNA (1)...(19): siRNA sense strand
gaaugccuuuucucuuuua

SEQ ID NO: 630186 - RNA, 19 nt, Homo sapiens
  misc_RNA (1)...(19): siRNA sense strand
uacccuggcucaacuguau

SEQ ID NO: 630187 - RNA, 19 nt, Homo sapiens
  misc_RNA (1)...(19): siRNA sense strand
ucgaaugccuuuucucuuu

SEQ ID NO: 630188 - RNA, 19 nt, Homo sapiens
  misc_RNA (1)...(19): siRNA sense strand
cagcuccacugcacugugu

SEQ ID NO: 630189 - RNA, 19 nt, Homo sapiens
  misc_RNA (1)...(19): siRNA sense strand
ccaagagguggcucagaaa

SEQ ID NO: 630190 - RNA, 19 nt, Homo sapiens
  misc_RNA (1)...(19): siRNA sense strand
caagagguggcucagaaau

SEQ ID NO: 630191 - RNA, 19 nt, Homo sapiens
  misc_RNA (1)...(19): siRNA sense strand
cgaaugccuuuucucuuuu

SEQ ID NO: 630192 - RNA, 19 nt, Homo sapiens
  misc_RNA (1)...(19): siRNA sense strand
gacaagaccccaucgaaug

SEQ ID NO: 630193 - RNA, 19 nt, Homo sapiens
  misc_RNA (1)...(19): siRNA sense strand
gguucugccuucuggacaa

SEQ ID NO: 630194 - RNA, 19 nt, Homo sapiens
  misc_RNA (1)...(19): siRNA sense strand
ggacucccacuuccaagag

SEQ ID NO: 630195 - RNA, 19 nt, Homo sapiens
  misc_RNA (1)...(19): siRNA sense strand
aagagguggcucagaaauu

SEQ ID NO: 630196 - RNA, 19 nt, Homo sapiens
  misc_RNA (1)...(19): siRNA sense strand
gagcaaaguccugcacacu

SEQ ID NO: 630197 - RNA, 19 nt, Homo sapiens
  misc_RNA (1)...(19): siRNA sense strand
ggaccugguucugccuucu

SEQ ID NO: 630198 - RNA, 19 nt, Homo sapiens
  misc_RNA (1)...(19): siRNA sense strand
acuagcggaucaaguaugg

SEQ ID NO: 630199 - RNA, 19 nt, Homo sapiens
  misc_RNA (1)...(19): siRNA sense strand
gauguuacccuggcucaac

SEQ ID NO: 630200 - RNA, 19 nt, Homo sapiens
  misc_RNA (1)...(19): siRNA sense strand
gaucaaguauggacacuga

SEQ ID NO: 630201 - RNA, 19 nt, Homo sapiens
  misc_RNA (1)...(19): siRNA sense strand
agagguggcucagaaauuc

SEQ ID NO: 630202 - RNA, 19 nt, Homo sapiens
  misc_RNA (1)...(19): siRNA sense strand
uccaagagguggcucagaa

SEQ ID NO: 630203 - RNA, 19 nt, Homo sapiens
  misc_RNA (1)...(19): siRNA sense strand
gaaugccuuuucucuuuua

SEQ ID NO: 630204 - RNA, 19 nt, Homo sapiens
  misc_RNA (1)...(19): siRNA sense strand
uacccuggcucaacuguau

SEQ ID NO: 630205 - RNA, 19 nt, Homo sapiens
  misc_RNA (1)...(19): siRNA sense strand
ucgaaugccuuuucucuuu

SEQ ID NO: 630206 - RNA, 19 nt, Homo sapiens
  misc_RNA (1)...(19): siRNA sense strand
cagcuccacugcacugugu

SEQ ID NO: 630207 - RNA, 19 nt, Homo sapiens
  misc_RNA (1)...(19): siRNA sense strand
ccaagagguggcucagaaa

SEQ ID NO: 630208 - RNA, 19 nt, Homo sapiens
  misc_RNA (1)...(19): siRNA sense strand
caagagguggcucagaaau

SEQ ID NO: 630209 - RNA, 19 nt, Homo sapiens
  misc_RNA (1)...(19): siRNA sense strand
cgaaugccuuuucucuuuu

SEQ ID NO: 630210 - RNA, 19 nt, Homo sapiens
  misc_RNA (1)...(19): siRNA sense strand
gacaagaccccaucgaaug

SEQ ID NO: 630211 - RNA, 19 nt, Homo sapiens
  misc_RNA (1)...(19): siRNA sense strand
gguucugccuucuggacaa

SEQ ID NO: 630212 - RNA, 19 nt, Homo sapiens
  misc_RNA (1)...(19): siRNA sense strand
ggacucccacuuccaagag

SEQ ID NO: 630213 - RNA, 19 nt, Homo sapiens
  misc_RNA (1)...(19): siRNA sense strand
aagagguggcucagaaauu

SEQ ID NO: 630214 - RNA, 19 nt, Homo sapiens
  misc_RNA (1)...(19): siRNA sense strand
gagcaaaguccugcacacu

SEQ ID NO: 630215 - RNA, 19 nt, Homo sapiens
  misc_RNA (1)...(19): siRNA sense strand
ggaccugguucugccuucu

SEQ ID NO: 630216 - RNA, 19 nt, Homo sapiens
  misc_RNA (1)...(19): siRNA sense strand
acuagcggaucaaguaugg

SEQ ID NO: 630217 - RNA, 19 nt, Homo sapiens
  misc_RNA (1)...(19): siRNA sense strand
gauguuacccuggcucaac

SEQ ID NO: 630218 - RNA, 19 nt, Homo sapiens
  misc_RNA (1)...(19): siRNA sense strand
gaucaaguauggacacuga

SEQ ID NO: 630219 - RNA, 19 nt, Homo sapiens
  misc_RNA (1)...(19): siRNA sense strand
agagguggcucagaaauuc

SEQ ID NO: 630220 - RNA, 19 nt, Homo sapiens
  misc_RNA (1)...(19): siRNA sense strand
uccaagagguggcucagaa

SEQ ID NO: 630221 - RNA, 19 nt, Homo sapiens
  misc_RNA (1)...(19): siRNA sense strand
gaaugccuuuucucuuuua

SEQ ID NO: 630222 - RNA, 19 nt, Homo sapiens
  misc_RNA (1)...(19): siRNA sense strand
uacccuggcucaacuguau

SEQ ID NO: 630223 - RNA, 19 nt, Homo sapiens
  misc_RNA (1)...(19): siRNA sense strand
ucgaaugccuuuucucuuu

SEQ ID NO: 630224 - RNA, 19 nt, Homo sapiens
  misc_RNA (1)...(19): siRNA sense strand
cagcuccacugcacugugu

SEQ ID NO: 630225 - RNA, 19 nt, Homo sapiens
  misc_RNA (1)...(19): siRNA sense strand
ccaagagguggcucagaaa

SEQ ID NO: 630226 - RNA, 19 nt, Homo sapiens
  misc_RNA (1)...(19): siRNA sense strand
caagagguggcucagaaau

SEQ ID NO: 630227 - RNA, 19 nt, Homo sapiens
  misc_RNA (1)...(19): siRNA sense strand
cgaaugccuuuucucuuuu

SEQ ID NO: 630228 - RNA, 19 nt, Homo sapiens
  misc_RNA (1)...(19): siRNA sense strand
gacaagaccccaucgaaug

SEQ ID NO: 630229 - RNA, 19 nt, Homo sapiens
  misc_RNA (1)...(19): siRNA sense strand
gguucugccuucuggacaa

SEQ ID NO: 630230 - RNA, 19 nt, Homo sapiens
  misc_RNA (1)...(19): siRNA sense strand
ggacucccacuuccaagag

SEQ ID NO: 630231 - RNA, 19 nt, Homo sapiens
  misc_RNA (1)...(19): siRNA sense strand
aagagguggcucagaaauu

SEQ ID NO: 630232 - RNA, 19 nt, Homo sapiens
  misc_RNA (1)...(19): siRNA sense strand
gagcaaaguccugcacacu

SEQ ID NO: 630233 - RNA, 19 nt, Homo sapiens
  misc_RNA (1)...(19): siRNA sense strand
ggaccugguucugccuucu

SEQ ID NO: 630234 - RNA, 19 nt, Homo sapiens
  misc_RNA (1)...(19): siRNA sense strand
acuagcggaucaaguaugg

SEQ ID NO: 630235 - RNA, 19 nt, Homo sapiens
  misc_RNA (1)...(19): siRNA sense strand
gauguuacccuggcucaac

SEQ ID NO: 630236 - RNA, 19 nt, Homo sapiens
  misc_RNA (1)...(19): siRNA sense strand
ugaagaagcuugugcugua

SEQ ID NO: 630237 - RNA, 19 nt, Homo sapiens
  misc_RNA (1)...(19): siRNA sense strand
gcacugaggaugaaaauaa

SEQ ID NO: 630238 - RNA, 19 nt, Homo sapiens
  misc_RNA (1)...(19): siRNA sense strand
ccgagaugcuuaaguguga

SEQ ID NO: 630239 - RNA, 19 nt, Homo sapiens
  misc_RNA (1)...(19): siRNA sense strand
gaaaucugaggccaucauu

SEQ ID NO: 630240 - RNA, 19 nt, Homo sapiens
  misc_RNA (1)...(19): siRNA sense strand
ggcccgagaugcuuaagug

SEQ ID NO: 630241 - RNA, 19 nt, Homo sapiens
  misc_RNA (1)...(19): siRNA sense strand
gaagaagcuugugcuguac

SEQ ID NO: 630242 - RNA, 19 nt, Homo sapiens
  misc_RNA (1)...(19): siRNA sense strand
gcuuaagugugacaaguuc

SEQ ID NO: 630243 - RNA, 19 nt, Homo sapiens
  misc_RNA (1)...(19): siRNA sense strand
gaagaaggaccugaagaag

SEQ ID NO: 630244 - RNA, 19 nt, Homo sapiens
  misc_RNA (1)...(19): siRNA sense strand
agaaggaccugaagaagcu

SEQ ID NO: 630245 - RNA, 19 nt, Homo sapiens
  misc_RNA (1)...(19): siRNA sense strand
gaaaauggcgacaagaaga

SEQ ID NO: 630246 - RNA, 19 nt, Homo sapiens
  misc_RNA (1)...(19): siRNA sense strand
agaagaaggaccugaagaa

SEQ ID NO: 630247 - RNA, 19 nt, Homo sapiens
  misc_RNA (1)...(19): siRNA sense strand
gcgagccggucaugcaguu

SEQ ID NO: 630248 - RNA, 19 nt, Homo sapiens
  misc_RNA (1)...(19): siRNA sense strand
ugacggccauccacaagug

SEQ ID NO: 630249 - RNA, 19 nt, Homo sapiens
  misc_RNA (1)...(19): siRNA sense strand
aaucugaggccaucauuga

SEQ ID NO: 630250 - RNA, 19 nt, Homo sapiens
  misc_RNA (1)...(19): siRNA sense strand
caacgugggcuacaagaag

SEQ ID NO: 630251 - RNA, 19 nt, Homo sapiens
  misc_RNA (1)...(19): siRNA sense strand
ucaagaagaaggaccugaa

SEQ ID NO: 630252 - RNA, 19 nt, Homo sapiens
  misc_RNA (1)...(19): siRNA sense strand
gcaaggugaagagccagua

SEQ ID NO: 630253 - RNA, 19 nt, Homo sapiens
  misc_RNA (1)...(19): siRNA sense strand
gaguuugcacugaggauga

SEQ ID NO: 630254 - RNA, 19 nt, Homo sapiens
  misc_RNA (1)...(19): siRNA sense strand
gaagaagccccugaaguug

SEQ ID NO: 630255 - RNA, 19 nt, Homo sapiens
  misc_RNA (1)...(19): siRNA sense strand
agaagaagccccugaaguu

SEQ ID NO: 630256 - RNA, 19 nt, Homo sapiens
  misc_RNA (1)...(19): siRNA sense strand
caaccucagccaccacuuc

SEQ ID NO: 630257 - RNA, 19 nt, Homo sapiens
  misc_RNA (1)...(19): siRNA sense strand
aaaagaaaauggcgacaag

SEQ ID NO: 630258 - RNA, 19 nt, Homo sapiens
  misc_RNA (1)...(19): siRNA sense strand
caagaagaaggaccugaag

SEQ ID NO: 630259 - RNA, 19 nt, Homo sapiens
  misc_RNA (1)...(19): siRNA sense strand
aacgugggcuacaagaaga

SEQ ID NO: 630260 - RNA, 19 nt, Homo sapiens
  misc_RNA (1)...(19): siRNA sense strand
caucauugaacaucucugu

SEQ ID NO: 630261 - RNA, 19 nt, Homo sapiens
  misc_RNA (1)...(19): siRNA sense strand
ggugaagagccaguacuug

SEQ ID NO: 630262 - RNA, 19 nt, Homo sapiens
  misc_RNA (1)...(19): siRNA sense strand
gcaguucuucggcuucuac

SEQ ID NO: 630263 - RNA, 19 nt, Homo sapiens
  misc_RNA (1)...(19): siRNA sense strand
gugcuguaccugaagaaug

SEQ ID NO: 630264 - RNA, 19 nt, Homo sapiens
  misc_RNA (1)...(19): siRNA sense strand
ggccaucauugaacaucuc

SEQ ID NO: 630265 - RNA, 19 nt, Homo sapiens
  misc_RNA (1)...(19): siRNA sense strand
ugcuguaccugaagaaugg

SEQ ID NO: 630266 - RNA, 19 nt, Homo sapiens
  misc_RNA (1)...(19): siRNA sense strand
gccagcgaguuugcacuga

SEQ ID NO: 630267 - RNA, 19 nt, Homo sapiens
  misc_RNA (1)...(19): siRNA sense strand
ucucugugccagcgaguuu

SEQ ID NO: 630268 - RNA, 19 nt, Homo sapiens
  misc_RNA (1)...(19): siRNA sense strand
agccaccacuuccucauca

SEQ ID NO: 630269 - RNA, 19 nt, Homo sapiens
  misc_RNA (1)...(19): siRNA sense strand
gaagagcagugguggaaug

SEQ ID NO: 630270 - RNA, 19 nt, Homo sapiens
  misc_RNA (1)...(19): siRNA sense strand
aauaggagaucaagaguuu

SEQ ID NO: 630271 - RNA, 19 nt, Homo sapiens
  misc_RNA (1)...(19): siRNA sense strand
gaaaggagacaucuugaga

SEQ ID NO: 630272 - RNA, 19 nt, Homo sapiens
  misc_RNA (1)...(19): siRNA sense strand
ggagacaucuugagaaucc

SEQ ID NO: 630273 - RNA, 19 nt, Homo sapiens
  misc_RNA (1)...(19): siRNA sense strand
ggacagcgaaggcaagaga

SEQ ID NO: 630274 - RNA, 19 nt, Homo sapiens
  misc_RNA (1)...(19): siRNA sense strand
gcaggguaguggagugauu

SEQ ID NO: 630275 - RNA, 19 nt, Homo sapiens
  misc_RNA (1)...(19): siRNA sense strand
ucccuuacgucgagaagua

SEQ ID NO: 630276 - RNA, 19 nt, Homo sapiens
  misc_RNA (1)...(19): siRNA sense strand
gaauaggagaucaagaguu

SEQ ID NO: 630277 - RNA, 19 nt, Homo sapiens
  misc_RNA (1)...(19): siRNA sense strand
uaaugggaaugaugaggaa

SEQ ID NO: 630278 - RNA, 19 nt, Homo sapiens
  misc_RNA (1)...(19): siRNA sense strand
aaggagacaucuugagaau

SEQ ID NO: 630279 - RNA, 19 nt, Homo sapiens
  misc_RNA (1)...(19): siRNA sense strand
ggaaugaugaggaagaucu

SEQ ID NO: 630280 - RNA, 19 nt, Homo sapiens
  misc_RNA (1)...(19): siRNA sense strand
cgagcccucuuugacuuua

SEQ ID NO: 630281 - RNA, 19 nt, Homo sapiens
  misc_RNA (1)...(19): siRNA sense strand
ggaugauuccagucccuua

SEQ ID NO: 630282 - RNA, 19 nt, Homo sapiens
  misc_RNA (1)...(19): siRNA sense strand
ggcaagagagggaugauuc

SEQ ID NO: 630283 - RNA, 19 nt, Homo sapiens
  misc_RNA (1)...(19): siRNA sense strand
gaaccaguuuccagaucca

SEQ ID NO: 630284 - RNA, 19 nt, Homo sapiens
  misc_RNA (1)...(19): siRNA sense strand
ggacacuacaacguugaua

SEQ ID NO: 630285 - RNA, 19 nt, Homo sapiens
  misc_RNA (1)...(19): siRNA sense strand
gagcccucuuugacuuuaa

SEQ ID NO: 630286 - RNA, 19 nt, Homo sapiens
  misc_RNA (1)...(19): siRNA sense strand
cugcuuuacuggaauucua

SEQ ID NO: 630287 - RNA, 19 nt, Homo sapiens
  misc_RNA (1)...(19): siRNA sense strand
gguaguggagugauucuca

SEQ ID NO: 630288 - RNA, 19 nt, Homo sapiens
  misc_RNA (1)...(19): siRNA sense strand
gaaggcaagagagggauga

SEQ ID NO: 630289 - RNA, 19 nt, Homo sapiens
  misc_RNA (1)...(19): siRNA sense strand
uagaaccaguuuccagauc

SEQ ID NO: 630290 - RNA, 19 nt, Homo sapiens
  misc_RNA (1)...(19): siRNA sense strand
aaaggagacaucuugagaa

SEQ ID NO: 630291 - RNA, 19 nt, Homo sapiens
  misc_RNA (1)...(19): siRNA sense strand
acacuacaacguugauaga

SEQ ID NO: 630292 - RNA, 19 nt, Homo sapiens
  misc_RNA (1)...(19): siRNA sense strand
gcgcgucucccacuacauc

SEQ ID NO: 630293 - RNA, 19 nt, Homo sapiens
  misc_RNA (1)...(19): siRNA sense strand
gaaugaugaggaagaucuu

SEQ ID NO: 630294 - RNA, 19 nt, Homo sapiens
  misc_RNA (1)...(19): siRNA sense strand
ccgaauaggagaucaagag

SEQ ID NO: 630295 - RNA, 19 nt, Homo sapiens
  misc_RNA (1)...(19): siRNA sense strand
ggaggaggcggaguaugug

SEQ ID NO: 630296 - RNA, 19 nt, Homo sapiens
  misc_RNA (1)...(19): siRNA sense strand
gcaggaggaggcggaguau

SEQ ID NO: 630297 - RNA, 19 nt, Homo sapiens
  misc_RNA (1)...(19): siRNA sense strand
gaggacagcgaaggcaaga

SEQ ID NO: 630298 - RNA, 19 nt, Homo sapiens
  misc_RNA (1)...(19): siRNA sense strand
gcgagcccucuuugacuuu

SEQ ID NO: 630299 - RNA, 19 nt, Homo sapiens
  misc_RNA (1)...(19): siRNA sense strand
uugauucauugccugcuuu

SEQ ID NO: 630300 - RNA, 19 nt, Homo sapiens
  misc_RNA (1)...(19): siRNA sense strand
guaugugcgagcccucuuu

SEQ ID NO: 630301 - RNA, 19 nt, Homo sapiens
  misc_RNA (1)...(19): siRNA sense strand
gacacuacaacguugauag

SEQ ID NO: 630302 - RNA, 19 nt, Homo sapiens
  misc_RNA (1)...(19): siRNA sense strand
aggaggaggcggaguaugu

SEQ ID NO: 630303 - RNA, 19 nt, Homo sapiens
  misc_RNA (1)...(19): siRNA sense strand
ugcgagcccucuuugacuu

SEQ ID NO: 630304 - RNA, 19 nt, Homo sapiens
  misc_RNA (1)...(19): siRNA sense strand
ugacuuuaaugggaaugau

SEQ ID NO: 630305 - RNA, 19 nt, Homo sapiens
  misc_RNA (1)...(19): siRNA sense strand
cugaagagcagugguggaa

SEQ ID NO: 630306 - RNA, 19 nt, Homo sapiens
  misc_RNA (1)...(19): siRNA sense strand
cgaauaggagaucaagagu

SEQ ID NO: 630307 - RNA, 19 nt, Homo sapiens
  misc_RNA (1)...(19): siRNA sense strand
gaagagcagugguggaaug

SEQ ID NO: 630308 - RNA, 19 nt, Homo sapiens
  misc_RNA (1)...(19): siRNA sense strand
aauaggagaucaagaguuu

SEQ ID NO: 630309 - RNA, 19 nt, Homo sapiens
  misc_RNA (1)...(19): siRNA sense strand
gaaaggagacaucuugaga

SEQ ID NO: 630310 - RNA, 19 nt, Homo sapiens
  misc_RNA (1)...(19): siRNA sense strand
ggagacaucuugagaaucc

SEQ ID NO: 630311 - RNA, 19 nt, Homo sapiens
  misc_RNA (1)...(19): siRNA sense strand
ggaggucggugagcuggua

SEQ ID NO: 630312 - RNA, 19 nt, Homo sapiens
  misc_RNA (1)...(19): siRNA sense strand
ggacagcgaaggcaagaga

SEQ ID NO: 630313 - RNA, 19 nt, Homo sapiens
  misc_RNA (1)...(19): siRNA sense strand
gcaggguaguggagugauu

SEQ ID NO: 630314 - RNA, 19 nt, Homo sapiens
  misc_RNA (1)...(19): siRNA sense strand
cgaggucacuucccauuca

SEQ ID NO: 630315 - RNA, 19 nt, Homo sapiens
  misc_RNA (1)...(19): siRNA sense strand
ucccuuacgucgagaagua

SEQ ID NO: 630316 - RNA, 19 nt, Homo sapiens
  misc_RNA (1)...(19): siRNA sense strand
gaauaggagaucaagaguu

SEQ ID NO: 630317 - RNA, 19 nt, Homo sapiens
  misc_RNA (1)...(19): siRNA sense strand
uaaugggaaugaugaggaa

SEQ ID NO: 630318 - RNA, 19 nt, Homo sapiens
  misc_RNA (1)...(19): siRNA sense strand
aaggagacaucuugagaau

SEQ ID NO: 630319 - RNA, 19 nt, Homo sapiens
  misc_RNA (1)...(19): siRNA sense strand
ggaaugaugaggaagaucu

SEQ ID NO: 630320 - RNA, 19 nt, Homo sapiens
  misc_RNA (1)...(19): siRNA sense strand
ggugagcugguaaagguua

SEQ ID NO: 630321 - RNA, 19 nt, Homo sapiens
  misc_RNA (1)...(19): siRNA sense strand
cgagcccucuuugacuuua

SEQ ID NO: 630322 - RNA, 19 nt, Homo sapiens
  misc_RNA (1)...(19): siRNA sense strand
ggaugauuccagucccuua

SEQ ID NO: 630323 - RNA, 19 nt, Homo sapiens
  misc_RNA (1)...(19): siRNA sense strand
ggcaagagagggaugauuc

SEQ ID NO: 630324 - RNA, 19 nt, Homo sapiens
  misc_RNA (1)...(19): siRNA sense strand
ucggugagcugguaaaggu

SEQ ID NO: 630325 - RNA, 19 nt, Homo sapiens
  misc_RNA (1)...(19): siRNA sense strand
gaaccaguuuccagaucca

SEQ ID NO: 630326 - RNA, 19 nt, Homo sapiens
  misc_RNA (1)...(19): siRNA sense strand
ggacacuacaacguugaua

SEQ ID NO: 630327 - RNA, 19 nt, Homo sapiens
  misc_RNA (1)...(19): siRNA sense strand
gagcccucuuugacuuuaa

SEQ ID NO: 630328 - RNA, 19 nt, Homo sapiens
  misc_RNA (1)...(19): siRNA sense strand
cugcuuuacuggaauucua

SEQ ID NO: 630329 - RNA, 19 nt, Homo sapiens
  misc_RNA (1)...(19): siRNA sense strand
gguaguggagugauucuca

SEQ ID NO: 630330 - RNA, 19 nt, Homo sapiens
  misc_RNA (1)...(19): siRNA sense strand
gaaggcaagagagggauga

SEQ ID NO: 630331 - RNA, 19 nt, Homo sapiens
  misc_RNA (1)...(19): siRNA sense strand
uagaaccaguuuccagauc

SEQ ID NO: 630332 - RNA, 19 nt, Homo sapiens
  misc_RNA (1)...(19): siRNA sense strand
gaaucccgaugaggacuuc

SEQ ID NO: 630333 - RNA, 19 nt, Homo sapiens
  misc_RNA (1)...(19): siRNA sense strand
aaaggagacaucuugagaa

SEQ ID NO: 630334 - RNA, 19 nt, Homo sapiens
  misc_RNA (1)...(19): siRNA sense strand
guuacgaagauuaauguga

SEQ ID NO: 630335 - RNA, 19 nt, Homo sapiens
  misc_RNA (1)...(19): siRNA sense strand
acacuacaacguugauaga

SEQ ID NO: 630336 - RNA, 19 nt, Homo sapiens
  misc_RNA (1)...(19): siRNA sense strand
gcgcgucucccacuacauc

SEQ ID NO: 630337 - RNA, 19 nt, Homo sapiens
  misc_RNA (1)...(19): siRNA sense strand
gaaugaugaggaagaucuu

SEQ ID NO: 630338 - RNA, 19 nt, Homo sapiens
  misc_RNA (1)...(19): siRNA sense strand
ccgaauaggagaucaagag

SEQ ID NO: 630339 - RNA, 19 nt, Homo sapiens
  misc_RNA (1)...(19): siRNA sense strand
ggaggaggcggaguaugug

SEQ ID NO: 630340 - RNA, 19 nt, Homo sapiens
  misc_RNA (1)...(19): siRNA sense strand
gcaggaggaggcggaguau

SEQ ID NO: 630341 - RNA, 19 nt, Homo sapiens
  misc_RNA (1)...(19): siRNA sense strand
gaggacagcgaaggcaaga

SEQ ID NO: 630342 - RNA, 19 nt, Homo sapiens
  misc_RNA (1)...(19): siRNA sense strand
gcgagcccucuuugacuuu

SEQ ID NO: 630343 - RNA, 19 nt, Homo sapiens
  misc_RNA (1)...(19): siRNA sense strand
guaugugcgagcccucuuu

SEQ ID NO: 630344 - RNA, 19 nt, Homo sapiens
  misc_RNA (1)...(19): siRNA sense strand
uugauucauugccugcuuu

SEQ ID NO: 630345 - RNA, 19 nt, Homo sapiens
  misc_RNA (1)...(19): siRNA sense strand
gacacuacaacguugauag

SEQ ID NO: 630346 - RNA, 19 nt, Homo sapiens
  misc_RNA (1)...(19): siRNA sense strand
aggaggaggcggaguaugu

SEQ ID NO: 630347 - RNA, 19 nt, Homo sapiens
  misc_RNA (1)...(19): siRNA sense strand
ucaacagaaucccgaugag

SEQ ID NO: 630348 - RNA, 19 nt, Homo sapiens
  misc_RNA (1)...(19): siRNA sense strand
ugcgagcccucuuugacuu

SEQ ID NO: 630349 - RNA, 19 nt, Homo sapiens
  misc_RNA (1)...(19): siRNA sense strand
cgaauaggagaucaagagu

SEQ ID NO: 630350 - RNA, 19 nt, Homo sapiens
  misc_RNA (1)...(19): siRNA sense strand
cugaagagcagugguggaa

SEQ ID NO: 630351 - RNA, 19 nt, Homo sapiens
  misc_RNA (1)...(19): siRNA sense strand
ugacuuuaaugggaaugau

SEQ ID NO: 630352 - RNA, 19 nt, Homo sapiens
  misc_RNA (1)...(19): siRNA sense strand
gaacaugucuccugaucua

SEQ ID NO: 630353 - RNA, 19 nt, Homo sapiens
  misc_RNA (1)...(19): siRNA sense strand
gaagacucaucuaaaguua

SEQ ID NO: 630354 - RNA, 19 nt, Homo sapiens
  misc_RNA (1)...(19): siRNA sense strand
ggaagugccugucauggua

SEQ ID NO: 630355 - RNA, 19 nt, Homo sapiens
  misc_RNA (1)...(19): siRNA sense strand
cgacaagacuucaacauga

SEQ ID NO: 630356 - RNA, 19 nt, Homo sapiens
  misc_RNA (1)...(19): siRNA sense strand
gcagauacauccucauaug

SEQ ID NO: 630357 - RNA, 19 nt, Homo sapiens
  misc_RNA (1)...(19): siRNA sense strand
gaaauaagauucgggaaca

SEQ ID NO: 630358 - RNA, 19 nt, Homo sapiens
  misc_RNA (1)...(19): siRNA sense strand
gcagaagacucaucuaaag

SEQ ID NO: 630359 - RNA, 19 nt, Homo sapiens
  misc_RNA (1)...(19): siRNA sense strand
caacccaacuggauuacua

SEQ ID NO: 630360 - RNA, 19 nt, Homo sapiens
  misc_RNA (1)...(19): siRNA sense strand
uggcugaacucaccaaaua

SEQ ID NO: 630361 - RNA, 19 nt, Homo sapiens
  misc_RNA (1)...(19): siRNA sense strand
gcaacuagccugugagauu

SEQ ID NO: 630362 - RNA, 19 nt, Homo sapiens
  misc_RNA (1)...(19): siRNA sense strand
gagcaagaccacauuauaa

SEQ ID NO: 630363 - RNA, 19 nt, Homo sapiens
  misc_RNA (1)...(19): siRNA sense strand
ggagaaaguugaggccuaa

SEQ ID NO: 630364 - RNA, 19 nt, Homo sapiens
  misc_RNA (1)...(19): siRNA sense strand
gagcagaggaaacgaguua

SEQ ID NO: 630365 - RNA, 19 nt, Homo sapiens
  misc_RNA (1)...(19): siRNA sense strand
ugggagauguugccuauua

SEQ ID NO: 630366 - RNA, 19 nt, Homo sapiens
  misc_RNA (1)...(19): siRNA sense strand
gcaagaccacauuauaaua

SEQ ID NO: 630367 - RNA, 19 nt, Homo sapiens
  misc_RNA (1)...(19): siRNA sense strand
ggagcaagaccacauuaua

SEQ ID NO: 630368 - RNA, 19 nt, Homo sapiens
  misc_RNA (1)...(19): siRNA sense strand
guauaaagcuuucacuuac

SEQ ID NO: 630369 - RNA, 19 nt, Homo sapiens
  misc_RNA (1)...(19): siRNA sense strand
aaggagaacuugaagagua

SEQ ID NO: 630370 - RNA, 19 nt, Homo sapiens
  misc_RNA (1)...(19): siRNA sense strand
uacagcagauugcagauua

SEQ ID NO: 630371 - RNA, 19 nt, Homo sapiens
  misc_RNA (1)...(19): siRNA sense strand
gaauucaacugcagaaggu

SEQ ID NO: 630372 - RNA, 19 nt, Homo sapiens
  misc_RNA (1)...(19): siRNA sense strand
gaugaaagcagaagacuca

SEQ ID NO: 630373 - RNA, 19 nt, Homo sapiens
  misc_RNA (1)...(19): siRNA sense strand
gcaaggaugauaugcauga

SEQ ID NO: 630374 - RNA, 19 nt, Homo sapiens
  misc_RNA (1)...(19): siRNA sense strand
gauaagccaccuucuacua

SEQ ID NO: 630375 - RNA, 19 nt, Homo sapiens
  misc_RNA (1)...(19): siRNA sense strand
gggcacaccuggcaaauac

SEQ ID NO: 630376 - RNA, 19 nt, Homo sapiens
  misc_RNA (1)...(19): siRNA sense strand
ccacaacccaacuggauua

SEQ ID NO: 630377 - RNA, 19 nt, Homo sapiens
  misc_RNA (1)...(19): siRNA sense strand
caacuagccugugagauuc

SEQ ID NO: 630378 - RNA, 19 nt, Homo sapiens
  misc_RNA (1)...(19): siRNA sense strand
guaaauggcaaggaugaua

SEQ ID NO: 630379 - RNA, 19 nt, Homo sapiens
  misc_RNA (1)...(19): siRNA sense strand
gauugcagauuacaucaug

SEQ ID NO: 630380 - RNA, 19 nt, Homo sapiens
  misc_RNA (1)...(19): siRNA sense strand
gugaguagguuaagcacaa

SEQ ID NO: 630381 - RNA, 19 nt, Homo sapiens
  misc_RNA (1)...(19): siRNA sense strand
gaacuugaagaguauaaga

SEQ ID NO: 630382 - RNA, 19 nt, Homo sapiens
  misc_RNA (1)...(19): siRNA sense strand
gcagcuguauccuccauga

SEQ ID NO: 630383 - RNA, 19 nt, Homo sapiens
  misc_RNA (1)...(19): siRNA sense strand
ccaauucuuucucggguuu

SEQ ID NO: 630384 - RNA, 19 nt, Homo sapiens
  misc_RNA (1)...(19): siRNA sense strand
gaacaggaggagagaauuc

SEQ ID NO: 630385 - RNA, 19 nt, Homo sapiens
  misc_RNA (1)...(19): siRNA sense strand
gguaguaaauggcaaggau

SEQ ID NO: 630386 - RNA, 19 nt, Homo sapiens
  misc_RNA (1)...(19): siRNA sense strand
gacaagacuucaacaugau

SEQ ID NO: 630387 - RNA, 19 nt, Homo sapiens
  misc_RNA (1)...(19): siRNA sense strand
uuacaggcauccucucauu

SEQ ID NO: 630388 - RNA, 19 nt, Homo sapiens
  misc_RNA (1)...(19): siRNA sense strand
ccagggaaguaccaauuug

SEQ ID NO: 630389 - RNA, 19 nt, Homo sapiens
  misc_RNA (1)...(19): siRNA sense strand
ccaaauacuuacaugaaag

SEQ ID NO: 630390 - RNA, 19 nt, Homo sapiens
  misc_RNA (1)...(19): siRNA sense strand
ugaacucaccaaauacuua

SEQ ID NO: 630391 - RNA, 19 nt, Homo sapiens
  misc_RNA (1)...(19): siRNA sense strand
gcacaaguacaaccauaga

SEQ ID NO: 630392 - RNA, 19 nt, Homo sapiens
  misc_RNA (1)...(19): siRNA sense strand
cagcaugccucacaaagag

SEQ ID NO: 630393 - RNA, 19 nt, Homo sapiens
  misc_RNA (1)...(19): siRNA sense strand
caacuggauuacuagcauu

SEQ ID NO: 630394 - RNA, 19 nt, Homo sapiens
  misc_RNA (1)...(19): siRNA sense strand
gaaagcagaagacucaucu

SEQ ID NO: 630395 - RNA, 19 nt, Homo sapiens
  misc_RNA (1)...(19): siRNA sense strand
ugaggacucuggacaacuu

SEQ ID NO: 630396 - RNA, 19 nt, Homo sapiens
  misc_RNA (1)...(19): siRNA sense strand
gugcagauacauccucaua

SEQ ID NO: 630397 - RNA, 19 nt, Homo sapiens
  misc_RNA (1)...(19): siRNA sense strand
gaagcuacagccuccaauu

SEQ ID NO: 630398 - RNA, 19 nt, Homo sapiens
  misc_RNA (1)...(19): siRNA sense strand
gaaaacaucgagauuacua

SEQ ID NO: 630399 - RNA, 19 nt, Homo sapiens
  misc_RNA (1)...(19): siRNA sense strand
gaaaucccagcaacuguga

SEQ ID NO: 630400 - RNA, 19 nt, Homo sapiens
  misc_RNA (1)...(19): siRNA sense strand
gagauguugccuauuauga

SEQ ID NO: 630401 - RNA, 19 nt, Homo sapiens
  misc_RNA (1)...(19): siRNA sense strand
gagagaagccuaggcacaa

SEQ ID NO: 630402 - RNA, 19 nt, Homo sapiens
  misc_RNA (1)...(19): siRNA sense strand
caagagugauguggaaauc

SEQ ID NO: 630403 - RNA, 19 nt, Homo sapiens
  misc_RNA (1)...(19): siRNA sense strand
gaauaaguaaggagcaaga

SEQ ID NO: 630404 - RNA, 19 nt, Homo sapiens
  misc_RNA (1)...(19): siRNA sense strand
gaaguccugucaccugaag

SEQ ID NO: 630405 - RNA, 19 nt, Homo sapiens
  misc_RNA (1)...(19): siRNA sense strand
aagcacaaguacaaccaua

SEQ ID NO: 630406 - RNA, 19 nt, Homo sapiens
  misc_RNA (1)...(19): siRNA sense strand
ugauaugcaugauguugaa

SEQ ID NO: 630407 - RNA, 19 nt, Homo sapiens
  misc_RNA (1)...(19): siRNA sense strand
cgaaugagguacuagaaaa

SEQ ID NO: 630408 - RNA, 19 nt, Homo sapiens
  misc_RNA (1)...(19): siRNA sense strand
gccacucucuccucucaaa

SEQ ID NO: 630409 - RNA, 19 nt, Homo sapiens
  misc_RNA (1)...(19): siRNA sense strand
gcagauugcagauuacauc

SEQ ID NO: 630410 - RNA, 19 nt, Homo sapiens
  misc_RNA (1)...(19): siRNA sense strand
ugugggauccuuccaauuu

SEQ ID NO: 630411 - RNA, 19 nt, Homo sapiens
  misc_RNA (1)...(19): siRNA sense strand
uauaauaggagaagugguu

SEQ ID NO: 630412 - RNA, 19 nt, Homo sapiens
  misc_RNA (1)...(19): siRNA sense strand
aagaacagaugaagaaagg

SEQ ID NO: 630413 - RNA, 19 nt, Homo sapiens
  misc_RNA (1)...(19): siRNA sense strand
gacaaucgaacguaaacaa

SEQ ID NO: 630414 - RNA, 19 nt, Homo sapiens
  misc_RNA (1)...(19): siRNA sense strand
agaggacaaucgaacguaa

SEQ ID NO: 630415 - RNA, 19 nt, Homo sapiens
  misc_RNA (1)...(19): siRNA sense strand
uaagccaccuucuacuaug

SEQ ID NO: 630416 - RNA, 19 nt, Homo sapiens
  misc_RNA (1)...(19): siRNA sense strand
gggagauguugccuauuau

SEQ ID NO: 630417 - RNA, 19 nt, Homo sapiens
  misc_RNA (1)...(19): siRNA sense strand
gaccagggaaguaccaauu

SEQ ID NO: 630418 - RNA, 19 nt, Homo sapiens
  misc_RNA (1)...(19): siRNA sense strand
ugcaugauguugaagauga

SEQ ID NO: 630419 - RNA, 19 nt, Homo sapiens
  misc_RNA (1)...(19): siRNA sense strand
gggaaguaccaauuugaaa

SEQ ID NO: 630420 - RNA, 19 nt, Homo sapiens
  misc_RNA (1)...(19): siRNA sense strand
caccaaauacuuacaugaa

SEQ ID NO: 630421 - RNA, 19 nt, Homo sapiens
  misc_RNA (1)...(19): siRNA sense strand
gaggaggcuuuucauuaua

SEQ ID NO: 630422 - RNA, 19 nt, Homo sapiens
  misc_RNA (1)...(19): siRNA sense strand
gcuguauccuccaugaaau

SEQ ID NO: 630423 - RNA, 19 nt, Homo sapiens
  misc_RNA (1)...(19): siRNA sense strand
caaaaucgccauccaagaa

SEQ ID NO: 630424 - RNA, 19 nt, Homo sapiens
  misc_RNA (1)...(19): siRNA sense strand
cuucuacuaugcaauuuga

SEQ ID NO: 630425 - RNA, 19 nt, Homo sapiens
  misc_RNA (1)...(19): siRNA sense strand
gaaaacagcaggaccacaa

SEQ ID NO: 630426 - RNA, 19 nt, Homo sapiens
  misc_RNA (1)...(19): siRNA sense strand
uaaaguuagugguggaaca

SEQ ID NO: 630427 - RNA, 19 nt, Homo sapiens
  misc_RNA (1)...(19): siRNA sense strand
aagcagaagacucaucuaa

SEQ ID NO: 630428 - RNA, 19 nt, Homo sapiens
  misc_RNA (1)...(19): siRNA sense strand
gaaugugccugaggagucu

SEQ ID NO: 630429 - RNA, 19 nt, Homo sapiens
  misc_RNA (1)...(19): siRNA sense strand
guccugauguuaagugugu

SEQ ID NO: 630430 - RNA, 19 nt, Homo sapiens
  misc_RNA (1)...(19): siRNA sense strand
cgagauuacuauuaagucu

SEQ ID NO: 630431 - RNA, 19 nt, Homo sapiens
  misc_RNA (1)...(19): siRNA sense strand
uaaacaacaaggccuagaa

SEQ ID NO: 630432 - RNA, 19 nt, Homo sapiens
  misc_RNA (1)...(19): siRNA sense strand
aaucgaacguaaacaacaa

SEQ ID NO: 630433 - RNA, 19 nt, Homo sapiens
  misc_RNA (1)...(19): siRNA sense strand
gaaccaaaaucacguggau

SEQ ID NO: 630434 - RNA, 19 nt, Homo sapiens
  misc_RNA (1)...(19): siRNA sense strand
gcacuuggagaaacauuag

SEQ ID NO: 630435 - RNA, 19 nt, Homo sapiens
  misc_RNA (1)...(19): siRNA sense strand
guucugggaccaaguugua

SEQ ID NO: 630436 - RNA, 19 nt, Homo sapiens
  misc_RNA (1)...(19): siRNA sense strand
ccaacuggauuacuagcau

SEQ ID NO: 630437 - RNA, 19 nt, Homo sapiens
  misc_RNA (1)...(19): siRNA sense strand
acaaguacaaccauagaaa

SEQ ID NO: 630438 - RNA, 19 nt, Homo sapiens
  misc_RNA (1)...(19): siRNA sense strand
gaugauaugcaugauguug

SEQ ID NO: 630439 - RNA, 19 nt, Homo sapiens
  misc_RNA (1)...(19): siRNA sense strand
gaagacuuggaaugccuua

SEQ ID NO: 630440 - RNA, 19 nt, Homo sapiens
  misc_RNA (1)...(19): siRNA sense strand
uaaauggcaaggaugauau

SEQ ID NO: 630441 - RNA, 19 nt, Homo sapiens
  misc_RNA (1)...(19): siRNA sense strand
ucaguugcuugcuggaauu

SEQ ID NO: 630442 - RNA, 19 nt, Homo sapiens
  misc_RNA (1)...(19): siRNA sense strand
agaagacucaucuaaaguu

SEQ ID NO: 630443 - RNA, 19 nt, Homo sapiens
  misc_RNA (1)...(19): siRNA sense strand
gaacucaccaaauacuuac

SEQ ID NO: 630444 - RNA, 19 nt, Homo sapiens
  misc_RNA (1)...(19): siRNA sense strand
ucagaaguauaaagcuuuc

SEQ ID NO: 630445 - RNA, 19 nt, Homo sapiens
  misc_RNA (1)...(19): siRNA sense strand
aguagacaaucuccaugua

SEQ ID NO: 630446 - RNA, 19 nt, Homo sapiens
  misc_RNA (1)...(19): siRNA sense strand
gauguugccuauuaugacu

SEQ ID NO: 630447 - RNA, 19 nt, Homo sapiens
  misc_RNA (1)...(19): siRNA sense strand
caucauggccaauucuuuc

SEQ ID NO: 630448 - RNA, 19 nt, Homo sapiens
  misc_RNA (1)...(19): siRNA sense strand
ggaaguaccaauuugaaaa

SEQ ID NO: 630449 - RNA, 19 nt, Homo sapiens
  misc_RNA (1)...(19): siRNA sense strand
uuacucagauccugcaaag

SEQ ID NO: 630450 - RNA, 19 nt, Homo sapiens
  misc_RNA (1)...(19): siRNA sense strand
ggaagguuggcgaaauuga

SEQ ID NO: 630451 - RNA, 19 nt, Homo sapiens
  misc_RNA (1)...(19): siRNA sense strand
uaaacacaaacccgaauga

SEQ ID NO: 630452 - RNA, 19 nt, Homo sapiens
  misc_RNA (1)...(19): siRNA sense strand
gaacaugucuccugaucua

SEQ ID NO: 630453 - RNA, 19 nt, Homo sapiens
  misc_RNA (1)...(19): siRNA sense strand
gaagacucaucuaaaguua

SEQ ID NO: 630454 - RNA, 19 nt, Homo sapiens
  misc_RNA (1)...(19): siRNA sense strand
ggaagugccugucauggua

SEQ ID NO: 630455 - RNA, 19 nt, Homo sapiens
  misc_RNA (1)...(19): siRNA sense strand
cgacaagacuucaacauga

SEQ ID NO: 630456 - RNA, 19 nt, Homo sapiens
  misc_RNA (1)...(19): siRNA sense strand
gcagauacauccucauaug

SEQ ID NO: 630457 - RNA, 19 nt, Homo sapiens
  misc_RNA (1)...(19): siRNA sense strand
gaaauaagauucgggaaca

SEQ ID NO: 630458 - RNA, 19 nt, Homo sapiens
  misc_RNA (1)...(19): siRNA sense strand
gcagaagacucaucuaaag

SEQ ID NO: 630459 - RNA, 19 nt, Homo sapiens
  misc_RNA (1)...(19): siRNA sense strand
caacccaacuggauuacua

SEQ ID NO: 630460 - RNA, 19 nt, Homo sapiens
  misc_RNA (1)...(19): siRNA sense strand
uggcugaacucaccaaaua

SEQ ID NO: 630461 - RNA, 19 nt, Homo sapiens
  misc_RNA (1)...(19): siRNA sense strand
gcaacuagccugugagauu

SEQ ID NO: 630462 - RNA, 19 nt, Homo sapiens
  misc_RNA (1)...(19): siRNA sense strand
gagcaagaccacauuauaa

SEQ ID NO: 630463 - RNA, 19 nt, Homo sapiens
  misc_RNA (1)...(19): siRNA sense strand
ggagaaaguugaggccuaa

SEQ ID NO: 630464 - RNA, 19 nt, Homo sapiens
  misc_RNA (1)...(19): siRNA sense strand
gagcagaggaaacgaguua

SEQ ID NO: 630465 - RNA, 19 nt, Homo sapiens
  misc_RNA (1)...(19): siRNA sense strand
ugggagauguugccuauua

SEQ ID NO: 630466 - RNA, 19 nt, Homo sapiens
  misc_RNA (1)...(19): siRNA sense strand
gcaagaccacauuauaaua

SEQ ID NO: 630467 - RNA, 19 nt, Homo sapiens
  misc_RNA (1)...(19): siRNA sense strand
ggagcaagaccacauuaua

SEQ ID NO: 630468 - RNA, 19 nt, Homo sapiens
  misc_RNA (1)...(19): siRNA sense strand
guauaaagcuuucacuuac

SEQ ID NO: 630469 - RNA, 19 nt, Homo sapiens
  misc_RNA (1)...(19): siRNA sense strand
aaggagaacuugaagagua

SEQ ID NO: 630470 - RNA, 19 nt, Homo sapiens
  misc_RNA (1)...(19): siRNA sense strand
uacagcagauugcagauua

SEQ ID NO: 630471 - RNA, 19 nt, Homo sapiens
  misc_RNA (1)...(19): siRNA sense strand
gaauucaacugcagaaggu

SEQ ID NO: 630472 - RNA, 19 nt, Homo sapiens
  misc_RNA (1)...(19): siRNA sense strand
gaugaaagcagaagacuca

SEQ ID NO: 630473 - RNA, 19 nt, Homo sapiens
  misc_RNA (1)...(19): siRNA sense strand
gcaaggaugauaugcauga

SEQ ID NO: 630474 - RNA, 19 nt, Homo sapiens
  misc_RNA (1)...(19): siRNA sense strand
gauaagccaccuucuacua

SEQ ID NO: 630475 - RNA, 19 nt, Homo sapiens
  misc_RNA (1)...(19): siRNA sense strand
gggcacaccuggcaaauac

SEQ ID NO: 630476 - RNA, 19 nt, Homo sapiens
  misc_RNA (1)...(19): siRNA sense strand
ccacaacccaacuggauua

SEQ ID NO: 630477 - RNA, 19 nt, Homo sapiens
  misc_RNA (1)...(19): siRNA sense strand
caacuagccugugagauuc

SEQ ID NO: 630478 - RNA, 19 nt, Homo sapiens
  misc_RNA (1)...(19): siRNA sense strand
guaaauggcaaggaugaua

SEQ ID NO: 630479 - RNA, 19 nt, Homo sapiens
  misc_RNA (1)...(19): siRNA sense strand
gauugcagauuacaucaug

SEQ ID NO: 630480 - RNA, 19 nt, Homo sapiens
  misc_RNA (1)...(19): siRNA sense strand
gugaguagguuaagcacaa

SEQ ID NO: 630481 - RNA, 19 nt, Homo sapiens
  misc_RNA (1)...(19): siRNA sense strand
gaacuugaagaguauaaga

SEQ ID NO: 630482 - RNA, 19 nt, Homo sapiens
  misc_RNA (1)...(19): siRNA sense strand
gcagcuguauccuccauga

SEQ ID NO: 630483 - RNA, 19 nt, Homo sapiens
  misc_RNA (1)...(19): siRNA sense strand
ccaauucuuucucggguuu

SEQ ID NO: 630484 - RNA, 19 nt, Homo sapiens
  misc_RNA (1)...(19): siRNA sense strand
gaacaggaggagagaauuc

SEQ ID NO: 630485 - RNA, 19 nt, Homo sapiens
  misc_RNA (1)...(19): siRNA sense strand
gguaguaaauggcaaggau

SEQ ID NO: 630486 - RNA, 19 nt, Homo sapiens
  misc_RNA (1)...(19): siRNA sense strand
gacaagacuucaacaugau

SEQ ID NO: 630487 - RNA, 19 nt, Homo sapiens
  misc_RNA (1)...(19): siRNA sense strand
uuacaggcauccucucauu

SEQ ID NO: 630488 - RNA, 19 nt, Homo sapiens
  misc_RNA (1)...(19): siRNA sense strand
ccagggaaguaccaauuug

SEQ ID NO: 630489 - RNA, 19 nt, Homo sapiens
  misc_RNA (1)...(19): siRNA sense strand
ccaaauacuuacaugaaag

SEQ ID NO: 630490 - RNA, 19 nt, Homo sapiens
  misc_RNA (1)...(19): siRNA sense strand
ugaacucaccaaauacuua

SEQ ID NO: 630491 - RNA, 19 nt, Homo sapiens
  misc_RNA (1)...(19): siRNA sense strand
gcacaaguacaaccauaga

SEQ ID NO: 630492 - RNA, 19 nt, Homo sapiens
  misc_RNA (1)...(19): siRNA sense strand
cagcaugccucacaaagag

SEQ ID NO: 630493 - RNA, 19 nt, Homo sapiens
  misc_RNA (1)...(19): siRNA sense strand
caacuggauuacuagcauu

SEQ ID NO: 630494 - RNA, 19 nt, Homo sapiens
  misc_RNA (1)...(19): siRNA sense strand
gaaagcagaagacucaucu

SEQ ID NO: 630495 - RNA, 19 nt, Homo sapiens
  misc_RNA (1)...(19): siRNA sense strand
ugaggacucuggacaacuu

SEQ ID NO: 630496 - RNA, 19 nt, Homo sapiens
  misc_RNA (1)...(19): siRNA sense strand
gugcagauacauccucaua

SEQ ID NO: 630497 - RNA, 19 nt, Homo sapiens
  misc_RNA (1)...(19): siRNA sense strand
gaagcuacagccuccaauu

SEQ ID NO: 630498 - RNA, 19 nt, Homo sapiens
  misc_RNA (1)...(19): siRNA sense strand
gaaaacaucgagauuacua

SEQ ID NO: 630499 - RNA, 19 nt, Homo sapiens
  misc_RNA (1)...(19): siRNA sense strand
gaaaucccagcaacuguga

SEQ ID NO: 630500 - RNA, 19 nt, Homo sapiens
  misc_RNA (1)...(19): siRNA sense strand
gagauguugccuauuauga

SEQ ID NO: 630501 - RNA, 19 nt, Homo sapiens
  misc_RNA (1)...(19): siRNA sense strand
gagagaagccuaggcacaa

SEQ ID NO: 630502 - RNA, 19 nt, Homo sapiens
  misc_RNA (1)...(19): siRNA sense strand
caagagugauguggaaauc

SEQ ID NO: 630503 - RNA, 19 nt, Homo sapiens
  misc_RNA (1)...(19): siRNA sense strand
gaauaaguaaggagcaaga

SEQ ID NO: 630504 - RNA, 19 nt, Homo sapiens
  misc_RNA (1)...(19): siRNA sense strand
gaaguccugucaccugaag

SEQ ID NO: 630505 - RNA, 19 nt, Homo sapiens
  misc_RNA (1)...(19): siRNA sense strand
aagcacaaguacaaccaua

SEQ ID NO: 630506 - RNA, 19 nt, Homo sapiens
  misc_RNA (1)...(19): siRNA sense strand
ugauaugcaugauguugaa

SEQ ID NO: 630507 - RNA, 19 nt, Homo sapiens
  misc_RNA (1)...(19): siRNA sense strand
cgaaugagguacuagaaaa

SEQ ID NO: 630508 - RNA, 19 nt, Homo sapiens
  misc_RNA (1)...(19): siRNA sense strand
gccacucucuccucucaaa

SEQ ID NO: 630509 - RNA, 19 nt, Homo sapiens
  misc_RNA (1)...(19): siRNA sense strand
gcagauugcagauuacauc

SEQ ID NO: 630510 - RNA, 19 nt, Homo sapiens
  misc_RNA (1)...(19): siRNA sense strand
ugugggauccuuccaauuu

SEQ ID NO: 630511 - RNA, 19 nt, Homo sapiens
  misc_RNA (1)...(19): siRNA sense strand
uauaauaggagaagugguu

SEQ ID NO: 630512 - RNA, 19 nt, Homo sapiens
  misc_RNA (1)...(19): siRNA sense strand
aagaacagaugaagaaagg

SEQ ID NO: 630513 - RNA, 19 nt, Homo sapiens
  misc_RNA (1)...(19): siRNA sense strand
gacaaucgaacguaaacaa

SEQ ID NO: 630514 - RNA, 19 nt, Homo sapiens
  misc_RNA (1)...(19): siRNA sense strand
agaggacaaucgaacguaa

SEQ ID NO: 630515 - RNA, 19 nt, Homo sapiens
  misc_RNA (1)...(19): siRNA sense strand
uaagccaccuucuacuaug

SEQ ID NO: 630516 - RNA, 19 nt, Homo sapiens
  misc_RNA (1)...(19): siRNA sense strand
gggagauguugccuauuau

SEQ ID NO: 630517 - RNA, 19 nt, Homo sapiens
  misc_RNA (1)...(19): siRNA sense strand
gaccagggaaguaccaauu

SEQ ID NO: 630518 - RNA, 19 nt, Homo sapiens
  misc_RNA (1)...(19): siRNA sense strand
ugcaugauguugaagauga

SEQ ID NO: 630519 - RNA, 19 nt, Homo sapiens
  misc_RNA (1)...(19): siRNA sense strand
gggaaguaccaauuugaaa

SEQ ID NO: 630520 - RNA, 19 nt, Homo sapiens
  misc_RNA (1)...(19): siRNA sense strand
caccaaauacuuacaugaa

SEQ ID NO: 630521 - RNA, 19 nt, Homo sapiens
  misc_RNA (1)...(19): siRNA sense strand
gaggaggcuuuucauuaua

SEQ ID NO: 630522 - RNA, 19 nt, Homo sapiens
  misc_RNA (1)...(19): siRNA sense strand
gcuguauccuccaugaaau

SEQ ID NO: 630523 - RNA, 19 nt, Homo sapiens
  misc_RNA (1)...(19): siRNA sense strand
caaaaucgccauccaagaa

SEQ ID NO: 630524 - RNA, 19 nt, Homo sapiens
  misc_RNA (1)...(19): siRNA sense strand
cuucuacuaugcaauuuga

SEQ ID NO: 630525 - RNA, 19 nt, Homo sapiens
  misc_RNA (1)...(19): siRNA sense strand
gaaaacagcaggaccacaa

SEQ ID NO: 630526 - RNA, 19 nt, Homo sapiens
  misc_RNA (1)...(19): siRNA sense strand
uaaaguuagugguggaaca

SEQ ID NO: 630527 - RNA, 19 nt, Homo sapiens
  misc_RNA (1)...(19): siRNA sense strand
aagcagaagacucaucuaa

SEQ ID NO: 630528 - RNA, 19 nt, Homo sapiens
  misc_RNA (1)...(19): siRNA sense strand
gaaugugccugaggagucu

SEQ ID NO: 630529 - RNA, 19 nt, Homo sapiens
  misc_RNA (1)...(19): siRNA sense strand
guccugauguuaagugugu

SEQ ID NO: 630530 - RNA, 19 nt, Homo sapiens
  misc_RNA (1)...(19): siRNA sense strand
cgagauuacuauuaagucu

SEQ ID NO: 630531 - RNA, 19 nt, Homo sapiens
  misc_RNA (1)...(19): siRNA sense strand
uaaacaacaaggccuagaa

SEQ ID NO: 630532 - RNA, 19 nt, Homo sapiens
  misc_RNA (1)...(19): siRNA sense strand
aaucgaacguaaacaacaa

SEQ ID NO: 630533 - RNA, 19 nt, Homo sapiens
  misc_RNA (1)...(19): siRNA sense strand
gaaccaaaaucacguggau

SEQ ID NO: 630534 - RNA, 19 nt, Homo sapiens
  misc_RNA (1)...(19): siRNA sense strand
gcacuuggagaaacauuag

SEQ ID NO: 630535 - RNA, 19 nt, Homo sapiens
  misc_RNA (1)...(19): siRNA sense strand
guucugggaccaaguugua

SEQ ID NO: 630536 - RNA, 19 nt, Homo sapiens
  misc_RNA (1)...(19): siRNA sense strand
ccaacuggauuacuagcau

SEQ ID NO: 630537 - RNA, 19 nt, Homo sapiens
  misc_RNA (1)...(19): siRNA sense strand
acaaguacaaccauagaaa

SEQ ID NO: 630538 - RNA, 19 nt, Homo sapiens
  misc_RNA (1)...(19): siRNA sense strand
gaugauaugcaugauguug

SEQ ID NO: 630539 - RNA, 19 nt, Homo sapiens
  misc_RNA (1)...(19): siRNA sense strand
gaagacuuggaaugccuua

SEQ ID NO: 630540 - RNA, 19 nt, Homo sapiens
  misc_RNA (1)...(19): siRNA sense strand
uaaauggcaaggaugauau

SEQ ID NO: 630541 - RNA, 19 nt, Homo sapiens
  misc_RNA (1)...(19): siRNA sense strand
ucaguugcuugcuggaauu

SEQ ID NO: 630542 - RNA, 19 nt, Homo sapiens
  misc_RNA (1)...(19): siRNA sense strand
agaagacucaucuaaaguu

SEQ ID NO: 630543 - RNA, 19 nt, Homo sapiens
  misc_RNA (1)...(19): siRNA sense strand
gaacucaccaaauacuuac

SEQ ID NO: 630544 - RNA, 19 nt, Homo sapiens
  misc_RNA (1)...(19): siRNA sense strand
ucagaaguauaaagcuuuc

SEQ ID NO: 630545 - RNA, 19 nt, Homo sapiens
  misc_RNA (1)...(19): siRNA sense strand
aguagacaaucuccaugua

SEQ ID NO: 630546 - RNA, 19 nt, Homo sapiens
  misc_RNA (1)...(19): siRNA sense strand
gauguugccuauuaugacu

SEQ ID NO: 630547 - RNA, 19 nt, Homo sapiens
  misc_RNA (1)...(19): siRNA sense strand
caucauggccaauucuuuc

SEQ ID NO: 630548 - RNA, 19 nt, Homo sapiens
  misc_RNA (1)...(19): siRNA sense strand
ggaaguaccaauuugaaaa

SEQ ID NO: 630549 - RNA, 19 nt, Homo sapiens
  misc_RNA (1)...(19): siRNA sense strand
uuacucagauccugcaaag

SEQ ID NO: 630550 - RNA, 19 nt, Homo sapiens
  misc_RNA (1)...(19): siRNA sense strand
ggaagguuggcgaaauuga

SEQ ID NO: 630551 - RNA, 19 nt, Homo sapiens
  misc_RNA (1)...(19): siRNA sense strand
uaaacacaaacccgaauga

SEQ ID NO: 630552 - RNA, 19 nt, Homo sapiens
  misc_RNA (1)...(19): siRNA sense strand
ggcaauggcugauaaauga

SEQ ID NO: 630553 - RNA, 19 nt, Homo sapiens
  misc_RNA (1)...(19): siRNA sense strand
gagaauguuucccagauuu

SEQ ID NO: 630554 - RNA, 19 nt, Homo sapiens
  misc_RNA (1)...(19): siRNA sense strand
gcucuaugaucgucaguua

SEQ ID NO: 630555 - RNA, 19 nt, Homo sapiens
  misc_RNA (1)...(19): siRNA sense strand
gaaacccgcuacaugcuuu

SEQ ID NO: 630556 - RNA, 19 nt, Homo sapiens
  misc_RNA (1)...(19): siRNA sense strand
gaucagacaucuccagcuu

SEQ ID NO: 630557 - RNA, 19 nt, Homo sapiens
  misc_RNA (1)...(19): siRNA sense strand
ggaggcagaucccgcaauu

SEQ ID NO: 630558 - RNA, 19 nt, Homo sapiens
  misc_RNA (1)...(19): siRNA sense strand
gugagaagauugaccguuu

SEQ ID NO: 630559 - RNA, 19 nt, Homo sapiens
  misc_RNA (1)...(19): siRNA sense strand
gaggacagcucaugagaca

SEQ ID NO: 630560 - RNA, 19 nt, Homo sapiens
  misc_RNA (1)...(19): siRNA sense strand
gcugauaaaugacacuuug

SEQ ID NO: 630561 - RNA, 19 nt, Homo sapiens
  misc_RNA (1)...(19): siRNA sense strand
gaccgaagaugacgacgaa

SEQ ID NO: 630562 - RNA, 19 nt, Homo sapiens
  misc_RNA (1)...(19): siRNA sense strand
gcagaguccuacuugauug

SEQ ID NO: 630563 - RNA, 19 nt, Homo sapiens
  misc_RNA (1)...(19): siRNA sense strand
ggagcagccucaucuguug

SEQ ID NO: 630564 - RNA, 19 nt, Homo sapiens
  misc_RNA (1)...(19): siRNA sense strand
gacauaaacugcagaagag

SEQ ID NO: 630565 - RNA, 19 nt, Homo sapiens
  misc_RNA (1)...(19): siRNA sense strand
gaccacagcugacuauuuu

SEQ ID NO: 630566 - RNA, 19 nt, Homo sapiens
  misc_RNA (1)...(19): siRNA sense strand
gagagaauguuucccagau

SEQ ID NO: 630567 - RNA, 19 nt, Homo sapiens
  misc_RNA (1)...(19): siRNA sense strand
gcguaauaauggacaaaua

SEQ ID NO: 630568 - RNA, 19 nt, Homo sapiens
  misc_RNA (1)...(19): siRNA sense strand
guccuuguguccagauuua

SEQ ID NO: 630569 - RNA, 19 nt, Homo sapiens
  misc_RNA (1)...(19): siRNA sense strand
ugaaggcgcugaccuacga

SEQ ID NO: 630570 - RNA, 19 nt, Homo sapiens
  misc_RNA (1)...(19): siRNA sense strand
ggugauugcugcgguguuu

SEQ ID NO: 630571 - RNA, 19 nt, Homo sapiens
  misc_RNA (1)...(19): siRNA sense strand
gagcugaagcccuuuguga

SEQ ID NO: 630572 - RNA, 19 nt, Homo sapiens
  misc_RNA (1)...(19): siRNA sense strand
aaagcaagauggcugaguu

SEQ ID NO: 630573 - RNA, 19 nt, Homo sapiens
  misc_RNA (1)...(19): siRNA sense strand
ucaugaaguugccgaugua

SEQ ID NO: 630574 - RNA, 19 nt, Homo sapiens
  misc_RNA (1)...(19): siRNA sense strand
ugaccugccugaucccuuu

SEQ ID NO: 630575 - RNA, 19 nt, Homo sapiens
  misc_RNA (1)...(19): siRNA sense strand
gaggacaaccuucugaaug

SEQ ID NO: 630576 - RNA, 19 nt, Homo sapiens
  misc_RNA (1)...(19): siRNA sense strand
aggacaaccuucugaauga

SEQ ID NO: 630577 - RNA, 19 nt, Homo sapiens
  misc_RNA (1)...(19): siRNA sense strand
gaacuuguuguuggacaua

SEQ ID NO: 630578 - RNA, 19 nt, Homo sapiens
  misc_RNA (1)...(19): siRNA sense strand
gaagacuguuugcccuaug

SEQ ID NO: 630579 - RNA, 19 nt, Homo sapiens
  misc_RNA (1)...(19): siRNA sense strand
ucuaugaucgucaguuaua

SEQ ID NO: 630580 - RNA, 19 nt, Homo sapiens
  misc_RNA (1)...(19): siRNA sense strand
agacauaaacugcagaaga

SEQ ID NO: 630581 - RNA, 19 nt, Homo sapiens
  misc_RNA (1)...(19): siRNA sense strand
uaaaugacacuuugagaca

SEQ ID NO: 630582 - RNA, 19 nt, Homo sapiens
  misc_RNA (1)...(19): siRNA sense strand
gguuggcaauggcugauaa

SEQ ID NO: 630583 - RNA, 19 nt, Homo sapiens
  misc_RNA (1)...(19): siRNA sense strand
ggacagcucaugagacaag

SEQ ID NO: 630584 - RNA, 19 nt, Homo sapiens
  misc_RNA (1)...(19): siRNA sense strand
ggucugugcuggacugcuu

SEQ ID NO: 630585 - RNA, 19 nt, Homo sapiens
  misc_RNA (1)...(19): siRNA sense strand
guacacgcagccaaugaua

SEQ ID NO: 630586 - RNA, 19 nt, Homo sapiens
  misc_RNA (1)...(19): siRNA sense strand
gcacuuucccucaugguau

SEQ ID NO: 630587 - RNA, 19 nt, Homo sapiens
  misc_RNA (1)...(19): siRNA sense strand
caccuugaauggaugauga

SEQ ID NO: 630588 - RNA, 19 nt, Homo sapiens
  misc_RNA (1)...(19): siRNA sense strand
gauaaaugacacuuugaga

SEQ ID NO: 630589 - RNA, 19 nt, Homo sapiens
  misc_RNA (1)...(19): siRNA sense strand
cagcuucccuuguacaucu

SEQ ID NO: 630590 - RNA, 19 nt, Homo sapiens
  misc_RNA (1)...(19): siRNA sense strand
gcagugaauauuacaugaa

SEQ ID NO: 630591 - RNA, 19 nt, Homo sapiens
  misc_RNA (1)...(19): siRNA sense strand
uugaauggaugaugaacuu

SEQ ID NO: 630592 - RNA, 19 nt, Homo sapiens
  misc_RNA (1)...(19): siRNA sense strand
caagcacgaauguccauaa

SEQ ID NO: 630593 - RNA, 19 nt, Homo sapiens
  misc_RNA (1)...(19): siRNA sense strand
guccagaucuucacaugag

SEQ ID NO: 630594 - RNA, 19 nt, Homo sapiens
  misc_RNA (1)...(19): siRNA sense strand
ggcccuggcacaaauauuu

SEQ ID NO: 630595 - RNA, 19 nt, Homo sapiens
  misc_RNA (1)...(19): siRNA sense strand
uagauuuggucacaauuca

SEQ ID NO: 630596 - RNA, 19 nt, Homo sapiens
  misc_RNA (1)...(19): siRNA sense strand
agagaauguuucccagauu

SEQ ID NO: 630597 - RNA, 19 nt, Homo sapiens
  misc_RNA (1)...(19): siRNA sense strand
ugaccacagcugacuauuu

SEQ ID NO: 630598 - RNA, 19 nt, Homo sapiens
  misc_RNA (1)...(19): siRNA sense strand
agacauugcucaccuacag

SEQ ID NO: 630599 - RNA, 19 nt, Homo sapiens
  misc_RNA (1)...(19): siRNA sense strand
gaaguugcuugcgcucugu

SEQ ID NO: 630600 - RNA, 19 nt, Homo sapiens
  misc_RNA (1)...(19): siRNA sense strand
ugacgcuccugcacuuuga

SEQ ID NO: 630601 - RNA, 19 nt, Homo sapiens
  misc_RNA (1)...(19): siRNA sense strand
gcaggccagugagaagauu

SEQ ID NO: 630602 - RNA, 19 nt, Homo sapiens
  misc_RNA (1)...(19): siRNA sense strand
gaagcugugugcggagaga

SEQ ID NO: 630603 - RNA, 19 nt, Homo sapiens
  misc_RNA (1)...(19): siRNA sense strand
cuuccaggcuuccuucuga

SEQ ID NO: 630604 - RNA, 19 nt, Homo sapiens
  misc_RNA (1)...(19): siRNA sense strand
gaguccagaucuucacaug

SEQ ID NO: 630605 - RNA, 19 nt, Homo sapiens
  misc_RNA (1)...(19): siRNA sense strand
gaugaugaacuuguuguug

SEQ ID NO: 630606 - RNA, 19 nt, Homo sapiens
  misc_RNA (1)...(19): siRNA sense strand
ggacgagacacuggccuuu

SEQ ID NO: 630607 - RNA, 19 nt, Homo sapiens
  misc_RNA (1)...(19): siRNA sense strand
ccagacuguuggugugaaa

SEQ ID NO: 630608 - RNA, 19 nt, Homo sapiens
  misc_RNA (1)...(19): siRNA sense strand
caucucaucucaagucacu

SEQ ID NO: 630609 - RNA, 19 nt, Homo sapiens
  misc_RNA (1)...(19): siRNA sense strand
ggaaacccgcuacaugcuu

SEQ ID NO: 630610 - RNA, 19 nt, Homo sapiens
  misc_RNA (1)...(19): siRNA sense strand
agacaagcaguguguguuu

SEQ ID NO: 630611 - RNA, 19 nt, Homo sapiens
  misc_RNA (1)...(19): siRNA sense strand
gguguuugaccgagacaua

SEQ ID NO: 630612 - RNA, 19 nt, Homo sapiens
  misc_RNA (1)...(19): siRNA sense strand
gcccuggcacaaauauuua

SEQ ID NO: 630613 - RNA, 19 nt, Homo sapiens
  misc_RNA (1)...(19): siRNA sense strand
gaagaugacgacgaagaug

SEQ ID NO: 630614 - RNA, 19 nt, Homo sapiens
  misc_RNA (1)...(19): siRNA sense strand
gagcagcgcaaccgucugu

SEQ ID NO: 630615 - RNA, 19 nt, Homo sapiens
  misc_RNA (1)...(19): siRNA sense strand
caaaagauauccagaagcu

SEQ ID NO: 630616 - RNA, 19 nt, Homo sapiens
  misc_RNA (1)...(19): siRNA sense strand
ggacaaccuucugaaugag

SEQ ID NO: 630617 - RNA, 19 nt, Homo sapiens
  misc_RNA (1)...(19): siRNA sense strand
ggacccuucugcagaucuu

SEQ ID NO: 630618 - RNA, 19 nt, Homo sapiens
  misc_RNA (1)...(19): siRNA sense strand
gaauggaugaugaacuugu

SEQ ID NO: 630619 - RNA, 19 nt, Homo sapiens
  misc_RNA (1)...(19): siRNA sense strand
caccaagguucgaggcuau

SEQ ID NO: 630620 - RNA, 19 nt, Homo sapiens
  misc_RNA (1)...(19): siRNA sense strand
ugaccagucugauggaucu

SEQ ID NO: 630621 - RNA, 19 nt, Homo sapiens
  misc_RNA (1)...(19): siRNA sense strand
ggacauagugcaagaucag

SEQ ID NO: 630622 - RNA, 19 nt, Homo sapiens
  misc_RNA (1)...(19): siRNA sense strand
ccugaucccuuuugauuuu

SEQ ID NO: 630623 - RNA, 19 nt, Homo sapiens
  misc_RNA (1)...(19): siRNA sense strand
gcgggacccuucugcagau

SEQ ID NO: 630624 - RNA, 19 nt, Homo sapiens
  misc_RNA (1)...(19): siRNA sense strand
cagugaauauuacaugaag

SEQ ID NO: 630625 - RNA, 19 nt, Homo sapiens
  misc_RNA (1)...(19): siRNA sense strand
ugacaaggcccgagaugca

SEQ ID NO: 630626 - RNA, 19 nt, Homo sapiens
  misc_RNA (1)...(19): siRNA sense strand
ccuacuugauugucaguga

SEQ ID NO: 630627 - RNA, 19 nt, Homo sapiens
  misc_RNA (1)...(19): siRNA sense strand
ugagaagauugaccguuuc

SEQ ID NO: 630628 - RNA, 19 nt, Homo sapiens
  misc_RNA (1)...(19): siRNA sense strand
gagcugaucgaggcccaua

SEQ ID NO: 630629 - RNA, 19 nt, Homo sapiens
  misc_RNA (1)...(19): siRNA sense strand
ugauggaucugacacuucu

SEQ ID NO: 630630 - RNA, 19 nt, Homo sapiens
  misc_RNA (1)...(19): siRNA sense strand
ugaaggccauugcgaggau

SEQ ID NO: 630631 - RNA, 19 nt, Homo sapiens
  misc_RNA (1)...(19): siRNA sense strand
ccaacuguuuccugguuau

SEQ ID NO: 630632 - RNA, 19 nt, Homo sapiens
  misc_RNA (1)...(19): siRNA sense strand
cgagugcacuggugauugc

SEQ ID NO: 630633 - RNA, 19 nt, Homo sapiens
  misc_RNA (1)...(19): siRNA sense strand
ugaagacuguuugcccuau

SEQ ID NO: 630634 - RNA, 19 nt, Homo sapiens
  misc_RNA (1)...(19): siRNA sense strand
agaauguuucccagauuua

SEQ ID NO: 630635 - RNA, 19 nt, Homo sapiens
  misc_RNA (1)...(19): siRNA sense strand
gaaggccauugcgaggauu

SEQ ID NO: 630636 - RNA, 19 nt, Homo sapiens
  misc_RNA (1)...(19): siRNA sense strand
gagcaguuacccacacuuc

SEQ ID NO: 630637 - RNA, 19 nt, Homo sapiens
  misc_RNA (1)...(19): siRNA sense strand
acacgcagccaaugauaga

SEQ ID NO: 630638 - RNA, 19 nt, Homo sapiens
  misc_RNA (1)...(19): siRNA sense strand
gauuuggucacaauucaga

SEQ ID NO: 630639 - RNA, 19 nt, Homo sapiens
  misc_RNA (1)...(19): siRNA sense strand
gaggagaacuggaaaagcu

SEQ ID NO: 630640 - RNA, 19 nt, Homo sapiens
  misc_RNA (1)...(19): siRNA sense strand
gugaauauuacaugaagga

SEQ ID NO: 630641 - RNA, 19 nt, Homo sapiens
  misc_RNA (1)...(19): siRNA sense strand
gacacugaguccagaucuu

SEQ ID NO: 630642 - RNA, 19 nt, Homo sapiens
  misc_RNA (1)...(19): siRNA sense strand
gaguacacgcagccaauga

SEQ ID NO: 630643 - RNA, 19 nt, Homo sapiens
  misc_RNA (1)...(19): siRNA sense strand
gaccaugaagcuugggaaa

SEQ ID NO: 630644 - RNA, 19 nt, Homo sapiens
  misc_RNA (1)...(19): siRNA sense strand
aagcacgaauguccauaau

SEQ ID NO: 630645 - RNA, 19 nt, Homo sapiens
  misc_RNA (1)...(19): siRNA sense strand
ccaccgaggagaacuggaa

SEQ ID NO: 630646 - RNA, 19 nt, Homo sapiens
  misc_RNA (1)...(19): siRNA sense strand
ugaugaacuuguuguugga

SEQ ID NO: 630647 - RNA, 19 nt, Homo sapiens
  misc_RNA (1)...(19): siRNA sense strand
gagacaagcaguguguguu

SEQ ID NO: 630648 - RNA, 19 nt, Homo sapiens
  misc_RNA (1)...(19): siRNA sense strand
caacuguuuccugguuaua

SEQ ID NO: 630649 - RNA, 19 nt, Homo sapiens
  misc_RNA (1)...(19): siRNA sense strand
ccucaugguauugauauuu

SEQ ID NO: 630650 - RNA, 19 nt, Homo sapiens
  misc_RNA (1)...(19): siRNA sense strand
ggguggagcgugugauaga

SEQ ID NO: 630651 - RNA, 19 nt, Homo sapiens
  misc_RNA (1)...(19): siRNA sense strand
guccugaugucaagcaaag

SEQ ID NO: 630652 - RNA, 19 nt, Homo sapiens
  misc_RNA (1)...(19): siRNA sense strand
ucaaugggcugucagauuu

SEQ ID NO: 630653 - RNA, 19 nt, Homo sapiens
  misc_RNA (1)...(19): siRNA sense strand
cagcagaucugaaauuuag

SEQ ID NO: 630654 - RNA, 19 nt, Homo sapiens
  misc_RNA (1)...(19): siRNA sense strand
gagaguauuugccuuuauu

SEQ ID NO: 630655 - RNA, 19 nt, Homo sapiens
  misc_RNA (1)...(19): siRNA sense strand
gcauggaggcaauguauua

SEQ ID NO: 630656 - RNA, 19 nt, Homo sapiens
  misc_RNA (1)...(19): siRNA sense strand
gaaacaggcuuugcacuuc

SEQ ID NO: 630657 - RNA, 19 nt, Homo sapiens
  misc_RNA (1)...(19): siRNA sense strand
cagaagaaguggaugauga

SEQ ID NO: 630658 - RNA, 19 nt, Homo sapiens
  misc_RNA (1)...(19): siRNA sense strand
ggacauccuuguuuucuua

SEQ ID NO: 630659 - RNA, 19 nt, Homo sapiens
  misc_RNA (1)...(19): siRNA sense strand
ggacacccuugcuaaagaa

SEQ ID NO: 630660 - RNA, 19 nt, Homo sapiens
  misc_RNA (1)...(19): siRNA sense strand
ggaggcaauguauuaauua

SEQ ID NO: 630661 - RNA, 19 nt, Homo sapiens
  misc_RNA (1)...(19): siRNA sense strand
gaagcauccaucccaauua

SEQ ID NO: 630662 - RNA, 19 nt, Homo sapiens
  misc_RNA (1)...(19): siRNA sense strand
cauggcagaugcaguauug

SEQ ID NO: 630663 - RNA, 19 nt, Homo sapiens
  misc_RNA (1)...(19): siRNA sense strand
ggacaaccacuacaaaaua

SEQ ID NO: 630664 - RNA, 19 nt, Homo sapiens
  misc_RNA (1)...(19): siRNA sense strand
aaugaagacugcuaaaguu

SEQ ID NO: 630665 - RNA, 19 nt, Homo sapiens
  misc_RNA (1)...(19): siRNA sense strand
ggagaguauuugccuuuau

SEQ ID NO: 630666 - RNA, 19 nt, Homo sapiens
  misc_RNA (1)...(19): siRNA sense strand
ccacacaagauauucauuu

SEQ ID NO: 630667 - RNA, 19 nt, Homo sapiens
  misc_RNA (1)...(19): siRNA sense strand
gaaguacucgaacaagauu

SEQ ID NO: 630668 - RNA, 19 nt, Homo sapiens
  misc_RNA (1)...(19): siRNA sense strand
gaaaagaaguacucgaaca

SEQ ID NO: 630669 - RNA, 19 nt, Homo sapiens
  misc_RNA (1)...(19): siRNA sense strand
gauauucauuuggguguga

SEQ ID NO: 630670 - RNA, 19 nt, Homo sapiens
  misc_RNA (1)...(19): siRNA sense strand
uggaggcaauguauuaauu

SEQ ID NO: 630671 - RNA, 19 nt, Homo sapiens
  misc_RNA (1)...(19): siRNA sense strand
gggaaguccuuaggcauga

SEQ ID NO: 630672 - RNA, 19 nt, Homo sapiens
  misc_RNA (1)...(19): siRNA sense strand
gacaagaagaggagaagaa

SEQ ID NO: 630673 - RNA, 19 nt, Homo sapiens
  misc_RNA (1)...(19): siRNA sense strand
aguauuggcucgaguguau

SEQ ID NO: 630674 - RNA, 19 nt, Homo sapiens
  misc_RNA (1)...(19): siRNA sense strand
gaaauggucacaacuucau

SEQ ID NO: 630675 - RNA, 19 nt, Homo sapiens
  misc_RNA (1)...(19): siRNA sense strand
uagaaauggucacaacuuc

SEQ ID NO: 630676 - RNA, 19 nt, Homo sapiens
  misc_RNA (1)...(19): siRNA sense strand
cacacaagauauucauuug

SEQ ID NO: 630677 - RNA, 19 nt, Homo sapiens
  misc_RNA (1)...(19): siRNA sense strand
gacaaccacuacaaaauaa

SEQ ID NO: 630678 - RNA, 19 nt, Homo sapiens
  misc_RNA (1)...(19): siRNA sense strand
cacuauagcucucugaaag

SEQ ID NO: 630679 - RNA, 19 nt, Homo sapiens
  misc_RNA (1)...(19): siRNA sense strand
aagcauccaucccaauuau

SEQ ID NO: 630680 - RNA, 19 nt, Homo sapiens
  misc_RNA (1)...(19): siRNA sense strand
ggauaagcaugggacaaga

SEQ ID NO: 630681 - RNA, 19 nt, Homo sapiens
  misc_RNA (1)...(19): siRNA sense strand
agaaguggaugaugaaguc

SEQ ID NO: 630682 - RNA, 19 nt, Homo sapiens
  misc_RNA (1)...(19): siRNA sense strand
caaugaagacugcuaaagu

SEQ ID NO: 630683 - RNA, 19 nt, Homo sapiens
  misc_RNA (1)...(19): siRNA sense strand
aagaaguacucgaacaaga

SEQ ID NO: 630684 - RNA, 19 nt, Homo sapiens
  misc_RNA (1)...(19): siRNA sense strand
ccagaaagccagaagaagu

SEQ ID NO: 630685 - RNA, 19 nt, Homo sapiens
  misc_RNA (1)...(19): siRNA sense strand
guuaccagguuacaaugaa

SEQ ID NO: 630686 - RNA, 19 nt, Homo sapiens
  misc_RNA (1)...(19): siRNA sense strand
gcuccaggcuuuccaaggu

SEQ ID NO: 630687 - RNA, 19 nt, Homo sapiens
  misc_RNA (1)...(19): siRNA sense strand
cagcuacuccaaaggguua

SEQ ID NO: 630688 - RNA, 19 nt, Homo sapiens
  misc_RNA (1)...(19): siRNA sense strand
gcucgaguguauaaacaau

SEQ ID NO: 630689 - RNA, 19 nt, Homo sapiens
  misc_RNA (1)...(19): siRNA sense strand
uuacacugcuugcccagaa

SEQ ID NO: 630690 - RNA, 19 nt, Homo sapiens
  misc_RNA (1)...(19): siRNA sense strand
aaacuuuaccggagaagaa

SEQ ID NO: 630691 - RNA, 19 nt, Homo sapiens
  misc_RNA (1)...(19): siRNA sense strand
aacagaaaguggacaauca

SEQ ID NO: 630692 - RNA, 19 nt, Homo sapiens
  misc_RNA (1)...(19): siRNA sense strand
gaagacugcuaaaguugcu

SEQ ID NO: 630693 - RNA, 19 nt, Homo sapiens
  misc_RNA (1)...(19): siRNA sense strand
gcauccaucccaauuauca

SEQ ID NO: 630694 - RNA, 19 nt, Homo sapiens
  misc_RNA (1)...(19): siRNA sense strand
gauaagcaugggacaagaa

SEQ ID NO: 630695 - RNA, 19 nt, Homo sapiens
  misc_RNA (1)...(19): siRNA sense strand
gcgcauggaggcaauguau

SEQ ID NO: 630696 - RNA, 19 nt, Homo sapiens
  misc_RNA (1)...(19): siRNA sense strand
ccggagaagaaauuaaaua

SEQ ID NO: 630697 - RNA, 19 nt, Homo sapiens
  misc_RNA (1)...(19): siRNA sense strand
gaugagcgcagcgaaauuc

SEQ ID NO: 630698 - RNA, 19 nt, Homo sapiens
  misc_RNA (1)...(19): siRNA sense strand
aagauugucuacagaaaca

SEQ ID NO: 630699 - RNA, 19 nt, Homo sapiens
  misc_RNA (1)...(19): siRNA sense strand
gaggcaauguauuaauuac

SEQ ID NO: 630700 - RNA, 19 nt, Homo sapiens
  misc_RNA (1)...(19): siRNA sense strand
ccaagcuguugcugacaaa

SEQ ID NO: 630701 - RNA, 19 nt, Homo sapiens
  misc_RNA (1)...(19): siRNA sense strand
gcaguaugccaaagagaau

SEQ ID NO: 630702 - RNA, 19 nt, Homo sapiens
  misc_RNA (1)...(19): siRNA sense strand
caaugcagcuuuuagaaau

SEQ ID NO: 630703 - RNA, 19 nt, Homo sapiens
  misc_RNA (1)...(19): siRNA sense strand
gcagaucugaaauuuagga

SEQ ID NO: 630704 - RNA, 19 nt, Homo sapiens
  misc_RNA (1)...(19): siRNA sense strand
ccagaagccuaaauuuuga

SEQ ID NO: 630705 - RNA, 19 nt, Homo sapiens
  misc_RNA (1)...(19): siRNA sense strand
uggacacccuugcuaaaga

SEQ ID NO: 630706 - RNA, 19 nt, Homo sapiens
  misc_RNA (1)...(19): siRNA sense strand
gaacacuauagcucucuga

SEQ ID NO: 630707 - RNA, 19 nt, Homo sapiens
  misc_RNA (1)...(19): siRNA sense strand
ucaggcagcuacuccaaag

SEQ ID NO: 630708 - RNA, 19 nt, Homo sapiens
  misc_RNA (1)...(19): siRNA sense strand
gcuccagaagccuaaauuu

SEQ ID NO: 630709 - RNA, 19 nt, Homo sapiens
  misc_RNA (1)...(19): siRNA sense strand
gcccagaaagccagaagaa

SEQ ID NO: 630710 - RNA, 19 nt, Homo sapiens
  misc_RNA (1)...(19): siRNA sense strand
ccaaagagaaugguaccaa

SEQ ID NO: 630711 - RNA, 19 nt, Homo sapiens
  misc_RNA (1)...(19): siRNA sense strand
aaucugaggauccuguuaa

SEQ ID NO: 630712 - RNA, 19 nt, Homo sapiens
  misc_RNA (1)...(19): siRNA sense strand
cagaaagccagaagaagug

SEQ ID NO: 630713 - RNA, 19 nt, Homo sapiens
  misc_RNA (1)...(19): siRNA sense strand
caaguuggcagagcaguau

SEQ ID NO: 630714 - RNA, 19 nt, Homo sapiens
  misc_RNA (1)...(19): siRNA sense strand
ucagauuuguaccauccua

SEQ ID NO: 630715 - RNA, 19 nt, Homo sapiens
  misc_RNA (1)...(19): siRNA sense strand
agaaacaggcuuugcacuu

SEQ ID NO: 630716 - RNA, 19 nt, Homo sapiens
  misc_RNA (1)...(19): siRNA sense strand
gagaaaagaaguacucgaa

SEQ ID NO: 630717 - RNA, 19 nt, Homo sapiens
  misc_RNA (1)...(19): siRNA sense strand
aaacagaaaggagaguauu

SEQ ID NO: 630718 - RNA, 19 nt, Homo sapiens
  misc_RNA (1)...(19): siRNA sense strand
guuaaacaaugcagcuuuu

SEQ ID NO: 630719 - RNA, 19 nt, Homo sapiens
  misc_RNA (1)...(19): siRNA sense strand
ucgaguguauaaacaauca

SEQ ID NO: 630720 - RNA, 19 nt, Homo sapiens
  misc_RNA (1)...(19): siRNA sense strand
uaccggagaagaaauuaaa

SEQ ID NO: 630721 - RNA, 19 nt, Homo sapiens
  misc_RNA (1)...(19): siRNA sense strand
aaacaggcuuugcacuucu

SEQ ID NO: 630722 - RNA, 19 nt, Homo sapiens
  misc_RNA (1)...(19): siRNA sense strand
aaaauaaagugcagcugaa

SEQ ID NO: 630723 - RNA, 19 nt, Homo sapiens
  misc_RNA (1)...(19): siRNA sense strand
acaagaagaggagaagaaa

SEQ ID NO: 630724 - RNA, 19 nt, Homo sapiens
  misc_RNA (1)...(19): siRNA sense strand
gcagagcaguaugccaaag

SEQ ID NO: 630725 - RNA, 19 nt, Homo sapiens
  misc_RNA (1)...(19): siRNA sense strand
agaagcauccaucccaauu

SEQ ID NO: 630726 - RNA, 19 nt, Homo sapiens
  misc_RNA (1)...(19): siRNA sense strand
aggagaguauuugccuuua

SEQ ID NO: 630727 - RNA, 19 nt, Homo sapiens
  misc_RNA (1)...(19): siRNA sense strand
gaaguccuuaggcaugauu

SEQ ID NO: 630728 - RNA, 19 nt, Homo sapiens
  misc_RNA (1)...(19): siRNA sense strand
aguggaugaugaagucuuu

SEQ ID NO: 630729 - RNA, 19 nt, Homo sapiens
  misc_RNA (1)...(19): siRNA sense strand
gcccguguauugucuagca

SEQ ID NO: 630730 - RNA, 19 nt, Homo sapiens
  misc_RNA (1)...(19): siRNA sense strand
agaagaaguggaugaugaa

SEQ ID NO: 630731 - RNA, 19 nt, Homo sapiens
  misc_RNA (1)...(19): siRNA sense strand
uuacaaugaagacugcuaa

SEQ ID NO: 630732 - RNA, 19 nt, Homo sapiens
  misc_RNA (1)...(19): siRNA sense strand
uuuccaagguuaccagguu

SEQ ID NO: 630733 - RNA, 19 nt, Homo sapiens
  misc_RNA (1)...(19): siRNA sense strand
acagaaaggagaguauuug

SEQ ID NO: 630734 - RNA, 19 nt, Homo sapiens
  misc_RNA (1)...(19): siRNA sense strand
guaccauccuauccagauc

SEQ ID NO: 630735 - RNA, 19 nt, Homo sapiens
  misc_RNA (1)...(19): siRNA sense strand
ugagccggaugcuagugua

SEQ ID NO: 630736 - RNA, 19 nt, Homo sapiens
  misc_RNA (1)...(19): siRNA sense strand
gauuuggacacccuugcua

SEQ ID NO: 630737 - RNA, 19 nt, Homo sapiens
  misc_RNA (1)...(19): siRNA sense strand
gaugaagucuuuuauucuc

SEQ ID NO: 630738 - RNA, 19 nt, Homo sapiens
  misc_RNA (1)...(19): siRNA sense strand
caacuucaugguucgaaau

SEQ ID NO: 630739 - RNA, 19 nt, Homo sapiens
  misc_RNA (1)...(19): siRNA sense strand
cuaaaguugcugccucuga

SEQ ID NO: 630740 - RNA, 19 nt, Homo sapiens
  misc_RNA (1)...(19): siRNA sense strand
uccaggcuuuccaagguua

SEQ ID NO: 630741 - RNA, 19 nt, Homo sapiens
  misc_RNA (1)...(19): siRNA sense strand
uuagaaauggucacaacuu

SEQ ID NO: 630742 - RNA, 19 nt, Homo sapiens
  misc_RNA (1)...(19): siRNA sense strand
uuccaagguuaccagguua

SEQ ID NO: 630743 - RNA, 19 nt, Homo sapiens
  misc_RNA (1)...(19): siRNA sense strand
ggacaagaagaggagaaga

SEQ ID NO: 630744 - RNA, 19 nt, Homo sapiens
  misc_RNA (1)...(19): siRNA sense strand
acagacacuuggauaagca

SEQ ID NO: 630745 - RNA, 19 nt, Homo sapiens
  misc_RNA (1)...(19): siRNA sense strand
acaacuucaugguucgaaa

SEQ ID NO: 630746 - RNA, 19 nt, Homo sapiens
  misc_RNA (1)...(19): siRNA sense strand
gaaaacagaaaguggacaa

SEQ ID NO: 630747 - RNA, 19 nt, Homo sapiens
  misc_RNA (1)...(19): siRNA sense strand
acaauauccugcacuccau

SEQ ID NO: 630748 - RNA, 19 nt, Homo sapiens
  misc_RNA (1)...(19): siRNA sense strand
agaaguacucgaacaagau

SEQ ID NO: 630749 - RNA, 19 nt, Homo sapiens
  misc_RNA (1)...(19): siRNA sense strand
aaacagaaaguggacaauc

SEQ ID NO: 630750 - RNA, 19 nt, Homo sapiens
  misc_RNA (1)...(19): siRNA sense strand
ucuccucgaucacuagugu

SEQ ID NO: 630751 - RNA, 19 nt, Homo sapiens
  misc_RNA (1)...(19): siRNA sense strand
ggaaguccuuaggcaugau

SEQ ID NO: 630752 - RNA, 19 nt, Homo sapiens
  misc_RNA (1)...(19): siRNA sense strand
gagcaugacccucacgaua

SEQ ID NO: 630753 - RNA, 19 nt, Homo sapiens
  misc_RNA (1)...(19): siRNA sense strand
gcccagaugugaagaauuc

SEQ ID NO: 630754 - RNA, 19 nt, Homo sapiens
  misc_RNA (1)...(19): siRNA sense strand
gagaagaggccauccuuug

SEQ ID NO: 630755 - RNA, 19 nt, Homo sapiens
  misc_RNA (1)...(19): siRNA sense strand
gaccggaucuuggaaauca

SEQ ID NO: 630756 - RNA, 19 nt, Homo sapiens
  misc_RNA (1)...(19): siRNA sense strand
gagauugaccugcugauuc

SEQ ID NO: 630757 - RNA, 19 nt, Homo sapiens
  misc_RNA (1)...(19): siRNA sense strand
gaacgcagacccugacuac

SEQ ID NO: 630758 - RNA, 19 nt, Homo sapiens
  misc_RNA (1)...(19): siRNA sense strand
gcaugacccucacgauaca

SEQ ID NO: 630759 - RNA, 19 nt, Homo sapiens
  misc_RNA (1)...(19): siRNA sense strand
gaagaggccauccuuugug

SEQ ID NO: 630760 - RNA, 19 nt, Homo sapiens
  misc_RNA (1)...(19): siRNA sense strand
gguugacgcuacuuuguug

SEQ ID NO: 630761 - RNA, 19 nt, Homo sapiens
  misc_RNA (1)...(19): siRNA sense strand
gacaagaggcucaacuuca

SEQ ID NO: 630762 - RNA, 19 nt, Homo sapiens
  misc_RNA (1)...(19): siRNA sense strand
ggacaagaggcucaacuuc

SEQ ID NO: 630763 - RNA, 19 nt, Homo sapiens
  misc_RNA (1)...(19): siRNA sense strand
gaucuaugauggccaguac

SEQ ID NO: 630764 - RNA, 19 nt, Homo sapiens
  misc_RNA (1)...(19): siRNA sense strand
acaagaggcucaacuucau

SEQ ID NO: 630765 - RNA, 19 nt, Homo sapiens
  misc_RNA (1)...(19): siRNA sense strand
ccaagggacugguuauggu

SEQ ID NO: 630766 - RNA, 19 nt, Homo sapiens
  misc_RNA (1)...(19): siRNA sense strand
agauugaccugcugauuca

SEQ ID NO: 630767 - RNA, 19 nt, Homo sapiens
  misc_RNA (1)...(19): siRNA sense strand
gagaccggaucuuggaaau

SEQ ID NO: 630768 - RNA, 19 nt, Homo sapiens
  misc_RNA (1)...(19): siRNA sense strand
gcacgcccauccgaaaugu

SEQ ID NO: 630769 - RNA, 19 nt, Homo sapiens
  misc_RNA (1)...(19): siRNA sense strand
ucaacuucaucacugagua

SEQ ID NO: 630770 - RNA, 19 nt, Homo sapiens
  misc_RNA (1)...(19): siRNA sense strand
ucaaggaggugaaggucau

SEQ ID NO: 630771 - RNA, 19 nt, Homo sapiens
  misc_RNA (1)...(19): siRNA sense strand
gagcccagaugugaagaau

SEQ ID NO: 630772 - RNA, 19 nt, Homo sapiens
  misc_RNA (1)...(19): siRNA sense strand
guggauguguucuccuuug

SEQ ID NO: 630773 - RNA, 19 nt, Homo sapiens
  misc_RNA (1)...(19): siRNA sense strand
ugagacaggugaggugaug

SEQ ID NO: 630774 - RNA, 19 nt, Homo sapiens
  misc_RNA (1)...(19): siRNA sense strand
aagaggccauccuuuguga

SEQ ID NO: 630775 - RNA, 19 nt, Homo sapiens
  misc_RNA (1)...(19): siRNA sense strand
ccauggagccagagaguga

SEQ ID NO: 630776 - RNA, 19 nt, Homo sapiens
  misc_RNA (1)...(19): siRNA sense strand
ggagaccggaucuuggaaa

SEQ ID NO: 630777 - RNA, 19 nt, Homo sapiens
  misc_RNA (1)...(19): siRNA sense strand
gauggcaccugagaugauc

SEQ ID NO: 630778 - RNA, 19 nt, Homo sapiens
  misc_RNA (1)...(19): siRNA sense strand
gaccucaacucccacaacu

SEQ ID NO: 630779 - RNA, 19 nt, Homo sapiens
  misc_RNA (1)...(19): siRNA sense strand
gugaggugauggugaugaa

SEQ ID NO: 630780 - RNA, 19 nt, Homo sapiens
  misc_RNA (1)...(19): siRNA sense strand
ggccagaggaucuaugaug

SEQ ID NO: 630781 - RNA, 19 nt, Homo sapiens
  misc_RNA (1)...(19): siRNA sense strand
caggugaggugauggugau

SEQ ID NO: 630782 - RNA, 19 nt, Homo sapiens
  misc_RNA (1)...(19): siRNA sense strand
ccaacgugcucaaguucau

SEQ ID NO: 630783 - RNA, 19 nt, Homo sapiens
  misc_RNA (1)...(19): siRNA sense strand
gaagccagaccgcaagaag

SEQ ID NO: 630784 - RNA, 19 nt, Homo sapiens
  misc_RNA (1)...(19): siRNA sense strand
uggcaagcguggacuuuca

SEQ ID NO: 630785 - RNA, 19 nt, Homo sapiens
  misc_RNA (1)...(19): siRNA sense strand
ggccgcagcuaugaugaga

SEQ ID NO: 630786 - RNA, 19 nt, Homo sapiens
  misc_RNA (1)...(19): siRNA sense strand
gagguugacgcuacuuugu

SEQ ID NO: 630787 - RNA, 19 nt, Homo sapiens
  misc_RNA (1)...(19): siRNA sense strand
cgagaagaggccauccuuu

SEQ ID NO: 630788 - RNA, 19 nt, Homo sapiens
  misc_RNA (1)...(19): siRNA sense strand
ccgcagcuaugaugagaag

SEQ ID NO: 630789 - RNA, 19 nt, Homo sapiens
  misc_RNA (1)...(19): siRNA sense strand
gagcauggacagccaguac

SEQ ID NO: 630790 - RNA, 19 nt, Homo sapiens
  misc_RNA (1)...(19): siRNA sense strand
gcaccaguacuaugagaag

SEQ ID NO: 630791 - RNA, 19 nt, Homo sapiens
  misc_RNA (1)...(19): siRNA sense strand
gagugagcuuugccaagga

SEQ ID NO: 630792 - RNA, 19 nt, Homo sapiens
  misc_RNA (1)...(19): siRNA sense strand
ggauggcaccugagaugau

SEQ ID NO: 630793 - RNA, 19 nt, Homo sapiens
  misc_RNA (1)...(19): siRNA sense strand
gcacugcuacuaccagacu

SEQ ID NO: 630794 - RNA, 19 nt, Homo sapiens
  misc_RNA (1)...(19): siRNA sense strand
agaagaggccauccuuugu

SEQ ID NO: 630795 - RNA, 19 nt, Homo sapiens
  misc_RNA (1)...(19): siRNA sense strand
augagaagguggauguguu

SEQ ID NO: 630796 - RNA, 19 nt, Homo sapiens
  misc_RNA (1)...(19): siRNA sense strand
ggucaugcgaugccuggaa

SEQ ID NO: 630797 - RNA, 19 nt, Homo sapiens
  misc_RNA (1)...(19): siRNA sense strand
ugucgcaccaguacuauga

SEQ ID NO: 630798 - RNA, 19 nt, Homo sapiens
  misc_RNA (1)...(19): siRNA sense strand
cuucaucacugaguacauc

SEQ ID NO: 630799 - RNA, 19 nt, Homo sapiens
  misc_RNA (1)...(19): siRNA sense strand
ccaguacuaugagaaggau

SEQ ID NO: 630800 - RNA, 19 nt, Homo sapiens
  misc_RNA (1)...(19): siRNA sense strand
gaugagaagguggaugugu

SEQ ID NO: 630801 - RNA, 19 nt, Homo sapiens
  misc_RNA (1)...(19): siRNA sense strand
gcaugagcccagaugugaa

SEQ ID NO: 630802 - RNA, 19 nt, Homo sapiens
  misc_RNA (1)...(19): siRNA sense strand
gagcagcuggacagagguu

SEQ ID NO: 630803 - RNA, 19 nt, Homo sapiens
  misc_RNA (1)...(19): siRNA sense strand
cgagauugaccugcugauu

SEQ ID NO: 630804 - RNA, 19 nt, Homo sapiens
  misc_RNA (1)...(19): siRNA sense strand
ccugagcucuccggcuuau

SEQ ID NO: 630805 - RNA, 19 nt, Homo sapiens
  misc_RNA (1)...(19): siRNA sense strand
gcagcuaugaugagaaggu

SEQ ID NO: 630806 - RNA, 19 nt, Homo sapiens
  misc_RNA (1)...(19): siRNA sense strand
gcggccagaggaucuauga

SEQ ID NO: 630807 - RNA, 19 nt, Homo sapiens
  misc_RNA (1)...(19): siRNA sense strand
ucacgugugggaccuuuau

SEQ ID NO: 630808 - RNA, 19 nt, Homo sapiens
  misc_RNA (1)...(19): siRNA sense strand
ggcucaacuucaucacuga

SEQ ID NO: 630809 - RNA, 19 nt, Homo sapiens
  misc_RNA (1)...(19): siRNA sense strand
ccucacgugugggaccuuu

SEQ ID NO: 630810 - RNA, 19 nt, Homo sapiens
  misc_RNA (1)...(19): siRNA sense strand
ugcaugagcccagauguga

SEQ ID NO: 630811 - RNA, 19 nt, Homo sapiens
  misc_RNA (1)...(19): siRNA sense strand
cgucggagaccggaucuug

SEQ ID NO: 630812 - RNA, 19 nt, Homo sapiens
  misc_RNA (1)...(19): siRNA sense strand
gaggccauccuuugugaag

SEQ ID NO: 630813 - RNA, 19 nt, Homo sapiens
  misc_RNA (1)...(19): siRNA sense strand
ugagaagguggauguguuc

SEQ ID NO: 630814 - RNA, 19 nt, Homo sapiens
  misc_RNA (1)...(19): siRNA sense strand
uaccuccacuccaugaaca

SEQ ID NO: 630815 - RNA, 19 nt, Homo sapiens
  misc_RNA (1)...(19): siRNA sense strand
ggaucuaugauggccagua

SEQ ID NO: 630816 - RNA, 19 nt, Homo sapiens
  misc_RNA (1)...(19): siRNA sense strand
ucgcaccaguacuaugaga

SEQ ID NO: 630817 - RNA, 19 nt, Homo sapiens
  misc_RNA (1)...(19): siRNA sense strand
gcagcuggacagagguuuc

SEQ ID NO: 630818 - RNA, 19 nt, Homo sapiens
  misc_RNA (1)...(19): siRNA sense strand
ggccauccuuugugaagcu

SEQ ID NO: 630819 - RNA, 19 nt, Homo sapiens
  misc_RNA (1)...(19): siRNA sense strand
agaggaaggaagcgaguug

SEQ ID NO: 630820 - RNA, 19 nt, Homo sapiens
  misc_RNA (1)...(19): siRNA sense strand
gagcaugacccucacgaua

SEQ ID NO: 630821 - RNA, 19 nt, Homo sapiens
  misc_RNA (1)...(19): siRNA sense strand
gcccagaugugaagaauuc

SEQ ID NO: 630822 - RNA, 19 nt, Homo sapiens
  misc_RNA (1)...(19): siRNA sense strand
gaccggaucuuggaaauca

SEQ ID NO: 630823 - RNA, 19 nt, Homo sapiens
  misc_RNA (1)...(19): siRNA sense strand
gagauugaccugcugauuc

SEQ ID NO: 630824 - RNA, 19 nt, Homo sapiens
  misc_RNA (1)...(19): siRNA sense strand
gguugacgcuacuuuguug

SEQ ID NO: 630825 - RNA, 19 nt, Homo sapiens
  misc_RNA (1)...(19): siRNA sense strand
gcaugacccucacgauaca

SEQ ID NO: 630826 - RNA, 19 nt, Homo sapiens
  misc_RNA (1)...(19): siRNA sense strand
gaucuaugauggccaguac

SEQ ID NO: 630827 - RNA, 19 nt, Homo sapiens
  misc_RNA (1)...(19): siRNA sense strand
ccaagggacugguuauggu

SEQ ID NO: 630828 - RNA, 19 nt, Homo sapiens
  misc_RNA (1)...(19): siRNA sense strand
agauugaccugcugauuca

SEQ ID NO: 630829 - RNA, 19 nt, Homo sapiens
  misc_RNA (1)...(19): siRNA sense strand
gagaccggaucuuggaaau

SEQ ID NO: 630830 - RNA, 19 nt, Homo sapiens
  misc_RNA (1)...(19): siRNA sense strand
gcacgcccauccgaaaugu

SEQ ID NO: 630831 - RNA, 19 nt, Homo sapiens
  misc_RNA (1)...(19): siRNA sense strand
gagcccagaugugaagaau

SEQ ID NO: 630832 - RNA, 19 nt, Homo sapiens
  misc_RNA (1)...(19): siRNA sense strand
ggagaccggaucuuggaaa

SEQ ID NO: 630833 - RNA, 19 nt, Homo sapiens
  misc_RNA (1)...(19): siRNA sense strand
ggccagaggaucuaugaug

SEQ ID NO: 630834 - RNA, 19 nt, Homo sapiens
  misc_RNA (1)...(19): siRNA sense strand
uggcaagcguggacuuuca

SEQ ID NO: 630835 - RNA, 19 nt, Homo sapiens
  misc_RNA (1)...(19): siRNA sense strand
gagguugacgcuacuuugu

SEQ ID NO: 630836 - RNA, 19 nt, Homo sapiens
  misc_RNA (1)...(19): siRNA sense strand
gcaccaguacuaugagaag

SEQ ID NO: 630837 - RNA, 19 nt, Homo sapiens
  misc_RNA (1)...(19): siRNA sense strand
gcacugcuacuaccagacu

SEQ ID NO: 630838 - RNA, 19 nt, Homo sapiens
  misc_RNA (1)...(19): siRNA sense strand
ugucgcaccaguacuauga

SEQ ID NO: 630839 - RNA, 19 nt, Homo sapiens
  misc_RNA (1)...(19): siRNA sense strand
ccaguacuaugagaaggau

SEQ ID NO: 630840 - RNA, 19 nt, Homo sapiens
  misc_RNA (1)...(19): siRNA sense strand
gcaugagcccagaugugaa

SEQ ID NO: 630841 - RNA, 19 nt, Homo sapiens
  misc_RNA (1)...(19): siRNA sense strand
cgagauugaccugcugauu

SEQ ID NO: 630842 - RNA, 19 nt, Homo sapiens
  misc_RNA (1)...(19): siRNA sense strand
gcggccagaggaucuauga

SEQ ID NO: 630843 - RNA, 19 nt, Homo sapiens
  misc_RNA (1)...(19): siRNA sense strand
ccugagcucuccggcuuau

SEQ ID NO: 630844 - RNA, 19 nt, Homo sapiens
  misc_RNA (1)...(19): siRNA sense strand
ucacgugugggaccuuuau

SEQ ID NO: 630845 - RNA, 19 nt, Homo sapiens
  misc_RNA (1)...(19): siRNA sense strand
ccucacgugugggaccuuu

SEQ ID NO: 630846 - RNA, 19 nt, Homo sapiens
  misc_RNA (1)...(19): siRNA sense strand
ugcaugagcccagauguga

SEQ ID NO: 630847 - RNA, 19 nt, Homo sapiens
  misc_RNA (1)...(19): siRNA sense strand
ggaucuaugauggccagua

SEQ ID NO: 630848 - RNA, 19 nt, Homo sapiens
  misc_RNA (1)...(19): siRNA sense strand
cgucggagaccggaucuug

SEQ ID NO: 630849 - RNA, 19 nt, Homo sapiens
  misc_RNA (1)...(19): siRNA sense strand
ucgcaccaguacuaugaga

SEQ ID NO: 630850 - RNA, 19 nt, Homo sapiens
  misc_RNA (1)...(19): siRNA sense strand
agaggaaggaagcgaguug

SEQ ID NO: 630851 - RNA, 19 nt, Homo sapiens
  misc_RNA (1)...(19): siRNA sense strand
gaaggucaauuacaacuuu

SEQ ID NO: 630852 - RNA, 19 nt, Homo sapiens
  misc_RNA (1)...(19): siRNA sense strand
caaccuggauaaugaguua

SEQ ID NO: 630853 - RNA, 19 nt, Homo sapiens
  misc_RNA (1)...(19): siRNA sense strand
gugcugagcuucucucuga

SEQ ID NO: 630854 - RNA, 19 nt, Homo sapiens
  misc_RNA (1)...(19): siRNA sense strand
ccaccaaacuaaaggauuu

SEQ ID NO: 630855 - RNA, 19 nt, Homo sapiens
  misc_RNA (1)...(19): siRNA sense strand
gagaagcuguguaucuauu

SEQ ID NO: 630856 - RNA, 19 nt, Homo sapiens
  misc_RNA (1)...(19): siRNA sense strand
ggacaaagaagcaaagguu

SEQ ID NO: 630857 - RNA, 19 nt, Homo sapiens
  misc_RNA (1)...(19): siRNA sense strand
ucacugaacuccagcagaa

SEQ ID NO: 630858 - RNA, 19 nt, Homo sapiens
  misc_RNA (1)...(19): siRNA sense strand
aaaggaaacugaagccaaa

SEQ ID NO: 630859 - RNA, 19 nt, Homo sapiens
  misc_RNA (1)...(19): siRNA sense strand
caaagagugugaaaggaaa

SEQ ID NO: 630860 - RNA, 19 nt, Homo sapiens
  misc_RNA (1)...(19): siRNA sense strand
ggaguggagugccggauuu

SEQ ID NO: 630861 - RNA, 19 nt, Homo sapiens
  misc_RNA (1)...(19): siRNA sense strand
gggauaagcugaaguucug

SEQ ID NO: 630862 - RNA, 19 nt, Homo sapiens
  misc_RNA (1)...(19): siRNA sense strand
gauuugauccucuugauaa

SEQ ID NO: 630863 - RNA, 19 nt, Homo sapiens
  misc_RNA (1)...(19): siRNA sense strand
gugaggaaguuucuacuga

SEQ ID NO: 630864 - RNA, 19 nt, Homo sapiens
  misc_RNA (1)...(19): siRNA sense strand
gaacaggggugcagaaaag

SEQ ID NO: 630865 - RNA, 19 nt, Homo sapiens
  misc_RNA (1)...(19): siRNA sense strand
gcucauugaucuguauaaa

SEQ ID NO: 630866 - RNA, 19 nt, Homo sapiens
  misc_RNA (1)...(19): siRNA sense strand
caacgugacauccucgaua

SEQ ID NO: 630867 - RNA, 19 nt, Homo sapiens
  misc_RNA (1)...(19): siRNA sense strand
ucaaggaaauccaugaaca

SEQ ID NO: 630868 - RNA, 19 nt, Homo sapiens
  misc_RNA (1)...(19): siRNA sense strand
ucuauuggauggucaacua

SEQ ID NO: 630869 - RNA, 19 nt, Homo sapiens
  misc_RNA (1)...(19): siRNA sense strand
gacaaagaagcaaagguua

SEQ ID NO: 630870 - RNA, 19 nt, Homo sapiens
  misc_RNA (1)...(19): siRNA sense strand
caacaaaugcuuccuagag

SEQ ID NO: 630871 - RNA, 19 nt, Homo sapiens
  misc_RNA (1)...(19): siRNA sense strand
uaaugugaguggagauaaa

SEQ ID NO: 630872 - RNA, 19 nt, Homo sapiens
  misc_RNA (1)...(19): siRNA sense strand
ucacaguccugcagcgaaa

SEQ ID NO: 630873 - RNA, 19 nt, Homo sapiens
  misc_RNA (1)...(19): siRNA sense strand
gaaaacugcuuccgacaau

SEQ ID NO: 630874 - RNA, 19 nt, Homo sapiens
  misc_RNA (1)...(19): siRNA sense strand
gauggucaacuacaacuuu

SEQ ID NO: 630875 - RNA, 19 nt, Homo sapiens
  misc_RNA (1)...(19): siRNA sense strand
guacaaagagugugaaagg

SEQ ID NO: 630876 - RNA, 19 nt, Homo sapiens
  misc_RNA (1)...(19): siRNA sense strand
ccaaaguccucaacgaaag

SEQ ID NO: 630877 - RNA, 19 nt, Homo sapiens
  misc_RNA (1)...(19): siRNA sense strand
cagccaagauccagauugu

SEQ ID NO: 630878 - RNA, 19 nt, Homo sapiens
  misc_RNA (1)...(19): siRNA sense strand
gugaagcacugguacaaag

SEQ ID NO: 630879 - RNA, 19 nt, Homo sapiens
  misc_RNA (1)...(19): siRNA sense strand
caacuacaacuuugaagau

SEQ ID NO: 630880 - RNA, 19 nt, Homo sapiens
  misc_RNA (1)...(19): siRNA sense strand
caggccaccuucuggauaa

SEQ ID NO: 630881 - RNA, 19 nt, Homo sapiens
  misc_RNA (1)...(19): siRNA sense strand
ugaguuaccugcaccaucu

SEQ ID NO: 630882 - RNA, 19 nt, Homo sapiens
  misc_RNA (1)...(19): siRNA sense strand
gaugguacccuuguccuuu

SEQ ID NO: 630883 - RNA, 19 nt, Homo sapiens
  misc_RNA (1)...(19): siRNA sense strand
ucuggaaggucaauuacaa

SEQ ID NO: 630884 - RNA, 19 nt, Homo sapiens
  misc_RNA (1)...(19): siRNA sense strand
gaagcuggguugguuuauc

SEQ ID NO: 630885 - RNA, 19 nt, Homo sapiens
  misc_RNA (1)...(19): siRNA sense strand
uggauaaguucaucaagga

SEQ ID NO: 630886 - RNA, 19 nt, Homo sapiens
  misc_RNA (1)...(19): siRNA sense strand
gauaaaauaugcuggcaau

SEQ ID NO: 630887 - RNA, 19 nt, Homo sapiens
  misc_RNA (1)...(19): siRNA sense strand
aggagaagcuguguaucua

SEQ ID NO: 630888 - RNA, 19 nt, Homo sapiens
  misc_RNA (1)...(19): siRNA sense strand
gaucucgucguguuccaua

SEQ ID NO: 630889 - RNA, 19 nt, Homo sapiens
  misc_RNA (1)...(19): siRNA sense strand
gaagcaaagguuagguuau

SEQ ID NO: 630890 - RNA, 19 nt, Homo sapiens
  misc_RNA (1)...(19): siRNA sense strand
guugguuuauccaggaaua

SEQ ID NO: 630891 - RNA, 19 nt, Homo sapiens
  misc_RNA (1)...(19): siRNA sense strand
ccauccagguguucacaaa

SEQ ID NO: 630892 - RNA, 19 nt, Homo sapiens
  misc_RNA (1)...(19): siRNA sense strand
aagcaaagguuagguuauc

SEQ ID NO: 630893 - RNA, 19 nt, Homo sapiens
  misc_RNA (1)...(19): siRNA sense strand
cagaagcuggguugguuua

SEQ ID NO: 630894 - RNA, 19 nt, Homo sapiens
  misc_RNA (1)...(19): siRNA sense strand
gaagcuguguaucuauugg

SEQ ID NO: 630895 - RNA, 19 nt, Homo sapiens
  misc_RNA (1)...(19): siRNA sense strand
aagcugaaguucugucugu

SEQ ID NO: 630896 - RNA, 19 nt, Homo sapiens
  misc_RNA (1)...(19): siRNA sense strand
uaacaucauccguacauuc

SEQ ID NO: 630897 - RNA, 19 nt, Homo sapiens
  misc_RNA (1)...(19): siRNA sense strand
aacgugacauccucgauaa

SEQ ID NO: 630898 - RNA, 19 nt, Homo sapiens
  misc_RNA (1)...(19): siRNA sense strand
gaugagaccgugaggaagu

SEQ ID NO: 630899 - RNA, 19 nt, Homo sapiens
  misc_RNA (1)...(19): siRNA sense strand
cucccaaccuggauaauga

SEQ ID NO: 630900 - RNA, 19 nt, Homo sapiens
  misc_RNA (1)...(19): siRNA sense strand
ggagaagcuguguaucuau

SEQ ID NO: 630901 - RNA, 19 nt, Homo sapiens
  misc_RNA (1)...(19): siRNA sense strand
acaaagagugugaaaggaa

SEQ ID NO: 630902 - RNA, 19 nt, Homo sapiens
  misc_RNA (1)...(19): siRNA sense strand
agaggcaacuccgauggua

SEQ ID NO: 630903 - RNA, 19 nt, Homo sapiens
  misc_RNA (1)...(19): siRNA sense strand
agaagcaaagguuagguua

SEQ ID NO: 630904 - RNA, 19 nt, Homo sapiens
  misc_RNA (1)...(19): siRNA sense strand
gcuuugagccucccaagug

SEQ ID NO: 630905 - RNA, 19 nt, Homo sapiens
  misc_RNA (1)...(19): siRNA sense strand
caucauccguacauuccuu

SEQ ID NO: 630906 - RNA, 19 nt, Homo sapiens
  misc_RNA (1)...(19): siRNA sense strand
gagcuucucucugaaaucc

SEQ ID NO: 630907 - RNA, 19 nt, Homo sapiens
  misc_RNA (1)...(19): siRNA sense strand
guuggcaucuucuggacaa

SEQ ID NO: 630908 - RNA, 19 nt, Homo sapiens
  misc_RNA (1)...(19): siRNA sense strand
auaaagcacuggcaucaac

SEQ ID NO: 630909 - RNA, 19 nt, Homo sapiens
  misc_RNA (1)...(19): siRNA sense strand
gaucaaaugccaggagaag

SEQ ID NO: 630910 - RNA, 19 nt, Homo sapiens
  misc_RNA (1)...(19): siRNA sense strand
ggaaggucaauuacaacuu

SEQ ID NO: 630911 - RNA, 19 nt, Homo sapiens
  misc_RNA (1)...(19): siRNA sense strand
gagcuggucacacaauauc

SEQ ID NO: 630912 - RNA, 19 nt, Homo sapiens
  misc_RNA (1)...(19): siRNA sense strand
gcacugggucagcugaguu

SEQ ID NO: 630913 - RNA, 19 nt, Homo sapiens
  misc_RNA (1)...(19): siRNA sense strand
gaaggaggaggagcuugaa

SEQ ID NO: 630914 - RNA, 19 nt, Homo sapiens
  misc_RNA (1)...(19): siRNA sense strand
gacccaaccaauaauguga

SEQ ID NO: 630915 - RNA, 19 nt, Homo sapiens
  misc_RNA (1)...(19): siRNA sense strand
uggagcuggucacacaaua

SEQ ID NO: 630916 - RNA, 19 nt, Homo sapiens
  misc_RNA (1)...(19): siRNA sense strand
gaagcccuacgaagaaugu

SEQ ID NO: 630917 - RNA, 19 nt, Homo sapiens
  misc_RNA (1)...(19): siRNA sense strand
gcacaaaaucgucaaggaa

SEQ ID NO: 630918 - RNA, 19 nt, Homo sapiens
  misc_RNA (1)...(19): siRNA sense strand
uaaaacaauuccaggauca

SEQ ID NO: 630919 - RNA, 19 nt, Homo sapiens
  misc_RNA (1)...(19): siRNA sense strand
ggaaacccaauaccaccuu

SEQ ID NO: 630920 - RNA, 19 nt, Homo sapiens
  misc_RNA (1)...(19): siRNA sense strand
aaaccaggccugugaucuu

SEQ ID NO: 630921 - RNA, 19 nt, Homo sapiens
  misc_RNA (1)...(19): siRNA sense strand
aagaugagaccgugaggaa

SEQ ID NO: 630922 - RNA, 19 nt, Homo sapiens
  misc_RNA (1)...(19): siRNA sense strand
caaaggcacagcucugaag

SEQ ID NO: 630923 - RNA, 19 nt, Homo sapiens
  misc_RNA (1)...(19): siRNA sense strand
caacagccaagauccagau

SEQ ID NO: 630924 - RNA, 19 nt, Homo sapiens
  misc_RNA (1)...(19): siRNA sense strand
ccugaagcccuacgaagaa

SEQ ID NO: 630925 - RNA, 19 nt, Homo sapiens
  misc_RNA (1)...(19): siRNA sense strand
gccaggagaagcuguguau

SEQ ID NO: 630926 - RNA, 19 nt, Homo sapiens
  misc_RNA (1)...(19): siRNA sense strand
caucaacagugccagaaaa

SEQ ID NO: 630927 - RNA, 19 nt, Homo sapiens
  misc_RNA (1)...(19): siRNA sense strand
ugacaaccguccuggaaaa

SEQ ID NO: 630928 - RNA, 19 nt, Homo sapiens
  misc_RNA (1)...(19): siRNA sense strand
caaccguccuggaaaacua

SEQ ID NO: 630929 - RNA, 19 nt, Homo sapiens
  misc_RNA (1)...(19): siRNA sense strand
ucaaggaugggacuggaaa

SEQ ID NO: 630930 - RNA, 19 nt, Homo sapiens
  misc_RNA (1)...(19): siRNA sense strand
ggagcuggucacacaauau

SEQ ID NO: 630931 - RNA, 19 nt, Homo sapiens
  misc_RNA (1)...(19): siRNA sense strand
gcuucucucugaaauccaa

SEQ ID NO: 630932 - RNA, 19 nt, Homo sapiens
  misc_RNA (1)...(19): siRNA sense strand
cuacaacuuugaagaugag

SEQ ID NO: 630933 - RNA, 19 nt, Homo sapiens
  misc_RNA (1)...(19): siRNA sense strand
acuacaacuuugaagauga

SEQ ID NO: 630934 - RNA, 19 nt, Homo sapiens
  misc_RNA (1)...(19): siRNA sense strand
gcaucaacagugccagaaa

SEQ ID NO: 630935 - RNA, 19 nt, Homo sapiens
  misc_RNA (1)...(19): siRNA sense strand
gauaaagcacuggcaucaa

SEQ ID NO: 630936 - RNA, 19 nt, Homo sapiens
  misc_RNA (1)...(19): siRNA sense strand
aaccaggccugugaucuug

SEQ ID NO: 630937 - RNA, 19 nt, Homo sapiens
  misc_RNA (1)...(19): siRNA sense strand
uaauucgccuggugaagca

SEQ ID NO: 630938 - RNA, 19 nt, Homo sapiens
  misc_RNA (1)...(19): siRNA sense strand
gcugagcuucucucugaaa

SEQ ID NO: 630939 - RNA, 19 nt, Homo sapiens
  misc_RNA (1)...(19): siRNA sense strand
ggaggaggagcuugaaguc

SEQ ID NO: 630940 - RNA, 19 nt, Homo sapiens
  misc_RNA (1)...(19): siRNA sense strand
agaaggaggaggagcuuga

SEQ ID NO: 630941 - RNA, 19 nt, Homo sapiens
  misc_RNA (1)...(19): siRNA sense strand
caacuuugacauugcugaa

SEQ ID NO: 630942 - RNA, 19 nt, Homo sapiens
  misc_RNA (1)...(19): siRNA sense strand
gagaagccaacgugacauc

SEQ ID NO: 630943 - RNA, 19 nt, Homo sapiens
  misc_RNA (1)...(19): siRNA sense strand
gccaaaggcacagcucuga

SEQ ID NO: 630944 - RNA, 19 nt, Homo sapiens
  misc_RNA (1)...(19): siRNA sense strand
gggaggaucaaccgccaaa

SEQ ID NO: 630945 - RNA, 19 nt, Homo sapiens
  misc_RNA (1)...(19): siRNA sense strand
aaacugcuuccgacaauca

SEQ ID NO: 630946 - RNA, 19 nt, Homo sapiens
  misc_RNA (1)...(19): siRNA sense strand
caggagaagcuguguaucu

SEQ ID NO: 630947 - RNA, 19 nt, Homo sapiens
  misc_RNA (1)...(19): siRNA sense strand
uucuggagcugaucaaaug

SEQ ID NO: 630948 - RNA, 19 nt, Homo sapiens
  misc_RNA (1)...(19): siRNA sense strand
augcagggcucauugaucu

SEQ ID NO: 630949 - RNA, 19 nt, Homo sapiens
  misc_RNA (1)...(19): siRNA sense strand
cucagaagcuggguugguu

SEQ ID NO: 630950 - RNA, 19 nt, Homo sapiens
  misc_RNA (1)...(19): siRNA sense strand
uacaaagagugugaaagga

SEQ ID NO: 630951 - RNA, 19 nt, Homo sapiens
  misc_RNA (1)...(19): siRNA sense strand
gaaggucaauuacaacuuu

SEQ ID NO: 630952 - RNA, 19 nt, Homo sapiens
  misc_RNA (1)...(19): siRNA sense strand
caaccuggauaaugaguua

SEQ ID NO: 630953 - RNA, 19 nt, Homo sapiens
  misc_RNA (1)...(19): siRNA sense strand
gugcugagcuucucucuga

SEQ ID NO: 630954 - RNA, 19 nt, Homo sapiens
  misc_RNA (1)...(19): siRNA sense strand
ccaccaaacuaaaggauuu

SEQ ID NO: 630955 - RNA, 19 nt, Homo sapiens
  misc_RNA (1)...(19): siRNA sense strand
gagaagcuguguaucuauu

SEQ ID NO: 630956 - RNA, 19 nt, Homo sapiens
  misc_RNA (1)...(19): siRNA sense strand
ggacaaagaagcaaagguu

SEQ ID NO: 630957 - RNA, 19 nt, Homo sapiens
  misc_RNA (1)...(19): siRNA sense strand
ucacugaacuccagcagaa

SEQ ID NO: 630958 - RNA, 19 nt, Homo sapiens
  misc_RNA (1)...(19): siRNA sense strand
aaaggaaacugaagccaaa

SEQ ID NO: 630959 - RNA, 19 nt, Homo sapiens
  misc_RNA (1)...(19): siRNA sense strand
caaagagugugaaaggaaa

SEQ ID NO: 630960 - RNA, 19 nt, Homo sapiens
  misc_RNA (1)...(19): siRNA sense strand
ggaguggagugccggauuu

SEQ ID NO: 630961 - RNA, 19 nt, Homo sapiens
  misc_RNA (1)...(19): siRNA sense strand
gggauaagcugaaguucug

SEQ ID NO: 630962 - RNA, 19 nt, Homo sapiens
  misc_RNA (1)...(19): siRNA sense strand
gauuugauccucuugauaa

SEQ ID NO: 630963 - RNA, 19 nt, Homo sapiens
  misc_RNA (1)...(19): siRNA sense strand
gugaggaaguuucuacuga

SEQ ID NO: 630964 - RNA, 19 nt, Homo sapiens
  misc_RNA (1)...(19): siRNA sense strand
gaacaggggugcagaaaag

SEQ ID NO: 630965 - RNA, 19 nt, Homo sapiens
  misc_RNA (1)...(19): siRNA sense strand
gcucauugaucuguauaaa

SEQ ID NO: 630966 - RNA, 19 nt, Homo sapiens
  misc_RNA (1)...(19): siRNA sense strand
caacgugacauccucgaua

SEQ ID NO: 630967 - RNA, 19 nt, Homo sapiens
  misc_RNA (1)...(19): siRNA sense strand
ucaaggaaauccaugaaca

SEQ ID NO: 630968 - RNA, 19 nt, Homo sapiens
  misc_RNA (1)...(19): siRNA sense strand
ucuauuggauggucaacua

SEQ ID NO: 630969 - RNA, 19 nt, Homo sapiens
  misc_RNA (1)...(19): siRNA sense strand
gacaaagaagcaaagguua

SEQ ID NO: 630970 - RNA, 19 nt, Homo sapiens
  misc_RNA (1)...(19): siRNA sense strand
caacaaaugcuuccuagag

SEQ ID NO: 630971 - RNA, 19 nt, Homo sapiens
  misc_RNA (1)...(19): siRNA sense strand
uaaugugaguggagauaaa

SEQ ID NO: 630972 - RNA, 19 nt, Homo sapiens
  misc_RNA (1)...(19): siRNA sense strand
ucacaguccugcagcgaaa

SEQ ID NO: 630973 - RNA, 19 nt, Homo sapiens
  misc_RNA (1)...(19): siRNA sense strand
gaaaacugcuuccgacaau

SEQ ID NO: 630974 - RNA, 19 nt, Homo sapiens
  misc_RNA (1)...(19): siRNA sense strand
gauggucaacuacaacuuu

SEQ ID NO: 630975 - RNA, 19 nt, Homo sapiens
  misc_RNA (1)...(19): siRNA sense strand
guacaaagagugugaaagg

SEQ ID NO: 630976 - RNA, 19 nt, Homo sapiens
  misc_RNA (1)...(19): siRNA sense strand
ccaaaguccucaacgaaag

SEQ ID NO: 630977 - RNA, 19 nt, Homo sapiens
  misc_RNA (1)...(19): siRNA sense strand
cagccaagauccagauugu

SEQ ID NO: 630978 - RNA, 19 nt, Homo sapiens
  misc_RNA (1)...(19): siRNA sense strand
gugaagcacugguacaaag

SEQ ID NO: 630979 - RNA, 19 nt, Homo sapiens
  misc_RNA (1)...(19): siRNA sense strand
caacuacaacuuugaagau

SEQ ID NO: 630980 - RNA, 19 nt, Homo sapiens
  misc_RNA (1)...(19): siRNA sense strand
caggccaccuucuggauaa

SEQ ID NO: 630981 - RNA, 19 nt, Homo sapiens
  misc_RNA (1)...(19): siRNA sense strand
ugaguuaccugcaccaucu

SEQ ID NO: 630982 - RNA, 19 nt, Homo sapiens
  misc_RNA (1)...(19): siRNA sense strand
gaugguacccuuguccuuu

SEQ ID NO: 630983 - RNA, 19 nt, Homo sapiens
  misc_RNA (1)...(19): siRNA sense strand
ucuggaaggucaauuacaa

SEQ ID NO: 630984 - RNA, 19 nt, Homo sapiens
  misc_RNA (1)...(19): siRNA sense strand
gaagcuggguugguuuauc

SEQ ID NO: 630985 - RNA, 19 nt, Homo sapiens
  misc_RNA (1)...(19): siRNA sense strand
uggauaaguucaucaagga

SEQ ID NO: 630986 - RNA, 19 nt, Homo sapiens
  misc_RNA (1)...(19): siRNA sense strand
gauaaaauaugcuggcaau

SEQ ID NO: 630987 - RNA, 19 nt, Homo sapiens
  misc_RNA (1)...(19): siRNA sense strand
aggagaagcuguguaucua

SEQ ID NO: 630988 - RNA, 19 nt, Homo sapiens
  misc_RNA (1)...(19): siRNA sense strand
gaucucgucguguuccaua

SEQ ID NO: 630989 - RNA, 19 nt, Homo sapiens
  misc_RNA (1)...(19): siRNA sense strand
gaagcaaagguuagguuau

SEQ ID NO: 630990 - RNA, 19 nt, Homo sapiens
  misc_RNA (1)...(19): siRNA sense strand
guugguuuauccaggaaua

SEQ ID NO: 630991 - RNA, 19 nt, Homo sapiens
  misc_RNA (1)...(19): siRNA sense strand
ccauccagguguucacaaa

SEQ ID NO: 630992 - RNA, 19 nt, Homo sapiens
  misc_RNA (1)...(19): siRNA sense strand
aagcaaagguuagguuauc

SEQ ID NO: 630993 - RNA, 19 nt, Homo sapiens
  misc_RNA (1)...(19): siRNA sense strand
cagaagcuggguugguuua

SEQ ID NO: 630994 - RNA, 19 nt, Homo sapiens
  misc_RNA (1)...(19): siRNA sense strand
gaagcuguguaucuauugg

SEQ ID NO: 630995 - RNA, 19 nt, Homo sapiens
  misc_RNA (1)...(19): siRNA sense strand
aagcugaaguucugucugu

SEQ ID NO: 630996 - RNA, 19 nt, Homo sapiens
  misc_RNA (1)...(19): siRNA sense strand
uaacaucauccguacauuc

SEQ ID NO: 630997 - RNA, 19 nt, Homo sapiens
  misc_RNA (1)...(19): siRNA sense strand
aacgugacauccucgauaa

SEQ ID NO: 630998 - RNA, 19 nt, Homo sapiens
  misc_RNA (1)...(19): siRNA sense strand
gaugagaccgugaggaagu

SEQ ID NO: 630999 - RNA, 19 nt, Homo sapiens
  misc_RNA (1)...(19): siRNA sense strand
cucccaaccuggauaauga

SEQ ID NO: 631000 - RNA, 19 nt, Homo sapiens
  misc_RNA (1)...(19): siRNA sense strand
ggagaagcuguguaucuau

SEQ ID NO: 631001 - RNA, 19 nt, Homo sapiens
  misc_RNA (1)...(19): siRNA sense strand
acaaagagugugaaaggaa

SEQ ID NO: 631002 - RNA, 19 nt, Homo sapiens
  misc_RNA (1)...(19): siRNA sense strand
agaggcaacuccgauggua

SEQ ID NO: 631003 - RNA, 19 nt, Homo sapiens
  misc_RNA (1)...(19): siRNA sense strand
agaagcaaagguuagguua

SEQ ID NO: 631004 - RNA, 19 nt, Homo sapiens
  misc_RNA (1)...(19): siRNA sense strand
gcuuugagccucccaagug

SEQ ID NO: 631005 - RNA, 19 nt, Homo sapiens
  misc_RNA (1)...(19): siRNA sense strand
caucauccguacauuccuu

SEQ ID NO: 631006 - RNA, 19 nt, Homo sapiens
  misc_RNA (1)...(19): siRNA sense strand
gagcuucucucugaaaucc

SEQ ID NO: 631007 - RNA, 19 nt, Homo sapiens
  misc_RNA (1)...(19): siRNA sense strand
guuggcaucuucuggacaa

SEQ ID NO: 631008 - RNA, 19 nt, Homo sapiens
  misc_RNA (1)...(19): siRNA sense strand
auaaagcacuggcaucaac

SEQ ID NO: 631009 - RNA, 19 nt, Homo sapiens
  misc_RNA (1)...(19): siRNA sense strand
gaucaaaugccaggagaag

SEQ ID NO: 631010 - RNA, 19 nt, Homo sapiens
  misc_RNA (1)...(19): siRNA sense strand
ggaaggucaauuacaacuu

SEQ ID NO: 631011 - RNA, 19 nt, Homo sapiens
  misc_RNA (1)...(19): siRNA sense strand
gagcuggucacacaauauc

SEQ ID NO: 631012 - RNA, 19 nt, Homo sapiens
  misc_RNA (1)...(19): siRNA sense strand
gcacugggucagcugaguu

SEQ ID NO: 631013 - RNA, 19 nt, Homo sapiens
  misc_RNA (1)...(19): siRNA sense strand
gaaggaggaggagcuugaa

SEQ ID NO: 631014 - RNA, 19 nt, Homo sapiens
  misc_RNA (1)...(19): siRNA sense strand
gacccaaccaauaauguga

SEQ ID NO: 631015 - RNA, 19 nt, Homo sapiens
  misc_RNA (1)...(19): siRNA sense strand
uggagcuggucacacaaua

SEQ ID NO: 631016 - RNA, 19 nt, Homo sapiens
  misc_RNA (1)...(19): siRNA sense strand
gaagcccuacgaagaaugu

SEQ ID NO: 631017 - RNA, 19 nt, Homo sapiens
  misc_RNA (1)...(19): siRNA sense strand
gcacaaaaucgucaaggaa

SEQ ID NO: 631018 - RNA, 19 nt, Homo sapiens
  misc_RNA (1)...(19): siRNA sense strand
uaaaacaauuccaggauca

SEQ ID NO: 631019 - RNA, 19 nt, Homo sapiens
  misc_RNA (1)...(19): siRNA sense strand
ggaaacccaauaccaccuu

SEQ ID NO: 631020 - RNA, 19 nt, Homo sapiens
  misc_RNA (1)...(19): siRNA sense strand
aaaccaggccugugaucuu

SEQ ID NO: 631021 - RNA, 19 nt, Homo sapiens
  misc_RNA (1)...(19): siRNA sense strand
aagaugagaccgugaggaa

SEQ ID NO: 631022 - RNA, 19 nt, Homo sapiens
  misc_RNA (1)...(19): siRNA sense strand
caaaggcacagcucugaag

SEQ ID NO: 631023 - RNA, 19 nt, Homo sapiens
  misc_RNA (1)...(19): siRNA sense strand
caacagccaagauccagau

SEQ ID NO: 631024 - RNA, 19 nt, Homo sapiens
  misc_RNA (1)...(19): siRNA sense strand
ccugaagcccuacgaagaa

SEQ ID NO: 631025 - RNA, 19 nt, Homo sapiens
  misc_RNA (1)...(19): siRNA sense strand
gccaggagaagcuguguau

SEQ ID NO: 631026 - RNA, 19 nt, Homo sapiens
  misc_RNA (1)...(19): siRNA sense strand
caucaacagugccagaaaa

SEQ ID NO: 631027 - RNA, 19 nt, Homo sapiens
  misc_RNA (1)...(19): siRNA sense strand
ugacaaccguccuggaaaa

SEQ ID NO: 631028 - RNA, 19 nt, Homo sapiens
  misc_RNA (1)...(19): siRNA sense strand
caaccguccuggaaaacua

SEQ ID NO: 631029 - RNA, 19 nt, Homo sapiens
  misc_RNA (1)...(19): siRNA sense strand
ucaaggaugggacuggaaa

SEQ ID NO: 631030 - RNA, 19 nt, Homo sapiens
  misc_RNA (1)...(19): siRNA sense strand
ggagcuggucacacaauau

SEQ ID NO: 631031 - RNA, 19 nt, Homo sapiens
  misc_RNA (1)...(19): siRNA sense strand
gcuucucucugaaauccaa

SEQ ID NO: 631032 - RNA, 19 nt, Homo sapiens
  misc_RNA (1)...(19): siRNA sense strand
cuacaacuuugaagaugag

SEQ ID NO: 631033 - RNA, 19 nt, Homo sapiens
  misc_RNA (1)...(19): siRNA sense strand
acuacaacuuugaagauga

SEQ ID NO: 631034 - RNA, 19 nt, Homo sapiens
  misc_RNA (1)...(19): siRNA sense strand
gcaucaacagugccagaaa

SEQ ID NO: 631035 - RNA, 19 nt, Homo sapiens
  misc_RNA (1)...(19): siRNA sense strand
gauaaagcacuggcaucaa

SEQ ID NO: 631036 - RNA, 19 nt, Homo sapiens
  misc_RNA (1)...(19): siRNA sense strand
aaccaggccugugaucuug

SEQ ID NO: 631037 - RNA, 19 nt, Homo sapiens
  misc_RNA (1)...(19): siRNA sense strand
uaauucgccuggugaagca

SEQ ID NO: 631038 - RNA, 19 nt, Homo sapiens
  misc_RNA (1)...(19): siRNA sense strand
gcugagcuucucucugaaa

SEQ ID NO: 631039 - RNA, 19 nt, Homo sapiens
  misc_RNA (1)...(19): siRNA sense strand
ggaggaggagcuugaaguc

SEQ ID NO: 631040 - RNA, 19 nt, Homo sapiens
  misc_RNA (1)...(19): siRNA sense strand
agaaggaggaggagcuuga

SEQ ID NO: 631041 - RNA, 19 nt, Homo sapiens
  misc_RNA (1)...(19): siRNA sense strand
caacuuugacauugcugaa

SEQ ID NO: 631042 - RNA, 19 nt, Homo sapiens
  misc_RNA (1)...(19): siRNA sense strand
gagaagccaacgugacauc

SEQ ID NO: 631043 - RNA, 19 nt, Homo sapiens
  misc_RNA (1)...(19): siRNA sense strand
gccaaaggcacagcucuga

SEQ ID NO: 631044 - RNA, 19 nt, Homo sapiens
  misc_RNA (1)...(19): siRNA sense strand
gggaggaucaaccgccaaa

SEQ ID NO: 631045 - RNA, 19 nt, Homo sapiens
  misc_RNA (1)...(19): siRNA sense strand
aaacugcuuccgacaauca

SEQ ID NO: 631046 - RNA, 19 nt, Homo sapiens
  misc_RNA (1)...(19): siRNA sense strand
caggagaagcuguguaucu

SEQ ID NO: 631047 - RNA, 19 nt, Homo sapiens
  misc_RNA (1)...(19): siRNA sense strand
uucuggagcugaucaaaug

SEQ ID NO: 631048 - RNA, 19 nt, Homo sapiens
  misc_RNA (1)...(19): siRNA sense strand
augcagggcucauugaucu

SEQ ID NO: 631049 - RNA, 19 nt, Homo sapiens
  misc_RNA (1)...(19): siRNA sense strand
cucagaagcuggguugguu

SEQ ID NO: 631050 - RNA, 19 nt, Homo sapiens
  misc_RNA (1)...(19): siRNA sense strand
uacaaagagugugaaagga

SEQ ID NO: 631051 - RNA, 19 nt, Homo sapiens
  misc_RNA (1)...(19): siRNA sense strand
gcacaggacauuaauauua

SEQ ID NO: 631052 - RNA, 19 nt, Homo sapiens
  misc_RNA (1)...(19): siRNA sense strand
ugaaggaccuguuuaauga

SEQ ID NO: 631053 - RNA, 19 nt, Homo sapiens
  misc_RNA (1)...(19): siRNA sense strand
gagcagaacucccuguuuc

SEQ ID NO: 631054 - RNA, 19 nt, Homo sapiens
  misc_RNA (1)...(19): siRNA sense strand
gcuagacucucucaacaaa

SEQ ID NO: 631055 - RNA, 19 nt, Homo sapiens
  misc_RNA (1)...(19): siRNA sense strand
gcagugggcucucuagugu

SEQ ID NO: 631056 - RNA, 19 nt, Homo sapiens
  misc_RNA (1)...(19): siRNA sense strand
caaaaccccuuucucauua

SEQ ID NO: 631057 - RNA, 19 nt, Homo sapiens
  misc_RNA (1)...(19): siRNA sense strand
caacagcaguuccuucaga

SEQ ID NO: 631058 - RNA, 19 nt, Homo sapiens
  misc_RNA (1)...(19): siRNA sense strand
gaauggcgaucaacagaau

SEQ ID NO: 631059 - RNA, 19 nt, Homo sapiens
  misc_RNA (1)...(19): siRNA sense strand
aaucagaacuccgcgaaua

SEQ ID NO: 631060 - RNA, 19 nt, Homo sapiens
  misc_RNA (1)...(19): siRNA sense strand
uggcauggcuucuggcaua

SEQ ID NO: 631061 - RNA, 19 nt, Homo sapiens
  misc_RNA (1)...(19): siRNA sense strand
ccgaguaacuugaaucaga

SEQ ID NO: 631062 - RNA, 19 nt, Homo sapiens
  misc_RNA (1)...(19): siRNA sense strand
ccacgcaucuucaugauac

SEQ ID NO: 631063 - RNA, 19 nt, Homo sapiens
  misc_RNA (1)...(19): siRNA sense strand
aaauaugccuuuccgauca

SEQ ID NO: 631064 - RNA, 19 nt, Homo sapiens
  misc_RNA (1)...(19): siRNA sense strand
ugccagaccucaaccuuaa

SEQ ID NO: 631065 - RNA, 19 nt, Homo sapiens
  misc_RNA (1)...(19): siRNA sense strand
cgaguaacuugaaucagaa

SEQ ID NO: 631066 - RNA, 19 nt, Homo sapiens
  misc_RNA (1)...(19): siRNA sense strand
gaagaccugccuugcauga

SEQ ID NO: 631067 - RNA, 19 nt, Homo sapiens
  misc_RNA (1)...(19): siRNA sense strand
gaagaaggacccagagucu

SEQ ID NO: 631068 - RNA, 19 nt, Homo sapiens
  misc_RNA (1)...(19): siRNA sense strand
gggcuagacucucucaaca

SEQ ID NO: 631069 - RNA, 19 nt, Homo sapiens
  misc_RNA (1)...(19): siRNA sense strand
agacuucacuaacuccaaa

SEQ ID NO: 631070 - RNA, 19 nt, Homo sapiens
  misc_RNA (1)...(19): siRNA sense strand
guuaggcucuccacaagug

SEQ ID NO: 631071 - RNA, 19 nt, Homo sapiens
  misc_RNA (1)...(19): siRNA sense strand
gcaaaagcauuuacagcaa

SEQ ID NO: 631072 - RNA, 19 nt, Homo sapiens
  misc_RNA (1)...(19): siRNA sense strand
ugauuuggacgaccuguua

SEQ ID NO: 631073 - RNA, 19 nt, Homo sapiens
  misc_RNA (1)...(19): siRNA sense strand
uaaugaagcagcaucaguu

SEQ ID NO: 631074 - RNA, 19 nt, Homo sapiens
  misc_RNA (1)...(19): siRNA sense strand
caugaugccuagugugaau

SEQ ID NO: 631075 - RNA, 19 nt, Homo sapiens
  misc_RNA (1)...(19): siRNA sense strand
ccucugagccugaauaaag

SEQ ID NO: 631076 - RNA, 19 nt, Homo sapiens
  misc_RNA (1)...(19): siRNA sense strand
aagcaagacuucacuaacu

SEQ ID NO: 631077 - RNA, 19 nt, Homo sapiens
  misc_RNA (1)...(19): siRNA sense strand
gacaugaaggaccuguuua

SEQ ID NO: 631078 - RNA, 19 nt, Homo sapiens
  misc_RNA (1)...(19): siRNA sense strand
cagcagccuuugagcaaga

SEQ ID NO: 631079 - RNA, 19 nt, Homo sapiens
  misc_RNA (1)...(19): siRNA sense strand
gagcaagccagcccugaug

SEQ ID NO: 631080 - RNA, 19 nt, Homo sapiens
  misc_RNA (1)...(19): siRNA sense strand
gugcuggacuacggcaaua

SEQ ID NO: 631081 - RNA, 19 nt, Homo sapiens
  misc_RNA (1)...(19): siRNA sense strand
ggcauaacccagauaguug

SEQ ID NO: 631082 - RNA, 19 nt, Homo sapiens
  misc_RNA (1)...(19): siRNA sense strand
gcagcugucccauauaagu

SEQ ID NO: 631083 - RNA, 19 nt, Homo sapiens
  misc_RNA (1)...(19): siRNA sense strand
ccagaacaccuccgucuca

SEQ ID NO: 631084 - RNA, 19 nt, Homo sapiens
  misc_RNA (1)...(19): siRNA sense strand
ucgaagaccugccuugcau

SEQ ID NO: 631085 - RNA, 19 nt, Homo sapiens
  misc_RNA (1)...(19): siRNA sense strand
agacaugaaggaccuguuu

SEQ ID NO: 631086 - RNA, 19 nt, Homo sapiens
  misc_RNA (1)...(19): siRNA sense strand
gaacaggagaagcaacagu

SEQ ID NO: 631087 - RNA, 19 nt, Homo sapiens
  misc_RNA (1)...(19): siRNA sense strand
cagcuguccucgaguguuc

SEQ ID NO: 631088 - RNA, 19 nt, Homo sapiens
  misc_RNA (1)...(19): siRNA sense strand
gaccugccuugcaugauca

SEQ ID NO: 631089 - RNA, 19 nt, Homo sapiens
  misc_RNA (1)...(19): siRNA sense strand
cagaauggcgaucaacaga

SEQ ID NO: 631090 - RNA, 19 nt, Homo sapiens
  misc_RNA (1)...(19): siRNA sense strand
gaguugccaucucuuccaa

SEQ ID NO: 631091 - RNA, 19 nt, Homo sapiens
  misc_RNA (1)...(19): siRNA sense strand
gcaucuucaugauacaguu

SEQ ID NO: 631092 - RNA, 19 nt, Homo sapiens
  misc_RNA (1)...(19): siRNA sense strand
gagccugaauaaagaacug

SEQ ID NO: 631093 - RNA, 19 nt, Homo sapiens
  misc_RNA (1)...(19): siRNA sense strand
uggcauaacccagauaguu

SEQ ID NO: 631094 - RNA, 19 nt, Homo sapiens
  misc_RNA (1)...(19): siRNA sense strand
ccuguuagggucucaguaa

SEQ ID NO: 631095 - RNA, 19 nt, Homo sapiens
  misc_RNA (1)...(19): siRNA sense strand
ucgacucccugcugaagaa

SEQ ID NO: 631096 - RNA, 19 nt, Homo sapiens
  misc_RNA (1)...(19): siRNA sense strand
guugccaucucuuccaaug

SEQ ID NO: 631097 - RNA, 19 nt, Homo sapiens
  misc_RNA (1)...(19): siRNA sense strand
acaagcaagacuucacuaa

SEQ ID NO: 631098 - RNA, 19 nt, Homo sapiens
  misc_RNA (1)...(19): siRNA sense strand
caguuaggcucuccacaag

SEQ ID NO: 631099 - RNA, 19 nt, Homo sapiens
  misc_RNA (1)...(19): siRNA sense strand
uggcacaggacauuaauau

SEQ ID NO: 631100 - RNA, 19 nt, Homo sapiens
  misc_RNA (1)...(19): siRNA sense strand
acaugaaggaccuguuuaa

SEQ ID NO: 631101 - RNA, 19 nt, Homo sapiens
  misc_RNA (1)...(19): siRNA sense strand
agaccugccuugcaugauc

SEQ ID NO: 631102 - RNA, 19 nt, Homo sapiens
  misc_RNA (1)...(19): siRNA sense strand
ccaaugggcccuggacaug

SEQ ID NO: 631103 - RNA, 19 nt, Homo sapiens
  misc_RNA (1)...(19): siRNA sense strand
guaaugaagcagcaucagu

SEQ ID NO: 631104 - RNA, 19 nt, Homo sapiens
  misc_RNA (1)...(19): siRNA sense strand
caucuucaugauacaguua

SEQ ID NO: 631105 - RNA, 19 nt, Homo sapiens
  misc_RNA (1)...(19): siRNA sense strand
ucucccagcagcacaauaa

SEQ ID NO: 631106 - RNA, 19 nt, Homo sapiens
  misc_RNA (1)...(19): siRNA sense strand
caaagggagcagcagcaaa

SEQ ID NO: 631107 - RNA, 19 nt, Homo sapiens
  misc_RNA (1)...(19): siRNA sense strand
gccaaagccaggaaauaug

SEQ ID NO: 631108 - RNA, 19 nt, Homo sapiens
  misc_RNA (1)...(19): siRNA sense strand
gaacucccuguuucugaug

SEQ ID NO: 631109 - RNA, 19 nt, Homo sapiens
  misc_RNA (1)...(19): siRNA sense strand
uuaacgagcaggaguggaa

SEQ ID NO: 631110 - RNA, 19 nt, Homo sapiens
  misc_RNA (1)...(19): siRNA sense strand
ggcauggcuucuggcauaa

SEQ ID NO: 631111 - RNA, 19 nt, Homo sapiens
  misc_RNA (1)...(19): siRNA sense strand
ggacuacggcaauacaaaa

SEQ ID NO: 631112 - RNA, 19 nt, Homo sapiens
  misc_RNA (1)...(19): siRNA sense strand
ccacaguuccuuagauguc

SEQ ID NO: 631113 - RNA, 19 nt, Homo sapiens
  misc_RNA (1)...(19): siRNA sense strand
ggacuucagaggaguggau

SEQ ID NO: 631114 - RNA, 19 nt, Homo sapiens
  misc_RNA (1)...(19): siRNA sense strand
cugggaaucugaugccaau

SEQ ID NO: 631115 - RNA, 19 nt, Homo sapiens
  misc_RNA (1)...(19): siRNA sense strand
gaagccaaagccaggaaau

SEQ ID NO: 631116 - RNA, 19 nt, Homo sapiens
  misc_RNA (1)...(19): siRNA sense strand
gagaagaaggacccagagu

SEQ ID NO: 631117 - RNA, 19 nt, Homo sapiens
  misc_RNA (1)...(19): siRNA sense strand
cgagcagaacucccuguuu

SEQ ID NO: 631118 - RNA, 19 nt, Homo sapiens
  misc_RNA (1)...(19): siRNA sense strand
ucccacaguuccuuagaug

SEQ ID NO: 631119 - RNA, 19 nt, Homo sapiens
  misc_RNA (1)...(19): siRNA sense strand
gcagaagcgcgagcagaug

SEQ ID NO: 631120 - RNA, 19 nt, Homo sapiens
  misc_RNA (1)...(19): siRNA sense strand
gcccagaacgcacaaagag

SEQ ID NO: 631121 - RNA, 19 nt, Homo sapiens
  misc_RNA (1)...(19): siRNA sense strand
caucagcccaggcccagaa

SEQ ID NO: 631122 - RNA, 19 nt, Homo sapiens
  misc_RNA (1)...(19): siRNA sense strand
acaguuaggcucuccacaa

SEQ ID NO: 631123 - RNA, 19 nt, Homo sapiens
  misc_RNA (1)...(19): siRNA sense strand
ggugcccgaugaagacaug

SEQ ID NO: 631124 - RNA, 19 nt, Homo sapiens
  misc_RNA (1)...(19): siRNA sense strand
ggagcugccuuuugccuau

SEQ ID NO: 631125 - RNA, 19 nt, Homo sapiens
  misc_RNA (1)...(19): siRNA sense strand
cacagcagguuggacaguu

SEQ ID NO: 631126 - RNA, 19 nt, Homo sapiens
  misc_RNA (1)...(19): siRNA sense strand
acuccaaacugcucaugau

SEQ ID NO: 631127 - RNA, 19 nt, Homo sapiens
  misc_RNA (1)...(19): siRNA sense strand
ccaaagccaggaaauaugc

SEQ ID NO: 631128 - RNA, 19 nt, Homo sapiens
  misc_RNA (1)...(19): siRNA sense strand
gggaaucugaugccaaugg

SEQ ID NO: 631129 - RNA, 19 nt, Homo sapiens
  misc_RNA (1)...(19): siRNA sense strand
guaccaagacccgacacaa

SEQ ID NO: 631130 - RNA, 19 nt, Homo sapiens
  misc_RNA (1)...(19): siRNA sense strand
ggccacgcaucuucaugau

SEQ ID NO: 631131 - RNA, 19 nt, Homo sapiens
  misc_RNA (1)...(19): siRNA sense strand
augaaggaccuguuuaaug

SEQ ID NO: 631132 - RNA, 19 nt, Homo sapiens
  misc_RNA (1)...(19): siRNA sense strand
aagccaaagccaggaaaua

SEQ ID NO: 631133 - RNA, 19 nt, Homo sapiens
  misc_RNA (1)...(19): siRNA sense strand
gagcuggagcgccaacaca

SEQ ID NO: 631134 - RNA, 19 nt, Homo sapiens
  misc_RNA (1)...(19): siRNA sense strand
gccaugggaggccagaauu

SEQ ID NO: 631135 - RNA, 19 nt, Homo sapiens
  misc_RNA (1)...(19): siRNA sense strand
acaaaaccccuuucucauu

SEQ ID NO: 631136 - RNA, 19 nt, Homo sapiens
  misc_RNA (1)...(19): siRNA sense strand
caagcaagacuucacuaac

SEQ ID NO: 631137 - RNA, 19 nt, Homo sapiens
  misc_RNA (1)...(19): siRNA sense strand
ccuugcaggugugguauug

SEQ ID NO: 631138 - RNA, 19 nt, Homo sapiens
  misc_RNA (1)...(19): siRNA sense strand
gggacugucggcuccauau

SEQ ID NO: 631139 - RNA, 19 nt, Homo sapiens
  misc_RNA (1)...(19): siRNA sense strand
ggcagugggcucucuagug

SEQ ID NO: 631140 - RNA, 19 nt, Homo sapiens
  misc_RNA (1)...(19): siRNA sense strand
agaccaacgugggccagaa

SEQ ID NO: 631141 - RNA, 19 nt, Homo sapiens
  misc_RNA (1)...(19): siRNA sense strand
agugagucauuuccucuga

SEQ ID NO: 631142 - RNA, 19 nt, Homo sapiens
  misc_RNA (1)...(19): siRNA sense strand
ugacuccagccuucacuug

SEQ ID NO: 631143 - RNA, 19 nt, Homo sapiens
  misc_RNA (1)...(19): siRNA sense strand
acaggagaagcaacaguuu

SEQ ID NO: 631144 - RNA, 19 nt, Homo sapiens
  misc_RNA (1)...(19): siRNA sense strand
ggaccaacagaaacaaagg

SEQ ID NO: 631145 - RNA, 19 nt, Homo sapiens
  misc_RNA (1)...(19): siRNA sense strand
ggcacaggacauuaauauu

SEQ ID NO: 631146 - RNA, 19 nt, Homo sapiens
  misc_RNA (1)...(19): siRNA sense strand
augauacaguuaagaggaa

SEQ ID NO: 631147 - RNA, 19 nt, Homo sapiens
  misc_RNA (1)...(19): siRNA sense strand
caugaaggaccuguuuaau

SEQ ID NO: 631148 - RNA, 19 nt, Homo sapiens
  misc_RNA (1)...(19): siRNA sense strand
gaucgacucccugcugaag

SEQ ID NO: 631149 - RNA, 19 nt, Homo sapiens
  misc_RNA (1)...(19): siRNA sense strand
ggacaugcuucaguuuccu

SEQ ID NO: 631150 - RNA, 19 nt, Homo sapiens
  misc_RNA (1)...(19): siRNA sense strand
gcccugauggcuuaucuuc

SEQ ID NO: 631151 - RNA, 19 nt, Homo sapiens
  misc_RNA (1)...(19): siRNA sense strand
gagaugcccuuccugaaua

SEQ ID NO: 631152 - RNA, 19 nt, Homo sapiens
  misc_RNA (1)...(19): siRNA sense strand
gagauuugcuuugaacuuu

SEQ ID NO: 631153 - RNA, 19 nt, Homo sapiens
  misc_RNA (1)...(19): siRNA sense strand
ggagcuacuuucauccuua

SEQ ID NO: 631154 - RNA, 19 nt, Homo sapiens
  misc_RNA (1)...(19): siRNA sense strand
gaauaugaagccaguagua

SEQ ID NO: 631155 - RNA, 19 nt, Homo sapiens
  misc_RNA (1)...(19): siRNA sense strand
gagaaacggcuggaugaua

SEQ ID NO: 631156 - RNA, 19 nt, Homo sapiens
  misc_RNA (1)...(19): siRNA sense strand
gagggaauaugauacuuca

SEQ ID NO: 631157 - RNA, 19 nt, Homo sapiens
  misc_RNA (1)...(19): siRNA sense strand
uaacugaacagcaaaugaa

SEQ ID NO: 631158 - RNA, 19 nt, Homo sapiens
  misc_RNA (1)...(19): siRNA sense strand
gggaauaugauacuucaaa

SEQ ID NO: 631159 - RNA, 19 nt, Homo sapiens
  misc_RNA (1)...(19): siRNA sense strand
agaaacggcuggaugauag

SEQ ID NO: 631160 - RNA, 19 nt, Homo sapiens
  misc_RNA (1)...(19): siRNA sense strand
gcugggaacguccaaauuu

SEQ ID NO: 631161 - RNA, 19 nt, Homo sapiens
  misc_RNA (1)...(19): siRNA sense strand
gaacagcaaaugaaagaag

SEQ ID NO: 631162 - RNA, 19 nt, Homo sapiens
  misc_RNA (1)...(19): siRNA sense strand
guuaaugagcugaaaguaa

SEQ ID NO: 631163 - RNA, 19 nt, Homo sapiens
  misc_RNA (1)...(19): siRNA sense strand
guacaagagccuaaccaaa

SEQ ID NO: 631164 - RNA, 19 nt, Homo sapiens
  misc_RNA (1)...(19): siRNA sense strand
agauucagguggucaaauu

SEQ ID NO: 631165 - RNA, 19 nt, Homo sapiens
  misc_RNA (1)...(19): siRNA sense strand
ggacuuggagcuacuuuca

SEQ ID NO: 631166 - RNA, 19 nt, Homo sapiens
  misc_RNA (1)...(19): siRNA sense strand
ugaaagaagcucagaagug

SEQ ID NO: 631167 - RNA, 19 nt, Homo sapiens
  misc_RNA (1)...(19): siRNA sense strand
guucuugaguccugaauuc

SEQ ID NO: 631168 - RNA, 19 nt, Homo sapiens
  misc_RNA (1)...(19): siRNA sense strand
gaauauagcacuuuugaug

SEQ ID NO: 631169 - RNA, 19 nt, Homo sapiens
  misc_RNA (1)...(19): siRNA sense strand
ggauuugcauucagagauc

SEQ ID NO: 631170 - RNA, 19 nt, Homo sapiens
  misc_RNA (1)...(19): siRNA sense strand
gcugcaauauggaaggaaa

SEQ ID NO: 631171 - RNA, 19 nt, Homo sapiens
  misc_RNA (1)...(19): siRNA sense strand
ggaagaggacuuggagcua

SEQ ID NO: 631172 - RNA, 19 nt, Homo sapiens
  misc_RNA (1)...(19): siRNA sense strand
gcuuugaacuuuauaaucc

SEQ ID NO: 631173 - RNA, 19 nt, Homo sapiens
  misc_RNA (1)...(19): siRNA sense strand
uacuacagcugacccauau

SEQ ID NO: 631174 - RNA, 19 nt, Homo sapiens
  misc_RNA (1)...(19): siRNA sense strand
gcuugaauuugauaugaug

SEQ ID NO: 631175 - RNA, 19 nt, Homo sapiens
  misc_RNA (1)...(19): siRNA sense strand
gagcuacuuucauccuuag

SEQ ID NO: 631176 - RNA, 19 nt, Homo sapiens
  misc_RNA (1)...(19): siRNA sense strand
ccuaagcccuggucuaaac

SEQ ID NO: 631177 - RNA, 19 nt, Homo sapiens
  misc_RNA (1)...(19): siRNA sense strand
gauucagguggucaaauua

SEQ ID NO: 631178 - RNA, 19 nt, Homo sapiens
  misc_RNA (1)...(19): siRNA sense strand
uagagaaacggcuggauga

SEQ ID NO: 631179 - RNA, 19 nt, Homo sapiens
  misc_RNA (1)...(19): siRNA sense strand
gaucuuuguuuaacugaac

SEQ ID NO: 631180 - RNA, 19 nt, Homo sapiens
  misc_RNA (1)...(19): siRNA sense strand
cgagaugcccuuccugaau

SEQ ID NO: 631181 - RNA, 19 nt, Homo sapiens
  misc_RNA (1)...(19): siRNA sense strand
uggcuugaauuugauauga

SEQ ID NO: 631182 - RNA, 19 nt, Homo sapiens
  misc_RNA (1)...(19): siRNA sense strand
guucuauguuggaaguauu

SEQ ID NO: 631183 - RNA, 19 nt, Homo sapiens
  misc_RNA (1)...(19): siRNA sense strand
ggaaauugaagcgucgaaa

SEQ ID NO: 631184 - RNA, 19 nt, Homo sapiens
  misc_RNA (1)...(19): siRNA sense strand
cuugaguccugaauucauu

SEQ ID NO: 631185 - RNA, 19 nt, Homo sapiens
  misc_RNA (1)...(19): siRNA sense strand
ccagaguucuauguuggaa

SEQ ID NO: 631186 - RNA, 19 nt, Homo sapiens
  misc_RNA (1)...(19): siRNA sense strand
gaaauugaagcgucgaaaa

SEQ ID NO: 631187 - RNA, 19 nt, Homo sapiens
  misc_RNA (1)...(19): siRNA sense strand
ccuuaggaauguuaucgaa

SEQ ID NO: 631188 - RNA, 19 nt, Homo sapiens
  misc_RNA (1)...(19): siRNA sense strand
uuacuacagcugacccaua

SEQ ID NO: 631189 - RNA, 19 nt, Homo sapiens
  misc_RNA (1)...(19): siRNA sense strand
ugaagccaguaguacaaga

SEQ ID NO: 631190 - RNA, 19 nt, Homo sapiens
  misc_RNA (1)...(19): siRNA sense strand
gaaaaguacuccacauucc

SEQ ID NO: 631191 - RNA, 19 nt, Homo sapiens
  misc_RNA (1)...(19): siRNA sense strand
gagaaaaguacuccacauu

SEQ ID NO: 631192 - RNA, 19 nt, Homo sapiens
  misc_RNA (1)...(19): siRNA sense strand
agaguucuauguuggaagu

SEQ ID NO: 631193 - RNA, 19 nt, Homo sapiens
  misc_RNA (1)...(19): siRNA sense strand
uacaagagccuaaccaaaa

SEQ ID NO: 631194 - RNA, 19 nt, Homo sapiens
  misc_RNA (1)...(19): siRNA sense strand
cgagauuugcuuugaacuu

SEQ ID NO: 631195 - RNA, 19 nt, Homo sapiens
  misc_RNA (1)...(19): siRNA sense strand
caaaugaaagaagcucaga

SEQ ID NO: 631196 - RNA, 19 nt, Homo sapiens
  misc_RNA (1)...(19): siRNA sense strand
cugaacagcaaaugaaaga

SEQ ID NO: 631197 - RNA, 19 nt, Homo sapiens
  misc_RNA (1)...(19): siRNA sense strand
gguggucaaauuagagaaa

SEQ ID NO: 631198 - RNA, 19 nt, Homo sapiens
  misc_RNA (1)...(19): siRNA sense strand
gugucgagauuugcuuuga

SEQ ID NO: 631199 - RNA, 19 nt, Homo sapiens
  misc_RNA (1)...(19): siRNA sense strand
uugauaugaugagggaaua

SEQ ID NO: 631200 - RNA, 19 nt, Homo sapiens
  misc_RNA (1)...(19): siRNA sense strand
ugucgagauuugcuuugaa

SEQ ID NO: 631201 - RNA, 19 nt, Homo sapiens
  misc_RNA (1)...(19): siRNA sense strand
gaugagggaauaugauacu

SEQ ID NO: 631202 - RNA, 19 nt, Homo sapiens
  misc_RNA (1)...(19): siRNA sense strand
aagaagcucagaaguggaa

SEQ ID NO: 631203 - RNA, 19 nt, Homo sapiens
  misc_RNA (1)...(19): siRNA sense strand
uaugaagccaguaguacaa

SEQ ID NO: 631204 - RNA, 19 nt, Homo sapiens
  misc_RNA (1)...(19): siRNA sense strand
ccacauuccagaguucuau

SEQ ID NO: 631205 - RNA, 19 nt, Homo sapiens
  misc_RNA (1)...(19): siRNA sense strand
gggauuugcauucagagau

SEQ ID NO: 631206 - RNA, 19 nt, Homo sapiens
  misc_RNA (1)...(19): siRNA sense strand
gccauggcuugaauuugau

SEQ ID NO: 631207 - RNA, 19 nt, Homo sapiens
  misc_RNA (1)...(19): siRNA sense strand
gauuugcauucagagauca

SEQ ID NO: 631208 - RNA, 19 nt, Homo sapiens
  misc_RNA (1)...(19): siRNA sense strand
uugcuauacuuacgagaug

SEQ ID NO: 631209 - RNA, 19 nt, Homo sapiens
  misc_RNA (1)...(19): siRNA sense strand
ggagauucagguggucaaa

SEQ ID NO: 631210 - RNA, 19 nt, Homo sapiens
  misc_RNA (1)...(19): siRNA sense strand
gagaucaggaagaggacuu

SEQ ID NO: 631211 - RNA, 19 nt, Homo sapiens
  misc_RNA (1)...(19): siRNA sense strand
uaggaauguuaucgaagga

SEQ ID NO: 631212 - RNA, 19 nt, Homo sapiens
  misc_RNA (1)...(19): siRNA sense strand
ggcuugaauuugauaugau

SEQ ID NO: 631213 - RNA, 19 nt, Homo sapiens
  misc_RNA (1)...(19): siRNA sense strand
acuuggagcuacuuucauc

SEQ ID NO: 631214 - RNA, 19 nt, Homo sapiens
  misc_RNA (1)...(19): siRNA sense strand
agccuaagcccuggucuaa

SEQ ID NO: 631215 - RNA, 19 nt, Homo sapiens
  misc_RNA (1)...(19): siRNA sense strand
gaagccaguaguacaagag

SEQ ID NO: 631216 - RNA, 19 nt, Homo sapiens
  misc_RNA (1)...(19): siRNA sense strand
gugaauaugaagccaguag

SEQ ID NO: 631217 - RNA, 19 nt, Homo sapiens
  misc_RNA (1)...(19): siRNA sense strand
augaugagggaauaugaua

SEQ ID NO: 631218 - RNA, 19 nt, Homo sapiens
  misc_RNA (1)...(19): siRNA sense strand
uuaacugaacagcaaauga

SEQ ID NO: 631219 - RNA, 19 nt, Homo sapiens
  misc_RNA (1)...(19): siRNA sense strand
gggaacguccaaauuuuaa

SEQ ID NO: 631220 - RNA, 19 nt, Homo sapiens
  misc_RNA (1)...(19): siRNA sense strand
gauauguuagaaaggagaa

SEQ ID NO: 631221 - RNA, 19 nt, Homo sapiens
  misc_RNA (1)...(19): siRNA sense strand
gaauguuaucgaaggacaa

SEQ ID NO: 631222 - RNA, 19 nt, Homo sapiens
  misc_RNA (1)...(19): siRNA sense strand
auucagagaucaggaagag

SEQ ID NO: 631223 - RNA, 19 nt, Homo sapiens
  misc_RNA (1)...(19): siRNA sense strand
ugagggaauaugauacuuc

SEQ ID NO: 631224 - RNA, 19 nt, Homo sapiens
  misc_RNA (1)...(19): siRNA sense strand
aaugaaagaagcucagaag

SEQ ID NO: 631225 - RNA, 19 nt, Homo sapiens
  misc_RNA (1)...(19): siRNA sense strand
gcacaccgcugcucaaaga

SEQ ID NO: 631226 - RNA, 19 nt, Homo sapiens
  misc_RNA (1)...(19): siRNA sense strand
ucaagucacucaaggauuc

SEQ ID NO: 631227 - RNA, 19 nt, Homo sapiens
  misc_RNA (1)...(19): siRNA sense strand
gcacgagggcugcaacaaa

SEQ ID NO: 631228 - RNA, 19 nt, Homo sapiens
  misc_RNA (1)...(19): siRNA sense strand
gcaaacacaugaccaccau

SEQ ID NO: 631229 - RNA, 19 nt, Homo sapiens
  misc_RNA (1)...(19): siRNA sense strand
ccaagaagcagcgcaauga

SEQ ID NO: 631230 - RNA, 19 nt, Homo sapiens
  misc_RNA (1)...(19): siRNA sense strand
gcacuggcuucucugacaa

SEQ ID NO: 631231 - RNA, 19 nt, Homo sapiens
  misc_RNA (1)...(19): siRNA sense strand
cgucaacccugucgccauu

SEQ ID NO: 631232 - RNA, 19 nt, Homo sapiens
  misc_RNA (1)...(19): siRNA sense strand
cagacgacguggugcagua

SEQ ID NO: 631233 - RNA, 19 nt, Homo sapiens
  misc_RNA (1)...(19): siRNA sense strand
ggagaagccauaugugugu

SEQ ID NO: 631234 - RNA, 19 nt, Homo sapiens
  misc_RNA (1)...(19): siRNA sense strand
uggcugaccucaaggaaga

SEQ ID NO: 631235 - RNA, 19 nt, Homo sapiens
  misc_RNA (1)...(19): siRNA sense strand
gcccucaccuccaucaaug

SEQ ID NO: 631236 - RNA, 19 nt, Homo sapiens
  misc_RNA (1)...(19): siRNA sense strand
gcgagaacguggcgaugga

SEQ ID NO: 631237 - RNA, 19 nt, Homo sapiens
  misc_RNA (1)...(19): siRNA sense strand
gcaacaaagccuucuccaa

SEQ ID NO: 631238 - RNA, 19 nt, Homo sapiens
  misc_RNA (1)...(19): siRNA sense strand
aggcugagguggucaucua

SEQ ID NO: 631239 - RNA, 19 nt, Homo sapiens
  misc_RNA (1)...(19): siRNA sense strand
gcaccaagagauacacaga

SEQ ID NO: 631240 - RNA, 19 nt, Homo sapiens
  misc_RNA (1)...(19): siRNA sense strand
uggagaaccugaagacaca

SEQ ID NO: 631241 - RNA, 19 nt, Homo sapiens
  misc_RNA (1)...(19): siRNA sense strand
gaaggagaagcucaaguca

SEQ ID NO: 631242 - RNA, 19 nt, Homo sapiens
  misc_RNA (1)...(19): siRNA sense strand
gagaagaaggaguuugugu

SEQ ID NO: 631243 - RNA, 19 nt, Homo sapiens
  misc_RNA (1)...(19): siRNA sense strand
gagaagcucaagucacuca

SEQ ID NO: 631244 - RNA, 19 nt, Homo sapiens
  misc_RNA (1)...(19): siRNA sense strand
gggagaagaaggaguuugu

SEQ ID NO: 631245 - RNA, 19 nt, Homo sapiens
  misc_RNA (1)...(19): siRNA sense strand
cacgagggcugcaacaaag

SEQ ID NO: 631246 - RNA, 19 nt, Homo sapiens
  misc_RNA (1)...(19): siRNA sense strand
aggagcagcuggugcauca

SEQ ID NO: 631247 - RNA, 19 nt, Homo sapiens
  misc_RNA (1)...(19): siRNA sense strand
aggagaagcucaagucacu

SEQ ID NO: 631248 - RNA, 19 nt, Homo sapiens
  misc_RNA (1)...(19): siRNA sense strand
gcucaagucacucaaggau

SEQ ID NO: 631249 - RNA, 19 nt, Homo sapiens
  misc_RNA (1)...(19): siRNA sense strand
ugagugacaccaaccagaa

SEQ ID NO: 631250 - RNA, 19 nt, Homo sapiens
  misc_RNA (1)...(19): siRNA sense strand
cagcugcgcaaacacauga

SEQ ID NO: 631251 - RNA, 19 nt, Homo sapiens
  misc_RNA (1)...(19): siRNA sense strand
caccgcugcucaaagagaa

SEQ ID NO: 631252 - RNA, 19 nt, Homo sapiens
  misc_RNA (1)...(19): siRNA sense strand
gcagcaacugucugaguga

SEQ ID NO: 631253 - RNA, 19 nt, Homo sapiens
  misc_RNA (1)...(19): siRNA sense strand
gggaagacugcaccaagga

SEQ ID NO: 631254 - RNA, 19 nt, Homo sapiens
  misc_RNA (1)...(19): siRNA sense strand
ucaagaaggagaagcucaa

SEQ ID NO: 631255 - RNA, 19 nt, Homo sapiens
  misc_RNA (1)...(19): siRNA sense strand
caacgagaaacccuacauc

SEQ ID NO: 631256 - RNA, 19 nt, Homo sapiens
  misc_RNA (1)...(19): siRNA sense strand
agaacaagcagagcaguga

SEQ ID NO: 631257 - RNA, 19 nt, Homo sapiens
  misc_RNA (1)...(19): siRNA sense strand
gagcagcuggugcaucaca

SEQ ID NO: 631258 - RNA, 19 nt, Homo sapiens
  misc_RNA (1)...(19): siRNA sense strand
gcacccacuccaacgagaa

SEQ ID NO: 631259 - RNA, 19 nt, Homo sapiens
  misc_RNA (1)...(19): siRNA sense strand
ggacugccugcacgucaga

SEQ ID NO: 631260 - RNA, 19 nt, Homo sapiens
  misc_RNA (1)...(19): siRNA sense strand
agaaggagaagcucaaguc

SEQ ID NO: 631261 - RNA, 19 nt, Homo sapiens
  misc_RNA (1)...(19): siRNA sense strand
gcacgucagagccaucaag

SEQ ID NO: 631262 - RNA, 19 nt, Homo sapiens
  misc_RNA (1)...(19): siRNA sense strand
ggaugccaguuaggcuuug

SEQ ID NO: 631263 - RNA, 19 nt, Homo sapiens
  misc_RNA (1)...(19): siRNA sense strand
gcuggugcaucacaucaac

SEQ ID NO: 631264 - RNA, 19 nt, Homo sapiens
  misc_RNA (1)...(19): siRNA sense strand
gcgagaagccccacaagug

SEQ ID NO: 631265 - RNA, 19 nt, Homo sapiens
  misc_RNA (1)...(19): siRNA sense strand
gcgccaagcaccagaaucg

SEQ ID NO: 631266 - RNA, 19 nt, Homo sapiens
  misc_RNA (1)...(19): siRNA sense strand
gaagcucaagucacucaag

SEQ ID NO: 631267 - RNA, 19 nt, Homo sapiens
  misc_RNA (1)...(19): siRNA sense strand
ucaacccugucgccauuca

SEQ ID NO: 631268 - RNA, 19 nt, Homo sapiens
  misc_RNA (1)...(19): siRNA sense strand
ggagaagaaggaguuugug

SEQ ID NO: 631269 - RNA, 19 nt, Homo sapiens
  misc_RNA (1)...(19): siRNA sense strand
ggaggacgaccuggugcuu

SEQ ID NO: 631270 - RNA, 19 nt, Homo sapiens
  misc_RNA (1)...(19): siRNA sense strand
caggcugcaccaagagaua

SEQ ID NO: 631271 - RNA, 19 nt, Homo sapiens
  misc_RNA (1)...(19): siRNA sense strand
cgagcgaggugaccaugcu

SEQ ID NO: 631272 - RNA, 19 nt, Homo sapiens
  misc_RNA (1)...(19): siRNA sense strand
cagcagcaacugucugagu

SEQ ID NO: 631273 - RNA, 19 nt, Homo sapiens
  misc_RNA (1)...(19): siRNA sense strand
gcacaccgcugcucaaaga

SEQ ID NO: 631274 - RNA, 19 nt, Homo sapiens
  misc_RNA (1)...(19): siRNA sense strand
ucaagucacucaaggauuc

SEQ ID NO: 631275 - RNA, 19 nt, Homo sapiens
  misc_RNA (1)...(19): siRNA sense strand
gcacgagggcugcaacaaa

SEQ ID NO: 631276 - RNA, 19 nt, Homo sapiens
  misc_RNA (1)...(19): siRNA sense strand
gcaaacacaugaccaccau

SEQ ID NO: 631277 - RNA, 19 nt, Homo sapiens
  misc_RNA (1)...(19): siRNA sense strand
ccaagaagcagcgcaauga

SEQ ID NO: 631278 - RNA, 19 nt, Homo sapiens
  misc_RNA (1)...(19): siRNA sense strand
gcacuggcuucucugacaa

SEQ ID NO: 631279 - RNA, 19 nt, Homo sapiens
  misc_RNA (1)...(19): siRNA sense strand
cgucaacccugucgccauu

SEQ ID NO: 631280 - RNA, 19 nt, Homo sapiens
  misc_RNA (1)...(19): siRNA sense strand
cagacgacguggugcagua

SEQ ID NO: 631281 - RNA, 19 nt, Homo sapiens
  misc_RNA (1)...(19): siRNA sense strand
ggagaagccauaugugugu

SEQ ID NO: 631282 - RNA, 19 nt, Homo sapiens
  misc_RNA (1)...(19): siRNA sense strand
uggcugaccucaaggaaga

SEQ ID NO: 631283 - RNA, 19 nt, Homo sapiens
  misc_RNA (1)...(19): siRNA sense strand
gcccucaccuccaucaaug

SEQ ID NO: 631284 - RNA, 19 nt, Homo sapiens
  misc_RNA (1)...(19): siRNA sense strand
gcgagaacguggcgaugga

SEQ ID NO: 631285 - RNA, 19 nt, Homo sapiens
  misc_RNA (1)...(19): siRNA sense strand
gcaacaaagccuucuccaa

SEQ ID NO: 631286 - RNA, 19 nt, Homo sapiens
  misc_RNA (1)...(19): siRNA sense strand
aggcugagguggucaucua

SEQ ID NO: 631287 - RNA, 19 nt, Homo sapiens
  misc_RNA (1)...(19): siRNA sense strand
gcaccaagagauacacaga

SEQ ID NO: 631288 - RNA, 19 nt, Homo sapiens
  misc_RNA (1)...(19): siRNA sense strand
uggagaaccugaagacaca

SEQ ID NO: 631289 - RNA, 19 nt, Homo sapiens
  misc_RNA (1)...(19): siRNA sense strand
gaaggagaagcucaaguca

SEQ ID NO: 631290 - RNA, 19 nt, Homo sapiens
  misc_RNA (1)...(19): siRNA sense strand
gagaagaaggaguuugugu

SEQ ID NO: 631291 - RNA, 19 nt, Homo sapiens
  misc_RNA (1)...(19): siRNA sense strand
gagaagcucaagucacuca

SEQ ID NO: 631292 - RNA, 19 nt, Homo sapiens
  misc_RNA (1)...(19): siRNA sense strand
gggagaagaaggaguuugu

SEQ ID NO: 631293 - RNA, 19 nt, Homo sapiens
  misc_RNA (1)...(19): siRNA sense strand
cacgagggcugcaacaaag

SEQ ID NO: 631294 - RNA, 19 nt, Homo sapiens
  misc_RNA (1)...(19): siRNA sense strand
aggagcagcuggugcauca

SEQ ID NO: 631295 - RNA, 19 nt, Homo sapiens
  misc_RNA (1)...(19): siRNA sense strand
aggagaagcucaagucacu

SEQ ID NO: 631296 - RNA, 19 nt, Homo sapiens
  misc_RNA (1)...(19): siRNA sense strand
gcucaagucacucaaggau

SEQ ID NO: 631297 - RNA, 19 nt, Homo sapiens
  misc_RNA (1)...(19): siRNA sense strand
ugagugacaccaaccagaa

SEQ ID NO: 631298 - RNA, 19 nt, Homo sapiens
  misc_RNA (1)...(19): siRNA sense strand
cagcugcgcaaacacauga

SEQ ID NO: 631299 - RNA, 19 nt, Homo sapiens
  misc_RNA (1)...(19): siRNA sense strand
caccgcugcucaaagagaa

SEQ ID NO: 631300 - RNA, 19 nt, Homo sapiens
  misc_RNA (1)...(19): siRNA sense strand
gcagcaacugucugaguga

SEQ ID NO: 631301 - RNA, 19 nt, Homo sapiens
  misc_RNA (1)...(19): siRNA sense strand
gggaagacugcaccaagga

SEQ ID NO: 631302 - RNA, 19 nt, Homo sapiens
  misc_RNA (1)...(19): siRNA sense strand
ucaagaaggagaagcucaa

SEQ ID NO: 631303 - RNA, 19 nt, Homo sapiens
  misc_RNA (1)...(19): siRNA sense strand
caacgagaaacccuacauc

SEQ ID NO: 631304 - RNA, 19 nt, Homo sapiens
  misc_RNA (1)...(19): siRNA sense strand
agaacaagcagagcaguga

SEQ ID NO: 631305 - RNA, 19 nt, Homo sapiens
  misc_RNA (1)...(19): siRNA sense strand
gagcagcuggugcaucaca

SEQ ID NO: 631306 - RNA, 19 nt, Homo sapiens
  misc_RNA (1)...(19): siRNA sense strand
gcacccacuccaacgagaa

SEQ ID NO: 631307 - RNA, 19 nt, Homo sapiens
  misc_RNA (1)...(19): siRNA sense strand
ggacugccugcacgucaga

SEQ ID NO: 631308 - RNA, 19 nt, Homo sapiens
  misc_RNA (1)...(19): siRNA sense strand
agaaggagaagcucaaguc

SEQ ID NO: 631309 - RNA, 19 nt, Homo sapiens
  misc_RNA (1)...(19): siRNA sense strand
gcacgucagagccaucaag

SEQ ID NO: 631310 - RNA, 19 nt, Homo sapiens
  misc_RNA (1)...(19): siRNA sense strand
ggaugccaguuaggcuuug

SEQ ID NO: 631311 - RNA, 19 nt, Homo sapiens
  misc_RNA (1)...(19): siRNA sense strand
gcuggugcaucacaucaac

SEQ ID NO: 631312 - RNA, 19 nt, Homo sapiens
  misc_RNA (1)...(19): siRNA sense strand
gcgagaagccccacaagug

SEQ ID NO: 631313 - RNA, 19 nt, Homo sapiens
  misc_RNA (1)...(19): siRNA sense strand
gcgccaagcaccagaaucg

SEQ ID NO: 631314 - RNA, 19 nt, Homo sapiens
  misc_RNA (1)...(19): siRNA sense strand
gaagcucaagucacucaag

SEQ ID NO: 631315 - RNA, 19 nt, Homo sapiens
  misc_RNA (1)...(19): siRNA sense strand
ucaacccugucgccauuca

SEQ ID NO: 631316 - RNA, 19 nt, Homo sapiens
  misc_RNA (1)...(19): siRNA sense strand
ggagaagaaggaguuugug

SEQ ID NO: 631317 - RNA, 19 nt, Homo sapiens
  misc_RNA (1)...(19): siRNA sense strand
ggaggacgaccuggugcuu

SEQ ID NO: 631318 - RNA, 19 nt, Homo sapiens
  misc_RNA (1)...(19): siRNA sense strand
caggcugcaccaagagaua

SEQ ID NO: 631319 - RNA, 19 nt, Homo sapiens
  misc_RNA (1)...(19): siRNA sense strand
cgagcgaggugaccaugcu

SEQ ID NO: 631320 - RNA, 19 nt, Homo sapiens
  misc_RNA (1)...(19): siRNA sense strand
cagcagcaacugucugagu

SEQ ID NO: 631321 - RNA, 19 nt, Homo sapiens
  misc_RNA (1)...(19): siRNA sense strand
uccugaacaugaugaccua

SEQ ID NO: 631322 - RNA, 19 nt, Homo sapiens
  misc_RNA (1)...(19): siRNA sense strand
gcacaccgcugcucaaaga

SEQ ID NO: 631323 - RNA, 19 nt, Homo sapiens
  misc_RNA (1)...(19): siRNA sense strand
ucaagucacucaaggauuc

SEQ ID NO: 631324 - RNA, 19 nt, Homo sapiens
  misc_RNA (1)...(19): siRNA sense strand
gcacgagggcugcaacaaa

SEQ ID NO: 631325 - RNA, 19 nt, Homo sapiens
  misc_RNA (1)...(19): siRNA sense strand
gcaaacacaugaccaccau

SEQ ID NO: 631326 - RNA, 19 nt, Homo sapiens
  misc_RNA (1)...(19): siRNA sense strand
ccaagaagcagcgcaauga

SEQ ID NO: 631327 - RNA, 19 nt, Homo sapiens
  misc_RNA (1)...(19): siRNA sense strand
gcacuggcuucucugacaa

SEQ ID NO: 631328 - RNA, 19 nt, Homo sapiens
  misc_RNA (1)...(19): siRNA sense strand
cgucaacccugucgccauu

SEQ ID NO: 631329 - RNA, 19 nt, Homo sapiens
  misc_RNA (1)...(19): siRNA sense strand
cagacgacguggugcagua

SEQ ID NO: 631330 - RNA, 19 nt, Homo sapiens
  misc_RNA (1)...(19): siRNA sense strand
ggagaagccauaugugugu

SEQ ID NO: 631331 - RNA, 19 nt, Homo sapiens
  misc_RNA (1)...(19): siRNA sense strand
uggcugaccucaaggaaga

SEQ ID NO: 631332 - RNA, 19 nt, Homo sapiens
  misc_RNA (1)...(19): siRNA sense strand
gcccucaccuccaucaaug

SEQ ID NO: 631333 - RNA, 19 nt, Homo sapiens
  misc_RNA (1)...(19): siRNA sense strand
gcgagaacguggcgaugga

SEQ ID NO: 631334 - RNA, 19 nt, Homo sapiens
  misc_RNA (1)...(19): siRNA sense strand
gcaacaaagccuucuccaa

SEQ ID NO: 631335 - RNA, 19 nt, Homo sapiens
  misc_RNA (1)...(19): siRNA sense strand
aggcugagguggucaucua

SEQ ID NO: 631336 - RNA, 19 nt, Homo sapiens
  misc_RNA (1)...(19): siRNA sense strand
gcaccaagagauacacaga

SEQ ID NO: 631337 - RNA, 19 nt, Homo sapiens
  misc_RNA (1)...(19): siRNA sense strand
uggagaaccugaagacaca

SEQ ID NO: 631338 - RNA, 19 nt, Homo sapiens
  misc_RNA (1)...(19): siRNA sense strand
gaaggagaagcucaaguca

SEQ ID NO: 631339 - RNA, 19 nt, Homo sapiens
  misc_RNA (1)...(19): siRNA sense strand
gagaagaaggaguuugugu

SEQ ID NO: 631340 - RNA, 19 nt, Homo sapiens
  misc_RNA (1)...(19): siRNA sense strand
gagaagcucaagucacuca

SEQ ID NO: 631341 - RNA, 19 nt, Homo sapiens
  misc_RNA (1)...(19): siRNA sense strand
gggagaagaaggaguuugu

SEQ ID NO: 631342 - RNA, 19 nt, Homo sapiens
  misc_RNA (1)...(19): siRNA sense strand
cacgagggcugcaacaaag

SEQ ID NO: 631343 - RNA, 19 nt, Homo sapiens
  misc_RNA (1)...(19): siRNA sense strand
aggagcagcuggugcauca

SEQ ID NO: 631344 - RNA, 19 nt, Homo sapiens
  misc_RNA (1)...(19): siRNA sense strand
aggagaagcucaagucacu

SEQ ID NO: 631345 - RNA, 19 nt, Homo sapiens
  misc_RNA (1)...(19): siRNA sense strand
gcucaagucacucaaggau

SEQ ID NO: 631346 - RNA, 19 nt, Homo sapiens
  misc_RNA (1)...(19): siRNA sense strand
ugagugacaccaaccagaa

SEQ ID NO: 631347 - RNA, 19 nt, Homo sapiens
  misc_RNA (1)...(19): siRNA sense strand
cagcugcgcaaacacauga

SEQ ID NO: 631348 - RNA, 19 nt, Homo sapiens
  misc_RNA (1)...(19): siRNA sense strand
caccgcugcucaaagagaa

SEQ ID NO: 631349 - RNA, 19 nt, Homo sapiens
  misc_RNA (1)...(19): siRNA sense strand
gcagcaacugucugaguga

SEQ ID NO: 631350 - RNA, 19 nt, Homo sapiens
  misc_RNA (1)...(19): siRNA sense strand
gggaagacugcaccaagga

SEQ ID NO: 631351 - RNA, 19 nt, Homo sapiens
  misc_RNA (1)...(19): siRNA sense strand
ucaagaaggagaagcucaa

SEQ ID NO: 631352 - RNA, 19 nt, Homo sapiens
  misc_RNA (1)...(19): siRNA sense strand
caacgagaaacccuacauc

SEQ ID NO: 631353 - RNA, 19 nt, Homo sapiens
  misc_RNA (1)...(19): siRNA sense strand
agaacaagcagagcaguga

SEQ ID NO: 631354 - RNA, 19 nt, Homo sapiens
  misc_RNA (1)...(19): siRNA sense strand
gagcagcuggugcaucaca

SEQ ID NO: 631355 - RNA, 19 nt, Homo sapiens
  misc_RNA (1)...(19): siRNA sense strand
gcacccacuccaacgagaa

SEQ ID NO: 631356 - RNA, 19 nt, Homo sapiens
  misc_RNA (1)...(19): siRNA sense strand
ggacugccugcacgucaga

SEQ ID NO: 631357 - RNA, 19 nt, Homo sapiens
  misc_RNA (1)...(19): siRNA sense strand
agaaggagaagcucaaguc

SEQ ID NO: 631358 - RNA, 19 nt, Homo sapiens
  misc_RNA (1)...(19): siRNA sense strand
gcacgucagagccaucaag

SEQ ID NO: 631359 - RNA, 19 nt, Homo sapiens
  misc_RNA (1)...(19): siRNA sense strand
ggaugccaguuaggcuuug

SEQ ID NO: 631360 - RNA, 19 nt, Homo sapiens
  misc_RNA (1)...(19): siRNA sense strand
gcuggugcaucacaucaac

SEQ ID NO: 631361 - RNA, 19 nt, Homo sapiens
  misc_RNA (1)...(19): siRNA sense strand
gcgagaagccccacaagug

SEQ ID NO: 631362 - RNA, 19 nt, Homo sapiens
  misc_RNA (1)...(19): siRNA sense strand
gcgccaagcaccagaaucg

SEQ ID NO: 631363 - RNA, 19 nt, Homo sapiens
  misc_RNA (1)...(19): siRNA sense strand
gaagcucaagucacucaag

SEQ ID NO: 631364 - RNA, 19 nt, Homo sapiens
  misc_RNA (1)...(19): siRNA sense strand
ucaacccugucgccauuca

SEQ ID NO: 631365 - RNA, 19 nt, Homo sapiens
  misc_RNA (1)...(19): siRNA sense strand
ggagaagaaggaguuugug

SEQ ID NO: 631366 - RNA, 19 nt, Homo sapiens
  misc_RNA (1)...(19): siRNA sense strand
ggaggacgaccuggugcuu

SEQ ID NO: 631367 - RNA, 19 nt, Homo sapiens
  misc_RNA (1)...(19): siRNA sense strand
caggcugcaccaagagaua

SEQ ID NO: 631368 - RNA, 19 nt, Homo sapiens
  misc_RNA (1)...(19): siRNA sense strand
cgagcgaggugaccaugcu

SEQ ID NO: 631369 - RNA, 19 nt, Homo sapiens
  misc_RNA (1)...(19): siRNA sense strand
cagcagcaacugucugagu

SEQ ID NO: 631370 - RNA, 19 nt, Homo sapiens
  misc_RNA (1)...(19): siRNA sense strand
uccugaacaugaugaccua

SEQ ID NO: 631371 - RNA, 19 nt, Homo sapiens
  misc_RNA (1)...(19): siRNA sense strand
gcacaccgcugcucaaaga

SEQ ID NO: 631372 - RNA, 19 nt, Homo sapiens
  misc_RNA (1)...(19): siRNA sense strand
ucaagucacucaaggauuc

SEQ ID NO: 631373 - RNA, 19 nt, Homo sapiens
  misc_RNA (1)...(19): siRNA sense strand
gcacgagggcugcaacaaa

SEQ ID NO: 631374 - RNA, 19 nt, Homo sapiens
  misc_RNA (1)...(19): siRNA sense strand
gcaaacacaugaccaccau

SEQ ID NO: 631375 - RNA, 19 nt, Homo sapiens
  misc_RNA (1)...(19): siRNA sense strand
ccaagaagcagcgcaauga

SEQ ID NO: 631376 - RNA, 19 nt, Homo sapiens
  misc_RNA (1)...(19): siRNA sense strand
gcacuggcuucucugacaa

SEQ ID NO: 631377 - RNA, 19 nt, Homo sapiens
  misc_RNA (1)...(19): siRNA sense strand
cgucaacccugucgccauu

SEQ ID NO: 631378 - RNA, 19 nt, Homo sapiens
  misc_RNA (1)...(19): siRNA sense strand
cagacgacguggugcagua

SEQ ID NO: 631379 - RNA, 19 nt, Homo sapiens
  misc_RNA (1)...(19): siRNA sense strand
ggagaagccauaugugugu

SEQ ID NO: 631380 - RNA, 19 nt, Homo sapiens
  misc_RNA (1)...(19): siRNA sense strand
uggcugaccucaaggaaga

SEQ ID NO: 631381 - RNA, 19 nt, Homo sapiens
  misc_RNA (1)...(19): siRNA sense strand
gcccucaccuccaucaaug

SEQ ID NO: 631382 - RNA, 19 nt, Homo sapiens
  misc_RNA (1)...(19): siRNA sense strand
gcgagaacguggcgaugga

SEQ ID NO: 631383 - RNA, 19 nt, Homo sapiens
  misc_RNA (1)...(19): siRNA sense strand
gcaacaaagccuucuccaa

SEQ ID NO: 631384 - RNA, 19 nt, Homo sapiens
  misc_RNA (1)...(19): siRNA sense strand
aggcugagguggucaucua

SEQ ID NO: 631385 - RNA, 19 nt, Homo sapiens
  misc_RNA (1)...(19): siRNA sense strand
gcaccaagagauacacaga

SEQ ID NO: 631386 - RNA, 19 nt, Homo sapiens
  misc_RNA (1)...(19): siRNA sense strand
uggagaaccugaagacaca

SEQ ID NO: 631387 - RNA, 19 nt, Homo sapiens
  misc_RNA (1)...(19): siRNA sense strand
gaaggagaagcucaaguca

SEQ ID NO: 631388 - RNA, 19 nt, Homo sapiens
  misc_RNA (1)...(19): siRNA sense strand
gagaagaaggaguuugugu

SEQ ID NO: 631389 - RNA, 19 nt, Homo sapiens
  misc_RNA (1)...(19): siRNA sense strand
gagaagcucaagucacuca

SEQ ID NO: 631390 - RNA, 19 nt, Homo sapiens
  misc_RNA (1)...(19): siRNA sense strand
gggagaagaaggaguuugu

SEQ ID NO: 631391 - RNA, 19 nt, Homo sapiens
  misc_RNA (1)...(19): siRNA sense strand
cacgagggcugcaacaaag

SEQ ID NO: 631392 - RNA, 19 nt, Homo sapiens
  misc_RNA (1)...(19): siRNA sense strand
aggagcagcuggugcauca

SEQ ID NO: 631393 - RNA, 19 nt, Homo sapiens
  misc_RNA (1)...(19): siRNA sense strand
aggagaagcucaagucacu

SEQ ID NO: 631394 - RNA, 19 nt, Homo sapiens
  misc_RNA (1)...(19): siRNA sense strand
gcucaagucacucaaggau

SEQ ID NO: 631395 - RNA, 19 nt, Homo sapiens
  misc_RNA (1)...(19): siRNA sense strand
ugagugacaccaaccagaa

SEQ ID NO: 631396 - RNA, 19 nt, Homo sapiens
  misc_RNA (1)...(19): siRNA sense strand
cagcugcgcaaacacauga

SEQ ID NO: 631397 - RNA, 19 nt, Homo sapiens
  misc_RNA (1)...(19): siRNA sense strand
caccgcugcucaaagagaa

SEQ ID NO: 631398 - RNA, 19 nt, Homo sapiens
  misc_RNA (1)...(19): siRNA sense strand
gcagcaacugucugaguga

SEQ ID NO: 631399 - RNA, 19 nt, Homo sapiens
  misc_RNA (1)...(19): siRNA sense strand
gggaagacugcaccaagga

SEQ ID NO: 631400 - RNA, 19 nt, Homo sapiens
  misc_RNA (1)...(19): siRNA sense strand
ucaagaaggagaagcucaa

SEQ ID NO: 631401 - RNA, 19 nt, Homo sapiens
  misc_RNA (1)...(19): siRNA sense strand
caacgagaaacccuacauc

SEQ ID NO: 631402 - RNA, 19 nt, Homo sapiens
  misc_RNA (1)...(19): siRNA sense strand
agaacaagcagagcaguga

SEQ ID NO: 631403 - RNA, 19 nt, Homo sapiens
  misc_RNA (1)...(19): siRNA sense strand
gagcagcuggugcaucaca

SEQ ID NO: 631404 - RNA, 19 nt, Homo sapiens
  misc_RNA (1)...(19): siRNA sense strand
gcacccacuccaacgagaa

SEQ ID NO: 631405 - RNA, 19 nt, Homo sapiens
  misc_RNA (1)...(19): siRNA sense strand
ggacugccugcacgucaga

SEQ ID NO: 631406 - RNA, 19 nt, Homo sapiens
  misc_RNA (1)...(19): siRNA sense strand
agaaggagaagcucaaguc

SEQ ID NO: 631407 - RNA, 19 nt, Homo sapiens
  misc_RNA (1)...(19): siRNA sense strand
gcacgucagagccaucaag

SEQ ID NO: 631408 - RNA, 19 nt, Homo sapiens
  misc_RNA (1)...(19): siRNA sense strand
ggaugccaguuaggcuuug

SEQ ID NO: 631409 - RNA, 19 nt, Homo sapiens
  misc_RNA (1)...(19): siRNA sense strand
gcuggugcaucacaucaac

SEQ ID NO: 631410 - RNA, 19 nt, Homo sapiens
  misc_RNA (1)...(19): siRNA sense strand
gcgagaagccccacaagug

SEQ ID NO: 631411 - RNA, 19 nt, Homo sapiens
  misc_RNA (1)...(19): siRNA sense strand
gcgccaagcaccagaaucg

SEQ ID NO: 631412 - RNA, 19 nt, Homo sapiens
  misc_RNA (1)...(19): siRNA sense strand
gaagcucaagucacucaag

SEQ ID NO: 631413 - RNA, 19 nt, Homo sapiens
  misc_RNA (1)...(19): siRNA sense strand
ucaacccugucgccauuca

SEQ ID NO: 631414 - RNA, 19 nt, Homo sapiens
  misc_RNA (1)...(19): siRNA sense strand
ggagaagaaggaguuugug

SEQ ID NO: 631415 - RNA, 19 nt, Homo sapiens
  misc_RNA (1)...(19): siRNA sense strand
ggaggacgaccuggugcuu

SEQ ID NO: 631416 - RNA, 19 nt, Homo sapiens
  misc_RNA (1)...(19): siRNA sense strand
caggcugcaccaagagaua

SEQ ID NO: 631417 - RNA, 19 nt, Homo sapiens
  misc_RNA (1)...(19): siRNA sense strand
cgagcgaggugaccaugcu

SEQ ID NO: 631418 - RNA, 19 nt, Homo sapiens
  misc_RNA (1)...(19): siRNA sense strand
cagcagcaacugucugagu

SEQ ID NO: 631419 - RNA, 19 nt, Homo sapiens
  misc_RNA (1)...(19): siRNA sense strand
gauaggaaaugaugggauu

SEQ ID NO: 631420 - RNA, 19 nt, Homo sapiens
  misc_RNA (1)...(19): siRNA sense strand
ggaagaugccagaaacuuu

SEQ ID NO: 631421 - RNA, 19 nt, Homo sapiens
  misc_RNA (1)...(19): siRNA sense strand
gcagagagcgcagcauauu

SEQ ID NO: 631422 - RNA, 19 nt, Homo sapiens
  misc_RNA (1)...(19): siRNA sense strand
uuuggucucucucuaauua

SEQ ID NO: 631423 - RNA, 19 nt, Homo sapiens
  misc_RNA (1)...(19): siRNA sense strand
uuaaauggauccugauugu

SEQ ID NO: 631424 - RNA, 19 nt, Homo sapiens
  misc_RNA (1)...(19): siRNA sense strand
ccaccuauuucccuggaua

SEQ ID NO: 631425 - RNA, 19 nt, Homo sapiens
  misc_RNA (1)...(19): siRNA sense strand
ggauuuggucucucucuaa

SEQ ID NO: 631426 - RNA, 19 nt, Homo sapiens
  misc_RNA (1)...(19): siRNA sense strand
gaccaaggcugaagcuacu

SEQ ID NO: 631427 - RNA, 19 nt, Homo sapiens
  misc_RNA (1)...(19): siRNA sense strand
gugaugcuccuccaccuua

SEQ ID NO: 631428 - RNA, 19 nt, Homo sapiens
  misc_RNA (1)...(19): siRNA sense strand
gauuuggucucucucuaau

SEQ ID NO: 631429 - RNA, 19 nt, Homo sapiens
  misc_RNA (1)...(19): siRNA sense strand
gaagaagagucuggagaac

SEQ ID NO: 631430 - RNA, 19 nt, Homo sapiens
  misc_RNA (1)...(19): siRNA sense strand
gaggauuuaucaauuaugc

SEQ ID NO: 631431 - RNA, 19 nt, Homo sapiens
  misc_RNA (1)...(19): siRNA sense strand
ugaagaagagucuggagaa

SEQ ID NO: 631432 - RNA, 19 nt, Homo sapiens
  misc_RNA (1)...(19): siRNA sense strand
ucauggcauuccucuuuaa

SEQ ID NO: 631433 - RNA, 19 nt, Homo sapiens
  misc_RNA (1)...(19): siRNA sense strand
cucagaggauuuaucaauu

SEQ ID NO: 631434 - RNA, 19 nt, Homo sapiens
  misc_RNA (1)...(19): siRNA sense strand
gaugggauuuucauguuaa

SEQ ID NO: 631435 - RNA, 19 nt, Homo sapiens
  misc_RNA (1)...(19): siRNA sense strand
aaauggauccugauuguca

SEQ ID NO: 631436 - RNA, 19 nt, Homo sapiens
  misc_RNA (1)...(19): siRNA sense strand
ugaacaggcugcaggugau

SEQ ID NO: 631437 - RNA, 19 nt, Homo sapiens
  misc_RNA (1)...(19): siRNA sense strand
uuucauggcauuccucuuu

SEQ ID NO: 631438 - RNA, 19 nt, Homo sapiens
  misc_RNA (1)...(19): siRNA sense strand
uaccagcaguugcagaaug

SEQ ID NO: 631439 - RNA, 19 nt, Homo sapiens
  misc_RNA (1)...(19): siRNA sense strand
cagagagcgcagcauauuu

SEQ ID NO: 631440 - RNA, 19 nt, Homo sapiens
  misc_RNA (1)...(19): siRNA sense strand
gcaguugcagaaugaagaa

SEQ ID NO: 631441 - RNA, 19 nt, Homo sapiens
  misc_RNA (1)...(19): siRNA sense strand
ucucagaggauuuaucaau

SEQ ID NO: 631442 - RNA, 19 nt, Homo sapiens
  misc_RNA (1)...(19): siRNA sense strand
cagcauauuuugacuacaa

SEQ ID NO: 631443 - RNA, 19 nt, Homo sapiens
  misc_RNA (1)...(19): siRNA sense strand
uggcauuccucuuuaacug

SEQ ID NO: 631444 - RNA, 19 nt, Homo sapiens
  misc_RNA (1)...(19): siRNA sense strand
gguaccagcaguugcagaa

SEQ ID NO: 631445 - RNA, 19 nt, Homo sapiens
  misc_RNA (1)...(19): siRNA sense strand
uucauggcauuccucuuua

SEQ ID NO: 631446 - RNA, 19 nt, Homo sapiens
  misc_RNA (1)...(19): siRNA sense strand
caaggaugagucuggguuu

SEQ ID NO: 631447 - RNA, 19 nt, Homo sapiens
  misc_RNA (1)...(19): siRNA sense strand
gaacaggcugcaggugaug

SEQ ID NO: 631448 - RNA, 19 nt, Homo sapiens
  misc_RNA (1)...(19): siRNA sense strand
guucggaagaugccagaaa

SEQ ID NO: 631449 - RNA, 19 nt, Homo sapiens
  misc_RNA (1)...(19): siRNA sense strand
gcagaaugaagaagagucu

SEQ ID NO: 631450 - RNA, 19 nt, Homo sapiens
  misc_RNA (1)...(19): siRNA sense strand
ugaagcuacuaucccuuug

SEQ ID NO: 631451 - RNA, 19 nt, Homo sapiens
  misc_RNA (1)...(19): siRNA sense strand
ccaccuuacagcagcauuu

SEQ ID NO: 631452 - RNA, 19 nt, Homo sapiens
  misc_RNA (1)...(19): siRNA sense strand
uuuaggcuuucuccuguuu

SEQ ID NO: 631453 - RNA, 19 nt, Homo sapiens
  misc_RNA (1)...(19): siRNA sense strand
gaccagcugaggauaggaa

SEQ ID NO: 631454 - RNA, 19 nt, Homo sapiens
  misc_RNA (1)...(19): siRNA sense strand
cuauuucccuggauauuuu

SEQ ID NO: 631455 - RNA, 19 nt, Homo sapiens
  misc_RNA (1)...(19): siRNA sense strand
ccuauuucccuggauauuu

SEQ ID NO: 631456 - RNA, 19 nt, Homo sapiens
  misc_RNA (1)...(19): siRNA sense strand
uggucucucucuaauuaaa

SEQ ID NO: 631457 - RNA, 19 nt, Homo sapiens
  misc_RNA (1)...(19): siRNA sense strand
accagcaguugcagaauga

SEQ ID NO: 631458 - RNA, 19 nt, Homo sapiens
  misc_RNA (1)...(19): siRNA sense strand
cagcugaggauaggaaaug

SEQ ID NO: 631459 - RNA, 19 nt, Homo sapiens
  misc_RNA (1)...(19): siRNA sense strand
agaagagucuggagaaccu

SEQ ID NO: 631460 - RNA, 19 nt, Homo sapiens
  misc_RNA (1)...(19): siRNA sense strand
ggagaggaccaaggcugaa

SEQ ID NO: 631461 - RNA, 19 nt, Homo sapiens
  misc_RNA (1)...(19): siRNA sense strand
cugaagcuacuaucccuuu

SEQ ID NO: 631462 - RNA, 19 nt, Homo sapiens
  misc_RNA (1)...(19): siRNA sense strand
ugguggguguuccuuguuu

SEQ ID NO: 631463 - RNA, 19 nt, Homo sapiens
  misc_RNA (1)...(19): siRNA sense strand
ggaugagucuggguuucca

SEQ ID NO: 631464 - RNA, 19 nt, Homo sapiens
  misc_RNA (1)...(19): siRNA sense strand
ugaugggauuuucauguua

SEQ ID NO: 631465 - RNA, 19 nt, Homo sapiens
  misc_RNA (1)...(19): siRNA sense strand
gaagcuacuaucccuuugg

SEQ ID NO: 631466 - RNA, 19 nt, Homo sapiens
  misc_RNA (1)...(19): siRNA sense strand
gagucuggguuuccaaagc

SEQ ID NO: 631467 - RNA, 19 nt, Homo sapiens
  misc_RNA (1)...(19): siRNA sense strand
cggaagaugccagaaacuu

SEQ ID NO: 631468 - RNA, 19 nt, Homo sapiens
  misc_RNA (1)...(19): siRNA sense strand
aggauuuggucucucucua

SEQ ID NO: 631469 - RNA, 19 nt, Homo sapiens
  misc_RNA (1)...(19): siRNA sense strand
ggagagaugaggauuuugu

SEQ ID NO: 631470 - RNA, 19 nt, Homo sapiens
  misc_RNA (1)...(19): siRNA sense strand
ccaaggcugaagcuacuau

SEQ ID NO: 631471 - RNA, 19 nt, Homo sapiens
  misc_RNA (1)...(19): siRNA sense strand
ugggagagaugaggauuuu

SEQ ID NO: 631472 - RNA, 19 nt, Homo sapiens
  misc_RNA (1)...(19): siRNA sense strand
agagagcgcagcauauuuu

SEQ ID NO: 631473 - RNA, 19 nt, Homo sapiens
  misc_RNA (1)...(19): siRNA sense strand
gucucucucuaauuaaaug

SEQ ID NO: 631474 - RNA, 19 nt, Homo sapiens
  misc_RNA (1)...(19): siRNA sense strand
gcacgcaucuucuccuuug

SEQ ID NO: 631475 - RNA, 19 nt, Homo sapiens
  misc_RNA (1)...(19): siRNA sense strand
ggaaggcgaugacucagau

SEQ ID NO: 631476 - RNA, 19 nt, Homo sapiens
  misc_RNA (1)...(19): siRNA sense strand
gagcggacccugacaaguu

SEQ ID NO: 631477 - RNA, 19 nt, Homo sapiens
  misc_RNA (1)...(19): siRNA sense strand
guuaggagcucagacacuu

SEQ ID NO: 631478 - RNA, 19 nt, Homo sapiens
  misc_RNA (1)...(19): siRNA sense strand
gcaguuuccguuugacuuu

SEQ ID NO: 631479 - RNA, 19 nt, Homo sapiens
  misc_RNA (1)...(19): siRNA sense strand
gggagaaguuggagcagau

SEQ ID NO: 631480 - RNA, 19 nt, Homo sapiens
  misc_RNA (1)...(19): siRNA sense strand
aagcugaccuucauugaca

SEQ ID NO: 631481 - RNA, 19 nt, Homo sapiens
  misc_RNA (1)...(19): siRNA sense strand
gugaggaguuccagagaau

SEQ ID NO: 631482 - RNA, 19 nt, Homo sapiens
  misc_RNA (1)...(19): siRNA sense strand
gaagggagaccgaggugau

SEQ ID NO: 631483 - RNA, 19 nt, Homo sapiens
  misc_RNA (1)...(19): siRNA sense strand
gaaccgggcagcaucuuca

SEQ ID NO: 631484 - RNA, 19 nt, Homo sapiens
  misc_RNA (1)...(19): siRNA sense strand
caagggagagauuggcuuu

SEQ ID NO: 631485 - RNA, 19 nt, Homo sapiens
  misc_RNA (1)...(19): siRNA sense strand
guuggaggcugaaaugaag

SEQ ID NO: 631486 - RNA, 19 nt, Homo sapiens
  misc_RNA (1)...(19): siRNA sense strand
ggugaucgcugagcugaag

SEQ ID NO: 631487 - RNA, 19 nt, Homo sapiens
  misc_RNA (1)...(19): siRNA sense strand
gaagauuccagaagugaag

SEQ ID NO: 631488 - RNA, 19 nt, Homo sapiens
  misc_RNA (1)...(19): siRNA sense strand
ccagggcaguuuccguuug

SEQ ID NO: 631489 - RNA, 19 nt, Homo sapiens
  misc_RNA (1)...(19): siRNA sense strand
cagggcaguuuccguuuga

SEQ ID NO: 631490 - RNA, 19 nt, Homo sapiens
  misc_RNA (1)...(19): siRNA sense strand
ggacaucucccugcucuac

SEQ ID NO: 631491 - RNA, 19 nt, Homo sapiens
  misc_RNA (1)...(19): siRNA sense strand
cgaggaaggcgaugacuca

SEQ ID NO: 631492 - RNA, 19 nt, Homo sapiens
  misc_RNA (1)...(19): siRNA sense strand
gaaguuggagcagauggaa

SEQ ID NO: 631493 - RNA, 19 nt, Homo sapiens
  misc_RNA (1)...(19): siRNA sense strand
gacaagcugaccuucauug

SEQ ID NO: 631494 - RNA, 19 nt, Homo sapiens
  misc_RNA (1)...(19): siRNA sense strand
gggcacgcaucuucuccuu

SEQ ID NO: 631495 - RNA, 19 nt, Homo sapiens
  misc_RNA (1)...(19): siRNA sense strand
ggagaugccagccuuggau

SEQ ID NO: 631496 - RNA, 19 nt, Homo sapiens
  misc_RNA (1)...(19): siRNA sense strand
gggaugaacggauugaaag

SEQ ID NO: 631497 - RNA, 19 nt, Homo sapiens
  misc_RNA (1)...(19): siRNA sense strand
ugaccgagagcuacuguga

SEQ ID NO: 631498 - RNA, 19 nt, Homo sapiens
  misc_RNA (1)...(19): siRNA sense strand
uggauuugaugacauggaa

SEQ ID NO: 631499 - RNA, 19 nt, Homo sapiens
  misc_RNA (1)...(19): siRNA sense strand
aggaaggacugggcagaaa

SEQ ID NO: 631500 - RNA, 19 nt, Homo sapiens
  misc_RNA (1)...(19): siRNA sense strand
caaggacgagcugcuguuu

SEQ ID NO: 631501 - RNA, 19 nt, Homo sapiens
  misc_RNA (1)...(19): siRNA sense strand
cacgagggacggacaauga

SEQ ID NO: 631502 - RNA, 19 nt, Homo sapiens
  misc_RNA (1)...(19): siRNA sense strand
gaugccagccuuggauuug

SEQ ID NO: 631503 - RNA, 19 nt, Homo sapiens
  misc_RNA (1)...(19): siRNA sense strand
accgagagcuacugugaga

SEQ ID NO: 631504 - RNA, 19 nt, Homo sapiens
  misc_RNA (1)...(19): siRNA sense strand
ugugaggaguuccagagaa

SEQ ID NO: 631505 - RNA, 19 nt, Homo sapiens
  misc_RNA (1)...(19): siRNA sense strand
gaugaacggauugaaagga

SEQ ID NO: 631506 - RNA, 19 nt, Homo sapiens
  misc_RNA (1)...(19): siRNA sense strand
gagaugccagccuuggauu

SEQ ID NO: 631507 - RNA, 19 nt, Homo sapiens
  misc_RNA (1)...(19): siRNA sense strand
gggcuggccuacgucuuug

SEQ ID NO: 631508 - RNA, 19 nt, Homo sapiens
  misc_RNA (1)...(19): siRNA sense strand
gcucugaggguccgcugaa

SEQ ID NO: 631509 - RNA, 19 nt, Homo sapiens
  misc_RNA (1)...(19): siRNA sense strand
cacgguggcuucguuagga

SEQ ID NO: 631510 - RNA, 19 nt, Homo sapiens
  misc_RNA (1)...(19): siRNA sense strand
ucaugacugccuccaagua

SEQ ID NO: 631511 - RNA, 19 nt, Homo sapiens
  misc_RNA (1)...(19): siRNA sense strand
ggaaggacugggcagaaag

SEQ ID NO: 631512 - RNA, 19 nt, Homo sapiens
  misc_RNA (1)...(19): siRNA sense strand
gcagcagcacggaagauuc

SEQ ID NO: 631513 - RNA, 19 nt, Homo sapiens
  misc_RNA (1)...(19): siRNA sense strand
gggccgacuuccagugcuu

SEQ ID NO: 631514 - RNA, 19 nt, Homo sapiens
  misc_RNA (1)...(19): siRNA sense strand
ccucacaggcagacuauca

SEQ ID NO: 631515 - RNA, 19 nt, Homo sapiens
  misc_RNA (1)...(19): siRNA sense strand
guuugacuuucuucaguug

SEQ ID NO: 631516 - RNA, 19 nt, Homo sapiens
  misc_RNA (1)...(19): siRNA sense strand
uuacgacagcaauguguuu

SEQ ID NO: 631517 - RNA, 19 nt, Homo sapiens
  misc_RNA (1)...(19): siRNA sense strand
gaaggacugggcagaaagg

SEQ ID NO: 631518 - RNA, 19 nt, Homo sapiens
  misc_RNA (1)...(19): siRNA sense strand
gcacugccuggacgaggaa

SEQ ID NO: 631519 - RNA, 19 nt, Homo sapiens
  misc_RNA (1)...(19): siRNA sense strand
cguuugacuuucuucaguu

SEQ ID NO: 631520 - RNA, 19 nt, Homo sapiens
  misc_RNA (1)...(19): siRNA sense strand
acgacaagcugaccuucau

SEQ ID NO: 631521 - RNA, 19 nt, Homo sapiens
  misc_RNA (1)...(19): siRNA sense strand
gacacuuccuggcucagau

SEQ ID NO: 631522 - RNA, 19 nt, Homo sapiens
  misc_RNA (1)...(19): siRNA sense strand
cuucuuccgugacuucuca

SEQ ID NO: 631523 - RNA, 19 nt, Homo sapiens
  misc_RNA (1)...(19): siRNA sense strand
cuacaucgugcucugcauu

SEQ ID NO: 631524 - RNA, 19 nt, Homo sapiens
  misc_RNA (1)...(19): siRNA sense strand
gcaggcugaccgagagcua

SEQ ID NO: 631525 - RNA, 19 nt, Homo sapiens
  misc_RNA (1)...(19): siRNA sense strand
cgggaugaacggauugaaa

SEQ ID NO: 631526 - RNA, 19 nt, Homo sapiens
  misc_RNA (1)...(19): siRNA sense strand
cgggcuggccuacgucuuu

SEQ ID NO: 631527 - RNA, 19 nt, Homo sapiens
  misc_RNA (1)...(19): siRNA sense strand
uuccagaagugaagaaguc

SEQ ID NO: 631528 - RNA, 19 nt, Homo sapiens
  misc_RNA (1)...(19): siRNA sense strand
ccguuugacuuucuucagu

SEQ ID NO: 631529 - RNA, 19 nt, Homo sapiens
  misc_RNA (1)...(19): siRNA sense strand
ugaccuucauugacaugga

SEQ ID NO: 631530 - RNA, 19 nt, Homo sapiens
  misc_RNA (1)...(19): siRNA sense strand
cgacaagcugaccuucauu

SEQ ID NO: 631531 - RNA, 19 nt, Homo sapiens
  misc_RNA (1)...(19): siRNA sense strand
cauggagggaucuggcuuu

SEQ ID NO: 631532 - RNA, 19 nt, Homo sapiens
  misc_RNA (1)...(19): siRNA sense strand
agggcaaccugggcucuaa

SEQ ID NO: 631533 - RNA, 19 nt, Homo sapiens
  misc_RNA (1)...(19): siRNA sense strand
ggcagcagcacggaagauu

SEQ ID NO: 631534 - RNA, 19 nt, Homo sapiens
  misc_RNA (1)...(19): siRNA sense strand
auugagaacagcuucauga

SEQ ID NO: 631535 - RNA, 19 nt, Homo sapiens
  misc_RNA (1)...(19): siRNA sense strand
ucaaggacgagcugcuguu

SEQ ID NO: 631536 - RNA, 19 nt, Homo sapiens
  misc_RNA (1)...(19): siRNA sense strand
gagggacggacaaugaagu

SEQ ID NO: 631537 - RNA, 19 nt, Homo sapiens
  misc_RNA (1)...(19): siRNA sense strand
acaagcugaccuucauuga

SEQ ID NO: 631538 - RNA, 19 nt, Homo sapiens
  misc_RNA (1)...(19): siRNA sense strand
caguguggcagguggcuuu

SEQ ID NO: 631539 - RNA, 19 nt, Homo sapiens
  misc_RNA (1)...(19): siRNA sense strand
ucucacugcuguuccacau

SEQ ID NO: 631540 - RNA, 19 nt, Homo sapiens
  misc_RNA (1)...(19): siRNA sense strand
cggauugaaaggagagaaa

SEQ ID NO: 631541 - RNA, 19 nt, Homo sapiens
  misc_RNA (1)...(19): siRNA sense strand
gcacgcaucuucuccuuug

SEQ ID NO: 631542 - RNA, 19 nt, Homo sapiens
  misc_RNA (1)...(19): siRNA sense strand
ggaaggcgaugacucagau

SEQ ID NO: 631543 - RNA, 19 nt, Homo sapiens
  misc_RNA (1)...(19): siRNA sense strand
gagcggacccugacaaguu

SEQ ID NO: 631544 - RNA, 19 nt, Homo sapiens
  misc_RNA (1)...(19): siRNA sense strand
guuaggagcucagacacuu

SEQ ID NO: 631545 - RNA, 19 nt, Homo sapiens
  misc_RNA (1)...(19): siRNA sense strand
gcaguuuccguuugacuuu

SEQ ID NO: 631546 - RNA, 19 nt, Homo sapiens
  misc_RNA (1)...(19): siRNA sense strand
gggagaaguuggagcagau

SEQ ID NO: 631547 - RNA, 19 nt, Homo sapiens
  misc_RNA (1)...(19): siRNA sense strand
aagcugaccuucauugaca

SEQ ID NO: 631548 - RNA, 19 nt, Homo sapiens
  misc_RNA (1)...(19): siRNA sense strand
gugaggaguuccagagaau

SEQ ID NO: 631549 - RNA, 19 nt, Homo sapiens
  misc_RNA (1)...(19): siRNA sense strand
gaagggagaccgaggugau

SEQ ID NO: 631550 - RNA, 19 nt, Homo sapiens
  misc_RNA (1)...(19): siRNA sense strand
gaaccgggcagcaucuuca

SEQ ID NO: 631551 - RNA, 19 nt, Homo sapiens
  misc_RNA (1)...(19): siRNA sense strand
caagggagagauuggcuuu

SEQ ID NO: 631552 - RNA, 19 nt, Homo sapiens
  misc_RNA (1)...(19): siRNA sense strand
guuggaggcugaaaugaag

SEQ ID NO: 631553 - RNA, 19 nt, Homo sapiens
  misc_RNA (1)...(19): siRNA sense strand
ggugaucgcugagcugaag

SEQ ID NO: 631554 - RNA, 19 nt, Homo sapiens
  misc_RNA (1)...(19): siRNA sense strand
gaagauuccagaagugaag

SEQ ID NO: 631555 - RNA, 19 nt, Homo sapiens
  misc_RNA (1)...(19): siRNA sense strand
ccagggcaguuuccguuug

SEQ ID NO: 631556 - RNA, 19 nt, Homo sapiens
  misc_RNA (1)...(19): siRNA sense strand
cagggcaguuuccguuuga

SEQ ID NO: 631557 - RNA, 19 nt, Homo sapiens
  misc_RNA (1)...(19): siRNA sense strand
ggacaucucccugcucuac

SEQ ID NO: 631558 - RNA, 19 nt, Homo sapiens
  misc_RNA (1)...(19): siRNA sense strand
cgaggaaggcgaugacuca

SEQ ID NO: 631559 - RNA, 19 nt, Homo sapiens
  misc_RNA (1)...(19): siRNA sense strand
gaaguuggagcagauggaa

SEQ ID NO: 631560 - RNA, 19 nt, Homo sapiens
  misc_RNA (1)...(19): siRNA sense strand
gacaagcugaccuucauug

SEQ ID NO: 631561 - RNA, 19 nt, Homo sapiens
  misc_RNA (1)...(19): siRNA sense strand
gggcacgcaucuucuccuu

SEQ ID NO: 631562 - RNA, 19 nt, Homo sapiens
  misc_RNA (1)...(19): siRNA sense strand
ggagaugccagccuuggau

SEQ ID NO: 631563 - RNA, 19 nt, Homo sapiens
  misc_RNA (1)...(19): siRNA sense strand
gggaugaacggauugaaag

SEQ ID NO: 631564 - RNA, 19 nt, Homo sapiens
  misc_RNA (1)...(19): siRNA sense strand
ugaccgagagcuacuguga

SEQ ID NO: 631565 - RNA, 19 nt, Homo sapiens
  misc_RNA (1)...(19): siRNA sense strand
uggauuugaugacauggaa

SEQ ID NO: 631566 - RNA, 19 nt, Homo sapiens
  misc_RNA (1)...(19): siRNA sense strand
aggaaggacugggcagaaa

SEQ ID NO: 631567 - RNA, 19 nt, Homo sapiens
  misc_RNA (1)...(19): siRNA sense strand
caaggacgagcugcuguuu

SEQ ID NO: 631568 - RNA, 19 nt, Homo sapiens
  misc_RNA (1)...(19): siRNA sense strand
cacgagggacggacaauga

SEQ ID NO: 631569 - RNA, 19 nt, Homo sapiens
  misc_RNA (1)...(19): siRNA sense strand
gaugccagccuuggauuug

SEQ ID NO: 631570 - RNA, 19 nt, Homo sapiens
  misc_RNA (1)...(19): siRNA sense strand
accgagagcuacugugaga

SEQ ID NO: 631571 - RNA, 19 nt, Homo sapiens
  misc_RNA (1)...(19): siRNA sense strand
ugugaggaguuccagagaa

SEQ ID NO: 631572 - RNA, 19 nt, Homo sapiens
  misc_RNA (1)...(19): siRNA sense strand
gaugaacggauugaaagga

SEQ ID NO: 631573 - RNA, 19 nt, Homo sapiens
  misc_RNA (1)...(19): siRNA sense strand
gagaugccagccuuggauu

SEQ ID NO: 631574 - RNA, 19 nt, Homo sapiens
  misc_RNA (1)...(19): siRNA sense strand
gggcuggccuacgucuuug

SEQ ID NO: 631575 - RNA, 19 nt, Homo sapiens
  misc_RNA (1)...(19): siRNA sense strand
gcucugaggguccgcugaa

SEQ ID NO: 631576 - RNA, 19 nt, Homo sapiens
  misc_RNA (1)...(19): siRNA sense strand
cacgguggcuucguuagga

SEQ ID NO: 631577 - RNA, 19 nt, Homo sapiens
  misc_RNA (1)...(19): siRNA sense strand
ucaugacugccuccaagua

SEQ ID NO: 631578 - RNA, 19 nt, Homo sapiens
  misc_RNA (1)...(19): siRNA sense strand
ggaaggacugggcagaaag

SEQ ID NO: 631579 - RNA, 19 nt, Homo sapiens
  misc_RNA (1)...(19): siRNA sense strand
gcagcagcacggaagauuc

SEQ ID NO: 631580 - RNA, 19 nt, Homo sapiens
  misc_RNA (1)...(19): siRNA sense strand
gggccgacuuccagugcuu

SEQ ID NO: 631581 - RNA, 19 nt, Homo sapiens
  misc_RNA (1)...(19): siRNA sense strand
ccucacaggcagacuauca

SEQ ID NO: 631582 - RNA, 19 nt, Homo sapiens
  misc_RNA (1)...(19): siRNA sense strand
guuugacuuucuucaguug

SEQ ID NO: 631583 - RNA, 19 nt, Homo sapiens
  misc_RNA (1)...(19): siRNA sense strand
uuacgacagcaauguguuu

SEQ ID NO: 631584 - RNA, 19 nt, Homo sapiens
  misc_RNA (1)...(19): siRNA sense strand
gaaggacugggcagaaagg

SEQ ID NO: 631585 - RNA, 19 nt, Homo sapiens
  misc_RNA (1)...(19): siRNA sense strand
gcacugccuggacgaggaa

SEQ ID NO: 631586 - RNA, 19 nt, Homo sapiens
  misc_RNA (1)...(19): siRNA sense strand
cguuugacuuucuucaguu

SEQ ID NO: 631587 - RNA, 19 nt, Homo sapiens
  misc_RNA (1)...(19): siRNA sense strand
acgacaagcugaccuucau

SEQ ID NO: 631588 - RNA, 19 nt, Homo sapiens
  misc_RNA (1)...(19): siRNA sense strand
gacacuuccuggcucagau

SEQ ID NO: 631589 - RNA, 19 nt, Homo sapiens
  misc_RNA (1)...(19): siRNA sense strand
cuucuuccgugacuucuca

SEQ ID NO: 631590 - RNA, 19 nt, Homo sapiens
  misc_RNA (1)...(19): siRNA sense strand
cuacaucgugcucugcauu

SEQ ID NO: 631591 - RNA, 19 nt, Homo sapiens
  misc_RNA (1)...(19): siRNA sense strand
gcaggcugaccgagagcua

SEQ ID NO: 631592 - RNA, 19 nt, Homo sapiens
  misc_RNA (1)...(19): siRNA sense strand
cgggaugaacggauugaaa

SEQ ID NO: 631593 - RNA, 19 nt, Homo sapiens
  misc_RNA (1)...(19): siRNA sense strand
cgggcuggccuacgucuuu

SEQ ID NO: 631594 - RNA, 19 nt, Homo sapiens
  misc_RNA (1)...(19): siRNA sense strand
uuccagaagugaagaaguc

SEQ ID NO: 631595 - RNA, 19 nt, Homo sapiens
  misc_RNA (1)...(19): siRNA sense strand
ccguuugacuuucuucagu

SEQ ID NO: 631596 - RNA, 19 nt, Homo sapiens
  misc_RNA (1)...(19): siRNA sense strand
ugaccuucauugacaugga

SEQ ID NO: 631597 - RNA, 19 nt, Homo sapiens
  misc_RNA (1)...(19): siRNA sense strand
cgacaagcugaccuucauu

SEQ ID NO: 631598 - RNA, 19 nt, Homo sapiens
  misc_RNA (1)...(19): siRNA sense strand
cauggagggaucuggcuuu

SEQ ID NO: 631599 - RNA, 19 nt, Homo sapiens
  misc_RNA (1)...(19): siRNA sense strand
agggcaaccugggcucuaa

SEQ ID NO: 631600 - RNA, 19 nt, Homo sapiens
  misc_RNA (1)...(19): siRNA sense strand
ggcagcagcacggaagauu

SEQ ID NO: 631601 - RNA, 19 nt, Homo sapiens
  misc_RNA (1)...(19): siRNA sense strand
auugagaacagcuucauga

SEQ ID NO: 631602 - RNA, 19 nt, Homo sapiens
  misc_RNA (1)...(19): siRNA sense strand
ucaaggacgagcugcuguu

SEQ ID NO: 631603 - RNA, 19 nt, Homo sapiens
  misc_RNA (1)...(19): siRNA sense strand
gagggacggacaaugaagu

SEQ ID NO: 631604 - RNA, 19 nt, Homo sapiens
  misc_RNA (1)...(19): siRNA sense strand
acaagcugaccuucauuga

SEQ ID NO: 631605 - RNA, 19 nt, Homo sapiens
  misc_RNA (1)...(19): siRNA sense strand
caguguggcagguggcuuu

SEQ ID NO: 631606 - RNA, 19 nt, Homo sapiens
  misc_RNA (1)...(19): siRNA sense strand
ucucacugcuguuccacau

SEQ ID NO: 631607 - RNA, 19 nt, Homo sapiens
  misc_RNA (1)...(19): siRNA sense strand
cggauugaaaggagagaaa

SEQ ID NO: 631608 - RNA, 19 nt, Homo sapiens
  misc_RNA (1)...(19): siRNA sense strand
gcacgcaucuucuccuuug

SEQ ID NO: 631609 - RNA, 19 nt, Homo sapiens
  misc_RNA (1)...(19): siRNA sense strand
ggaaggcgaugacucagau

SEQ ID NO: 631610 - RNA, 19 nt, Homo sapiens
  misc_RNA (1)...(19): siRNA sense strand
gagcggacccugacaaguu

SEQ ID NO: 631611 - RNA, 19 nt, Homo sapiens
  misc_RNA (1)...(19): siRNA sense strand
guuaggagcucagacacuu

SEQ ID NO: 631612 - RNA, 19 nt, Homo sapiens
  misc_RNA (1)...(19): siRNA sense strand
gcaguuuccguuugacuuu

SEQ ID NO: 631613 - RNA, 19 nt, Homo sapiens
  misc_RNA (1)...(19): siRNA sense strand
gggagaaguuggagcagau

SEQ ID NO: 631614 - RNA, 19 nt, Homo sapiens
  misc_RNA (1)...(19): siRNA sense strand
aagcugaccuucauugaca

SEQ ID NO: 631615 - RNA, 19 nt, Homo sapiens
  misc_RNA (1)...(19): siRNA sense strand
gugaggaguuccagagaau

SEQ ID NO: 631616 - RNA, 19 nt, Homo sapiens
  misc_RNA (1)...(19): siRNA sense strand
gaagggagaccgaggugau

SEQ ID NO: 631617 - RNA, 19 nt, Homo sapiens
  misc_RNA (1)...(19): siRNA sense strand
gaaccgggcagcaucuuca

SEQ ID NO: 631618 - RNA, 19 nt, Homo sapiens
  misc_RNA (1)...(19): siRNA sense strand
caagggagagauuggcuuu

SEQ ID NO: 631619 - RNA, 19 nt, Homo sapiens
  misc_RNA (1)...(19): siRNA sense strand
guuggaggcugaaaugaag

SEQ ID NO: 631620 - RNA, 19 nt, Homo sapiens
  misc_RNA (1)...(19): siRNA sense strand
ggugaucgcugagcugaag

SEQ ID NO: 631621 - RNA, 19 nt, Homo sapiens
  misc_RNA (1)...(19): siRNA sense strand
gaagauuccagaagugaag

SEQ ID NO: 631622 - RNA, 19 nt, Homo sapiens
  misc_RNA (1)...(19): siRNA sense strand
ccagggcaguuuccguuug

SEQ ID NO: 631623 - RNA, 19 nt, Homo sapiens
  misc_RNA (1)...(19): siRNA sense strand
cagggcaguuuccguuuga

SEQ ID NO: 631624 - RNA, 19 nt, Homo sapiens
  misc_RNA (1)...(19): siRNA sense strand
ggacaucucccugcucuac

SEQ ID NO: 631625 - RNA, 19 nt, Homo sapiens
  misc_RNA (1)...(19): siRNA sense strand
cgaggaaggcgaugacuca

SEQ ID NO: 631626 - RNA, 19 nt, Homo sapiens
  misc_RNA (1)...(19): siRNA sense strand
gaaguuggagcagauggaa

SEQ ID NO: 631627 - RNA, 19 nt, Homo sapiens
  misc_RNA (1)...(19): siRNA sense strand
gacaagcugaccuucauug

SEQ ID NO: 631628 - RNA, 19 nt, Homo sapiens
  misc_RNA (1)...(19): siRNA sense strand
gggcacgcaucuucuccuu

SEQ ID NO: 631629 - RNA, 19 nt, Homo sapiens
  misc_RNA (1)...(19): siRNA sense strand
ggagaugccagccuuggau

SEQ ID NO: 631630 - RNA, 19 nt, Homo sapiens
  misc_RNA (1)...(19): siRNA sense strand
gggaugaacggauugaaag

SEQ ID NO: 631631 - RNA, 19 nt, Homo sapiens
  misc_RNA (1)...(19): siRNA sense strand
ugaccgagagcuacuguga

SEQ ID NO: 631632 - RNA, 19 nt, Homo sapiens
  misc_RNA (1)...(19): siRNA sense strand
uggauuugaugacauggaa

SEQ ID NO: 631633 - RNA, 19 nt, Homo sapiens
  misc_RNA (1)...(19): siRNA sense strand
aggaaggacugggcagaaa

SEQ ID NO: 631634 - RNA, 19 nt, Homo sapiens
  misc_RNA (1)...(19): siRNA sense strand
caaggacgagcugcuguuu

SEQ ID NO: 631635 - RNA, 19 nt, Homo sapiens
  misc_RNA (1)...(19): siRNA sense strand
cacgagggacggacaauga

SEQ ID NO: 631636 - RNA, 19 nt, Homo sapiens
  misc_RNA (1)...(19): siRNA sense strand
gaugccagccuuggauuug

SEQ ID NO: 631637 - RNA, 19 nt, Homo sapiens
  misc_RNA (1)...(19): siRNA sense strand
accgagagcuacugugaga

SEQ ID NO: 631638 - RNA, 19 nt, Homo sapiens
  misc_RNA (1)...(19): siRNA sense strand
ugugaggaguuccagagaa

SEQ ID NO: 631639 - RNA, 19 nt, Homo sapiens
  misc_RNA (1)...(19): siRNA sense strand
gaugaacggauugaaagga

SEQ ID NO: 631640 - RNA, 19 nt, Homo sapiens
  misc_RNA (1)...(19): siRNA sense strand
gagaugccagccuuggauu

SEQ ID NO: 631641 - RNA, 19 nt, Homo sapiens
  misc_RNA (1)...(19): siRNA sense strand
gggcuggccuacgucuuug

SEQ ID NO: 631642 - RNA, 19 nt, Homo sapiens
  misc_RNA (1)...(19): siRNA sense strand
gcucugaggguccgcugaa

SEQ ID NO: 631643 - RNA, 19 nt, Homo sapiens
  misc_RNA (1)...(19): siRNA sense strand
cacgguggcuucguuagga

SEQ ID NO: 631644 - RNA, 19 nt, Homo sapiens
  misc_RNA (1)...(19): siRNA sense strand
ucaugacugccuccaagua

SEQ ID NO: 631645 - RNA, 19 nt, Homo sapiens
  misc_RNA (1)...(19): siRNA sense strand
ggaaggacugggcagaaag

SEQ ID NO: 631646 - RNA, 19 nt, Homo sapiens
  misc_RNA (1)...(19): siRNA sense strand
gcagcagcacggaagauuc

SEQ ID NO: 631647 - RNA, 19 nt, Homo sapiens
  misc_RNA (1)...(19): siRNA sense strand
gggccgacuuccagugcuu

SEQ ID NO: 631648 - RNA, 19 nt, Homo sapiens
  misc_RNA (1)...(19): siRNA sense strand
ccucacaggcagacuauca

SEQ ID NO: 631649 - RNA, 19 nt, Homo sapiens
  misc_RNA (1)...(19): siRNA sense strand
guuugacuuucuucaguug

SEQ ID NO: 631650 - RNA, 19 nt, Homo sapiens
  misc_RNA (1)...(19): siRNA sense strand
uuacgacagcaauguguuu

SEQ ID NO: 631651 - RNA, 19 nt, Homo sapiens
  misc_RNA (1)...(19): siRNA sense strand
gaaggacugggcagaaagg

SEQ ID NO: 631652 - RNA, 19 nt, Homo sapiens
  misc_RNA (1)...(19): siRNA sense strand
gcacugccuggacgaggaa

SEQ ID NO: 631653 - RNA, 19 nt, Homo sapiens
  misc_RNA (1)...(19): siRNA sense strand
cguuugacuuucuucaguu

SEQ ID NO: 631654 - RNA, 19 nt, Homo sapiens
  misc_RNA (1)...(19): siRNA sense strand
acgacaagcugaccuucau

SEQ ID NO: 631655 - RNA, 19 nt, Homo sapiens
  misc_RNA (1)...(19): siRNA sense strand
gacacuuccuggcucagau

SEQ ID NO: 631656 - RNA, 19 nt, Homo sapiens
  misc_RNA (1)...(19): siRNA sense strand
cuucuuccgugacuucuca

SEQ ID NO: 631657 - RNA, 19 nt, Homo sapiens
  misc_RNA (1)...(19): siRNA sense strand
cuacaucgugcucugcauu

SEQ ID NO: 631658 - RNA, 19 nt, Homo sapiens
  misc_RNA (1)...(19): siRNA sense strand
gcaggcugaccgagagcua

SEQ ID NO: 631659 - RNA, 19 nt, Homo sapiens
  misc_RNA (1)...(19): siRNA sense strand
cgggaugaacggauugaaa

SEQ ID NO: 631660 - RNA, 19 nt, Homo sapiens
  misc_RNA (1)...(19): siRNA sense strand
cgggcuggccuacgucuuu

SEQ ID NO: 631661 - RNA, 19 nt, Homo sapiens
  misc_RNA (1)...(19): siRNA sense strand
uuccagaagugaagaaguc

SEQ ID NO: 631662 - RNA, 19 nt, Homo sapiens
  misc_RNA (1)...(19): siRNA sense strand
ccguuugacuuucuucagu

SEQ ID NO: 631663 - RNA, 19 nt, Homo sapiens
  misc_RNA (1)...(19): siRNA sense strand
ugaccuucauugacaugga

SEQ ID NO: 631664 - RNA, 19 nt, Homo sapiens
  misc_RNA (1)...(19): siRNA sense strand
cgacaagcugaccuucauu

SEQ ID NO: 631665 - RNA, 19 nt, Homo sapiens
  misc_RNA (1)...(19): siRNA sense strand
cauggagggaucuggcuuu

SEQ ID NO: 631666 - RNA, 19 nt, Homo sapiens
  misc_RNA (1)...(19): siRNA sense strand
agggcaaccugggcucuaa

SEQ ID NO: 631667 - RNA, 19 nt, Homo sapiens
  misc_RNA (1)...(19): siRNA sense strand
ggcagcagcacggaagauu

SEQ ID NO: 631668 - RNA, 19 nt, Homo sapiens
  misc_RNA (1)...(19): siRNA sense strand
auugagaacagcuucauga

SEQ ID NO: 631669 - RNA, 19 nt, Homo sapiens
  misc_RNA (1)...(19): siRNA sense strand
ucaaggacgagcugcuguu

SEQ ID NO: 631670 - RNA, 19 nt, Homo sapiens
  misc_RNA (1)...(19): siRNA sense strand
gagggacggacaaugaagu

SEQ ID NO: 631671 - RNA, 19 nt, Homo sapiens
  misc_RNA (1)...(19): siRNA sense strand
acaagcugaccuucauuga

SEQ ID NO: 631672 - RNA, 19 nt, Homo sapiens
  misc_RNA (1)...(19): siRNA sense strand
caguguggcagguggcuuu

SEQ ID NO: 631673 - RNA, 19 nt, Homo sapiens
  misc_RNA (1)...(19): siRNA sense strand
ucucacugcuguuccacau

SEQ ID NO: 631674 - RNA, 19 nt, Homo sapiens
  misc_RNA (1)...(19): siRNA sense strand
cggauugaaaggagagaaa

SEQ ID NO: 631675 - RNA, 19 nt, Homo sapiens
  misc_RNA (1)...(19): siRNA sense strand
gagcagauuuguucuauga

SEQ ID NO: 631676 - RNA, 19 nt, Homo sapiens
  misc_RNA (1)...(19): siRNA sense strand
acaaagcccuugagaagua

SEQ ID NO: 631677 - RNA, 19 nt, Homo sapiens
  misc_RNA (1)...(19): siRNA sense strand
caacaaagcccuugagaag

SEQ ID NO: 631678 - RNA, 19 nt, Homo sapiens
  misc_RNA (1)...(19): siRNA sense strand
ccacaaacauccucuaaag

SEQ ID NO: 631679 - RNA, 19 nt, Homo sapiens
  misc_RNA (1)...(19): siRNA sense strand
gguaauagcuacaagacau

SEQ ID NO: 631680 - RNA, 19 nt, Homo sapiens
  misc_RNA (1)...(19): siRNA sense strand
ucagagugauugacuuuaa

SEQ ID NO: 631681 - RNA, 19 nt, Homo sapiens
  misc_RNA (1)...(19): siRNA sense strand
gcagauuuguucuaugaug

SEQ ID NO: 631682 - RNA, 19 nt, Homo sapiens
  misc_RNA (1)...(19): siRNA sense strand
ugaaagagaucacucacau

SEQ ID NO: 631683 - RNA, 19 nt, Homo sapiens
  misc_RNA (1)...(19): siRNA sense strand
gaucggacaauguaaggua

SEQ ID NO: 631684 - RNA, 19 nt, Homo sapiens
  misc_RNA (1)...(19): siRNA sense strand
acaaagaggagaaugauga

SEQ ID NO: 631685 - RNA, 19 nt, Homo sapiens
  misc_RNA (1)...(19): siRNA sense strand
gaacaugagaacaucaaug

SEQ ID NO: 631686 - RNA, 19 nt, Homo sapiens
  misc_RNA (1)...(19): siRNA sense strand
agaggagaaugaugacuuu

SEQ ID NO: 631687 - RNA, 19 nt, Homo sapiens
  misc_RNA (1)...(19): siRNA sense strand
uacaagacauucccaugaa

SEQ ID NO: 631688 - RNA, 19 nt, Homo sapiens
  misc_RNA (1)...(19): siRNA sense strand
acaaggcccuccuccacua

SEQ ID NO: 631689 - RNA, 19 nt, Homo sapiens
  misc_RNA (1)...(19): siRNA sense strand
gacuuuaacugcaccacaa

SEQ ID NO: 631690 - RNA, 19 nt, Homo sapiens
  misc_RNA (1)...(19): siRNA sense strand
gccaugauuuccaagacua

SEQ ID NO: 631691 - RNA, 19 nt, Homo sapiens
  misc_RNA (1)...(19): siRNA sense strand
cagagcagauuuguucuau

SEQ ID NO: 631692 - RNA, 19 nt, Homo sapiens
  misc_RNA (1)...(19): siRNA sense strand
ccacugccaugauuuccaa

SEQ ID NO: 631693 - RNA, 19 nt, Homo sapiens
  misc_RNA (1)...(19): siRNA sense strand
gcagagcagauuuguucua

SEQ ID NO: 631694 - RNA, 19 nt, Homo sapiens
  misc_RNA (1)...(19): siRNA sense strand
cuacaagacauucccauga

SEQ ID NO: 631695 - RNA, 19 nt, Homo sapiens
  misc_RNA (1)...(19): siRNA sense strand
ccaccaagccuccauucaa

SEQ ID NO: 631696 - RNA, 19 nt, Homo sapiens
  misc_RNA (1)...(19): siRNA sense strand
gaaauacuggaaugacugu

SEQ ID NO: 631697 - RNA, 19 nt, Homo sapiens
  misc_RNA (1)...(19): siRNA sense strand
auacugagcgcuacagaaa

SEQ ID NO: 631698 - RNA, 19 nt, Homo sapiens
  misc_RNA (1)...(19): siRNA sense strand
guccgguccucauagauuu

SEQ ID NO: 631699 - RNA, 19 nt, Homo sapiens
  misc_RNA (1)...(19): siRNA sense strand
gaaguucaagaguggguuu

SEQ ID NO: 631700 - RNA, 19 nt, Homo sapiens
  misc_RNA (1)...(19): siRNA sense strand
gaaagagaucacucacaug

SEQ ID NO: 631701 - RNA, 19 nt, Homo sapiens
  misc_RNA (1)...(19): siRNA sense strand
cggacaauguaagguaaua

SEQ ID NO: 631702 - RNA, 19 nt, Homo sapiens
  misc_RNA (1)...(19): siRNA sense strand
caauguaagguaauagcua

SEQ ID NO: 631703 - RNA, 19 nt, Homo sapiens
  misc_RNA (1)...(19): siRNA sense strand
caccaagccuccauucaag

SEQ ID NO: 631704 - RNA, 19 nt, Homo sapiens
  misc_RNA (1)...(19): siRNA sense strand
gggcaugagcguucuucua

SEQ ID NO: 631705 - RNA, 19 nt, Homo sapiens
  misc_RNA (1)...(19): siRNA sense strand
ugacuuugccucuuucaga

SEQ ID NO: 631706 - RNA, 19 nt, Homo sapiens
  misc_RNA (1)...(19): siRNA sense strand
guacaaagaggagaaugau

SEQ ID NO: 631707 - RNA, 19 nt, Homo sapiens
  misc_RNA (1)...(19): siRNA sense strand
cagauuuguucuaugaugu

SEQ ID NO: 631708 - RNA, 19 nt, Homo sapiens
  misc_RNA (1)...(19): siRNA sense strand
uccacaaguuuccauguuu

SEQ ID NO: 631709 - RNA, 19 nt, Homo sapiens
  misc_RNA (1)...(19): siRNA sense strand
ccgacucccuccucuaaga

SEQ ID NO: 631710 - RNA, 19 nt, Homo sapiens
  misc_RNA (1)...(19): siRNA sense strand
ggacuuggaaagcccgaaa

SEQ ID NO: 631711 - RNA, 19 nt, Homo sapiens
  misc_RNA (1)...(19): siRNA sense strand
gaaauagugaucggacaau

SEQ ID NO: 631712 - RNA, 19 nt, Homo sapiens
  misc_RNA (1)...(19): siRNA sense strand
cuucagcacuggccaauac

SEQ ID NO: 631713 - RNA, 19 nt, Homo sapiens
  misc_RNA (1)...(19): siRNA sense strand
guaauagcuacaagacauu

SEQ ID NO: 631714 - RNA, 19 nt, Homo sapiens
  misc_RNA (1)...(19): siRNA sense strand
ccaacaaagcccuugagaa

SEQ ID NO: 631715 - RNA, 19 nt, Homo sapiens
  misc_RNA (1)...(19): siRNA sense strand
cacaaguucugucucuuca

SEQ ID NO: 631716 - RNA, 19 nt, Homo sapiens
  misc_RNA (1)...(19): siRNA sense strand
agaaagcucuagaccugau

SEQ ID NO: 631717 - RNA, 19 nt, Homo sapiens
  misc_RNA (1)...(19): siRNA sense strand
ccacaaguuuccauguuuu

SEQ ID NO: 631718 - RNA, 19 nt, Homo sapiens
  misc_RNA (1)...(19): siRNA sense strand
ccacaaguucugucucuuc

SEQ ID NO: 631719 - RNA, 19 nt, Homo sapiens
  misc_RNA (1)...(19): siRNA sense strand
gaacaugauacccauagac

SEQ ID NO: 631720 - RNA, 19 nt, Homo sapiens
  misc_RNA (1)...(19): siRNA sense strand
gcgacgggauggcuaccuu

SEQ ID NO: 631721 - RNA, 19 nt, Homo sapiens
  misc_RNA (1)...(19): siRNA sense strand
agacguccaucugaaauag

SEQ ID NO: 631722 - RNA, 19 nt, Homo sapiens
  misc_RNA (1)...(19): siRNA sense strand
uguagaagccuuggacuug

SEQ ID NO: 631723 - RNA, 19 nt, Homo sapiens
  misc_RNA (1)...(19): siRNA sense strand
ccucagagugauugacuuu

SEQ ID NO: 631724 - RNA, 19 nt, Homo sapiens
  misc_RNA (1)...(19): siRNA sense strand
auagugaucggacaaugua

SEQ ID NO: 631725 - RNA, 19 nt, Homo sapiens
  misc_RNA (1)...(19): siRNA sense strand
augaugacuuugccucuuu

SEQ ID NO: 631726 - RNA, 19 nt, Homo sapiens
  misc_RNA (1)...(19): siRNA sense strand
gauugcugaugcccacuug

SEQ ID NO: 631727 - RNA, 19 nt, Homo sapiens
  misc_RNA (1)...(19): siRNA sense strand
guaagguaauagcuacaag

SEQ ID NO: 631728 - RNA, 19 nt, Homo sapiens
  misc_RNA (1)...(19): siRNA sense strand
gauacugagcgcuacagaa

SEQ ID NO: 631729 - RNA, 19 nt, Homo sapiens
  misc_RNA (1)...(19): siRNA sense strand
gaaggcgaggcccagguaa

SEQ ID NO: 631730 - RNA, 19 nt, Homo sapiens
  misc_RNA (1)...(19): siRNA sense strand
ccacaagccacacgaacau

SEQ ID NO: 631731 - RNA, 19 nt, Homo sapiens
  misc_RNA (1)...(19): siRNA sense strand
ggcaugagcguucuucuac

SEQ ID NO: 631732 - RNA, 19 nt, Homo sapiens
  misc_RNA (1)...(19): siRNA sense strand
ucaggaacaugagaacauc

SEQ ID NO: 631733 - RNA, 19 nt, Homo sapiens
  misc_RNA (1)...(19): siRNA sense strand
gucauaaacugugaagucu

SEQ ID NO: 631734 - RNA, 19 nt, Homo sapiens
  misc_RNA (1)...(19): siRNA sense strand
gagagaguugcaagaguga

SEQ ID NO: 631735 - RNA, 19 nt, Homo sapiens
  misc_RNA (1)...(19): siRNA sense strand
uaagguaauagcuacaaga

SEQ ID NO: 631736 - RNA, 19 nt, Homo sapiens
  misc_RNA (1)...(19): siRNA sense strand
caccacaaacauccucuaa

SEQ ID NO: 631737 - RNA, 19 nt, Homo sapiens
  misc_RNA (1)...(19): siRNA sense strand
uaccgacucccuccucuaa

SEQ ID NO: 631738 - RNA, 19 nt, Homo sapiens
  misc_RNA (1)...(19): siRNA sense strand
ugaacaugauacccauaga

SEQ ID NO: 631739 - RNA, 19 nt, Homo sapiens
  misc_RNA (1)...(19): siRNA sense strand
uagaagccuuggacuugga

SEQ ID NO: 631740 - RNA, 19 nt, Homo sapiens
  misc_RNA (1)...(19): siRNA sense strand
gagaguugcaagagugaga

SEQ ID NO: 631741 - RNA, 19 nt, Homo sapiens
  misc_RNA (1)...(19): siRNA sense strand
caccacaaguucugucucu

SEQ ID NO: 631742 - RNA, 19 nt, Homo sapiens
  misc_RNA (1)...(19): siRNA sense strand
gcacuggccaauaccaaag

SEQ ID NO: 631743 - RNA, 19 nt, Homo sapiens
  misc_RNA (1)...(19): siRNA sense strand
uuacuuagucuuagaugug

SEQ ID NO: 631744 - RNA, 19 nt, Homo sapiens
  misc_RNA (1)...(19): siRNA sense strand
caugagcguucuucuacca

SEQ ID NO: 631745 - RNA, 19 nt, Homo sapiens
  misc_RNA (1)...(19): siRNA sense strand
gaaguacaaagaggagaau

SEQ ID NO: 631746 - RNA, 19 nt, Homo sapiens
  misc_RNA (1)...(19): siRNA sense strand
ugaaauagugaucggacaa

SEQ ID NO: 631747 - RNA, 19 nt, Homo sapiens
  misc_RNA (1)...(19): siRNA sense strand
gcaccacaaacauccucua

SEQ ID NO: 631748 - RNA, 19 nt, Homo sapiens
  misc_RNA (1)...(19): siRNA sense strand
cccauguccugcucaaguu

SEQ ID NO: 631749 - RNA, 19 nt, Homo sapiens
  misc_RNA (1)...(19): siRNA sense strand
aaauagugaucggacaaug

SEQ ID NO: 631750 - RNA, 19 nt, Homo sapiens
  misc_RNA (1)...(19): siRNA sense strand
gugcaagaaucggacuguu

SEQ ID NO: 631751 - RNA, 19 nt, Homo sapiens
  misc_RNA (1)...(19): siRNA sense strand
ugacugcagugcuguugag

SEQ ID NO: 631752 - RNA, 19 nt, Homo sapiens
  misc_RNA (1)...(19): siRNA sense strand
ugucauaaacugugaaguc

SEQ ID NO: 631753 - RNA, 19 nt, Homo sapiens
  misc_RNA (1)...(19): siRNA sense strand
gauaguccgguccucauag

SEQ ID NO: 631754 - RNA, 19 nt, Homo sapiens
  misc_RNA (1)...(19): siRNA sense strand
agacaaauuggaucugugu

SEQ ID NO: 631755 - RNA, 19 nt, Homo sapiens
  misc_RNA (1)...(19): siRNA sense strand
gcgaggcccagguaaagga

SEQ ID NO: 631756 - RNA, 19 nt, Homo sapiens
  misc_RNA (1)...(19): siRNA sense strand
uugaucacauugcaguauu

SEQ ID NO: 631757 - RNA, 19 nt, Homo sapiens
  misc_RNA (1)...(19): siRNA sense strand
gggaaggaacugguuacuu

SEQ ID NO: 631758 - RNA, 19 nt, Homo sapiens
  misc_RNA (1)...(19): siRNA sense strand
agaaggcgaggcccaggua

SEQ ID NO: 631759 - RNA, 19 nt, Homo sapiens
  misc_RNA (1)...(19): siRNA sense strand
gcccauguccugcucaagu

SEQ ID NO: 631760 - RNA, 19 nt, Homo sapiens
  misc_RNA (1)...(19): siRNA sense strand
ggacagaguggaaaauaca

SEQ ID NO: 631761 - RNA, 19 nt, Homo sapiens
  misc_RNA (1)...(19): siRNA sense strand
cagagugauugacuuuaac

SEQ ID NO: 631762 - RNA, 19 nt, Homo sapiens
  misc_RNA (1)...(19): siRNA sense strand
ggugaggugcugccacuuc

SEQ ID NO: 631763 - RNA, 19 nt, Homo sapiens
  misc_RNA (1)...(19): siRNA sense strand
gguccucauagauuucuuu

SEQ ID NO: 631764 - RNA, 19 nt, Homo sapiens
  misc_RNA (1)...(19): siRNA sense strand
ugaucacauugcaguauuc

SEQ ID NO: 631765 - RNA, 19 nt, Homo sapiens
  misc_RNA (1)...(19): siRNA sense strand
acaccauccucaugaacau

SEQ ID NO: 631766 - RNA, 19 nt, Homo sapiens
  misc_RNA (1)...(19): siRNA sense strand
gauuuguucuaugauguag

SEQ ID NO: 631767 - RNA, 19 nt, Homo sapiens
  misc_RNA (1)...(19): siRNA sense strand
gaaaacaagccaacaaagc

SEQ ID NO: 631768 - RNA, 19 nt, Homo sapiens
  misc_RNA (1)...(19): siRNA sense strand
ggacaauguaagguaauag

SEQ ID NO: 631769 - RNA, 19 nt, Homo sapiens
  misc_RNA (1)...(19): siRNA sense strand
auaguccgguccucauaga

SEQ ID NO: 631770 - RNA, 19 nt, Homo sapiens
  misc_RNA (1)...(19): siRNA sense strand
uuccacaaguuuccauguu

SEQ ID NO: 631771 - RNA, 19 nt, Homo sapiens
  misc_RNA (1)...(19): siRNA sense strand
guaccgacucccuccucua

SEQ ID NO: 631772 - RNA, 19 nt, Homo sapiens
  misc_RNA (1)...(19): siRNA sense strand
ggaacaugagaacaucaau

SEQ ID NO: 631773 - RNA, 19 nt, Homo sapiens
  misc_RNA (1)...(19): siRNA sense strand
aagaggagaaugaugacuu

SEQ ID NO: 631774 - RNA, 19 nt, Homo sapiens
  misc_RNA (1)...(19): siRNA sense strand
cgacucccuccucuaagaa

SEQ ID NO: 631775 - RNA, 19 nt, Homo sapiens
  misc_RNA (1)...(19): siRNA sense strand
ggaaaccuguccuguauaa

SEQ ID NO: 631776 - RNA, 19 nt, Homo sapiens
  misc_RNA (1)...(19): siRNA sense strand
gggauucgcugcuuucuuu

SEQ ID NO: 631777 - RNA, 19 nt, Homo sapiens
  misc_RNA (1)...(19): siRNA sense strand
ggaagacaaugaucccuuu

SEQ ID NO: 631778 - RNA, 19 nt, Homo sapiens
  misc_RNA (1)...(19): siRNA sense strand
cggaagagcugaccuuuga

SEQ ID NO: 631779 - RNA, 19 nt, Homo sapiens
  misc_RNA (1)...(19): siRNA sense strand
gaaggaaagaguaaagaua

SEQ ID NO: 631780 - RNA, 19 nt, Homo sapiens
  misc_RNA (1)...(19): siRNA sense strand
gaaacuccguuccuacaaa

SEQ ID NO: 631781 - RNA, 19 nt, Homo sapiens
  misc_RNA (1)...(19): siRNA sense strand
ggacacaucugguauucga

SEQ ID NO: 631782 - RNA, 19 nt, Homo sapiens
  misc_RNA (1)...(19): siRNA sense strand
gaugagaccuacuuuggaa

SEQ ID NO: 631783 - RNA, 19 nt, Homo sapiens
  misc_RNA (1)...(19): siRNA sense strand
gagauugcguccucgauaa

SEQ ID NO: 631784 - RNA, 19 nt, Homo sapiens
  misc_RNA (1)...(19): siRNA sense strand
ugaagaaucugucggagaa

SEQ ID NO: 631785 - RNA, 19 nt, Homo sapiens
  misc_RNA (1)...(19): siRNA sense strand
caucagaaaugaaagagaa

SEQ ID NO: 631786 - RNA, 19 nt, Homo sapiens
  misc_RNA (1)...(19): siRNA sense strand
ggacgcaccuuccgugaug

SEQ ID NO: 631787 - RNA, 19 nt, Homo sapiens
  misc_RNA (1)...(19): siRNA sense strand
ggaaagcucuugcccucuu

SEQ ID NO: 631788 - RNA, 19 nt, Homo sapiens
  misc_RNA (1)...(19): siRNA sense strand
ucagagaaauccuggcaua

SEQ ID NO: 631789 - RNA, 19 nt, Homo sapiens
  misc_RNA (1)...(19): siRNA sense strand
gguggaagaugucauuuau

SEQ ID NO: 631790 - RNA, 19 nt, Homo sapiens
  misc_RNA (1)...(19): siRNA sense strand
cggcagagcucaucuacuu

SEQ ID NO: 631791 - RNA, 19 nt, Homo sapiens
  misc_RNA (1)...(19): siRNA sense strand
ggacaggaccuauugauca

SEQ ID NO: 631792 - RNA, 19 nt, Homo sapiens
  misc_RNA (1)...(19): siRNA sense strand
gagaaauccuggcauacuu

SEQ ID NO: 631793 - RNA, 19 nt, Homo sapiens
  misc_RNA (1)...(19): siRNA sense strand
gagaaggggucuacuauuu

SEQ ID NO: 631794 - RNA, 19 nt, Homo sapiens
  misc_RNA (1)...(19): siRNA sense strand
ggagagccauuugggauuu

SEQ ID NO: 631795 - RNA, 19 nt, Homo sapiens
  misc_RNA (1)...(19): siRNA sense strand
ggacagagaaacccagaaa

SEQ ID NO: 631796 - RNA, 19 nt, Homo sapiens
  misc_RNA (1)...(19): siRNA sense strand
ccaaggaugugucaagaau

SEQ ID NO: 631797 - RNA, 19 nt, Homo sapiens
  misc_RNA (1)...(19): siRNA sense strand
gaccagagcuguguuugug

SEQ ID NO: 631798 - RNA, 19 nt, Homo sapiens
  misc_RNA (1)...(19): siRNA sense strand
ggaccaacgucaaggguau

SEQ ID NO: 631799 - RNA, 19 nt, Homo sapiens
  misc_RNA (1)...(19): siRNA sense strand
gcaaccaccucacuuucuu

SEQ ID NO: 631800 - RNA, 19 nt, Homo sapiens
  misc_RNA (1)...(19): siRNA sense strand
gaacaggagugacuuacac

SEQ ID NO: 631801 - RNA, 19 nt, Homo sapiens
  misc_RNA (1)...(19): siRNA sense strand
gaaagcauuugcccucauc

SEQ ID NO: 631802 - RNA, 19 nt, Homo sapiens
  misc_RNA (1)...(19): siRNA sense strand
ggauuggacucacguggaa

SEQ ID NO: 631803 - RNA, 19 nt, Homo sapiens
  misc_RNA (1)...(19): siRNA sense strand
gaucaugaguuucccaaag

SEQ ID NO: 631804 - RNA, 19 nt, Homo sapiens
  misc_RNA (1)...(19): siRNA sense strand
gaugaaugcugaaggaaag

SEQ ID NO: 631805 - RNA, 19 nt, Homo sapiens
  misc_RNA (1)...(19): siRNA sense strand
aaccuguccuguauaauua

SEQ ID NO: 631806 - RNA, 19 nt, Homo sapiens
  misc_RNA (1)...(19): siRNA sense strand
ggcaucagcuucagugaga

SEQ ID NO: 631807 - RNA, 19 nt, Homo sapiens
  misc_RNA (1)...(19): siRNA sense strand
ggauucagguggagcuuga

SEQ ID NO: 631808 - RNA, 19 nt, Homo sapiens
  misc_RNA (1)...(19): siRNA sense strand
ggagauugcguccucgaua

SEQ ID NO: 631809 - RNA, 19 nt, Homo sapiens
  misc_RNA (1)...(19): siRNA sense strand
cauccaaccugguccauau

SEQ ID NO: 631810 - RNA, 19 nt, Homo sapiens
  misc_RNA (1)...(19): siRNA sense strand
ucacagugcuggaagacaa

SEQ ID NO: 631811 - RNA, 19 nt, Homo sapiens
  misc_RNA (1)...(19): siRNA sense strand
ccacggagcaggacagaaa

SEQ ID NO: 631812 - RNA, 19 nt, Homo sapiens
  misc_RNA (1)...(19): siRNA sense strand
gccaagagcuggagaacag

SEQ ID NO: 631813 - RNA, 19 nt, Homo sapiens
  misc_RNA (1)...(19): siRNA sense strand
gaaggcagcuuuugcucua

SEQ ID NO: 631814 - RNA, 19 nt, Homo sapiens
  misc_RNA (1)...(19): siRNA sense strand
gcauagacgucagacagaa

SEQ ID NO: 631815 - RNA, 19 nt, Homo sapiens
  misc_RNA (1)...(19): siRNA sense strand
gccaggagcuacagucaug

SEQ ID NO: 631816 - RNA, 19 nt, Homo sapiens
  misc_RNA (1)...(19): siRNA sense strand
gcccuuggcuacaucauug

SEQ ID NO: 631817 - RNA, 19 nt, Homo sapiens
  misc_RNA (1)...(19): siRNA sense strand
ugaagagaguggacgauga

SEQ ID NO: 631818 - RNA, 19 nt, Homo sapiens
  misc_RNA (1)...(19): siRNA sense strand
cagagaugcuugcuaugaa

SEQ ID NO: 631819 - RNA, 19 nt, Homo sapiens
  misc_RNA (1)...(19): siRNA sense strand
ggagaggucauccgaauca

SEQ ID NO: 631820 - RNA, 19 nt, Homo sapiens
  misc_RNA (1)...(19): siRNA sense strand
gacagggaaugguggauug

SEQ ID NO: 631821 - RNA, 19 nt, Homo sapiens
  misc_RNA (1)...(19): siRNA sense strand
acaccacccucgugaguaa

SEQ ID NO: 631822 - RNA, 19 nt, Homo sapiens
  misc_RNA (1)...(19): siRNA sense strand
gaccaaggaugugucaaga

SEQ ID NO: 631823 - RNA, 19 nt, Homo sapiens
  misc_RNA (1)...(19): siRNA sense strand
ggaaggacgcucaggauca

SEQ ID NO: 631824 - RNA, 19 nt, Homo sapiens
  misc_RNA (1)...(19): siRNA sense strand
aaacucaccucguaccaau

SEQ ID NO: 631825 - RNA, 19 nt, Homo sapiens
  misc_RNA (1)...(19): siRNA sense strand
gaccaguccugaagcuuug

SEQ ID NO: 631826 - RNA, 19 nt, Homo sapiens
  misc_RNA (1)...(19): siRNA sense strand
gcgccuggcuguucugaga

SEQ ID NO: 631827 - RNA, 19 nt, Homo sapiens
  misc_RNA (1)...(19): siRNA sense strand
aaaccuguccuguauaauu

SEQ ID NO: 631828 - RNA, 19 nt, Homo sapiens
  misc_RNA (1)...(19): siRNA sense strand
uuaccaugcuccuggcuua

SEQ ID NO: 631829 - RNA, 19 nt, Homo sapiens
  misc_RNA (1)...(19): siRNA sense strand
caucauugccuuccuggua

SEQ ID NO: 631830 - RNA, 19 nt, Homo sapiens
  misc_RNA (1)...(19): siRNA sense strand
gcaagcgcaugaguaaaga

SEQ ID NO: 631831 - RNA, 19 nt, Homo sapiens
  misc_RNA (1)...(19): siRNA sense strand
gaaagagaaaucacagugu

SEQ ID NO: 631832 - RNA, 19 nt, Homo sapiens
  misc_RNA (1)...(19): siRNA sense strand
cuucagagaugcuugcuau

SEQ ID NO: 631833 - RNA, 19 nt, Homo sapiens
  misc_RNA (1)...(19): siRNA sense strand
uagauuugcugcugaugaa

SEQ ID NO: 631834 - RNA, 19 nt, Homo sapiens
  misc_RNA (1)...(19): siRNA sense strand
ggucaacucauaccuguga

SEQ ID NO: 631835 - RNA, 19 nt, Homo sapiens
  misc_RNA (1)...(19): siRNA sense strand
gaaagcucuugcccucuug

SEQ ID NO: 631836 - RNA, 19 nt, Homo sapiens
  misc_RNA (1)...(19): siRNA sense strand
gaaggggucuacuauuuga

SEQ ID NO: 631837 - RNA, 19 nt, Homo sapiens
  misc_RNA (1)...(19): siRNA sense strand
gcauuaagucuaagagaga

SEQ ID NO: 631838 - RNA, 19 nt, Homo sapiens
  misc_RNA (1)...(19): siRNA sense strand
aagaaucugucggagaaua

SEQ ID NO: 631839 - RNA, 19 nt, Homo sapiens
  misc_RNA (1)...(19): siRNA sense strand
ccagacugcugagcucuuu

SEQ ID NO: 631840 - RNA, 19 nt, Homo sapiens
  misc_RNA (1)...(19): siRNA sense strand
gcacguuccuggugauguc

SEQ ID NO: 631841 - RNA, 19 nt, Homo sapiens
  misc_RNA (1)...(19): siRNA sense strand
gacauugcacucacgcuua

SEQ ID NO: 631842 - RNA, 19 nt, Homo sapiens
  misc_RNA (1)...(19): siRNA sense strand
gcagaacacuggaaaaugg

SEQ ID NO: 631843 - RNA, 19 nt, Homo sapiens
  misc_RNA (1)...(19): siRNA sense strand
cugaagacauggcagacua

SEQ ID NO: 631844 - RNA, 19 nt, Homo sapiens
  misc_RNA (1)...(19): siRNA sense strand
gaggaacaggagugacuua

SEQ ID NO: 631845 - RNA, 19 nt, Homo sapiens
  misc_RNA (1)...(19): siRNA sense strand
gggcgacauuucaggcuuu

SEQ ID NO: 631846 - RNA, 19 nt, Homo sapiens
  misc_RNA (1)...(19): siRNA sense strand
caaggaacagaaagcauuu

SEQ ID NO: 631847 - RNA, 19 nt, Homo sapiens
  misc_RNA (1)...(19): siRNA sense strand
ucaaggaacagaaagcauu

SEQ ID NO: 631848 - RNA, 19 nt, Homo sapiens
  misc_RNA (1)...(19): siRNA sense strand
gccgggugcuggucuauga

SEQ ID NO: 631849 - RNA, 19 nt, Homo sapiens
  misc_RNA (1)...(19): siRNA sense strand
gccaggagcccguggauau

SEQ ID NO: 631850 - RNA, 19 nt, Homo sapiens
  misc_RNA (1)...(19): siRNA sense strand
guacacaaacagaauacaa

SEQ ID NO: 631851 - RNA, 19 nt, Homo sapiens
  misc_RNA (1)...(19): siRNA sense strand
gagaggagaacaaugacuu

SEQ ID NO: 631852 - RNA, 19 nt, Homo sapiens
  misc_RNA (1)...(19): siRNA sense strand
ggaguuacgcuuccaaugg

SEQ ID NO: 631853 - RNA, 19 nt, Homo sapiens
  misc_RNA (1)...(19): siRNA sense strand
ggaugaaugcugaaggaaa

SEQ ID NO: 631854 - RNA, 19 nt, Homo sapiens
  misc_RNA (1)...(19): siRNA sense strand
gaacuuggcacggaaugga

SEQ ID NO: 631855 - RNA, 19 nt, Homo sapiens
  misc_RNA (1)...(19): siRNA sense strand
ccucuacaaucuccagaaa

SEQ ID NO: 631856 - RNA, 19 nt, Homo sapiens
  misc_RNA (1)...(19): siRNA sense strand
cagugagaguuucaucuuu

SEQ ID NO: 631857 - RNA, 19 nt, Homo sapiens
  misc_RNA (1)...(19): siRNA sense strand
aaagagagaggacccugua

SEQ ID NO: 631858 - RNA, 19 nt, Homo sapiens
  misc_RNA (1)...(19): siRNA sense strand
gaaggacgcucaggaucag

SEQ ID NO: 631859 - RNA, 19 nt, Homo sapiens
  misc_RNA (1)...(19): siRNA sense strand
gcaccguucugacgagcuu

SEQ ID NO: 631860 - RNA, 19 nt, Homo sapiens
  misc_RNA (1)...(19): siRNA sense strand
gaggacaccuaugugauca

SEQ ID NO: 631861 - RNA, 19 nt, Homo sapiens
  misc_RNA (1)...(19): siRNA sense strand
gaaaucgggaacaucacua

SEQ ID NO: 631862 - RNA, 19 nt, Homo sapiens
  misc_RNA (1)...(19): siRNA sense strand
gggaagcccugcagcugau

SEQ ID NO: 631863 - RNA, 19 nt, Homo sapiens
  misc_RNA (1)...(19): siRNA sense strand
caagugaggguccaggaaa

SEQ ID NO: 631864 - RNA, 19 nt, Homo sapiens
  misc_RNA (1)...(19): siRNA sense strand
gagagaggacccuguaaca

SEQ ID NO: 631865 - RNA, 19 nt, Homo sapiens
  misc_RNA (1)...(19): siRNA sense strand
ggcaggaggugaugauugg

SEQ ID NO: 631866 - RNA, 19 nt, Homo sapiens
  misc_RNA (1)...(19): siRNA sense strand
ggacuuggguaaaauugaa

SEQ ID NO: 631867 - RNA, 19 nt, Homo sapiens
  misc_RNA (1)...(19): siRNA sense strand
ucuaugaccuggugaugga

SEQ ID NO: 631868 - RNA, 19 nt, Homo sapiens
  misc_RNA (1)...(19): siRNA sense strand
gcagccagauugccacagu

SEQ ID NO: 631869 - RNA, 19 nt, Homo sapiens
  misc_RNA (1)...(19): siRNA sense strand
cagcuuggcucuacagcau

SEQ ID NO: 631870 - RNA, 19 nt, Homo sapiens
  misc_RNA (1)...(19): siRNA sense strand
gaguuacgcuuccaauggu

SEQ ID NO: 631871 - RNA, 19 nt, Homo sapiens
  misc_RNA (1)...(19): siRNA sense strand
ucuacaaucuccagaaaca

SEQ ID NO: 631872 - RNA, 19 nt, Homo sapiens
  misc_RNA (1)...(19): siRNA sense strand
agagaaacccagaaacuga

SEQ ID NO: 631873 - RNA, 19 nt, Homo sapiens
  misc_RNA (1)...(19): siRNA sense strand
gcaaugugacccaccaguu

SEQ ID NO: 631874 - RNA, 19 nt, Homo sapiens
  misc_RNA (1)...(19): siRNA sense strand
gugagaguuucaucuuuga

SEQ ID NO: 631875 - RNA, 19 nt, Homo sapiens
  misc_RNA (1)...(19): siRNA sense strand
ggaaaccuguccuguauaa

SEQ ID NO: 631876 - RNA, 19 nt, Homo sapiens
  misc_RNA (1)...(19): siRNA sense strand
gggauucgcugcuuucuuu

SEQ ID NO: 631877 - RNA, 19 nt, Homo sapiens
  misc_RNA (1)...(19): siRNA sense strand
ggaagacaaugaucccuuu

SEQ ID NO: 631878 - RNA, 19 nt, Homo sapiens
  misc_RNA (1)...(19): siRNA sense strand
cggaagagcugaccuuuga

SEQ ID NO: 631879 - RNA, 19 nt, Homo sapiens
  misc_RNA (1)...(19): siRNA sense strand
gaaggaaagaguaaagaua

SEQ ID NO: 631880 - RNA, 19 nt, Homo sapiens
  misc_RNA (1)...(19): siRNA sense strand
ggacacaucugguauucga

SEQ ID NO: 631881 - RNA, 19 nt, Homo sapiens
  misc_RNA (1)...(19): siRNA sense strand
gaugagaccuacuuuggaa

SEQ ID NO: 631882 - RNA, 19 nt, Homo sapiens
  misc_RNA (1)...(19): siRNA sense strand
gagauugcguccucgauaa

SEQ ID NO: 631883 - RNA, 19 nt, Homo sapiens
  misc_RNA (1)...(19): siRNA sense strand
ugaagaaucugucggagaa

SEQ ID NO: 631884 - RNA, 19 nt, Homo sapiens
  misc_RNA (1)...(19): siRNA sense strand
caucagaaaugaaagagaa

SEQ ID NO: 631885 - RNA, 19 nt, Homo sapiens
  misc_RNA (1)...(19): siRNA sense strand
ggacgcaccuuccgugaug

SEQ ID NO: 631886 - RNA, 19 nt, Homo sapiens
  misc_RNA (1)...(19): siRNA sense strand
gguggaagaugucauuuau

SEQ ID NO: 631887 - RNA, 19 nt, Homo sapiens
  misc_RNA (1)...(19): siRNA sense strand
ggacaggaccuauugauca

SEQ ID NO: 631888 - RNA, 19 nt, Homo sapiens
  misc_RNA (1)...(19): siRNA sense strand
gagaaggggucuacuauuu

SEQ ID NO: 631889 - RNA, 19 nt, Homo sapiens
  misc_RNA (1)...(19): siRNA sense strand
ggagagccauuugggauuu

SEQ ID NO: 631890 - RNA, 19 nt, Homo sapiens
  misc_RNA (1)...(19): siRNA sense strand
ggacagagaaacccagaaa

SEQ ID NO: 631891 - RNA, 19 nt, Homo sapiens
  misc_RNA (1)...(19): siRNA sense strand
ccaaggaugugucaagaau

SEQ ID NO: 631892 - RNA, 19 nt, Homo sapiens
  misc_RNA (1)...(19): siRNA sense strand
gcaaccaccucacuuucuu

SEQ ID NO: 631893 - RNA, 19 nt, Homo sapiens
  misc_RNA (1)...(19): siRNA sense strand
gaacaggagugacuuacac

SEQ ID NO: 631894 - RNA, 19 nt, Homo sapiens
  misc_RNA (1)...(19): siRNA sense strand
ggauuggacucacguggaa

SEQ ID NO: 631895 - RNA, 19 nt, Homo sapiens
  misc_RNA (1)...(19): siRNA sense strand
gaucaugaguuucccaaag

SEQ ID NO: 631896 - RNA, 19 nt, Homo sapiens
  misc_RNA (1)...(19): siRNA sense strand
gaugaaugcugaaggaaag

SEQ ID NO: 631897 - RNA, 19 nt, Homo sapiens
  misc_RNA (1)...(19): siRNA sense strand
aaccuguccuguauaauua

SEQ ID NO: 631898 - RNA, 19 nt, Homo sapiens
  misc_RNA (1)...(19): siRNA sense strand
ggauucagguggagcuuga

SEQ ID NO: 631899 - RNA, 19 nt, Homo sapiens
  misc_RNA (1)...(19): siRNA sense strand
ggagauugcguccucgaua

SEQ ID NO: 631900 - RNA, 19 nt, Homo sapiens
  misc_RNA (1)...(19): siRNA sense strand
cauccaaccugguccauau

SEQ ID NO: 631901 - RNA, 19 nt, Homo sapiens
  misc_RNA (1)...(19): siRNA sense strand
ucacagugcuggaagacaa

SEQ ID NO: 631902 - RNA, 19 nt, Homo sapiens
  misc_RNA (1)...(19): siRNA sense strand
ccacggagcaggacagaaa

SEQ ID NO: 631903 - RNA, 19 nt, Homo sapiens
  misc_RNA (1)...(19): siRNA sense strand
gaaggcagcuuuugcucua

SEQ ID NO: 631904 - RNA, 19 nt, Homo sapiens
  misc_RNA (1)...(19): siRNA sense strand
gcauagacgucagacagaa

SEQ ID NO: 631905 - RNA, 19 nt, Homo sapiens
  misc_RNA (1)...(19): siRNA sense strand
gccaagagcuggagaacag

SEQ ID NO: 631906 - RNA, 19 nt, Homo sapiens
  misc_RNA (1)...(19): siRNA sense strand
cagagaugcuugcuaugaa

SEQ ID NO: 631907 - RNA, 19 nt, Homo sapiens
  misc_RNA (1)...(19): siRNA sense strand
gccaggagcuacagucaug

SEQ ID NO: 631908 - RNA, 19 nt, Homo sapiens
  misc_RNA (1)...(19): siRNA sense strand
ggagaggucauccgaauca

SEQ ID NO: 631909 - RNA, 19 nt, Homo sapiens
  misc_RNA (1)...(19): siRNA sense strand
gacagggaaugguggauug

SEQ ID NO: 631910 - RNA, 19 nt, Homo sapiens
  misc_RNA (1)...(19): siRNA sense strand
gaccaaggaugugucaaga

SEQ ID NO: 631911 - RNA, 19 nt, Homo sapiens
  misc_RNA (1)...(19): siRNA sense strand
ggaaggacgcucaggauca

SEQ ID NO: 631912 - RNA, 19 nt, Homo sapiens
  misc_RNA (1)...(19): siRNA sense strand
aaacucaccucguaccaau

SEQ ID NO: 631913 - RNA, 19 nt, Homo sapiens
  misc_RNA (1)...(19): siRNA sense strand
gaccaguccugaagcuuug

SEQ ID NO: 631914 - RNA, 19 nt, Homo sapiens
  misc_RNA (1)...(19): siRNA sense strand
gcgccuggcuguucugaga

SEQ ID NO: 631915 - RNA, 19 nt, Homo sapiens
  misc_RNA (1)...(19): siRNA sense strand
aaaccuguccuguauaauu

SEQ ID NO: 631916 - RNA, 19 nt, Homo sapiens
  misc_RNA (1)...(19): siRNA sense strand
gaaagagaaaucacagugu

SEQ ID NO: 631917 - RNA, 19 nt, Homo sapiens
  misc_RNA (1)...(19): siRNA sense strand
cuucagagaugcuugcuau

SEQ ID NO: 631918 - RNA, 19 nt, Homo sapiens
  misc_RNA (1)...(19): siRNA sense strand
ggucaacucauaccuguga

SEQ ID NO: 631919 - RNA, 19 nt, Homo sapiens
  misc_RNA (1)...(19): siRNA sense strand
gaaggggucuacuauuuga

SEQ ID NO: 631920 - RNA, 19 nt, Homo sapiens
  misc_RNA (1)...(19): siRNA sense strand
aagaaucugucggagaaua

SEQ ID NO: 631921 - RNA, 19 nt, Homo sapiens
  misc_RNA (1)...(19): siRNA sense strand
ccagacugcugagcucuuu

SEQ ID NO: 631922 - RNA, 19 nt, Homo sapiens
  misc_RNA (1)...(19): siRNA sense strand
gcacguuccuggugauguc

SEQ ID NO: 631923 - RNA, 19 nt, Homo sapiens
  misc_RNA (1)...(19): siRNA sense strand
gacauugcacucacgcuua

SEQ ID NO: 631924 - RNA, 19 nt, Homo sapiens
  misc_RNA (1)...(19): siRNA sense strand
gcagaacacuggaaaaugg

SEQ ID NO: 631925 - RNA, 19 nt, Homo sapiens
  misc_RNA (1)...(19): siRNA sense strand
gaacuuggcacggaaugga

SEQ ID NO: 631926 - RNA, 19 nt, Homo sapiens
  misc_RNA (1)...(19): siRNA sense strand
gccgggugcuggucuauga

SEQ ID NO: 631927 - RNA, 19 nt, Homo sapiens
  misc_RNA (1)...(19): siRNA sense strand
gccaggagcccguggauau

SEQ ID NO: 631928 - RNA, 19 nt, Homo sapiens
  misc_RNA (1)...(19): siRNA sense strand
guacacaaacagaauacaa

SEQ ID NO: 631929 - RNA, 19 nt, Homo sapiens
  misc_RNA (1)...(19): siRNA sense strand
gagaggagaacaaugacuu

SEQ ID NO: 631930 - RNA, 19 nt, Homo sapiens
  misc_RNA (1)...(19): siRNA sense strand
ggaguuacgcuuccaaugg

SEQ ID NO: 631931 - RNA, 19 nt, Homo sapiens
  misc_RNA (1)...(19): siRNA sense strand
ggaugaaugcugaaggaaa

SEQ ID NO: 631932 - RNA, 19 nt, Homo sapiens
  misc_RNA (1)...(19): siRNA sense strand
ccucuacaaucuccagaaa

SEQ ID NO: 631933 - RNA, 19 nt, Homo sapiens
  misc_RNA (1)...(19): siRNA sense strand
gaggaacaggagugacuua

SEQ ID NO: 631934 - RNA, 19 nt, Homo sapiens
  misc_RNA (1)...(19): siRNA sense strand
cagugagaguuucaucuuu

SEQ ID NO: 631935 - RNA, 19 nt, Homo sapiens
  misc_RNA (1)...(19): siRNA sense strand
aaagagagaggacccugua

SEQ ID NO: 631936 - RNA, 19 nt, Homo sapiens
  misc_RNA (1)...(19): siRNA sense strand
gaaggacgcucaggaucag

SEQ ID NO: 631937 - RNA, 19 nt, Homo sapiens
  misc_RNA (1)...(19): siRNA sense strand
gcaccguucugacgagcuu

SEQ ID NO: 631938 - RNA, 19 nt, Homo sapiens
  misc_RNA (1)...(19): siRNA sense strand
gaggacaccuaugugauca

SEQ ID NO: 631939 - RNA, 19 nt, Homo sapiens
  misc_RNA (1)...(19): siRNA sense strand
gaaaucgggaacaucacua

SEQ ID NO: 631940 - RNA, 19 nt, Homo sapiens
  misc_RNA (1)...(19): siRNA sense strand
gggaagcccugcagcugau

SEQ ID NO: 631941 - RNA, 19 nt, Homo sapiens
  misc_RNA (1)...(19): siRNA sense strand
gagagaggacccuguaaca

SEQ ID NO: 631942 - RNA, 19 nt, Homo sapiens
  misc_RNA (1)...(19): siRNA sense strand
ggcaggaggugaugauugg

SEQ ID NO: 631943 - RNA, 19 nt, Homo sapiens
  misc_RNA (1)...(19): siRNA sense strand
ggacuuggguaaaauugaa

SEQ ID NO: 631944 - RNA, 19 nt, Homo sapiens
  misc_RNA (1)...(19): siRNA sense strand
ucuaugaccuggugaugga

SEQ ID NO: 631945 - RNA, 19 nt, Homo sapiens
  misc_RNA (1)...(19): siRNA sense strand
gcagccagauugccacagu

SEQ ID NO: 631946 - RNA, 19 nt, Homo sapiens
  misc_RNA (1)...(19): siRNA sense strand
cagcuuggcucuacagcau

SEQ ID NO: 631947 - RNA, 19 nt, Homo sapiens
  misc_RNA (1)...(19): siRNA sense strand
gaguuacgcuuccaauggu

SEQ ID NO: 631948 - RNA, 19 nt, Homo sapiens
  misc_RNA (1)...(19): siRNA sense strand
ucuacaaucuccagaaaca

SEQ ID NO: 631949 - RNA, 19 nt, Homo sapiens
  misc_RNA (1)...(19): siRNA sense strand
agagaaacccagaaacuga

SEQ ID NO: 631950 - RNA, 19 nt, Homo sapiens
  misc_RNA (1)...(19): siRNA sense strand
gcaaugugacccaccaguu

SEQ ID NO: 631951 - RNA, 19 nt, Homo sapiens
  misc_RNA (1)...(19): siRNA sense strand
gugagaguuucaucuuuga

SEQ ID NO: 631952 - RNA, 19 nt, Homo sapiens
  misc_RNA (1)...(19): siRNA sense strand
ggaggacaccuaugugauc

SEQ ID NO: 631953 - RNA, 19 nt, Homo sapiens
  misc_RNA (1)...(19): siRNA sense strand
gaaccaagagcaugaaagc

SEQ ID NO: 631954 - RNA, 19 nt, Homo sapiens
  misc_RNA (1)...(19): siRNA sense strand
gcagaugagaccuacuuug

SEQ ID NO: 631955 - RNA, 19 nt, Homo sapiens
  misc_RNA (1)...(19): siRNA sense strand
ggcagugucuguaccuuca

SEQ ID NO: 631956 - RNA, 19 nt, Homo sapiens
  misc_RNA (1)...(19): siRNA sense strand
ggacagggaaugguggauu

SEQ ID NO: 631957 - RNA, 19 nt, Homo sapiens
  misc_RNA (1)...(19): siRNA sense strand
ucagagaugcuugcuauga

SEQ ID NO: 631958 - RNA, 19 nt, Homo sapiens
  misc_RNA (1)...(19): siRNA sense strand
cagguggccuucagagaug

SEQ ID NO: 631959 - RNA, 19 nt, Homo sapiens
  misc_RNA (1)...(19): siRNA sense strand
aaacauuacaguccacuug

SEQ ID NO: 631960 - RNA, 19 nt, Homo sapiens
  misc_RNA (1)...(19): siRNA sense strand
caaccugaguuuggaaauc

SEQ ID NO: 631961 - RNA, 19 nt, Homo sapiens
  misc_RNA (1)...(19): siRNA sense strand
cgucagcucccucuucaaa

SEQ ID NO: 631962 - RNA, 19 nt, Homo sapiens
  misc_RNA (1)...(19): siRNA sense strand
gaaccugaccaguccugaa

SEQ ID NO: 631963 - RNA, 19 nt, Homo sapiens
  misc_RNA (1)...(19): siRNA sense strand
acucauaccugugaagaau

SEQ ID NO: 631964 - RNA, 19 nt, Homo sapiens
  misc_RNA (1)...(19): siRNA sense strand
cgaagccacuuugauguca

SEQ ID NO: 631965 - RNA, 19 nt, Homo sapiens
  misc_RNA (1)...(19): siRNA sense strand
ggaaagaguaaagauaaag

SEQ ID NO: 631966 - RNA, 19 nt, Homo sapiens
  misc_RNA (1)...(19): siRNA sense strand
agugagaguuucaucuuug

SEQ ID NO: 631967 - RNA, 19 nt, Homo sapiens
  misc_RNA (1)...(19): siRNA sense strand
gagaggacccuguaacacu

SEQ ID NO: 631968 - RNA, 19 nt, Homo sapiens
  misc_RNA (1)...(19): siRNA sense strand
gaugucauuuauccacaga

SEQ ID NO: 631969 - RNA, 19 nt, Homo sapiens
  misc_RNA (1)...(19): siRNA sense strand
gcuguggcaugacaacuca

SEQ ID NO: 631970 - RNA, 19 nt, Homo sapiens
  misc_RNA (1)...(19): siRNA sense strand
gaagcacguuccuggugau

SEQ ID NO: 631971 - RNA, 19 nt, Homo sapiens
  misc_RNA (1)...(19): siRNA sense strand
gcccagaccuucgccuuca

SEQ ID NO: 631972 - RNA, 19 nt, Homo sapiens
  misc_RNA (1)...(19): siRNA sense strand
gccauuuggucuucauuca

SEQ ID NO: 631973 - RNA, 19 nt, Homo sapiens
  misc_RNA (1)...(19): siRNA sense strand
gggcagccacguccucaaa

SEQ ID NO: 631974 - RNA, 19 nt, Homo sapiens
  misc_RNA (1)...(19): siRNA sense strand
acaauucagccaccuguuu

SEQ ID NO: 631975 - RNA, 19 nt, Homo sapiens
  misc_RNA (1)...(19): siRNA sense strand
ggacagaguuaccucaaua

SEQ ID NO: 631976 - RNA, 19 nt, Homo sapiens
  misc_RNA (1)...(19): siRNA sense strand
ugacaaagcucuaugacua

SEQ ID NO: 631977 - RNA, 19 nt, Homo sapiens
  misc_RNA (1)...(19): siRNA sense strand
aaaugaagcuuccgaaaua

SEQ ID NO: 631978 - RNA, 19 nt, Homo sapiens
  misc_RNA (1)...(19): siRNA sense strand
gggagaagauggcagcuua

SEQ ID NO: 631979 - RNA, 19 nt, Homo sapiens
  misc_RNA (1)...(19): siRNA sense strand
caaagaccaucgcaguaua

SEQ ID NO: 631980 - RNA, 19 nt, Homo sapiens
  misc_RNA (1)...(19): siRNA sense strand
gaagcugaaugauaaaguu

SEQ ID NO: 631981 - RNA, 19 nt, Homo sapiens
  misc_RNA (1)...(19): siRNA sense strand
gcaccugucucuucccuuu

SEQ ID NO: 631982 - RNA, 19 nt, Homo sapiens
  misc_RNA (1)...(19): siRNA sense strand
ggaaguguaugcaaggaaa

SEQ ID NO: 631983 - RNA, 19 nt, Homo sapiens
  misc_RNA (1)...(19): siRNA sense strand
ggacaucggucgagucauc

SEQ ID NO: 631984 - RNA, 19 nt, Homo sapiens
  misc_RNA (1)...(19): siRNA sense strand
gauggcagcuuauccaaga

SEQ ID NO: 631985 - RNA, 19 nt, Homo sapiens
  misc_RNA (1)...(19): siRNA sense strand
gaagaggacuacagaccuu

SEQ ID NO: 631986 - RNA, 19 nt, Homo sapiens
  misc_RNA (1)...(19): siRNA sense strand
gaaggugguuuccaauaau

SEQ ID NO: 631987 - RNA, 19 nt, Homo sapiens
  misc_RNA (1)...(19): siRNA sense strand
ggaaugccauccuacaaga

SEQ ID NO: 631988 - RNA, 19 nt, Homo sapiens
  misc_RNA (1)...(19): siRNA sense strand
acacacaucucucccaauu

SEQ ID NO: 631989 - RNA, 19 nt, Homo sapiens
  misc_RNA (1)...(19): siRNA sense strand
augagaagcugaaugauaa

SEQ ID NO: 631990 - RNA, 19 nt, Homo sapiens
  misc_RNA (1)...(19): siRNA sense strand
ugacucaucucuccgauug

SEQ ID NO: 631991 - RNA, 19 nt, Homo sapiens
  misc_RNA (1)...(19): siRNA sense strand
gaaacaacacggagccuuu

SEQ ID NO: 631992 - RNA, 19 nt, Homo sapiens
  misc_RNA (1)...(19): siRNA sense strand
gggaacaccuggagacaga

SEQ ID NO: 631993 - RNA, 19 nt, Homo sapiens
  misc_RNA (1)...(19): siRNA sense strand
gagagcaguuuauugauca

SEQ ID NO: 631994 - RNA, 19 nt, Homo sapiens
  misc_RNA (1)...(19): siRNA sense strand
gaagaagagcacaguguuu

SEQ ID NO: 631995 - RNA, 19 nt, Homo sapiens
  misc_RNA (1)...(19): siRNA sense strand
guacagaggccaacaggaa

SEQ ID NO: 631996 - RNA, 19 nt, Homo sapiens
  misc_RNA (1)...(19): siRNA sense strand
aagcauauccuucagauuu

SEQ ID NO: 631997 - RNA, 19 nt, Homo sapiens
  misc_RNA (1)...(19): siRNA sense strand
acagagagcucgcuuugga

SEQ ID NO: 631998 - RNA, 19 nt, Homo sapiens
  misc_RNA (1)...(19): siRNA sense strand
ucaaacacgucuaucagaa

SEQ ID NO: 631999 - RNA, 19 nt, Homo sapiens
  misc_RNA (1)...(19): siRNA sense strand
ucacagacccggagauuga

SEQ ID NO: 632000 - RNA, 19 nt, Homo sapiens
  misc_RNA (1)...(19): siRNA sense strand
gcaaauacaguuucacauc

SEQ ID NO: 632001 - RNA, 19 nt, Homo sapiens
  misc_RNA (1)...(19): siRNA sense strand
caaauacaguuucacaucu

SEQ ID NO: 632002 - RNA, 19 nt, Homo sapiens
  misc_RNA (1)...(19): siRNA sense strand
caacaagcguaagauaaug

SEQ ID NO: 632003 - RNA, 19 nt, Homo sapiens
  misc_RNA (1)...(19): siRNA sense strand
cggcugaacuucuacauuc

SEQ ID NO: 632004 - RNA, 19 nt, Homo sapiens
  misc_RNA (1)...(19): siRNA sense strand
gggcacaguaugcaauuua

SEQ ID NO: 632005 - RNA, 19 nt, Homo sapiens
  misc_RNA (1)...(19): siRNA sense strand
ggacacaacgucacucuca

SEQ ID NO: 632006 - RNA, 19 nt, Homo sapiens
  misc_RNA (1)...(19): siRNA sense strand
gacccagacucuuugauug

SEQ ID NO: 632007 - RNA, 19 nt, Homo sapiens
  misc_RNA (1)...(19): siRNA sense strand
cgacaucuuugguugaguu

SEQ ID NO: 632008 - RNA, 19 nt, Homo sapiens
  misc_RNA (1)...(19): siRNA sense strand
acaaagcucuaugacuaua

SEQ ID NO: 632009 - RNA, 19 nt, Homo sapiens
  misc_RNA (1)...(19): siRNA sense strand
caaaugaagcuuccgaaau

SEQ ID NO: 632010 - RNA, 19 nt, Homo sapiens
  misc_RNA (1)...(19): siRNA sense strand
uaugagaagcugaaugaua

SEQ ID NO: 632011 - RNA, 19 nt, Homo sapiens
  misc_RNA (1)...(19): siRNA sense strand
ucacuuacgugugguggua

SEQ ID NO: 632012 - RNA, 19 nt, Homo sapiens
  misc_RNA (1)...(19): siRNA sense strand
caagaagauugacaaccaa

SEQ ID NO: 632013 - RNA, 19 nt, Homo sapiens
  misc_RNA (1)...(19): siRNA sense strand
caccacugcugaacucuuu

SEQ ID NO: 632014 - RNA, 19 nt, Homo sapiens
  misc_RNA (1)...(19): siRNA sense strand
caggagcuauggaaucuga

SEQ ID NO: 632015 - RNA, 19 nt, Homo sapiens
  misc_RNA (1)...(19): siRNA sense strand
ggaaccagaaugacacgua

SEQ ID NO: 632016 - RNA, 19 nt, Homo sapiens
  misc_RNA (1)...(19): siRNA sense strand
uguccaugcugcucacuua

SEQ ID NO: 632017 - RNA, 19 nt, Homo sapiens
  misc_RNA (1)...(19): siRNA sense strand
cauggaagaugggaucaaa

SEQ ID NO: 632018 - RNA, 19 nt, Homo sapiens
  misc_RNA (1)...(19): siRNA sense strand
ggauauauaagaagcgaaa

SEQ ID NO: 632019 - RNA, 19 nt, Homo sapiens
  misc_RNA (1)...(19): siRNA sense strand
acaagaagauugacaacca

SEQ ID NO: 632020 - RNA, 19 nt, Homo sapiens
  misc_RNA (1)...(19): siRNA sense strand
agaguuaccucaauaguac

SEQ ID NO: 632021 - RNA, 19 nt, Homo sapiens
  misc_RNA (1)...(19): siRNA sense strand
ggcacaguaugcaauuuaa

SEQ ID NO: 632022 - RNA, 19 nt, Homo sapiens
  misc_RNA (1)...(19): siRNA sense strand
ggagauugagagcaguuua

SEQ ID NO: 632023 - RNA, 19 nt, Homo sapiens
  misc_RNA (1)...(19): siRNA sense strand
gagcagauaucagaauugc

SEQ ID NO: 632024 - RNA, 19 nt, Homo sapiens
  misc_RNA (1)...(19): siRNA sense strand
ucaggaucauuauguguuu

SEQ ID NO: 632025 - RNA, 19 nt, Homo sapiens
  misc_RNA (1)...(19): siRNA sense strand
caaacaagaagacuggauu

SEQ ID NO: 632026 - RNA, 19 nt, Homo sapiens
  misc_RNA (1)...(19): siRNA sense strand
ccaacaagcguaagauaau

SEQ ID NO: 632027 - RNA, 19 nt, Homo sapiens
  misc_RNA (1)...(19): siRNA sense strand
aaucagagcggaaguguau

SEQ ID NO: 632028 - RNA, 19 nt, Homo sapiens
  misc_RNA (1)...(19): siRNA sense strand
gaagauugacaaccaagug

SEQ ID NO: 632029 - RNA, 19 nt, Homo sapiens
  misc_RNA (1)...(19): siRNA sense strand
gaagauggcagcuuaucca

SEQ ID NO: 632030 - RNA, 19 nt, Homo sapiens
  misc_RNA (1)...(19): siRNA sense strand
cagaguuaccucaauagua

SEQ ID NO: 632031 - RNA, 19 nt, Homo sapiens
  misc_RNA (1)...(19): siRNA sense strand
gguaauauagguucugaau

SEQ ID NO: 632032 - RNA, 19 nt, Homo sapiens
  misc_RNA (1)...(19): siRNA sense strand
ggauggucauucacauuau

SEQ ID NO: 632033 - RNA, 19 nt, Homo sapiens
  misc_RNA (1)...(19): siRNA sense strand
ugauaaaguugguuugaag

SEQ ID NO: 632034 - RNA, 19 nt, Homo sapiens
  misc_RNA (1)...(19): siRNA sense strand
gaaugaauaccaucacagu

SEQ ID NO: 632035 - RNA, 19 nt, Homo sapiens
  misc_RNA (1)...(19): siRNA sense strand
gaaggaaugaauaccauca

SEQ ID NO: 632036 - RNA, 19 nt, Homo sapiens
  misc_RNA (1)...(19): siRNA sense strand
gcacugaggcugauuuuga

SEQ ID NO: 632037 - RNA, 19 nt, Homo sapiens
  misc_RNA (1)...(19): siRNA sense strand
gagcaaauacaguuucaca

SEQ ID NO: 632038 - RNA, 19 nt, Homo sapiens
  misc_RNA (1)...(19): siRNA sense strand
gaauggaaccagaaugaca

SEQ ID NO: 632039 - RNA, 19 nt, Homo sapiens
  misc_RNA (1)...(19): siRNA sense strand
ugagagcaguuuauugauc

SEQ ID NO: 632040 - RNA, 19 nt, Homo sapiens
  misc_RNA (1)...(19): siRNA sense strand
ggagaucuuggagcaaaua

SEQ ID NO: 632041 - RNA, 19 nt, Homo sapiens
  misc_RNA (1)...(19): siRNA sense strand
gcagaagugcccagggaaa

SEQ ID NO: 632042 - RNA, 19 nt, Homo sapiens
  misc_RNA (1)...(19): siRNA sense strand
gauugcagcuugggacaga

SEQ ID NO: 632043 - RNA, 19 nt, Homo sapiens
  misc_RNA (1)...(19): siRNA sense strand
ccuaugagaagcugaauga

SEQ ID NO: 632044 - RNA, 19 nt, Homo sapiens
  misc_RNA (1)...(19): siRNA sense strand
agcauauccuucagauuua

SEQ ID NO: 632045 - RNA, 19 nt, Homo sapiens
  misc_RNA (1)...(19): siRNA sense strand
uauagguucugaauuguca

SEQ ID NO: 632046 - RNA, 19 nt, Homo sapiens
  misc_RNA (1)...(19): siRNA sense strand
gagaaucccuacacaucag

SEQ ID NO: 632047 - RNA, 19 nt, Homo sapiens
  misc_RNA (1)...(19): siRNA sense strand
ucacagagagcucgcuuug

SEQ ID NO: 632048 - RNA, 19 nt, Homo sapiens
  misc_RNA (1)...(19): siRNA sense strand
uaaagaaccagaccuugug

SEQ ID NO: 632049 - RNA, 19 nt, Homo sapiens
  misc_RNA (1)...(19): siRNA sense strand
aagacuggauucuggcaua

SEQ ID NO: 632050 - RNA, 19 nt, Homo sapiens
  misc_RNA (1)...(19): siRNA sense strand
gcauguuugucucuucaga

SEQ ID NO: 632051 - RNA, 19 nt, Homo sapiens
  misc_RNA (1)...(19): siRNA sense strand
uggauggucauucacauua

SEQ ID NO: 632052 - RNA, 19 nt, Homo sapiens
  misc_RNA (1)...(19): siRNA sense strand
ggaucaaacacgucuauca

SEQ ID NO: 632053 - RNA, 19 nt, Homo sapiens
  misc_RNA (1)...(19): siRNA sense strand
gauaaaguugguuugaaga

SEQ ID NO: 632054 - RNA, 19 nt, Homo sapiens
  misc_RNA (1)...(19): siRNA sense strand
cagaaggaaugaauaccau

SEQ ID NO: 632055 - RNA, 19 nt, Homo sapiens
  misc_RNA (1)...(19): siRNA sense strand
ggacaacagucuggguucu

SEQ ID NO: 632056 - RNA, 19 nt, Homo sapiens
  misc_RNA (1)...(19): siRNA sense strand
uaucagaacgugggcauuu

SEQ ID NO: 632057 - RNA, 19 nt, Homo sapiens
  misc_RNA (1)...(19): siRNA sense strand
guagauuacaaguccauuu

SEQ ID NO: 632058 - RNA, 19 nt, Homo sapiens
  misc_RNA (1)...(19): siRNA sense strand
acacaucucucccaauucg

SEQ ID NO: 632059 - RNA, 19 nt, Homo sapiens
  misc_RNA (1)...(19): siRNA sense strand
ggucauucacauuaucuaa

SEQ ID NO: 632060 - RNA, 19 nt, Homo sapiens
  misc_RNA (1)...(19): siRNA sense strand
gauggucauucacauuauc

SEQ ID NO: 632061 - RNA, 19 nt, Homo sapiens
  misc_RNA (1)...(19): siRNA sense strand
uggagcagauaucagaauu

SEQ ID NO: 632062 - RNA, 19 nt, Homo sapiens
  misc_RNA (1)...(19): siRNA sense strand
ucacaucuauuccacuuuu

SEQ ID NO: 632063 - RNA, 19 nt, Homo sapiens
  misc_RNA (1)...(19): siRNA sense strand
guacaaccucuacaucuca

SEQ ID NO: 632064 - RNA, 19 nt, Homo sapiens
  misc_RNA (1)...(19): siRNA sense strand
aagaauggaaccagaauga

SEQ ID NO: 632065 - RNA, 19 nt, Homo sapiens
  misc_RNA (1)...(19): siRNA sense strand
ucgcagcgguccaagaaug

SEQ ID NO: 632066 - RNA, 19 nt, Homo sapiens
  misc_RNA (1)...(19): siRNA sense strand
gagauugagagcaguuuau

SEQ ID NO: 632067 - RNA, 19 nt, Homo sapiens
  misc_RNA (1)...(19): siRNA sense strand
ccacuggucuggccacaac

SEQ ID NO: 632068 - RNA, 19 nt, Homo sapiens
  misc_RNA (1)...(19): siRNA sense strand
aauggcagcuggucaaagu

SEQ ID NO: 632069 - RNA, 19 nt, Homo sapiens
  misc_RNA (1)...(19): siRNA sense strand
ggauaaagggaauguucuu

SEQ ID NO: 632070 - RNA, 19 nt, Homo sapiens
  misc_RNA (1)...(19): siRNA sense strand
ccaaaugaagcuuccgaaa

SEQ ID NO: 632071 - RNA, 19 nt, Homo sapiens
  misc_RNA (1)...(19): siRNA sense strand
gacaaagcucuaugacuau

SEQ ID NO: 632072 - RNA, 19 nt, Homo sapiens
  misc_RNA (1)...(19): siRNA sense strand
cagcauguuugucucuuca

SEQ ID NO: 632073 - RNA, 19 nt, Homo sapiens
  misc_RNA (1)...(19): siRNA sense strand
aaccagaccuugugcaucu

SEQ ID NO: 632074 - RNA, 19 nt, Homo sapiens
  misc_RNA (1)...(19): siRNA sense strand
gaucaaacacgucuaucag

SEQ ID NO: 632075 - RNA, 19 nt, Homo sapiens
  misc_RNA (1)...(19): siRNA sense strand
cugcaaagcuguccaguua

SEQ ID NO: 632076 - RNA, 19 nt, Homo sapiens
  misc_RNA (1)...(19): siRNA sense strand
caacugcccuugacaaugu

SEQ ID NO: 632077 - RNA, 19 nt, Homo sapiens
  misc_RNA (1)...(19): siRNA sense strand
caaggaaccuagaguaugu

SEQ ID NO: 632078 - RNA, 19 nt, Homo sapiens
  misc_RNA (1)...(19): siRNA sense strand
gcaaagcuguccaguuaca

SEQ ID NO: 632079 - RNA, 19 nt, Homo sapiens
  misc_RNA (1)...(19): siRNA sense strand
gcccagauauccacaaaga

SEQ ID NO: 632080 - RNA, 19 nt, Homo sapiens
  misc_RNA (1)...(19): siRNA sense strand
gaacauacaaguuaccaau

SEQ ID NO: 632081 - RNA, 19 nt, Homo sapiens
  misc_RNA (1)...(19): siRNA sense strand
ccacaaagaccucugcaaa

SEQ ID NO: 632082 - RNA, 19 nt, Homo sapiens
  misc_RNA (1)...(19): siRNA sense strand
gaaccuagaguauguuuca

SEQ ID NO: 632083 - RNA, 19 nt, Homo sapiens
  misc_RNA (1)...(19): siRNA sense strand
gaauguaguuucacaaagc

SEQ ID NO: 632084 - RNA, 19 nt, Homo sapiens
  misc_RNA (1)...(19): siRNA sense strand
ucacuuggcuuuucaauga

SEQ ID NO: 632085 - RNA, 19 nt, Homo sapiens
  misc_RNA (1)...(19): siRNA sense strand
aaacaucucuugccuucau

SEQ ID NO: 632086 - RNA, 19 nt, Homo sapiens
  misc_RNA (1)...(19): siRNA sense strand
ccacgugacuaauccgaaa

SEQ ID NO: 632087 - RNA, 19 nt, Homo sapiens
  misc_RNA (1)...(19): siRNA sense strand
gagcccagauauccacaaa

SEQ ID NO: 632088 - RNA, 19 nt, Homo sapiens
  misc_RNA (1)...(19): siRNA sense strand
agucuucgguuucaucaua

SEQ ID NO: 632089 - RNA, 19 nt, Homo sapiens
  misc_RNA (1)...(19): siRNA sense strand
agaaugcugucaguaauuu

SEQ ID NO: 632090 - RNA, 19 nt, Homo sapiens
  misc_RNA (1)...(19): siRNA sense strand
ggaauguaguuucacaaag

SEQ ID NO: 632091 - RNA, 19 nt, Homo sapiens
  misc_RNA (1)...(19): siRNA sense strand
gaaauccacgugacuaauc

SEQ ID NO: 632092 - RNA, 19 nt, Homo sapiens
  misc_RNA (1)...(19): siRNA sense strand
cagagaaugcugucaguaa

SEQ ID NO: 632093 - RNA, 19 nt, Homo sapiens
  misc_RNA (1)...(19): siRNA sense strand
auacugcuguuacuuguuu

SEQ ID NO: 632094 - RNA, 19 nt, Homo sapiens
  misc_RNA (1)...(19): siRNA sense strand
acagucagcuauuucagaa

SEQ ID NO: 632095 - RNA, 19 nt, Homo sapiens
  misc_RNA (1)...(19): siRNA sense strand
gcaaggaaccuagaguaug

SEQ ID NO: 632096 - RNA, 19 nt, Homo sapiens
  misc_RNA (1)...(19): siRNA sense strand
ggacuacaccugcauagca

SEQ ID NO: 632097 - RNA, 19 nt, Homo sapiens
  misc_RNA (1)...(19): siRNA sense strand
gagaaugcugucaguaauu

SEQ ID NO: 632098 - RNA, 19 nt, Homo sapiens
  misc_RNA (1)...(19): siRNA sense strand
cugaggaacauacaaguua

SEQ ID NO: 632099 - RNA, 19 nt, Homo sapiens
  misc_RNA (1)...(19): siRNA sense strand
uaagacaacugaggaacau

SEQ ID NO: 632100 - RNA, 19 nt, Homo sapiens
  misc_RNA (1)...(19): siRNA sense strand
guuuaugguuucugggaua

SEQ ID NO: 632101 - RNA, 19 nt, Homo sapiens
  misc_RNA (1)...(19): siRNA sense strand
gaugggaggccuugggaaa

SEQ ID NO: 632102 - RNA, 19 nt, Homo sapiens
  misc_RNA (1)...(19): siRNA sense strand
gcgaagauguuaaaauuca

SEQ ID NO: 632103 - RNA, 19 nt, Homo sapiens
  misc_RNA (1)...(19): siRNA sense strand
acauacaaguuaccaauca

SEQ ID NO: 632104 - RNA, 19 nt, Homo sapiens
  misc_RNA (1)...(19): siRNA sense strand
caaucacagucagcuauuu

SEQ ID NO: 632105 - RNA, 19 nt, Homo sapiens
  misc_RNA (1)...(19): siRNA sense strand
gggaauguaguuucacaaa

SEQ ID NO: 632106 - RNA, 19 nt, Homo sapiens
  misc_RNA (1)...(19): siRNA sense strand
agagaaugcugucaguaau

SEQ ID NO: 632107 - RNA, 19 nt, Homo sapiens
  misc_RNA (1)...(19): siRNA sense strand
uccaaucgcuccuguuugu

SEQ ID NO: 632108 - RNA, 19 nt, Homo sapiens
  misc_RNA (1)...(19): siRNA sense strand
ccagaagcuuugcgaagau

SEQ ID NO: 632109 - RNA, 19 nt, Homo sapiens
  misc_RNA (1)...(19): siRNA sense strand
cagaaauccacgugacuaa

SEQ ID NO: 632110 - RNA, 19 nt, Homo sapiens
  misc_RNA (1)...(19): siRNA sense strand
ucaaacagggaaacagaaa

SEQ ID NO: 632111 - RNA, 19 nt, Homo sapiens
  misc_RNA (1)...(19): siRNA sense strand
cccagaagcuuugcgaaga

SEQ ID NO: 632112 - RNA, 19 nt, Homo sapiens
  misc_RNA (1)...(19): siRNA sense strand
gaaugcugucaguaauuua

SEQ ID NO: 632113 - RNA, 19 nt, Homo sapiens
  misc_RNA (1)...(19): siRNA sense strand
gcagagaaugcugucagua

SEQ ID NO: 632114 - RNA, 19 nt, Homo sapiens
  misc_RNA (1)...(19): siRNA sense strand
agacacaggcucuuacaga

SEQ ID NO: 632115 - RNA, 19 nt, Homo sapiens
  misc_RNA (1)...(19): siRNA sense strand
acaaagaccucugcaaagc

SEQ ID NO: 632116 - RNA, 19 nt, Homo sapiens
  misc_RNA (1)...(19): siRNA sense strand
guuacacucugaggauauu

SEQ ID NO: 632117 - RNA, 19 nt, Homo sapiens
  misc_RNA (1)...(19): siRNA sense strand
caguuacacucugaggaua

SEQ ID NO: 632118 - RNA, 19 nt, Homo sapiens
  misc_RNA (1)...(19): siRNA sense strand
guuccaaucgcuccuguuu

SEQ ID NO: 632119 - RNA, 19 nt, Homo sapiens
  misc_RNA (1)...(19): siRNA sense strand
ggaggaugcagaugacaau

SEQ ID NO: 632120 - RNA, 19 nt, Homo sapiens
  misc_RNA (1)...(19): siRNA sense strand
ccagaaauccacgugacua

SEQ ID NO: 632121 - RNA, 19 nt, Homo sapiens
  misc_RNA (1)...(19): siRNA sense strand
caacugaggaacauacaag

SEQ ID NO: 632122 - RNA, 19 nt, Homo sapiens
  misc_RNA (1)...(19): siRNA sense strand
aaacagggaaagcgacuga

SEQ ID NO: 632123 - RNA, 19 nt, Homo sapiens
  misc_RNA (1)...(19): siRNA sense strand
caggagagaaggucaacuu

SEQ ID NO: 632124 - RNA, 19 nt, Homo sapiens
  misc_RNA (1)...(19): siRNA sense strand
gcaacugcccuugacaaug

SEQ ID NO: 632125 - RNA, 19 nt, Homo sapiens
  misc_RNA (1)...(19): siRNA sense strand
ucucuugccuucauaguac

SEQ ID NO: 632126 - RNA, 19 nt, Homo sapiens
  misc_RNA (1)...(19): siRNA sense strand
aaacagggaaacagaaauc

SEQ ID NO: 632127 - RNA, 19 nt, Homo sapiens
  misc_RNA (1)...(19): siRNA sense strand
ccgcaaggaaccuagagua

SEQ ID NO: 632128 - RNA, 19 nt, Homo sapiens
  misc_RNA (1)...(19): siRNA sense strand
aaggucaacuucaucacuu

SEQ ID NO: 632129 - RNA, 19 nt, Homo sapiens
  misc_RNA (1)...(19): siRNA sense strand
uucagaauaugaccuguga

SEQ ID NO: 632130 - RNA, 19 nt, Homo sapiens
  misc_RNA (1)...(19): siRNA sense strand
cagggaauguaguuucaca

SEQ ID NO: 632131 - RNA, 19 nt, Homo sapiens
  misc_RNA (1)...(19): siRNA sense strand
ucauacugcuguuacuugu

SEQ ID NO: 632132 - RNA, 19 nt, Homo sapiens
  misc_RNA (1)...(19): siRNA sense strand
gaagcuuugcgaagauguu

SEQ ID NO: 632133 - RNA, 19 nt, Homo sapiens
  misc_RNA (1)...(19): siRNA sense strand
ccaaucacagucagcuauu

SEQ ID NO: 632134 - RNA, 19 nt, Homo sapiens
  misc_RNA (1)...(19): siRNA sense strand
cagaagcuuugcgaagaug

SEQ ID NO: 632135 - RNA, 19 nt, Homo sapiens
  misc_RNA (1)...(19): siRNA sense strand
ugaggaacauacaaguuac

SEQ ID NO: 632136 - RNA, 19 nt, Homo sapiens
  misc_RNA (1)...(19): siRNA sense strand
ccaguuacacucugaggau

SEQ ID NO: 632137 - RNA, 19 nt, Homo sapiens
  misc_RNA (1)...(19): siRNA sense strand
gcuuugcgaagauguuaaa

SEQ ID NO: 632138 - RNA, 19 nt, Homo sapiens
  misc_RNA (1)...(19): siRNA sense strand
gaaaucuggacaccuagag

SEQ ID NO: 632139 - RNA, 19 nt, Homo sapiens
  misc_RNA (1)...(19): siRNA sense strand
caaacagggaaacagaaau

SEQ ID NO: 632140 - RNA, 19 nt, Homo sapiens
  misc_RNA (1)...(19): siRNA sense strand
ccacaauuaaucauuccaa

SEQ ID NO: 632141 - RNA, 19 nt, Homo sapiens
  misc_RNA (1)...(19): siRNA sense strand
cacaaagaccucugcaaag

SEQ ID NO: 632142 - RNA, 19 nt, Homo sapiens
  misc_RNA (1)...(19): siRNA sense strand
gauucccuaucuuugucua

SEQ ID NO: 632143 - RNA, 19 nt, Homo sapiens
  misc_RNA (1)...(19): siRNA sense strand
cccagggaauguaguuuca

SEQ ID NO: 632144 - RNA, 19 nt, Homo sapiens
  misc_RNA (1)...(19): siRNA sense strand
guaauuuauccuucucugu

SEQ ID NO: 632145 - RNA, 19 nt, Homo sapiens
  misc_RNA (1)...(19): siRNA sense strand
cugaggauauuaagacaac

SEQ ID NO: 632146 - RNA, 19 nt, Homo sapiens
  misc_RNA (1)...(19): siRNA sense strand
uuacagagcccagauaucc

SEQ ID NO: 632147 - RNA, 19 nt, Homo sapiens
  misc_RNA (1)...(19): siRNA sense strand
acuccacaauuaaucauuc

SEQ ID NO: 632148 - RNA, 19 nt, Homo sapiens
  misc_RNA (1)...(19): siRNA sense strand
gaaaccaaaaguccagaaa

SEQ ID NO: 632149 - RNA, 19 nt, Homo sapiens
  misc_RNA (1)...(19): siRNA sense strand
ucugggauaugcauagucu

SEQ ID NO: 632150 - RNA, 19 nt, Homo sapiens
  misc_RNA (1)...(19): siRNA sense strand
gaggauauuaagacaacug

SEQ ID NO: 632151 - RNA, 19 nt, Homo sapiens
  misc_RNA (1)...(19): siRNA sense strand
gucaguaauuuauccuucu

SEQ ID NO: 632152 - RNA, 19 nt, Homo sapiens
  misc_RNA (1)...(19): siRNA sense strand
cuguuugucuucugcuuug

SEQ ID NO: 632153 - RNA, 19 nt, Homo sapiens
  misc_RNA (1)...(19): siRNA sense strand
cagccaaaccucacugucu

SEQ ID NO: 632154 - RNA, 19 nt, Homo sapiens
  misc_RNA (1)...(19): siRNA sense strand
gcccagggaauguaguuuc

SEQ ID NO: 632155 - RNA, 19 nt, Homo sapiens
  misc_RNA (1)...(19): siRNA sense strand
aaagagaguaaacccacuu

SEQ ID NO: 632156 - RNA, 19 nt, Homo sapiens
  misc_RNA (1)...(19): siRNA sense strand
uaugcauagucuucgguuu

SEQ ID NO: 632157 - RNA, 19 nt, Homo sapiens
  misc_RNA (1)...(19): siRNA sense strand
ggaacauacaaguuaccaa

SEQ ID NO: 632158 - RNA, 19 nt, Homo sapiens
  misc_RNA (1)...(19): siRNA sense strand
gcaaccugaagauggaaga

SEQ ID NO: 632159 - RNA, 19 nt, Homo sapiens
  misc_RNA (1)...(19): siRNA sense strand
cacagucagcuauuucaga

SEQ ID NO: 632160 - RNA, 19 nt, Homo sapiens
  misc_RNA (1)...(19): siRNA sense strand
ugggaggccuugggaaaca

SEQ ID NO: 632161 - RNA, 19 nt, Homo sapiens
  misc_RNA (1)...(19): siRNA sense strand
aaucuggacaccuagagaa

SEQ ID NO: 632162 - RNA, 19 nt, Homo sapiens
  misc_RNA (1)...(19): siRNA sense strand
cgcaaggaaccuagaguau

SEQ ID NO: 632163 - RNA, 19 nt, Homo sapiens
  misc_RNA (1)...(19): siRNA sense strand
aagcuuugcgaagauguua

SEQ ID NO: 632164 - RNA, 19 nt, Homo sapiens
  misc_RNA (1)...(19): siRNA sense strand
ucaguaauuuauccuucuc

SEQ ID NO: 632165 - RNA, 19 nt, Homo sapiens
  misc_RNA (1)...(19): siRNA sense strand
gaucaaagcugugguguuu

SEQ ID NO: 632166 - RNA, 19 nt, Homo sapiens
  misc_RNA (1)...(19): siRNA sense strand
ucagagaucuucaggcaaa

SEQ ID NO: 632167 - RNA, 19 nt, Homo sapiens
  misc_RNA (1)...(19): siRNA sense strand
gaggaggucucuauucaug

SEQ ID NO: 632168 - RNA, 19 nt, Homo sapiens
  misc_RNA (1)...(19): siRNA sense strand
ccagguaccuuugccguua

SEQ ID NO: 632169 - RNA, 19 nt, Homo sapiens
  misc_RNA (1)...(19): siRNA sense strand
gcacgucuuucccagcaua

SEQ ID NO: 632170 - RNA, 19 nt, Homo sapiens
  misc_RNA (1)...(19): siRNA sense strand
ggaggucucuauucaugaa

SEQ ID NO: 632171 - RNA, 19 nt, Homo sapiens
  misc_RNA (1)...(19): siRNA sense strand
gcaccagcguguccuauau

SEQ ID NO: 632172 - RNA, 19 nt, Homo sapiens
  misc_RNA (1)...(19): siRNA sense strand
gcucaaugcucgcuacaug

SEQ ID NO: 632173 - RNA, 19 nt, Homo sapiens
  misc_RNA (1)...(19): siRNA sense strand
ggagagaaacuucgcaaug

SEQ ID NO: 632174 - RNA, 19 nt, Homo sapiens
  misc_RNA (1)...(19): siRNA sense strand
ugauuucggugcucaagua

SEQ ID NO: 632175 - RNA, 19 nt, Homo sapiens
  misc_RNA (1)...(19): siRNA sense strand
agagcaagcuggacuguug

SEQ ID NO: 632176 - RNA, 19 nt, Homo sapiens
  misc_RNA (1)...(19): siRNA sense strand
gagagaaacuucgcaaugc

SEQ ID NO: 632177 - RNA, 19 nt, Homo sapiens
  misc_RNA (1)...(19): siRNA sense strand
ggauggagcuggaggaaaa

SEQ ID NO: 632178 - RNA, 19 nt, Homo sapiens
  misc_RNA (1)...(19): siRNA sense strand
cauggacacugacauuuau

SEQ ID NO: 632179 - RNA, 19 nt, Homo sapiens
  misc_RNA (1)...(19): siRNA sense strand
ccaaguacaagauuaaaga

SEQ ID NO: 632180 - RNA, 19 nt, Homo sapiens
  misc_RNA (1)...(19): siRNA sense strand
augcugagcucuccuugua

SEQ ID NO: 632181 - RNA, 19 nt, Homo sapiens
  misc_RNA (1)...(19): siRNA sense strand
uauaauagggcccaggaua

SEQ ID NO: 632182 - RNA, 19 nt, Homo sapiens
  misc_RNA (1)...(19): siRNA sense strand
gcuacgacguggauucgaa

SEQ ID NO: 632183 - RNA, 19 nt, Homo sapiens
  misc_RNA (1)...(19): siRNA sense strand
cagcaggacuuugagaaug

SEQ ID NO: 632184 - RNA, 19 nt, Homo sapiens
  misc_RNA (1)...(19): siRNA sense strand
gaaugaggcccacacaaca

SEQ ID NO: 632185 - RNA, 19 nt, Homo sapiens
  misc_RNA (1)...(19): siRNA sense strand
ucauggacacugacauuua

SEQ ID NO: 632186 - RNA, 19 nt, Homo sapiens
  misc_RNA (1)...(19): siRNA sense strand
caagaacucccucaagcaa

SEQ ID NO: 632187 - RNA, 19 nt, Homo sapiens
  misc_RNA (1)...(19): siRNA sense strand
caaccuuccugcagucaau

SEQ ID NO: 632188 - RNA, 19 nt, Homo sapiens
  misc_RNA (1)...(19): siRNA sense strand
gcaaugccuucagauguuc

SEQ ID NO: 632189 - RNA, 19 nt, Homo sapiens
  misc_RNA (1)...(19): siRNA sense strand
caggagaagcggagaauga

SEQ ID NO: 632190 - RNA, 19 nt, Homo sapiens
  misc_RNA (1)...(19): siRNA sense strand
acgaugaguuugagaagaa

SEQ ID NO: 632191 - RNA, 19 nt, Homo sapiens
  misc_RNA (1)...(19): siRNA sense strand
guacaagauuaaagacuac

SEQ ID NO: 632192 - RNA, 19 nt, Homo sapiens
  misc_RNA (1)...(19): siRNA sense strand
ucaacaaugccaccaauga

SEQ ID NO: 632193 - RNA, 19 nt, Homo sapiens
  misc_RNA (1)...(19): siRNA sense strand
cgcaaugccuucagauguu

SEQ ID NO: 632194 - RNA, 19 nt, Homo sapiens
  misc_RNA (1)...(19): siRNA sense strand
ggacuuagagcaggagaug

SEQ ID NO: 632195 - RNA, 19 nt, Homo sapiens
  misc_RNA (1)...(19): siRNA sense strand
caacaucgccucgcucauc

SEQ ID NO: 632196 - RNA, 19 nt, Homo sapiens
  misc_RNA (1)...(19): siRNA sense strand
ccacaaggcauggcauuug

SEQ ID NO: 632197 - RNA, 19 nt, Homo sapiens
  misc_RNA (1)...(19): siRNA sense strand
cagacucaguuucgaaaug

SEQ ID NO: 632198 - RNA, 19 nt, Homo sapiens
  misc_RNA (1)...(19): siRNA sense strand
gaagaaggaccggacauac

SEQ ID NO: 632199 - RNA, 19 nt, Homo sapiens
  misc_RNA (1)...(19): siRNA sense strand
ccucuucgacgaugaguuu

SEQ ID NO: 632200 - RNA, 19 nt, Homo sapiens
  misc_RNA (1)...(19): siRNA sense strand
gacgaugaguuugagaaga

SEQ ID NO: 632201 - RNA, 19 nt, Homo sapiens
  misc_RNA (1)...(19): siRNA sense strand
gauggugccagguaccuuu

SEQ ID NO: 632202 - RNA, 19 nt, Homo sapiens
  misc_RNA (1)...(19): siRNA sense strand
ggaugggagucuagaaugc

SEQ ID NO: 632203 - RNA, 19 nt, Homo sapiens
  misc_RNA (1)...(19): siRNA sense strand
gcagaucgugggagaaauc

SEQ ID NO: 632204 - RNA, 19 nt, Homo sapiens
  misc_RNA (1)...(19): siRNA sense strand
caucgucuuuaccuucauu

SEQ ID NO: 632205 - RNA, 19 nt, Homo sapiens
  misc_RNA (1)...(19): siRNA sense strand
gcagcaggacuuugagaau

SEQ ID NO: 632206 - RNA, 19 nt, Homo sapiens
  misc_RNA (1)...(19): siRNA sense strand
gaaauuccaggucuucaac

SEQ ID NO: 632207 - RNA, 19 nt, Homo sapiens
  misc_RNA (1)...(19): siRNA sense strand
gauguucgggagcauguuu

SEQ ID NO: 632208 - RNA, 19 nt, Homo sapiens
  misc_RNA (1)...(19): siRNA sense strand
gaggaugggagucuagaau

SEQ ID NO: 632209 - RNA, 19 nt, Homo sapiens
  misc_RNA (1)...(19): siRNA sense strand
agaagaaggaccggacaua

SEQ ID NO: 632210 - RNA, 19 nt, Homo sapiens
  misc_RNA (1)...(19): siRNA sense strand
ugaaucccaagaccuauaa

SEQ ID NO: 632211 - RNA, 19 nt, Homo sapiens
  misc_RNA (1)...(19): siRNA sense strand
gaucgugggagaaauccaa

SEQ ID NO: 632212 - RNA, 19 nt, Homo sapiens
  misc_RNA (1)...(19): siRNA sense strand
gugaaucccaagaccuaua

SEQ ID NO: 632213 - RNA, 19 nt, Homo sapiens
  misc_RNA (1)...(19): siRNA sense strand
ucagcauccugguggguaa

SEQ ID NO: 632214 - RNA, 19 nt, Homo sapiens
  misc_RNA (1)...(19): siRNA sense strand
uucuuuggcuccuucuuua

SEQ ID NO: 632215 - RNA, 19 nt, Homo sapiens
  misc_RNA (1)...(19): siRNA sense strand
gcucucggcugcagcaacu

SEQ ID NO: 632216 - RNA, 19 nt, Homo sapiens
  misc_RNA (1)...(19): siRNA sense strand
caacaaugccaccaaugag

SEQ ID NO: 632217 - RNA, 19 nt, Homo sapiens
  misc_RNA (1)...(19): siRNA sense strand
ccugaucgcugucaaucuc

SEQ ID NO: 632218 - RNA, 19 nt, Homo sapiens
  misc_RNA (1)...(19): siRNA sense strand
gucuuuaccuucauugaca

SEQ ID NO: 632219 - RNA, 19 nt, Homo sapiens
  misc_RNA (1)...(19): siRNA sense strand
gagaaugaggcccacacaa

SEQ ID NO: 632220 - RNA, 19 nt, Homo sapiens
  misc_RNA (1)...(19): siRNA sense strand
ccuacuaccuguggaggaa

SEQ ID NO: 632221 - RNA, 19 nt, Homo sapiens
  misc_RNA (1)...(19): siRNA sense strand
gucauuugcugugcgcuuu

SEQ ID NO: 632222 - RNA, 19 nt, Homo sapiens
  misc_RNA (1)...(19): siRNA sense strand
cauacucccuuacccucuu

SEQ ID NO: 632223 - RNA, 19 nt, Homo sapiens
  misc_RNA (1)...(19): siRNA sense strand
uuccaggucuucaacaaug

SEQ ID NO: 632224 - RNA, 19 nt, Homo sapiens
  misc_RNA (1)...(19): siRNA sense strand
agaaugcaagcacgucuuu

SEQ ID NO: 632225 - RNA, 19 nt, Homo sapiens
  misc_RNA (1)...(19): siRNA sense strand
gcaucuggguagugagcuu

SEQ ID NO: 632226 - RNA, 19 nt, Homo sapiens
  misc_RNA (1)...(19): siRNA sense strand
aagcuggacuguugcaucu

SEQ ID NO: 632227 - RNA, 19 nt, Homo sapiens
  misc_RNA (1)...(19): siRNA sense strand
gaagagcaagcuggacugu

SEQ ID NO: 632228 - RNA, 19 nt, Homo sapiens
  misc_RNA (1)...(19): siRNA sense strand
cgaaauuccaggucuucaa

SEQ ID NO: 632229 - RNA, 19 nt, Homo sapiens
  misc_RNA (1)...(19): siRNA sense strand
uuaccuucauugacauuug

SEQ ID NO: 632230 - RNA, 19 nt, Homo sapiens
  misc_RNA (1)...(19): siRNA sense strand
aaguacaucuucggacuga

SEQ ID NO: 632231 - RNA, 19 nt, Homo sapiens
  misc_RNA (1)...(19): siRNA sense strand
gccugcagauccugauuuc

SEQ ID NO: 632232 - RNA, 19 nt, Homo sapiens
  misc_RNA (1)...(19): siRNA sense strand
acaugacgcaguccucuuu

SEQ ID NO: 632233 - RNA, 19 nt, Homo sapiens
  misc_RNA (1)...(19): siRNA sense strand
gcccagguguacaaugaca

SEQ ID NO: 632234 - RNA, 19 nt, Homo sapiens
  misc_RNA (1)...(19): siRNA sense strand
ggcaccagcguguccuaua

SEQ ID NO: 632235 - RNA, 19 nt, Homo sapiens
  misc_RNA (1)...(19): siRNA sense strand
agacucaguuucgaaaugg

SEQ ID NO: 632236 - RNA, 19 nt, Homo sapiens
  misc_RNA (1)...(19): siRNA sense strand
cuucaacaaugccaccaau

SEQ ID NO: 632237 - RNA, 19 nt, Homo sapiens
  misc_RNA (1)...(19): siRNA sense strand
auaauagggcccaggauau

SEQ ID NO: 632238 - RNA, 19 nt, Homo sapiens
  misc_RNA (1)...(19): siRNA sense strand
acaguggaaggacaugaua

SEQ ID NO: 632239 - RNA, 19 nt, Homo sapiens
  misc_RNA (1)...(19): siRNA sense strand
ccucuacuccuccuucuuc

SEQ ID NO: 632240 - RNA, 19 nt, Homo sapiens
  misc_RNA (1)...(19): siRNA sense strand
gagauguucgggagcaugu

SEQ ID NO: 632241 - RNA, 19 nt, Homo sapiens
  misc_RNA (1)...(19): siRNA sense strand
ucgcagcuacugggacuua

SEQ ID NO: 632242 - RNA, 19 nt, Homo sapiens
  misc_RNA (1)...(19): siRNA sense strand
cgacucagaggaggacauu

SEQ ID NO: 632243 - RNA, 19 nt, Homo sapiens
  misc_RNA (1)...(19): siRNA sense strand
augcccagguguacaauga

SEQ ID NO: 632244 - RNA, 19 nt, Homo sapiens
  misc_RNA (1)...(19): siRNA sense strand
ggagaaugaggcccacaca

SEQ ID NO: 632245 - RNA, 19 nt, Homo sapiens
  misc_RNA (1)...(19): siRNA sense strand
aaucccaagaccuauaaua

SEQ ID NO: 632246 - RNA, 19 nt, Homo sapiens
  misc_RNA (1)...(19): siRNA sense strand
ucaccgccaucauccagau

SEQ ID NO: 632247 - RNA, 19 nt, Homo sapiens
  misc_RNA (1)...(19): siRNA sense strand
uaauagggcccaggauauc

SEQ ID NO: 632248 - RNA, 19 nt, Homo sapiens
  misc_RNA (1)...(19): siRNA sense strand
caagauuaaagacuacauc

SEQ ID NO: 632249 - RNA, 19 nt, Homo sapiens
  misc_RNA (1)...(19): siRNA sense strand
cagguaccuuugccguuau

SEQ ID NO: 632250 - RNA, 19 nt, Homo sapiens
  misc_RNA (1)...(19): siRNA sense strand
ucgcaaugccuucagaugu

SEQ ID NO: 632251 - RNA, 19 nt, Homo sapiens
  misc_RNA (1)...(19): siRNA sense strand
agaacucccucaagcaacu

SEQ ID NO: 632252 - RNA, 19 nt, Homo sapiens
  misc_RNA (1)...(19): siRNA sense strand
uguauccucucccuaaguc

SEQ ID NO: 632253 - RNA, 19 nt, Homo sapiens
  misc_RNA (1)...(19): siRNA sense strand
ggccugcagauccugauuu

SEQ ID NO: 632254 - RNA, 19 nt, Homo sapiens
  misc_RNA (1)...(19): siRNA sense strand
caggguccaucgucuuuac

SEQ ID NO: 632255 - RNA, 19 nt, Homo sapiens
  misc_RNA (1)...(19): siRNA sense strand
gcagcuacugggacuuaga

SEQ ID NO: 632256 - RNA, 19 nt, Homo sapiens
  misc_RNA (1)...(19): siRNA sense strand
ucucuacuuugccaacuca

SEQ ID NO: 632257 - RNA, 19 nt, Homo sapiens
  misc_RNA (1)...(19): siRNA sense strand
cacaaggcauggcauuugc

SEQ ID NO: 632258 - RNA, 19 nt, Homo sapiens
  misc_RNA (1)...(19): siRNA sense strand
ucgcucaucuucgcucuca

SEQ ID NO: 632259 - RNA, 19 nt, Homo sapiens
  misc_RNA (1)...(19): siRNA sense strand
gguccaucgucuuuaccuu

SEQ ID NO: 632260 - RNA, 19 nt, Homo sapiens
  misc_RNA (1)...(19): siRNA sense strand
ccugguggguaacaucugu

SEQ ID NO: 632261 - RNA, 19 nt, Homo sapiens
  misc_RNA (1)...(19): siRNA sense strand
agaaugaggcccacacaac

SEQ ID NO: 632262 - RNA, 19 nt, Homo sapiens
  misc_RNA (1)...(19): siRNA sense strand
ucaagaacucccucaagca

SEQ ID NO: 632263 - RNA, 19 nt, Homo sapiens
  misc_RNA (1)...(19): siRNA sense strand
gcucaucuucgcucucauc

SEQ ID NO: 632264 - RNA, 19 nt, Homo sapiens
  misc_RNA (1)...(19): siRNA sense strand
gagaagaaggaccggacau

SEQ ID NO: 632265 - RNA, 19 nt, Homo sapiens
  misc_RNA (1)...(19): siRNA sense strand
gaucaaagcugugguguuu

SEQ ID NO: 632266 - RNA, 19 nt, Homo sapiens
  misc_RNA (1)...(19): siRNA sense strand
ucagagaucuucaggcaaa

SEQ ID NO: 632267 - RNA, 19 nt, Homo sapiens
  misc_RNA (1)...(19): siRNA sense strand
gaggaggucucuauucaug

SEQ ID NO: 632268 - RNA, 19 nt, Homo sapiens
  misc_RNA (1)...(19): siRNA sense strand
ccagguaccuuugccguua

SEQ ID NO: 632269 - RNA, 19 nt, Homo sapiens
  misc_RNA (1)...(19): siRNA sense strand
gcacgucuuucccagcaua

SEQ ID NO: 632270 - RNA, 19 nt, Homo sapiens
  misc_RNA (1)...(19): siRNA sense strand
ggaggucucuauucaugaa

SEQ ID NO: 632271 - RNA, 19 nt, Homo sapiens
  misc_RNA (1)...(19): siRNA sense strand
gcaccagcguguccuauau

SEQ ID NO: 632272 - RNA, 19 nt, Homo sapiens
  misc_RNA (1)...(19): siRNA sense strand
gcucaaugcucgcuacaug

SEQ ID NO: 632273 - RNA, 19 nt, Homo sapiens
  misc_RNA (1)...(19): siRNA sense strand
ggagagaaacuucgcaaug

SEQ ID NO: 632274 - RNA, 19 nt, Homo sapiens
  misc_RNA (1)...(19): siRNA sense strand
ugauuucggugcucaagua

SEQ ID NO: 632275 - RNA, 19 nt, Homo sapiens
  misc_RNA (1)...(19): siRNA sense strand
agagcaagcuggacuguug

SEQ ID NO: 632276 - RNA, 19 nt, Homo sapiens
  misc_RNA (1)...(19): siRNA sense strand
gagagaaacuucgcaaugc

SEQ ID NO: 632277 - RNA, 19 nt, Homo sapiens
  misc_RNA (1)...(19): siRNA sense strand
ggauggagcuggaggaaaa

SEQ ID NO: 632278 - RNA, 19 nt, Homo sapiens
  misc_RNA (1)...(19): siRNA sense strand
cauggacacugacauuuau

SEQ ID NO: 632279 - RNA, 19 nt, Homo sapiens
  misc_RNA (1)...(19): siRNA sense strand
ccaaguacaagauuaaaga

SEQ ID NO: 632280 - RNA, 19 nt, Homo sapiens
  misc_RNA (1)...(19): siRNA sense strand
caccuugacuuccagcuuu

SEQ ID NO: 632281 - RNA, 19 nt, Homo sapiens
  misc_RNA (1)...(19): siRNA sense strand
augcugagcucuccuugua

SEQ ID NO: 632282 - RNA, 19 nt, Homo sapiens
  misc_RNA (1)...(19): siRNA sense strand
uauaauagggcccaggaua

SEQ ID NO: 632283 - RNA, 19 nt, Homo sapiens
  misc_RNA (1)...(19): siRNA sense strand
gcuacgacguggauucgaa

SEQ ID NO: 632284 - RNA, 19 nt, Homo sapiens
  misc_RNA (1)...(19): siRNA sense strand
cagcaggacuuugagaaug

SEQ ID NO: 632285 - RNA, 19 nt, Homo sapiens
  misc_RNA (1)...(19): siRNA sense strand
gaaugaggcccacacaaca

SEQ ID NO: 632286 - RNA, 19 nt, Homo sapiens
  misc_RNA (1)...(19): siRNA sense strand
ucauggacacugacauuua

SEQ ID NO: 632287 - RNA, 19 nt, Homo sapiens
  misc_RNA (1)...(19): siRNA sense strand
caagaacucccucaagcaa

SEQ ID NO: 632288 - RNA, 19 nt, Homo sapiens
  misc_RNA (1)...(19): siRNA sense strand
caaccuuccugcagucaau

SEQ ID NO: 632289 - RNA, 19 nt, Homo sapiens
  misc_RNA (1)...(19): siRNA sense strand
gcaaugccuucagauguuc

SEQ ID NO: 632290 - RNA, 19 nt, Homo sapiens
  misc_RNA (1)...(19): siRNA sense strand
caggagaagcggagaauga

SEQ ID NO: 632291 - RNA, 19 nt, Homo sapiens
  misc_RNA (1)...(19): siRNA sense strand
acgaugaguuugagaagaa

SEQ ID NO: 632292 - RNA, 19 nt, Homo sapiens
  misc_RNA (1)...(19): siRNA sense strand
guacaagauuaaagacuac

SEQ ID NO: 632293 - RNA, 19 nt, Homo sapiens
  misc_RNA (1)...(19): siRNA sense strand
ucaacaaugccaccaauga

SEQ ID NO: 632294 - RNA, 19 nt, Homo sapiens
  misc_RNA (1)...(19): siRNA sense strand
gugcuggccugcuguacaa

SEQ ID NO: 632295 - RNA, 19 nt, Homo sapiens
  misc_RNA (1)...(19): siRNA sense strand
cgcaaugccuucagauguu

SEQ ID NO: 632296 - RNA, 19 nt, Homo sapiens
  misc_RNA (1)...(19): siRNA sense strand
ggacuuagagcaggagaug

SEQ ID NO: 632297 - RNA, 19 nt, Homo sapiens
  misc_RNA (1)...(19): siRNA sense strand
caacaucgccucgcucauc

SEQ ID NO: 632298 - RNA, 19 nt, Homo sapiens
  misc_RNA (1)...(19): siRNA sense strand
ccacaaggcauggcauuug

SEQ ID NO: 632299 - RNA, 19 nt, Homo sapiens
  misc_RNA (1)...(19): siRNA sense strand
cagacucaguuucgaaaug

SEQ ID NO: 632300 - RNA, 19 nt, Homo sapiens
  misc_RNA (1)...(19): siRNA sense strand
gaaggacaaguacaacugu

SEQ ID NO: 632301 - RNA, 19 nt, Homo sapiens
  misc_RNA (1)...(19): siRNA sense strand
gaagaaggaccggacauac

SEQ ID NO: 632302 - RNA, 19 nt, Homo sapiens
  misc_RNA (1)...(19): siRNA sense strand
gacgaugaguuugagaaga

SEQ ID NO: 632303 - RNA, 19 nt, Homo sapiens
  misc_RNA (1)...(19): siRNA sense strand
ccucuucgacgaugaguuu

SEQ ID NO: 632304 - RNA, 19 nt, Homo sapiens
  misc_RNA (1)...(19): siRNA sense strand
gauggugccagguaccuuu

SEQ ID NO: 632305 - RNA, 19 nt, Homo sapiens
  misc_RNA (1)...(19): siRNA sense strand
ggaugggagucuagaaugc

SEQ ID NO: 632306 - RNA, 19 nt, Homo sapiens
  misc_RNA (1)...(19): siRNA sense strand
gcagaucgugggagaaauc

SEQ ID NO: 632307 - RNA, 19 nt, Homo sapiens
  misc_RNA (1)...(19): siRNA sense strand
caucgucuuuaccuucauu

SEQ ID NO: 632308 - RNA, 19 nt, Homo sapiens
  misc_RNA (1)...(19): siRNA sense strand
gcagcaggacuuugagaau

SEQ ID NO: 632309 - RNA, 19 nt, Homo sapiens
  misc_RNA (1)...(19): siRNA sense strand
gaaauuccaggucuucaac

SEQ ID NO: 632310 - RNA, 19 nt, Homo sapiens
  misc_RNA (1)...(19): siRNA sense strand
gauguucgggagcauguuu

SEQ ID NO: 632311 - RNA, 19 nt, Homo sapiens
  misc_RNA (1)...(19): siRNA sense strand
gaggaugggagucuagaau

SEQ ID NO: 632312 - RNA, 19 nt, Homo sapiens
  misc_RNA (1)...(19): siRNA sense strand
agaagaaggaccggacaua

SEQ ID NO: 632313 - RNA, 19 nt, Homo sapiens
  misc_RNA (1)...(19): siRNA sense strand
ugaaucccaagaccuauaa

SEQ ID NO: 632314 - RNA, 19 nt, Homo sapiens
  misc_RNA (1)...(19): siRNA sense strand
gaucgugggagaaauccaa

SEQ ID NO: 632315 - RNA, 19 nt, Homo sapiens
  misc_RNA (1)...(19): siRNA sense strand
gugaaucccaagaccuaua

SEQ ID NO: 632316 - RNA, 19 nt, Homo sapiens
  misc_RNA (1)...(19): siRNA sense strand
ucagcauccugguggguaa

SEQ ID NO: 632317 - RNA, 19 nt, Homo sapiens
  misc_RNA (1)...(19): siRNA sense strand
uucuuuggcuccuucuuua

SEQ ID NO: 632318 - RNA, 19 nt, Homo sapiens
  misc_RNA (1)...(19): siRNA sense strand
gcucucggcugcagcaacu

SEQ ID NO: 632319 - RNA, 19 nt, Homo sapiens
  misc_RNA (1)...(19): siRNA sense strand
caacaaugccaccaaugag

SEQ ID NO: 632320 - RNA, 19 nt, Homo sapiens
  misc_RNA (1)...(19): siRNA sense strand
ccugaucgcugucaaucuc

SEQ ID NO: 632321 - RNA, 19 nt, Homo sapiens
  misc_RNA (1)...(19): siRNA sense strand
gucuuuaccuucauugaca

SEQ ID NO: 632322 - RNA, 19 nt, Homo sapiens
  misc_RNA (1)...(19): siRNA sense strand
gagaaugaggcccacacaa

SEQ ID NO: 632323 - RNA, 19 nt, Homo sapiens
  misc_RNA (1)...(19): siRNA sense strand
ccuacuaccuguggaggaa

SEQ ID NO: 632324 - RNA, 19 nt, Homo sapiens
  misc_RNA (1)...(19): siRNA sense strand
gucauuugcugugcgcuuu

SEQ ID NO: 632325 - RNA, 19 nt, Homo sapiens
  misc_RNA (1)...(19): siRNA sense strand
cauacucccuuacccucuu

SEQ ID NO: 632326 - RNA, 19 nt, Homo sapiens
  misc_RNA (1)...(19): siRNA sense strand
uuccaggucuucaacaaug

SEQ ID NO: 632327 - RNA, 19 nt, Homo sapiens
  misc_RNA (1)...(19): siRNA sense strand
ccacaucugcccuguccuu

SEQ ID NO: 632328 - RNA, 19 nt, Homo sapiens
  misc_RNA (1)...(19): siRNA sense strand
agaaugcaagcacgucuuu

SEQ ID NO: 632329 - RNA, 19 nt, Homo sapiens
  misc_RNA (1)...(19): siRNA sense strand
gcaucuggguagugagcuu

SEQ ID NO: 632330 - RNA, 19 nt, Homo sapiens
  misc_RNA (1)...(19): siRNA sense strand
aagcuggacuguugcaucu

SEQ ID NO: 632331 - RNA, 19 nt, Homo sapiens
  misc_RNA (1)...(19): siRNA sense strand
gaagagcaagcuggacugu

SEQ ID NO: 632332 - RNA, 19 nt, Homo sapiens
  misc_RNA (1)...(19): siRNA sense strand
cgaaauuccaggucuucaa

SEQ ID NO: 632333 - RNA, 19 nt, Homo sapiens
  misc_RNA (1)...(19): siRNA sense strand
uuaccuucauugacauuug

SEQ ID NO: 632334 - RNA, 19 nt, Homo sapiens
  misc_RNA (1)...(19): siRNA sense strand
aaguacaucuucggacuga

SEQ ID NO: 632335 - RNA, 19 nt, Homo sapiens
  misc_RNA (1)...(19): siRNA sense strand
gccugcagauccugauuuc

SEQ ID NO: 632336 - RNA, 19 nt, Homo sapiens
  misc_RNA (1)...(19): siRNA sense strand
acaugacgcaguccucuuu

SEQ ID NO: 632337 - RNA, 19 nt, Homo sapiens
  misc_RNA (1)...(19): siRNA sense strand
gcccagguguacaaugaca

SEQ ID NO: 632338 - RNA, 19 nt, Homo sapiens
  misc_RNA (1)...(19): siRNA sense strand
ggcaccagcguguccuaua

SEQ ID NO: 632339 - RNA, 19 nt, Homo sapiens
  misc_RNA (1)...(19): siRNA sense strand
agacucaguuucgaaaugg

SEQ ID NO: 632340 - RNA, 19 nt, Homo sapiens
  misc_RNA (1)...(19): siRNA sense strand
cuucaacaaugccaccaau

SEQ ID NO: 632341 - RNA, 19 nt, Homo sapiens
  misc_RNA (1)...(19): siRNA sense strand
auaauagggcccaggauau

SEQ ID NO: 632342 - RNA, 19 nt, Homo sapiens
  misc_RNA (1)...(19): siRNA sense strand
acaguggaaggacaugaua

SEQ ID NO: 632343 - RNA, 19 nt, Homo sapiens
  misc_RNA (1)...(19): siRNA sense strand
ccucuacuccuccuucuuc

SEQ ID NO: 632344 - RNA, 19 nt, Homo sapiens
  misc_RNA (1)...(19): siRNA sense strand
gagauguucgggagcaugu

SEQ ID NO: 632345 - RNA, 19 nt, Homo sapiens
  misc_RNA (1)...(19): siRNA sense strand
ucgcagcuacugggacuua

SEQ ID NO: 632346 - RNA, 19 nt, Homo sapiens
  misc_RNA (1)...(19): siRNA sense strand
cgacucagaggaggacauu

SEQ ID NO: 632347 - RNA, 19 nt, Homo sapiens
  misc_RNA (1)...(19): siRNA sense strand
augcccagguguacaauga

SEQ ID NO: 632348 - RNA, 19 nt, Homo sapiens
  misc_RNA (1)...(19): siRNA sense strand
ggagaaugaggcccacaca

SEQ ID NO: 632349 - RNA, 19 nt, Homo sapiens
  misc_RNA (1)...(19): siRNA sense strand
aaucccaagaccuauaaua

SEQ ID NO: 632350 - RNA, 19 nt, Homo sapiens
  misc_RNA (1)...(19): siRNA sense strand
ucaccgccaucauccagau

SEQ ID NO: 632351 - RNA, 19 nt, Homo sapiens
  misc_RNA (1)...(19): siRNA sense strand
caagauuaaagacuacauc

SEQ ID NO: 632352 - RNA, 19 nt, Homo sapiens
  misc_RNA (1)...(19): siRNA sense strand
uaauagggcccaggauauc

SEQ ID NO: 632353 - RNA, 19 nt, Homo sapiens
  misc_RNA (1)...(19): siRNA sense strand
cagguaccuuugccguuau

SEQ ID NO: 632354 - RNA, 19 nt, Homo sapiens
  misc_RNA (1)...(19): siRNA sense strand
ucgcaaugccuucagaugu

SEQ ID NO: 632355 - RNA, 19 nt, Homo sapiens
  misc_RNA (1)...(19): siRNA sense strand
agaacucccucaagcaacu

SEQ ID NO: 632356 - RNA, 19 nt, Homo sapiens
  misc_RNA (1)...(19): siRNA sense strand
uguauccucucccuaaguc

SEQ ID NO: 632357 - RNA, 19 nt, Homo sapiens
  misc_RNA (1)...(19): siRNA sense strand
ggccugcagauccugauuu

SEQ ID NO: 632358 - RNA, 19 nt, Homo sapiens
  misc_RNA (1)...(19): siRNA sense strand
caggguccaucgucuuuac

SEQ ID NO: 632359 - RNA, 19 nt, Homo sapiens
  misc_RNA (1)...(19): siRNA sense strand
gcagcuacugggacuuaga

SEQ ID NO: 632360 - RNA, 19 nt, Homo sapiens
  misc_RNA (1)...(19): siRNA sense strand
cacaaggcauggcauuugc

SEQ ID NO: 632361 - RNA, 19 nt, Homo sapiens
  misc_RNA (1)...(19): siRNA sense strand
ucucuacuuugccaacuca

SEQ ID NO: 632362 - RNA, 19 nt, Homo sapiens
  misc_RNA (1)...(19): siRNA sense strand
ucgcucaucuucgcucuca

SEQ ID NO: 632363 - RNA, 19 nt, Homo sapiens
  misc_RNA (1)...(19): siRNA sense strand
gguccaucgucuuuaccuu

SEQ ID NO: 632364 - RNA, 19 nt, Homo sapiens
  misc_RNA (1)...(19): siRNA sense strand
aaacagaaggacaaguaca

SEQ ID NO: 632365 - RNA, 19 nt, Homo sapiens
  misc_RNA (1)...(19): siRNA sense strand
cuacagugcuucuuagaua

SEQ ID NO: 632366 - RNA, 19 nt, Homo sapiens
  misc_RNA (1)...(19): siRNA sense strand
ggaauuccuuggcuguuua

SEQ ID NO: 632367 - RNA, 19 nt, Homo sapiens
  misc_RNA (1)...(19): siRNA sense strand
aaucuaagcuguugucuga

SEQ ID NO: 632368 - RNA, 19 nt, Homo sapiens
  misc_RNA (1)...(19): siRNA sense strand
gaagagaauggaacgguua

SEQ ID NO: 632369 - RNA, 19 nt, Homo sapiens
  misc_RNA (1)...(19): siRNA sense strand
gaaaucaauuggagaaugg

SEQ ID NO: 632370 - RNA, 19 nt, Homo sapiens
  misc_RNA (1)...(19): siRNA sense strand
ggaaaucaauuggagaaug

SEQ ID NO: 632371 - RNA, 19 nt, Homo sapiens
  misc_RNA (1)...(19): siRNA sense strand
ggaagcagcaucuccuuaa

SEQ ID NO: 632372 - RNA, 19 nt, Homo sapiens
  misc_RNA (1)...(19): siRNA sense strand
gaagcagcaucuccuuaaa

SEQ ID NO: 632373 - RNA, 19 nt, Homo sapiens
  misc_RNA (1)...(19): siRNA sense strand
cagaugagcugguauggau

SEQ ID NO: 632374 - RNA, 19 nt, Homo sapiens
  misc_RNA (1)...(19): siRNA sense strand
acaaauggguguaggagaa

SEQ ID NO: 632375 - RNA, 19 nt, Homo sapiens
  misc_RNA (1)...(19): siRNA sense strand
ggaggaagauuuugagauu

SEQ ID NO: 632376 - RNA, 19 nt, Homo sapiens
  misc_RNA (1)...(19): siRNA sense strand
ucuaagcuguugucugaua

SEQ ID NO: 632377 - RNA, 19 nt, Homo sapiens
  misc_RNA (1)...(19): siRNA sense strand
acacuggccucccuuugua

SEQ ID NO: 632378 - RNA, 19 nt, Homo sapiens
  misc_RNA (1)...(19): siRNA sense strand
aagaacaacccaaagaaua

SEQ ID NO: 632379 - RNA, 19 nt, Homo sapiens
  misc_RNA (1)...(19): siRNA sense strand
gcuguugucugauauaagu

SEQ ID NO: 632380 - RNA, 19 nt, Homo sapiens
  misc_RNA (1)...(19): siRNA sense strand
ggagaagggaaaucaauug

SEQ ID NO: 632381 - RNA, 19 nt, Homo sapiens
  misc_RNA (1)...(19): siRNA sense strand
gcucaagcccuuaucugua

SEQ ID NO: 632382 - RNA, 19 nt, Homo sapiens
  misc_RNA (1)...(19): siRNA sense strand
gguguagccuuguucagaa

SEQ ID NO: 632383 - RNA, 19 nt, Homo sapiens
  misc_RNA (1)...(19): siRNA sense strand
uauaagugcucgucuaugg

SEQ ID NO: 632384 - RNA, 19 nt, Homo sapiens
  misc_RNA (1)...(19): siRNA sense strand
gugacgagcucaucuucuu

SEQ ID NO: 632385 - RNA, 19 nt, Homo sapiens
  misc_RNA (1)...(19): siRNA sense strand
gauauaagugcucgucuau

SEQ ID NO: 632386 - RNA, 19 nt, Homo sapiens
  misc_RNA (1)...(19): siRNA sense strand
aaaccuggauccuucaguu

SEQ ID NO: 632387 - RNA, 19 nt, Homo sapiens
  misc_RNA (1)...(19): siRNA sense strand
ugauauaagugcucgucua

SEQ ID NO: 632388 - RNA, 19 nt, Homo sapiens
  misc_RNA (1)...(19): siRNA sense strand
acacaguggucauugaaga

SEQ ID NO: 632389 - RNA, 19 nt, Homo sapiens
  misc_RNA (1)...(19): siRNA sense strand
gagcugguauggaucuuag

SEQ ID NO: 632390 - RNA, 19 nt, Homo sapiens
  misc_RNA (1)...(19): siRNA sense strand
gaaugaacauccuaaaccu

SEQ ID NO: 632391 - RNA, 19 nt, Homo sapiens
  misc_RNA (1)...(19): siRNA sense strand
cugacuaccuagaagaaua

SEQ ID NO: 632392 - RNA, 19 nt, Homo sapiens
  misc_RNA (1)...(19): siRNA sense strand
ugacaggccucccgauucu

SEQ ID NO: 632393 - RNA, 19 nt, Homo sapiens
  misc_RNA (1)...(19): siRNA sense strand
uaacugguguagccuuguu

SEQ ID NO: 632394 - RNA, 19 nt, Homo sapiens
  misc_RNA (1)...(19): siRNA sense strand
gggaagcagcaucuccuua

SEQ ID NO: 632395 - RNA, 19 nt, Homo sapiens
  misc_RNA (1)...(19): siRNA sense strand
ggaguuugaucuggaggaa

SEQ ID NO: 632396 - RNA, 19 nt, Homo sapiens
  misc_RNA (1)...(19): siRNA sense strand
cauccuacagugcuucuua

SEQ ID NO: 632397 - RNA, 19 nt, Homo sapiens
  misc_RNA (1)...(19): siRNA sense strand
gcucgucuaugguuuacau

SEQ ID NO: 632398 - RNA, 19 nt, Homo sapiens
  misc_RNA (1)...(19): siRNA sense strand
gagaauggaacgguuaaug

SEQ ID NO: 632399 - RNA, 19 nt, Homo sapiens
  misc_RNA (1)...(19): siRNA sense strand
gcuacucuauccaucaaau

SEQ ID NO: 632400 - RNA, 19 nt, Homo sapiens
  misc_RNA (1)...(19): siRNA sense strand
aaagauuguugcuacucua

SEQ ID NO: 632401 - RNA, 19 nt, Homo sapiens
  misc_RNA (1)...(19): siRNA sense strand
gcccuuaucuguagacacu

SEQ ID NO: 632402 - RNA, 19 nt, Homo sapiens
  misc_RNA (1)...(19): siRNA sense strand
uaacacaguggucauugaa

SEQ ID NO: 632403 - RNA, 19 nt, Homo sapiens
  misc_RNA (1)...(19): siRNA sense strand
agaauggaacgguuaauga

SEQ ID NO: 632404 - RNA, 19 nt, Homo sapiens
  misc_RNA (1)...(19): siRNA sense strand
agauacagaugagcuggua

SEQ ID NO: 632405 - RNA, 19 nt, Homo sapiens
  misc_RNA (1)...(19): siRNA sense strand
caaguaugaagaucagauu

SEQ ID NO: 632406 - RNA, 19 nt, Homo sapiens
  misc_RNA (1)...(19): siRNA sense strand
aaggagaauuuaaggaugu

SEQ ID NO: 632407 - RNA, 19 nt, Homo sapiens
  misc_RNA (1)...(19): siRNA sense strand
uggaauuccuuggcuguuu

SEQ ID NO: 632408 - RNA, 19 nt, Homo sapiens
  misc_RNA (1)...(19): siRNA sense strand
ggacuggagcugggagaaa

SEQ ID NO: 632409 - RNA, 19 nt, Homo sapiens
  misc_RNA (1)...(19): siRNA sense strand
ggauaacacaguggucauu

SEQ ID NO: 632410 - RNA, 19 nt, Homo sapiens
  misc_RNA (1)...(19): siRNA sense strand
gauaacacaguggucauug

SEQ ID NO: 632411 - RNA, 19 nt, Homo sapiens
  misc_RNA (1)...(19): siRNA sense strand
cagaauucauugacucuac

SEQ ID NO: 632412 - RNA, 19 nt, Homo sapiens
  misc_RNA (1)...(19): siRNA sense strand
gagaauuuaaggauguuug

SEQ ID NO: 632413 - RNA, 19 nt, Homo sapiens
  misc_RNA (1)...(19): siRNA sense strand
aaagaacaacccaaagaau

SEQ ID NO: 632414 - RNA, 19 nt, Homo sapiens
  misc_RNA (1)...(19): siRNA sense strand
caucaaauggcacaaaugg

SEQ ID NO: 632415 - RNA, 19 nt, Homo sapiens
  misc_RNA (1)...(19): siRNA sense strand
aagcuguugucugauauaa

SEQ ID NO: 632416 - RNA, 19 nt, Homo sapiens
  misc_RNA (1)...(19): siRNA sense strand
gaccuuuguugacacugaa

SEQ ID NO: 632417 - RNA, 19 nt, Homo sapiens
  misc_RNA (1)...(19): siRNA sense strand
guaugaagaucagauuacu

SEQ ID NO: 632418 - RNA, 19 nt, Homo sapiens
  misc_RNA (1)...(19): siRNA sense strand
uaagugcucgucuaugguu

SEQ ID NO: 632419 - RNA, 19 nt, Homo sapiens
  misc_RNA (1)...(19): siRNA sense strand
uuccuuggcuguuuauguu

SEQ ID NO: 632420 - RNA, 19 nt, Homo sapiens
  misc_RNA (1)...(19): siRNA sense strand
auaacacaguggucauuga

SEQ ID NO: 632421 - RNA, 19 nt, Homo sapiens
  misc_RNA (1)...(19): siRNA sense strand
ggugacaggccucccgauu

SEQ ID NO: 632422 - RNA, 19 nt, Homo sapiens
  misc_RNA (1)...(19): siRNA sense strand
gaauggaacgguuaaugac

SEQ ID NO: 632423 - RNA, 19 nt, Homo sapiens
  misc_RNA (1)...(19): siRNA sense strand
cucaagcccuuaucuguag

SEQ ID NO: 632424 - RNA, 19 nt, Homo sapiens
  misc_RNA (1)...(19): siRNA sense strand
ugaccagacuuuccauugc

SEQ ID NO: 632425 - RNA, 19 nt, Homo sapiens
  misc_RNA (1)...(19): siRNA sense strand
gagaagggaaaucaauugg

SEQ ID NO: 632426 - RNA, 19 nt, Homo sapiens
  misc_RNA (1)...(19): siRNA sense strand
cuaagcuguugucugauau

SEQ ID NO: 632427 - RNA, 19 nt, Homo sapiens
  misc_RNA (1)...(19): siRNA sense strand
aguuugaucuggaggaaga

SEQ ID NO: 632428 - RNA, 19 nt, Homo sapiens
  misc_RNA (1)...(19): siRNA sense strand
agaccuuuguugacacuga

SEQ ID NO: 632429 - RNA, 19 nt, Homo sapiens
  misc_RNA (1)...(19): siRNA sense strand
gcagaauucauugacucua

SEQ ID NO: 632430 - RNA, 19 nt, Homo sapiens
  misc_RNA (1)...(19): siRNA sense strand
ugacuaccuagaagaauau

SEQ ID NO: 632431 - RNA, 19 nt, Homo sapiens
  misc_RNA (1)...(19): siRNA sense strand
cagcgaaugaacauccuaa

SEQ ID NO: 632432 - RNA, 19 nt, Homo sapiens
  misc_RNA (1)...(19): siRNA sense strand
ccuuaucuguagacacuug

SEQ ID NO: 632433 - RNA, 19 nt, Homo sapiens
  misc_RNA (1)...(19): siRNA sense strand
uaagcuguugucugauaua

SEQ ID NO: 632434 - RNA, 19 nt, Homo sapiens
  misc_RNA (1)...(19): siRNA sense strand
cauacaacccagaccuuug

SEQ ID NO: 632435 - RNA, 19 nt, Homo sapiens
  misc_RNA (1)...(19): siRNA sense strand
agaacaacccaaagaauac

SEQ ID NO: 632436 - RNA, 19 nt, Homo sapiens
  misc_RNA (1)...(19): siRNA sense strand
ucauacaacccagaccuuu

SEQ ID NO: 632437 - RNA, 19 nt, Homo sapiens
  misc_RNA (1)...(19): siRNA sense strand
acaggccucccgauucuuu

SEQ ID NO: 632438 - RNA, 19 nt, Homo sapiens
  misc_RNA (1)...(19): siRNA sense strand
acaguggucauugaagaua

SEQ ID NO: 632439 - RNA, 19 nt, Homo sapiens
  misc_RNA (1)...(19): siRNA sense strand
ucaauuggagaaugguuug

SEQ ID NO: 632440 - RNA, 19 nt, Homo sapiens
  misc_RNA (1)...(19): siRNA sense strand
gacuggagcugggagaaac

SEQ ID NO: 632441 - RNA, 19 nt, Homo sapiens
  misc_RNA (1)...(19): siRNA sense strand
cauugacucuacugagcaa

SEQ ID NO: 632442 - RNA, 19 nt, Homo sapiens
  misc_RNA (1)...(19): siRNA sense strand
ucacugacuaccuagaaga

SEQ ID NO: 632443 - RNA, 19 nt, Homo sapiens
  misc_RNA (1)...(19): siRNA sense strand
cgaaugaacauccuaaacc

SEQ ID NO: 632444 - RNA, 19 nt, Homo sapiens
  misc_RNA (1)...(19): siRNA sense strand
uguugacacugaagagaau

SEQ ID NO: 632445 - RNA, 19 nt, Homo sapiens
  misc_RNA (1)...(19): siRNA sense strand
gauuguugcuacucuaucc

SEQ ID NO: 632446 - RNA, 19 nt, Homo sapiens
  misc_RNA (1)...(19): siRNA sense strand
gaauuaguucagaaacauc

SEQ ID NO: 632447 - RNA, 19 nt, Homo sapiens
  misc_RNA (1)...(19): siRNA sense strand
ccuagaagaauauccagau

SEQ ID NO: 632448 - RNA, 19 nt, Homo sapiens
  misc_RNA (1)...(19): siRNA sense strand
caguggucauugaagauau

SEQ ID NO: 632449 - RNA, 19 nt, Homo sapiens
  misc_RNA (1)...(19): siRNA sense strand
ccaaguaugaagaucagau

SEQ ID NO: 632450 - RNA, 19 nt, Homo sapiens
  misc_RNA (1)...(19): siRNA sense strand
gcgaaugaacauccuaaac

SEQ ID NO: 632451 - RNA, 19 nt, Homo sapiens
  misc_RNA (1)...(19): siRNA sense strand
gugacaggccucccgauuc

SEQ ID NO: 632452 - RNA, 19 nt, Homo sapiens
  misc_RNA (1)...(19): siRNA sense strand
uaggagaagggaaaucaau

SEQ ID NO: 632453 - RNA, 19 nt, Homo sapiens
  misc_RNA (1)...(19): siRNA sense strand
ggguguaggagaagggaaa

SEQ ID NO: 632454 - RNA, 19 nt, Homo sapiens
  misc_RNA (1)...(19): siRNA sense strand
uacagugcuucuuagauag

SEQ ID NO: 632455 - RNA, 19 nt, Homo sapiens
  misc_RNA (1)...(19): siRNA sense strand
gaauuccuuggcuguuuau

SEQ ID NO: 632456 - RNA, 19 nt, Homo sapiens
  misc_RNA (1)...(19): siRNA sense strand
agaauaccaacgcauccua

SEQ ID NO: 632457 - RNA, 19 nt, Homo sapiens
  misc_RNA (1)...(19): siRNA sense strand
acccagaccuuuguugaca

SEQ ID NO: 632458 - RNA, 19 nt, Homo sapiens
  misc_RNA (1)...(19): siRNA sense strand
cuguuuauguuucaaugga

SEQ ID NO: 632459 - RNA, 19 nt, Homo sapiens
  misc_RNA (1)...(19): siRNA sense strand
uacaguugcacagguguua

SEQ ID NO: 632460 - RNA, 19 nt, Homo sapiens
  misc_RNA (1)...(19): siRNA sense strand
gaugagcugguauggaucu

SEQ ID NO: 632461 - RNA, 19 nt, Homo sapiens
  misc_RNA (1)...(19): siRNA sense strand
guaggagaagggaaaucaa

SEQ ID NO: 632462 - RNA, 19 nt, Homo sapiens
  misc_RNA (1)...(19): siRNA sense strand
caguugcacagguguuaaa

SEQ ID NO: 632463 - RNA, 19 nt, Homo sapiens
  misc_RNA (1)...(19): siRNA sense strand
ggagaauuuaaggauguuu

SEQ ID NO: 632464 - RNA, 19 nt, Homo sapiens
  misc_RNA (1)...(19): siRNA sense strand
ugguuuacauacagaagga

SEQ ID NO: 632465 - RNA, 19 nt, Homo sapiens
  misc_RNA (1)...(19): siRNA sense strand
cuacagugcuucuuagaua

SEQ ID NO: 632466 - RNA, 19 nt, Homo sapiens
  misc_RNA (1)...(19): siRNA sense strand
ggaauuccuuggcuguuua

SEQ ID NO: 632467 - RNA, 19 nt, Homo sapiens
  misc_RNA (1)...(19): siRNA sense strand
aaucuaagcuguugucuga

SEQ ID NO: 632468 - RNA, 19 nt, Homo sapiens
  misc_RNA (1)...(19): siRNA sense strand
gaagagaauggaacgguua

SEQ ID NO: 632469 - RNA, 19 nt, Homo sapiens
  misc_RNA (1)...(19): siRNA sense strand
gaaaucaauuggagaaugg

SEQ ID NO: 632470 - RNA, 19 nt, Homo sapiens
  misc_RNA (1)...(19): siRNA sense strand
ggaaaucaauuggagaaug

SEQ ID NO: 632471 - RNA, 19 nt, Homo sapiens
  misc_RNA (1)...(19): siRNA sense strand
ggaagcagcaucuccuuaa

SEQ ID NO: 632472 - RNA, 19 nt, Homo sapiens
  misc_RNA (1)...(19): siRNA sense strand
gaagcagcaucuccuuaaa

SEQ ID NO: 632473 - RNA, 19 nt, Homo sapiens
  misc_RNA (1)...(19): siRNA sense strand
cagaugagcugguauggau

SEQ ID NO: 632474 - RNA, 19 nt, Homo sapiens
  misc_RNA (1)...(19): siRNA sense strand
acaaauggguguaggagaa

SEQ ID NO: 632475 - RNA, 19 nt, Homo sapiens
  misc_RNA (1)...(19): siRNA sense strand
ggaggaagauuuugagauu

SEQ ID NO: 632476 - RNA, 19 nt, Homo sapiens
  misc_RNA (1)...(19): siRNA sense strand
ucuaagcuguugucugaua

SEQ ID NO: 632477 - RNA, 19 nt, Homo sapiens
  misc_RNA (1)...(19): siRNA sense strand
acacuggccucccuuugua

SEQ ID NO: 632478 - RNA, 19 nt, Homo sapiens
  misc_RNA (1)...(19): siRNA sense strand
aagaacaacccaaagaaua

SEQ ID NO: 632479 - RNA, 19 nt, Homo sapiens
  misc_RNA (1)...(19): siRNA sense strand
gcuguugucugauauaagu

SEQ ID NO: 632480 - RNA, 19 nt, Homo sapiens
  misc_RNA (1)...(19): siRNA sense strand
ggagaagggaaaucaauug

SEQ ID NO: 632481 - RNA, 19 nt, Homo sapiens
  misc_RNA (1)...(19): siRNA sense strand
gcucaagcccuuaucugua

SEQ ID NO: 632482 - RNA, 19 nt, Homo sapiens
  misc_RNA (1)...(19): siRNA sense strand
gguguagccuuguucagaa

SEQ ID NO: 632483 - RNA, 19 nt, Homo sapiens
  misc_RNA (1)...(19): siRNA sense strand
uauaagugcucgucuaugg

SEQ ID NO: 632484 - RNA, 19 nt, Homo sapiens
  misc_RNA (1)...(19): siRNA sense strand
gugacgagcucaucuucuu

SEQ ID NO: 632485 - RNA, 19 nt, Homo sapiens
  misc_RNA (1)...(19): siRNA sense strand
gauauaagugcucgucuau

SEQ ID NO: 632486 - RNA, 19 nt, Homo sapiens
  misc_RNA (1)...(19): siRNA sense strand
aaaccuggauccuucaguu

SEQ ID NO: 632487 - RNA, 19 nt, Homo sapiens
  misc_RNA (1)...(19): siRNA sense strand
ugauauaagugcucgucua

SEQ ID NO: 632488 - RNA, 19 nt, Homo sapiens
  misc_RNA (1)...(19): siRNA sense strand
acacaguggucauugaaga

SEQ ID NO: 632489 - RNA, 19 nt, Homo sapiens
  misc_RNA (1)...(19): siRNA sense strand
gagcugguauggaucuuag

SEQ ID NO: 632490 - RNA, 19 nt, Homo sapiens
  misc_RNA (1)...(19): siRNA sense strand
gaaugaacauccuaaaccu

SEQ ID NO: 632491 - RNA, 19 nt, Homo sapiens
  misc_RNA (1)...(19): siRNA sense strand
cugacuaccuagaagaaua

SEQ ID NO: 632492 - RNA, 19 nt, Homo sapiens
  misc_RNA (1)...(19): siRNA sense strand
ugacaggccucccgauucu

SEQ ID NO: 632493 - RNA, 19 nt, Homo sapiens
  misc_RNA (1)...(19): siRNA sense strand
uaacugguguagccuuguu

SEQ ID NO: 632494 - RNA, 19 nt, Homo sapiens
  misc_RNA (1)...(19): siRNA sense strand
gggaagcagcaucuccuua

SEQ ID NO: 632495 - RNA, 19 nt, Homo sapiens
  misc_RNA (1)...(19): siRNA sense strand
ggaguuugaucuggaggaa

SEQ ID NO: 632496 - RNA, 19 nt, Homo sapiens
  misc_RNA (1)...(19): siRNA sense strand
cauccuacagugcuucuua

SEQ ID NO: 632497 - RNA, 19 nt, Homo sapiens
  misc_RNA (1)...(19): siRNA sense strand
gcucgucuaugguuuacau

SEQ ID NO: 632498 - RNA, 19 nt, Homo sapiens
  misc_RNA (1)...(19): siRNA sense strand
gagaauggaacgguuaaug

SEQ ID NO: 632499 - RNA, 19 nt, Homo sapiens
  misc_RNA (1)...(19): siRNA sense strand
gcuacucuauccaucaaau

SEQ ID NO: 632500 - RNA, 19 nt, Homo sapiens
  misc_RNA (1)...(19): siRNA sense strand
aaagauuguugcuacucua

SEQ ID NO: 632501 - RNA, 19 nt, Homo sapiens
  misc_RNA (1)...(19): siRNA sense strand
gcccuuaucuguagacacu

SEQ ID NO: 632502 - RNA, 19 nt, Homo sapiens
  misc_RNA (1)...(19): siRNA sense strand
uaacacaguggucauugaa

SEQ ID NO: 632503 - RNA, 19 nt, Homo sapiens
  misc_RNA (1)...(19): siRNA sense strand
agaauggaacgguuaauga

SEQ ID NO: 632504 - RNA, 19 nt, Homo sapiens
  misc_RNA (1)...(19): siRNA sense strand
agauacagaugagcuggua

SEQ ID NO: 632505 - RNA, 19 nt, Homo sapiens
  misc_RNA (1)...(19): siRNA sense strand
caaguaugaagaucagauu

SEQ ID NO: 632506 - RNA, 19 nt, Homo sapiens
  misc_RNA (1)...(19): siRNA sense strand
aaggagaauuuaaggaugu

SEQ ID NO: 632507 - RNA, 19 nt, Homo sapiens
  misc_RNA (1)...(19): siRNA sense strand
uggaauuccuuggcuguuu

SEQ ID NO: 632508 - RNA, 19 nt, Homo sapiens
  misc_RNA (1)...(19): siRNA sense strand
ggacuggagcugggagaaa

SEQ ID NO: 632509 - RNA, 19 nt, Homo sapiens
  misc_RNA (1)...(19): siRNA sense strand
ggauaacacaguggucauu

SEQ ID NO: 632510 - RNA, 19 nt, Homo sapiens
  misc_RNA (1)...(19): siRNA sense strand
gauaacacaguggucauug

SEQ ID NO: 632511 - RNA, 19 nt, Homo sapiens
  misc_RNA (1)...(19): siRNA sense strand
cagaauucauugacucuac

SEQ ID NO: 632512 - RNA, 19 nt, Homo sapiens
  misc_RNA (1)...(19): siRNA sense strand
gagaauuuaaggauguuug

SEQ ID NO: 632513 - RNA, 19 nt, Homo sapiens
  misc_RNA (1)...(19): siRNA sense strand
aaagaacaacccaaagaau

SEQ ID NO: 632514 - RNA, 19 nt, Homo sapiens
  misc_RNA (1)...(19): siRNA sense strand
caucaaauggcacaaaugg

SEQ ID NO: 632515 - RNA, 19 nt, Homo sapiens
  misc_RNA (1)...(19): siRNA sense strand
aagcuguugucugauauaa

SEQ ID NO: 632516 - RNA, 19 nt, Homo sapiens
  misc_RNA (1)...(19): siRNA sense strand
gaccuuuguugacacugaa

SEQ ID NO: 632517 - RNA, 19 nt, Homo sapiens
  misc_RNA (1)...(19): siRNA sense strand
guaugaagaucagauuacu

SEQ ID NO: 632518 - RNA, 19 nt, Homo sapiens
  misc_RNA (1)...(19): siRNA sense strand
uaagugcucgucuaugguu

SEQ ID NO: 632519 - RNA, 19 nt, Homo sapiens
  misc_RNA (1)...(19): siRNA sense strand
uuccuuggcuguuuauguu

SEQ ID NO: 632520 - RNA, 19 nt, Homo sapiens
  misc_RNA (1)...(19): siRNA sense strand
auaacacaguggucauuga

SEQ ID NO: 632521 - RNA, 19 nt, Homo sapiens
  misc_RNA (1)...(19): siRNA sense strand
ggugacaggccucccgauu

SEQ ID NO: 632522 - RNA, 19 nt, Homo sapiens
  misc_RNA (1)...(19): siRNA sense strand
gaauggaacgguuaaugac

SEQ ID NO: 632523 - RNA, 19 nt, Homo sapiens
  misc_RNA (1)...(19): siRNA sense strand
cucaagcccuuaucuguag

SEQ ID NO: 632524 - RNA, 19 nt, Homo sapiens
  misc_RNA (1)...(19): siRNA sense strand
ugaccagacuuuccauugc

SEQ ID NO: 632525 - RNA, 19 nt, Homo sapiens
  misc_RNA (1)...(19): siRNA sense strand
gagaagggaaaucaauugg

SEQ ID NO: 632526 - RNA, 19 nt, Homo sapiens
  misc_RNA (1)...(19): siRNA sense strand
cuaagcuguugucugauau

SEQ ID NO: 632527 - RNA, 19 nt, Homo sapiens
  misc_RNA (1)...(19): siRNA sense strand
aguuugaucuggaggaaga

SEQ ID NO: 632528 - RNA, 19 nt, Homo sapiens
  misc_RNA (1)...(19): siRNA sense strand
agaccuuuguugacacuga

SEQ ID NO: 632529 - RNA, 19 nt, Homo sapiens
  misc_RNA (1)...(19): siRNA sense strand
gcagaauucauugacucua

SEQ ID NO: 632530 - RNA, 19 nt, Homo sapiens
  misc_RNA (1)...(19): siRNA sense strand
ugacuaccuagaagaauau

SEQ ID NO: 632531 - RNA, 19 nt, Homo sapiens
  misc_RNA (1)...(19): siRNA sense strand
cagcgaaugaacauccuaa

SEQ ID NO: 632532 - RNA, 19 nt, Homo sapiens
  misc_RNA (1)...(19): siRNA sense strand
ccuuaucuguagacacuug

SEQ ID NO: 632533 - RNA, 19 nt, Homo sapiens
  misc_RNA (1)...(19): siRNA sense strand
uaagcuguugucugauaua

SEQ ID NO: 632534 - RNA, 19 nt, Homo sapiens
  misc_RNA (1)...(19): siRNA sense strand
cauacaacccagaccuuug

SEQ ID NO: 632535 - RNA, 19 nt, Homo sapiens
  misc_RNA (1)...(19): siRNA sense strand
agaacaacccaaagaauac

SEQ ID NO: 632536 - RNA, 19 nt, Homo sapiens
  misc_RNA (1)...(19): siRNA sense strand
ucauacaacccagaccuuu

SEQ ID NO: 632537 - RNA, 19 nt, Homo sapiens
  misc_RNA (1)...(19): siRNA sense strand
acaggccucccgauucuuu

SEQ ID NO: 632538 - RNA, 19 nt, Homo sapiens
  misc_RNA (1)...(19): siRNA sense strand
acaguggucauugaagaua

SEQ ID NO: 632539 - RNA, 19 nt, Homo sapiens
  misc_RNA (1)...(19): siRNA sense strand
ucaauuggagaaugguuug

SEQ ID NO: 632540 - RNA, 19 nt, Homo sapiens
  misc_RNA (1)...(19): siRNA sense strand
gacuggagcugggagaaac

SEQ ID NO: 632541 - RNA, 19 nt, Homo sapiens
  misc_RNA (1)...(19): siRNA sense strand
cauugacucuacugagcaa

SEQ ID NO: 632542 - RNA, 19 nt, Homo sapiens
  misc_RNA (1)...(19): siRNA sense strand
ucacugacuaccuagaaga

SEQ ID NO: 632543 - RNA, 19 nt, Homo sapiens
  misc_RNA (1)...(19): siRNA sense strand
cgaaugaacauccuaaacc

SEQ ID NO: 632544 - RNA, 19 nt, Homo sapiens
  misc_RNA (1)...(19): siRNA sense strand
uguugacacugaagagaau

SEQ ID NO: 632545 - RNA, 19 nt, Homo sapiens
  misc_RNA (1)...(19): siRNA sense strand
gauuguugcuacucuaucc

SEQ ID NO: 632546 - RNA, 19 nt, Homo sapiens
  misc_RNA (1)...(19): siRNA sense strand
gaauuaguucagaaacauc

SEQ ID NO: 632547 - RNA, 19 nt, Homo sapiens
  misc_RNA (1)...(19): siRNA sense strand
ccuagaagaauauccagau

SEQ ID NO: 632548 - RNA, 19 nt, Homo sapiens
  misc_RNA (1)...(19): siRNA sense strand
caguggucauugaagauau

SEQ ID NO: 632549 - RNA, 19 nt, Homo sapiens
  misc_RNA (1)...(19): siRNA sense strand
ccaaguaugaagaucagau

SEQ ID NO: 632550 - RNA, 19 nt, Homo sapiens
  misc_RNA (1)...(19): siRNA sense strand
gcgaaugaacauccuaaac

SEQ ID NO: 632551 - RNA, 19 nt, Homo sapiens
  misc_RNA (1)...(19): siRNA sense strand
gugacaggccucccgauuc

SEQ ID NO: 632552 - RNA, 19 nt, Homo sapiens
  misc_RNA (1)...(19): siRNA sense strand
uaggagaagggaaaucaau

SEQ ID NO: 632553 - RNA, 19 nt, Homo sapiens
  misc_RNA (1)...(19): siRNA sense strand
ggguguaggagaagggaaa

SEQ ID NO: 632554 - RNA, 19 nt, Homo sapiens
  misc_RNA (1)...(19): siRNA sense strand
uacagugcuucuuagauag

SEQ ID NO: 632555 - RNA, 19 nt, Homo sapiens
  misc_RNA (1)...(19): siRNA sense strand
gaauuccuuggcuguuuau

SEQ ID NO: 632556 - RNA, 19 nt, Homo sapiens
  misc_RNA (1)...(19): siRNA sense strand
agaauaccaacgcauccua

SEQ ID NO: 632557 - RNA, 19 nt, Homo sapiens
  misc_RNA (1)...(19): siRNA sense strand
acccagaccuuuguugaca

SEQ ID NO: 632558 - RNA, 19 nt, Homo sapiens
  misc_RNA (1)...(19): siRNA sense strand
cuguuuauguuucaaugga

SEQ ID NO: 632559 - RNA, 19 nt, Homo sapiens
  misc_RNA (1)...(19): siRNA sense strand
uacaguugcacagguguua

SEQ ID NO: 632560 - RNA, 19 nt, Homo sapiens
  misc_RNA (1)...(19): siRNA sense strand
gaugagcugguauggaucu

SEQ ID NO: 632561 - RNA, 19 nt, Homo sapiens
  misc_RNA (1)...(19): siRNA sense strand
guaggagaagggaaaucaa

SEQ ID NO: 632562 - RNA, 19 nt, Homo sapiens
  misc_RNA (1)...(19): siRNA sense strand
caguugcacagguguuaaa

SEQ ID NO: 632563 - RNA, 19 nt, Homo sapiens
  misc_RNA (1)...(19): siRNA sense strand
ggagaauuuaaggauguuu

SEQ ID NO: 632564 - RNA, 19 nt, Homo sapiens
  misc_RNA (1)...(19): siRNA sense strand
ugguuuacauacagaagga

SEQ ID NO: 632565 - RNA, 19 nt, Homo sapiens
  misc_RNA (1)...(19): siRNA sense strand
cuacagugcuucuuagaua

SEQ ID NO: 632566 - RNA, 19 nt, Homo sapiens
  misc_RNA (1)...(19): siRNA sense strand
ggaauuccuuggcuguuua

SEQ ID NO: 632567 - RNA, 19 nt, Homo sapiens
  misc_RNA (1)...(19): siRNA sense strand
gaagagaauggaacgguua

SEQ ID NO: 632568 - RNA, 19 nt, Homo sapiens
  misc_RNA (1)...(19): siRNA sense strand
gaaaucaauuggagaaugg

SEQ ID NO: 632569 - RNA, 19 nt, Homo sapiens
  misc_RNA (1)...(19): siRNA sense strand
ggaaaucaauuggagaaug

SEQ ID NO: 632570 - RNA, 19 nt, Homo sapiens
  misc_RNA (1)...(19): siRNA sense strand
acaaauggguguaggagaa

SEQ ID NO: 632571 - RNA, 19 nt, Homo sapiens
  misc_RNA (1)...(19): siRNA sense strand
ggaggaagauuuugagauu

SEQ ID NO: 632572 - RNA, 19 nt, Homo sapiens
  misc_RNA (1)...(19): siRNA sense strand
acacuggccucccuuugua

SEQ ID NO: 632573 - RNA, 19 nt, Homo sapiens
  misc_RNA (1)...(19): siRNA sense strand
aagaacaacccaaagaaua

SEQ ID NO: 632574 - RNA, 19 nt, Homo sapiens
  misc_RNA (1)...(19): siRNA sense strand
ggagaagggaaaucaauug

SEQ ID NO: 632575 - RNA, 19 nt, Homo sapiens
  misc_RNA (1)...(19): siRNA sense strand
gcucaagcccuuaucugua

SEQ ID NO: 632576 - RNA, 19 nt, Homo sapiens
  misc_RNA (1)...(19): siRNA sense strand
gguguagccuuguucagaa

SEQ ID NO: 632577 - RNA, 19 nt, Homo sapiens
  misc_RNA (1)...(19): siRNA sense strand
gugacgagcucaucuucuu

SEQ ID NO: 632578 - RNA, 19 nt, Homo sapiens
  misc_RNA (1)...(19): siRNA sense strand
aaaccuggauccuucaguu

SEQ ID NO: 632579 - RNA, 19 nt, Homo sapiens
  misc_RNA (1)...(19): siRNA sense strand
acacaguggucauugaaga

SEQ ID NO: 632580 - RNA, 19 nt, Homo sapiens
  misc_RNA (1)...(19): siRNA sense strand
gaaugaacauccuaaaccu

SEQ ID NO: 632581 - RNA, 19 nt, Homo sapiens
  misc_RNA (1)...(19): siRNA sense strand
ugacaggccucccgauucu

SEQ ID NO: 632582 - RNA, 19 nt, Homo sapiens
  misc_RNA (1)...(19): siRNA sense strand
uaacugguguagccuuguu

SEQ ID NO: 632583 - RNA, 19 nt, Homo sapiens
  misc_RNA (1)...(19): siRNA sense strand
ggaguuugaucuggaggaa

SEQ ID NO: 632584 - RNA, 19 nt, Homo sapiens
  misc_RNA (1)...(19): siRNA sense strand
cauccuacagugcuucuua

SEQ ID NO: 632585 - RNA, 19 nt, Homo sapiens
  misc_RNA (1)...(19): siRNA sense strand
aaagauuguugcuacucua

SEQ ID NO: 632586 - RNA, 19 nt, Homo sapiens
  misc_RNA (1)...(19): siRNA sense strand
gcccuuaucuguagacacu

SEQ ID NO: 632587 - RNA, 19 nt, Homo sapiens
  misc_RNA (1)...(19): siRNA sense strand
gagaauggaacgguuaaug

SEQ ID NO: 632588 - RNA, 19 nt, Homo sapiens
  misc_RNA (1)...(19): siRNA sense strand
gcuacucuauccaucaaau

SEQ ID NO: 632589 - RNA, 19 nt, Homo sapiens
  misc_RNA (1)...(19): siRNA sense strand
uaacacaguggucauugaa

SEQ ID NO: 632590 - RNA, 19 nt, Homo sapiens
  misc_RNA (1)...(19): siRNA sense strand
agaauggaacgguuaauga

SEQ ID NO: 632591 - RNA, 19 nt, Homo sapiens
  misc_RNA (1)...(19): siRNA sense strand
uggaauuccuuggcuguuu

SEQ ID NO: 632592 - RNA, 19 nt, Homo sapiens
  misc_RNA (1)...(19): siRNA sense strand
aaggagaauuuaaggaugu

SEQ ID NO: 632593 - RNA, 19 nt, Homo sapiens
  misc_RNA (1)...(19): siRNA sense strand
ggauaacacaguggucauu

SEQ ID NO: 632594 - RNA, 19 nt, Homo sapiens
  misc_RNA (1)...(19): siRNA sense strand
ggacuggagcugggagaaa

SEQ ID NO: 632595 - RNA, 19 nt, Homo sapiens
  misc_RNA (1)...(19): siRNA sense strand
gauaacacaguggucauug

SEQ ID NO: 632596 - RNA, 19 nt, Homo sapiens
  misc_RNA (1)...(19): siRNA sense strand
cagaauucauugacucuac

SEQ ID NO: 632597 - RNA, 19 nt, Homo sapiens
  misc_RNA (1)...(19): siRNA sense strand
gagaauuuaaggauguuug

SEQ ID NO: 632598 - RNA, 19 nt, Homo sapiens
  misc_RNA (1)...(19): siRNA sense strand
caucaaauggcacaaaugg

SEQ ID NO: 632599 - RNA, 19 nt, Homo sapiens
  misc_RNA (1)...(19): siRNA sense strand
aaagaacaacccaaagaau

SEQ ID NO: 632600 - RNA, 19 nt, Homo sapiens
  misc_RNA (1)...(19): siRNA sense strand
gaccuuuguugacacugaa

SEQ ID NO: 632601 - RNA, 19 nt, Homo sapiens
  misc_RNA (1)...(19): siRNA sense strand
uuccuuggcuguuuauguu

SEQ ID NO: 632602 - RNA, 19 nt, Homo sapiens
  misc_RNA (1)...(19): siRNA sense strand
auaacacaguggucauuga

SEQ ID NO: 632603 - RNA, 19 nt, Homo sapiens
  misc_RNA (1)...(19): siRNA sense strand
ggugacaggccucccgauu

SEQ ID NO: 632604 - RNA, 19 nt, Homo sapiens
  misc_RNA (1)...(19): siRNA sense strand
gaauggaacgguuaaugac

SEQ ID NO: 632605 - RNA, 19 nt, Homo sapiens
  misc_RNA (1)...(19): siRNA sense strand
gagaagggaaaucaauugg

SEQ ID NO: 632606 - RNA, 19 nt, Homo sapiens
  misc_RNA (1)...(19): siRNA sense strand
ugaccagacuuuccauugc

SEQ ID NO: 632607 - RNA, 19 nt, Homo sapiens
  misc_RNA (1)...(19): siRNA sense strand
cucaagcccuuaucuguag

SEQ ID NO: 632608 - RNA, 19 nt, Homo sapiens
  misc_RNA (1)...(19): siRNA sense strand
agaccuuuguugacacuga

SEQ ID NO: 632609 - RNA, 19 nt, Homo sapiens
  misc_RNA (1)...(19): siRNA sense strand
aguuugaucuggaggaaga

SEQ ID NO: 632610 - RNA, 19 nt, Homo sapiens
  misc_RNA (1)...(19): siRNA sense strand
gcagaauucauugacucua

SEQ ID NO: 632611 - RNA, 19 nt, Homo sapiens
  misc_RNA (1)...(19): siRNA sense strand
cagcgaaugaacauccuaa

SEQ ID NO: 632612 - RNA, 19 nt, Homo sapiens
  misc_RNA (1)...(19): siRNA sense strand
ccuuaucuguagacacuug

SEQ ID NO: 632613 - RNA, 19 nt, Homo sapiens
  misc_RNA (1)...(19): siRNA sense strand
cauacaacccagaccuuug

SEQ ID NO: 632614 - RNA, 19 nt, Homo sapiens
  misc_RNA (1)...(19): siRNA sense strand
ucaauuggagaaugguuug

SEQ ID NO: 632615 - RNA, 19 nt, Homo sapiens
  misc_RNA (1)...(19): siRNA sense strand
agaacaacccaaagaauac

SEQ ID NO: 632616 - RNA, 19 nt, Homo sapiens
  misc_RNA (1)...(19): siRNA sense strand
ucauacaacccagaccuuu

SEQ ID NO: 632617 - RNA, 19 nt, Homo sapiens
  misc_RNA (1)...(19): siRNA sense strand
acaggccucccgauucuuu

SEQ ID NO: 632618 - RNA, 19 nt, Homo sapiens
  misc_RNA (1)...(19): siRNA sense strand
acaguggucauugaagaua

SEQ ID NO: 632619 - RNA, 19 nt, Homo sapiens
  misc_RNA (1)...(19): siRNA sense strand
gacuggagcugggagaaac

SEQ ID NO: 632620 - RNA, 19 nt, Homo sapiens
  misc_RNA (1)...(19): siRNA sense strand
cauugacucuacugagcaa

SEQ ID NO: 632621 - RNA, 19 nt, Homo sapiens
  misc_RNA (1)...(19): siRNA sense strand
cgaaugaacauccuaaacc

SEQ ID NO: 632622 - RNA, 19 nt, Homo sapiens
  misc_RNA (1)...(19): siRNA sense strand
uguugacacugaagagaau

SEQ ID NO: 632623 - RNA, 19 nt, Homo sapiens
  misc_RNA (1)...(19): siRNA sense strand
caguggucauugaagauau

SEQ ID NO: 632624 - RNA, 19 nt, Homo sapiens
  misc_RNA (1)...(19): siRNA sense strand
gaauuaguucagaaacauc

SEQ ID NO: 632625 - RNA, 19 nt, Homo sapiens
  misc_RNA (1)...(19): siRNA sense strand
gauuguugcuacucuaucc

SEQ ID NO: 632626 - RNA, 19 nt, Homo sapiens
  misc_RNA (1)...(19): siRNA sense strand
uaggagaagggaaaucaau

SEQ ID NO: 632627 - RNA, 19 nt, Homo sapiens
  misc_RNA (1)...(19): siRNA sense strand
gcgaaugaacauccuaaac

SEQ ID NO: 632628 - RNA, 19 nt, Homo sapiens
  misc_RNA (1)...(19): siRNA sense strand
gugacaggccucccgauuc

SEQ ID NO: 632629 - RNA, 19 nt, Homo sapiens
  misc_RNA (1)...(19): siRNA sense strand
ggguguaggagaagggaaa

SEQ ID NO: 632630 - RNA, 19 nt, Homo sapiens
  misc_RNA (1)...(19): siRNA sense strand
gaauuccuuggcuguuuau

SEQ ID NO: 632631 - RNA, 19 nt, Homo sapiens
  misc_RNA (1)...(19): siRNA sense strand
uacagugcuucuuagauag

SEQ ID NO: 632632 - RNA, 19 nt, Homo sapiens
  misc_RNA (1)...(19): siRNA sense strand
uacaguugcacagguguua

SEQ ID NO: 632633 - RNA, 19 nt, Homo sapiens
  misc_RNA (1)...(19): siRNA sense strand
acccagaccuuuguugaca

SEQ ID NO: 632634 - RNA, 19 nt, Homo sapiens
  misc_RNA (1)...(19): siRNA sense strand
agaauaccaacgcauccua

SEQ ID NO: 632635 - RNA, 19 nt, Homo sapiens
  misc_RNA (1)...(19): siRNA sense strand
cuguuuauguuucaaugga

SEQ ID NO: 632636 - RNA, 19 nt, Homo sapiens
  misc_RNA (1)...(19): siRNA sense strand
guaggagaagggaaaucaa

SEQ ID NO: 632637 - RNA, 19 nt, Homo sapiens
  misc_RNA (1)...(19): siRNA sense strand
caguugcacagguguuaaa

SEQ ID NO: 632638 - RNA, 19 nt, Homo sapiens
  misc_RNA (1)...(19): siRNA sense strand
ggagaauuuaaggauguuu

SEQ ID NO: 632639 - RNA, 19 nt, Homo sapiens
  misc_RNA (1)...(19): siRNA sense strand
uugcuacucuauccaucaa

SEQ ID NO: 632640 - RNA, 19 nt, Homo sapiens
  misc_RNA (1)...(19): siRNA sense strand
gacaaggucaucauucugu

SEQ ID NO: 632641 - RNA, 19 nt, Homo sapiens
  misc_RNA (1)...(19): siRNA sense strand
ggacaaggucaucauucug

SEQ ID NO: 632642 - RNA, 19 nt, Homo sapiens
  misc_RNA (1)...(19): siRNA sense strand
uggacaaggucaucauucu

SEQ ID NO: 632643 - RNA, 19 nt, Homo sapiens
  misc_RNA (1)...(19): siRNA sense strand
gagagaaccuguacuauga

SEQ ID NO: 632644 - RNA, 19 nt, Homo sapiens
  misc_RNA (1)...(19): siRNA sense strand
ggauggagcuggacaauca

SEQ ID NO: 632645 - RNA, 19 nt, Homo sapiens
  misc_RNA (1)...(19): siRNA sense strand
cagaugagcuguccuuuga

SEQ ID NO: 632646 - RNA, 19 nt, Homo sapiens
  misc_RNA (1)...(19): siRNA sense strand
gaggaggcgucacucaaua

SEQ ID NO: 632647 - RNA, 19 nt, Homo sapiens
  misc_RNA (1)...(19): siRNA sense strand
ggagagaaccuguacuaug

SEQ ID NO: 632648 - RNA, 19 nt, Homo sapiens
  misc_RNA (1)...(19): siRNA sense strand
caggguaucucgucucuga

SEQ ID NO: 632649 - RNA, 19 nt, Homo sapiens
  misc_RNA (1)...(19): siRNA sense strand
gcuggucccuccacucuga

SEQ ID NO: 632650 - RNA, 19 nt, Homo sapiens
  misc_RNA (1)...(19): siRNA sense strand
gagaaccuguacuaugaga

SEQ ID NO: 632651 - RNA, 19 nt, Homo sapiens
  misc_RNA (1)...(19): siRNA sense strand
ccauggagcuggagucagu

SEQ ID NO: 632652 - RNA, 19 nt, Homo sapiens
  misc_RNA (1)...(19): siRNA sense strand
gaacccagcacgccucaug

SEQ ID NO: 632653 - RNA, 19 nt, Homo sapiens
  misc_RNA (1)...(19): siRNA sense strand
gaggguccuuguacagaaa

SEQ ID NO: 632654 - RNA, 19 nt, Homo sapiens
  misc_RNA (1)...(19): siRNA sense strand
acacugagaucugccaaga

SEQ ID NO: 632655 - RNA, 19 nt, Homo sapiens
  misc_RNA (1)...(19): siRNA sense strand
ggcacgaguuugacaguga

SEQ ID NO: 632656 - RNA, 19 nt, Homo sapiens
  misc_RNA (1)...(19): siRNA sense strand
gaaccuguacuaugagauc

SEQ ID NO: 632657 - RNA, 19 nt, Homo sapiens
  misc_RNA (1)...(19): siRNA sense strand
cgaacccucugcucaccua

SEQ ID NO: 632658 - RNA, 19 nt, Homo sapiens
  misc_RNA (1)...(19): siRNA sense strand
cgaggguccuuguacagaa

SEQ ID NO: 632659 - RNA, 19 nt, Homo sapiens
  misc_RNA (1)...(19): siRNA sense strand
cuacgagaacguugacuuu

SEQ ID NO: 632660 - RNA, 19 nt, Homo sapiens
  misc_RNA (1)...(19): siRNA sense strand
caugugaucaaacgguaua

SEQ ID NO: 632661 - RNA, 19 nt, Homo sapiens
  misc_RNA (1)...(19): siRNA sense strand
gagagaaugagcugguguu

SEQ ID NO: 632662 - RNA, 19 nt, Homo sapiens
  misc_RNA (1)...(19): siRNA sense strand
cggcaugcuuggccaauca

SEQ ID NO: 632663 - RNA, 19 nt, Homo sapiens
  misc_RNA (1)...(19): siRNA sense strand
gagcgaggagucucuguca

SEQ ID NO: 632664 - RNA, 19 nt, Homo sapiens
  misc_RNA (1)...(19): siRNA sense strand
ccagaugagcuguccuuug

SEQ ID NO: 632665 - RNA, 19 nt, Homo sapiens
  misc_RNA (1)...(19): siRNA sense strand
guguuuggcugcgaucuug

SEQ ID NO: 632666 - RNA, 19 nt, Homo sapiens
  misc_RNA (1)...(19): siRNA sense strand
ggccugugcucaccuggau

SEQ ID NO: 632667 - RNA, 19 nt, Homo sapiens
  misc_RNA (1)...(19): siRNA sense strand
gcgaggagucucugucauc

SEQ ID NO: 632668 - RNA, 19 nt, Homo sapiens
  misc_RNA (1)...(19): siRNA sense strand
ucucaggcgugucuuccaa

SEQ ID NO: 632669 - RNA, 19 nt, Homo sapiens
  misc_RNA (1)...(19): siRNA sense strand
uaccaaggcaacaaaguga

SEQ ID NO: 632670 - RNA, 19 nt, Homo sapiens
  misc_RNA (1)...(19): siRNA sense strand
ucagugaggccaugucagu

SEQ ID NO: 632671 - RNA, 19 nt, Homo sapiens
  misc_RNA (1)...(19): siRNA sense strand
cuccaccggugcauauuug

SEQ ID NO: 632672 - RNA, 19 nt, Homo sapiens
  misc_RNA (1)...(19): siRNA sense strand
ccaaggcaacaaagugaug

SEQ ID NO: 632673 - RNA, 19 nt, Homo sapiens
  misc_RNA (1)...(19): siRNA sense strand
caacucaggccaggaugug

SEQ ID NO: 632674 - RNA, 19 nt, Homo sapiens
  misc_RNA (1)...(19): siRNA sense strand
gcgagcaccucagcaacuc

SEQ ID NO: 632675 - RNA, 19 nt, Homo sapiens
  misc_RNA (1)...(19): siRNA sense strand
ugacuuucguucccuggau

SEQ ID NO: 632676 - RNA, 19 nt, Homo sapiens
  misc_RNA (1)...(19): siRNA sense strand
ggaguuacgaugacuuucg

SEQ ID NO: 632677 - RNA, 19 nt, Homo sapiens
  misc_RNA (1)...(19): siRNA sense strand
ugaccaccuuggcuacuca

SEQ ID NO: 632678 - RNA, 19 nt, Homo sapiens
  misc_RNA (1)...(19): siRNA sense strand
cagugucccucgaaagaag

SEQ ID NO: 632679 - RNA, 19 nt, Homo sapiens
  misc_RNA (1)...(19): siRNA sense strand
ucaccuaccagcucuaugg

SEQ ID NO: 632680 - RNA, 19 nt, Homo sapiens
  misc_RNA (1)...(19): siRNA sense strand
aggcgugucuuccaacauc

SEQ ID NO: 632681 - RNA, 19 nt, Homo sapiens
  misc_RNA (1)...(19): siRNA sense strand
ggaggcgucacucaauauc

SEQ ID NO: 632682 - RNA, 19 nt, Homo sapiens
  misc_RNA (1)...(19): siRNA sense strand
ccgacuuccugcucagcua

SEQ ID NO: 632683 - RNA, 19 nt, Homo sapiens
  misc_RNA (1)...(19): siRNA sense strand
ggcccacucgguccugaua

SEQ ID NO: 632684 - RNA, 19 nt, Homo sapiens
  misc_RNA (1)...(19): siRNA sense strand
acgagaacguugacuuugg

SEQ ID NO: 632685 - RNA, 19 nt, Homo sapiens
  misc_RNA (1)...(19): siRNA sense strand
gcaacucaggccaggaugu

SEQ ID NO: 632686 - RNA, 19 nt, Homo sapiens
  misc_RNA (1)...(19): siRNA sense strand
ggugguggaugggaucuac

SEQ ID NO: 632687 - RNA, 19 nt, Homo sapiens
  misc_RNA (1)...(19): siRNA sense strand
caccgaggguccuuguaca

SEQ ID NO: 632688 - RNA, 19 nt, Homo sapiens
  misc_RNA (1)...(19): siRNA sense strand
ucuaugggaaguucaguga

SEQ ID NO: 632689 - RNA, 19 nt, Homo sapiens
  misc_RNA (1)...(19): siRNA sense strand
agaaauggagggcaaagag

SEQ ID NO: 632690 - RNA, 19 nt, Homo sapiens
  misc_RNA (1)...(19): siRNA sense strand
cuacgucaaccuagcucua

SEQ ID NO: 632691 - RNA, 19 nt, Homo sapiens
  misc_RNA (1)...(19): siRNA sense strand
gggagagaaccuguacuau

SEQ ID NO: 632692 - RNA, 19 nt, Homo sapiens
  misc_RNA (1)...(19): siRNA sense strand
ccauguggacguccuguuc

SEQ ID NO: 632693 - RNA, 19 nt, Homo sapiens
  misc_RNA (1)...(19): siRNA sense strand
cagcaacucaggccaggau

SEQ ID NO: 632694 - RNA, 19 nt, Homo sapiens
  misc_RNA (1)...(19): siRNA sense strand
ggggagagaaccuguacua

SEQ ID NO: 632695 - RNA, 19 nt, Homo sapiens
  misc_RNA (1)...(19): siRNA sense strand
uuaccaaggcaacaaagug

SEQ ID NO: 632696 - RNA, 19 nt, Homo sapiens
  misc_RNA (1)...(19): siRNA sense strand
cccagugucccucgaaaga

SEQ ID NO: 632697 - RNA, 19 nt, Homo sapiens
  misc_RNA (1)...(19): siRNA sense strand
ccagcucuaugggaaguuc

SEQ ID NO: 632698 - RNA, 19 nt, Homo sapiens
  misc_RNA (1)...(19): siRNA sense strand
ucaggcgugucuuccaaca

SEQ ID NO: 632699 - RNA, 19 nt, Homo sapiens
  misc_RNA (1)...(19): siRNA sense strand
cccacucgguccugauaug

SEQ ID NO: 632700 - RNA, 19 nt, Homo sapiens
  misc_RNA (1)...(19): siRNA sense strand
cgacaccgucacacugaga

SEQ ID NO: 632701 - RNA, 19 nt, Homo sapiens
  misc_RNA (1)...(19): siRNA sense strand
ccggaguuacgaugacuuu

SEQ ID NO: 632702 - RNA, 19 nt, Homo sapiens
  misc_RNA (1)...(19): siRNA sense strand
ugcaguaccuggagacacu

SEQ ID NO: 632703 - RNA, 19 nt, Homo sapiens
  misc_RNA (1)...(19): siRNA sense strand
aagaugagcugcuggagaa

SEQ ID NO: 632704 - RNA, 19 nt, Homo sapiens
  misc_RNA (1)...(19): siRNA sense strand
gaagaagucauaggucguu

SEQ ID NO: 632705 - RNA, 19 nt, Homo sapiens
  misc_RNA (1)...(19): siRNA sense strand
ccagcuagaagaagucaua

SEQ ID NO: 632706 - RNA, 19 nt, Homo sapiens
  misc_RNA (1)...(19): siRNA sense strand
caacucagcccagagaaga

SEQ ID NO: 632707 - RNA, 19 nt, Homo sapiens
  misc_RNA (1)...(19): siRNA sense strand
gaggaagucccaccaggaa

SEQ ID NO: 632708 - RNA, 19 nt, Homo sapiens
  misc_RNA (1)...(19): siRNA sense strand
ggaagucccaccaggaaug

SEQ ID NO: 632709 - RNA, 19 nt, Homo sapiens
  misc_RNA (1)...(19): siRNA sense strand
agaaaugcauccaguccuu

SEQ ID NO: 632710 - RNA, 19 nt, Homo sapiens
  misc_RNA (1)...(19): siRNA sense strand
gaaaagacaguaagaggaa

SEQ ID NO: 632711 - RNA, 19 nt, Homo sapiens
  misc_RNA (1)...(19): siRNA sense strand
ugagacggcugcagaucug

SEQ ID NO: 632712 - RNA, 19 nt, Homo sapiens
  misc_RNA (1)...(19): siRNA sense strand
gcuagaagaagucauaggu

SEQ ID NO: 632713 - RNA, 19 nt, Homo sapiens
  misc_RNA (1)...(19): siRNA sense strand
ggaaaucagcaaggucaug

SEQ ID NO: 632714 - RNA, 19 nt, Homo sapiens
  misc_RNA (1)...(19): siRNA sense strand
gcaccaggauccccagcua

SEQ ID NO: 632715 - RNA, 19 nt, Homo sapiens
  misc_RNA (1)...(19): siRNA sense strand
gaagucauaggucguuucu

SEQ ID NO: 632716 - RNA, 19 nt, Homo sapiens
  misc_RNA (1)...(19): siRNA sense strand
gaacagaaaagacaguaag

SEQ ID NO: 632717 - RNA, 19 nt, Homo sapiens
  misc_RNA (1)...(19): siRNA sense strand
gagaagacugggagacucu

SEQ ID NO: 632718 - RNA, 19 nt, Homo sapiens
  misc_RNA (1)...(19): siRNA sense strand
gaaccugggccugcugagu

SEQ ID NO: 632719 - RNA, 19 nt, Homo sapiens
  misc_RNA (1)...(19): siRNA sense strand
gcaacucagcccagagaag

SEQ ID NO: 632720 - RNA, 19 nt, Homo sapiens
  misc_RNA (1)...(19): siRNA sense strand
cauccaguccuucgauuca

SEQ ID NO: 632721 - RNA, 19 nt, Homo sapiens
  misc_RNA (1)...(19): siRNA sense strand
gaugagcugcuggagaaau

SEQ ID NO: 632722 - RNA, 19 nt, Homo sapiens
  misc_RNA (1)...(19): siRNA sense strand
gaggaccacaugcucaaca

SEQ ID NO: 632723 - RNA, 19 nt, Homo sapiens
  misc_RNA (1)...(19): siRNA sense strand
gcauccaguccuucgauuc

SEQ ID NO: 632724 - RNA, 19 nt, Homo sapiens
  misc_RNA (1)...(19): siRNA sense strand
ggacacccaggagcugaga

SEQ ID NO: 632725 - RNA, 19 nt, Homo sapiens
  misc_RNA (1)...(19): siRNA sense strand
aagaugagcugcuggagaa

SEQ ID NO: 632726 - RNA, 19 nt, Homo sapiens
  misc_RNA (1)...(19): siRNA sense strand
gacgagaucuaugagcuuu

SEQ ID NO: 632727 - RNA, 19 nt, Homo sapiens
  misc_RNA (1)...(19): siRNA sense strand
gaagguagaauguaagaag

SEQ ID NO: 632728 - RNA, 19 nt, Homo sapiens
  misc_RNA (1)...(19): siRNA sense strand
gagcgacucucgggcaauu

SEQ ID NO: 632729 - RNA, 19 nt, Homo sapiens
  misc_RNA (1)...(19): siRNA sense strand
ucuaugagcuuucuuaugc

SEQ ID NO: 632730 - RNA, 19 nt, Homo sapiens
  misc_RNA (1)...(19): siRNA sense strand
agucuguguucaagaauua

SEQ ID NO: 632731 - RNA, 19 nt, Homo sapiens
  misc_RNA (1)...(19): siRNA sense strand
caagaauuaugacccugaa

SEQ ID NO: 632732 - RNA, 19 nt, Homo sapiens
  misc_RNA (1)...(19): siRNA sense strand
gaagaagucauaggucguu

SEQ ID NO: 632733 - RNA, 19 nt, Homo sapiens
  misc_RNA (1)...(19): siRNA sense strand
gagaccaggugaagguaga

SEQ ID NO: 632734 - RNA, 19 nt, Homo sapiens
  misc_RNA (1)...(19): siRNA sense strand
uccaccagcugcagaauuu

SEQ ID NO: 632735 - RNA, 19 nt, Homo sapiens
  misc_RNA (1)...(19): siRNA sense strand
ccagcuagaagaagucaua

SEQ ID NO: 632736 - RNA, 19 nt, Homo sapiens
  misc_RNA (1)...(19): siRNA sense strand
caacucagcccagagaaga

SEQ ID NO: 632737 - RNA, 19 nt, Homo sapiens
  misc_RNA (1)...(19): siRNA sense strand
ggaagucccaccaggaaug

SEQ ID NO: 632738 - RNA, 19 nt, Homo sapiens
  misc_RNA (1)...(19): siRNA sense strand
gcagagaccaggugaaggu

SEQ ID NO: 632739 - RNA, 19 nt, Homo sapiens
  misc_RNA (1)...(19): siRNA sense strand
gaggaagucccaccaggaa

SEQ ID NO: 632740 - RNA, 19 nt, Homo sapiens
  misc_RNA (1)...(19): siRNA sense strand
agaaaugcauccaguccuu

SEQ ID NO: 632741 - RNA, 19 nt, Homo sapiens
  misc_RNA (1)...(19): siRNA sense strand
gaaaagacaguaagaggaa

SEQ ID NO: 632742 - RNA, 19 nt, Homo sapiens
  misc_RNA (1)...(19): siRNA sense strand
cacaggugcuggacaaguu

SEQ ID NO: 632743 - RNA, 19 nt, Homo sapiens
  misc_RNA (1)...(19): siRNA sense strand
gagucuguguucaagaauu

SEQ ID NO: 632744 - RNA, 19 nt, Homo sapiens
  misc_RNA (1)...(19): siRNA sense strand
gagccgcguugucccaaga

SEQ ID NO: 632745 - RNA, 19 nt, Homo sapiens
  misc_RNA (1)...(19): siRNA sense strand
cggaagacgagaucuauga

SEQ ID NO: 632746 - RNA, 19 nt, Homo sapiens
  misc_RNA (1)...(19): siRNA sense strand
uggagucuguguucaagaa

SEQ ID NO: 632747 - RNA, 19 nt, Homo sapiens
  misc_RNA (1)...(19): siRNA sense strand
ugagacggcugcagaucug

SEQ ID NO: 632748 - RNA, 19 nt, Homo sapiens
  misc_RNA (1)...(19): siRNA sense strand
gcuagaagaagucauaggu

SEQ ID NO: 632749 - RNA, 19 nt, Homo sapiens
  misc_RNA (1)...(19): siRNA sense strand
gaucuaugagcuuucuuau

SEQ ID NO: 632750 - RNA, 19 nt, Homo sapiens
  misc_RNA (1)...(19): siRNA sense strand
aggugaagguagaauguaa

SEQ ID NO: 632751 - RNA, 19 nt, Homo sapiens
  misc_RNA (1)...(19): siRNA sense strand
gaggauccuucagcagaga

SEQ ID NO: 632752 - RNA, 19 nt, Homo sapiens
  misc_RNA (1)...(19): siRNA sense strand
ggaaaucagcaaggucaug

SEQ ID NO: 632753 - RNA, 19 nt, Homo sapiens
  misc_RNA (1)...(19): siRNA sense strand
gcaccaggauccccagcua

SEQ ID NO: 632754 - RNA, 19 nt, Homo sapiens
  misc_RNA (1)...(19): siRNA sense strand
aagguagaauguaagaaga

SEQ ID NO: 632755 - RNA, 19 nt, Homo sapiens
  misc_RNA (1)...(19): siRNA sense strand
gaagucauaggucguuucu

SEQ ID NO: 632756 - RNA, 19 nt, Homo sapiens
  misc_RNA (1)...(19): siRNA sense strand
gaaggccgaggaacaaucu

SEQ ID NO: 632757 - RNA, 19 nt, Homo sapiens
  misc_RNA (1)...(19): siRNA sense strand
gaccugcggagcuacguuu

SEQ ID NO: 632758 - RNA, 19 nt, Homo sapiens
  misc_RNA (1)...(19): siRNA sense strand
cgagaucuaugagcuuucu

SEQ ID NO: 632759 - RNA, 19 nt, Homo sapiens
  misc_RNA (1)...(19): siRNA sense strand
agaucuaugagcuuucuua

SEQ ID NO: 632760 - RNA, 19 nt, Homo sapiens
  misc_RNA (1)...(19): siRNA sense strand
gguggagucuguguucaag

SEQ ID NO: 632761 - RNA, 19 nt, Homo sapiens
  misc_RNA (1)...(19): siRNA sense strand
gagaagacugggagacucu

SEQ ID NO: 632762 - RNA, 19 nt, Homo sapiens
  misc_RNA (1)...(19): siRNA sense strand
gaacagaaaagacaguaag

SEQ ID NO: 632763 - RNA, 19 nt, Homo sapiens
  misc_RNA (1)...(19): siRNA sense strand
acacggaagacgagaucua

SEQ ID NO: 632764 - RNA, 19 nt, Homo sapiens
  misc_RNA (1)...(19): siRNA sense strand
gcaacucagcccagagaag

SEQ ID NO: 632765 - RNA, 19 nt, Homo sapiens
  misc_RNA (1)...(19): siRNA sense strand
gugaagguagaauguaaga

SEQ ID NO: 632766 - RNA, 19 nt, Homo sapiens
  misc_RNA (1)...(19): siRNA sense strand
cauccaguccuucgauuca

SEQ ID NO: 632767 - RNA, 19 nt, Homo sapiens
  misc_RNA (1)...(19): siRNA sense strand
ggaagacgagaucuaugag

SEQ ID NO: 632768 - RNA, 19 nt, Homo sapiens
  misc_RNA (1)...(19): siRNA sense strand
gaaccugggccugcugagu

SEQ ID NO: 632769 - RNA, 19 nt, Homo sapiens
  misc_RNA (1)...(19): siRNA sense strand
aggcacagcccgacagguu

SEQ ID NO: 632770 - RNA, 19 nt, Homo sapiens
  misc_RNA (1)...(19): siRNA sense strand
gaugagcugcuggagaaau

SEQ ID NO: 632771 - RNA, 19 nt, Homo sapiens
  misc_RNA (1)...(19): siRNA sense strand
ccaggugaagguagaaugu

SEQ ID NO: 632772 - RNA, 19 nt, Homo sapiens
  misc_RNA (1)...(19): siRNA sense strand
uacccaagcugaacaaccu

SEQ ID NO: 632773 - RNA, 19 nt, Homo sapiens
  misc_RNA (1)...(19): siRNA sense strand
gaggaccacaugcucaaca

SEQ ID NO: 632774 - RNA, 19 nt, Homo sapiens
  misc_RNA (1)...(19): siRNA sense strand
uggcucagcaccucaccua

SEQ ID NO: 632775 - RNA, 19 nt, Homo sapiens
  misc_RNA (1)...(19): siRNA sense strand
gacccaccaucaacugcau

SEQ ID NO: 632776 - RNA, 19 nt, Homo sapiens
  misc_RNA (1)...(19): siRNA sense strand
gcauccaguccuucgauuc

SEQ ID NO: 632777 - RNA, 19 nt, Homo sapiens
  misc_RNA (1)...(19): siRNA sense strand
gcugguggagucuguguuc

SEQ ID NO: 632778 - RNA, 19 nt, Homo sapiens
  misc_RNA (1)...(19): siRNA sense strand
gaauuucaacacgcugaug

SEQ ID NO: 632779 - RNA, 19 nt, Homo sapiens
  misc_RNA (1)...(19): siRNA sense strand
ggacacccaggagcugaga

SEQ ID NO: 632780 - RNA, 19 nt, Homo sapiens
  misc_RNA (1)...(19): siRNA sense strand
aaucacuccuacacgcuau

SEQ ID NO: 632781 - RNA, 19 nt, Homo sapiens
  misc_RNA (1)...(19): siRNA sense strand
caggugaagguagaaugua

SEQ ID NO: 632782 - RNA, 19 nt, Homo sapiens
  misc_RNA (1)...(19): siRNA sense strand
aagaugagcugcuggagaa

SEQ ID NO: 632783 - RNA, 19 nt, Homo sapiens
  misc_RNA (1)...(19): siRNA sense strand
gacgagaucuaugagcuuu

SEQ ID NO: 632784 - RNA, 19 nt, Homo sapiens
  misc_RNA (1)...(19): siRNA sense strand
gaagguagaauguaagaag

SEQ ID NO: 632785 - RNA, 19 nt, Homo sapiens
  misc_RNA (1)...(19): siRNA sense strand
gagcgacucucgggcaauu

SEQ ID NO: 632786 - RNA, 19 nt, Homo sapiens
  misc_RNA (1)...(19): siRNA sense strand
ucuaugagcuuucuuaugc

SEQ ID NO: 632787 - RNA, 19 nt, Homo sapiens
  misc_RNA (1)...(19): siRNA sense strand
agucuguguucaagaauua

SEQ ID NO: 632788 - RNA, 19 nt, Homo sapiens
  misc_RNA (1)...(19): siRNA sense strand
caagaauuaugacccugaa

SEQ ID NO: 632789 - RNA, 19 nt, Homo sapiens
  misc_RNA (1)...(19): siRNA sense strand
gaagaagucauaggucguu

SEQ ID NO: 632790 - RNA, 19 nt, Homo sapiens
  misc_RNA (1)...(19): siRNA sense strand
gagaccaggugaagguaga

SEQ ID NO: 632791 - RNA, 19 nt, Homo sapiens
  misc_RNA (1)...(19): siRNA sense strand
uccaccagcugcagaauuu

SEQ ID NO: 632792 - RNA, 19 nt, Homo sapiens
  misc_RNA (1)...(19): siRNA sense strand
ccagcuagaagaagucaua

SEQ ID NO: 632793 - RNA, 19 nt, Homo sapiens
  misc_RNA (1)...(19): siRNA sense strand
caacucagcccagagaaga

SEQ ID NO: 632794 - RNA, 19 nt, Homo sapiens
  misc_RNA (1)...(19): siRNA sense strand
ggaagucccaccaggaaug

SEQ ID NO: 632795 - RNA, 19 nt, Homo sapiens
  misc_RNA (1)...(19): siRNA sense strand
gcagagaccaggugaaggu

SEQ ID NO: 632796 - RNA, 19 nt, Homo sapiens
  misc_RNA (1)...(19): siRNA sense strand
gaggaagucccaccaggaa

SEQ ID NO: 632797 - RNA, 19 nt, Homo sapiens
  misc_RNA (1)...(19): siRNA sense strand
agaaaugcauccaguccuu

SEQ ID NO: 632798 - RNA, 19 nt, Homo sapiens
  misc_RNA (1)...(19): siRNA sense strand
gaaaagacaguaagaggaa

SEQ ID NO: 632799 - RNA, 19 nt, Homo sapiens
  misc_RNA (1)...(19): siRNA sense strand
cacaggugcuggacaaguu

SEQ ID NO: 632800 - RNA, 19 nt, Homo sapiens
  misc_RNA (1)...(19): siRNA sense strand
gagucuguguucaagaauu

SEQ ID NO: 632801 - RNA, 19 nt, Homo sapiens
  misc_RNA (1)...(19): siRNA sense strand
gagccgcguugucccaaga

SEQ ID NO: 632802 - RNA, 19 nt, Homo sapiens
  misc_RNA (1)...(19): siRNA sense strand
cggaagacgagaucuauga

SEQ ID NO: 632803 - RNA, 19 nt, Homo sapiens
  misc_RNA (1)...(19): siRNA sense strand
uggagucuguguucaagaa

SEQ ID NO: 632804 - RNA, 19 nt, Homo sapiens
  misc_RNA (1)...(19): siRNA sense strand
ugagacggcugcagaucug

SEQ ID NO: 632805 - RNA, 19 nt, Homo sapiens
  misc_RNA (1)...(19): siRNA sense strand
gcuagaagaagucauaggu

SEQ ID NO: 632806 - RNA, 19 nt, Homo sapiens
  misc_RNA (1)...(19): siRNA sense strand
gaucuaugagcuuucuuau

SEQ ID NO: 632807 - RNA, 19 nt, Homo sapiens
  misc_RNA (1)...(19): siRNA sense strand
aggugaagguagaauguaa

SEQ ID NO: 632808 - RNA, 19 nt, Homo sapiens
  misc_RNA (1)...(19): siRNA sense strand
gaggauccuucagcagaga

SEQ ID NO: 632809 - RNA, 19 nt, Homo sapiens
  misc_RNA (1)...(19): siRNA sense strand
ggaaaucagcaaggucaug

SEQ ID NO: 632810 - RNA, 19 nt, Homo sapiens
  misc_RNA (1)...(19): siRNA sense strand
gcaccaggauccccagcua

SEQ ID NO: 632811 - RNA, 19 nt, Homo sapiens
  misc_RNA (1)...(19): siRNA sense strand
aagguagaauguaagaaga

SEQ ID NO: 632812 - RNA, 19 nt, Homo sapiens
  misc_RNA (1)...(19): siRNA sense strand
gaagucauaggucguuucu

SEQ ID NO: 632813 - RNA, 19 nt, Homo sapiens
  misc_RNA (1)...(19): siRNA sense strand
gaaggccgaggaacaaucu

SEQ ID NO: 632814 - RNA, 19 nt, Homo sapiens
  misc_RNA (1)...(19): siRNA sense strand
gaccugcggagcuacguuu

SEQ ID NO: 632815 - RNA, 19 nt, Homo sapiens
  misc_RNA (1)...(19): siRNA sense strand
cgagaucuaugagcuuucu

SEQ ID NO: 632816 - RNA, 19 nt, Homo sapiens
  misc_RNA (1)...(19): siRNA sense strand
agaucuaugagcuuucuua

SEQ ID NO: 632817 - RNA, 19 nt, Homo sapiens
  misc_RNA (1)...(19): siRNA sense strand
gguggagucuguguucaag

SEQ ID NO: 632818 - RNA, 19 nt, Homo sapiens
  misc_RNA (1)...(19): siRNA sense strand
gagaagacugggagacucu

SEQ ID NO: 632819 - RNA, 19 nt, Homo sapiens
  misc_RNA (1)...(19): siRNA sense strand
gaacagaaaagacaguaag

SEQ ID NO: 632820 - RNA, 19 nt, Homo sapiens
  misc_RNA (1)...(19): siRNA sense strand
acacggaagacgagaucua

SEQ ID NO: 632821 - RNA, 19 nt, Homo sapiens
  misc_RNA (1)...(19): siRNA sense strand
gcaacucagcccagagaag

SEQ ID NO: 632822 - RNA, 19 nt, Homo sapiens
  misc_RNA (1)...(19): siRNA sense strand
gugaagguagaauguaaga

SEQ ID NO: 632823 - RNA, 19 nt, Homo sapiens
  misc_RNA (1)...(19): siRNA sense strand
cauccaguccuucgauuca

SEQ ID NO: 632824 - RNA, 19 nt, Homo sapiens
  misc_RNA (1)...(19): siRNA sense strand
ggaagacgagaucuaugag

SEQ ID NO: 632825 - RNA, 19 nt, Homo sapiens
  misc_RNA (1)...(19): siRNA sense strand
gaaccugggccugcugagu

SEQ ID NO: 632826 - RNA, 19 nt, Homo sapiens
  misc_RNA (1)...(19): siRNA sense strand
aggcacagcccgacagguu

SEQ ID NO: 632827 - RNA, 19 nt, Homo sapiens
  misc_RNA (1)...(19): siRNA sense strand
gaugagcugcuggagaaau

SEQ ID NO: 632828 - RNA, 19 nt, Homo sapiens
  misc_RNA (1)...(19): siRNA sense strand
ccaggugaagguagaaugu

SEQ ID NO: 632829 - RNA, 19 nt, Homo sapiens
  misc_RNA (1)...(19): siRNA sense strand
uacccaagcugaacaaccu

SEQ ID NO: 632830 - RNA, 19 nt, Homo sapiens
  misc_RNA (1)...(19): siRNA sense strand
gaggaccacaugcucaaca

SEQ ID NO: 632831 - RNA, 19 nt, Homo sapiens
  misc_RNA (1)...(19): siRNA sense strand
uggcucagcaccucaccua

SEQ ID NO: 632832 - RNA, 19 nt, Homo sapiens
  misc_RNA (1)...(19): siRNA sense strand
gacccaccaucaacugcau

SEQ ID NO: 632833 - RNA, 19 nt, Homo sapiens
  misc_RNA (1)...(19): siRNA sense strand
gcauccaguccuucgauuc

SEQ ID NO: 632834 - RNA, 19 nt, Homo sapiens
  misc_RNA (1)...(19): siRNA sense strand
gcugguggagucuguguuc

SEQ ID NO: 632835 - RNA, 19 nt, Homo sapiens
  misc_RNA (1)...(19): siRNA sense strand
gaauuucaacacgcugaug

SEQ ID NO: 632836 - RNA, 19 nt, Homo sapiens
  misc_RNA (1)...(19): siRNA sense strand
ggacacccaggagcugaga

SEQ ID NO: 632837 - RNA, 19 nt, Homo sapiens
  misc_RNA (1)...(19): siRNA sense strand
aaucacuccuacacgcuau

SEQ ID NO: 632838 - RNA, 19 nt, Homo sapiens
  misc_RNA (1)...(19): siRNA sense strand
caggugaagguagaaugua

SEQ ID NO: 632839 - RNA, 19 nt, Homo sapiens
  misc_RNA (1)...(19): siRNA sense strand
aagaugagcugcuggagaa

SEQ ID NO: 632840 - RNA, 19 nt, Homo sapiens
  misc_RNA (1)...(19): siRNA sense strand
gacgagaucuaugagcuuu

SEQ ID NO: 632841 - RNA, 19 nt, Homo sapiens
  misc_RNA (1)...(19): siRNA sense strand
gaagguagaauguaagaag

SEQ ID NO: 632842 - RNA, 19 nt, Homo sapiens
  misc_RNA (1)...(19): siRNA sense strand
gagcgacucucgggcaauu

SEQ ID NO: 632843 - RNA, 19 nt, Homo sapiens
  misc_RNA (1)...(19): siRNA sense strand
ucuaugagcuuucuuaugc

SEQ ID NO: 632844 - RNA, 19 nt, Homo sapiens
  misc_RNA (1)...(19): siRNA sense strand
agucuguguucaagaauua

SEQ ID NO: 632845 - RNA, 19 nt, Homo sapiens
  misc_RNA (1)...(19): siRNA sense strand
caagaauuaugacccugaa

SEQ ID NO: 632846 - RNA, 19 nt, Homo sapiens
  misc_RNA (1)...(19): siRNA sense strand
gaagaagucauaggucguu

SEQ ID NO: 632847 - RNA, 19 nt, Homo sapiens
  misc_RNA (1)...(19): siRNA sense strand
gagaccaggugaagguaga

SEQ ID NO: 632848 - RNA, 19 nt, Homo sapiens
  misc_RNA (1)...(19): siRNA sense strand
uccaccagcugcagaauuu

SEQ ID NO: 632849 - RNA, 19 nt, Homo sapiens
  misc_RNA (1)...(19): siRNA sense strand
ccagcuagaagaagucaua

SEQ ID NO: 632850 - RNA, 19 nt, Homo sapiens
  misc_RNA (1)...(19): siRNA sense strand
caacucagcccagagaaga

SEQ ID NO: 632851 - RNA, 19 nt, Homo sapiens
  misc_RNA (1)...(19): siRNA sense strand
ggaagucccaccaggaaug

SEQ ID NO: 632852 - RNA, 19 nt, Homo sapiens
  misc_RNA (1)...(19): siRNA sense strand
gcagagaccaggugaaggu

SEQ ID NO: 632853 - RNA, 19 nt, Homo sapiens
  misc_RNA (1)...(19): siRNA sense strand
gaggaagucccaccaggaa

SEQ ID NO: 632854 - RNA, 19 nt, Homo sapiens
  misc_RNA (1)...(19): siRNA sense strand
agaaaugcauccaguccuu

SEQ ID NO: 632855 - RNA, 19 nt, Homo sapiens
  misc_RNA (1)...(19): siRNA sense strand
gaaaagacaguaagaggaa

SEQ ID NO: 632856 - RNA, 19 nt, Homo sapiens
  misc_RNA (1)...(19): siRNA sense strand
cacaggugcuggacaaguu

SEQ ID NO: 632857 - RNA, 19 nt, Homo sapiens
  misc_RNA (1)...(19): siRNA sense strand
gagucuguguucaagaauu

SEQ ID NO: 632858 - RNA, 19 nt, Homo sapiens
  misc_RNA (1)...(19): siRNA sense strand
gagccgcguugucccaaga

SEQ ID NO: 632859 - RNA, 19 nt, Homo sapiens
  misc_RNA (1)...(19): siRNA sense strand
cggaagacgagaucuauga

SEQ ID NO: 632860 - RNA, 19 nt, Homo sapiens
  misc_RNA (1)...(19): siRNA sense strand
uggagucuguguucaagaa

SEQ ID NO: 632861 - RNA, 19 nt, Homo sapiens
  misc_RNA (1)...(19): siRNA sense strand
ugagacggcugcagaucug

SEQ ID NO: 632862 - RNA, 19 nt, Homo sapiens
  misc_RNA (1)...(19): siRNA sense strand
gcuagaagaagucauaggu

SEQ ID NO: 632863 - RNA, 19 nt, Homo sapiens
  misc_RNA (1)...(19): siRNA sense strand
gaucuaugagcuuucuuau

SEQ ID NO: 632864 - RNA, 19 nt, Homo sapiens
  misc_RNA (1)...(19): siRNA sense strand
aggugaagguagaauguaa

SEQ ID NO: 632865 - RNA, 19 nt, Homo sapiens
  misc_RNA (1)...(19): siRNA sense strand
gaggauccuucagcagaga

SEQ ID NO: 632866 - RNA, 19 nt, Homo sapiens
  misc_RNA (1)...(19): siRNA sense strand
ggaaaucagcaaggucaug

SEQ ID NO: 632867 - RNA, 19 nt, Homo sapiens
  misc_RNA (1)...(19): siRNA sense strand
gcaccaggauccccagcua

SEQ ID NO: 632868 - RNA, 19 nt, Homo sapiens
  misc_RNA (1)...(19): siRNA sense strand
aagguagaauguaagaaga

SEQ ID NO: 632869 - RNA, 19 nt, Homo sapiens
  misc_RNA (1)...(19): siRNA sense strand
gaagucauaggucguuucu

SEQ ID NO: 632870 - RNA, 19 nt, Homo sapiens
  misc_RNA (1)...(19): siRNA sense strand
gaaggccgaggaacaaucu

SEQ ID NO: 632871 - RNA, 19 nt, Homo sapiens
  misc_RNA (1)...(19): siRNA sense strand
gaccugcggagcuacguuu

SEQ ID NO: 632872 - RNA, 19 nt, Homo sapiens
  misc_RNA (1)...(19): siRNA sense strand
cgagaucuaugagcuuucu

SEQ ID NO: 632873 - RNA, 19 nt, Homo sapiens
  misc_RNA (1)...(19): siRNA sense strand
agaucuaugagcuuucuua

SEQ ID NO: 632874 - RNA, 19 nt, Homo sapiens
  misc_RNA (1)...(19): siRNA sense strand
gguggagucuguguucaag

SEQ ID NO: 632875 - RNA, 19 nt, Homo sapiens
  misc_RNA (1)...(19): siRNA sense strand
gagaagacugggagacucu

SEQ ID NO: 632876 - RNA, 19 nt, Homo sapiens
  misc_RNA (1)...(19): siRNA sense strand
gaacagaaaagacaguaag

SEQ ID NO: 632877 - RNA, 19 nt, Homo sapiens
  misc_RNA (1)...(19): siRNA sense strand
acacggaagacgagaucua

SEQ ID NO: 632878 - RNA, 19 nt, Homo sapiens
  misc_RNA (1)...(19): siRNA sense strand
gcaacucagcccagagaag

SEQ ID NO: 632879 - RNA, 19 nt, Homo sapiens
  misc_RNA (1)...(19): siRNA sense strand
gugaagguagaauguaaga

SEQ ID NO: 632880 - RNA, 19 nt, Homo sapiens
  misc_RNA (1)...(19): siRNA sense strand
cauccaguccuucgauuca

SEQ ID NO: 632881 - RNA, 19 nt, Homo sapiens
  misc_RNA (1)...(19): siRNA sense strand
ggaagacgagaucuaugag

SEQ ID NO: 632882 - RNA, 19 nt, Homo sapiens
  misc_RNA (1)...(19): siRNA sense strand
gaaccugggccugcugagu

SEQ ID NO: 632883 - RNA, 19 nt, Homo sapiens
  misc_RNA (1)...(19): siRNA sense strand
aggcacagcccgacagguu

SEQ ID NO: 632884 - RNA, 19 nt, Homo sapiens
  misc_RNA (1)...(19): siRNA sense strand
gaugagcugcuggagaaau

SEQ ID NO: 632885 - RNA, 19 nt, Homo sapiens
  misc_RNA (1)...(19): siRNA sense strand
ccaggugaagguagaaugu

SEQ ID NO: 632886 - RNA, 19 nt, Homo sapiens
  misc_RNA (1)...(19): siRNA sense strand
uacccaagcugaacaaccu

SEQ ID NO: 632887 - RNA, 19 nt, Homo sapiens
  misc_RNA (1)...(19): siRNA sense strand
gaggaccacaugcucaaca

SEQ ID NO: 632888 - RNA, 19 nt, Homo sapiens
  misc_RNA (1)...(19): siRNA sense strand
uggcucagcaccucaccua

SEQ ID NO: 632889 - RNA, 19 nt, Homo sapiens
  misc_RNA (1)...(19): siRNA sense strand
gacccaccaucaacugcau

SEQ ID NO: 632890 - RNA, 19 nt, Homo sapiens
  misc_RNA (1)...(19): siRNA sense strand
gcauccaguccuucgauuc

SEQ ID NO: 632891 - RNA, 19 nt, Homo sapiens
  misc_RNA (1)...(19): siRNA sense strand
gcugguggagucuguguuc

SEQ ID NO: 632892 - RNA, 19 nt, Homo sapiens
  misc_RNA (1)...(19): siRNA sense strand
gaauuucaacacgcugaug

SEQ ID NO: 632893 - RNA, 19 nt, Homo sapiens
  misc_RNA (1)...(19): siRNA sense strand
ggacacccaggagcugaga

SEQ ID NO: 632894 - RNA, 19 nt, Homo sapiens
  misc_RNA (1)...(19): siRNA sense strand
aaucacuccuacacgcuau

SEQ ID NO: 632895 - RNA, 19 nt, Homo sapiens
  misc_RNA (1)...(19): siRNA sense strand
caggugaagguagaaugua

SEQ ID NO: 632896 - RNA, 19 nt, Homo sapiens
  misc_RNA (1)...(19): siRNA sense strand
gcaaguggaugaugagauu

SEQ ID NO: 632897 - RNA, 19 nt, Homo sapiens
  misc_RNA (1)...(19): siRNA sense strand
cugcugggcugcaacauua

SEQ ID NO: 632898 - RNA, 19 nt, Homo sapiens
  misc_RNA (1)...(19): siRNA sense strand
caacauuauuccucugcaa

SEQ ID NO: 632899 - RNA, 19 nt, Homo sapiens
  misc_RNA (1)...(19): siRNA sense strand
gcagaucaaggccaacuau

SEQ ID NO: 632900 - RNA, 19 nt, Homo sapiens
  misc_RNA (1)...(19): siRNA sense strand
gcaaacugggucagaguga

SEQ ID NO: 632901 - RNA, 19 nt, Homo sapiens
  misc_RNA (1)...(19): siRNA sense strand
ccaacacgcugggcaggaa

SEQ ID NO: 632902 - RNA, 19 nt, Homo sapiens
  misc_RNA (1)...(19): siRNA sense strand
gauagaagcgcagaucaag

SEQ ID NO: 632903 - RNA, 19 nt, Homo sapiens
  misc_RNA (1)...(19): siRNA sense strand
aaacaccagcuuagacuug

SEQ ID NO: 632904 - RNA, 19 nt, Homo sapiens
  misc_RNA (1)...(19): siRNA sense strand
augaugagauuguggaguu

SEQ ID NO: 632905 - RNA, 19 nt, Homo sapiens
  misc_RNA (1)...(19): siRNA sense strand
ggagauagaagcgcagauc

SEQ ID NO: 632906 - RNA, 19 nt, Homo sapiens
  misc_RNA (1)...(19): siRNA sense strand
gaucaaggccaacuaugac

SEQ ID NO: 632907 - RNA, 19 nt, Homo sapiens
  misc_RNA (1)...(19): siRNA sense strand
acaaggcagugaugaagca

SEQ ID NO: 632908 - RNA, 19 nt, Homo sapiens
  misc_RNA (1)...(19): siRNA sense strand
cauuauuccucugcaaaga

SEQ ID NO: 632909 - RNA, 19 nt, Homo sapiens
  misc_RNA (1)...(19): siRNA sense strand
gagauagaagcgcagauca

SEQ ID NO: 632910 - RNA, 19 nt, Homo sapiens
  misc_RNA (1)...(19): siRNA sense strand
gcgcaaggaggagauagaa

SEQ ID NO: 632911 - RNA, 19 nt, Homo sapiens
  misc_RNA (1)...(19): siRNA sense strand
uggcugaggcccacaaaga

SEQ ID NO: 632912 - RNA, 19 nt, Homo sapiens
  misc_RNA (1)...(19): siRNA sense strand
cagcaucgcgggucugcaa

SEQ ID NO: 632913 - RNA, 19 nt, Homo sapiens
  misc_RNA (1)...(19): siRNA sense strand
agaucaaggccaacuauga

SEQ ID NO: 632914 - RNA, 19 nt, Homo sapiens
  misc_RNA (1)...(19): siRNA sense strand
caucauaugccugcagaau

SEQ ID NO: 632915 - RNA, 19 nt, Homo sapiens
  misc_RNA (1)...(19): siRNA sense strand
caacuaugacgugcuggaa

SEQ ID NO: 632916 - RNA, 19 nt, Homo sapiens
  misc_RNA (1)...(19): siRNA sense strand
cagcuuagacuuguuccaa

SEQ ID NO: 632917 - RNA, 19 nt, Homo sapiens
  misc_RNA (1)...(19): siRNA sense strand
ggacugcugggcugcaaca

SEQ ID NO: 632918 - RNA, 19 nt, Homo sapiens
  misc_RNA (1)...(19): siRNA sense strand
uuauuccucugcaaagaug

SEQ ID NO: 632919 - RNA, 19 nt, Homo sapiens
  misc_RNA (1)...(19): siRNA sense strand
gggaagccccugaauguga

SEQ ID NO: 632920 - RNA, 19 nt, Homo sapiens
  misc_RNA (1)...(19): siRNA sense strand
acuaugacgugcuggaaag

SEQ ID NO: 632921 - RNA, 19 nt, Homo sapiens
  misc_RNA (1)...(19): siRNA sense strand
aaacugggucagagugaga

SEQ ID NO: 632922 - RNA, 19 nt, Homo sapiens
  misc_RNA (1)...(19): siRNA sense strand
caucgcgggucugcaagug

SEQ ID NO: 632923 - RNA, 19 nt, Homo sapiens
  misc_RNA (1)...(19): siRNA sense strand
gucugcaaguggaugauga

SEQ ID NO: 632924 - RNA, 19 nt, Homo sapiens
  misc_RNA (1)...(19): siRNA sense strand
cgccaggcacaacaucaua

SEQ ID NO: 632925 - RNA, 19 nt, Homo sapiens
  misc_RNA (1)...(19): siRNA sense strand
gcugggcugcaacauuauu

SEQ ID NO: 632926 - RNA, 19 nt, Homo sapiens
  misc_RNA (1)...(19): siRNA sense strand
caacacgcugggcaggaaa

SEQ ID NO: 632927 - RNA, 19 nt, Homo sapiens
  misc_RNA (1)...(19): siRNA sense strand
agauagaagcgcagaucaa

SEQ ID NO: 632928 - RNA, 19 nt, Homo sapiens
  misc_RNA (1)...(19): siRNA sense strand
ggagagagcaguuagagaa

SEQ ID NO: 632929 - RNA, 19 nt, Homo sapiens
  misc_RNA (1)...(19): siRNA sense strand
gaacagcaccggcaacuca

SEQ ID NO: 632930 - RNA, 19 nt, Homo sapiens
  misc_RNA (1)...(19): siRNA sense strand
gagagcaguuagagaagua

SEQ ID NO: 632931 - RNA, 19 nt, Homo sapiens
  misc_RNA (1)...(19): siRNA sense strand
cagaugacuugauuggaua

SEQ ID NO: 632932 - RNA, 19 nt, Homo sapiens
  misc_RNA (1)...(19): siRNA sense strand
gaacugauggugaagaaau

SEQ ID NO: 632933 - RNA, 19 nt, Homo sapiens
  misc_RNA (1)...(19): siRNA sense strand
ugacuugauuggauacuuu

SEQ ID NO: 632934 - RNA, 19 nt, Homo sapiens
  misc_RNA (1)...(19): siRNA sense strand
gcgagacuuucaacaguuu

SEQ ID NO: 632935 - RNA, 19 nt, Homo sapiens
  misc_RNA (1)...(19): siRNA sense strand
guacggaaguugcaagagu

SEQ ID NO: 632936 - RNA, 19 nt, Homo sapiens
  misc_RNA (1)...(19): siRNA sense strand
ccagaugacuugauuggau

SEQ ID NO: 632937 - RNA, 19 nt, Homo sapiens
  misc_RNA (1)...(19): siRNA sense strand
cuacguggccuauaacauu

SEQ ID NO: 632938 - RNA, 19 nt, Homo sapiens
  misc_RNA (1)...(19): siRNA sense strand
ccgccuacguggccuauaa

SEQ ID NO: 632939 - RNA, 19 nt, Homo sapiens
  misc_RNA (1)...(19): siRNA sense strand
ggaaguugcaagaguuuga

SEQ ID NO: 632940 - RNA, 19 nt, Homo sapiens
  misc_RNA (1)...(19): siRNA sense strand
ggaacuggcuuuugaauac

SEQ ID NO: 632941 - RNA, 19 nt, Homo sapiens
  misc_RNA (1)...(19): siRNA sense strand
uugaauaccucaugagcaa

SEQ ID NO: 632942 - RNA, 19 nt, Homo sapiens
  misc_RNA (1)...(19): siRNA sense strand
cagcgagacuuucaacagu

SEQ ID NO: 632943 - RNA, 19 nt, Homo sapiens
  misc_RNA (1)...(19): siRNA sense strand
ggaaguguccuuggaagug

SEQ ID NO: 632944 - RNA, 19 nt, Homo sapiens
  misc_RNA (1)...(19): siRNA sense strand
uggucaaacucucaaguaa

SEQ ID NO: 632945 - RNA, 19 nt, Homo sapiens
  misc_RNA (1)...(19): siRNA sense strand
ggauggagccuuuucuuuu

SEQ ID NO: 632946 - RNA, 19 nt, Homo sapiens
  misc_RNA (1)...(19): siRNA sense strand
aguuugagcugccuuaugu

SEQ ID NO: 632947 - RNA, 19 nt, Homo sapiens
  misc_RNA (1)...(19): siRNA sense strand
gauggagccuuuucuuuug

SEQ ID NO: 632948 - RNA, 19 nt, Homo sapiens
  misc_RNA (1)...(19): siRNA sense strand
ucaacgugcuaacuucaga

SEQ ID NO: 632949 - RNA, 19 nt, Homo sapiens
  misc_RNA (1)...(19): siRNA sense strand
uugaugaacugauggugaa

SEQ ID NO: 632950 - RNA, 19 nt, Homo sapiens
  misc_RNA (1)...(19): siRNA sense strand
caccuccucuguaccauug

SEQ ID NO: 632951 - RNA, 19 nt, Homo sapiens
  misc_RNA (1)...(19): siRNA sense strand
ggccugaaccugcuuuaug

SEQ ID NO: 632952 - RNA, 19 nt, Homo sapiens
  misc_RNA (1)...(19): siRNA sense strand
gauuggauacuuuagucua

SEQ ID NO: 632953 - RNA, 19 nt, Homo sapiens
  misc_RNA (1)...(19): siRNA sense strand
gggagucuauggucaaacu

SEQ ID NO: 632954 - RNA, 19 nt, Homo sapiens
  misc_RNA (1)...(19): siRNA sense strand
gagucaagaguauaagauu

SEQ ID NO: 632955 - RNA, 19 nt, Homo sapiens
  misc_RNA (1)...(19): siRNA sense strand
agucaagaguauaagauug

SEQ ID NO: 632956 - RNA, 19 nt, Homo sapiens
  misc_RNA (1)...(19): siRNA sense strand
guggcugacuucccagaaa

SEQ ID NO: 632957 - RNA, 19 nt, Homo sapiens
  misc_RNA (1)...(19): siRNA sense strand
caugguugaugaacugaug

SEQ ID NO: 632958 - RNA, 19 nt, Homo sapiens
  misc_RNA (1)...(19): siRNA sense strand
ggagucaagaguauaagau

SEQ ID NO: 632959 - RNA, 19 nt, Homo sapiens
  misc_RNA (1)...(19): siRNA sense strand
gucaaacucucaaguaagc

SEQ ID NO: 632960 - RNA, 19 nt, Homo sapiens
  misc_RNA (1)...(19): siRNA sense strand
gaguauaagauugugcuaa

SEQ ID NO: 632961 - RNA, 19 nt, Homo sapiens
  misc_RNA (1)...(19): siRNA sense strand
gcggcacuauggcuacuug

SEQ ID NO: 632962 - RNA, 19 nt, Homo sapiens
  misc_RNA (1)...(19): siRNA sense strand
aguauaagauugugcuaag

SEQ ID NO: 632963 - RNA, 19 nt, Homo sapiens
  misc_RNA (1)...(19): siRNA sense strand
gcaguuagagaaguacaug

SEQ ID NO: 632964 - RNA, 19 nt, Homo sapiens
  misc_RNA (1)...(19): siRNA sense strand
gugcuaaggaagaguuauu

SEQ ID NO: 632965 - RNA, 19 nt, Homo sapiens
  misc_RNA (1)...(19): siRNA sense strand
uacggaaguugcaagaguu

SEQ ID NO: 632966 - RNA, 19 nt, Homo sapiens
  misc_RNA (1)...(19): siRNA sense strand
gcagcgagacuuucaacag

SEQ ID NO: 632967 - RNA, 19 nt, Homo sapiens
  misc_RNA (1)...(19): siRNA sense strand
guccaugguugaugaacug

SEQ ID NO: 632968 - RNA, 19 nt, Homo sapiens
  misc_RNA (1)...(19): siRNA sense strand
gccugaaccugcuuuaugc

SEQ ID NO: 632969 - RNA, 19 nt, Homo sapiens
  misc_RNA (1)...(19): siRNA sense strand
gacuugauuggauacuuua

SEQ ID NO: 632970 - RNA, 19 nt, Homo sapiens
  misc_RNA (1)...(19): siRNA sense strand
gugcuaacuucagaucaga

SEQ ID NO: 632971 - RNA, 19 nt, Homo sapiens
  misc_RNA (1)...(19): siRNA sense strand
gaauggaguccugcacugu

SEQ ID NO: 632972 - RNA, 19 nt, Homo sapiens
  misc_RNA (1)...(19): siRNA sense strand
gcgggucaccuccucugua

SEQ ID NO: 632973 - RNA, 19 nt, Homo sapiens
  misc_RNA (1)...(19): siRNA sense strand
gaaguacaugcaagcuguu

SEQ ID NO: 632974 - RNA, 19 nt, Homo sapiens
  misc_RNA (1)...(19): siRNA sense strand
uauaagauugugcuaagga

SEQ ID NO: 632975 - RNA, 19 nt, Homo sapiens
  misc_RNA (1)...(19): siRNA sense strand
gggcacaacaggagacaca

SEQ ID NO: 632976 - RNA, 19 nt, Homo sapiens
  misc_RNA (1)...(19): siRNA sense strand
gaaaucuggcggcaguauc

SEQ ID NO: 632977 - RNA, 19 nt, Homo sapiens
  misc_RNA (1)...(19): siRNA sense strand
gcaacucaaaucucugcaa

SEQ ID NO: 632978 - RNA, 19 nt, Homo sapiens
  misc_RNA (1)...(19): siRNA sense strand
auaagauugugcuaaggaa

SEQ ID NO: 632979 - RNA, 19 nt, Homo sapiens
  misc_RNA (1)...(19): siRNA sense strand
ugagcugccuuaugugucu

SEQ ID NO: 632980 - RNA, 19 nt, Homo sapiens
  misc_RNA (1)...(19): siRNA sense strand
gcucagcaacgggcagaaa

SEQ ID NO: 632981 - RNA, 19 nt, Homo sapiens
  misc_RNA (1)...(19): siRNA sense strand
ggucaaacucucaaguaag

SEQ ID NO: 632982 - RNA, 19 nt, Homo sapiens
  misc_RNA (1)...(19): siRNA sense strand
ugcaguccaugguugauga

SEQ ID NO: 632983 - RNA, 19 nt, Homo sapiens
  misc_RNA (1)...(19): siRNA sense strand
gggacucugccuaugauga

SEQ ID NO: 632984 - RNA, 19 nt, Homo sapiens
  misc_RNA (1)...(19): siRNA sense strand
ucaccagccuucggaguca

SEQ ID NO: 632985 - RNA, 19 nt, Homo sapiens
  misc_RNA (1)...(19): siRNA sense strand
gggagcagcgagacuuuca

SEQ ID NO: 632986 - RNA, 19 nt, Homo sapiens
  misc_RNA (1)...(19): siRNA sense strand
ucugacuccugcugaggua

SEQ ID NO: 632987 - RNA, 19 nt, Homo sapiens
  misc_RNA (1)...(19): siRNA sense strand
uggauacuuuagucuauuc

SEQ ID NO: 632988 - RNA, 19 nt, Homo sapiens
  misc_RNA (1)...(19): siRNA sense strand
ucaagaguauaagauugug

SEQ ID NO: 632989 - RNA, 19 nt, Homo sapiens
  misc_RNA (1)...(19): siRNA sense strand
gucaagaguauaagauugu

SEQ ID NO: 632990 - RNA, 19 nt, Homo sapiens
  misc_RNA (1)...(19): siRNA sense strand
ggucaacgugcuaacuuca

SEQ ID NO: 632991 - RNA, 19 nt, Homo sapiens
  misc_RNA (1)...(19): siRNA sense strand
gaggagagagcaguuagag

SEQ ID NO: 632992 - RNA, 19 nt, Homo sapiens
  misc_RNA (1)...(19): siRNA sense strand
cagcaacgggcagaaaguu

SEQ ID NO: 632993 - RNA, 19 nt, Homo sapiens
  misc_RNA (1)...(19): siRNA sense strand
acagaggagagagcaguua

SEQ ID NO: 632994 - RNA, 19 nt, Homo sapiens
  misc_RNA (1)...(19): siRNA sense strand
uacguggccuauaacauuc

SEQ ID NO: 632995 - RNA, 19 nt, Homo sapiens
  misc_RNA (1)...(19): siRNA sense strand
ucuuccagaugacuugauu

SEQ ID NO: 632996 - RNA, 19 nt, Homo sapiens
  misc_RNA (1)...(19): siRNA sense strand
cugcuugagucaccugaug

SEQ ID NO: 632997 - RNA, 19 nt, Homo sapiens
  misc_RNA (1)...(19): siRNA sense strand
gcaccggcaacucaaaucu

SEQ ID NO: 632998 - RNA, 19 nt, Homo sapiens
  misc_RNA (1)...(19): siRNA sense strand
gagagagcaguuagagaag

SEQ ID NO: 632999 - RNA, 19 nt, Homo sapiens
  misc_RNA (1)...(19): siRNA sense strand
gaguuugagcugccuuaug

SEQ ID NO: 633000 - RNA, 19 nt, Homo sapiens
  misc_RNA (1)...(19): siRNA sense strand
gaugaacugauggugaaga

SEQ ID NO: 633001 - RNA, 19 nt, Homo sapiens
  misc_RNA (1)...(19): siRNA sense strand
ggacucugccuaugaugac

SEQ ID NO: 633002 - RNA, 19 nt, Homo sapiens
  misc_RNA (1)...(19): siRNA sense strand
guauaagauugugcuaagg

SEQ ID NO: 633003 - RNA, 19 nt, Homo sapiens
  misc_RNA (1)...(19): siRNA sense strand
agagagcaguuagagaagu

SEQ ID NO: 633004 - RNA, 19 nt, Homo sapiens
  misc_RNA (1)...(19): siRNA sense strand
ucgagggcauuggagauga

SEQ ID NO: 633005 - RNA, 19 nt, Homo sapiens
  misc_RNA (1)...(19): siRNA sense strand
augaacugauggugaagaa

SEQ ID NO: 633006 - RNA, 19 nt, Homo sapiens
  misc_RNA (1)...(19): siRNA sense strand
ggucaccuccucuguacca

SEQ ID NO: 633007 - RNA, 19 nt, Homo sapiens
  misc_RNA (1)...(19): siRNA sense strand
cgggucaccuccucuguac

SEQ ID NO: 633008 - RNA, 19 nt, Homo sapiens
  misc_RNA (1)...(19): siRNA sense strand
uugauuggauacuuuaguc

SEQ ID NO: 633009 - RNA, 19 nt, Homo sapiens
  misc_RNA (1)...(19): siRNA sense strand
cagaugccagugccaguga

SEQ ID NO: 633010 - RNA, 19 nt, Homo sapiens
  misc_RNA (1)...(19): siRNA sense strand
ccgggagucuauggucaaa

SEQ ID NO: 633011 - RNA, 19 nt, Homo sapiens
  misc_RNA (1)...(19): siRNA sense strand
aaaucuggcggcaguauca

SEQ ID NO: 633012 - RNA, 19 nt, Homo sapiens
  misc_RNA (1)...(19): siRNA sense strand
gagcagcgagacuuucaac

SEQ ID NO: 633013 - RNA, 19 nt, Homo sapiens
  misc_RNA (1)...(19): siRNA sense strand
aagauugugcuaaggaaga

SEQ ID NO: 633014 - RNA, 19 nt, Homo sapiens
  misc_RNA (1)...(19): siRNA sense strand
uauggcuacuugcgcuuug

SEQ ID NO: 633015 - RNA, 19 nt, Homo sapiens
  misc_RNA (1)...(19): siRNA sense strand
gccuggaacuggcuuuuga

SEQ ID NO: 633016 - RNA, 19 nt, Homo sapiens
  misc_RNA (1)...(19): siRNA sense strand
gcacugaucuggacuguca

SEQ ID NO: 633017 - RNA, 19 nt, Homo sapiens
  misc_RNA (1)...(19): siRNA sense strand
ugaccuaccugaauguuua

SEQ ID NO: 633018 - RNA, 19 nt, Homo sapiens
  misc_RNA (1)...(19): siRNA sense strand
gagaacaccuugaucaaau

SEQ ID NO: 633019 - RNA, 19 nt, Homo sapiens
  misc_RNA (1)...(19): siRNA sense strand
ccacucagcugacgcagua

SEQ ID NO: 633020 - RNA, 19 nt, Homo sapiens
  misc_RNA (1)...(19): siRNA sense strand
caagaaggcucagcacaaa

SEQ ID NO: 633021 - RNA, 19 nt, Homo sapiens
  misc_RNA (1)...(19): siRNA sense strand
gcagugaauuugcaaagaa

SEQ ID NO: 633022 - RNA, 19 nt, Homo sapiens
  misc_RNA (1)...(19): siRNA sense strand
gaagaaggaauuucauuug

SEQ ID NO: 633023 - RNA, 19 nt, Homo sapiens
  misc_RNA (1)...(19): siRNA sense strand
gaaggaauuucauuugaca

SEQ ID NO: 633024 - RNA, 19 nt, Homo sapiens
  misc_RNA (1)...(19): siRNA sense strand
cugcagaucuaucccauua

SEQ ID NO: 633025 - RNA, 19 nt, Homo sapiens
  misc_RNA (1)...(19): siRNA sense strand
ggaccaaacugggagauau

SEQ ID NO: 633026 - RNA, 19 nt, Homo sapiens
  misc_RNA (1)...(19): siRNA sense strand
ggagaaguuugcugccuuu

SEQ ID NO: 633027 - RNA, 19 nt, Homo sapiens
  misc_RNA (1)...(19): siRNA sense strand
ggacuaaccuggccaacgu

SEQ ID NO: 633028 - RNA, 19 nt, Homo sapiens
  misc_RNA (1)...(19): siRNA sense strand
ggagguggaugaggacuuu

SEQ ID NO: 633029 - RNA, 19 nt, Homo sapiens
  misc_RNA (1)...(19): siRNA sense strand
gagcguagcagcagaagaa

SEQ ID NO: 633030 - RNA, 19 nt, Homo sapiens
  misc_RNA (1)...(19): siRNA sense strand
gagcaaggaugaccagaag

SEQ ID NO: 633031 - RNA, 19 nt, Homo sapiens
  misc_RNA (1)...(19): siRNA sense strand
ccagaaggaugcugaggaa

SEQ ID NO: 633032 - RNA, 19 nt, Homo sapiens
  misc_RNA (1)...(19): siRNA sense strand
gcaagaaggcucagcacaa

SEQ ID NO: 633033 - RNA, 19 nt, Homo sapiens
  misc_RNA (1)...(19): siRNA sense strand
ggaggagagugaucaaauc

SEQ ID NO: 633034 - RNA, 19 nt, Homo sapiens
  misc_RNA (1)...(19): siRNA sense strand
ggccguaccuucccuguug

SEQ ID NO: 633035 - RNA, 19 nt, Homo sapiens
  misc_RNA (1)...(19): siRNA sense strand
ggaggaagagccagauaaa

SEQ ID NO: 633036 - RNA, 19 nt, Homo sapiens
  misc_RNA (1)...(19): siRNA sense strand
gagagucagugaagagaug

SEQ ID NO: 633037 - RNA, 19 nt, Homo sapiens
  misc_RNA (1)...(19): siRNA sense strand
ggacagagcagaaguuugc

SEQ ID NO: 633038 - RNA, 19 nt, Homo sapiens
  misc_RNA (1)...(19): siRNA sense strand
gaucgggauugguacauga

SEQ ID NO: 633039 - RNA, 19 nt, Homo sapiens
  misc_RNA (1)...(19): siRNA sense strand
ggagagagcgagaggagaa

SEQ ID NO: 633040 - RNA, 19 nt, Homo sapiens
  misc_RNA (1)...(19): siRNA sense strand
cagaucacaugaagagaaa

SEQ ID NO: 633041 - RNA, 19 nt, Homo sapiens
  misc_RNA (1)...(19): siRNA sense strand
cgaagaaggaauuucauuu

SEQ ID NO: 633042 - RNA, 19 nt, Homo sapiens
  misc_RNA (1)...(19): siRNA sense strand
gggaagagagcaaggauga

SEQ ID NO: 633043 - RNA, 19 nt, Homo sapiens
  misc_RNA (1)...(19): siRNA sense strand
ggagacauccuuaucuuca

SEQ ID NO: 633044 - RNA, 19 nt, Homo sapiens
  misc_RNA (1)...(19): siRNA sense strand
gcguguagcugccauguca

SEQ ID NO: 633045 - RNA, 19 nt, Homo sapiens
  misc_RNA (1)...(19): siRNA sense strand
gcagaucacaugaagagaa

SEQ ID NO: 633046 - RNA, 19 nt, Homo sapiens
  misc_RNA (1)...(19): siRNA sense strand
gagcagaaguuugcagauc

SEQ ID NO: 633047 - RNA, 19 nt, Homo sapiens
  misc_RNA (1)...(19): siRNA sense strand
agaacaccuugaucaaaua

SEQ ID NO: 633048 - RNA, 19 nt, Homo sapiens
  misc_RNA (1)...(19): siRNA sense strand
cauaguguaucacgaguug

SEQ ID NO: 633049 - RNA, 19 nt, Homo sapiens
  misc_RNA (1)...(19): siRNA sense strand
agacgucucucacuguuga

SEQ ID NO: 633050 - RNA, 19 nt, Homo sapiens
  misc_RNA (1)...(19): siRNA sense strand
gagcucaacucaaggacau

SEQ ID NO: 633051 - RNA, 19 nt, Homo sapiens
  misc_RNA (1)...(19): siRNA sense strand
gaaguuugcagaucacaug

SEQ ID NO: 633052 - RNA, 19 nt, Homo sapiens
  misc_RNA (1)...(19): siRNA sense strand
ccaacucccuccuacaaau

SEQ ID NO: 633053 - RNA, 19 nt, Homo sapiens
  misc_RNA (1)...(19): siRNA sense strand
cagccaagcucaagggaau

SEQ ID NO: 633054 - RNA, 19 nt, Homo sapiens
  misc_RNA (1)...(19): siRNA sense strand
caucugugcugccuauuuc

SEQ ID NO: 633055 - RNA, 19 nt, Homo sapiens
  misc_RNA (1)...(19): siRNA sense strand
gacggcaucauguuuguua

SEQ ID NO: 633056 - RNA, 19 nt, Homo sapiens
  misc_RNA (1)...(19): siRNA sense strand
gaaggaugcugaggaagag

SEQ ID NO: 633057 - RNA, 19 nt, Homo sapiens
  misc_RNA (1)...(19): siRNA sense strand
gaccaaacugggagauaua

SEQ ID NO: 633058 - RNA, 19 nt, Homo sapiens
  misc_RNA (1)...(19): siRNA sense strand
caacucccuccuacaaaua

SEQ ID NO: 633059 - RNA, 19 nt, Homo sapiens
  misc_RNA (1)...(19): siRNA sense strand
gcaaggaugaccagaagga

SEQ ID NO: 633060 - RNA, 19 nt, Homo sapiens
  misc_RNA (1)...(19): siRNA sense strand
gagaugagcgggauagaag

SEQ ID NO: 633061 - RNA, 19 nt, Homo sapiens
  misc_RNA (1)...(19): siRNA sense strand
gaugagcgggauagaagua

SEQ ID NO: 633062 - RNA, 19 nt, Homo sapiens
  misc_RNA (1)...(19): siRNA sense strand
gcaagucacggcaggagaa

SEQ ID NO: 633063 - RNA, 19 nt, Homo sapiens
  misc_RNA (1)...(19): siRNA sense strand
gaucauuucauccaugcua

SEQ ID NO: 633064 - RNA, 19 nt, Homo sapiens
  misc_RNA (1)...(19): siRNA sense strand
acaacaugcucaacucuau

SEQ ID NO: 633065 - RNA, 19 nt, Homo sapiens
  misc_RNA (1)...(19): siRNA sense strand
ccagagcgccuacaagaau

SEQ ID NO: 633066 - RNA, 19 nt, Homo sapiens
  misc_RNA (1)...(19): siRNA sense strand
gagcgaagccagcagugaa

SEQ ID NO: 633067 - RNA, 19 nt, Homo sapiens
  misc_RNA (1)...(19): siRNA sense strand
ggugcgagcucaacucaag

SEQ ID NO: 633068 - RNA, 19 nt, Homo sapiens
  misc_RNA (1)...(19): siRNA sense strand
ggaagaacaauaauuacuc

SEQ ID NO: 633069 - RNA, 19 nt, Homo sapiens
  misc_RNA (1)...(19): siRNA sense strand
ggagggcgaagaaggaauu

SEQ ID NO: 633070 - RNA, 19 nt, Homo sapiens
  misc_RNA (1)...(19): siRNA sense strand
gaucaaauccgggagaagu

SEQ ID NO: 633071 - RNA, 19 nt, Homo sapiens
  misc_RNA (1)...(19): siRNA sense strand
gcagaucuaucccauuagc

SEQ ID NO: 633072 - RNA, 19 nt, Homo sapiens
  misc_RNA (1)...(19): siRNA sense strand
caaacugggagauauaaug

SEQ ID NO: 633073 - RNA, 19 nt, Homo sapiens
  misc_RNA (1)...(19): siRNA sense strand
gcgaagaaggaauuucauu

SEQ ID NO: 633074 - RNA, 19 nt, Homo sapiens
  misc_RNA (1)...(19): siRNA sense strand
caaagucuccuccuacaag

SEQ ID NO: 633075 - RNA, 19 nt, Homo sapiens
  misc_RNA (1)...(19): siRNA sense strand
gcacaaacacugggaacug

SEQ ID NO: 633076 - RNA, 19 nt, Homo sapiens
  misc_RNA (1)...(19): siRNA sense strand
ucagguugguggucuuauu

SEQ ID NO: 633077 - RNA, 19 nt, Homo sapiens
  misc_RNA (1)...(19): siRNA sense strand
ggaagaggacaguggcuau

SEQ ID NO: 633078 - RNA, 19 nt, Homo sapiens
  misc_RNA (1)...(19): siRNA sense strand
uggaugcucugcagaucua

SEQ ID NO: 633079 - RNA, 19 nt, Homo sapiens
  misc_RNA (1)...(19): siRNA sense strand
aagccgaccuggaucacua

SEQ ID NO: 633080 - RNA, 19 nt, Homo sapiens
  misc_RNA (1)...(19): siRNA sense strand
gaagccagcagugaauuug

SEQ ID NO: 633081 - RNA, 19 nt, Homo sapiens
  misc_RNA (1)...(19): siRNA sense strand
aagaagaaguccaaagucu

SEQ ID NO: 633082 - RNA, 19 nt, Homo sapiens
  misc_RNA (1)...(19): siRNA sense strand
gaucacaugaagagaaaga

SEQ ID NO: 633083 - RNA, 19 nt, Homo sapiens
  misc_RNA (1)...(19): siRNA sense strand
gugcaucugugcugccuau

SEQ ID NO: 633084 - RNA, 19 nt, Homo sapiens
  misc_RNA (1)...(19): siRNA sense strand
caucauguuuguuaucgau

SEQ ID NO: 633085 - RNA, 19 nt, Homo sapiens
  misc_RNA (1)...(19): siRNA sense strand
ucagagaacaccuugauca

SEQ ID NO: 633086 - RNA, 19 nt, Homo sapiens
  misc_RNA (1)...(19): siRNA sense strand
ggaaagacagacauuaucg

SEQ ID NO: 633087 - RNA, 19 nt, Homo sapiens
  misc_RNA (1)...(19): siRNA sense strand
gaguauaugcaguguguga

SEQ ID NO: 633088 - RNA, 19 nt, Homo sapiens
  misc_RNA (1)...(19): siRNA sense strand
gcaucugugcugccuauuu

SEQ ID NO: 633089 - RNA, 19 nt, Homo sapiens
  misc_RNA (1)...(19): siRNA sense strand
gcuaugccauccgcuuuga

SEQ ID NO: 633090 - RNA, 19 nt, Homo sapiens
  misc_RNA (1)...(19): siRNA sense strand
ccaagagagucagugaaga

SEQ ID NO: 633091 - RNA, 19 nt, Homo sapiens
  misc_RNA (1)...(19): siRNA sense strand
gcaagagggacagagauga

SEQ ID NO: 633092 - RNA, 19 nt, Homo sapiens
  misc_RNA (1)...(19): siRNA sense strand
caaaauauccggaaagaca

SEQ ID NO: 633093 - RNA, 19 nt, Homo sapiens
  misc_RNA (1)...(19): siRNA sense strand
cgaccuggaucacuacagu

SEQ ID NO: 633094 - RNA, 19 nt, Homo sapiens
  misc_RNA (1)...(19): siRNA sense strand
cgagggcuaugacgaguuc

SEQ ID NO: 633095 - RNA, 19 nt, Homo sapiens
  misc_RNA (1)...(19): siRNA sense strand
gggcgaagaaggaauuuca

SEQ ID NO: 633096 - RNA, 19 nt, Homo sapiens
  misc_RNA (1)...(19): siRNA sense strand
cgagugggccgaugacaga

SEQ ID NO: 633097 - RNA, 19 nt, Homo sapiens
  misc_RNA (1)...(19): siRNA sense strand
cauguucuauagcgugaaa

SEQ ID NO: 633098 - RNA, 19 nt, Homo sapiens
  misc_RNA (1)...(19): siRNA sense strand
gcaaauuaaaggucuucaa

SEQ ID NO: 633099 - RNA, 19 nt, Homo sapiens
  misc_RNA (1)...(19): siRNA sense strand
gcaccugcauaaacagaag

SEQ ID NO: 633100 - RNA, 19 nt, Homo sapiens
  misc_RNA (1)...(19): siRNA sense strand
ggccaucauugcucggaaa

SEQ ID NO: 633101 - RNA, 19 nt, Homo sapiens
  misc_RNA (1)...(19): siRNA sense strand
guguaacgaucauuucauc

SEQ ID NO: 633102 - RNA, 19 nt, Homo sapiens
  misc_RNA (1)...(19): siRNA sense strand
gacaacaugcucaacucua

SEQ ID NO: 633103 - RNA, 19 nt, Homo sapiens
  misc_RNA (1)...(19): siRNA sense strand
acacugacgugcucuuugg

SEQ ID NO: 633104 - RNA, 19 nt, Homo sapiens
  misc_RNA (1)...(19): siRNA sense strand
gcugcucacuauuaucaga

SEQ ID NO: 633105 - RNA, 19 nt, Homo sapiens
  misc_RNA (1)...(19): siRNA sense strand
uaaugggcgucaagaagga

SEQ ID NO: 633106 - RNA, 19 nt, Homo sapiens
  misc_RNA (1)...(19): siRNA sense strand
ggaacgcagucggcagaga

SEQ ID NO: 633107 - RNA, 19 nt, Homo sapiens
  misc_RNA (1)...(19): siRNA sense strand
gagauccugcucaucguuu

SEQ ID NO: 633108 - RNA, 19 nt, Homo sapiens
  misc_RNA (1)...(19): siRNA sense strand
caaauuaaaggucuucaac

SEQ ID NO: 633109 - RNA, 19 nt, Homo sapiens
  misc_RNA (1)...(19): siRNA sense strand
caacacugacgugcucuuu

SEQ ID NO: 633110 - RNA, 19 nt, Homo sapiens
  misc_RNA (1)...(19): siRNA sense strand
cacgagcgcucccucaaca

SEQ ID NO: 633111 - RNA, 19 nt, Homo sapiens
  misc_RNA (1)...(19): siRNA sense strand
ggaagcacagggagcagaa

SEQ ID NO: 633112 - RNA, 19 nt, Homo sapiens
  misc_RNA (1)...(19): siRNA sense strand
gaagaggacaguggcuaug

SEQ ID NO: 633113 - RNA, 19 nt, Homo sapiens
  misc_RNA (1)...(19): siRNA sense strand
ccugagagcgaucauuuga

SEQ ID NO: 633114 - RNA, 19 nt, Homo sapiens
  misc_RNA (1)...(19): siRNA sense strand
agacauccuuaucuucaug

SEQ ID NO: 633115 - RNA, 19 nt, Homo sapiens
  misc_RNA (1)...(19): siRNA sense strand
gagacauccuuaucuucau

SEQ ID NO: 633116 - RNA, 19 nt, Homo sapiens
  misc_RNA (1)...(19): siRNA sense strand
gaacaugaguguguaaaug

SEQ ID NO: 633117 - RNA, 19 nt, Homo sapiens
  misc_RNA (1)...(19): siRNA sense strand
gcacaaagauagacuacug

SEQ ID NO: 633118 - RNA, 19 nt, Homo sapiens
  misc_RNA (1)...(19): siRNA sense strand
uaacacagaugauuccuau

SEQ ID NO: 633119 - RNA, 19 nt, Homo sapiens
  misc_RNA (1)...(19): siRNA sense strand
gcugauggcuccuaccuuu

SEQ ID NO: 633120 - RNA, 19 nt, Homo sapiens
  misc_RNA (1)...(19): siRNA sense strand
ggaagacggugcaagaaau

SEQ ID NO: 633121 - RNA, 19 nt, Homo sapiens
  misc_RNA (1)...(19): siRNA sense strand
aaacaaggcuacauucuca

SEQ ID NO: 633122 - RNA, 19 nt, Homo sapiens
  misc_RNA (1)...(19): siRNA sense strand
gcagaaggaucaacuacug

SEQ ID NO: 633123 - RNA, 19 nt, Homo sapiens
  misc_RNA (1)...(19): siRNA sense strand
gggaaacgcugccgaagga

SEQ ID NO: 633124 - RNA, 19 nt, Homo sapiens
  misc_RNA (1)...(19): siRNA sense strand
gcagcacccuggagcauaa

SEQ ID NO: 633125 - RNA, 19 nt, Homo sapiens
  misc_RNA (1)...(19): siRNA sense strand
ccaaugguaucacuaugua

SEQ ID NO: 633126 - RNA, 19 nt, Homo sapiens
  misc_RNA (1)...(19): siRNA sense strand
caugaaggauuugcucuua

SEQ ID NO: 633127 - RNA, 19 nt, Homo sapiens
  misc_RNA (1)...(19): siRNA sense strand
aaacaagcaucucuucuau

SEQ ID NO: 633128 - RNA, 19 nt, Homo sapiens
  misc_RNA (1)...(19): siRNA sense strand
caacaucccuggcucauac

SEQ ID NO: 633129 - RNA, 19 nt, Homo sapiens
  misc_RNA (1)...(19): siRNA sense strand
ggacuacugugccucagaa

SEQ ID NO: 633130 - RNA, 19 nt, Homo sapiens
  misc_RNA (1)...(19): siRNA sense strand
aaagaugucugccaagcua

SEQ ID NO: 633131 - RNA, 19 nt, Homo sapiens
  misc_RNA (1)...(19): siRNA sense strand
ccacacagguccacacaga

SEQ ID NO: 633132 - RNA, 19 nt, Homo sapiens
  misc_RNA (1)...(19): siRNA sense strand
gaagaaaugacacagagaa

SEQ ID NO: 633133 - RNA, 19 nt, Homo sapiens
  misc_RNA (1)...(19): siRNA sense strand
gcagcacugucaagaauga

SEQ ID NO: 633134 - RNA, 19 nt, Homo sapiens
  misc_RNA (1)...(19): siRNA sense strand
acacagcgcuuagaagaaa

SEQ ID NO: 633135 - RNA, 19 nt, Homo sapiens
  misc_RNA (1)...(19): siRNA sense strand
ggaaggaugucugcaaauc

SEQ ID NO: 633136 - RNA, 19 nt, Homo sapiens
  misc_RNA (1)...(19): siRNA sense strand
gagugggccugcuccaaua

SEQ ID NO: 633137 - RNA, 19 nt, Homo sapiens
  misc_RNA (1)...(19): siRNA sense strand
caaacaagcaucucuucua

SEQ ID NO: 633138 - RNA, 19 nt, Homo sapiens
  misc_RNA (1)...(19): siRNA sense strand
caacauggacagauccuuu

SEQ ID NO: 633139 - RNA, 19 nt, Homo sapiens
  misc_RNA (1)...(19): siRNA sense strand
uaacacagcgcuuagaaga

SEQ ID NO: 633140 - RNA, 19 nt, Homo sapiens
  misc_RNA (1)...(19): siRNA sense strand
ccagugccaugaaggauuu

SEQ ID NO: 633141 - RNA, 19 nt, Homo sapiens
  misc_RNA (1)...(19): siRNA sense strand
guuugucacuggaauuaua

SEQ ID NO: 633142 - RNA, 19 nt, Homo sapiens
  misc_RNA (1)...(19): siRNA sense strand
gaaaugacacagagaaugg

SEQ ID NO: 633143 - RNA, 19 nt, Homo sapiens
  misc_RNA (1)...(19): siRNA sense strand
gcauaacugugcccacuuc

SEQ ID NO: 633144 - RNA, 19 nt, Homo sapiens
  misc_RNA (1)...(19): siRNA sense strand
gcacugaaggcccaauuga

SEQ ID NO: 633145 - RNA, 19 nt, Homo sapiens
  misc_RNA (1)...(19): siRNA sense strand
gagcagcugugucugaaca

SEQ ID NO: 633146 - RNA, 19 nt, Homo sapiens
  misc_RNA (1)...(19): siRNA sense strand
ggaccacgguugugaacau

SEQ ID NO: 633147 - RNA, 19 nt, Homo sapiens
  misc_RNA (1)...(19): siRNA sense strand
gaaggaaggaugucugcaa

SEQ ID NO: 633148 - RNA, 19 nt, Homo sapiens
  misc_RNA (1)...(19): siRNA sense strand
gaacauucguguguaagca

SEQ ID NO: 633149 - RNA, 19 nt, Homo sapiens
  misc_RNA (1)...(19): siRNA sense strand
gaagacgugugcaaaauug

SEQ ID NO: 633150 - RNA, 19 nt, Homo sapiens
  misc_RNA (1)...(19): siRNA sense strand
gaucaaugcaaaugugaaa

SEQ ID NO: 633151 - RNA, 19 nt, Homo sapiens
  misc_RNA (1)...(19): siRNA sense strand
caacucagccaaagacaug

SEQ ID NO: 633152 - RNA, 19 nt, Homo sapiens
  misc_RNA (1)...(19): siRNA sense strand
ggacaucuugcaauucuug

SEQ ID NO: 633153 - RNA, 19 nt, Homo sapiens
  misc_RNA (1)...(19): siRNA sense strand
gaucagacgacuugcagaa

SEQ ID NO: 633154 - RNA, 19 nt, Homo sapiens
  misc_RNA (1)...(19): siRNA sense strand
gaaaaucgccugagauaca

SEQ ID NO: 633155 - RNA, 19 nt, Homo sapiens
  misc_RNA (1)...(19): siRNA sense strand
gccagugcuuugaagguua

SEQ ID NO: 633156 - RNA, 19 nt, Homo sapiens
  misc_RNA (1)...(19): siRNA sense strand
gcucuuaacccagaugaaa

SEQ ID NO: 633157 - RNA, 19 nt, Homo sapiens
  misc_RNA (1)...(19): siRNA sense strand
caagaaaggcaucugugaa

SEQ ID NO: 633158 - RNA, 19 nt, Homo sapiens
  misc_RNA (1)...(19): siRNA sense strand
gauaucuguuugaagaaga

SEQ ID NO: 633159 - RNA, 19 nt, Homo sapiens
  misc_RNA (1)...(19): siRNA sense strand
gaaccuugcaaacgaagaa

SEQ ID NO: 633160 - RNA, 19 nt, Homo sapiens
  misc_RNA (1)...(19): siRNA sense strand
gaaggaugucugcaaauca

SEQ ID NO: 633161 - RNA, 19 nt, Homo sapiens
  misc_RNA (1)...(19): siRNA sense strand
gagaauggaagcccuggaa

SEQ ID NO: 633162 - RNA, 19 nt, Homo sapiens
  misc_RNA (1)...(19): siRNA sense strand
ccagaaccuugcaaacgaa

SEQ ID NO: 633163 - RNA, 19 nt, Homo sapiens
  misc_RNA (1)...(19): siRNA sense strand
gaagacggugcaagaaaug

SEQ ID NO: 633164 - RNA, 19 nt, Homo sapiens
  misc_RNA (1)...(19): siRNA sense strand
caacuacugugcacugaac

SEQ ID NO: 633165 - RNA, 19 nt, Homo sapiens
  misc_RNA (1)...(19): siRNA sense strand
cacaaaagcuuucccauuc

SEQ ID NO: 633166 - RNA, 19 nt, Homo sapiens
  misc_RNA (1)...(19): siRNA sense strand
caacacccaugacuaugca

SEQ ID NO: 633167 - RNA, 19 nt, Homo sapiens
  misc_RNA (1)...(19): siRNA sense strand
uggcagcacugucaagaau

SEQ ID NO: 633168 - RNA, 19 nt, Homo sapiens
  misc_RNA (1)...(19): siRNA sense strand
ccucugagcccacaaacaa

SEQ ID NO: 633169 - RNA, 19 nt, Homo sapiens
  misc_RNA (1)...(19): siRNA sense strand
aaggaaggaugucugcaaa

SEQ ID NO: 633170 - RNA, 19 nt, Homo sapiens
  misc_RNA (1)...(19): siRNA sense strand
caauauggcagcacuguca

SEQ ID NO: 633171 - RNA, 19 nt, Homo sapiens
  misc_RNA (1)...(19): siRNA sense strand
ggaagcccuuuggaagaaa

SEQ ID NO: 633172 - RNA, 19 nt, Homo sapiens
  misc_RNA (1)...(19): siRNA sense strand
ggaggaacuacaagagauu

SEQ ID NO: 633173 - RNA, 19 nt, Homo sapiens
  misc_RNA (1)...(19): siRNA sense strand
acacagaugauuccuauuc

SEQ ID NO: 633174 - RNA, 19 nt, Homo sapiens
  misc_RNA (1)...(19): siRNA sense strand
ucaagaccuucaagaggaa

SEQ ID NO: 633175 - RNA, 19 nt, Homo sapiens
  misc_RNA (1)...(19): siRNA sense strand
augcaaaggucaaggaguu

SEQ ID NO: 633176 - RNA, 19 nt, Homo sapiens
  misc_RNA (1)...(19): siRNA sense strand
ucagagggauuuguucuag

SEQ ID NO: 633177 - RNA, 19 nt, Homo sapiens
  misc_RNA (1)...(19): siRNA sense strand
gcagugaagauucguuugu

SEQ ID NO: 633178 - RNA, 19 nt, Homo sapiens
  misc_RNA (1)...(19): siRNA sense strand
gagcaugagugcgucaaca

SEQ ID NO: 633179 - RNA, 19 nt, Homo sapiens
  misc_RNA (1)...(19): siRNA sense strand
gaaugugccacgggucaua

SEQ ID NO: 633180 - RNA, 19 nt, Homo sapiens
  misc_RNA (1)...(19): siRNA sense strand
ugaaguccauugggaguga

SEQ ID NO: 633181 - RNA, 19 nt, Homo sapiens
  misc_RNA (1)...(19): siRNA sense strand
cuagaagacuccgauggaa

SEQ ID NO: 633182 - RNA, 19 nt, Homo sapiens
  misc_RNA (1)...(19): siRNA sense strand
ucaagaaaggcaucuguga

SEQ ID NO: 633183 - RNA, 19 nt, Homo sapiens
  misc_RNA (1)...(19): siRNA sense strand
gaggaggaacuacaagaga

SEQ ID NO: 633184 - RNA, 19 nt, Homo sapiens
  misc_RNA (1)...(19): siRNA sense strand
aaggaugucugcaaaucaa

SEQ ID NO: 633185 - RNA, 19 nt, Homo sapiens
  misc_RNA (1)...(19): siRNA sense strand
guggacaucuugcaauucu

SEQ ID NO: 633186 - RNA, 19 nt, Homo sapiens
  misc_RNA (1)...(19): siRNA sense strand
ucagacgacuugcagaauc

SEQ ID NO: 633187 - RNA, 19 nt, Homo sapiens
  misc_RNA (1)...(19): siRNA sense strand
gcaaacaaggcuacauucu

SEQ ID NO: 633188 - RNA, 19 nt, Homo sapiens
  misc_RNA (1)...(19): siRNA sense strand
caaacgaagaaguaagaaa

SEQ ID NO: 633189 - RNA, 19 nt, Homo sapiens
  misc_RNA (1)...(19): siRNA sense strand
caauggaugagauaaguga

SEQ ID NO: 633190 - RNA, 19 nt, Homo sapiens
  misc_RNA (1)...(19): siRNA sense strand
ugugaacauucguguguaa

SEQ ID NO: 633191 - RNA, 19 nt, Homo sapiens
  misc_RNA (1)...(19): siRNA sense strand
gugcaaacaaggcuacauu

SEQ ID NO: 633192 - RNA, 19 nt, Homo sapiens
  misc_RNA (1)...(19): siRNA sense strand
cacaauggaugagauaagu

SEQ ID NO: 633193 - RNA, 19 nt, Homo sapiens
  misc_RNA (1)...(19): siRNA sense strand
gcaaaugcucagagggauu

SEQ ID NO: 633194 - RNA, 19 nt, Homo sapiens
  misc_RNA (1)...(19): siRNA sense strand
gaccacgguugugaacauu

SEQ ID NO: 633195 - RNA, 19 nt, Homo sapiens
  misc_RNA (1)...(19): siRNA sense strand
cgugggagguccaucucua

SEQ ID NO: 633196 - RNA, 19 nt, Homo sapiens
  misc_RNA (1)...(19): siRNA sense strand
gcacaauggaugagauaag

SEQ ID NO: 633197 - RNA, 19 nt, Homo sapiens
  misc_RNA (1)...(19): siRNA sense strand
uggccgagguggcugcuaa

SEQ ID NO: 633198 - RNA, 19 nt, Homo sapiens
  misc_RNA (1)...(19): siRNA sense strand
gcgcuuagaagaaaugaca

SEQ ID NO: 633199 - RNA, 19 nt, Homo sapiens
  misc_RNA (1)...(19): siRNA sense strand
aaacuucaacucagccaaa

SEQ ID NO: 633200 - RNA, 19 nt, Homo sapiens
  misc_RNA (1)...(19): siRNA sense strand
acauuugugugaacaguga

SEQ ID NO: 633201 - RNA, 19 nt, Homo sapiens
  misc_RNA (1)...(19): siRNA sense strand
gaauacuccugugucaaca

SEQ ID NO: 633202 - RNA, 19 nt, Homo sapiens
  misc_RNA (1)...(19): siRNA sense strand
gugagcagcugugucugaa

SEQ ID NO: 633203 - RNA, 19 nt, Homo sapiens
  misc_RNA (1)...(19): siRNA sense strand
gaugucagcacgagugugu

SEQ ID NO: 633204 - RNA, 19 nt, Homo sapiens
  misc_RNA (1)...(19): siRNA sense strand
ugaaggauuugcucuuaac

SEQ ID NO: 633205 - RNA, 19 nt, Homo sapiens
  misc_RNA (1)...(19): siRNA sense strand
cagcacaauggaugagaua

SEQ ID NO: 633206 - RNA, 19 nt, Homo sapiens
  misc_RNA (1)...(19): siRNA sense strand
uagauuccuugacaauuuc

SEQ ID NO: 633207 - RNA, 19 nt, Homo sapiens
  misc_RNA (1)...(19): siRNA sense strand
gacggaagacggugcaaga

SEQ ID NO: 633208 - RNA, 19 nt, Homo sapiens
  misc_RNA (1)...(19): siRNA sense strand
uaaugggaauuccuacauc

SEQ ID NO: 633209 - RNA, 19 nt, Homo sapiens
  misc_RNA (1)...(19): siRNA sense strand
gcgagugcuuggagggauu

SEQ ID NO: 633210 - RNA, 19 nt, Homo sapiens
  misc_RNA (1)...(19): siRNA sense strand
ccagugcuuugaagguuau

SEQ ID NO: 633211 - RNA, 19 nt, Homo sapiens
  misc_RNA (1)...(19): siRNA sense strand
ugaccuccguguuccagaa

SEQ ID NO: 633212 - RNA, 19 nt, Homo sapiens
  misc_RNA (1)...(19): siRNA sense strand
aggaagcccuuuggaagaa

SEQ ID NO: 633213 - RNA, 19 nt, Homo sapiens
  misc_RNA (1)...(19): siRNA sense strand
gcccagagcagccauugug

SEQ ID NO: 633214 - RNA, 19 nt, Homo sapiens
  misc_RNA (1)...(19): siRNA sense strand
gagugaccaugguugugaa

SEQ ID NO: 633215 - RNA, 19 nt, Homo sapiens
  misc_RNA (1)...(19): siRNA sense strand
ugucagcacgaguguguua

SEQ ID NO: 633216 - RNA, 19 nt, Homo sapiens
  misc_RNA (1)...(19): siRNA sense strand
gaacaugaguguguaaaug

SEQ ID NO: 633217 - RNA, 19 nt, Homo sapiens
  misc_RNA (1)...(19): siRNA sense strand
gcacaaagauagacuacug

SEQ ID NO: 633218 - RNA, 19 nt, Homo sapiens
  misc_RNA (1)...(19): siRNA sense strand
uaacacagaugauuccuau

SEQ ID NO: 633219 - RNA, 19 nt, Homo sapiens
  misc_RNA (1)...(19): siRNA sense strand
gcugauggcuccuaccuuu

SEQ ID NO: 633220 - RNA, 19 nt, Homo sapiens
  misc_RNA (1)...(19): siRNA sense strand
ggaagacggugcaagaaau

SEQ ID NO: 633221 - RNA, 19 nt, Homo sapiens
  misc_RNA (1)...(19): siRNA sense strand
aaacaaggcuacauucuca

SEQ ID NO: 633222 - RNA, 19 nt, Homo sapiens
  misc_RNA (1)...(19): siRNA sense strand
gcagaaggaucaacuacug

SEQ ID NO: 633223 - RNA, 19 nt, Homo sapiens
  misc_RNA (1)...(19): siRNA sense strand
gggaaacgcugccgaagga

SEQ ID NO: 633224 - RNA, 19 nt, Homo sapiens
  misc_RNA (1)...(19): siRNA sense strand
gcagcacccuggagcauaa

SEQ ID NO: 633225 - RNA, 19 nt, Homo sapiens
  misc_RNA (1)...(19): siRNA sense strand
ccaaugguaucacuaugua

SEQ ID NO: 633226 - RNA, 19 nt, Homo sapiens
  misc_RNA (1)...(19): siRNA sense strand
caugaaggauuugcucuua

SEQ ID NO: 633227 - RNA, 19 nt, Homo sapiens
  misc_RNA (1)...(19): siRNA sense strand
aaacaagcaucucuucuau

SEQ ID NO: 633228 - RNA, 19 nt, Homo sapiens
  misc_RNA (1)...(19): siRNA sense strand
caacaucccuggcucauac

SEQ ID NO: 633229 - RNA, 19 nt, Homo sapiens
  misc_RNA (1)...(19): siRNA sense strand
ggacuacugugccucagaa

SEQ ID NO: 633230 - RNA, 19 nt, Homo sapiens
  misc_RNA (1)...(19): siRNA sense strand
aaagaugucugccaagcua

SEQ ID NO: 633231 - RNA, 19 nt, Homo sapiens
  misc_RNA (1)...(19): siRNA sense strand
ccacacagguccacacaga

SEQ ID NO: 633232 - RNA, 19 nt, Homo sapiens
  misc_RNA (1)...(19): siRNA sense strand
gaagaaaugacacagagaa

SEQ ID NO: 633233 - RNA, 19 nt, Homo sapiens
  misc_RNA (1)...(19): siRNA sense strand
gcagcacugucaagaauga

SEQ ID NO: 633234 - RNA, 19 nt, Homo sapiens
  misc_RNA (1)...(19): siRNA sense strand
acacagcgcuuagaagaaa

SEQ ID NO: 633235 - RNA, 19 nt, Homo sapiens
  misc_RNA (1)...(19): siRNA sense strand
ggaaggaugucugcaaauc

SEQ ID NO: 633236 - RNA, 19 nt, Homo sapiens
  misc_RNA (1)...(19): siRNA sense strand
gagugggccugcuccaaua

SEQ ID NO: 633237 - RNA, 19 nt, Homo sapiens
  misc_RNA (1)...(19): siRNA sense strand
caaacaagcaucucuucua

SEQ ID NO: 633238 - RNA, 19 nt, Homo sapiens
  misc_RNA (1)...(19): siRNA sense strand
caacauggacagauccuuu

SEQ ID NO: 633239 - RNA, 19 nt, Homo sapiens
  misc_RNA (1)...(19): siRNA sense strand
uaacacagcgcuuagaaga

SEQ ID NO: 633240 - RNA, 19 nt, Homo sapiens
  misc_RNA (1)...(19): siRNA sense strand
ccagugccaugaaggauuu

SEQ ID NO: 633241 - RNA, 19 nt, Homo sapiens
  misc_RNA (1)...(19): siRNA sense strand
guuugucacuggaauuaua

SEQ ID NO: 633242 - RNA, 19 nt, Homo sapiens
  misc_RNA (1)...(19): siRNA sense strand
gaaaugacacagagaaugg

SEQ ID NO: 633243 - RNA, 19 nt, Homo sapiens
  misc_RNA (1)...(19): siRNA sense strand
gcauaacugugcccacuuc

SEQ ID NO: 633244 - RNA, 19 nt, Homo sapiens
  misc_RNA (1)...(19): siRNA sense strand
gcacugaaggcccaauuga

SEQ ID NO: 633245 - RNA, 19 nt, Homo sapiens
  misc_RNA (1)...(19): siRNA sense strand
gagcagcugugucugaaca

SEQ ID NO: 633246 - RNA, 19 nt, Homo sapiens
  misc_RNA (1)...(19): siRNA sense strand
ggaccacgguugugaacau

SEQ ID NO: 633247 - RNA, 19 nt, Homo sapiens
  misc_RNA (1)...(19): siRNA sense strand
gaaggaaggaugucugcaa

SEQ ID NO: 633248 - RNA, 19 nt, Homo sapiens
  misc_RNA (1)...(19): siRNA sense strand
gaacauucguguguaagca

SEQ ID NO: 633249 - RNA, 19 nt, Homo sapiens
  misc_RNA (1)...(19): siRNA sense strand
gaagacgugugcaaaauug

SEQ ID NO: 633250 - RNA, 19 nt, Homo sapiens
  misc_RNA (1)...(19): siRNA sense strand
gaucaaugcaaaugugaaa

SEQ ID NO: 633251 - RNA, 19 nt, Homo sapiens
  misc_RNA (1)...(19): siRNA sense strand
caacucagccaaagacaug

SEQ ID NO: 633252 - RNA, 19 nt, Homo sapiens
  misc_RNA (1)...(19): siRNA sense strand
ggacaucuugcaauucuug

SEQ ID NO: 633253 - RNA, 19 nt, Homo sapiens
  misc_RNA (1)...(19): siRNA sense strand
gaucagacgacuugcagaa

SEQ ID NO: 633254 - RNA, 19 nt, Homo sapiens
  misc_RNA (1)...(19): siRNA sense strand
gaaaaucgccugagauaca

SEQ ID NO: 633255 - RNA, 19 nt, Homo sapiens
  misc_RNA (1)...(19): siRNA sense strand
gccagugcuuugaagguua

SEQ ID NO: 633256 - RNA, 19 nt, Homo sapiens
  misc_RNA (1)...(19): siRNA sense strand
gcucuuaacccagaugaaa

SEQ ID NO: 633257 - RNA, 19 nt, Homo sapiens
  misc_RNA (1)...(19): siRNA sense strand
caagaaaggcaucugugaa

SEQ ID NO: 633258 - RNA, 19 nt, Homo sapiens
  misc_RNA (1)...(19): siRNA sense strand
gauaucuguuugaagaaga

SEQ ID NO: 633259 - RNA, 19 nt, Homo sapiens
  misc_RNA (1)...(19): siRNA sense strand
gaaccuugcaaacgaagaa

SEQ ID NO: 633260 - RNA, 19 nt, Homo sapiens
  misc_RNA (1)...(19): siRNA sense strand
gaaggaugucugcaaauca

SEQ ID NO: 633261 - RNA, 19 nt, Homo sapiens
  misc_RNA (1)...(19): siRNA sense strand
gagaauggaagcccuggaa

SEQ ID NO: 633262 - RNA, 19 nt, Homo sapiens
  misc_RNA (1)...(19): siRNA sense strand
ccagaaccuugcaaacgaa

SEQ ID NO: 633263 - RNA, 19 nt, Homo sapiens
  misc_RNA (1)...(19): siRNA sense strand
gaagacggugcaagaaaug

SEQ ID NO: 633264 - RNA, 19 nt, Homo sapiens
  misc_RNA (1)...(19): siRNA sense strand
caacuacugugcacugaac

SEQ ID NO: 633265 - RNA, 19 nt, Homo sapiens
  misc_RNA (1)...(19): siRNA sense strand
cacaaaagcuuucccauuc

SEQ ID NO: 633266 - RNA, 19 nt, Homo sapiens
  misc_RNA (1)...(19): siRNA sense strand
caacacccaugacuaugca

SEQ ID NO: 633267 - RNA, 19 nt, Homo sapiens
  misc_RNA (1)...(19): siRNA sense strand
uggcagcacugucaagaau

SEQ ID NO: 633268 - RNA, 19 nt, Homo sapiens
  misc_RNA (1)...(19): siRNA sense strand
ccucugagcccacaaacaa

SEQ ID NO: 633269 - RNA, 19 nt, Homo sapiens
  misc_RNA (1)...(19): siRNA sense strand
aaggaaggaugucugcaaa

SEQ ID NO: 633270 - RNA, 19 nt, Homo sapiens
  misc_RNA (1)...(19): siRNA sense strand
caauauggcagcacuguca

SEQ ID NO: 633271 - RNA, 19 nt, Homo sapiens
  misc_RNA (1)...(19): siRNA sense strand
ggaagcccuuuggaagaaa

SEQ ID NO: 633272 - RNA, 19 nt, Homo sapiens
  misc_RNA (1)...(19): siRNA sense strand
ggaggaacuacaagagauu

SEQ ID NO: 633273 - RNA, 19 nt, Homo sapiens
  misc_RNA (1)...(19): siRNA sense strand
acacagaugauuccuauuc

SEQ ID NO: 633274 - RNA, 19 nt, Homo sapiens
  misc_RNA (1)...(19): siRNA sense strand
ucaagaccuucaagaggaa

SEQ ID NO: 633275 - RNA, 19 nt, Homo sapiens
  misc_RNA (1)...(19): siRNA sense strand
augcaaaggucaaggaguu

SEQ ID NO: 633276 - RNA, 19 nt, Homo sapiens
  misc_RNA (1)...(19): siRNA sense strand
ucagagggauuuguucuag

SEQ ID NO: 633277 - RNA, 19 nt, Homo sapiens
  misc_RNA (1)...(19): siRNA sense strand
gcagugaagauucguuugu

SEQ ID NO: 633278 - RNA, 19 nt, Homo sapiens
  misc_RNA (1)...(19): siRNA sense strand
gagcaugagugcgucaaca

SEQ ID NO: 633279 - RNA, 19 nt, Homo sapiens
  misc_RNA (1)...(19): siRNA sense strand
gaaugugccacgggucaua

SEQ ID NO: 633280 - RNA, 19 nt, Homo sapiens
  misc_RNA (1)...(19): siRNA sense strand
ugaaguccauugggaguga

SEQ ID NO: 633281 - RNA, 19 nt, Homo sapiens
  misc_RNA (1)...(19): siRNA sense strand
cuagaagacuccgauggaa

SEQ ID NO: 633282 - RNA, 19 nt, Homo sapiens
  misc_RNA (1)...(19): siRNA sense strand
ucaagaaaggcaucuguga

SEQ ID NO: 633283 - RNA, 19 nt, Homo sapiens
  misc_RNA (1)...(19): siRNA sense strand
gaggaggaacuacaagaga

SEQ ID NO: 633284 - RNA, 19 nt, Homo sapiens
  misc_RNA (1)...(19): siRNA sense strand
aaggaugucugcaaaucaa

SEQ ID NO: 633285 - RNA, 19 nt, Homo sapiens
  misc_RNA (1)...(19): siRNA sense strand
guggacaucuugcaauucu

SEQ ID NO: 633286 - RNA, 19 nt, Homo sapiens
  misc_RNA (1)...(19): siRNA sense strand
ucagacgacuugcagaauc

SEQ ID NO: 633287 - RNA, 19 nt, Homo sapiens
  misc_RNA (1)...(19): siRNA sense strand
gcaaacaaggcuacauucu

SEQ ID NO: 633288 - RNA, 19 nt, Homo sapiens
  misc_RNA (1)...(19): siRNA sense strand
caaacgaagaaguaagaaa

SEQ ID NO: 633289 - RNA, 19 nt, Homo sapiens
  misc_RNA (1)...(19): siRNA sense strand
caauggaugagauaaguga

SEQ ID NO: 633290 - RNA, 19 nt, Homo sapiens
  misc_RNA (1)...(19): siRNA sense strand
ugugaacauucguguguaa

SEQ ID NO: 633291 - RNA, 19 nt, Homo sapiens
  misc_RNA (1)...(19): siRNA sense strand
gugcaaacaaggcuacauu

SEQ ID NO: 633292 - RNA, 19 nt, Homo sapiens
  misc_RNA (1)...(19): siRNA sense strand
cacaauggaugagauaagu

SEQ ID NO: 633293 - RNA, 19 nt, Homo sapiens
  misc_RNA (1)...(19): siRNA sense strand
gcaaaugcucagagggauu

SEQ ID NO: 633294 - RNA, 19 nt, Homo sapiens
  misc_RNA (1)...(19): siRNA sense strand
gaccacgguugugaacauu

SEQ ID NO: 633295 - RNA, 19 nt, Homo sapiens
  misc_RNA (1)...(19): siRNA sense strand
cgugggagguccaucucua

SEQ ID NO: 633296 - RNA, 19 nt, Homo sapiens
  misc_RNA (1)...(19): siRNA sense strand
gcacaauggaugagauaag

SEQ ID NO: 633297 - RNA, 19 nt, Homo sapiens
  misc_RNA (1)...(19): siRNA sense strand
uggccgagguggcugcuaa

SEQ ID NO: 633298 - RNA, 19 nt, Homo sapiens
  misc_RNA (1)...(19): siRNA sense strand
gcgcuuagaagaaaugaca

SEQ ID NO: 633299 - RNA, 19 nt, Homo sapiens
  misc_RNA (1)...(19): siRNA sense strand
aaacuucaacucagccaaa

SEQ ID NO: 633300 - RNA, 19 nt, Homo sapiens
  misc_RNA (1)...(19): siRNA sense strand
acauuugugugaacaguga

SEQ ID NO: 633301 - RNA, 19 nt, Homo sapiens
  misc_RNA (1)...(19): siRNA sense strand
gaauacuccugugucaaca

SEQ ID NO: 633302 - RNA, 19 nt, Homo sapiens
  misc_RNA (1)...(19): siRNA sense strand
gugagcagcugugucugaa

SEQ ID NO: 633303 - RNA, 19 nt, Homo sapiens
  misc_RNA (1)...(19): siRNA sense strand
gaugucagcacgagugugu

SEQ ID NO: 633304 - RNA, 19 nt, Homo sapiens
  misc_RNA (1)...(19): siRNA sense strand
ugaaggauuugcucuuaac

SEQ ID NO: 633305 - RNA, 19 nt, Homo sapiens
  misc_RNA (1)...(19): siRNA sense strand
cagcacaauggaugagaua

SEQ ID NO: 633306 - RNA, 19 nt, Homo sapiens
  misc_RNA (1)...(19): siRNA sense strand
uagauuccuugacaauuuc

SEQ ID NO: 633307 - RNA, 19 nt, Homo sapiens
  misc_RNA (1)...(19): siRNA sense strand
gacggaagacggugcaaga

SEQ ID NO: 633308 - RNA, 19 nt, Homo sapiens
  misc_RNA (1)...(19): siRNA sense strand
uaaugggaauuccuacauc

SEQ ID NO: 633309 - RNA, 19 nt, Homo sapiens
  misc_RNA (1)...(19): siRNA sense strand
gcgagugcuuggagggauu

SEQ ID NO: 633310 - RNA, 19 nt, Homo sapiens
  misc_RNA (1)...(19): siRNA sense strand
ccagugcuuugaagguuau

SEQ ID NO: 633311 - RNA, 19 nt, Homo sapiens
  misc_RNA (1)...(19): siRNA sense strand
ugaccuccguguuccagaa

SEQ ID NO: 633312 - RNA, 19 nt, Homo sapiens
  misc_RNA (1)...(19): siRNA sense strand
aggaagcccuuuggaagaa

SEQ ID NO: 633313 - RNA, 19 nt, Homo sapiens
  misc_RNA (1)...(19): siRNA sense strand
gcccagagcagccauugug

SEQ ID NO: 633314 - RNA, 19 nt, Homo sapiens
  misc_RNA (1)...(19): siRNA sense strand
gagugaccaugguugugaa

SEQ ID NO: 633315 - RNA, 19 nt, Homo sapiens
  misc_RNA (1)...(19): siRNA sense strand
ugucagcacgaguguguua

SEQ ID NO: 633316 - RNA, 19 nt, Homo sapiens
  misc_RNA (1)...(19): siRNA sense strand
gaaauuagaagcugcagaa

SEQ ID NO: 633317 - RNA, 19 nt, Homo sapiens
  misc_RNA (1)...(19): siRNA sense strand
gaaacgagagcacgagaaa

SEQ ID NO: 633318 - RNA, 19 nt, Homo sapiens
  misc_RNA (1)...(19): siRNA sense strand
gaaccgagaggcacaaaug

SEQ ID NO: 633319 - RNA, 19 nt, Homo sapiens
  misc_RNA (1)...(19): siRNA sense strand
ggaggaaauucagaagaaa

SEQ ID NO: 633320 - RNA, 19 nt, Homo sapiens
  misc_RNA (1)...(19): siRNA sense strand
ccaugaagcugaggucuug

SEQ ID NO: 633321 - RNA, 19 nt, Homo sapiens
  misc_RNA (1)...(19): siRNA sense strand
auuagaagcugcagaagaa

SEQ ID NO: 633322 - RNA, 19 nt, Homo sapiens
  misc_RNA (1)...(19): siRNA sense strand
uggaggaaauucagaagaa

SEQ ID NO: 633323 - RNA, 19 nt, Homo sapiens
  misc_RNA (1)...(19): siRNA sense strand
gaagaagugcggaagaaca

SEQ ID NO: 633324 - RNA, 19 nt, Homo sapiens
  misc_RNA (1)...(19): siRNA sense strand
aagagaaacugacccacaa

SEQ ID NO: 633325 - RNA, 19 nt, Homo sapiens
  misc_RNA (1)...(19): siRNA sense strand
uagaagagaacaacaacuu

SEQ ID NO: 633326 - RNA, 19 nt, Homo sapiens
  misc_RNA (1)...(19): siRNA sense strand
caauagaagagaacaacaa

SEQ ID NO: 633327 - RNA, 19 nt, Homo sapiens
  misc_RNA (1)...(19): siRNA sense strand
ggauaagcacauugaagaa

SEQ ID NO: 633328 - RNA, 19 nt, Homo sapiens
  misc_RNA (1)...(19): siRNA sense strand
aagcugaggucuugaagca

SEQ ID NO: 633329 - RNA, 19 nt, Homo sapiens
  misc_RNA (1)...(19): siRNA sense strand
aauggaagcuaauaaagag

SEQ ID NO: 633330 - RNA, 19 nt, Homo sapiens
  misc_RNA (1)...(19): siRNA sense strand
agaaggcaauagaagagaa

SEQ ID NO: 633331 - RNA, 19 nt, Homo sapiens
  misc_RNA (1)...(19): siRNA sense strand
agagaaggauaagcacauu

SEQ ID NO: 633332 - RNA, 19 nt, Homo sapiens
  misc_RNA (1)...(19): siRNA sense strand
gaaacugacccacaaaaug

SEQ ID NO: 633333 - RNA, 19 nt, Homo sapiens
  misc_RNA (1)...(19): siRNA sense strand
gaggaaauucagaagaaau

SEQ ID NO: 633334 - RNA, 19 nt, Homo sapiens
  misc_RNA (1)...(19): siRNA sense strand
gaaggauaagcacauugaa

SEQ ID NO: 633335 - RNA, 19 nt, Homo sapiens
  misc_RNA (1)...(19): siRNA sense strand
agaaggauaagcacauuga

SEQ ID NO: 633336 - RNA, 19 nt, Homo sapiens
  misc_RNA (1)...(19): siRNA sense strand
gagagaaggauaagcacau

SEQ ID NO: 633337 - RNA, 19 nt, Homo sapiens
  misc_RNA (1)...(19): siRNA sense strand
uaagcacauugaagaagug

SEQ ID NO: 633338 - RNA, 19 nt, Homo sapiens
  misc_RNA (1)...(19): siRNA sense strand
cuucugauauccaggugaa

SEQ ID NO: 633339 - RNA, 19 nt, Homo sapiens
  misc_RNA (1)...(19): siRNA sense strand
uugaagaagugcggaagaa

SEQ ID NO: 633340 - RNA, 19 nt, Homo sapiens
  misc_RNA (1)...(19): siRNA sense strand
gauaagcacauugaagaag

SEQ ID NO: 633341 - RNA, 19 nt, Homo sapiens
  misc_RNA (1)...(19): siRNA sense strand
aggauaagcacauugaaga

SEQ ID NO: 633342 - RNA, 19 nt, Homo sapiens
  misc_RNA (1)...(19): siRNA sense strand
gcagaagaaagacgcaagu

SEQ ID NO: 633343 - RNA, 19 nt, Homo sapiens
  misc_RNA (1)...(19): siRNA sense strand
aacgagagcacgagaaaga

SEQ ID NO: 633344 - RNA, 19 nt, Homo sapiens
  misc_RNA (1)...(19): siRNA sense strand
gagaaggauaagcacauug

SEQ ID NO: 633345 - RNA, 19 nt, Homo sapiens
  misc_RNA (1)...(19): siRNA sense strand
gcaauagaagagaacaaca

SEQ ID NO: 633346 - RNA, 19 nt, Homo sapiens
  misc_RNA (1)...(19): siRNA sense strand
auaagcacauugaagaagu

SEQ ID NO: 633347 - RNA, 19 nt, Homo sapiens
  misc_RNA (1)...(19): siRNA sense strand
agacgcaagucccaugaag

SEQ ID NO: 633348 - RNA, 19 nt, Homo sapiens
  misc_RNA (1)...(19): siRNA sense strand
ggaagcuaauaaagagaac

SEQ ID NO: 633349 - RNA, 19 nt, Homo sapiens
  misc_RNA (1)...(19): siRNA sense strand
cuggaacguuugcgagaga

SEQ ID NO: 633350 - RNA, 19 nt, Homo sapiens
  misc_RNA (1)...(19): siRNA sense strand
aagaagugcggaagaacaa

SEQ ID NO: 633351 - RNA, 19 nt, Homo sapiens
  misc_RNA (1)...(19): siRNA sense strand
ucagaaggcaauagaagag

SEQ ID NO: 633352 - RNA, 19 nt, Homo sapiens
  misc_RNA (1)...(19): siRNA sense strand
agaagcugcagaagaaaga

SEQ ID NO: 633353 - RNA, 19 nt, Homo sapiens
  misc_RNA (1)...(19): siRNA sense strand
gagagcacgagaaagaagu

SEQ ID NO: 633354 - RNA, 19 nt, Homo sapiens
  misc_RNA (1)...(19): siRNA sense strand
aauuagaagcugcagaaga

SEQ ID NO: 633355 - RNA, 19 nt, Homo sapiens
  misc_RNA (1)...(19): siRNA sense strand
gagaaccgagaggcacaaa

SEQ ID NO: 633356 - RNA, 19 nt, Homo sapiens
  misc_RNA (1)...(19): siRNA sense strand
uggaagcuaauaaagagaa

SEQ ID NO: 633357 - RNA, 19 nt, Homo sapiens
  misc_RNA (1)...(19): siRNA sense strand
gagaaacugacccacaaaa

SEQ ID NO: 633358 - RNA, 19 nt, Homo sapiens
  misc_RNA (1)...(19): siRNA sense strand
aaagacgcaagucccauga

SEQ ID NO: 633359 - RNA, 19 nt, Homo sapiens
  misc_RNA (1)...(19): siRNA sense strand
gaaggcaauagaagagaac

SEQ ID NO: 633360 - RNA, 19 nt, Homo sapiens
  misc_RNA (1)...(19): siRNA sense strand
ggugaaagaacuggagaag

SEQ ID NO: 633361 - RNA, 19 nt, Homo sapiens
  misc_RNA (1)...(19): siRNA sense strand
caaccacucuucaccaaua

SEQ ID NO: 633362 - RNA, 19 nt, Homo sapiens
  misc_RNA (1)...(19): siRNA sense strand
acacgaagcugaccaugaa

SEQ ID NO: 633363 - RNA, 19 nt, Homo sapiens
  misc_RNA (1)...(19): siRNA sense strand
gaaggaggaugccgccuau

SEQ ID NO: 633364 - RNA, 19 nt, Homo sapiens
  misc_RNA (1)...(19): siRNA sense strand
gcuacuggcuccacuaucu

SEQ ID NO: 633365 - RNA, 19 nt, Homo sapiens
  misc_RNA (1)...(19): siRNA sense strand
gaguaaggcucaguuucug

SEQ ID NO: 633366 - RNA, 19 nt, Homo sapiens
  misc_RNA (1)...(19): siRNA sense strand
ggcaaccacucuucaccaa

SEQ ID NO: 633367 - RNA, 19 nt, Homo sapiens
  misc_RNA (1)...(19): siRNA sense strand
ucccuaugcuggcuacuuu

SEQ ID NO: 633368 - RNA, 19 nt, Homo sapiens
  misc_RNA (1)...(19): siRNA sense strand
ucagagguuuaccaagauu

SEQ ID NO: 633369 - RNA, 19 nt, Homo sapiens
  misc_RNA (1)...(19): siRNA sense strand
gaacaccaccugcgcuacu

SEQ ID NO: 633370 - RNA, 19 nt, Homo sapiens
  misc_RNA (1)...(19): siRNA sense strand
ugacugggaugaagaucuc

SEQ ID NO: 633371 - RNA, 19 nt, Homo sapiens
  misc_RNA (1)...(19): siRNA sense strand
gaacccaggcgugcucaug

SEQ ID NO: 633372 - RNA, 19 nt, Homo sapiens
  misc_RNA (1)...(19): siRNA sense strand
ggaggugucucggcaacca

SEQ ID NO: 633373 - RNA, 19 nt, Homo sapiens
  misc_RNA (1)...(19): siRNA sense strand
uggaugaccgcaaccuaua

SEQ ID NO: 633374 - RNA, 19 nt, Homo sapiens
  misc_RNA (1)...(19): siRNA sense strand
caauaucacaguggacauu

SEQ ID NO: 633375 - RNA, 19 nt, Homo sapiens
  misc_RNA (1)...(19): siRNA sense strand
uaacgugggcuuccuagag

SEQ ID NO: 633376 - RNA, 19 nt, Homo sapiens
  misc_RNA (1)...(19): siRNA sense strand
gaucucacgcccagacauc

SEQ ID NO: 633377 - RNA, 19 nt, Homo sapiens
  misc_RNA (1)...(19): siRNA sense strand
acaagcauaacgaaccuaa

SEQ ID NO: 633378 - RNA, 19 nt, Homo sapiens
  misc_RNA (1)...(19): siRNA sense strand
cgacaagcauaacgaaccu

SEQ ID NO: 633379 - RNA, 19 nt, Homo sapiens
  misc_RNA (1)...(19): siRNA sense strand
gcacgaccgcgacaagcau

SEQ ID NO: 633380 - RNA, 19 nt, Homo sapiens
  misc_RNA (1)...(19): siRNA sense strand
ggccgucauccucuacuuu

SEQ ID NO: 633381 - RNA, 19 nt, Homo sapiens
  misc_RNA (1)...(19): siRNA sense strand
ccacucuucaccaauauca

SEQ ID NO: 633382 - RNA, 19 nt, Homo sapiens
  misc_RNA (1)...(19): siRNA sense strand
gccgucauccucuacuuug

SEQ ID NO: 633383 - RNA, 19 nt, Homo sapiens
  misc_RNA (1)...(19): siRNA sense strand
ucaauggcuuccccaauga

SEQ ID NO: 633384 - RNA, 19 nt, Homo sapiens
  misc_RNA (1)...(19): siRNA sense strand
aggaggaugccgccuauga

SEQ ID NO: 633385 - RNA, 19 nt, Homo sapiens
  misc_RNA (1)...(19): siRNA sense strand
gcgcuacuggcuccacuau

SEQ ID NO: 633386 - RNA, 19 nt, Homo sapiens
  misc_RNA (1)...(19): siRNA sense strand
gcaaccacucuucaccaau

SEQ ID NO: 633387 - RNA, 19 nt, Homo sapiens
  misc_RNA (1)...(19): siRNA sense strand
gcuaccgcaugaucaagca

SEQ ID NO: 633388 - RNA, 19 nt, Homo sapiens
  misc_RNA (1)...(19): siRNA sense strand
gacgguggcggucaucauc

SEQ ID NO: 633389 - RNA, 19 nt, Homo sapiens
  misc_RNA (1)...(19): siRNA sense strand
gaggaugccgccuaugacu

SEQ ID NO: 633390 - RNA, 19 nt, Homo sapiens
  misc_RNA (1)...(19): siRNA sense strand
gcgucuaugucaucaacca

SEQ ID NO: 633391 - RNA, 19 nt, Homo sapiens
  misc_RNA (1)...(19): siRNA sense strand
gcgcuacggcgucuauguc

SEQ ID NO: 633392 - RNA, 19 nt, Homo sapiens
  misc_RNA (1)...(19): siRNA sense strand
cuacuggcuccacuaucua

SEQ ID NO: 633393 - RNA, 19 nt, Homo sapiens
  misc_RNA (1)...(19): siRNA sense strand
gaacccaggcgugcucaug

SEQ ID NO: 633394 - RNA, 19 nt, Homo sapiens
  misc_RNA (1)...(19): siRNA sense strand
ggccgucauccucuacuuu

SEQ ID NO: 633395 - RNA, 19 nt, Homo sapiens
  misc_RNA (1)...(19): siRNA sense strand
gccgucauccucuacuuug

SEQ ID NO: 633396 - RNA, 19 nt, Homo sapiens
  misc_RNA (1)...(19): siRNA sense strand
gacgguggcggucaucauc

SEQ ID NO: 633397 - RNA, 19 nt, Homo sapiens
  misc_RNA (1)...(19): siRNA sense strand
gcaaauaucucaugaagcu

SEQ ID NO: 633398 - RNA, 19 nt, Homo sapiens
  misc_RNA (1)...(19): siRNA sense strand
gaacguaugcugaacauga

SEQ ID NO: 633399 - RNA, 19 nt, Homo sapiens
  misc_RNA (1)...(19): siRNA sense strand
ccaagaaaguccaaucuga

SEQ ID NO: 633400 - RNA, 19 nt, Homo sapiens
  misc_RNA (1)...(19): siRNA sense strand
ggauuaaacugcaaauauc

SEQ ID NO: 633401 - RNA, 19 nt, Homo sapiens
  misc_RNA (1)...(19): siRNA sense strand
uaauauggcuacacuaaga

SEQ ID NO: 633402 - RNA, 19 nt, Homo sapiens
  misc_RNA (1)...(19): siRNA sense strand
caaacaaccugcuaucauc

SEQ ID NO: 633403 - RNA, 19 nt, Homo sapiens
  misc_RNA (1)...(19): siRNA sense strand
uagaauggguggagaagaa

SEQ ID NO: 633404 - RNA, 19 nt, Homo sapiens
  misc_RNA (1)...(19): siRNA sense strand
guagaugacuggauuaaac

SEQ ID NO: 633405 - RNA, 19 nt, Homo sapiens
  misc_RNA (1)...(19): siRNA sense strand
gcuuguagaugacuggauu

SEQ ID NO: 633406 - RNA, 19 nt, Homo sapiens
  misc_RNA (1)...(19): siRNA sense strand
ccagaagauuguuuguuga

SEQ ID NO: 633407 - RNA, 19 nt, Homo sapiens
  misc_RNA (1)...(19): siRNA sense strand
uaaaugaacguaugcugaa

SEQ ID NO: 633408 - RNA, 19 nt, Homo sapiens
  misc_RNA (1)...(19): siRNA sense strand
uccagaagauuguuuguug

SEQ ID NO: 633409 - RNA, 19 nt, Homo sapiens
  misc_RNA (1)...(19): siRNA sense strand
agauugugcuuguagauga

SEQ ID NO: 633410 - RNA, 19 nt, Homo sapiens
  misc_RNA (1)...(19): siRNA sense strand
gaagaagcagagauacguu

SEQ ID NO: 633411 - RNA, 19 nt, Homo sapiens
  misc_RNA (1)...(19): siRNA sense strand
gacaauggaagcggauaua

SEQ ID NO: 633412 - RNA, 19 nt, Homo sapiens
  misc_RNA (1)...(19): siRNA sense strand
gcugguaucaaccuuauga

SEQ ID NO: 633413 - RNA, 19 nt, Homo sapiens
  misc_RNA (1)...(19): siRNA sense strand
ggcuuugguuguugaagua

SEQ ID NO: 633414 - RNA, 19 nt, Homo sapiens
  misc_RNA (1)...(19): siRNA sense strand
ccaucucccuucuuuguau

SEQ ID NO: 633415 - RNA, 19 nt, Homo sapiens
  misc_RNA (1)...(19): siRNA sense strand
ccaaaguucagcucaaaga

SEQ ID NO: 633416 - RNA, 19 nt, Homo sapiens
  misc_RNA (1)...(19): siRNA sense strand
gaccagauaauaauuugga

SEQ ID NO: 633417 - RNA, 19 nt, Homo sapiens
  misc_RNA (1)...(19): siRNA sense strand
caagaaaguccaaucugau

SEQ ID NO: 633418 - RNA, 19 nt, Homo sapiens
  misc_RNA (1)...(19): siRNA sense strand
gagcacaaaagacuuaaua

SEQ ID NO: 633419 - RNA, 19 nt, Homo sapiens
  misc_RNA (1)...(19): siRNA sense strand
aagaggagguggcggcuau

SEQ ID NO: 633420 - RNA, 19 nt, Homo sapiens
  misc_RNA (1)...(19): siRNA sense strand
cauggaggcuuugguuguu

SEQ ID NO: 633421 - RNA, 19 nt, Homo sapiens
  misc_RNA (1)...(19): siRNA sense strand
ggcuauauccaucgaaauu

SEQ ID NO: 633422 - RNA, 19 nt, Homo sapiens
  misc_RNA (1)...(19): siRNA sense strand
uggagaagaagcagagaua

SEQ ID NO: 633423 - RNA, 19 nt, Homo sapiens
  misc_RNA (1)...(19): siRNA sense strand
cuuaauauggcuacacuaa

SEQ ID NO: 633424 - RNA, 19 nt, Homo sapiens
  misc_RNA (1)...(19): siRNA sense strand
aauggaagcggauauagaa

SEQ ID NO: 633425 - RNA, 19 nt, Homo sapiens
  misc_RNA (1)...(19): siRNA sense strand
ccaaacaaccugcuaucau

SEQ ID NO: 633426 - RNA, 19 nt, Homo sapiens
  misc_RNA (1)...(19): siRNA sense strand
cugcaaauaucucaugaag

SEQ ID NO: 633427 - RNA, 19 nt, Homo sapiens
  misc_RNA (1)...(19): siRNA sense strand
caauggaagcggauauaga

SEQ ID NO: 633428 - RNA, 19 nt, Homo sapiens
  misc_RNA (1)...(19): siRNA sense strand
uuacagugguggaggcuau

SEQ ID NO: 633429 - RNA, 19 nt, Homo sapiens
  misc_RNA (1)...(19): siRNA sense strand
gcacaaaagacuuaauaug

SEQ ID NO: 633430 - RNA, 19 nt, Homo sapiens
  misc_RNA (1)...(19): siRNA sense strand
ucacguagcccuuuuauca

SEQ ID NO: 633431 - RNA, 19 nt, Homo sapiens
  misc_RNA (1)...(19): siRNA sense strand
gaaggggagguucuaguua

SEQ ID NO: 633432 - RNA, 19 nt, Homo sapiens
  misc_RNA (1)...(19): siRNA sense strand
gcuauauccaucgaaauuu

SEQ ID NO: 633433 - RNA, 19 nt, Homo sapiens
  misc_RNA (1)...(19): siRNA sense strand
gaccugggaagccaaaguu

SEQ ID NO: 633434 - RNA, 19 nt, Homo sapiens
  misc_RNA (1)...(19): siRNA sense strand
uggaccagauaauaauuug

SEQ ID NO: 633435 - RNA, 19 nt, Homo sapiens
  misc_RNA (1)...(19): siRNA sense strand
uaaccaaacaaccugcuau

SEQ ID NO: 633436 - RNA, 19 nt, Homo sapiens
  misc_RNA (1)...(19): siRNA sense strand
caucucccuucuuuguauu

SEQ ID NO: 633437 - RNA, 19 nt, Homo sapiens
  misc_RNA (1)...(19): siRNA sense strand
gggagguucuaguuacagu

SEQ ID NO: 633438 - RNA, 19 nt, Homo sapiens
  misc_RNA (1)...(19): siRNA sense strand
aaacugcaaauaucucaug

SEQ ID NO: 633439 - RNA, 19 nt, Homo sapiens
  misc_RNA (1)...(19): siRNA sense strand
aaaguucagcucaaagaga

SEQ ID NO: 633440 - RNA, 19 nt, Homo sapiens
  misc_RNA (1)...(19): siRNA sense strand
cucccaagauggcccgaua

SEQ ID NO: 633441 - RNA, 19 nt, Homo sapiens
  misc_RNA (1)...(19): siRNA sense strand
gcagauugugcuuguagau

SEQ ID NO: 633442 - RNA, 19 nt, Homo sapiens
  misc_RNA (1)...(19): siRNA sense strand
aaguucagcucaaagagau

SEQ ID NO: 633443 - RNA, 19 nt, Homo sapiens
  misc_RNA (1)...(19): siRNA sense strand
gacuuaauauggcuacacu

SEQ ID NO: 633444 - RNA, 19 nt, Homo sapiens
  misc_RNA (1)...(19): siRNA sense strand
gauuggcaguacacgguau

SEQ ID NO: 633445 - RNA, 19 nt, Homo sapiens
  misc_RNA (1)...(19): siRNA sense strand
ugaagcugcugccuguauc

SEQ ID NO: 633446 - RNA, 19 nt, Homo sapiens
  misc_RNA (1)...(19): siRNA sense strand
ugacuggauuaaacugcaa

SEQ ID NO: 633447 - RNA, 19 nt, Homo sapiens
  misc_RNA (1)...(19): siRNA sense strand
agccaaaguucagcucaaa

SEQ ID NO: 633448 - RNA, 19 nt, Homo sapiens
  misc_RNA (1)...(19): siRNA sense strand
gggcagauugugcuuguag

SEQ ID NO: 633449 - RNA, 19 nt, Homo sapiens
  misc_RNA (1)...(19): siRNA sense strand
aagaaaguccaaucugaug

SEQ ID NO: 633450 - RNA, 19 nt, Homo sapiens
  misc_RNA (1)...(19): siRNA sense strand
guucagcucaaagagauuu

SEQ ID NO: 633451 - RNA, 19 nt, Homo sapiens
  misc_RNA (1)...(19): siRNA sense strand
aaacaaccugcuaucauca

SEQ ID NO: 633452 - RNA, 19 nt, Homo sapiens
  misc_RNA (1)...(19): siRNA sense strand
guaaccaaacaaccugcua

SEQ ID NO: 633453 - RNA, 19 nt, Homo sapiens
  misc_RNA (1)...(19): siRNA sense strand
cgagccaucucugcuaaag

SEQ ID NO: 633454 - RNA, 19 nt, Homo sapiens
  misc_RNA (1)...(19): siRNA sense strand
ugggcuauauccaucgaaa

SEQ ID NO: 633455 - RNA, 19 nt, Homo sapiens
  misc_RNA (1)...(19): siRNA sense strand
gaagcugcugccuguauca

SEQ ID NO: 633456 - RNA, 19 nt, Homo sapiens
  misc_RNA (1)...(19): siRNA sense strand
aagaagcagagauacguuu

SEQ ID NO: 633457 - RNA, 19 nt, Homo sapiens
  misc_RNA (1)...(19): siRNA sense strand
cgacaauggaagcggauau

SEQ ID NO: 633458 - RNA, 19 nt, Homo sapiens
  misc_RNA (1)...(19): siRNA sense strand
cugcugguaucaaccuuau

SEQ ID NO: 633459 - RNA, 19 nt, Homo sapiens
  misc_RNA (1)...(19): siRNA sense strand
aagauuguuuguugacaca

SEQ ID NO: 633460 - RNA, 19 nt, Homo sapiens
  misc_RNA (1)...(19): siRNA sense strand
gcugcugguaucaaccuua

SEQ ID NO: 633461 - RNA, 19 nt, Homo sapiens
  misc_RNA (1)...(19): siRNA sense strand
ccauggaggcuuugguugu

SEQ ID NO: 633462 - RNA, 19 nt, Homo sapiens
  misc_RNA (1)...(19): siRNA sense strand
ggcagauugugcuuguaga

SEQ ID NO: 633463 - RNA, 19 nt, Homo sapiens
  misc_RNA (1)...(19): siRNA sense strand
gagaagaagcagagauacg

SEQ ID NO: 633464 - RNA, 19 nt, Homo sapiens
  misc_RNA (1)...(19): siRNA sense strand
aagccaaaguucagcucaa

SEQ ID NO: 633465 - RNA, 19 nt, Homo sapiens
  misc_RNA (1)...(19): siRNA sense strand
uggaggcuuugguuguuga

SEQ ID NO: 633466 - RNA, 19 nt, Homo sapiens
  misc_RNA (1)...(19): siRNA sense strand
cucgagccaucucugcuaa

SEQ ID NO: 633467 - RNA, 19 nt, Homo sapiens
  misc_RNA (1)...(19): siRNA sense strand
aaauuuugcuggaaacaga

SEQ ID NO: 633468 - RNA, 19 nt, Homo sapiens
  misc_RNA (1)...(19): siRNA sense strand
uggaggcuauagaggaguu

SEQ ID NO: 633469 - RNA, 19 nt, Homo sapiens
  misc_RNA (1)...(19): siRNA sense strand
ugaaguaaccaaacaaccu

SEQ ID NO: 633470 - RNA, 19 nt, Homo sapiens
  misc_RNA (1)...(19): siRNA sense strand
cacaaaagacuuaauaugg

SEQ ID NO: 633471 - RNA, 19 nt, Homo sapiens
  misc_RNA (1)...(19): siRNA sense strand
ggagaagaagcagagauac

SEQ ID NO: 633472 - RNA, 19 nt, Homo sapiens
  misc_RNA (1)...(19): siRNA sense strand
gauuaauucuggguuucca

SEQ ID NO: 633473 - RNA, 19 nt, Homo sapiens
  misc_RNA (1)...(19): siRNA sense strand
gcaaauaucucaugaagcu

SEQ ID NO: 633474 - RNA, 19 nt, Homo sapiens
  misc_RNA (1)...(19): siRNA sense strand
gaacguaugcugaacauga

SEQ ID NO: 633475 - RNA, 19 nt, Homo sapiens
  misc_RNA (1)...(19): siRNA sense strand
ccaagaaaguccaaucuga

SEQ ID NO: 633476 - RNA, 19 nt, Homo sapiens
  misc_RNA (1)...(19): siRNA sense strand
ggauuaaacugcaaauauc

SEQ ID NO: 633477 - RNA, 19 nt, Homo sapiens
  misc_RNA (1)...(19): siRNA sense strand
caaacaaccugcuaucauc

SEQ ID NO: 633478 - RNA, 19 nt, Homo sapiens
  misc_RNA (1)...(19): siRNA sense strand
guagaugacuggauuaaac

SEQ ID NO: 633479 - RNA, 19 nt, Homo sapiens
  misc_RNA (1)...(19): siRNA sense strand
gcuuguagaugacuggauu

SEQ ID NO: 633480 - RNA, 19 nt, Homo sapiens
  misc_RNA (1)...(19): siRNA sense strand
uaaaugaacguaugcugaa

SEQ ID NO: 633481 - RNA, 19 nt, Homo sapiens
  misc_RNA (1)...(19): siRNA sense strand
agauugugcuuguagauga

SEQ ID NO: 633482 - RNA, 19 nt, Homo sapiens
  misc_RNA (1)...(19): siRNA sense strand
ccaucucccuucuuuguau

SEQ ID NO: 633483 - RNA, 19 nt, Homo sapiens
  misc_RNA (1)...(19): siRNA sense strand
gacaauggaagcggauaua

SEQ ID NO: 633484 - RNA, 19 nt, Homo sapiens
  misc_RNA (1)...(19): siRNA sense strand
gcugguaucaaccuuauga

SEQ ID NO: 633485 - RNA, 19 nt, Homo sapiens
  misc_RNA (1)...(19): siRNA sense strand
ggcuuugguuguugaagua

SEQ ID NO: 633486 - RNA, 19 nt, Homo sapiens
  misc_RNA (1)...(19): siRNA sense strand
caagaaaguccaaucugau

SEQ ID NO: 633487 - RNA, 19 nt, Homo sapiens
  misc_RNA (1)...(19): siRNA sense strand
cauggaggcuuugguuguu

SEQ ID NO: 633488 - RNA, 19 nt, Homo sapiens
  misc_RNA (1)...(19): siRNA sense strand
aagaggagguggcggcuau

SEQ ID NO: 633489 - RNA, 19 nt, Homo sapiens
  misc_RNA (1)...(19): siRNA sense strand
cugcaaauaucucaugaag

SEQ ID NO: 633490 - RNA, 19 nt, Homo sapiens
  misc_RNA (1)...(19): siRNA sense strand
aauggaagcggauauagaa

SEQ ID NO: 633491 - RNA, 19 nt, Homo sapiens
  misc_RNA (1)...(19): siRNA sense strand
ccaaacaaccugcuaucau

SEQ ID NO: 633492 - RNA, 19 nt, Homo sapiens
  misc_RNA (1)...(19): siRNA sense strand
caauggaagcggauauaga

SEQ ID NO: 633493 - RNA, 19 nt, Homo sapiens
  misc_RNA (1)...(19): siRNA sense strand
uuacagugguggaggcuau

SEQ ID NO: 633494 - RNA, 19 nt, Homo sapiens
  misc_RNA (1)...(19): siRNA sense strand
gaaggggagguucuaguua

SEQ ID NO: 633495 - RNA, 19 nt, Homo sapiens
  misc_RNA (1)...(19): siRNA sense strand
uaaccaaacaaccugcuau

SEQ ID NO: 633496 - RNA, 19 nt, Homo sapiens
  misc_RNA (1)...(19): siRNA sense strand
aaacugcaaauaucucaug

SEQ ID NO: 633497 - RNA, 19 nt, Homo sapiens
  misc_RNA (1)...(19): siRNA sense strand
gggagguucuaguuacagu

SEQ ID NO: 633498 - RNA, 19 nt, Homo sapiens
  misc_RNA (1)...(19): siRNA sense strand
caucucccuucuuuguauu

SEQ ID NO: 633499 - RNA, 19 nt, Homo sapiens
  misc_RNA (1)...(19): siRNA sense strand
gcagauugugcuuguagau

SEQ ID NO: 633500 - RNA, 19 nt, Homo sapiens
  misc_RNA (1)...(19): siRNA sense strand
cucccaagauggcccgaua

SEQ ID NO: 633501 - RNA, 19 nt, Homo sapiens
  misc_RNA (1)...(19): siRNA sense strand
ugacuggauuaaacugcaa

SEQ ID NO: 633502 - RNA, 19 nt, Homo sapiens
  misc_RNA (1)...(19): siRNA sense strand
gauuggcaguacacgguau

SEQ ID NO: 633503 - RNA, 19 nt, Homo sapiens
  misc_RNA (1)...(19): siRNA sense strand
ugaagcugcugccuguauc

SEQ ID NO: 633504 - RNA, 19 nt, Homo sapiens
  misc_RNA (1)...(19): siRNA sense strand
aagaaaguccaaucugaug

SEQ ID NO: 633505 - RNA, 19 nt, Homo sapiens
  misc_RNA (1)...(19): siRNA sense strand
gggcagauugugcuuguag

SEQ ID NO: 633506 - RNA, 19 nt, Homo sapiens
  misc_RNA (1)...(19): siRNA sense strand
guaaccaaacaaccugcua

SEQ ID NO: 633507 - RNA, 19 nt, Homo sapiens
  misc_RNA (1)...(19): siRNA sense strand
cgagccaucucugcuaaag

SEQ ID NO: 633508 - RNA, 19 nt, Homo sapiens
  misc_RNA (1)...(19): siRNA sense strand
aaacaaccugcuaucauca

SEQ ID NO: 633509 - RNA, 19 nt, Homo sapiens
  misc_RNA (1)...(19): siRNA sense strand
gaagcugcugccuguauca

SEQ ID NO: 633510 - RNA, 19 nt, Homo sapiens
  misc_RNA (1)...(19): siRNA sense strand
cugcugguaucaaccuuau

SEQ ID NO: 633511 - RNA, 19 nt, Homo sapiens
  misc_RNA (1)...(19): siRNA sense strand
cgacaauggaagcggauau

SEQ ID NO: 633512 - RNA, 19 nt, Homo sapiens
  misc_RNA (1)...(19): siRNA sense strand
ggcagauugugcuuguaga

SEQ ID NO: 633513 - RNA, 19 nt, Homo sapiens
  misc_RNA (1)...(19): siRNA sense strand
gcugcugguaucaaccuua

SEQ ID NO: 633514 - RNA, 19 nt, Homo sapiens
  misc_RNA (1)...(19): siRNA sense strand
ccauggaggcuuugguugu

SEQ ID NO: 633515 - RNA, 19 nt, Homo sapiens
  misc_RNA (1)...(19): siRNA sense strand
uggaggcuuugguuguuga

SEQ ID NO: 633516 - RNA, 19 nt, Homo sapiens
  misc_RNA (1)...(19): siRNA sense strand
cucgagccaucucugcuaa

SEQ ID NO: 633517 - RNA, 19 nt, Homo sapiens
  misc_RNA (1)...(19): siRNA sense strand
ugaaguaaccaaacaaccu

SEQ ID NO: 633518 - RNA, 19 nt, Homo sapiens
  misc_RNA (1)...(19): siRNA sense strand
uggaggcuauagaggaguu

SEQ ID NO: 633519 - RNA, 19 nt, Homo sapiens
  misc_RNA (1)...(19): siRNA sense strand
gaaacuaccuccagcugaa

SEQ ID NO: 633520 - RNA, 19 nt, Homo sapiens
  misc_RNA (1)...(19): siRNA sense strand
gaauggagcucuuucucuu

SEQ ID NO: 633521 - RNA, 19 nt, Homo sapiens
  misc_RNA (1)...(19): siRNA sense strand
gaacacagagcacauaugu

SEQ ID NO: 633522 - RNA, 19 nt, Homo sapiens
  misc_RNA (1)...(19): siRNA sense strand
ccacgaaacuacaccauga

SEQ ID NO: 633523 - RNA, 19 nt, Homo sapiens
  misc_RNA (1)...(19): siRNA sense strand
ccaagaagguggagcacaa

SEQ ID NO: 633524 - RNA, 19 nt, Homo sapiens
  misc_RNA (1)...(19): siRNA sense strand
ggaccaagaugcccuacau

SEQ ID NO: 633525 - RNA, 19 nt, Homo sapiens
  misc_RNA (1)...(19): siRNA sense strand
ccacugcccuucauuggaa

SEQ ID NO: 633526 - RNA, 19 nt, Homo sapiens
  misc_RNA (1)...(19): siRNA sense strand
gcaccgaaguguucccuau

SEQ ID NO: 633527 - RNA, 19 nt, Homo sapiens
  misc_RNA (1)...(19): siRNA sense strand
acacggaguucuacuugaa

SEQ ID NO: 633528 - RNA, 19 nt, Homo sapiens
  misc_RNA (1)...(19): siRNA sense strand
gaaacuacaccaugagcuu

SEQ ID NO: 633529 - RNA, 19 nt, Homo sapiens
  misc_RNA (1)...(19): siRNA sense strand
ugaagaaccugaugaugag

SEQ ID NO: 633530 - RNA, 19 nt, Homo sapiens
  misc_RNA (1)...(19): siRNA sense strand
caucagcuccauugucuuu

SEQ ID NO: 633531 - RNA, 19 nt, Homo sapiens
  misc_RNA (1)...(19): siRNA sense strand
caacacggaguucuacuug

SEQ ID NO: 633532 - RNA, 19 nt, Homo sapiens
  misc_RNA (1)...(19): siRNA sense strand
gcggaacuguuucggagaa

SEQ ID NO: 633533 - RNA, 19 nt, Homo sapiens
  misc_RNA (1)...(19): siRNA sense strand
gauguucucuucggugaug

SEQ ID NO: 633534 - RNA, 19 nt, Homo sapiens
  misc_RNA (1)...(19): siRNA sense strand
ggacuucaucgacuccuuu

SEQ ID NO: 633535 - RNA, 19 nt, Homo sapiens
  misc_RNA (1)...(19): siRNA sense strand
gaaccggcagcccaaguuu

SEQ ID NO: 633536 - RNA, 19 nt, Homo sapiens
  misc_RNA (1)...(19): siRNA sense strand
caagguccaugaggagauu

SEQ ID NO: 633537 - RNA, 19 nt, Homo sapiens
  misc_RNA (1)...(19): siRNA sense strand
acaaagaguuccugucacu

SEQ ID NO: 633538 - RNA, 19 nt, Homo sapiens
  misc_RNA (1)...(19): siRNA sense strand
acaccaaguuucgggauuu

SEQ ID NO: 633539 - RNA, 19 nt, Homo sapiens
  misc_RNA (1)...(19): siRNA sense strand
uugaagaaccugaugauga

SEQ ID NO: 633540 - RNA, 19 nt, Homo sapiens
  misc_RNA (1)...(19): siRNA sense strand
ggagcucuuucucuucuuc

SEQ ID NO: 633541 - RNA, 19 nt, Homo sapiens
  misc_RNA (1)...(19): siRNA sense strand
ccacgagauccaaagauuu

SEQ ID NO: 633542 - RNA, 19 nt, Homo sapiens
  misc_RNA (1)...(19): siRNA sense strand
gggcagcucuaugagaugu

SEQ ID NO: 633543 - RNA, 19 nt, Homo sapiens
  misc_RNA (1)...(19): siRNA sense strand
ucucuucggugaugaaaca

SEQ ID NO: 633544 - RNA, 19 nt, Homo sapiens
  misc_RNA (1)...(19): siRNA sense strand
gacaccaaguuucgggauu

SEQ ID NO: 633545 - RNA, 19 nt, Homo sapiens
  misc_RNA (1)...(19): siRNA sense strand
gucaucagcuccauugucu

SEQ ID NO: 633546 - RNA, 19 nt, Homo sapiens
  misc_RNA (1)...(19): siRNA sense strand
gcugaacacagagcacaua

SEQ ID NO: 633547 - RNA, 19 nt, Homo sapiens
  misc_RNA (1)...(19): siRNA sense strand
uccacgagauccaaagauu

SEQ ID NO: 633548 - RNA, 19 nt, Homo sapiens
  misc_RNA (1)...(19): siRNA sense strand
gcagcucuaugagauguuc

SEQ ID NO: 633549 - RNA, 19 nt, Homo sapiens
  misc_RNA (1)...(19): siRNA sense strand
auaugugacuccaucauga

SEQ ID NO: 633550 - RNA, 19 nt, Homo sapiens
  misc_RNA (1)...(19): siRNA sense strand
ugacugugauggucuugau

SEQ ID NO: 633551 - RNA, 19 nt, Homo sapiens
  misc_RNA (1)...(19): siRNA sense strand
uaagggcaccgaaguguuc

SEQ ID NO: 633552 - RNA, 19 nt, Homo sapiens
  misc_RNA (1)...(19): siRNA sense strand
ucaccaccgucaugcagaa

SEQ ID NO: 633553 - RNA, 19 nt, Homo sapiens
  misc_RNA (1)...(19): siRNA sense strand
ugcaagggcuggaggacuu

SEQ ID NO: 633554 - RNA, 19 nt, Homo sapiens
  misc_RNA (1)...(19): siRNA sense strand
ccaagaugcccuacaugga

SEQ ID NO: 633555 - RNA, 19 nt, Homo sapiens
  misc_RNA (1)...(19): siRNA sense strand
gggaccgcuuugacuauga

SEQ ID NO: 633556 - RNA, 19 nt, Homo sapiens
  misc_RNA (1)...(19): siRNA sense strand
ccacagcaacaggccuuua

SEQ ID NO: 633557 - RNA, 19 nt, Homo sapiens
  misc_RNA (1)...(19): siRNA sense strand
gcuucuugcugcucaugaa

SEQ ID NO: 633558 - RNA, 19 nt, Homo sapiens
  misc_RNA (1)...(19): siRNA sense strand
acagagugaucggcaagaa

SEQ ID NO: 633559 - RNA, 19 nt, Homo sapiens
  misc_RNA (1)...(19): siRNA sense strand
gaggagauugacagaguga

SEQ ID NO: 633560 - RNA, 19 nt, Homo sapiens
  misc_RNA (1)...(19): siRNA sense strand
ggaccgcuuugacuaugag

SEQ ID NO: 633561 - RNA, 19 nt, Homo sapiens
  misc_RNA (1)...(19): siRNA sense strand
ggagauugacagagugauc

SEQ ID NO: 633562 - RNA, 19 nt, Homo sapiens
  misc_RNA (1)...(19): siRNA sense strand
cacagcaacaggccuuuaa

SEQ ID NO: 633563 - RNA, 19 nt, Homo sapiens
  misc_RNA (1)...(19): siRNA sense strand
caucgacuccuuucucauc

SEQ ID NO: 633564 - RNA, 19 nt, Homo sapiens
  misc_RNA (1)...(19): siRNA sense strand
ccucaaguccucccaguca

SEQ ID NO: 633565 - RNA, 19 nt, Homo sapiens
  misc_RNA (1)...(19): siRNA sense strand
gcacgcuggaucccaauuc

SEQ ID NO: 633566 - RNA, 19 nt, Homo sapiens
  misc_RNA (1)...(19): siRNA sense strand
ccaccgucaugcagaacuu

SEQ ID NO: 633567 - RNA, 19 nt, Homo sapiens
  misc_RNA (1)...(19): siRNA sense strand
cauaugugacuccaucaug

SEQ ID NO: 633568 - RNA, 19 nt, Homo sapiens
  misc_RNA (1)...(19): siRNA sense strand
gcagaacuuccgccucaag

SEQ ID NO: 633569 - RNA, 19 nt, Homo sapiens
  misc_RNA (1)...(19): siRNA sense strand
ggagucgggcuuccucauc

SEQ ID NO: 633570 - RNA, 19 nt, Homo sapiens
  misc_RNA (1)...(19): siRNA sense strand
ccaacacggaguucuacuu

SEQ ID NO: 633571 - RNA, 19 nt, Homo sapiens
  misc_RNA (1)...(19): siRNA sense strand
augaggagauugacagagu

SEQ ID NO: 633572 - RNA, 19 nt, Homo sapiens
  misc_RNA (1)...(19): siRNA sense strand
cgcacagucuccaauguca

SEQ ID NO: 633573 - RNA, 19 nt, Homo sapiens
  misc_RNA (1)...(19): siRNA sense strand
cuacauggaggcagugauc

SEQ ID NO: 633574 - RNA, 19 nt, Homo sapiens
  misc_RNA (1)...(19): siRNA sense strand
gcccuucauuggaaacuac

SEQ ID NO: 633575 - RNA, 19 nt, Homo sapiens
  misc_RNA (1)...(19): siRNA sense strand
ccacggggcagcucuauga

SEQ ID NO: 633576 - RNA, 19 nt, Homo sapiens
  misc_RNA (1)...(19): siRNA sense strand
cagcaacaggccuuuaagu

SEQ ID NO: 633577 - RNA, 19 nt, Homo sapiens
  misc_RNA (1)...(19): siRNA sense strand
gccgcacagucuccaaugu

SEQ ID NO: 633578 - RNA, 19 nt, Homo sapiens
  misc_RNA (1)...(19): siRNA sense strand
agcaacaggccuuuaaguu

SEQ ID NO: 633579 - RNA, 19 nt, Homo sapiens
  misc_RNA (1)...(19): siRNA sense strand
acuaugaggacaaagaguu

SEQ ID NO: 633580 - RNA, 19 nt, Homo sapiens
  misc_RNA (1)...(19): siRNA sense strand
ucagcuccauugucuuugg

SEQ ID NO: 633581 - RNA, 19 nt, Homo sapiens
  misc_RNA (1)...(19): siRNA sense strand
ggccagaauggagcucuuu

SEQ ID NO: 633582 - RNA, 19 nt, Homo sapiens
  misc_RNA (1)...(19): siRNA sense strand
gaugacaaggggcaguuua

SEQ ID NO: 633583 - RNA, 19 nt, Homo sapiens
  misc_RNA (1)...(19): siRNA sense strand
ggacuucaauccccagcau

SEQ ID NO: 633584 - RNA, 19 nt, Homo sapiens
  misc_RNA (1)...(19): siRNA sense strand
ccugcgcuauggcuucuug

SEQ ID NO: 633585 - RNA, 19 nt, Homo sapiens
  misc_RNA (1)...(19): siRNA sense strand
gaccaagaugcccuacaug

SEQ ID NO: 633586 - RNA, 19 nt, Homo sapiens
  misc_RNA (1)...(19): siRNA sense strand
gaaacuaccuccagcugaa

SEQ ID NO: 633587 - RNA, 19 nt, Homo sapiens
  misc_RNA (1)...(19): siRNA sense strand
gaauggagcucuuucucuu

SEQ ID NO: 633588 - RNA, 19 nt, Homo sapiens
  misc_RNA (1)...(19): siRNA sense strand
gaacacagagcacauaugu

SEQ ID NO: 633589 - RNA, 19 nt, Homo sapiens
  misc_RNA (1)...(19): siRNA sense strand
ccacgaaacuacaccauga

SEQ ID NO: 633590 - RNA, 19 nt, Homo sapiens
  misc_RNA (1)...(19): siRNA sense strand
ccaagaagguggagcacaa

SEQ ID NO: 633591 - RNA, 19 nt, Homo sapiens
  misc_RNA (1)...(19): siRNA sense strand
ggaccaagaugcccuacau

SEQ ID NO: 633592 - RNA, 19 nt, Homo sapiens
  misc_RNA (1)...(19): siRNA sense strand
ccacugcccuucauuggaa

SEQ ID NO: 633593 - RNA, 19 nt, Homo sapiens
  misc_RNA (1)...(19): siRNA sense strand
gcaccgaaguguucccuau

SEQ ID NO: 633594 - RNA, 19 nt, Homo sapiens
  misc_RNA (1)...(19): siRNA sense strand
acacggaguucuacuugaa

SEQ ID NO: 633595 - RNA, 19 nt, Homo sapiens
  misc_RNA (1)...(19): siRNA sense strand
gaaacuacaccaugagcuu

SEQ ID NO: 633596 - RNA, 19 nt, Homo sapiens
  misc_RNA (1)...(19): siRNA sense strand
ugaagaaccugaugaugag

SEQ ID NO: 633597 - RNA, 19 nt, Homo sapiens
  misc_RNA (1)...(19): siRNA sense strand
caucagcuccauugucuuu

SEQ ID NO: 633598 - RNA, 19 nt, Homo sapiens
  misc_RNA (1)...(19): siRNA sense strand
caacacggaguucuacuug

SEQ ID NO: 633599 - RNA, 19 nt, Homo sapiens
  misc_RNA (1)...(19): siRNA sense strand
gcggaacuguuucggagaa

SEQ ID NO: 633600 - RNA, 19 nt, Homo sapiens
  misc_RNA (1)...(19): siRNA sense strand
gauguucucuucggugaug

SEQ ID NO: 633601 - RNA, 19 nt, Homo sapiens
  misc_RNA (1)...(19): siRNA sense strand
ggacuucaucgacuccuuu

SEQ ID NO: 633602 - RNA, 19 nt, Homo sapiens
  misc_RNA (1)...(19): siRNA sense strand
gaaccggcagcccaaguuu

SEQ ID NO: 633603 - RNA, 19 nt, Homo sapiens
  misc_RNA (1)...(19): siRNA sense strand
caagguccaugaggagauu

SEQ ID NO: 633604 - RNA, 19 nt, Homo sapiens
  misc_RNA (1)...(19): siRNA sense strand
acaaagaguuccugucacu

SEQ ID NO: 633605 - RNA, 19 nt, Homo sapiens
  misc_RNA (1)...(19): siRNA sense strand
acaccaaguuucgggauuu

SEQ ID NO: 633606 - RNA, 19 nt, Homo sapiens
  misc_RNA (1)...(19): siRNA sense strand
uugaagaaccugaugauga

SEQ ID NO: 633607 - RNA, 19 nt, Homo sapiens
  misc_RNA (1)...(19): siRNA sense strand
ggagcucuuucucuucuuc

SEQ ID NO: 633608 - RNA, 19 nt, Homo sapiens
  misc_RNA (1)...(19): siRNA sense strand
ccacgagauccaaagauuu

SEQ ID NO: 633609 - RNA, 19 nt, Homo sapiens
  misc_RNA (1)...(19): siRNA sense strand
gggcagcucuaugagaugu

SEQ ID NO: 633610 - RNA, 19 nt, Homo sapiens
  misc_RNA (1)...(19): siRNA sense strand
ucucuucggugaugaaaca

SEQ ID NO: 633611 - RNA, 19 nt, Homo sapiens
  misc_RNA (1)...(19): siRNA sense strand
gacaccaaguuucgggauu

SEQ ID NO: 633612 - RNA, 19 nt, Homo sapiens
  misc_RNA (1)...(19): siRNA sense strand
gucaucagcuccauugucu

SEQ ID NO: 633613 - RNA, 19 nt, Homo sapiens
  misc_RNA (1)...(19): siRNA sense strand
gcugaacacagagcacaua

SEQ ID NO: 633614 - RNA, 19 nt, Homo sapiens
  misc_RNA (1)...(19): siRNA sense strand
uccacgagauccaaagauu

SEQ ID NO: 633615 - RNA, 19 nt, Homo sapiens
  misc_RNA (1)...(19): siRNA sense strand
gcagcucuaugagauguuc

SEQ ID NO: 633616 - RNA, 19 nt, Homo sapiens
  misc_RNA (1)...(19): siRNA sense strand
auaugugacuccaucauga

SEQ ID NO: 633617 - RNA, 19 nt, Homo sapiens
  misc_RNA (1)...(19): siRNA sense strand
ugacugugauggucuugau

SEQ ID NO: 633618 - RNA, 19 nt, Homo sapiens
  misc_RNA (1)...(19): siRNA sense strand
uaagggcaccgaaguguuc

SEQ ID NO: 633619 - RNA, 19 nt, Homo sapiens
  misc_RNA (1)...(19): siRNA sense strand
ucaccaccgucaugcagaa

SEQ ID NO: 633620 - RNA, 19 nt, Homo sapiens
  misc_RNA (1)...(19): siRNA sense strand
ugcaagggcuggaggacuu

SEQ ID NO: 633621 - RNA, 19 nt, Homo sapiens
  misc_RNA (1)...(19): siRNA sense strand
ccaagaugcccuacaugga

SEQ ID NO: 633622 - RNA, 19 nt, Homo sapiens
  misc_RNA (1)...(19): siRNA sense strand
gggaccgcuuugacuauga

SEQ ID NO: 633623 - RNA, 19 nt, Homo sapiens
  misc_RNA (1)...(19): siRNA sense strand
ccacagcaacaggccuuua

SEQ ID NO: 633624 - RNA, 19 nt, Homo sapiens
  misc_RNA (1)...(19): siRNA sense strand
gcuucuugcugcucaugaa

SEQ ID NO: 633625 - RNA, 19 nt, Homo sapiens
  misc_RNA (1)...(19): siRNA sense strand
acagagugaucggcaagaa

SEQ ID NO: 633626 - RNA, 19 nt, Homo sapiens
  misc_RNA (1)...(19): siRNA sense strand
gaggagauugacagaguga

SEQ ID NO: 633627 - RNA, 19 nt, Homo sapiens
  misc_RNA (1)...(19): siRNA sense strand
ggaccgcuuugacuaugag

SEQ ID NO: 633628 - RNA, 19 nt, Homo sapiens
  misc_RNA (1)...(19): siRNA sense strand
ggagauugacagagugauc

SEQ ID NO: 633629 - RNA, 19 nt, Homo sapiens
  misc_RNA (1)...(19): siRNA sense strand
cacagcaacaggccuuuaa

SEQ ID NO: 633630 - RNA, 19 nt, Homo sapiens
  misc_RNA (1)...(19): siRNA sense strand
caucgacuccuuucucauc

SEQ ID NO: 633631 - RNA, 19 nt, Homo sapiens
  misc_RNA (1)...(19): siRNA sense strand
ccucaaguccucccaguca

SEQ ID NO: 633632 - RNA, 19 nt, Homo sapiens
  misc_RNA (1)...(19): siRNA sense strand
gcacgcuggaucccaauuc

SEQ ID NO: 633633 - RNA, 19 nt, Homo sapiens
  misc_RNA (1)...(19): siRNA sense strand
ccaccgucaugcagaacuu

SEQ ID NO: 633634 - RNA, 19 nt, Homo sapiens
  misc_RNA (1)...(19): siRNA sense strand
cauaugugacuccaucaug

SEQ ID NO: 633635 - RNA, 19 nt, Homo sapiens
  misc_RNA (1)...(19): siRNA sense strand
gcagaacuuccgccucaag

SEQ ID NO: 633636 - RNA, 19 nt, Homo sapiens
  misc_RNA (1)...(19): siRNA sense strand
ggagucgggcuuccucauc

SEQ ID NO: 633637 - RNA, 19 nt, Homo sapiens
  misc_RNA (1)...(19): siRNA sense strand
ccaacacggaguucuacuu

SEQ ID NO: 633638 - RNA, 19 nt, Homo sapiens
  misc_RNA (1)...(19): siRNA sense strand
augaggagauugacagagu

SEQ ID NO: 633639 - RNA, 19 nt, Homo sapiens
  misc_RNA (1)...(19): siRNA sense strand
cgcacagucuccaauguca

SEQ ID NO: 633640 - RNA, 19 nt, Homo sapiens
  misc_RNA (1)...(19): siRNA sense strand
cuacauggaggcagugauc

SEQ ID NO: 633641 - RNA, 19 nt, Homo sapiens
  misc_RNA (1)...(19): siRNA sense strand
gcccuucauuggaaacuac

SEQ ID NO: 633642 - RNA, 19 nt, Homo sapiens
  misc_RNA (1)...(19): siRNA sense strand
ccacggggcagcucuauga

SEQ ID NO: 633643 - RNA, 19 nt, Homo sapiens
  misc_RNA (1)...(19): siRNA sense strand
cagcaacaggccuuuaagu

SEQ ID NO: 633644 - RNA, 19 nt, Homo sapiens
  misc_RNA (1)...(19): siRNA sense strand
gccgcacagucuccaaugu

SEQ ID NO: 633645 - RNA, 19 nt, Homo sapiens
  misc_RNA (1)...(19): siRNA sense strand
agcaacaggccuuuaaguu

SEQ ID NO: 633646 - RNA, 19 nt, Homo sapiens
  misc_RNA (1)...(19): siRNA sense strand
acuaugaggacaaagaguu

SEQ ID NO: 633647 - RNA, 19 nt, Homo sapiens
  misc_RNA (1)...(19): siRNA sense strand
ucagcuccauugucuuugg

SEQ ID NO: 633648 - RNA, 19 nt, Homo sapiens
  misc_RNA (1)...(19): siRNA sense strand
ggccagaauggagcucuuu

SEQ ID NO: 633649 - RNA, 19 nt, Homo sapiens
  misc_RNA (1)...(19): siRNA sense strand
gaugacaaggggcaguuua

SEQ ID NO: 633650 - RNA, 19 nt, Homo sapiens
  misc_RNA (1)...(19): siRNA sense strand
ggacuucaauccccagcau

SEQ ID NO: 633651 - RNA, 19 nt, Homo sapiens
  misc_RNA (1)...(19): siRNA sense strand
ccugcgcuauggcuucuug

SEQ ID NO: 633652 - RNA, 19 nt, Homo sapiens
  misc_RNA (1)...(19): siRNA sense strand
gaccaagaugcccuacaug

SEQ ID NO: 633653 - RNA, 19 nt, Homo sapiens
  misc_RNA (1)...(19): siRNA sense strand
gcgaaagccucguggaguu

SEQ ID NO: 633654 - RNA, 19 nt, Homo sapiens
  misc_RNA (1)...(19): siRNA sense strand
ugacgcaccugcuggagaa

SEQ ID NO: 633655 - RNA, 19 nt, Homo sapiens
  misc_RNA (1)...(19): siRNA sense strand
gaucugguguucgugauug

SEQ ID NO: 633656 - RNA, 19 nt, Homo sapiens
  misc_RNA (1)...(19): siRNA sense strand
gaacugcacguguccuaug

SEQ ID NO: 633657 - RNA, 19 nt, Homo sapiens
  misc_RNA (1)...(19): siRNA sense strand
gcugugaguuccagugugu

SEQ ID NO: 633658 - RNA, 19 nt, Homo sapiens
  misc_RNA (1)...(19): siRNA sense strand
ggaggaaggcaucgucaug

SEQ ID NO: 633659 - RNA, 19 nt, Homo sapiens
  misc_RNA (1)...(19): siRNA sense strand
gaaccagauuguggacuuc

SEQ ID NO: 633660 - RNA, 19 nt, Homo sapiens
  misc_RNA (1)...(19): siRNA sense strand
ugaaccagauuguggacuu

SEQ ID NO: 633661 - RNA, 19 nt, Homo sapiens
  misc_RNA (1)...(19): siRNA sense strand
ggaaacccagcuccaguug

SEQ ID NO: 633662 - RNA, 19 nt, Homo sapiens
  misc_RNA (1)...(19): siRNA sense strand
aggaaggcaucgucaugua

SEQ ID NO: 633663 - RNA, 19 nt, Homo sapiens
  misc_RNA (1)...(19): siRNA sense strand
gcguuggcgugauccagua

SEQ ID NO: 633664 - RNA, 19 nt, Homo sapiens
  misc_RNA (1)...(19): siRNA sense strand
gggaaacccagcuccaguu

SEQ ID NO: 633665 - RNA, 19 nt, Homo sapiens
  misc_RNA (1)...(19): siRNA sense strand
gaaacccagcuccaguuga

SEQ ID NO: 633666 - RNA, 19 nt, Homo sapiens
  misc_RNA (1)...(19): siRNA sense strand
aaacccagcuccaguugac

SEQ ID NO: 633667 - RNA, 19 nt, Homo sapiens
  misc_RNA (1)...(19): siRNA sense strand
uggaggaucuggagaacca

SEQ ID NO: 633668 - RNA, 19 nt, Homo sapiens
  misc_RNA (1)...(19): siRNA sense strand
ggaccauggcugugaguuc

SEQ ID NO: 633669 - RNA, 19 nt, Homo sapiens
  misc_RNA (1)...(19): siRNA sense strand
gaggaaggcaucgucaugu

SEQ ID NO: 633670 - RNA, 19 nt, Homo sapiens
  misc_RNA (1)...(19): siRNA sense strand
ggaccuuguucugcugguu

SEQ ID NO: 633671 - RNA, 19 nt, Homo sapiens
  misc_RNA (1)...(19): siRNA sense strand
agaaccagcuggccaacca

SEQ ID NO: 633672 - RNA, 19 nt, Homo sapiens
  misc_RNA (1)...(19): siRNA sense strand
gauuguggacuuccuagau

SEQ ID NO: 633673 - RNA, 19 nt, Homo sapiens
  misc_RNA (1)...(19): siRNA sense strand
ggaguucggccugcaguuc

SEQ ID NO: 633674 - RNA, 19 nt, Homo sapiens
  misc_RNA (1)...(19): siRNA sense strand
ucgagagccugacgcugaa

SEQ ID NO: 633675 - RNA, 19 nt, Homo sapiens
  misc_RNA (1)...(19): siRNA sense strand
ggaaggcaucgucauguac

SEQ ID NO: 633676 - RNA, 19 nt, Homo sapiens
  misc_RNA (1)...(19): siRNA sense strand
gauccaguauucgagucaa

SEQ ID NO: 633677 - RNA, 19 nt, Homo sapiens
  misc_RNA (1)...(19): siRNA sense strand
gcacgucuuccucguagag

SEQ ID NO: 633678 - RNA, 19 nt, Homo sapiens
  misc_RNA (1)...(19): siRNA sense strand
ccacguggaccuuguucug

SEQ ID NO: 633679 - RNA, 19 nt, Homo sapiens
  misc_RNA (1)...(19): siRNA sense strand
caagagcgugcguccacaa

SEQ ID NO: 633680 - RNA, 19 nt, Homo sapiens
  misc_RNA (1)...(19): siRNA sense strand
ggaacgcggcaccaugaca

SEQ ID NO: 633681 - RNA, 19 nt, Homo sapiens
  misc_RNA (1)...(19): siRNA sense strand
ggaucugguguucgugauu

SEQ ID NO: 633682 - RNA, 19 nt, Homo sapiens
  misc_RNA (1)...(19): siRNA sense strand
ggaacugcacguguccuau

SEQ ID NO: 633683 - RNA, 19 nt, Homo sapiens
  misc_RNA (1)...(19): siRNA sense strand
cgugcgcccuuucgaguuc

SEQ ID NO: 633684 - RNA, 19 nt, Homo sapiens
  misc_RNA (1)...(19): siRNA sense strand
ccagauuguggacuuccua

SEQ ID NO: 633685 - RNA, 19 nt, Homo sapiens
  misc_RNA (1)...(19): siRNA sense strand
auuguggacuuccuagaug

SEQ ID NO: 633686 - RNA, 19 nt, Homo sapiens
  misc_RNA (1)...(19): siRNA sense strand
ggccguggaguacauggaa

SEQ ID NO: 633687 - RNA, 19 nt, Homo sapiens
  misc_RNA (1)...(19): siRNA sense strand
gcgaaagccucguggaguu

SEQ ID NO: 633688 - RNA, 19 nt, Homo sapiens
  misc_RNA (1)...(19): siRNA sense strand
ugacgcaccugcuggagaa

SEQ ID NO: 633689 - RNA, 19 nt, Homo sapiens
  misc_RNA (1)...(19): siRNA sense strand
gaucugguguucgugauug

SEQ ID NO: 633690 - RNA, 19 nt, Homo sapiens
  misc_RNA (1)...(19): siRNA sense strand
gaacugcacguguccuaug

SEQ ID NO: 633691 - RNA, 19 nt, Homo sapiens
  misc_RNA (1)...(19): siRNA sense strand
gcugugaguuccagugugu

SEQ ID NO: 633692 - RNA, 19 nt, Homo sapiens
  misc_RNA (1)...(19): siRNA sense strand
ggaggaaggcaucgucaug

SEQ ID NO: 633693 - RNA, 19 nt, Homo sapiens
  misc_RNA (1)...(19): siRNA sense strand
gaaccagauuguggacuuc

SEQ ID NO: 633694 - RNA, 19 nt, Homo sapiens
  misc_RNA (1)...(19): siRNA sense strand
ugaaccagauuguggacuu

SEQ ID NO: 633695 - RNA, 19 nt, Homo sapiens
  misc_RNA (1)...(19): siRNA sense strand
ggaaacccagcuccaguug

SEQ ID NO: 633696 - RNA, 19 nt, Homo sapiens
  misc_RNA (1)...(19): siRNA sense strand
aggaaggcaucgucaugua

SEQ ID NO: 633697 - RNA, 19 nt, Homo sapiens
  misc_RNA (1)...(19): siRNA sense strand
gcguuggcgugauccagua

SEQ ID NO: 633698 - RNA, 19 nt, Homo sapiens
  misc_RNA (1)...(19): siRNA sense strand
gggaaacccagcuccaguu

SEQ ID NO: 633699 - RNA, 19 nt, Homo sapiens
  misc_RNA (1)...(19): siRNA sense strand
gaaacccagcuccaguuga

SEQ ID NO: 633700 - RNA, 19 nt, Homo sapiens
  misc_RNA (1)...(19): siRNA sense strand
aaacccagcuccaguugac

SEQ ID NO: 633701 - RNA, 19 nt, Homo sapiens
  misc_RNA (1)...(19): siRNA sense strand
uggaggaucuggagaacca

SEQ ID NO: 633702 - RNA, 19 nt, Homo sapiens
  misc_RNA (1)...(19): siRNA sense strand
ggaccauggcugugaguuc

SEQ ID NO: 633703 - RNA, 19 nt, Homo sapiens
  misc_RNA (1)...(19): siRNA sense strand
gaggaaggcaucgucaugu

SEQ ID NO: 633704 - RNA, 19 nt, Homo sapiens
  misc_RNA (1)...(19): siRNA sense strand
ggaccuuguucugcugguu

SEQ ID NO: 633705 - RNA, 19 nt, Homo sapiens
  misc_RNA (1)...(19): siRNA sense strand
agaaccagcuggccaacca

SEQ ID NO: 633706 - RNA, 19 nt, Homo sapiens
  misc_RNA (1)...(19): siRNA sense strand
gauuguggacuuccuagau

SEQ ID NO: 633707 - RNA, 19 nt, Homo sapiens
  misc_RNA (1)...(19): siRNA sense strand
ggaguucggccugcaguuc

SEQ ID NO: 633708 - RNA, 19 nt, Homo sapiens
  misc_RNA (1)...(19): siRNA sense strand
ucgagagccugacgcugaa

SEQ ID NO: 633709 - RNA, 19 nt, Homo sapiens
  misc_RNA (1)...(19): siRNA sense strand
ggaaggcaucgucauguac

SEQ ID NO: 633710 - RNA, 19 nt, Homo sapiens
  misc_RNA (1)...(19): siRNA sense strand
gauccaguauucgagucaa

SEQ ID NO: 633711 - RNA, 19 nt, Homo sapiens
  misc_RNA (1)...(19): siRNA sense strand
gcacgucuuccucguagag

SEQ ID NO: 633712 - RNA, 19 nt, Homo sapiens
  misc_RNA (1)...(19): siRNA sense strand
ccacguggaccuuguucug

SEQ ID NO: 633713 - RNA, 19 nt, Homo sapiens
  misc_RNA (1)...(19): siRNA sense strand
caagagcgugcguccacaa

SEQ ID NO: 633714 - RNA, 19 nt, Homo sapiens
  misc_RNA (1)...(19): siRNA sense strand
ggaacgcggcaccaugaca

SEQ ID NO: 633715 - RNA, 19 nt, Homo sapiens
  misc_RNA (1)...(19): siRNA sense strand
ggaucugguguucgugauu

SEQ ID NO: 633716 - RNA, 19 nt, Homo sapiens
  misc_RNA (1)...(19): siRNA sense strand
ggaacugcacguguccuau

SEQ ID NO: 633717 - RNA, 19 nt, Homo sapiens
  misc_RNA (1)...(19): siRNA sense strand
cgugcgcccuuucgaguuc

SEQ ID NO: 633718 - RNA, 19 nt, Homo sapiens
  misc_RNA (1)...(19): siRNA sense strand
ccagauuguggacuuccua

SEQ ID NO: 633719 - RNA, 19 nt, Homo sapiens
  misc_RNA (1)...(19): siRNA sense strand
auuguggacuuccuagaug

SEQ ID NO: 633720 - RNA, 19 nt, Homo sapiens
  misc_RNA (1)...(19): siRNA sense strand
ggccguggaguacauggaa

SEQ ID NO: 633721 - RNA, 19 nt, Homo sapiens
  misc_RNA (1)...(19): siRNA sense strand
gcgaaagccucguggaguu

SEQ ID NO: 633722 - RNA, 19 nt, Homo sapiens
  misc_RNA (1)...(19): siRNA sense strand
ugacgcaccugcuggagaa

SEQ ID NO: 633723 - RNA, 19 nt, Homo sapiens
  misc_RNA (1)...(19): siRNA sense strand
gaucugguguucgugauug

SEQ ID NO: 633724 - RNA, 19 nt, Homo sapiens
  misc_RNA (1)...(19): siRNA sense strand
gaacugcacguguccuaug

SEQ ID NO: 633725 - RNA, 19 nt, Homo sapiens
  misc_RNA (1)...(19): siRNA sense strand
gcugugaguuccagugugu

SEQ ID NO: 633726 - RNA, 19 nt, Homo sapiens
  misc_RNA (1)...(19): siRNA sense strand
ggaggaaggcaucgucaug

SEQ ID NO: 633727 - RNA, 19 nt, Homo sapiens
  misc_RNA (1)...(19): siRNA sense strand
gaaccagauuguggacuuc

SEQ ID NO: 633728 - RNA, 19 nt, Homo sapiens
  misc_RNA (1)...(19): siRNA sense strand
ugaaccagauuguggacuu

SEQ ID NO: 633729 - RNA, 19 nt, Homo sapiens
  misc_RNA (1)...(19): siRNA sense strand
ggaaacccagcuccaguug

SEQ ID NO: 633730 - RNA, 19 nt, Homo sapiens
  misc_RNA (1)...(19): siRNA sense strand
aggaaggcaucgucaugua

SEQ ID NO: 633731 - RNA, 19 nt, Homo sapiens
  misc_RNA (1)...(19): siRNA sense strand
gcguuggcgugauccagua

SEQ ID NO: 633732 - RNA, 19 nt, Homo sapiens
  misc_RNA (1)...(19): siRNA sense strand
gggaaacccagcuccaguu

SEQ ID NO: 633733 - RNA, 19 nt, Homo sapiens
  misc_RNA (1)...(19): siRNA sense strand
gaaacccagcuccaguuga

SEQ ID NO: 633734 - RNA, 19 nt, Homo sapiens
  misc_RNA (1)...(19): siRNA sense strand
aaacccagcuccaguugac

SEQ ID NO: 633735 - RNA, 19 nt, Homo sapiens
  misc_RNA (1)...(19): siRNA sense strand
uggaggaucuggagaacca

SEQ ID NO: 633736 - RNA, 19 nt, Homo sapiens
  misc_RNA (1)...(19): siRNA sense strand
ggaccauggcugugaguuc

SEQ ID NO: 633737 - RNA, 19 nt, Homo sapiens
  misc_RNA (1)...(19): siRNA sense strand
gaggaaggcaucgucaugu

SEQ ID NO: 633738 - RNA, 19 nt, Homo sapiens
  misc_RNA (1)...(19): siRNA sense strand
ggaccuuguucugcugguu

SEQ ID NO: 633739 - RNA, 19 nt, Homo sapiens
  misc_RNA (1)...(19): siRNA sense strand
agaaccagcuggccaacca

SEQ ID NO: 633740 - RNA, 19 nt, Homo sapiens
  misc_RNA (1)...(19): siRNA sense strand
gauuguggacuuccuagau

SEQ ID NO: 633741 - RNA, 19 nt, Homo sapiens
  misc_RNA (1)...(19): siRNA sense strand
ggaguucggccugcaguuc

SEQ ID NO: 633742 - RNA, 19 nt, Homo sapiens
  misc_RNA (1)...(19): siRNA sense strand
ucgagagccugacgcugaa

SEQ ID NO: 633743 - RNA, 19 nt, Homo sapiens
  misc_RNA (1)...(19): siRNA sense strand
ggaaggcaucgucauguac

SEQ ID NO: 633744 - RNA, 19 nt, Homo sapiens
  misc_RNA (1)...(19): siRNA sense strand
gauccaguauucgagucaa

SEQ ID NO: 633745 - RNA, 19 nt, Homo sapiens
  misc_RNA (1)...(19): siRNA sense strand
gcacgucuuccucguagag

SEQ ID NO: 633746 - RNA, 19 nt, Homo sapiens
  misc_RNA (1)...(19): siRNA sense strand
ccacguggaccuuguucug

SEQ ID NO: 633747 - RNA, 19 nt, Homo sapiens
  misc_RNA (1)...(19): siRNA sense strand
caagagcgugcguccacaa

SEQ ID NO: 633748 - RNA, 19 nt, Homo sapiens
  misc_RNA (1)...(19): siRNA sense strand
ggaacgcggcaccaugaca

SEQ ID NO: 633749 - RNA, 19 nt, Homo sapiens
  misc_RNA (1)...(19): siRNA sense strand
ggaucugguguucgugauu

SEQ ID NO: 633750 - RNA, 19 nt, Homo sapiens
  misc_RNA (1)...(19): siRNA sense strand
ggaacugcacguguccuau

SEQ ID NO: 633751 - RNA, 19 nt, Homo sapiens
  misc_RNA (1)...(19): siRNA sense strand
cgugcgcccuuucgaguuc

SEQ ID NO: 633752 - RNA, 19 nt, Homo sapiens
  misc_RNA (1)...(19): siRNA sense strand
ccagauuguggacuuccua

SEQ ID NO: 633753 - RNA, 19 nt, Homo sapiens
  misc_RNA (1)...(19): siRNA sense strand
auuguggacuuccuagaug

SEQ ID NO: 633754 - RNA, 19 nt, Homo sapiens
  misc_RNA (1)...(19): siRNA sense strand
ggccguggaguacauggaa

SEQ ID NO: 633755 - RNA, 19 nt, Homo sapiens
  misc_RNA (1)...(19): siRNA sense strand
gcgaaagccucguggaguu

SEQ ID NO: 633756 - RNA, 19 nt, Homo sapiens
  misc_RNA (1)...(19): siRNA sense strand
ugacgcaccugcuggagaa

SEQ ID NO: 633757 - RNA, 19 nt, Homo sapiens
  misc_RNA (1)...(19): siRNA sense strand
gaucugguguucgugauug

SEQ ID NO: 633758 - RNA, 19 nt, Homo sapiens
  misc_RNA (1)...(19): siRNA sense strand
gaacugcacguguccuaug

SEQ ID NO: 633759 - RNA, 19 nt, Homo sapiens
  misc_RNA (1)...(19): siRNA sense strand
gcugugaguuccagugugu

SEQ ID NO: 633760 - RNA, 19 nt, Homo sapiens
  misc_RNA (1)...(19): siRNA sense strand
ggaggaaggcaucgucaug

SEQ ID NO: 633761 - RNA, 19 nt, Homo sapiens
  misc_RNA (1)...(19): siRNA sense strand
gaaccagauuguggacuuc

SEQ ID NO: 633762 - RNA, 19 nt, Homo sapiens
  misc_RNA (1)...(19): siRNA sense strand
ugaaccagauuguggacuu

SEQ ID NO: 633763 - RNA, 19 nt, Homo sapiens
  misc_RNA (1)...(19): siRNA sense strand
ggaaacccagcuccaguug

SEQ ID NO: 633764 - RNA, 19 nt, Homo sapiens
  misc_RNA (1)...(19): siRNA sense strand
aggaaggcaucgucaugua

SEQ ID NO: 633765 - RNA, 19 nt, Homo sapiens
  misc_RNA (1)...(19): siRNA sense strand
gcguuggcgugauccagua

SEQ ID NO: 633766 - RNA, 19 nt, Homo sapiens
  misc_RNA (1)...(19): siRNA sense strand
gggaaacccagcuccaguu

SEQ ID NO: 633767 - RNA, 19 nt, Homo sapiens
  misc_RNA (1)...(19): siRNA sense strand
gaaacccagcuccaguuga

SEQ ID NO: 633768 - RNA, 19 nt, Homo sapiens
  misc_RNA (1)...(19): siRNA sense strand
aaacccagcuccaguugac

SEQ ID NO: 633769 - RNA, 19 nt, Homo sapiens
  misc_RNA (1)...(19): siRNA sense strand
uggaggaucuggagaacca

SEQ ID NO: 633770 - RNA, 19 nt, Homo sapiens
  misc_RNA (1)...(19): siRNA sense strand
ggaccauggcugugaguuc

SEQ ID NO: 633771 - RNA, 19 nt, Homo sapiens
  misc_RNA (1)...(19): siRNA sense strand
gaggaaggcaucgucaugu

SEQ ID NO: 633772 - RNA, 19 nt, Homo sapiens
  misc_RNA (1)...(19): siRNA sense strand
ggaccuuguucugcugguu

SEQ ID NO: 633773 - RNA, 19 nt, Homo sapiens
  misc_RNA (1)...(19): siRNA sense strand
agaaccagcuggccaacca

SEQ ID NO: 633774 - RNA, 19 nt, Homo sapiens
  misc_RNA (1)...(19): siRNA sense strand
gauuguggacuuccuagau

SEQ ID NO: 633775 - RNA, 19 nt, Homo sapiens
  misc_RNA (1)...(19): siRNA sense strand
ggaguucggccugcaguuc

SEQ ID NO: 633776 - RNA, 19 nt, Homo sapiens
  misc_RNA (1)...(19): siRNA sense strand
ucgagagccugacgcugaa

SEQ ID NO: 633777 - RNA, 19 nt, Homo sapiens
  misc_RNA (1)...(19): siRNA sense strand
ggaaggcaucgucauguac

SEQ ID NO: 633778 - RNA, 19 nt, Homo sapiens
  misc_RNA (1)...(19): siRNA sense strand
gauccaguauucgagucaa

SEQ ID NO: 633779 - RNA, 19 nt, Homo sapiens
  misc_RNA (1)...(19): siRNA sense strand
gcacgucuuccucguagag

SEQ ID NO: 633780 - RNA, 19 nt, Homo sapiens
  misc_RNA (1)...(19): siRNA sense strand
ccacguggaccuuguucug

SEQ ID NO: 633781 - RNA, 19 nt, Homo sapiens
  misc_RNA (1)...(19): siRNA sense strand
caagagcgugcguccacaa

SEQ ID NO: 633782 - RNA, 19 nt, Homo sapiens
  misc_RNA (1)...(19): siRNA sense strand
ggaacgcggcaccaugaca

SEQ ID NO: 633783 - RNA, 19 nt, Homo sapiens
  misc_RNA (1)...(19): siRNA sense strand
ggaucugguguucgugauu

SEQ ID NO: 633784 - RNA, 19 nt, Homo sapiens
  misc_RNA (1)...(19): siRNA sense strand
ggaacugcacguguccuau

SEQ ID NO: 633785 - RNA, 19 nt, Homo sapiens
  misc_RNA (1)...(19): siRNA sense strand
cgugcgcccuuucgaguuc

SEQ ID NO: 633786 - RNA, 19 nt, Homo sapiens
  misc_RNA (1)...(19): siRNA sense strand
ccagauuguggacuuccua

SEQ ID NO: 633787 - RNA, 19 nt, Homo sapiens
  misc_RNA (1)...(19): siRNA sense strand
auuguggacuuccuagaug

SEQ ID NO: 633788 - RNA, 19 nt, Homo sapiens
  misc_RNA (1)...(19): siRNA sense strand
ggccguggaguacauggaa

SEQ ID NO: 633789 - RNA, 19 nt, Homo sapiens
  misc_RNA (1)...(19): siRNA sense strand
gcgaaagccucguggaguu

SEQ ID NO: 633790 - RNA, 19 nt, Homo sapiens
  misc_RNA (1)...(19): siRNA sense strand
ugacgcaccugcuggagaa

SEQ ID NO: 633791 - RNA, 19 nt, Homo sapiens
  misc_RNA (1)...(19): siRNA sense strand
gaucugguguucgugauug

SEQ ID NO: 633792 - RNA, 19 nt, Homo sapiens
  misc_RNA (1)...(19): siRNA sense strand
gaacugcacguguccuaug

SEQ ID NO: 633793 - RNA, 19 nt, Homo sapiens
  misc_RNA (1)...(19): siRNA sense strand
gcugugaguuccagugugu

SEQ ID NO: 633794 - RNA, 19 nt, Homo sapiens
  misc_RNA (1)...(19): siRNA sense strand
ggaggaaggcaucgucaug

SEQ ID NO: 633795 - RNA, 19 nt, Homo sapiens
  misc_RNA (1)...(19): siRNA sense strand
gaaccagauuguggacuuc

SEQ ID NO: 633796 - RNA, 19 nt, Homo sapiens
  misc_RNA (1)...(19): siRNA sense strand
ugaaccagauuguggacuu

SEQ ID NO: 633797 - RNA, 19 nt, Homo sapiens
  misc_RNA (1)...(19): siRNA sense strand
ggaaacccagcuccaguug

SEQ ID NO: 633798 - RNA, 19 nt, Homo sapiens
  misc_RNA (1)...(19): siRNA sense strand
aggaaggcaucgucaugua

SEQ ID NO: 633799 - RNA, 19 nt, Homo sapiens
  misc_RNA (1)...(19): siRNA sense strand
gcguuggcgugauccagua

SEQ ID NO: 633800 - RNA, 19 nt, Homo sapiens
  misc_RNA (1)...(19): siRNA sense strand
gggaaacccagcuccaguu

SEQ ID NO: 633801 - RNA, 19 nt, Homo sapiens
  misc_RNA (1)...(19): siRNA sense strand
gaaacccagcuccaguuga

SEQ ID NO: 633802 - RNA, 19 nt, Homo sapiens
  misc_RNA (1)...(19): siRNA sense strand
aaacccagcuccaguugac

SEQ ID NO: 633803 - RNA, 19 nt, Homo sapiens
  misc_RNA (1)...(19): siRNA sense strand
uggaggaucuggagaacca

SEQ ID NO: 633804 - RNA, 19 nt, Homo sapiens
  misc_RNA (1)...(19): siRNA sense strand
ggaccauggcugugaguuc

SEQ ID NO: 633805 - RNA, 19 nt, Homo sapiens
  misc_RNA (1)...(19): siRNA sense strand
gaggaaggcaucgucaugu

SEQ ID NO: 633806 - RNA, 19 nt, Homo sapiens
  misc_RNA (1)...(19): siRNA sense strand
ggaccuuguucugcugguu

SEQ ID NO: 633807 - RNA, 19 nt, Homo sapiens
  misc_RNA (1)...(19): siRNA sense strand
agaaccagcuggccaacca

SEQ ID NO: 633808 - RNA, 19 nt, Homo sapiens
  misc_RNA (1)...(19): siRNA sense strand
gauuguggacuuccuagau

SEQ ID NO: 633809 - RNA, 19 nt, Homo sapiens
  misc_RNA (1)...(19): siRNA sense strand
ggaguucggccugcaguuc

SEQ ID NO: 633810 - RNA, 19 nt, Homo sapiens
  misc_RNA (1)...(19): siRNA sense strand
ucgagagccugacgcugaa

SEQ ID NO: 633811 - RNA, 19 nt, Homo sapiens
  misc_RNA (1)...(19): siRNA sense strand
ggaaggcaucgucauguac

SEQ ID NO: 633812 - RNA, 19 nt, Homo sapiens
  misc_RNA (1)...(19): siRNA sense strand
gauccaguauucgagucaa

SEQ ID NO: 633813 - RNA, 19 nt, Homo sapiens
  misc_RNA (1)...(19): siRNA sense strand
gcacgucuuccucguagag

SEQ ID NO: 633814 - RNA, 19 nt, Homo sapiens
  misc_RNA (1)...(19): siRNA sense strand
ccacguggaccuuguucug

SEQ ID NO: 633815 - RNA, 19 nt, Homo sapiens
  misc_RNA (1)...(19): siRNA sense strand
caagagcgugcguccacaa

SEQ ID NO: 633816 - RNA, 19 nt, Homo sapiens
  misc_RNA (1)...(19): siRNA sense strand
ggaacgcggcaccaugaca

SEQ ID NO: 633817 - RNA, 19 nt, Homo sapiens
  misc_RNA (1)...(19): siRNA sense strand
ggaucugguguucgugauu

SEQ ID NO: 633818 - RNA, 19 nt, Homo sapiens
  misc_RNA (1)...(19): siRNA sense strand
ggaacugcacguguccuau

SEQ ID NO: 633819 - RNA, 19 nt, Homo sapiens
  misc_RNA (1)...(19): siRNA sense strand
cgugcgcccuuucgaguuc

SEQ ID NO: 633820 - RNA, 19 nt, Homo sapiens
  misc_RNA (1)...(19): siRNA sense strand
ccagauuguggacuuccua

SEQ ID NO: 633821 - RNA, 19 nt, Homo sapiens
  misc_RNA (1)...(19): siRNA sense strand
auuguggacuuccuagaug

SEQ ID NO: 633822 - RNA, 19 nt, Homo sapiens
  misc_RNA (1)...(19): siRNA sense strand
ggccguggaguacauggaa

SEQ ID NO: 633823 - RNA, 19 nt, Homo sapiens
  misc_RNA (1)...(19): siRNA sense strand
gcgaaagccucguggaguu

SEQ ID NO: 633824 - RNA, 19 nt, Homo sapiens
  misc_RNA (1)...(19): siRNA sense strand
ugacgcaccugcuggagaa

SEQ ID NO: 633825 - RNA, 19 nt, Homo sapiens
  misc_RNA (1)...(19): siRNA sense strand
gaucugguguucgugauug

SEQ ID NO: 633826 - RNA, 19 nt, Homo sapiens
  misc_RNA (1)...(19): siRNA sense strand
gaacugcacguguccuaug

SEQ ID NO: 633827 - RNA, 19 nt, Homo sapiens
  misc_RNA (1)...(19): siRNA sense strand
gcugugaguuccagugugu

SEQ ID NO: 633828 - RNA, 19 nt, Homo sapiens
  misc_RNA (1)...(19): siRNA sense strand
ggaggaaggcaucgucaug

SEQ ID NO: 633829 - RNA, 19 nt, Homo sapiens
  misc_RNA (1)...(19): siRNA sense strand
gaaccagauuguggacuuc

SEQ ID NO: 633830 - RNA, 19 nt, Homo sapiens
  misc_RNA (1)...(19): siRNA sense strand
ugaaccagauuguggacuu

SEQ ID NO: 633831 - RNA, 19 nt, Homo sapiens
  misc_RNA (1)...(19): siRNA sense strand
ggaaacccagcuccaguug

SEQ ID NO: 633832 - RNA, 19 nt, Homo sapiens
  misc_RNA (1)...(19): siRNA sense strand
aggaaggcaucgucaugua

SEQ ID NO: 633833 - RNA, 19 nt, Homo sapiens
  misc_RNA (1)...(19): siRNA sense strand
gcguuggcgugauccagua

SEQ ID NO: 633834 - RNA, 19 nt, Homo sapiens
  misc_RNA (1)...(19): siRNA sense strand
gggaaacccagcuccaguu

SEQ ID NO: 633835 - RNA, 19 nt, Homo sapiens
  misc_RNA (1)...(19): siRNA sense strand
gaaacccagcuccaguuga

SEQ ID NO: 633836 - RNA, 19 nt, Homo sapiens
  misc_RNA (1)...(19): siRNA sense strand
aaacccagcuccaguugac

SEQ ID NO: 633837 - RNA, 19 nt, Homo sapiens
  misc_RNA (1)...(19): siRNA sense strand
uggaggaucuggagaacca

SEQ ID NO: 633838 - RNA, 19 nt, Homo sapiens
  misc_RNA (1)...(19): siRNA sense strand
ggaccauggcugugaguuc

SEQ ID NO: 633839 - RNA, 19 nt, Homo sapiens
  misc_RNA (1)...(19): siRNA sense strand
gaggaaggcaucgucaugu

SEQ ID NO: 633840 - RNA, 19 nt, Homo sapiens
  misc_RNA (1)...(19): siRNA sense strand
ggaccuuguucugcugguu

SEQ ID NO: 633841 - RNA, 19 nt, Homo sapiens
  misc_RNA (1)...(19): siRNA sense strand
agaaccagcuggccaacca

SEQ ID NO: 633842 - RNA, 19 nt, Homo sapiens
  misc_RNA (1)...(19): siRNA sense strand
gauuguggacuuccuagau

SEQ ID NO: 633843 - RNA, 19 nt, Homo sapiens
  misc_RNA (1)...(19): siRNA sense strand
ggaguucggccugcaguuc

SEQ ID NO: 633844 - RNA, 19 nt, Homo sapiens
  misc_RNA (1)...(19): siRNA sense strand
ucgagagccugacgcugaa

SEQ ID NO: 633845 - RNA, 19 nt, Homo sapiens
  misc_RNA (1)...(19): siRNA sense strand
ggaaggcaucgucauguac

SEQ ID NO: 633846 - RNA, 19 nt, Homo sapiens
  misc_RNA (1)...(19): siRNA sense strand
gauccaguauucgagucaa

SEQ ID NO: 633847 - RNA, 19 nt, Homo sapiens
  misc_RNA (1)...(19): siRNA sense strand
gcacgucuuccucguagag

SEQ ID NO: 633848 - RNA, 19 nt, Homo sapiens
  misc_RNA (1)...(19): siRNA sense strand
ccacguggaccuuguucug

SEQ ID NO: 633849 - RNA, 19 nt, Homo sapiens
  misc_RNA (1)...(19): siRNA sense strand
caagagcgugcguccacaa

SEQ ID NO: 633850 - RNA, 19 nt, Homo sapiens
  misc_RNA (1)...(19): siRNA sense strand
ggaacgcggcaccaugaca

SEQ ID NO: 633851 - RNA, 19 nt, Homo sapiens
  misc_RNA (1)...(19): siRNA sense strand
ggaucugguguucgugauu

SEQ ID NO: 633852 - RNA, 19 nt, Homo sapiens
  misc_RNA (1)...(19): siRNA sense strand
ggaacugcacguguccuau

SEQ ID NO: 633853 - RNA, 19 nt, Homo sapiens
  misc_RNA (1)...(19): siRNA sense strand
cgugcgcccuuucgaguuc

SEQ ID NO: 633854 - RNA, 19 nt, Homo sapiens
  misc_RNA (1)...(19): siRNA sense strand
ccagauuguggacuuccua

SEQ ID NO: 633855 - RNA, 19 nt, Homo sapiens
  misc_RNA (1)...(19): siRNA sense strand
auuguggacuuccuagaug

SEQ ID NO: 633856 - RNA, 19 nt, Homo sapiens
  misc_RNA (1)...(19): siRNA sense strand
ggccguggaguacauggaa

SEQ ID NO: 633857 - RNA, 19 nt, Homo sapiens
  misc_RNA (1)...(19): siRNA sense strand
gaauggagcucuuucucuu

SEQ ID NO: 633858 - RNA, 19 nt, Homo sapiens
  misc_RNA (1)...(19): siRNA sense strand
ccacgaaacuacaccauga

SEQ ID NO: 633859 - RNA, 19 nt, Homo sapiens
  misc_RNA (1)...(19): siRNA sense strand
caacaaggacaccaaguuu

SEQ ID NO: 633860 - RNA, 19 nt, Homo sapiens
  misc_RNA (1)...(19): siRNA sense strand
acacagaguucuacuugaa

SEQ ID NO: 633861 - RNA, 19 nt, Homo sapiens
  misc_RNA (1)...(19): siRNA sense strand
ccaagaagguggagcacaa

SEQ ID NO: 633862 - RNA, 19 nt, Homo sapiens
  misc_RNA (1)...(19): siRNA sense strand
caacacagaguucuacuug

SEQ ID NO: 633863 - RNA, 19 nt, Homo sapiens
  misc_RNA (1)...(19): siRNA sense strand
gaagaucagugagcgcuau

SEQ ID NO: 633864 - RNA, 19 nt, Homo sapiens
  misc_RNA (1)...(19): siRNA sense strand
ggaccaggcugaggaguuc

SEQ ID NO: 633865 - RNA, 19 nt, Homo sapiens
  misc_RNA (1)...(19): siRNA sense strand
acacagagcagauguacaa

SEQ ID NO: 633866 - RNA, 19 nt, Homo sapiens
  misc_RNA (1)...(19): siRNA sense strand
gaaacuacaccaugagcuu

SEQ ID NO: 633867 - RNA, 19 nt, Homo sapiens
  misc_RNA (1)...(19): siRNA sense strand
ggaaagcgguacuguuuug

SEQ ID NO: 633868 - RNA, 19 nt, Homo sapiens
  misc_RNA (1)...(19): siRNA sense strand
caucagcuccauugucuuu

SEQ ID NO: 633869 - RNA, 19 nt, Homo sapiens
  misc_RNA (1)...(19): siRNA sense strand
gcagaacuuucgcuucaag

SEQ ID NO: 633870 - RNA, 19 nt, Homo sapiens
  misc_RNA (1)...(19): siRNA sense strand
ccauugcccuucauuggaa

SEQ ID NO: 633871 - RNA, 19 nt, Homo sapiens
  misc_RNA (1)...(19): siRNA sense strand
ggacuucaucgacuccuuu

SEQ ID NO: 633872 - RNA, 19 nt, Homo sapiens
  misc_RNA (1)...(19): siRNA sense strand
gauguucucuucggugaug

SEQ ID NO: 633873 - RNA, 19 nt, Homo sapiens
  misc_RNA (1)...(19): siRNA sense strand
guacaacucccucaugaag

SEQ ID NO: 633874 - RNA, 19 nt, Homo sapiens
  misc_RNA (1)...(19): siRNA sense strand
gaaccggcagcccaaguuu

SEQ ID NO: 633875 - RNA, 19 nt, Homo sapiens
  misc_RNA (1)...(19): siRNA sense strand
caagguccaugaggagauu

SEQ ID NO: 633876 - RNA, 19 nt, Homo sapiens
  misc_RNA (1)...(19): siRNA sense strand
ucggaaagcgguacuguuu

SEQ ID NO: 633877 - RNA, 19 nt, Homo sapiens
  misc_RNA (1)...(19): siRNA sense strand
ugaagaaccuggugaugac

SEQ ID NO: 633878 - RNA, 19 nt, Homo sapiens
  misc_RNA (1)...(19): siRNA sense strand
gaacacagagcagauguac

SEQ ID NO: 633879 - RNA, 19 nt, Homo sapiens
  misc_RNA (1)...(19): siRNA sense strand
acaccaaguuucgggauuu

SEQ ID NO: 633880 - RNA, 19 nt, Homo sapiens
  misc_RNA (1)...(19): siRNA sense strand
acaaagaguuccugucacu

SEQ ID NO: 633881 - RNA, 19 nt, Homo sapiens
  misc_RNA (1)...(19): siRNA sense strand
ccacgagauccaaagauuu

SEQ ID NO: 633882 - RNA, 19 nt, Homo sapiens
  misc_RNA (1)...(19): siRNA sense strand
ggagcucuuucucuucuuc

SEQ ID NO: 633883 - RNA, 19 nt, Homo sapiens
  misc_RNA (1)...(19): siRNA sense strand
acaacucccucaugaagau

SEQ ID NO: 633884 - RNA, 19 nt, Homo sapiens
  misc_RNA (1)...(19): siRNA sense strand
ccaagaugcccuacacaga

SEQ ID NO: 633885 - RNA, 19 nt, Homo sapiens
  misc_RNA (1)...(19): siRNA sense strand
gggcagcucuaugagaugu

SEQ ID NO: 633886 - RNA, 19 nt, Homo sapiens
  misc_RNA (1)...(19): siRNA sense strand
cagagcagauguacaacuc

SEQ ID NO: 633887 - RNA, 19 nt, Homo sapiens
  misc_RNA (1)...(19): siRNA sense strand
gacaccaaguuucgggauu

SEQ ID NO: 633888 - RNA, 19 nt, Homo sapiens
  misc_RNA (1)...(19): siRNA sense strand
ucucuucggugaugaaaca

SEQ ID NO: 633889 - RNA, 19 nt, Homo sapiens
  misc_RNA (1)...(19): siRNA sense strand
gacaugaugccgucaagga

SEQ ID NO: 633890 - RNA, 19 nt, Homo sapiens
  misc_RNA (1)...(19): siRNA sense strand
ucaccaccaucaugcagaa

SEQ ID NO: 633891 - RNA, 19 nt, Homo sapiens
  misc_RNA (1)...(19): siRNA sense strand
gucaucagcuccauugucu

SEQ ID NO: 633892 - RNA, 19 nt, Homo sapiens
  misc_RNA (1)...(19): siRNA sense strand
gcagcucuaugagauguuc

SEQ ID NO: 633893 - RNA, 19 nt, Homo sapiens
  misc_RNA (1)...(19): siRNA sense strand
ucaacaaggacaccaaguu

SEQ ID NO: 633894 - RNA, 19 nt, Homo sapiens
  misc_RNA (1)...(19): siRNA sense strand
uccacgagauccaaagauu

SEQ ID NO: 633895 - RNA, 19 nt, Homo sapiens
  misc_RNA (1)...(19): siRNA sense strand
acagaguucuacuugaaga

SEQ ID NO: 633896 - RNA, 19 nt, Homo sapiens
  misc_RNA (1)...(19): siRNA sense strand
ugacugugauggucuugau

SEQ ID NO: 633897 - RNA, 19 nt, Homo sapiens
  misc_RNA (1)...(19): siRNA sense strand
augcagaacuuucgcuuca

SEQ ID NO: 633898 - RNA, 19 nt, Homo sapiens
  misc_RNA (1)...(19): siRNA sense strand
ugcaagggcuggaggacuu

SEQ ID NO: 633899 - RNA, 19 nt, Homo sapiens
  misc_RNA (1)...(19): siRNA sense strand
gggaccgcuuugacuauga

SEQ ID NO: 633900 - RNA, 19 nt, Homo sapiens
  misc_RNA (1)...(19): siRNA sense strand
ccacagcaacaggccuuua

SEQ ID NO: 633901 - RNA, 19 nt, Homo sapiens
  misc_RNA (1)...(19): siRNA sense strand
gauguacaacucccucaug

SEQ ID NO: 633902 - RNA, 19 nt, Homo sapiens
  misc_RNA (1)...(19): siRNA sense strand
ugaccacccugaaccucuu

SEQ ID NO: 633903 - RNA, 19 nt, Homo sapiens
  misc_RNA (1)...(19): siRNA sense strand
ccaccaucaugcagaacuu

SEQ ID NO: 633904 - RNA, 19 nt, Homo sapiens
  misc_RNA (1)...(19): siRNA sense strand
acagagugaucggcaagaa

SEQ ID NO: 633905 - RNA, 19 nt, Homo sapiens
  misc_RNA (1)...(19): siRNA sense strand
gaggagauugacagaguga

SEQ ID NO: 633906 - RNA, 19 nt, Homo sapiens
  misc_RNA (1)...(19): siRNA sense strand
ggaccgcuuugacuaugag

SEQ ID NO: 633907 - RNA, 19 nt, Homo sapiens
  misc_RNA (1)...(19): siRNA sense strand
ggagauugacagagugauc

SEQ ID NO: 633908 - RNA, 19 nt, Homo sapiens
  misc_RNA (1)...(19): siRNA sense strand
cacagcaacaggccuuuaa

SEQ ID NO: 633909 - RNA, 19 nt, Homo sapiens
  misc_RNA (1)...(19): siRNA sense strand
aaagaguuccugucacugu

SEQ ID NO: 633910 - RNA, 19 nt, Homo sapiens
  misc_RNA (1)...(19): siRNA sense strand
caucgacuccuuucucauc

SEQ ID NO: 633911 - RNA, 19 nt, Homo sapiens
  misc_RNA (1)...(19): siRNA sense strand
gcacgcuggaucccaauuc

SEQ ID NO: 633912 - RNA, 19 nt, Homo sapiens
  misc_RNA (1)...(19): siRNA sense strand
gcaugcaggaggaggagaa

SEQ ID NO: 633913 - RNA, 19 nt, Homo sapiens
  misc_RNA (1)...(19): siRNA sense strand
ucgacuggcucuucaaagg

SEQ ID NO: 633914 - RNA, 19 nt, Homo sapiens
  misc_RNA (1)...(19): siRNA sense strand
aagaguuccugucacuguu

SEQ ID NO: 633915 - RNA, 19 nt, Homo sapiens
  misc_RNA (1)...(19): siRNA sense strand
ggcccuguguucaccauuc

SEQ ID NO: 633916 - RNA, 19 nt, Homo sapiens
  misc_RNA (1)...(19): siRNA sense strand
uugaagaaccuggugauga

SEQ ID NO: 633917 - RNA, 19 nt, Homo sapiens
  misc_RNA (1)...(19): siRNA sense strand
gcccuguguucaccauuca

SEQ ID NO: 633918 - RNA, 19 nt, Homo sapiens
  misc_RNA (1)...(19): siRNA sense strand
augaggagauugacagagu

SEQ ID NO: 633919 - RNA, 19 nt, Homo sapiens
  misc_RNA (1)...(19): siRNA sense strand
auguacaacucccucauga

SEQ ID NO: 633920 - RNA, 19 nt, Homo sapiens
  misc_RNA (1)...(19): siRNA sense strand
cgcacagucuccaauguca

SEQ ID NO: 633921 - RNA, 19 nt, Homo sapiens
  misc_RNA (1)...(19): siRNA sense strand
cuacacagaggcagugauc

SEQ ID NO: 633922 - RNA, 19 nt, Homo sapiens
  misc_RNA (1)...(19): siRNA sense strand
ugaacacagagcagaugua

SEQ ID NO: 633923 - RNA, 19 nt, Homo sapiens
  misc_RNA (1)...(19): siRNA sense strand
gcccuucauuggaaacuac

SEQ ID NO: 633924 - RNA, 19 nt, Homo sapiens
  misc_RNA (1)...(19): siRNA sense strand
ccacggggcagcucuauga

SEQ ID NO: 633925 - RNA, 19 nt, Homo sapiens
  misc_RNA (1)...(19): siRNA sense strand
ccucagucgccuaaggaua

SEQ ID NO: 633926 - RNA, 19 nt, Homo sapiens
  misc_RNA (1)...(19): siRNA sense strand
ccaaguuucgggauuucuu

SEQ ID NO: 633927 - RNA, 19 nt, Homo sapiens
  misc_RNA (1)...(19): siRNA sense strand
gcgcuauggcccuguguuc

SEQ ID NO: 633928 - RNA, 19 nt, Homo sapiens
  misc_RNA (1)...(19): siRNA sense strand
cccacagggucaacaagga

SEQ ID NO: 633929 - RNA, 19 nt, Homo sapiens
  misc_RNA (1)...(19): siRNA sense strand
acuaugaggacaaagaguu

SEQ ID NO: 633930 - RNA, 19 nt, Homo sapiens
  misc_RNA (1)...(19): siRNA sense strand
gccgcacagucuccaaugu

SEQ ID NO: 633931 - RNA, 19 nt, Homo sapiens
  misc_RNA (1)...(19): siRNA sense strand
ucagcuccauugucuuugg

SEQ ID NO: 633932 - RNA, 19 nt, Homo sapiens
  misc_RNA (1)...(19): siRNA sense strand
cucagucgccuaaggauau

SEQ ID NO: 633933 - RNA, 19 nt, Homo sapiens
  misc_RNA (1)...(19): siRNA sense strand
ggccagaauggagcucuuu

SEQ ID NO: 633934 - RNA, 19 nt, Homo sapiens
  misc_RNA (1)...(19): siRNA sense strand
gggacuucaucgacuccuu

SEQ ID NO: 633935 - RNA, 19 nt, Homo sapiens
  misc_RNA (1)...(19): siRNA sense strand
gcuauggcguggcguucag

SEQ ID NO: 633936 - RNA, 19 nt, Homo sapiens
  misc_RNA (1)...(19): siRNA sense strand
caaguuucgggauuucuuc

SEQ ID NO: 633937 - RNA, 19 nt, Homo sapiens
  misc_RNA (1)...(19): siRNA sense strand
caccaaguuucgggauuuc

SEQ ID NO: 633938 - RNA, 19 nt, Homo sapiens
  misc_RNA (1)...(19): siRNA sense strand
cacccugaaccucuucuuu

SEQ ID NO: 633939 - RNA, 19 nt, Homo sapiens
  misc_RNA (1)...(19): siRNA sense strand
aacacagaguucuacuuga

SEQ ID NO: 633940 - RNA, 19 nt, Homo sapiens
  misc_RNA (1)...(19): siRNA sense strand
ccaacacagaguucuacuu

SEQ ID NO: 633941 - RNA, 19 nt, Homo sapiens
  misc_RNA (1)...(19): siRNA sense strand
gagaucagcuauuucaaga

SEQ ID NO: 633942 - RNA, 19 nt, Homo sapiens
  misc_RNA (1)...(19): siRNA sense strand
gaggaggcauggacuuuga

SEQ ID NO: 633943 - RNA, 19 nt, Homo sapiens
  misc_RNA (1)...(19): siRNA sense strand
ccgcuaagcuggaugaaag

SEQ ID NO: 633944 - RNA, 19 nt, Homo sapiens
  misc_RNA (1)...(19): siRNA sense strand
uaagcuggaugaaagagaa

SEQ ID NO: 633945 - RNA, 19 nt, Homo sapiens
  misc_RNA (1)...(19): siRNA sense strand
gaagccugauaucgucuuu

SEQ ID NO: 633946 - RNA, 19 nt, Homo sapiens
  misc_RNA (1)...(19): siRNA sense strand
gcgcguuucuucuccugua

SEQ ID NO: 633947 - RNA, 19 nt, Homo sapiens
  misc_RNA (1)...(19): siRNA sense strand
gcacggcaccuucuacaca

SEQ ID NO: 633948 - RNA, 19 nt, Homo sapiens
  misc_RNA (1)...(19): siRNA sense strand
ucuuugagaucagcuauuu

SEQ ID NO: 633949 - RNA, 19 nt, Homo sapiens
  misc_RNA (1)...(19): siRNA sense strand
ccaccggccucuaugacaa

SEQ ID NO: 633950 - RNA, 19 nt, Homo sapiens
  misc_RNA (1)...(19): siRNA sense strand
gcccaagugugaagacugu

SEQ ID NO: 633951 - RNA, 19 nt, Homo sapiens
  misc_RNA (1)...(19): siRNA sense strand
uagauacccuggagcgaau

SEQ ID NO: 633952 - RNA, 19 nt, Homo sapiens
  misc_RNA (1)...(19): siRNA sense strand
uggacgagcugaccuugga

SEQ ID NO: 633953 - RNA, 19 nt, Homo sapiens
  misc_RNA (1)...(19): siRNA sense strand
ggacuuugacuccaagaag

SEQ ID NO: 633954 - RNA, 19 nt, Homo sapiens
  misc_RNA (1)...(19): siRNA sense strand
augacaaccuagagaagua

SEQ ID NO: 633955 - RNA, 19 nt, Homo sapiens
  misc_RNA (1)...(19): siRNA sense strand
ccagaggccaucuuugaga

SEQ ID NO: 633956 - RNA, 19 nt, Homo sapiens
  misc_RNA (1)...(19): siRNA sense strand
gagggagcacgccagcaua

SEQ ID NO: 633957 - RNA, 19 nt, Homo sapiens
  misc_RNA (1)...(19): siRNA sense strand
gagcacgccagcauagaug

SEQ ID NO: 633958 - RNA, 19 nt, Homo sapiens
  misc_RNA (1)...(19): siRNA sense strand
gcuacacgcagaacauaga

SEQ ID NO: 633959 - RNA, 19 nt, Homo sapiens
  misc_RNA (1)...(19): siRNA sense strand
caacagagagggagaaacc

SEQ ID NO: 633960 - RNA, 19 nt, Homo sapiens
  misc_RNA (1)...(19): siRNA sense strand
ggacaacagagagggagaa

SEQ ID NO: 633961 - RNA, 19 nt, Homo sapiens
  misc_RNA (1)...(19): siRNA sense strand
ggaggaggcauggacuuug

SEQ ID NO: 633962 - RNA, 19 nt, Homo sapiens
  misc_RNA (1)...(19): siRNA sense strand
aaccaucugucacuacuuc

SEQ ID NO: 633963 - RNA, 19 nt, Homo sapiens
  misc_RNA (1)...(19): siRNA sense strand
ggagcacgccagcauagau

SEQ ID NO: 633964 - RNA, 19 nt, Homo sapiens
  misc_RNA (1)...(19): siRNA sense strand
gagaagcagacauggacuu

SEQ ID NO: 633965 - RNA, 19 nt, Homo sapiens
  misc_RNA (1)...(19): siRNA sense strand
ccaaccaucugucacuacu

SEQ ID NO: 633966 - RNA, 19 nt, Homo sapiens
  misc_RNA (1)...(19): siRNA sense strand
ggacgaggccaggacaaca

SEQ ID NO: 633967 - RNA, 19 nt, Homo sapiens
  misc_RNA (1)...(19): siRNA sense strand
gaacgcugucgcagaguca

SEQ ID NO: 633968 - RNA, 19 nt, Homo sapiens
  misc_RNA (1)...(19): siRNA sense strand
ccagcugccggcacgaaua

SEQ ID NO: 633969 - RNA, 19 nt, Homo sapiens
  misc_RNA (1)...(19): siRNA sense strand
cggccucuaugacaaccua

SEQ ID NO: 633970 - RNA, 19 nt, Homo sapiens
  misc_RNA (1)...(19): siRNA sense strand
gacuuucgcucuccaucca

SEQ ID NO: 633971 - RNA, 19 nt, Homo sapiens
  misc_RNA (1)...(19): siRNA sense strand
gcucaucaacaaggagaaa

SEQ ID NO: 633972 - RNA, 19 nt, Homo sapiens
  misc_RNA (1)...(19): siRNA sense strand
cggcacgaauacccgcuaa

SEQ ID NO: 633973 - RNA, 19 nt, Homo sapiens
  misc_RNA (1)...(19): siRNA sense strand
cuacccagaggccaucuuu

SEQ ID NO: 633974 - RNA, 19 nt, Homo sapiens
  misc_RNA (1)...(19): siRNA sense strand
ucaugcgccugcugaagga

SEQ ID NO: 633975 - RNA, 19 nt, Homo sapiens
  misc_RNA (1)...(19): siRNA sense strand
aggagccgcugguggagaa

SEQ ID NO: 633976 - RNA, 19 nt, Homo sapiens
  misc_RNA (1)...(19): siRNA sense strand
acccagaggccaucuuuga

SEQ ID NO: 633977 - RNA, 19 nt, Homo sapiens
  misc_RNA (1)...(19): siRNA sense strand
ugagaucagcuauuucaag

SEQ ID NO: 633978 - RNA, 19 nt, Homo sapiens
  misc_RNA (1)...(19): siRNA sense strand
gcacgaauacccgcuaagc

SEQ ID NO: 633979 - RNA, 19 nt, Homo sapiens
  misc_RNA (1)...(19): siRNA sense strand
gacaacagagagggagaaa

SEQ ID NO: 633980 - RNA, 19 nt, Homo sapiens
  misc_RNA (1)...(19): siRNA sense strand
ucuccuguaugcagucaga

SEQ ID NO: 633981 - RNA, 19 nt, Homo sapiens
  misc_RNA (1)...(19): siRNA sense strand
cggaggaggcauggacuuu

SEQ ID NO: 633982 - RNA, 19 nt, Homo sapiens
  misc_RNA (1)...(19): siRNA sense strand
uuugagaucagcuauuuca

SEQ ID NO: 633983 - RNA, 19 nt, Homo sapiens
  misc_RNA (1)...(19): siRNA sense strand
ggacgagcugaccuuggaa

SEQ ID NO: 633984 - RNA, 19 nt, Homo sapiens
  misc_RNA (1)...(19): siRNA sense strand
guucaagccaaccaucugu

SEQ ID NO: 633985 - RNA, 19 nt, Homo sapiens
  misc_RNA (1)...(19): siRNA sense strand
gagaucagcuauuucaaga

SEQ ID NO: 633986 - RNA, 19 nt, Homo sapiens
  misc_RNA (1)...(19): siRNA sense strand
gaggaggcauggacuuuga

SEQ ID NO: 633987 - RNA, 19 nt, Homo sapiens
  misc_RNA (1)...(19): siRNA sense strand
ccgcuaagcuggaugaaag

SEQ ID NO: 633988 - RNA, 19 nt, Homo sapiens
  misc_RNA (1)...(19): siRNA sense strand
uaagcuggaugaaagagaa

SEQ ID NO: 633989 - RNA, 19 nt, Homo sapiens
  misc_RNA (1)...(19): siRNA sense strand
gaagccugauaucgucuuu

SEQ ID NO: 633990 - RNA, 19 nt, Homo sapiens
  misc_RNA (1)...(19): siRNA sense strand
gcgcguuucuucuccugua

SEQ ID NO: 633991 - RNA, 19 nt, Homo sapiens
  misc_RNA (1)...(19): siRNA sense strand
gcacggcaccuucuacaca

SEQ ID NO: 633992 - RNA, 19 nt, Homo sapiens
  misc_RNA (1)...(19): siRNA sense strand
ucuuugagaucagcuauuu

SEQ ID NO: 633993 - RNA, 19 nt, Homo sapiens
  misc_RNA (1)...(19): siRNA sense strand
ccaccggccucuaugacaa

SEQ ID NO: 633994 - RNA, 19 nt, Homo sapiens
  misc_RNA (1)...(19): siRNA sense strand
gcccaagugugaagacugu

SEQ ID NO: 633995 - RNA, 19 nt, Homo sapiens
  misc_RNA (1)...(19): siRNA sense strand
uagauacccuggagcgaau

SEQ ID NO: 633996 - RNA, 19 nt, Homo sapiens
  misc_RNA (1)...(19): siRNA sense strand
uggacgagcugaccuugga

SEQ ID NO: 633997 - RNA, 19 nt, Homo sapiens
  misc_RNA (1)...(19): siRNA sense strand
ggacuuugacuccaagaag

SEQ ID NO: 633998 - RNA, 19 nt, Homo sapiens
  misc_RNA (1)...(19): siRNA sense strand
augacaaccuagagaagua

SEQ ID NO: 633999 - RNA, 19 nt, Homo sapiens
  misc_RNA (1)...(19): siRNA sense strand
ccagaggccaucuuugaga

SEQ ID NO: 634000 - RNA, 19 nt, Homo sapiens
  misc_RNA (1)...(19): siRNA sense strand
gagggagcacgccagcaua

SEQ ID NO: 634001 - RNA, 19 nt, Homo sapiens
  misc_RNA (1)...(19): siRNA sense strand
gagcacgccagcauagaug

SEQ ID NO: 634002 - RNA, 19 nt, Homo sapiens
  misc_RNA (1)...(19): siRNA sense strand
gcuacacgcagaacauaga

SEQ ID NO: 634003 - RNA, 19 nt, Homo sapiens
  misc_RNA (1)...(19): siRNA sense strand
caacagagagggagaaacc

SEQ ID NO: 634004 - RNA, 19 nt, Homo sapiens
  misc_RNA (1)...(19): siRNA sense strand
ggacaacagagagggagaa

SEQ ID NO: 634005 - RNA, 19 nt, Homo sapiens
  misc_RNA (1)...(19): siRNA sense strand
ggaggaggcauggacuuug

SEQ ID NO: 634006 - RNA, 19 nt, Homo sapiens
  misc_RNA (1)...(19): siRNA sense strand
aaccaucugucacuacuuc

SEQ ID NO: 634007 - RNA, 19 nt, Homo sapiens
  misc_RNA (1)...(19): siRNA sense strand
ggagcacgccagcauagau

SEQ ID NO: 634008 - RNA, 19 nt, Homo sapiens
  misc_RNA (1)...(19): siRNA sense strand
ccaaccaucugucacuacu

SEQ ID NO: 634009 - RNA, 19 nt, Homo sapiens
  misc_RNA (1)...(19): siRNA sense strand
ggacgaggccaggacaaca

SEQ ID NO: 634010 - RNA, 19 nt, Homo sapiens
  misc_RNA (1)...(19): siRNA sense strand
gaacgcugucgcagaguca

SEQ ID NO: 634011 - RNA, 19 nt, Homo sapiens
  misc_RNA (1)...(19): siRNA sense strand
ccagcugccggcacgaaua

SEQ ID NO: 634012 - RNA, 19 nt, Homo sapiens
  misc_RNA (1)...(19): siRNA sense strand
cggccucuaugacaaccua

SEQ ID NO: 634013 - RNA, 19 nt, Homo sapiens
  misc_RNA (1)...(19): siRNA sense strand
cggcacgaauacccgcuaa

SEQ ID NO: 634014 - RNA, 19 nt, Homo sapiens
  misc_RNA (1)...(19): siRNA sense strand
gacuuucgcucuccaucca

SEQ ID NO: 634015 - RNA, 19 nt, Homo sapiens
  misc_RNA (1)...(19): siRNA sense strand
gcucaucaacaaggagaaa

SEQ ID NO: 634016 - RNA, 19 nt, Homo sapiens
  misc_RNA (1)...(19): siRNA sense strand
cuacccagaggccaucuuu

SEQ ID NO: 634017 - RNA, 19 nt, Homo sapiens
  misc_RNA (1)...(19): siRNA sense strand
ucaugcgccugcugaagga

SEQ ID NO: 634018 - RNA, 19 nt, Homo sapiens
  misc_RNA (1)...(19): siRNA sense strand
acccagaggccaucuuuga

SEQ ID NO: 634019 - RNA, 19 nt, Homo sapiens
  misc_RNA (1)...(19): siRNA sense strand
ugagaucagcuauuucaag

SEQ ID NO: 634020 - RNA, 19 nt, Homo sapiens
  misc_RNA (1)...(19): siRNA sense strand
gcacgaauacccgcuaagc

SEQ ID NO: 634021 - RNA, 19 nt, Homo sapiens
  misc_RNA (1)...(19): siRNA sense strand
gacaacagagagggagaaa

SEQ ID NO: 634022 - RNA, 19 nt, Homo sapiens
  misc_RNA (1)...(19): siRNA sense strand
ucuccuguaugcagucaga

SEQ ID NO: 634023 - RNA, 19 nt, Homo sapiens
  misc_RNA (1)...(19): siRNA sense strand
cggaggaggcauggacuuu

SEQ ID NO: 634024 - RNA, 19 nt, Homo sapiens
  misc_RNA (1)...(19): siRNA sense strand
uuugagaucagcuauuuca

SEQ ID NO: 634025 - RNA, 19 nt, Homo sapiens
  misc_RNA (1)...(19): siRNA sense strand
ggacgagcugaccuuggaa

SEQ ID NO: 634026 - RNA, 19 nt, Homo sapiens
  misc_RNA (1)...(19): siRNA sense strand
guucaagccaaccaucugu

SEQ ID NO: 634027 - RNA, 19 nt, Homo sapiens
  misc_RNA (1)...(19): siRNA sense strand
gggauuauaucugugaaua

SEQ ID NO: 634028 - RNA, 19 nt, Homo sapiens
  misc_RNA (1)...(19): siRNA sense strand
gaaggaaauuaaaguggaa

SEQ ID NO: 634029 - RNA, 19 nt, Homo sapiens
  misc_RNA (1)...(19): siRNA sense strand
ucaaagggauuauaucugu

SEQ ID NO: 634030 - RNA, 19 nt, Homo sapiens
  misc_RNA (1)...(19): siRNA sense strand
cagaccaacuugauuauga

SEQ ID NO: 634031 - RNA, 19 nt, Homo sapiens
  misc_RNA (1)...(19): siRNA sense strand
ugugagaucuguggauuua

SEQ ID NO: 634032 - RNA, 19 nt, Homo sapiens
  misc_RNA (1)...(19): siRNA sense strand
gagauaccauucaaagaug

SEQ ID NO: 634033 - RNA, 19 nt, Homo sapiens
  misc_RNA (1)...(19): siRNA sense strand
ggaggaagaagagauguua

SEQ ID NO: 634034 - RNA, 19 nt, Homo sapiens
  misc_RNA (1)...(19): siRNA sense strand
ggagauaccauucaaagau

SEQ ID NO: 634035 - RNA, 19 nt, Homo sapiens
  misc_RNA (1)...(19): siRNA sense strand
gaagaggagaaugaaauua

SEQ ID NO: 634036 - RNA, 19 nt, Homo sapiens
  misc_RNA (1)...(19): siRNA sense strand
ugauaaagaucccaaggaa

SEQ ID NO: 634037 - RNA, 19 nt, Homo sapiens
  misc_RNA (1)...(19): siRNA sense strand
gaagaagagauguuaauca

SEQ ID NO: 634038 - RNA, 19 nt, Homo sapiens
  misc_RNA (1)...(19): siRNA sense strand
gaaagaagaggagaaugaa

SEQ ID NO: 634039 - RNA, 19 nt, Homo sapiens
  misc_RNA (1)...(19): siRNA sense strand
caaaaggcaucucuuaauu

SEQ ID NO: 634040 - RNA, 19 nt, Homo sapiens
  misc_RNA (1)...(19): siRNA sense strand
gagagugccuacuguuaga

SEQ ID NO: 634041 - RNA, 19 nt, Homo sapiens
  misc_RNA (1)...(19): siRNA sense strand
ugacaaaaguccacguuua

SEQ ID NO: 634042 - RNA, 19 nt, Homo sapiens
  misc_RNA (1)...(19): siRNA sense strand
gaagggaugucaaagucau

SEQ ID NO: 634043 - RNA, 19 nt, Homo sapiens
  misc_RNA (1)...(19): siRNA sense strand
ggagaagaaggaaauuaaa

SEQ ID NO: 634044 - RNA, 19 nt, Homo sapiens
  misc_RNA (1)...(19): siRNA sense strand
ugaaagaagaggagaauga

SEQ ID NO: 634045 - RNA, 19 nt, Homo sapiens
  misc_RNA (1)...(19): siRNA sense strand
gaagaaggaaauuaaagug

SEQ ID NO: 634046 - RNA, 19 nt, Homo sapiens
  misc_RNA (1)...(19): siRNA sense strand
gcucgggccuucaagaguu

SEQ ID NO: 634047 - RNA, 19 nt, Homo sapiens
  misc_RNA (1)...(19): siRNA sense strand
caaagaugauccaagagau

SEQ ID NO: 634048 - RNA, 19 nt, Homo sapiens
  misc_RNA (1)...(19): siRNA sense strand
acagauaucuugggcacua

SEQ ID NO: 634049 - RNA, 19 nt, Homo sapiens
  misc_RNA (1)...(19): siRNA sense strand
cgacaugccaaacaucaua

SEQ ID NO: 634050 - RNA, 19 nt, Homo sapiens
  misc_RNA (1)...(19): siRNA sense strand
auacagaccaacuugauua

SEQ ID NO: 634051 - RNA, 19 nt, Homo sapiens
  misc_RNA (1)...(19): siRNA sense strand
gaagaaggacagcguagug

SEQ ID NO: 634052 - RNA, 19 nt, Homo sapiens
  misc_RNA (1)...(19): siRNA sense strand
gaaauuaaaguggaaguag

SEQ ID NO: 634053 - RNA, 19 nt, Homo sapiens
  misc_RNA (1)...(19): siRNA sense strand
gaucaaagggauuauaucu

SEQ ID NO: 634054 - RNA, 19 nt, Homo sapiens
  misc_RNA (1)...(19): siRNA sense strand
gaagaggagauaccauuca

SEQ ID NO: 634055 - RNA, 19 nt, Homo sapiens
  misc_RNA (1)...(19): siRNA sense strand
ccaaacaucauacagauca

SEQ ID NO: 634056 - RNA, 19 nt, Homo sapiens
  misc_RNA (1)...(19): siRNA sense strand
ccaacuugauuaugauguu

SEQ ID NO: 634057 - RNA, 19 nt, Homo sapiens
  misc_RNA (1)...(19): siRNA sense strand
gaaugaaauuagagaggau

SEQ ID NO: 634058 - RNA, 19 nt, Homo sapiens
  misc_RNA (1)...(19): siRNA sense strand
ggaaauuaaaguggaagua

SEQ ID NO: 634059 - RNA, 19 nt, Homo sapiens
  misc_RNA (1)...(19): siRNA sense strand
auucaaagaugauccaaga

SEQ ID NO: 634060 - RNA, 19 nt, Homo sapiens
  misc_RNA (1)...(19): siRNA sense strand
aaaggcaucucuuaauugg

SEQ ID NO: 634061 - RNA, 19 nt, Homo sapiens
  misc_RNA (1)...(19): siRNA sense strand
caagagaugagaccuacaa

SEQ ID NO: 634062 - RNA, 19 nt, Homo sapiens
  misc_RNA (1)...(19): siRNA sense strand
gcagugcaccggaugauuc

SEQ ID NO: 634063 - RNA, 19 nt, Homo sapiens
  misc_RNA (1)...(19): siRNA sense strand
auaaagaucccaaggaaga

SEQ ID NO: 634064 - RNA, 19 nt, Homo sapiens
  misc_RNA (1)...(19): siRNA sense strand
ccaaauacagaccaacuug

SEQ ID NO: 634065 - RNA, 19 nt, Homo sapiens
  misc_RNA (1)...(19): siRNA sense strand
ggagagugccuacuguuag

SEQ ID NO: 634066 - RNA, 19 nt, Homo sapiens
  misc_RNA (1)...(19): siRNA sense strand
gagaagaaggaaauuaaag

SEQ ID NO: 634067 - RNA, 19 nt, Homo sapiens
  misc_RNA (1)...(19): siRNA sense strand
ucaaagaugauccaagaga

SEQ ID NO: 634068 - RNA, 19 nt, Homo sapiens
  misc_RNA (1)...(19): siRNA sense strand
uuaauuggcacaugaagaa

SEQ ID NO: 634069 - RNA, 19 nt, Homo sapiens
  misc_RNA (1)...(19): siRNA sense strand
ucucuuaauuggcacauga

SEQ ID NO: 634070 - RNA, 19 nt, Homo sapiens
  misc_RNA (1)...(19): siRNA sense strand
aagaagagauguuaaucag

SEQ ID NO: 634071 - RNA, 19 nt, Homo sapiens
  misc_RNA (1)...(19): siRNA sense strand
cacauuaaauaccagcauu

SEQ ID NO: 634072 - RNA, 19 nt, Homo sapiens
  misc_RNA (1)...(19): siRNA sense strand
aagaagagaaggagaagaa

SEQ ID NO: 634073 - RNA, 19 nt, Homo sapiens
  misc_RNA (1)...(19): siRNA sense strand
gaggagauaccauucaaag

SEQ ID NO: 634074 - RNA, 19 nt, Homo sapiens
  misc_RNA (1)...(19): siRNA sense strand
ggaagaagagauguuaauc

SEQ ID NO: 634075 - RNA, 19 nt, Homo sapiens
  misc_RNA (1)...(19): siRNA sense strand
cgacaaaaggcaucucuua

SEQ ID NO: 634076 - RNA, 19 nt, Homo sapiens
  misc_RNA (1)...(19): siRNA sense strand
ggaagaagacgaaaagaug

SEQ ID NO: 634077 - RNA, 19 nt, Homo sapiens
  misc_RNA (1)...(19): siRNA sense strand
agaggagaaugaaauuaga

SEQ ID NO: 634078 - RNA, 19 nt, Homo sapiens
  misc_RNA (1)...(19): siRNA sense strand
gugaagaggagauaccauu

SEQ ID NO: 634079 - RNA, 19 nt, Homo sapiens
  misc_RNA (1)...(19): siRNA sense strand
gcagcucauuugcaaguca

SEQ ID NO: 634080 - RNA, 19 nt, Homo sapiens
  misc_RNA (1)...(19): siRNA sense strand
ggaagaggaggaggaagaa

SEQ ID NO: 634081 - RNA, 19 nt, Homo sapiens
  misc_RNA (1)...(19): siRNA sense strand
caaauacagaccaacuuga

SEQ ID NO: 634082 - RNA, 19 nt, Homo sapiens
  misc_RNA (1)...(19): siRNA sense strand
guauguccguugugagaug

SEQ ID NO: 634083 - RNA, 19 nt, Homo sapiens
  misc_RNA (1)...(19): siRNA sense strand
auacagaucaaagggauua

SEQ ID NO: 634084 - RNA, 19 nt, Homo sapiens
  misc_RNA (1)...(19): siRNA sense strand
ggaggaggaagaagagaug

SEQ ID NO: 634085 - RNA, 19 nt, Homo sapiens
  misc_RNA (1)...(19): siRNA sense strand
aagaggagauaccauucaa

SEQ ID NO: 634086 - RNA, 19 nt, Homo sapiens
  misc_RNA (1)...(19): siRNA sense strand
guucauugcagcucauuug

SEQ ID NO: 634087 - RNA, 19 nt, Homo sapiens
  misc_RNA (1)...(19): siRNA sense strand
ugauuaugauguuggagaa

SEQ ID NO: 634088 - RNA, 19 nt, Homo sapiens
  misc_RNA (1)...(19): siRNA sense strand
aggagaagaaggaaauuaa

SEQ ID NO: 634089 - RNA, 19 nt, Homo sapiens
  misc_RNA (1)...(19): siRNA sense strand
gaaggagaagaaggaaauu

SEQ ID NO: 634090 - RNA, 19 nt, Homo sapiens
  misc_RNA (1)...(19): siRNA sense strand
gaggaagaagagauguuaa

SEQ ID NO: 634091 - RNA, 19 nt, Homo sapiens
  misc_RNA (1)...(19): siRNA sense strand
cugaagggaugucaaaguc

SEQ ID NO: 634092 - RNA, 19 nt, Homo sapiens
  misc_RNA (1)...(19): siRNA sense strand
cagaucaaagggauuauau

SEQ ID NO: 634093 - RNA, 19 nt, Homo sapiens
  misc_RNA (1)...(19): siRNA sense strand
gaagaagacgaaaagauga

SEQ ID NO: 634094 - RNA, 19 nt, Homo sapiens
  misc_RNA (1)...(19): siRNA sense strand
aagaagaggagaaugaaau

SEQ ID NO: 634095 - RNA, 19 nt, Homo sapiens
  misc_RNA (1)...(19): siRNA sense strand
gaaaaucagggaagguaaa

SEQ ID NO: 634096 - RNA, 19 nt, Homo sapiens
  misc_RNA (1)...(19): siRNA sense strand
uggagagugccuacuguua

SEQ ID NO: 634097 - RNA, 19 nt, Homo sapiens
  misc_RNA (1)...(19): siRNA sense strand
guccaagaccgguucauug

SEQ ID NO: 634098 - RNA, 19 nt, Homo sapiens
  misc_RNA (1)...(19): siRNA sense strand
ggucagggucuuccucuuc

SEQ ID NO: 634099 - RNA, 19 nt, Homo sapiens
  misc_RNA (1)...(19): siRNA sense strand
aaugugagaucuguggauu

SEQ ID NO: 634100 - RNA, 19 nt, Homo sapiens
  misc_RNA (1)...(19): siRNA sense strand
agaagaggagaaugaaauu

SEQ ID NO: 634101 - RNA, 19 nt, Homo sapiens
  misc_RNA (1)...(19): siRNA sense strand
aaguagagguggaggugaa

SEQ ID NO: 634102 - RNA, 19 nt, Homo sapiens
  misc_RNA (1)...(19): siRNA sense strand
agaaggagaagaaggaaau

SEQ ID NO: 634103 - RNA, 19 nt, Homo sapiens
  misc_RNA (1)...(19): siRNA sense strand
ggaggaaggccgaguaucc

SEQ ID NO: 634104 - RNA, 19 nt, Homo sapiens
  misc_RNA (1)...(19): siRNA sense strand
ugagaucuguggauuuacu

SEQ ID NO: 634105 - RNA, 19 nt, Homo sapiens
  misc_RNA (1)...(19): siRNA sense strand
ugccaaacaucauacagau

SEQ ID NO: 634106 - RNA, 19 nt, Homo sapiens
  misc_RNA (1)...(19): siRNA sense strand
gcugaagaagaaauaugua

SEQ ID NO: 634107 - RNA, 19 nt, Homo sapiens
  misc_RNA (1)...(19): siRNA sense strand
gagauggaaggauguggaa

SEQ ID NO: 634108 - RNA, 19 nt, Homo sapiens
  misc_RNA (1)...(19): siRNA sense strand
aguaguaggacaucuguuu

SEQ ID NO: 634109 - RNA, 19 nt, Homo sapiens
  misc_RNA (1)...(19): siRNA sense strand
gagaaggagaagaaggaaa

SEQ ID NO: 634110 - RNA, 19 nt, Homo sapiens
  misc_RNA (1)...(19): siRNA sense strand
cuacaaaccccacuuagaa

SEQ ID NO: 634111 - RNA, 19 nt, Homo sapiens
  misc_RNA (1)...(19): siRNA sense strand
gagaugagaccuacaaacc

SEQ ID NO: 634112 - RNA, 19 nt, Homo sapiens
  misc_RNA (1)...(19): siRNA sense strand
caaacaucauacagaucaa

SEQ ID NO: 634113 - RNA, 19 nt, Homo sapiens
  misc_RNA (1)...(19): siRNA sense strand
caccagcacagauaucuug

SEQ ID NO: 634114 - RNA, 19 nt, Homo sapiens
  misc_RNA (1)...(19): siRNA sense strand
caagucagaaccaaauaca

SEQ ID NO: 634115 - RNA, 19 nt, Homo sapiens
  misc_RNA (1)...(19): siRNA sense strand
cuucaagaguucccacaau

SEQ ID NO: 634116 - RNA, 19 nt, Homo sapiens
  misc_RNA (1)...(19): siRNA sense strand
ugcagcaccacauuaaaua

SEQ ID NO: 634117 - RNA, 19 nt, Homo sapiens
  misc_RNA (1)...(19): siRNA sense strand
aaagggauuauaucuguga

SEQ ID NO: 634118 - RNA, 19 nt, Homo sapiens
  misc_RNA (1)...(19): siRNA sense strand
agaccaacuugauuaugau

SEQ ID NO: 634119 - RNA, 19 nt, Homo sapiens
  misc_RNA (1)...(19): siRNA sense strand
gacaaaaggcaucucuuaa

SEQ ID NO: 634120 - RNA, 19 nt, Homo sapiens
  misc_RNA (1)...(19): siRNA sense strand
agucagaaccaaauacaga

SEQ ID NO: 634121 - RNA, 19 nt, Homo sapiens
  misc_RNA (1)...(19): siRNA sense strand
gagaaaaucagggaaggua

SEQ ID NO: 634122 - RNA, 19 nt, Homo sapiens
  misc_RNA (1)...(19): siRNA sense strand
gcaagucagaaccaaauac

SEQ ID NO: 634123 - RNA, 19 nt, Homo sapiens
  misc_RNA (1)...(19): siRNA sense strand
agauaccauucaaagauga

SEQ ID NO: 634124 - RNA, 19 nt, Homo sapiens
  misc_RNA (1)...(19): siRNA sense strand
gauucacacuggcgagaag

SEQ ID NO: 634125 - RNA, 19 nt, Homo sapiens
  misc_RNA (1)...(19): siRNA sense strand
ccaaggaagagaggaagaa

SEQ ID NO: 634126 - RNA, 19 nt, Homo sapiens
  misc_RNA (1)...(19): siRNA sense strand
gcugaagggaugucaaagu

SEQ ID NO: 634127 - RNA, 19 nt, Homo sapiens
  misc_RNA (1)...(19): siRNA sense strand
gggauuauaucugugaaua

SEQ ID NO: 634128 - RNA, 19 nt, Homo sapiens
  misc_RNA (1)...(19): siRNA sense strand
gaaggaaauuaaaguggaa

SEQ ID NO: 634129 - RNA, 19 nt, Homo sapiens
  misc_RNA (1)...(19): siRNA sense strand
ucaaagggauuauaucugu

SEQ ID NO: 634130 - RNA, 19 nt, Homo sapiens
  misc_RNA (1)...(19): siRNA sense strand
cagaccaacuugauuauga

SEQ ID NO: 634131 - RNA, 19 nt, Homo sapiens
  misc_RNA (1)...(19): siRNA sense strand
ugugagaucuguggauuua

SEQ ID NO: 634132 - RNA, 19 nt, Homo sapiens
  misc_RNA (1)...(19): siRNA sense strand
gagauaccauucaaagaug

SEQ ID NO: 634133 - RNA, 19 nt, Homo sapiens
  misc_RNA (1)...(19): siRNA sense strand
ggaggaagaagagauguua

SEQ ID NO: 634134 - RNA, 19 nt, Homo sapiens
  misc_RNA (1)...(19): siRNA sense strand
ggagauaccauucaaagau

SEQ ID NO: 634135 - RNA, 19 nt, Homo sapiens
  misc_RNA (1)...(19): siRNA sense strand
gaagaggagaaugaaauua

SEQ ID NO: 634136 - RNA, 19 nt, Homo sapiens
  misc_RNA (1)...(19): siRNA sense strand
ugauaaagaucccaaggaa

SEQ ID NO: 634137 - RNA, 19 nt, Homo sapiens
  misc_RNA (1)...(19): siRNA sense strand
gaagaagagauguuaauca

SEQ ID NO: 634138 - RNA, 19 nt, Homo sapiens
  misc_RNA (1)...(19): siRNA sense strand
gaaagaagaggagaaugaa

SEQ ID NO: 634139 - RNA, 19 nt, Homo sapiens
  misc_RNA (1)...(19): siRNA sense strand
caaaaggcaucucuuaauu

SEQ ID NO: 634140 - RNA, 19 nt, Homo sapiens
  misc_RNA (1)...(19): siRNA sense strand
gagagugccuacuguuaga

SEQ ID NO: 634141 - RNA, 19 nt, Homo sapiens
  misc_RNA (1)...(19): siRNA sense strand
ugacaaaaguccacguuua

SEQ ID NO: 634142 - RNA, 19 nt, Homo sapiens
  misc_RNA (1)...(19): siRNA sense strand
gaagggaugucaaagucau

SEQ ID NO: 634143 - RNA, 19 nt, Homo sapiens
  misc_RNA (1)...(19): siRNA sense strand
ggagaagaaggaaauuaaa

SEQ ID NO: 634144 - RNA, 19 nt, Homo sapiens
  misc_RNA (1)...(19): siRNA sense strand
ugaaagaagaggagaauga

SEQ ID NO: 634145 - RNA, 19 nt, Homo sapiens
  misc_RNA (1)...(19): siRNA sense strand
gaagaaggaaauuaaagug

SEQ ID NO: 634146 - RNA, 19 nt, Homo sapiens
  misc_RNA (1)...(19): siRNA sense strand
gcucgggccuucaagaguu

SEQ ID NO: 634147 - RNA, 19 nt, Homo sapiens
  misc_RNA (1)...(19): siRNA sense strand
caaagaugauccaagagau

SEQ ID NO: 634148 - RNA, 19 nt, Homo sapiens
  misc_RNA (1)...(19): siRNA sense strand
acagauaucuugggcacua

SEQ ID NO: 634149 - RNA, 19 nt, Homo sapiens
  misc_RNA (1)...(19): siRNA sense strand
cgacaugccaaacaucaua

SEQ ID NO: 634150 - RNA, 19 nt, Homo sapiens
  misc_RNA (1)...(19): siRNA sense strand
auacagaccaacuugauua

SEQ ID NO: 634151 - RNA, 19 nt, Homo sapiens
  misc_RNA (1)...(19): siRNA sense strand
gaagaaggacagcguagug

SEQ ID NO: 634152 - RNA, 19 nt, Homo sapiens
  misc_RNA (1)...(19): siRNA sense strand
gaaauuaaaguggaaguag

SEQ ID NO: 634153 - RNA, 19 nt, Homo sapiens
  misc_RNA (1)...(19): siRNA sense strand
gaucaaagggauuauaucu

SEQ ID NO: 634154 - RNA, 19 nt, Homo sapiens
  misc_RNA (1)...(19): siRNA sense strand
gaagaggagauaccauuca

SEQ ID NO: 634155 - RNA, 19 nt, Homo sapiens
  misc_RNA (1)...(19): siRNA sense strand
ccaaacaucauacagauca

SEQ ID NO: 634156 - RNA, 19 nt, Homo sapiens
  misc_RNA (1)...(19): siRNA sense strand
ccaacuugauuaugauguu

SEQ ID NO: 634157 - RNA, 19 nt, Homo sapiens
  misc_RNA (1)...(19): siRNA sense strand
gaaugaaauuagagaggau

SEQ ID NO: 634158 - RNA, 19 nt, Homo sapiens
  misc_RNA (1)...(19): siRNA sense strand
ggaaauuaaaguggaagua

SEQ ID NO: 634159 - RNA, 19 nt, Homo sapiens
  misc_RNA (1)...(19): siRNA sense strand
auucaaagaugauccaaga

SEQ ID NO: 634160 - RNA, 19 nt, Homo sapiens
  misc_RNA (1)...(19): siRNA sense strand
aaaggcaucucuuaauugg

SEQ ID NO: 634161 - RNA, 19 nt, Homo sapiens
  misc_RNA (1)...(19): siRNA sense strand
caagagaugagaccuacaa

SEQ ID NO: 634162 - RNA, 19 nt, Homo sapiens
  misc_RNA (1)...(19): siRNA sense strand
gcagugcaccggaugauuc

SEQ ID NO: 634163 - RNA, 19 nt, Homo sapiens
  misc_RNA (1)...(19): siRNA sense strand
auaaagaucccaaggaaga

SEQ ID NO: 634164 - RNA, 19 nt, Homo sapiens
  misc_RNA (1)...(19): siRNA sense strand
ccaaauacagaccaacuug

SEQ ID NO: 634165 - RNA, 19 nt, Homo sapiens
  misc_RNA (1)...(19): siRNA sense strand
ggagagugccuacuguuag

SEQ ID NO: 634166 - RNA, 19 nt, Homo sapiens
  misc_RNA (1)...(19): siRNA sense strand
gagaagaaggaaauuaaag

SEQ ID NO: 634167 - RNA, 19 nt, Homo sapiens
  misc_RNA (1)...(19): siRNA sense strand
ucaaagaugauccaagaga

SEQ ID NO: 634168 - RNA, 19 nt, Homo sapiens
  misc_RNA (1)...(19): siRNA sense strand
uuaauuggcacaugaagaa

SEQ ID NO: 634169 - RNA, 19 nt, Homo sapiens
  misc_RNA (1)...(19): siRNA sense strand
ucucuuaauuggcacauga

SEQ ID NO: 634170 - RNA, 19 nt, Homo sapiens
  misc_RNA (1)...(19): siRNA sense strand
aagaagagauguuaaucag

SEQ ID NO: 634171 - RNA, 19 nt, Homo sapiens
  misc_RNA (1)...(19): siRNA sense strand
cacauuaaauaccagcauu

SEQ ID NO: 634172 - RNA, 19 nt, Homo sapiens
  misc_RNA (1)...(19): siRNA sense strand
aagaagagaaggagaagaa

SEQ ID NO: 634173 - RNA, 19 nt, Homo sapiens
  misc_RNA (1)...(19): siRNA sense strand
gaggagauaccauucaaag

SEQ ID NO: 634174 - RNA, 19 nt, Homo sapiens
  misc_RNA (1)...(19): siRNA sense strand
ggaagaagagauguuaauc

SEQ ID NO: 634175 - RNA, 19 nt, Homo sapiens
  misc_RNA (1)...(19): siRNA sense strand
cgacaaaaggcaucucuua

SEQ ID NO: 634176 - RNA, 19 nt, Homo sapiens
  misc_RNA (1)...(19): siRNA sense strand
ggaagaagacgaaaagaug

SEQ ID NO: 634177 - RNA, 19 nt, Homo sapiens
  misc_RNA (1)...(19): siRNA sense strand
agaggagaaugaaauuaga

SEQ ID NO: 634178 - RNA, 19 nt, Homo sapiens
  misc_RNA (1)...(19): siRNA sense strand
gugaagaggagauaccauu

SEQ ID NO: 634179 - RNA, 19 nt, Homo sapiens
  misc_RNA (1)...(19): siRNA sense strand
gcagcucauuugcaaguca

SEQ ID NO: 634180 - RNA, 19 nt, Homo sapiens
  misc_RNA (1)...(19): siRNA sense strand
ggaagaggaggaggaagaa

SEQ ID NO: 634181 - RNA, 19 nt, Homo sapiens
  misc_RNA (1)...(19): siRNA sense strand
caaauacagaccaacuuga

SEQ ID NO: 634182 - RNA, 19 nt, Homo sapiens
  misc_RNA (1)...(19): siRNA sense strand
guauguccguugugagaug

SEQ ID NO: 634183 - RNA, 19 nt, Homo sapiens
  misc_RNA (1)...(19): siRNA sense strand
auacagaucaaagggauua

SEQ ID NO: 634184 - RNA, 19 nt, Homo sapiens
  misc_RNA (1)...(19): siRNA sense strand
ggaggaggaagaagagaug

SEQ ID NO: 634185 - RNA, 19 nt, Homo sapiens
  misc_RNA (1)...(19): siRNA sense strand
aagaggagauaccauucaa

SEQ ID NO: 634186 - RNA, 19 nt, Homo sapiens
  misc_RNA (1)...(19): siRNA sense strand
guucauugcagcucauuug

SEQ ID NO: 634187 - RNA, 19 nt, Homo sapiens
  misc_RNA (1)...(19): siRNA sense strand
ugauuaugauguuggagaa

SEQ ID NO: 634188 - RNA, 19 nt, Homo sapiens
  misc_RNA (1)...(19): siRNA sense strand
aggagaagaaggaaauuaa

SEQ ID NO: 634189 - RNA, 19 nt, Homo sapiens
  misc_RNA (1)...(19): siRNA sense strand
gaaggagaagaaggaaauu

SEQ ID NO: 634190 - RNA, 19 nt, Homo sapiens
  misc_RNA (1)...(19): siRNA sense strand
gaggaagaagagauguuaa

SEQ ID NO: 634191 - RNA, 19 nt, Homo sapiens
  misc_RNA (1)...(19): siRNA sense strand
cugaagggaugucaaaguc

SEQ ID NO: 634192 - RNA, 19 nt, Homo sapiens
  misc_RNA (1)...(19): siRNA sense strand
cagaucaaagggauuauau

SEQ ID NO: 634193 - RNA, 19 nt, Homo sapiens
  misc_RNA (1)...(19): siRNA sense strand
gaagaagacgaaaagauga

SEQ ID NO: 634194 - RNA, 19 nt, Homo sapiens
  misc_RNA (1)...(19): siRNA sense strand
aagaagaggagaaugaaau

SEQ ID NO: 634195 - RNA, 19 nt, Homo sapiens
  misc_RNA (1)...(19): siRNA sense strand
gaaaaucagggaagguaaa

SEQ ID NO: 634196 - RNA, 19 nt, Homo sapiens
  misc_RNA (1)...(19): siRNA sense strand
uggagagugccuacuguua

SEQ ID NO: 634197 - RNA, 19 nt, Homo sapiens
  misc_RNA (1)...(19): siRNA sense strand
guccaagaccgguucauug

SEQ ID NO: 634198 - RNA, 19 nt, Homo sapiens
  misc_RNA (1)...(19): siRNA sense strand
ggucagggucuuccucuuc

SEQ ID NO: 634199 - RNA, 19 nt, Homo sapiens
  misc_RNA (1)...(19): siRNA sense strand
aaugugagaucuguggauu

SEQ ID NO: 634200 - RNA, 19 nt, Homo sapiens
  misc_RNA (1)...(19): siRNA sense strand
agaagaggagaaugaaauu

SEQ ID NO: 634201 - RNA, 19 nt, Homo sapiens
  misc_RNA (1)...(19): siRNA sense strand
aaguagagguggaggugaa

SEQ ID NO: 634202 - RNA, 19 nt, Homo sapiens
  misc_RNA (1)...(19): siRNA sense strand
agaaggagaagaaggaaau

SEQ ID NO: 634203 - RNA, 19 nt, Homo sapiens
  misc_RNA (1)...(19): siRNA sense strand
ggaggaaggccgaguaucc

SEQ ID NO: 634204 - RNA, 19 nt, Homo sapiens
  misc_RNA (1)...(19): siRNA sense strand
ugagaucuguggauuuacu

SEQ ID NO: 634205 - RNA, 19 nt, Homo sapiens
  misc_RNA (1)...(19): siRNA sense strand
ugccaaacaucauacagau

SEQ ID NO: 634206 - RNA, 19 nt, Homo sapiens
  misc_RNA (1)...(19): siRNA sense strand
gcugaagaagaaauaugua

SEQ ID NO: 634207 - RNA, 19 nt, Homo sapiens
  misc_RNA (1)...(19): siRNA sense strand
gagauggaaggauguggaa

SEQ ID NO: 634208 - RNA, 19 nt, Homo sapiens
  misc_RNA (1)...(19): siRNA sense strand
aguaguaggacaucuguuu

SEQ ID NO: 634209 - RNA, 19 nt, Homo sapiens
  misc_RNA (1)...(19): siRNA sense strand
gagaaggagaagaaggaaa

SEQ ID NO: 634210 - RNA, 19 nt, Homo sapiens
  misc_RNA (1)...(19): siRNA sense strand
cuacaaaccccacuuagaa

SEQ ID NO: 634211 - RNA, 19 nt, Homo sapiens
  misc_RNA (1)...(19): siRNA sense strand
gagaugagaccuacaaacc

SEQ ID NO: 634212 - RNA, 19 nt, Homo sapiens
  misc_RNA (1)...(19): siRNA sense strand
caaacaucauacagaucaa

SEQ ID NO: 634213 - RNA, 19 nt, Homo sapiens
  misc_RNA (1)...(19): siRNA sense strand
caccagcacagauaucuug

SEQ ID NO: 634214 - RNA, 19 nt, Homo sapiens
  misc_RNA (1)...(19): siRNA sense strand
caagucagaaccaaauaca

SEQ ID NO: 634215 - RNA, 19 nt, Homo sapiens
  misc_RNA (1)...(19): siRNA sense strand
cuucaagaguucccacaau

SEQ ID NO: 634216 - RNA, 19 nt, Homo sapiens
  misc_RNA (1)...(19): siRNA sense strand
ugcagcaccacauuaaaua

SEQ ID NO: 634217 - RNA, 19 nt, Homo sapiens
  misc_RNA (1)...(19): siRNA sense strand
aaagggauuauaucuguga

SEQ ID NO: 634218 - RNA, 19 nt, Homo sapiens
  misc_RNA (1)...(19): siRNA sense strand
agaccaacuugauuaugau

SEQ ID NO: 634219 - RNA, 19 nt, Homo sapiens
  misc_RNA (1)...(19): siRNA sense strand
gacaaaaggcaucucuuaa

SEQ ID NO: 634220 - RNA, 19 nt, Homo sapiens
  misc_RNA (1)...(19): siRNA sense strand
agucagaaccaaauacaga

SEQ ID NO: 634221 - RNA, 19 nt, Homo sapiens
  misc_RNA (1)...(19): siRNA sense strand
gagaaaaucagggaaggua

SEQ ID NO: 634222 - RNA, 19 nt, Homo sapiens
  misc_RNA (1)...(19): siRNA sense strand
gcaagucagaaccaaauac

SEQ ID NO: 634223 - RNA, 19 nt, Homo sapiens
  misc_RNA (1)...(19): siRNA sense strand
agauaccauucaaagauga

SEQ ID NO: 634224 - RNA, 19 nt, Homo sapiens
  misc_RNA (1)...(19): siRNA sense strand
gauucacacuggcgagaag

SEQ ID NO: 634225 - RNA, 19 nt, Homo sapiens
  misc_RNA (1)...(19): siRNA sense strand
ccaaggaagagaggaagaa

SEQ ID NO: 634226 - RNA, 19 nt, Homo sapiens
  misc_RNA (1)...(19): siRNA sense strand
gcugaagggaugucaaagu

SEQ ID NO: 634227 - RNA, 19 nt, Homo sapiens
  misc_RNA (1)...(19): siRNA sense strand
ggaaauggaacuacauaua

SEQ ID NO: 634228 - RNA, 19 nt, Homo sapiens
  misc_RNA (1)...(19): siRNA sense strand
ccucagaacuugaccauga

SEQ ID NO: 634229 - RNA, 19 nt, Homo sapiens
  misc_RNA (1)...(19): siRNA sense strand
ggaacuacauauaugacaa

SEQ ID NO: 634230 - RNA, 19 nt, Homo sapiens
  misc_RNA (1)...(19): siRNA sense strand
gaccaugacugucuuccaa

SEQ ID NO: 634231 - RNA, 19 nt, Homo sapiens
  misc_RNA (1)...(19): siRNA sense strand
gcaccagccucaccuguca

SEQ ID NO: 634232 - RNA, 19 nt, Homo sapiens
  misc_RNA (1)...(19): siRNA sense strand
ggaaggagagauccaguau

SEQ ID NO: 634233 - RNA, 19 nt, Homo sapiens
  misc_RNA (1)...(19): siRNA sense strand
gagugcaugugaaggauga

SEQ ID NO: 634234 - RNA, 19 nt, Homo sapiens
  misc_RNA (1)...(19): siRNA sense strand
ggagagaggaagcaggaaa

SEQ ID NO: 634235 - RNA, 19 nt, Homo sapiens
  misc_RNA (1)...(19): siRNA sense strand
ugacagcccugacucacau

SEQ ID NO: 634236 - RNA, 19 nt, Homo sapiens
  misc_RNA (1)...(19): siRNA sense strand
ggagagauccaguaugcau

SEQ ID NO: 634237 - RNA, 19 nt, Homo sapiens
  misc_RNA (1)...(19): siRNA sense strand
gccgauauaccaugggaua

SEQ ID NO: 634238 - RNA, 19 nt, Homo sapiens
  misc_RNA (1)...(19): siRNA sense strand
gaccuacugucaagauaca

SEQ ID NO: 634239 - RNA, 19 nt, Homo sapiens
  misc_RNA (1)...(19): siRNA sense strand
caggaaauggaacuacaua

SEQ ID NO: 634240 - RNA, 19 nt, Homo sapiens
  misc_RNA (1)...(19): siRNA sense strand
aaggagagauccaguaugc

SEQ ID NO: 634241 - RNA, 19 nt, Homo sapiens
  misc_RNA (1)...(19): siRNA sense strand
gaacuacauauaugacaag

SEQ ID NO: 634242 - RNA, 19 nt, Homo sapiens
  misc_RNA (1)...(19): siRNA sense strand
acaaagcgaggccucagua

SEQ ID NO: 634243 - RNA, 19 nt, Homo sapiens
  misc_RNA (1)...(19): siRNA sense strand
gcacagcauccacaaccuu

SEQ ID NO: 634244 - RNA, 19 nt, Homo sapiens
  misc_RNA (1)...(19): siRNA sense strand
aggaauggcucggcccuuu

SEQ ID NO: 634245 - RNA, 19 nt, Homo sapiens
  misc_RNA (1)...(19): siRNA sense strand
ugacucacaugcccaccuu

SEQ ID NO: 634246 - RNA, 19 nt, Homo sapiens
  misc_RNA (1)...(19): siRNA sense strand
gagagaggaagcaggaaau

SEQ ID NO: 634247 - RNA, 19 nt, Homo sapiens
  misc_RNA (1)...(19): siRNA sense strand
ggagcugccucgagugcau

SEQ ID NO: 634248 - RNA, 19 nt, Homo sapiens
  misc_RNA (1)...(19): siRNA sense strand
gaauggcucggcccuuuca

SEQ ID NO: 634249 - RNA, 19 nt, Homo sapiens
  misc_RNA (1)...(19): siRNA sense strand
guuuauggauccugguuca

SEQ ID NO: 634250 - RNA, 19 nt, Homo sapiens
  misc_RNA (1)...(19): siRNA sense strand
gaaggagagauccaguaug

SEQ ID NO: 634251 - RNA, 19 nt, Homo sapiens
  misc_RNA (1)...(19): siRNA sense strand
gggauucagggaaguacua

SEQ ID NO: 634252 - RNA, 19 nt, Homo sapiens
  misc_RNA (1)...(19): siRNA sense strand
gaggaagcaggaaauggaa

SEQ ID NO: 634253 - RNA, 19 nt, Homo sapiens
  misc_RNA (1)...(19): siRNA sense strand
gccagucccugcaccuugu

SEQ ID NO: 634254 - RNA, 19 nt, Homo sapiens
  misc_RNA (1)...(19): siRNA sense strand
ccacaaccuugaggaaugg

SEQ ID NO: 634255 - RNA, 19 nt, Homo sapiens
  misc_RNA (1)...(19): siRNA sense strand
uauccuauccuccucagaa

SEQ ID NO: 634256 - RNA, 19 nt, Homo sapiens
  misc_RNA (1)...(19): siRNA sense strand
guacuucugcaucaucuuc

SEQ ID NO: 634257 - RNA, 19 nt, Homo sapiens
  misc_RNA (1)...(19): siRNA sense strand
caagcucucugugcaugug

SEQ ID NO: 634258 - RNA, 19 nt, Homo sapiens
  misc_RNA (1)...(19): siRNA sense strand
ccacagcccuggucuuccu

SEQ ID NO: 634259 - RNA, 19 nt, Homo sapiens
  misc_RNA (1)...(19): siRNA sense strand
uccacaaccuugaggaaug

SEQ ID NO: 634260 - RNA, 19 nt, Homo sapiens
  misc_RNA (1)...(19): siRNA sense strand
agaggaagcaggaaaugga

SEQ ID NO: 634261 - RNA, 19 nt, Homo sapiens
  misc_RNA (1)...(19): siRNA sense strand
gaagcaggaaauggaacua

SEQ ID NO: 634262 - RNA, 19 nt, Homo sapiens
  misc_RNA (1)...(19): siRNA sense strand
gcaggaaauggaacuacau

SEQ ID NO: 634263 - RNA, 19 nt, Homo sapiens
  misc_RNA (1)...(19): siRNA sense strand
caucaucuucguuguagug

SEQ ID NO: 634264 - RNA, 19 nt, Homo sapiens
  misc_RNA (1)...(19): siRNA sense strand
gcuguccgacucaacauau

SEQ ID NO: 634265 - RNA, 19 nt, Homo sapiens
  misc_RNA (1)...(19): siRNA sense strand
ucccucagcuuccacaaag

SEQ ID NO: 634266 - RNA, 19 nt, Homo sapiens
  misc_RNA (1)...(19): siRNA sense strand
cgacucaacauauccuauc

SEQ ID NO: 634267 - RNA, 19 nt, Homo sapiens
  misc_RNA (1)...(19): siRNA sense strand
ggaauggcucggcccuuuc

SEQ ID NO: 634268 - RNA, 19 nt, Homo sapiens
  misc_RNA (1)...(19): siRNA sense strand
ggauacccacggucgauuc

SEQ ID NO: 634269 - RNA, 19 nt, Homo sapiens
  misc_RNA (1)...(19): siRNA sense strand
uaugaguacuccgagauca

SEQ ID NO: 634270 - RNA, 19 nt, Homo sapiens
  misc_RNA (1)...(19): siRNA sense strand
caaaaugaggccuauauca

SEQ ID NO: 634271 - RNA, 19 nt, Homo sapiens
  misc_RNA (1)...(19): siRNA sense strand
aaacgaguacacaggcaaa

SEQ ID NO: 634272 - RNA, 19 nt, Homo sapiens
  misc_RNA (1)...(19): siRNA sense strand
gcccugcaguguccuuuac

SEQ ID NO: 634273 - RNA, 19 nt, Homo sapiens
  misc_RNA (1)...(19): siRNA sense strand
ggaccuacugucaagauac

SEQ ID NO: 634274 - RNA, 19 nt, Homo sapiens
  misc_RNA (1)...(19): siRNA sense strand
gcuaugaguacuccgagau

SEQ ID NO: 634275 - RNA, 19 nt, Homo sapiens
  misc_RNA (1)...(19): siRNA sense strand
ggccaucggcuaugaguac

SEQ ID NO: 634276 - RNA, 19 nt, Homo sapiens
  misc_RNA (1)...(19): siRNA sense strand
uauaugacaagcucucugu

SEQ ID NO: 634277 - RNA, 19 nt, Homo sapiens
  misc_RNA (1)...(19): siRNA sense strand
ccucuagcccuguuuaugg

SEQ ID NO: 634278 - RNA, 19 nt, Homo sapiens
  misc_RNA (1)...(19): siRNA sense strand
aggaccuacugucaagaua

SEQ ID NO: 634279 - RNA, 19 nt, Homo sapiens
  misc_RNA (1)...(19): siRNA sense strand
gaggauacccacggucgau

SEQ ID NO: 634280 - RNA, 19 nt, Homo sapiens
  misc_RNA (1)...(19): siRNA sense strand
cugagccucucccugcaaa

SEQ ID NO: 634281 - RNA, 19 nt, Homo sapiens
  misc_RNA (1)...(19): siRNA sense strand
cccaggaccuacugucaag

SEQ ID NO: 634282 - RNA, 19 nt, Homo sapiens
  misc_RNA (1)...(19): siRNA sense strand
ggaagcaggaaauggaacu

SEQ ID NO: 634283 - RNA, 19 nt, Homo sapiens
  misc_RNA (1)...(19): siRNA sense strand
gagaggaagcaggaaaugg

SEQ ID NO: 634284 - RNA, 19 nt, Homo sapiens
  misc_RNA (1)...(19): siRNA sense strand
gcccuggucuuccuguacu

SEQ ID NO: 634285 - RNA, 19 nt, Homo sapiens
  misc_RNA (1)...(19): siRNA sense strand
cagcccuggucuuccugua

SEQ ID NO: 634286 - RNA, 19 nt, Homo sapiens
  misc_RNA (1)...(19): siRNA sense strand
gaaaagugcaagaggauac

SEQ ID NO: 634287 - RNA, 19 nt, Homo sapiens
  misc_RNA (1)...(19): siRNA sense strand
cugcaucaucuucguugua

SEQ ID NO: 634288 - RNA, 19 nt, Homo sapiens
  misc_RNA (1)...(19): siRNA sense strand
ggaaaagugcaagaggaua

SEQ ID NO: 634289 - RNA, 19 nt, Homo sapiens
  misc_RNA (1)...(19): siRNA sense strand
ggaaauggaacuacauaua

SEQ ID NO: 634290 - RNA, 19 nt, Homo sapiens
  misc_RNA (1)...(19): siRNA sense strand
ccucagaacuugaccauga

SEQ ID NO: 634291 - RNA, 19 nt, Homo sapiens
  misc_RNA (1)...(19): siRNA sense strand
ggaacuacauauaugacaa

SEQ ID NO: 634292 - RNA, 19 nt, Homo sapiens
  misc_RNA (1)...(19): siRNA sense strand
gaccaugacugucuuccaa

SEQ ID NO: 634293 - RNA, 19 nt, Homo sapiens
  misc_RNA (1)...(19): siRNA sense strand
gcaccagccucaccuguca

SEQ ID NO: 634294 - RNA, 19 nt, Homo sapiens
  misc_RNA (1)...(19): siRNA sense strand
ggaaggagagauccaguau

SEQ ID NO: 634295 - RNA, 19 nt, Homo sapiens
  misc_RNA (1)...(19): siRNA sense strand
gagugcaugugaaggauga

SEQ ID NO: 634296 - RNA, 19 nt, Homo sapiens
  misc_RNA (1)...(19): siRNA sense strand
ggagagaggaagcaggaaa

SEQ ID NO: 634297 - RNA, 19 nt, Homo sapiens
  misc_RNA (1)...(19): siRNA sense strand
ugacagcccugacucacau

SEQ ID NO: 634298 - RNA, 19 nt, Homo sapiens
  misc_RNA (1)...(19): siRNA sense strand
ggagagauccaguaugcau

SEQ ID NO: 634299 - RNA, 19 nt, Homo sapiens
  misc_RNA (1)...(19): siRNA sense strand
gccgauauaccaugggaua

SEQ ID NO: 634300 - RNA, 19 nt, Homo sapiens
  misc_RNA (1)...(19): siRNA sense strand
gaccuacugucaagauaca

SEQ ID NO: 634301 - RNA, 19 nt, Homo sapiens
  misc_RNA (1)...(19): siRNA sense strand
caggaaauggaacuacaua

SEQ ID NO: 634302 - RNA, 19 nt, Homo sapiens
  misc_RNA (1)...(19): siRNA sense strand
aaggagagauccaguaugc

SEQ ID NO: 634303 - RNA, 19 nt, Homo sapiens
  misc_RNA (1)...(19): siRNA sense strand
gaacuacauauaugacaag

SEQ ID NO: 634304 - RNA, 19 nt, Homo sapiens
  misc_RNA (1)...(19): siRNA sense strand
acaaagcgaggccucagua

SEQ ID NO: 634305 - RNA, 19 nt, Homo sapiens
  misc_RNA (1)...(19): siRNA sense strand
gcacagcauccacaaccuu

SEQ ID NO: 634306 - RNA, 19 nt, Homo sapiens
  misc_RNA (1)...(19): siRNA sense strand
aggaauggcucggcccuuu

SEQ ID NO: 634307 - RNA, 19 nt, Homo sapiens
  misc_RNA (1)...(19): siRNA sense strand
ugacucacaugcccaccuu

SEQ ID NO: 634308 - RNA, 19 nt, Homo sapiens
  misc_RNA (1)...(19): siRNA sense strand
gagagaggaagcaggaaau

SEQ ID NO: 634309 - RNA, 19 nt, Homo sapiens
  misc_RNA (1)...(19): siRNA sense strand
ggagcugccucgagugcau

SEQ ID NO: 634310 - RNA, 19 nt, Homo sapiens
  misc_RNA (1)...(19): siRNA sense strand
gaauggcucggcccuuuca

SEQ ID NO: 634311 - RNA, 19 nt, Homo sapiens
  misc_RNA (1)...(19): siRNA sense strand
guuuauggauccugguuca

SEQ ID NO: 634312 - RNA, 19 nt, Homo sapiens
  misc_RNA (1)...(19): siRNA sense strand
gaaggagagauccaguaug

SEQ ID NO: 634313 - RNA, 19 nt, Homo sapiens
  misc_RNA (1)...(19): siRNA sense strand
gggauucagggaaguacua

SEQ ID NO: 634314 - RNA, 19 nt, Homo sapiens
  misc_RNA (1)...(19): siRNA sense strand
gaggaagcaggaaauggaa

SEQ ID NO: 634315 - RNA, 19 nt, Homo sapiens
  misc_RNA (1)...(19): siRNA sense strand
gccagucccugcaccuugu

SEQ ID NO: 634316 - RNA, 19 nt, Homo sapiens
  misc_RNA (1)...(19): siRNA sense strand
ccacaaccuugaggaaugg

SEQ ID NO: 634317 - RNA, 19 nt, Homo sapiens
  misc_RNA (1)...(19): siRNA sense strand
uauccuauccuccucagaa

SEQ ID NO: 634318 - RNA, 19 nt, Homo sapiens
  misc_RNA (1)...(19): siRNA sense strand
guacuucugcaucaucuuc

SEQ ID NO: 634319 - RNA, 19 nt, Homo sapiens
  misc_RNA (1)...(19): siRNA sense strand
caagcucucugugcaugug

SEQ ID NO: 634320 - RNA, 19 nt, Homo sapiens
  misc_RNA (1)...(19): siRNA sense strand
ccacagcccuggucuuccu

SEQ ID NO: 634321 - RNA, 19 nt, Homo sapiens
  misc_RNA (1)...(19): siRNA sense strand
uccacaaccuugaggaaug

SEQ ID NO: 634322 - RNA, 19 nt, Homo sapiens
  misc_RNA (1)...(19): siRNA sense strand
agaggaagcaggaaaugga

SEQ ID NO: 634323 - RNA, 19 nt, Homo sapiens
  misc_RNA (1)...(19): siRNA sense strand
gaagcaggaaauggaacua

SEQ ID NO: 634324 - RNA, 19 nt, Homo sapiens
  misc_RNA (1)...(19): siRNA sense strand
gcaggaaauggaacuacau

SEQ ID NO: 634325 - RNA, 19 nt, Homo sapiens
  misc_RNA (1)...(19): siRNA sense strand
caucaucuucguuguagug

SEQ ID NO: 634326 - RNA, 19 nt, Homo sapiens
  misc_RNA (1)...(19): siRNA sense strand
gcuguccgacucaacauau

SEQ ID NO: 634327 - RNA, 19 nt, Homo sapiens
  misc_RNA (1)...(19): siRNA sense strand
ucccucagcuuccacaaag

SEQ ID NO: 634328 - RNA, 19 nt, Homo sapiens
  misc_RNA (1)...(19): siRNA sense strand
cgacucaacauauccuauc

SEQ ID NO: 634329 - RNA, 19 nt, Homo sapiens
  misc_RNA (1)...(19): siRNA sense strand
ggaauggcucggcccuuuc

SEQ ID NO: 634330 - RNA, 19 nt, Homo sapiens
  misc_RNA (1)...(19): siRNA sense strand
ggauacccacggucgauuc

SEQ ID NO: 634331 - RNA, 19 nt, Homo sapiens
  misc_RNA (1)...(19): siRNA sense strand
uaugaguacuccgagauca

SEQ ID NO: 634332 - RNA, 19 nt, Homo sapiens
  misc_RNA (1)...(19): siRNA sense strand
caaaaugaggccuauauca

SEQ ID NO: 634333 - RNA, 19 nt, Homo sapiens
  misc_RNA (1)...(19): siRNA sense strand
aaacgaguacacaggcaaa

SEQ ID NO: 634334 - RNA, 19 nt, Homo sapiens
  misc_RNA (1)...(19): siRNA sense strand
gcccugcaguguccuuuac

SEQ ID NO: 634335 - RNA, 19 nt, Homo sapiens
  misc_RNA (1)...(19): siRNA sense strand
ggaccuacugucaagauac

SEQ ID NO: 634336 - RNA, 19 nt, Homo sapiens
  misc_RNA (1)...(19): siRNA sense strand
gcuaugaguacuccgagau

SEQ ID NO: 634337 - RNA, 19 nt, Homo sapiens
  misc_RNA (1)...(19): siRNA sense strand
ggccaucggcuaugaguac

SEQ ID NO: 634338 - RNA, 19 nt, Homo sapiens
  misc_RNA (1)...(19): siRNA sense strand
uauaugacaagcucucugu

SEQ ID NO: 634339 - RNA, 19 nt, Homo sapiens
  misc_RNA (1)...(19): siRNA sense strand
aggaccuacugucaagaua

SEQ ID NO: 634340 - RNA, 19 nt, Homo sapiens
  misc_RNA (1)...(19): siRNA sense strand
ccucuagcccuguuuaugg

SEQ ID NO: 634341 - RNA, 19 nt, Homo sapiens
  misc_RNA (1)...(19): siRNA sense strand
gaggauacccacggucgau

SEQ ID NO: 634342 - RNA, 19 nt, Homo sapiens
  misc_RNA (1)...(19): siRNA sense strand
cugagccucucccugcaaa

SEQ ID NO: 634343 - RNA, 19 nt, Homo sapiens
  misc_RNA (1)...(19): siRNA sense strand
cccaggaccuacugucaag

SEQ ID NO: 634344 - RNA, 19 nt, Homo sapiens
  misc_RNA (1)...(19): siRNA sense strand
ggaagcaggaaauggaacu

SEQ ID NO: 634345 - RNA, 19 nt, Homo sapiens
  misc_RNA (1)...(19): siRNA sense strand
gagaggaagcaggaaaugg

SEQ ID NO: 634346 - RNA, 19 nt, Homo sapiens
  misc_RNA (1)...(19): siRNA sense strand
gcccuggucuuccuguacu

SEQ ID NO: 634347 - RNA, 19 nt, Homo sapiens
  misc_RNA (1)...(19): siRNA sense strand
cagcccuggucuuccugua

SEQ ID NO: 634348 - RNA, 19 nt, Homo sapiens
  misc_RNA (1)...(19): siRNA sense strand
gaaaagugcaagaggauac

SEQ ID NO: 634349 - RNA, 19 nt, Homo sapiens
  misc_RNA (1)...(19): siRNA sense strand
cugcaucaucuucguugua

SEQ ID NO: 634350 - RNA, 19 nt, Homo sapiens
  misc_RNA (1)...(19): siRNA sense strand
ggaaaagugcaagaggaua

SEQ ID NO: 634351 - RNA, 19 nt, Homo sapiens
  misc_RNA (1)...(19): siRNA sense strand
gaugguggcuuucgucaag

SEQ ID NO: 634352 - RNA, 19 nt, Homo sapiens
  misc_RNA (1)...(19): siRNA sense strand
ugaagaagcccaagaagag

SEQ ID NO: 634353 - RNA, 19 nt, Homo sapiens
  misc_RNA (1)...(19): siRNA sense strand
gcaagauggcugacugguu

SEQ ID NO: 634354 - RNA, 19 nt, Homo sapiens
  misc_RNA (1)...(19): siRNA sense strand
gagcuccgauucauguacu

SEQ ID NO: 634355 - RNA, 19 nt, Homo sapiens
  misc_RNA (1)...(19): siRNA sense strand
aguagucgcuggagcaaag

SEQ ID NO: 634356 - RNA, 19 nt, Homo sapiens
  misc_RNA (1)...(19): siRNA sense strand
caccugagcuccgauucau

SEQ ID NO: 634357 - RNA, 19 nt, Homo sapiens
  misc_RNA (1)...(19): siRNA sense strand
uggcuuucgucaagucaaa

SEQ ID NO: 634358 - RNA, 19 nt, Homo sapiens
  misc_RNA (1)...(19): siRNA sense strand
ccaagaagaggcccaacuc

SEQ ID NO: 634359 - RNA, 19 nt, Homo sapiens
  misc_RNA (1)...(19): siRNA sense strand
gggcccugaugguggcuuu

SEQ ID NO: 634360 - RNA, 19 nt, Homo sapiens
  misc_RNA (1)...(19): siRNA sense strand
cugaagaagcccaagaaga

SEQ ID NO: 634361 - RNA, 19 nt, Homo sapiens
  misc_RNA (1)...(19): siRNA sense strand
agucaaagaagcugucaug

SEQ ID NO: 634362 - RNA, 19 nt, Homo sapiens
  misc_RNA (1)...(19): siRNA sense strand
gcgagugacaguggcagua

SEQ ID NO: 634363 - RNA, 19 nt, Homo sapiens
  misc_RNA (1)...(19): siRNA sense strand
cuucacagccuaccucaca

SEQ ID NO: 634364 - RNA, 19 nt, Homo sapiens
  misc_RNA (1)...(19): siRNA sense strand
ccugagcuccgauucaugu

SEQ ID NO: 634365 - RNA, 19 nt, Homo sapiens
  misc_RNA (1)...(19): siRNA sense strand
gagugacaguggcaguagu

SEQ ID NO: 634366 - RNA, 19 nt, Homo sapiens
  misc_RNA (1)...(19): siRNA sense strand
ccaagccucagcucaguca

SEQ ID NO: 634367 - RNA, 19 nt, Homo sapiens
  misc_RNA (1)...(19): siRNA sense strand
gcaguagucgcuggagcaa

SEQ ID NO: 634368 - RNA, 19 nt, Homo sapiens
  misc_RNA (1)...(19): siRNA sense strand
gcuggagcaaagacuauga

SEQ ID NO: 634369 - RNA, 19 nt, Homo sapiens
  misc_RNA (1)...(19): siRNA sense strand
ccuggucuccuacuuggaa

SEQ ID NO: 634370 - RNA, 19 nt, Homo sapiens
  misc_RNA (1)...(19): siRNA sense strand
gaugguggcuuucgucaag

SEQ ID NO: 634371 - RNA, 19 nt, Homo sapiens
  misc_RNA (1)...(19): siRNA sense strand
ugaagaagcccaagaagag

SEQ ID NO: 634372 - RNA, 19 nt, Homo sapiens
  misc_RNA (1)...(19): siRNA sense strand
gcaagauggcugacugguu

SEQ ID NO: 634373 - RNA, 19 nt, Homo sapiens
  misc_RNA (1)...(19): siRNA sense strand
gagcuccgauucauguacu

SEQ ID NO: 634374 - RNA, 19 nt, Homo sapiens
  misc_RNA (1)...(19): siRNA sense strand
aguagucgcuggagcaaag

SEQ ID NO: 634375 - RNA, 19 nt, Homo sapiens
  misc_RNA (1)...(19): siRNA sense strand
caccugagcuccgauucau

SEQ ID NO: 634376 - RNA, 19 nt, Homo sapiens
  misc_RNA (1)...(19): siRNA sense strand
uggcuuucgucaagucaaa

SEQ ID NO: 634377 - RNA, 19 nt, Homo sapiens
  misc_RNA (1)...(19): siRNA sense strand
ccaagaagaggcccaacuc

SEQ ID NO: 634378 - RNA, 19 nt, Homo sapiens
  misc_RNA (1)...(19): siRNA sense strand
gggcccugaugguggcuuu

SEQ ID NO: 634379 - RNA, 19 nt, Homo sapiens
  misc_RNA (1)...(19): siRNA sense strand
cugaagaagcccaagaaga

SEQ ID NO: 634380 - RNA, 19 nt, Homo sapiens
  misc_RNA (1)...(19): siRNA sense strand
agucaaagaagcugucaug

SEQ ID NO: 634381 - RNA, 19 nt, Homo sapiens
  misc_RNA (1)...(19): siRNA sense strand
gcgagugacaguggcagua

SEQ ID NO: 634382 - RNA, 19 nt, Homo sapiens
  misc_RNA (1)...(19): siRNA sense strand
cuucacagccuaccucaca

SEQ ID NO: 634383 - RNA, 19 nt, Homo sapiens
  misc_RNA (1)...(19): siRNA sense strand
ccugagcuccgauucaugu

SEQ ID NO: 634384 - RNA, 19 nt, Homo sapiens
  misc_RNA (1)...(19): siRNA sense strand
gagugacaguggcaguagu

SEQ ID NO: 634385 - RNA, 19 nt, Homo sapiens
  misc_RNA (1)...(19): siRNA sense strand
ccaagccucagcucaguca

SEQ ID NO: 634386 - RNA, 19 nt, Homo sapiens
  misc_RNA (1)...(19): siRNA sense strand
gcaguagucgcuggagcaa

SEQ ID NO: 634387 - RNA, 19 nt, Homo sapiens
  misc_RNA (1)...(19): siRNA sense strand
gcuggagcaaagacuauga

SEQ ID NO: 634388 - RNA, 19 nt, Homo sapiens
  misc_RNA (1)...(19): siRNA sense strand
ccuggucuccuacuuggaa

SEQ ID NO: 634389 - RNA, 19 nt, Homo sapiens
  misc_RNA (1)...(19): siRNA sense strand
gauuauagcugagaaggua

SEQ ID NO: 634390 - RNA, 19 nt, Homo sapiens
  misc_RNA (1)...(19): siRNA sense strand
cgaaaucugugcuauauga

SEQ ID NO: 634391 - RNA, 19 nt, Homo sapiens
  misc_RNA (1)...(19): siRNA sense strand
gauaugguguucugugaua

SEQ ID NO: 634392 - RNA, 19 nt, Homo sapiens
  misc_RNA (1)...(19): siRNA sense strand
agaaacagcuccacagaaa

SEQ ID NO: 634393 - RNA, 19 nt, Homo sapiens
  misc_RNA (1)...(19): siRNA sense strand
ggaguucuauuccuuggua

SEQ ID NO: 634394 - RNA, 19 nt, Homo sapiens
  misc_RNA (1)...(19): siRNA sense strand
gaacagaucuucgguuugc

SEQ ID NO: 634395 - RNA, 19 nt, Homo sapiens
  misc_RNA (1)...(19): siRNA sense strand
cgagugagauguucuguga

SEQ ID NO: 634396 - RNA, 19 nt, Homo sapiens
  misc_RNA (1)...(19): siRNA sense strand
gcuguggacuuuaucuaua

SEQ ID NO: 634397 - RNA, 19 nt, Homo sapiens
  misc_RNA (1)...(19): siRNA sense strand
aaagacagcucgagugaga

SEQ ID NO: 634398 - RNA, 19 nt, Homo sapiens
  misc_RNA (1)...(19): siRNA sense strand
ggaaugauaugguguucug

SEQ ID NO: 634399 - RNA, 19 nt, Homo sapiens
  misc_RNA (1)...(19): siRNA sense strand
gaaagccucugguccuuca

SEQ ID NO: 634400 - RNA, 19 nt, Homo sapiens
  misc_RNA (1)...(19): siRNA sense strand
gguaaaggacguucuguuu

SEQ ID NO: 634401 - RNA, 19 nt, Homo sapiens
  misc_RNA (1)...(19): siRNA sense strand
guagaacacuuuaguaggu

SEQ ID NO: 634402 - RNA, 19 nt, Homo sapiens
  misc_RNA (1)...(19): siRNA sense strand
gaacgccauugccaugaaa

SEQ ID NO: 634403 - RNA, 19 nt, Homo sapiens
  misc_RNA (1)...(19): siRNA sense strand
ccaugaaacuuccagauuc

SEQ ID NO: 634404 - RNA, 19 nt, Homo sapiens
  misc_RNA (1)...(19): siRNA sense strand
gagcaagaauaaccguuug

SEQ ID NO: 634405 - RNA, 19 nt, Homo sapiens
  misc_RNA (1)...(19): siRNA sense strand
gaaccaugcuauugagaca

SEQ ID NO: 634406 - RNA, 19 nt, Homo sapiens
  misc_RNA (1)...(19): siRNA sense strand
ugauagcuauuaccucuuu

SEQ ID NO: 634407 - RNA, 19 nt, Homo sapiens
  misc_RNA (1)...(19): siRNA sense strand
gaugugaucugugaugugu

SEQ ID NO: 634408 - RNA, 19 nt, Homo sapiens
  misc_RNA (1)...(19): siRNA sense strand
uguauucagugcucuauaa

SEQ ID NO: 634409 - RNA, 19 nt, Homo sapiens
  misc_RNA (1)...(19): siRNA sense strand
ggaacgccauugccaugaa

SEQ ID NO: 634410 - RNA, 19 nt, Homo sapiens
  misc_RNA (1)...(19): siRNA sense strand
ggaacucaaugaagaccuu

SEQ ID NO: 634411 - RNA, 19 nt, Homo sapiens
  misc_RNA (1)...(19): siRNA sense strand
cauauugccucaagcauag

SEQ ID NO: 634412 - RNA, 19 nt, Homo sapiens
  misc_RNA (1)...(19): siRNA sense strand
uguauaggaucaagucaaa

SEQ ID NO: 634413 - RNA, 19 nt, Homo sapiens
  misc_RNA (1)...(19): siRNA sense strand
gaaugagaauguuuaugca

SEQ ID NO: 634414 - RNA, 19 nt, Homo sapiens
  misc_RNA (1)...(19): siRNA sense strand
uuaaagagaccaccaauag

SEQ ID NO: 634415 - RNA, 19 nt, Homo sapiens
  misc_RNA (1)...(19): siRNA sense strand
gaagcugucacacaacaaa

SEQ ID NO: 634416 - RNA, 19 nt, Homo sapiens
  misc_RNA (1)...(19): siRNA sense strand
gaugagaaucuuauggaaa

SEQ ID NO: 634417 - RNA, 19 nt, Homo sapiens
  misc_RNA (1)...(19): siRNA sense strand
ccucaggagucacuagaaa

SEQ ID NO: 634418 - RNA, 19 nt, Homo sapiens
  misc_RNA (1)...(19): siRNA sense strand
uauaacuacuggaaacuga

SEQ ID NO: 634419 - RNA, 19 nt, Homo sapiens
  misc_RNA (1)...(19): siRNA sense strand
gcagaaacuuggagaagcu

SEQ ID NO: 634420 - RNA, 19 nt, Homo sapiens
  misc_RNA (1)...(19): siRNA sense strand
ggauggaaccgaucacgaa

SEQ ID NO: 634421 - RNA, 19 nt, Homo sapiens
  misc_RNA (1)...(19): siRNA sense strand
aggaacagaucuucgguuu

SEQ ID NO: 634422 - RNA, 19 nt, Homo sapiens
  misc_RNA (1)...(19): siRNA sense strand
ucacgaagaucucccacau

SEQ ID NO: 634423 - RNA, 19 nt, Homo sapiens
  misc_RNA (1)...(19): siRNA sense strand
gcuaugaccuagaugacau

SEQ ID NO: 634424 - RNA, 19 nt, Homo sapiens
  misc_RNA (1)...(19): siRNA sense strand
gcagaaagugaugggaaua

SEQ ID NO: 634425 - RNA, 19 nt, Homo sapiens
  misc_RNA (1)...(19): siRNA sense strand
gcaggugccucaggaguca

SEQ ID NO: 634426 - RNA, 19 nt, Homo sapiens
  misc_RNA (1)...(19): siRNA sense strand
caaugaagaccuugcagaa

SEQ ID NO: 634427 - RNA, 19 nt, Homo sapiens
  misc_RNA (1)...(19): siRNA sense strand
ugaagaccuugcagaaaug

SEQ ID NO: 634428 - RNA, 19 nt, Homo sapiens
  misc_RNA (1)...(19): siRNA sense strand
agaaagugaugggaauaaa

SEQ ID NO: 634429 - RNA, 19 nt, Homo sapiens
  misc_RNA (1)...(19): siRNA sense strand
gaucuucgguuugcaaguc

SEQ ID NO: 634430 - RNA, 19 nt, Homo sapiens
  misc_RNA (1)...(19): siRNA sense strand
caagucauauugccucaag

SEQ ID NO: 634431 - RNA, 19 nt, Homo sapiens
  misc_RNA (1)...(19): siRNA sense strand
ccacgucaccugugccuuu

SEQ ID NO: 634432 - RNA, 19 nt, Homo sapiens
  misc_RNA (1)...(19): siRNA sense strand
uguguuauguccaaagaaa

SEQ ID NO: 634433 - RNA, 19 nt, Homo sapiens
  misc_RNA (1)...(19): siRNA sense strand
cagauucucaccacauuaa

SEQ ID NO: 634434 - RNA, 19 nt, Homo sapiens
  misc_RNA (1)...(19): siRNA sense strand
ccacuagagagcaagaaua

SEQ ID NO: 634435 - RNA, 19 nt, Homo sapiens
  misc_RNA (1)...(19): siRNA sense strand
gagaauguuuaugcaucua

SEQ ID NO: 634436 - RNA, 19 nt, Homo sapiens
  misc_RNA (1)...(19): siRNA sense strand
gagcacggccuagagauga

SEQ ID NO: 634437 - RNA, 19 nt, Homo sapiens
  misc_RNA (1)...(19): siRNA sense strand
gagaggguccgaaaucugu

SEQ ID NO: 634438 - RNA, 19 nt, Homo sapiens
  misc_RNA (1)...(19): siRNA sense strand
caauguguguuauguccaa

SEQ ID NO: 634439 - RNA, 19 nt, Homo sapiens
  misc_RNA (1)...(19): siRNA sense strand
gaccuccagugcuauguga

SEQ ID NO: 634440 - RNA, 19 nt, Homo sapiens
  misc_RNA (1)...(19): siRNA sense strand
ggaguuggcagcaucuguu

SEQ ID NO: 634441 - RNA, 19 nt, Homo sapiens
  misc_RNA (1)...(19): siRNA sense strand
gaaagugaugggaauaaag

SEQ ID NO: 634442 - RNA, 19 nt, Homo sapiens
  misc_RNA (1)...(19): siRNA sense strand
gggaaagccucugguccuu

SEQ ID NO: 634443 - RNA, 19 nt, Homo sapiens
  misc_RNA (1)...(19): siRNA sense strand
gaaagcauucacacucgaa

SEQ ID NO: 634444 - RNA, 19 nt, Homo sapiens
  misc_RNA (1)...(19): siRNA sense strand
ucauauugccucaagcaua

SEQ ID NO: 634445 - RNA, 19 nt, Homo sapiens
  misc_RNA (1)...(19): siRNA sense strand
gguguucugugauaagugu

SEQ ID NO: 634446 - RNA, 19 nt, Homo sapiens
  misc_RNA (1)...(19): siRNA sense strand
augaagaccuugcagaaau

SEQ ID NO: 634447 - RNA, 19 nt, Homo sapiens
  misc_RNA (1)...(19): siRNA sense strand
cacgcuagcuguggacuuu

SEQ ID NO: 634448 - RNA, 19 nt, Homo sapiens
  misc_RNA (1)...(19): siRNA sense strand
cacuagagagcaagaauaa

SEQ ID NO: 634449 - RNA, 19 nt, Homo sapiens
  misc_RNA (1)...(19): siRNA sense strand
gccaugaaacuuccagauu

SEQ ID NO: 634450 - RNA, 19 nt, Homo sapiens
  misc_RNA (1)...(19): siRNA sense strand
ggcagaaagugaugggaau

SEQ ID NO: 634451 - RNA, 19 nt, Homo sapiens
  misc_RNA (1)...(19): siRNA sense strand
cagcagcagugacaguuca

SEQ ID NO: 634452 - RNA, 19 nt, Homo sapiens
  misc_RNA (1)...(19): siRNA sense strand
uccgaaaucugugcuauau

SEQ ID NO: 634453 - RNA, 19 nt, Homo sapiens
  misc_RNA (1)...(19): siRNA sense strand
cgaaugagaauguuuaugc

SEQ ID NO: 634454 - RNA, 19 nt, Homo sapiens
  misc_RNA (1)...(19): siRNA sense strand
gacaguagaaguccuggaa

SEQ ID NO: 634455 - RNA, 19 nt, Homo sapiens
  misc_RNA (1)...(19): siRNA sense strand
uauuaccucuuugcugaua

SEQ ID NO: 634456 - RNA, 19 nt, Homo sapiens
  misc_RNA (1)...(19): siRNA sense strand
agacgggauugccauggua

SEQ ID NO: 634457 - RNA, 19 nt, Homo sapiens
  misc_RNA (1)...(19): siRNA sense strand
aaagugaugggaauaaaga

SEQ ID NO: 634458 - RNA, 19 nt, Homo sapiens
  misc_RNA (1)...(19): siRNA sense strand
gugaagccaaccaagaaua

SEQ ID NO: 634459 - RNA, 19 nt, Homo sapiens
  misc_RNA (1)...(19): siRNA sense strand
ggacuaaaugggcucaugu

SEQ ID NO: 634460 - RNA, 19 nt, Homo sapiens
  misc_RNA (1)...(19): siRNA sense strand
gugaagaagggaaugauau

SEQ ID NO: 634461 - RNA, 19 nt, Homo sapiens
  misc_RNA (1)...(19): siRNA sense strand
gaaaauaugaaccaugcua

SEQ ID NO: 634462 - RNA, 19 nt, Homo sapiens
  misc_RNA (1)...(19): siRNA sense strand
cauuaauccugauagcuau

SEQ ID NO: 634463 - RNA, 19 nt, Homo sapiens
  misc_RNA (1)...(19): siRNA sense strand
aaagucagccuaacuccaa

SEQ ID NO: 634464 - RNA, 19 nt, Homo sapiens
  misc_RNA (1)...(19): siRNA sense strand
ugaugagaaucuuauggaa

SEQ ID NO: 634465 - RNA, 19 nt, Homo sapiens
  misc_RNA (1)...(19): siRNA sense strand
gaagguaaaggacguucug

SEQ ID NO: 634466 - RNA, 19 nt, Homo sapiens
  misc_RNA (1)...(19): siRNA sense strand
caugaaacuuccagauucu

SEQ ID NO: 634467 - RNA, 19 nt, Homo sapiens
  misc_RNA (1)...(19): siRNA sense strand
gcuauggcauccucaaggu

SEQ ID NO: 634468 - RNA, 19 nt, Homo sapiens
  misc_RNA (1)...(19): siRNA sense strand
acauuaauccugauagcua

SEQ ID NO: 634469 - RNA, 19 nt, Homo sapiens
  misc_RNA (1)...(19): siRNA sense strand
ggaaaagggaguccaggua

SEQ ID NO: 634470 - RNA, 19 nt, Homo sapiens
  misc_RNA (1)...(19): siRNA sense strand
cagaaagugaugggaauaa

SEQ ID NO: 634471 - RNA, 19 nt, Homo sapiens
  misc_RNA (1)...(19): siRNA sense strand
cacuagaaaugagaacaaa

SEQ ID NO: 634472 - RNA, 19 nt, Homo sapiens
  misc_RNA (1)...(19): siRNA sense strand
caaaggaggaugaagaaaa

SEQ ID NO: 634473 - RNA, 19 nt, Homo sapiens
  misc_RNA (1)...(19): siRNA sense strand
ggccuuagucugcaacuug

SEQ ID NO: 634474 - RNA, 19 nt, Homo sapiens
  misc_RNA (1)...(19): siRNA sense strand
gccauuauuuccuccaaag

SEQ ID NO: 634475 - RNA, 19 nt, Homo sapiens
  misc_RNA (1)...(19): siRNA sense strand
aaagagaccaccaauaggu

SEQ ID NO: 634476 - RNA, 19 nt, Homo sapiens
  misc_RNA (1)...(19): siRNA sense strand
caaaugcacuugaaaacuc

SEQ ID NO: 634477 - RNA, 19 nt, Homo sapiens
  misc_RNA (1)...(19): siRNA sense strand
gaugcagggcuuccuuuga

SEQ ID NO: 634478 - RNA, 19 nt, Homo sapiens
  misc_RNA (1)...(19): siRNA sense strand
uugcaaguccagcuucuua

SEQ ID NO: 634479 - RNA, 19 nt, Homo sapiens
  misc_RNA (1)...(19): siRNA sense strand
caaaugaacacaagaaacc

SEQ ID NO: 634480 - RNA, 19 nt, Homo sapiens
  misc_RNA (1)...(19): siRNA sense strand
ugaagaagggaaugauaug

SEQ ID NO: 634481 - RNA, 19 nt, Homo sapiens
  misc_RNA (1)...(19): siRNA sense strand
ccaauaggugggugaagaa

SEQ ID NO: 634482 - RNA, 19 nt, Homo sapiens
  misc_RNA (1)...(19): siRNA sense strand
gaaaauccacuguagaaca

SEQ ID NO: 634483 - RNA, 19 nt, Homo sapiens
  misc_RNA (1)...(19): siRNA sense strand
gauacccacuagagagcaa

SEQ ID NO: 634484 - RNA, 19 nt, Homo sapiens
  misc_RNA (1)...(19): siRNA sense strand
cagaaacagcuccacagaa

SEQ ID NO: 634485 - RNA, 19 nt, Homo sapiens
  misc_RNA (1)...(19): siRNA sense strand
ccagaagaccacagaaaca

SEQ ID NO: 634486 - RNA, 19 nt, Homo sapiens
  misc_RNA (1)...(19): siRNA sense strand
gguccgaaaucugugcuau

SEQ ID NO: 634487 - RNA, 19 nt, Homo sapiens
  misc_RNA (1)...(19): siRNA sense strand
gggacuaaaugggcucaug

SEQ ID NO: 634488 - RNA, 19 nt, Homo sapiens
  misc_RNA (1)...(19): siRNA sense strand
gaagaagggaaugauaugg

SEQ ID NO: 634489 - RNA, 19 nt, Homo sapiens
  misc_RNA (1)...(19): siRNA sense strand
ggaagaagaucgggaagua

SEQ ID NO: 634490 - RNA, 19 nt, Homo sapiens
  misc_RNA (1)...(19): siRNA sense strand
gagcagaucuccaaagugu

SEQ ID NO: 634491 - RNA, 19 nt, Homo sapiens
  misc_RNA (1)...(19): siRNA sense strand
cagaggaguuugccuugua

SEQ ID NO: 634492 - RNA, 19 nt, Homo sapiens
  misc_RNA (1)...(19): siRNA sense strand
cgacguggcccaguauaua

SEQ ID NO: 634493 - RNA, 19 nt, Homo sapiens
  misc_RNA (1)...(19): siRNA sense strand
gaauucagcagaggaguuu

SEQ ID NO: 634494 - RNA, 19 nt, Homo sapiens
  misc_RNA (1)...(19): siRNA sense strand
gacagaggcuggaggagau

SEQ ID NO: 634495 - RNA, 19 nt, Homo sapiens
  misc_RNA (1)...(19): siRNA sense strand
ggccauuucuacaaccaua

SEQ ID NO: 634496 - RNA, 19 nt, Homo sapiens
  misc_RNA (1)...(19): siRNA sense strand
gaagaagaucgggaaguaa

SEQ ID NO: 634497 - RNA, 19 nt, Homo sapiens
  misc_RNA (1)...(19): siRNA sense strand
gcagaucuccaaaguguuc

SEQ ID NO: 634498 - RNA, 19 nt, Homo sapiens
  misc_RNA (1)...(19): siRNA sense strand
ccaaaguguuccuaaugga

SEQ ID NO: 634499 - RNA, 19 nt, Homo sapiens
  misc_RNA (1)...(19): siRNA sense strand
caacggccauuucuacaac

SEQ ID NO: 634500 - RNA, 19 nt, Homo sapiens
  misc_RNA (1)...(19): siRNA sense strand
gaagaucgggaaguaaaga

SEQ ID NO: 634501 - RNA, 19 nt, Homo sapiens
  misc_RNA (1)...(19): siRNA sense strand
gugagcagaucuccaaagu

SEQ ID NO: 634502 - RNA, 19 nt, Homo sapiens
  misc_RNA (1)...(19): siRNA sense strand
ugaagcugcugcucaacaa

SEQ ID NO: 634503 - RNA, 19 nt, Homo sapiens
  misc_RNA (1)...(19): siRNA sense strand
gcccaaaguucagaucuca

SEQ ID NO: 634504 - RNA, 19 nt, Homo sapiens
  misc_RNA (1)...(19): siRNA sense strand
cgagaugccgguacuuaaa

SEQ ID NO: 634505 - RNA, 19 nt, Homo sapiens
  misc_RNA (1)...(19): siRNA sense strand
cauaagacauccguguuca

SEQ ID NO: 634506 - RNA, 19 nt, Homo sapiens
  misc_RNA (1)...(19): siRNA sense strand
cuuaaaagcuucauucaga

SEQ ID NO: 634507 - RNA, 19 nt, Homo sapiens
  misc_RNA (1)...(19): siRNA sense strand
gacguggcccaguauauaa

SEQ ID NO: 634508 - RNA, 19 nt, Homo sapiens
  misc_RNA (1)...(19): siRNA sense strand
gcagaggaguuugccuugu

SEQ ID NO: 634509 - RNA, 19 nt, Homo sapiens
  misc_RNA (1)...(19): siRNA sense strand
guauauaaaguucgagaug

SEQ ID NO: 634510 - RNA, 19 nt, Homo sapiens
  misc_RNA (1)...(19): siRNA sense strand
aagaagaucgggaaguaaa

SEQ ID NO: 634511 - RNA, 19 nt, Homo sapiens
  misc_RNA (1)...(19): siRNA sense strand
ccuacgacguggcccagua

SEQ ID NO: 634512 - RNA, 19 nt, Homo sapiens
  misc_RNA (1)...(19): siRNA sense strand
ccaaaguucagaucucaga

SEQ ID NO: 634513 - RNA, 19 nt, Homo sapiens
  misc_RNA (1)...(19): siRNA sense strand
cgccaccgcuucuccauca

SEQ ID NO: 634514 - RNA, 19 nt, Homo sapiens
  misc_RNA (1)...(19): siRNA sense strand
caucaacggccauuucuac

SEQ ID NO: 634515 - RNA, 19 nt, Homo sapiens
  misc_RNA (1)...(19): siRNA sense strand
caugugagcagaucuccaa

SEQ ID NO: 634516 - RNA, 19 nt, Homo sapiens
  misc_RNA (1)...(19): siRNA sense strand
ggaaguaaagaagcugaug

SEQ ID NO: 634517 - RNA, 19 nt, Homo sapiens
  misc_RNA (1)...(19): siRNA sense strand
agaagcugaugcgcaagua

SEQ ID NO: 634518 - RNA, 19 nt, Homo sapiens
  misc_RNA (1)...(19): siRNA sense strand
gaagcugcugcucaacaaa

SEQ ID NO: 634519 - RNA, 19 nt, Homo sapiens
  misc_RNA (1)...(19): siRNA sense strand
uggaggaagucaccuacga

SEQ ID NO: 634520 - RNA, 19 nt, Homo sapiens
  misc_RNA (1)...(19): siRNA sense strand
ugacugugcccaaaguuca

SEQ ID NO: 634521 - RNA, 19 nt, Homo sapiens
  misc_RNA (1)...(19): siRNA sense strand
uaagacauccguguucaca

SEQ ID NO: 634522 - RNA, 19 nt, Homo sapiens
  misc_RNA (1)...(19): siRNA sense strand
ccauaagacauccguguuc

SEQ ID NO: 634523 - RNA, 19 nt, Homo sapiens
  misc_RNA (1)...(19): siRNA sense strand
uccaaaguguuccuaaugg

SEQ ID NO: 634524 - RNA, 19 nt, Homo sapiens
  misc_RNA (1)...(19): siRNA sense strand
cugcugcucaacaaauuua

SEQ ID NO: 634525 - RNA, 19 nt, Homo sapiens
  misc_RNA (1)...(19): siRNA sense strand
ucgagaugccgguacuuaa

SEQ ID NO: 634526 - RNA, 19 nt, Homo sapiens
  misc_RNA (1)...(19): siRNA sense strand
ucuccaaaguguuccuaau

SEQ ID NO: 634527 - RNA, 19 nt, Homo sapiens
  misc_RNA (1)...(19): siRNA sense strand
ggcccaguauauaaaguuc

SEQ ID NO: 634528 - RNA, 19 nt, Homo sapiens
  misc_RNA (1)...(19): siRNA sense strand
ucaacggccauuucuacaa

SEQ ID NO: 634529 - RNA, 19 nt, Homo sapiens
  misc_RNA (1)...(19): siRNA sense strand
gcgcacacgcagugauguu

SEQ ID NO: 634530 - RNA, 19 nt, Homo sapiens
  misc_RNA (1)...(19): siRNA sense strand
gaaggaccagguggaggaa

SEQ ID NO: 634531 - RNA, 19 nt, Homo sapiens
  misc_RNA (1)...(19): siRNA sense strand
ucaccaacguccgcaucaa

SEQ ID NO: 634532 - RNA, 19 nt, Homo sapiens
  misc_RNA (1)...(19): siRNA sense strand
cccaguauauaaaguucga

SEQ ID NO: 634533 - RNA, 19 nt, Homo sapiens
  misc_RNA (1)...(19): siRNA sense strand
cggcuaaugauucgacaga

SEQ ID NO: 634534 - RNA, 19 nt, Homo sapiens
  misc_RNA (1)...(19): siRNA sense strand
guacuuaaaagcuucauuc

SEQ ID NO: 634535 - RNA, 19 nt, Homo sapiens
  misc_RNA (1)...(19): siRNA sense strand
gagaugccgguacuuaaaa

SEQ ID NO: 634536 - RNA, 19 nt, Homo sapiens
  misc_RNA (1)...(19): siRNA sense strand
cagaggaguuugccuugua

SEQ ID NO: 634537 - RNA, 19 nt, Homo sapiens
  misc_RNA (1)...(19): siRNA sense strand
gaauucagcagaggaguuu

SEQ ID NO: 634538 - RNA, 19 nt, Homo sapiens
  misc_RNA (1)...(19): siRNA sense strand
ggccauuucuacaaccaua

SEQ ID NO: 634539 - RNA, 19 nt, Homo sapiens
  misc_RNA (1)...(19): siRNA sense strand
caacggccauuucuacaac

SEQ ID NO: 634540 - RNA, 19 nt, Homo sapiens
  misc_RNA (1)...(19): siRNA sense strand
ugaagcugcugcucaacaa

SEQ ID NO: 634541 - RNA, 19 nt, Homo sapiens
  misc_RNA (1)...(19): siRNA sense strand
gcccaaaguucagaucuca

SEQ ID NO: 634542 - RNA, 19 nt, Homo sapiens
  misc_RNA (1)...(19): siRNA sense strand
cauaagacauccguguuca

SEQ ID NO: 634543 - RNA, 19 nt, Homo sapiens
  misc_RNA (1)...(19): siRNA sense strand
gcagaggaguuugccuugu

SEQ ID NO: 634544 - RNA, 19 nt, Homo sapiens
  misc_RNA (1)...(19): siRNA sense strand
ccaaaguucagaucucaga

SEQ ID NO: 634545 - RNA, 19 nt, Homo sapiens
  misc_RNA (1)...(19): siRNA sense strand
cgccaccgcuucuccauca

SEQ ID NO: 634546 - RNA, 19 nt, Homo sapiens
  misc_RNA (1)...(19): siRNA sense strand
caucaacggccauuucuac

SEQ ID NO: 634547 - RNA, 19 nt, Homo sapiens
  misc_RNA (1)...(19): siRNA sense strand
gaagcugcugcucaacaaa

SEQ ID NO: 634548 - RNA, 19 nt, Homo sapiens
  misc_RNA (1)...(19): siRNA sense strand
uaagacauccguguucaca

SEQ ID NO: 634549 - RNA, 19 nt, Homo sapiens
  misc_RNA (1)...(19): siRNA sense strand
ugacugugcccaaaguuca

SEQ ID NO: 634550 - RNA, 19 nt, Homo sapiens
  misc_RNA (1)...(19): siRNA sense strand
ccauaagacauccguguuc

SEQ ID NO: 634551 - RNA, 19 nt, Homo sapiens
  misc_RNA (1)...(19): siRNA sense strand
cugcugcucaacaaauuua

SEQ ID NO: 634552 - RNA, 19 nt, Homo sapiens
  misc_RNA (1)...(19): siRNA sense strand
gcgcacacgcagugauguu

SEQ ID NO: 634553 - RNA, 19 nt, Homo sapiens
  misc_RNA (1)...(19): siRNA sense strand
ucaccaacguccgcaucaa

SEQ ID NO: 634554 - RNA, 19 nt, Homo sapiens
  misc_RNA (1)...(19): siRNA sense strand
ucaacggccauuucuacaa

SEQ ID NO: 634555 - RNA, 19 nt, Homo sapiens
  misc_RNA (1)...(19): siRNA sense strand
ggaagaagaucgggaagua

SEQ ID NO: 634556 - RNA, 19 nt, Homo sapiens
  misc_RNA (1)...(19): siRNA sense strand
gagcagaucuccaaagugu

SEQ ID NO: 634557 - RNA, 19 nt, Homo sapiens
  misc_RNA (1)...(19): siRNA sense strand
cagaggaguuugccuugua

SEQ ID NO: 634558 - RNA, 19 nt, Homo sapiens
  misc_RNA (1)...(19): siRNA sense strand
cgacguggcccaguauaua

SEQ ID NO: 634559 - RNA, 19 nt, Homo sapiens
  misc_RNA (1)...(19): siRNA sense strand
gaauucagcagaggaguuu

SEQ ID NO: 634560 - RNA, 19 nt, Homo sapiens
  misc_RNA (1)...(19): siRNA sense strand
gacagaggcuggaggagau

SEQ ID NO: 634561 - RNA, 19 nt, Homo sapiens
  misc_RNA (1)...(19): siRNA sense strand
ggccauuucuacaaccaua

SEQ ID NO: 634562 - RNA, 19 nt, Homo sapiens
  misc_RNA (1)...(19): siRNA sense strand
gaagaagaucgggaaguaa

SEQ ID NO: 634563 - RNA, 19 nt, Homo sapiens
  misc_RNA (1)...(19): siRNA sense strand
gcagaucuccaaaguguuc

SEQ ID NO: 634564 - RNA, 19 nt, Homo sapiens
  misc_RNA (1)...(19): siRNA sense strand
ccaaaguguuccuaaugga

SEQ ID NO: 634565 - RNA, 19 nt, Homo sapiens
  misc_RNA (1)...(19): siRNA sense strand
caacggccauuucuacaac

SEQ ID NO: 634566 - RNA, 19 nt, Homo sapiens
  misc_RNA (1)...(19): siRNA sense strand
gaagaucgggaaguaaaga

SEQ ID NO: 634567 - RNA, 19 nt, Homo sapiens
  misc_RNA (1)...(19): siRNA sense strand
gugagcagaucuccaaagu

SEQ ID NO: 634568 - RNA, 19 nt, Homo sapiens
  misc_RNA (1)...(19): siRNA sense strand
ugaagcugcugcucaacaa

SEQ ID NO: 634569 - RNA, 19 nt, Homo sapiens
  misc_RNA (1)...(19): siRNA sense strand
gcccaaaguucagaucuca

SEQ ID NO: 634570 - RNA, 19 nt, Homo sapiens
  misc_RNA (1)...(19): siRNA sense strand
cgagaugccgguacuuaaa

SEQ ID NO: 634571 - RNA, 19 nt, Homo sapiens
  misc_RNA (1)...(19): siRNA sense strand
cauaagacauccguguuca

SEQ ID NO: 634572 - RNA, 19 nt, Homo sapiens
  misc_RNA (1)...(19): siRNA sense strand
cuuaaaagcuucauucaga

SEQ ID NO: 634573 - RNA, 19 nt, Homo sapiens
  misc_RNA (1)...(19): siRNA sense strand
gacguggcccaguauauaa

SEQ ID NO: 634574 - RNA, 19 nt, Homo sapiens
  misc_RNA (1)...(19): siRNA sense strand
gcagaggaguuugccuugu

SEQ ID NO: 634575 - RNA, 19 nt, Homo sapiens
  misc_RNA (1)...(19): siRNA sense strand
guauauaaaguucgagaug

SEQ ID NO: 634576 - RNA, 19 nt, Homo sapiens
  misc_RNA (1)...(19): siRNA sense strand
aagaagaucgggaaguaaa

SEQ ID NO: 634577 - RNA, 19 nt, Homo sapiens
  misc_RNA (1)...(19): siRNA sense strand
ccuacgacguggcccagua

SEQ ID NO: 634578 - RNA, 19 nt, Homo sapiens
  misc_RNA (1)...(19): siRNA sense strand
ccaaaguucagaucucaga

SEQ ID NO: 634579 - RNA, 19 nt, Homo sapiens
  misc_RNA (1)...(19): siRNA sense strand
cgccaccgcuucuccauca

SEQ ID NO: 634580 - RNA, 19 nt, Homo sapiens
  misc_RNA (1)...(19): siRNA sense strand
caucaacggccauuucuac

SEQ ID NO: 634581 - RNA, 19 nt, Homo sapiens
  misc_RNA (1)...(19): siRNA sense strand
caugugagcagaucuccaa

SEQ ID NO: 634582 - RNA, 19 nt, Homo sapiens
  misc_RNA (1)...(19): siRNA sense strand
ggaaguaaagaagcugaug

SEQ ID NO: 634583 - RNA, 19 nt, Homo sapiens
  misc_RNA (1)...(19): siRNA sense strand
agaagcugaugcgcaagua

SEQ ID NO: 634584 - RNA, 19 nt, Homo sapiens
  misc_RNA (1)...(19): siRNA sense strand
gaagcugcugcucaacaaa

SEQ ID NO: 634585 - RNA, 19 nt, Homo sapiens
  misc_RNA (1)...(19): siRNA sense strand
uggaggaagucaccuacga

SEQ ID NO: 634586 - RNA, 19 nt, Homo sapiens
  misc_RNA (1)...(19): siRNA sense strand
ugacugugcccaaaguuca

SEQ ID NO: 634587 - RNA, 19 nt, Homo sapiens
  misc_RNA (1)...(19): siRNA sense strand
uaagacauccguguucaca

SEQ ID NO: 634588 - RNA, 19 nt, Homo sapiens
  misc_RNA (1)...(19): siRNA sense strand
ccauaagacauccguguuc

SEQ ID NO: 634589 - RNA, 19 nt, Homo sapiens
  misc_RNA (1)...(19): siRNA sense strand
uccaaaguguuccuaaugg

SEQ ID NO: 634590 - RNA, 19 nt, Homo sapiens
  misc_RNA (1)...(19): siRNA sense strand
cugcugcucaacaaauuua

SEQ ID NO: 634591 - RNA, 19 nt, Homo sapiens
  misc_RNA (1)...(19): siRNA sense strand
ucgagaugccgguacuuaa

SEQ ID NO: 634592 - RNA, 19 nt, Homo sapiens
  misc_RNA (1)...(19): siRNA sense strand
ucuccaaaguguuccuaau

SEQ ID NO: 634593 - RNA, 19 nt, Homo sapiens
  misc_RNA (1)...(19): siRNA sense strand
ggcccaguauauaaaguuc

SEQ ID NO: 634594 - RNA, 19 nt, Homo sapiens
  misc_RNA (1)...(19): siRNA sense strand
ucaacggccauuucuacaa

SEQ ID NO: 634595 - RNA, 19 nt, Homo sapiens
  misc_RNA (1)...(19): siRNA sense strand
gcgcacacgcagugauguu

SEQ ID NO: 634596 - RNA, 19 nt, Homo sapiens
  misc_RNA (1)...(19): siRNA sense strand
gaaggaccagguggaggaa

SEQ ID NO: 634597 - RNA, 19 nt, Homo sapiens
  misc_RNA (1)...(19): siRNA sense strand
ucaccaacguccgcaucaa

SEQ ID NO: 634598 - RNA, 19 nt, Homo sapiens
  misc_RNA (1)...(19): siRNA sense strand
cccaguauauaaaguucga

SEQ ID NO: 634599 - RNA, 19 nt, Homo sapiens
  misc_RNA (1)...(19): siRNA sense strand
cggcuaaugauucgacaga

SEQ ID NO: 634600 - RNA, 19 nt, Homo sapiens
  misc_RNA (1)...(19): siRNA sense strand
guacuuaaaagcuucauuc

SEQ ID NO: 634601 - RNA, 19 nt, Homo sapiens
  misc_RNA (1)...(19): siRNA sense strand
gagaugccgguacuuaaaa

SEQ ID NO: 634602 - RNA, 19 nt, Homo sapiens
  misc_RNA (1)...(19): siRNA sense strand
cagagugacuuaggaauua

SEQ ID NO: 634603 - RNA, 19 nt, Homo sapiens
  misc_RNA (1)...(19): siRNA sense strand
ggaaggagccgcagagcuu

SEQ ID NO: 634604 - RNA, 19 nt, Homo sapiens
  misc_RNA (1)...(19): siRNA sense strand
ugacagcacugcagaccaa

SEQ ID NO: 634605 - RNA, 19 nt, Homo sapiens
  misc_RNA (1)...(19): siRNA sense strand
ggucucaccugauaauuac

SEQ ID NO: 634606 - RNA, 19 nt, Homo sapiens
  misc_RNA (1)...(19): siRNA sense strand
ggaagaggaggccggauug

SEQ ID NO: 634607 - RNA, 19 nt, Homo sapiens
  misc_RNA (1)...(19): siRNA sense strand
acauggaccucaggguuua

SEQ ID NO: 634608 - RNA, 19 nt, Homo sapiens
  misc_RNA (1)...(19): siRNA sense strand
gacauggaccucaggguuu

SEQ ID NO: 634609 - RNA, 19 nt, Homo sapiens
  misc_RNA (1)...(19): siRNA sense strand
caagaagcccaaagguuga

SEQ ID NO: 634610 - RNA, 19 nt, Homo sapiens
  misc_RNA (1)...(19): siRNA sense strand
ccuacucacuucucucuug

SEQ ID NO: 634611 - RNA, 19 nt, Homo sapiens
  misc_RNA (1)...(19): siRNA sense strand
cgaaguuacuggugauucu

SEQ ID NO: 634612 - RNA, 19 nt, Homo sapiens
  misc_RNA (1)...(19): siRNA sense strand
ggcagcgccucgaaacuga

SEQ ID NO: 634613 - RNA, 19 nt, Homo sapiens
  misc_RNA (1)...(19): siRNA sense strand
gggaagaggaggccggauu

SEQ ID NO: 634614 - RNA, 19 nt, Homo sapiens
  misc_RNA (1)...(19): siRNA sense strand
gaagaggaggccggauuga

SEQ ID NO: 634615 - RNA, 19 nt, Homo sapiens
  misc_RNA (1)...(19): siRNA sense strand
uuggauggguacaauguuu

SEQ ID NO: 634616 - RNA, 19 nt, Homo sapiens
  misc_RNA (1)...(19): siRNA sense strand
auaauuacggugacucuaa

SEQ ID NO: 634617 - RNA, 19 nt, Homo sapiens
  misc_RNA (1)...(19): siRNA sense strand
guggaaguuuacaauaaug

SEQ ID NO: 634618 - RNA, 19 nt, Homo sapiens
  misc_RNA (1)...(19): siRNA sense strand
ccacagagugacuuaggaa

SEQ ID NO: 634619 - RNA, 19 nt, Homo sapiens
  misc_RNA (1)...(19): siRNA sense strand
gugauucucugcauuucuc

SEQ ID NO: 634620 - RNA, 19 nt, Homo sapiens
  misc_RNA (1)...(19): siRNA sense strand
gcccuguucugccgcuuga

SEQ ID NO: 634621 - RNA, 19 nt, Homo sapiens
  misc_RNA (1)...(19): siRNA sense strand
acagagugacuuaggaauu

SEQ ID NO: 634622 - RNA, 19 nt, Homo sapiens
  misc_RNA (1)...(19): siRNA sense strand
gcaggaagggcaggaagga

SEQ ID NO: 634623 - RNA, 19 nt, Homo sapiens
  misc_RNA (1)...(19): siRNA sense strand
cauaguggaaguuuacaau

SEQ ID NO: 634624 - RNA, 19 nt, Homo sapiens
  misc_RNA (1)...(19): siRNA sense strand
gcaggugcaggcucgacua

SEQ ID NO: 634625 - RNA, 19 nt, Homo sapiens
  misc_RNA (1)...(19): siRNA sense strand
gauaauuacggugacucua

SEQ ID NO: 634626 - RNA, 19 nt, Homo sapiens
  misc_RNA (1)...(19): siRNA sense strand
ucagagcgcggucuuugga

SEQ ID NO: 634627 - RNA, 19 nt, Homo sapiens
  misc_RNA (1)...(19): siRNA sense strand
uaauuacggugacucuaac

SEQ ID NO: 634628 - RNA, 19 nt, Homo sapiens
  misc_RNA (1)...(19): siRNA sense strand
aaagguugaagucuccaua

SEQ ID NO: 634629 - RNA, 19 nt, Homo sapiens
  misc_RNA (1)...(19): siRNA sense strand
ggugcaggcucgacuacag

SEQ ID NO: 634630 - RNA, 19 nt, Homo sapiens
  misc_RNA (1)...(19): siRNA sense strand
gcggaaagagcuauaccau

SEQ ID NO: 634631 - RNA, 19 nt, Homo sapiens
  misc_RNA (1)...(19): siRNA sense strand
ugacccacagagugacuua

SEQ ID NO: 634632 - RNA, 19 nt, Homo sapiens
  misc_RNA (1)...(19): siRNA sense strand
gagcaaacagaggcaggaa

SEQ ID NO: 634633 - RNA, 19 nt, Homo sapiens
  misc_RNA (1)...(19): siRNA sense strand
gguugaagucuccauagug

SEQ ID NO: 634634 - RNA, 19 nt, Homo sapiens
  misc_RNA (1)...(19): siRNA sense strand
ucucuuggauggguacaau

SEQ ID NO: 634635 - RNA, 19 nt, Homo sapiens
  misc_RNA (1)...(19): siRNA sense strand
agagugacuuaggaauuau

SEQ ID NO: 634636 - RNA, 19 nt, Homo sapiens
  misc_RNA (1)...(19): siRNA sense strand
ggccaaagacagcauugca

SEQ ID NO: 634637 - RNA, 19 nt, Homo sapiens
  misc_RNA (1)...(19): siRNA sense strand
ucucagagcgcggucuuug

SEQ ID NO: 634638 - RNA, 19 nt, Homo sapiens
  misc_RNA (1)...(19): siRNA sense strand
ccacagccuccugcucuga

SEQ ID NO: 634639 - RNA, 19 nt, Homo sapiens
  misc_RNA (1)...(19): siRNA sense strand
ggauggacggacagagguu

SEQ ID NO: 634640 - RNA, 19 nt, Homo sapiens
  misc_RNA (1)...(19): siRNA sense strand
ggccuucccagaugacaug

SEQ ID NO: 634641 - RNA, 19 nt, Homo sapiens
  misc_RNA (1)...(19): siRNA sense strand
cagagugacuuaggaauua

SEQ ID NO: 634642 - RNA, 19 nt, Homo sapiens
  misc_RNA (1)...(19): siRNA sense strand
ggaaggagccgcagagcuu

SEQ ID NO: 634643 - RNA, 19 nt, Homo sapiens
  misc_RNA (1)...(19): siRNA sense strand
ugacagcacugcagaccaa

SEQ ID NO: 634644 - RNA, 19 nt, Homo sapiens
  misc_RNA (1)...(19): siRNA sense strand
ggucucaccugauaauuac

SEQ ID NO: 634645 - RNA, 19 nt, Homo sapiens
  misc_RNA (1)...(19): siRNA sense strand
ggaagaggaggccggauug

SEQ ID NO: 634646 - RNA, 19 nt, Homo sapiens
  misc_RNA (1)...(19): siRNA sense strand
acauggaccucaggguuua

SEQ ID NO: 634647 - RNA, 19 nt, Homo sapiens
  misc_RNA (1)...(19): siRNA sense strand
gacauggaccucaggguuu

SEQ ID NO: 634648 - RNA, 19 nt, Homo sapiens
  misc_RNA (1)...(19): siRNA sense strand
caagaagcccaaagguuga

SEQ ID NO: 634649 - RNA, 19 nt, Homo sapiens
  misc_RNA (1)...(19): siRNA sense strand
ccuacucacuucucucuug

SEQ ID NO: 634650 - RNA, 19 nt, Homo sapiens
  misc_RNA (1)...(19): siRNA sense strand
cgaaguuacuggugauucu

SEQ ID NO: 634651 - RNA, 19 nt, Homo sapiens
  misc_RNA (1)...(19): siRNA sense strand
ggcagcgccucgaaacuga

SEQ ID NO: 634652 - RNA, 19 nt, Homo sapiens
  misc_RNA (1)...(19): siRNA sense strand
gggaagaggaggccggauu

SEQ ID NO: 634653 - RNA, 19 nt, Homo sapiens
  misc_RNA (1)...(19): siRNA sense strand
gaagaggaggccggauuga

SEQ ID NO: 634654 - RNA, 19 nt, Homo sapiens
  misc_RNA (1)...(19): siRNA sense strand
uuggauggguacaauguuu

SEQ ID NO: 634655 - RNA, 19 nt, Homo sapiens
  misc_RNA (1)...(19): siRNA sense strand
auaauuacggugacucuaa

SEQ ID NO: 634656 - RNA, 19 nt, Homo sapiens
  misc_RNA (1)...(19): siRNA sense strand
guggaaguuuacaauaaug

SEQ ID NO: 634657 - RNA, 19 nt, Homo sapiens
  misc_RNA (1)...(19): siRNA sense strand
ccacagagugacuuaggaa

SEQ ID NO: 634658 - RNA, 19 nt, Homo sapiens
  misc_RNA (1)...(19): siRNA sense strand
gugauucucugcauuucuc

SEQ ID NO: 634659 - RNA, 19 nt, Homo sapiens
  misc_RNA (1)...(19): siRNA sense strand
gcccuguucugccgcuuga

SEQ ID NO: 634660 - RNA, 19 nt, Homo sapiens
  misc_RNA (1)...(19): siRNA sense strand
acagagugacuuaggaauu

SEQ ID NO: 634661 - RNA, 19 nt, Homo sapiens
  misc_RNA (1)...(19): siRNA sense strand
gcaggaagggcaggaagga

SEQ ID NO: 634662 - RNA, 19 nt, Homo sapiens
  misc_RNA (1)...(19): siRNA sense strand
cauaguggaaguuuacaau

SEQ ID NO: 634663 - RNA, 19 nt, Homo sapiens
  misc_RNA (1)...(19): siRNA sense strand
gcaggugcaggcucgacua

SEQ ID NO: 634664 - RNA, 19 nt, Homo sapiens
  misc_RNA (1)...(19): siRNA sense strand
gauaauuacggugacucua

SEQ ID NO: 634665 - RNA, 19 nt, Homo sapiens
  misc_RNA (1)...(19): siRNA sense strand
ucagagcgcggucuuugga

SEQ ID NO: 634666 - RNA, 19 nt, Homo sapiens
  misc_RNA (1)...(19): siRNA sense strand
uaauuacggugacucuaac

SEQ ID NO: 634667 - RNA, 19 nt, Homo sapiens
  misc_RNA (1)...(19): siRNA sense strand
aaagguugaagucuccaua

SEQ ID NO: 634668 - RNA, 19 nt, Homo sapiens
  misc_RNA (1)...(19): siRNA sense strand
ggugcaggcucgacuacag

SEQ ID NO: 634669 - RNA, 19 nt, Homo sapiens
  misc_RNA (1)...(19): siRNA sense strand
gcggaaagagcuauaccau

SEQ ID NO: 634670 - RNA, 19 nt, Homo sapiens
  misc_RNA (1)...(19): siRNA sense strand
ugacccacagagugacuua

SEQ ID NO: 634671 - RNA, 19 nt, Homo sapiens
  misc_RNA (1)...(19): siRNA sense strand
gagcaaacagaggcaggaa

SEQ ID NO: 634672 - RNA, 19 nt, Homo sapiens
  misc_RNA (1)...(19): siRNA sense strand
gguugaagucuccauagug

SEQ ID NO: 634673 - RNA, 19 nt, Homo sapiens
  misc_RNA (1)...(19): siRNA sense strand
ucucuuggauggguacaau

SEQ ID NO: 634674 - RNA, 19 nt, Homo sapiens
  misc_RNA (1)...(19): siRNA sense strand
agagugacuuaggaauuau

SEQ ID NO: 634675 - RNA, 19 nt, Homo sapiens
  misc_RNA (1)...(19): siRNA sense strand
ggccaaagacagcauugca

SEQ ID NO: 634676 - RNA, 19 nt, Homo sapiens
  misc_RNA (1)...(19): siRNA sense strand
ucucagagcgcggucuuug

SEQ ID NO: 634677 - RNA, 19 nt, Homo sapiens
  misc_RNA (1)...(19): siRNA sense strand
ccacagccuccugcucuga

SEQ ID NO: 634678 - RNA, 19 nt, Homo sapiens
  misc_RNA (1)...(19): siRNA sense strand
ggauggacggacagagguu

SEQ ID NO: 634679 - RNA, 19 nt, Homo sapiens
  misc_RNA (1)...(19): siRNA sense strand
ggccuucccagaugacaug

SEQ ID NO: 634680 - RNA, 19 nt, Homo sapiens
  misc_RNA (1)...(19): siRNA sense strand
gaaauacccucauguccaa

SEQ ID NO: 634681 - RNA, 19 nt, Homo sapiens
  misc_RNA (1)...(19): siRNA sense strand
gcacagaauucaccaacaa

SEQ ID NO: 634682 - RNA, 19 nt, Homo sapiens
  misc_RNA (1)...(19): siRNA sense strand
ggaggcagcugaggaaguu

SEQ ID NO: 634683 - RNA, 19 nt, Homo sapiens
  misc_RNA (1)...(19): siRNA sense strand
gaagauggcacaggaggaa

SEQ ID NO: 634684 - RNA, 19 nt, Homo sapiens
  misc_RNA (1)...(19): siRNA sense strand
aagcggagcucuuccucuu

SEQ ID NO: 634685 - RNA, 19 nt, Homo sapiens
  misc_RNA (1)...(19): siRNA sense strand
gcaccacggucggcuauac

SEQ ID NO: 634686 - RNA, 19 nt, Homo sapiens
  misc_RNA (1)...(19): siRNA sense strand
caccuuggcugccuucaca

SEQ ID NO: 634687 - RNA, 19 nt, Homo sapiens
  misc_RNA (1)...(19): siRNA sense strand
guuccugcccuucuccuua

SEQ ID NO: 634688 - RNA, 19 nt, Homo sapiens
  misc_RNA (1)...(19): siRNA sense strand
gcggagcucuuccucuucu

SEQ ID NO: 634689 - RNA, 19 nt, Homo sapiens
  misc_RNA (1)...(19): siRNA sense strand
gaggaaguuuaccaugcuu

SEQ ID NO: 634690 - RNA, 19 nt, Homo sapiens
  misc_RNA (1)...(19): siRNA sense strand
aacaagaacaugcugauga

SEQ ID NO: 634691 - RNA, 19 nt, Homo sapiens
  misc_RNA (1)...(19): siRNA sense strand
ggccuccgcuucuccuaug

SEQ ID NO: 634692 - RNA, 19 nt, Homo sapiens
  misc_RNA (1)...(19): siRNA sense strand
gacagaaggacgcccauuc

SEQ ID NO: 634693 - RNA, 19 nt, Homo sapiens
  misc_RNA (1)...(19): siRNA sense strand
ccgacgcgguucugcauga

SEQ ID NO: 634694 - RNA, 19 nt, Homo sapiens
  misc_RNA (1)...(19): siRNA sense strand
cagaauucaccaacaagaa

SEQ ID NO: 634695 - RNA, 19 nt, Homo sapiens
  misc_RNA (1)...(19): siRNA sense strand
agaacaugcugaugacagu

SEQ ID NO: 634696 - RNA, 19 nt, Homo sapiens
  misc_RNA (1)...(19): siRNA sense strand
ucaugcggcugaguaagaa

SEQ ID NO: 634697 - RNA, 19 nt, Homo sapiens
  misc_RNA (1)...(19): siRNA sense strand
ggacagaaggacgcccauu

SEQ ID NO: 634698 - RNA, 19 nt, Homo sapiens
  misc_RNA (1)...(19): siRNA sense strand
acaagaacaugcugaugac

SEQ ID NO: 634699 - RNA, 19 nt, Homo sapiens
  misc_RNA (1)...(19): siRNA sense strand
caacaagaacaugcugaug

SEQ ID NO: 634700 - RNA, 19 nt, Homo sapiens
  misc_RNA (1)...(19): siRNA sense strand
gaauucaccaacaagaaca

SEQ ID NO: 634701 - RNA, 19 nt, Homo sapiens
  misc_RNA (1)...(19): siRNA sense strand
gaaguacggaccgguguuc

SEQ ID NO: 634702 - RNA, 19 nt, Homo sapiens
  misc_RNA (1)...(19): siRNA sense strand
ccuaugaggauaaggaguu

SEQ ID NO: 634703 - RNA, 19 nt, Homo sapiens
  misc_RNA (1)...(19): siRNA sense strand
ccaggccaccuccaacgua

SEQ ID NO: 634704 - RNA, 19 nt, Homo sapiens
  misc_RNA (1)...(19): siRNA sense strand
ucaagcacccagaagaguu

SEQ ID NO: 634705 - RNA, 19 nt, Homo sapiens
  misc_RNA (1)...(19): siRNA sense strand
gguggaggcagcugaggaa

SEQ ID NO: 634706 - RNA, 19 nt, Homo sapiens
  misc_RNA (1)...(19): siRNA sense strand
ccaccacgcagaccagaug

SEQ ID NO: 634707 - RNA, 19 nt, Homo sapiens
  misc_RNA (1)...(19): siRNA sense strand
ugaggaaguuuaccaugcu

SEQ ID NO: 634708 - RNA, 19 nt, Homo sapiens
  misc_RNA (1)...(19): siRNA sense strand
cagauggacgguucaggaa

SEQ ID NO: 634709 - RNA, 19 nt, Homo sapiens
  misc_RNA (1)...(19): siRNA sense strand
agucugcucccuccucuuu

SEQ ID NO: 634710 - RNA, 19 nt, Homo sapiens
  misc_RNA (1)...(19): siRNA sense strand
aaacccaggcacagaauuc

SEQ ID NO: 634711 - RNA, 19 nt, Homo sapiens
  misc_RNA (1)...(19): siRNA sense strand
caagcacccagaagaguuc

SEQ ID NO: 634712 - RNA, 19 nt, Homo sapiens
  misc_RNA (1)...(19): siRNA sense strand
ggcacagaauucaccaaca

SEQ ID NO: 634713 - RNA, 19 nt, Homo sapiens
  misc_RNA (1)...(19): siRNA sense strand
ucauuuauuugcuguuugc

SEQ ID NO: 634714 - RNA, 19 nt, Homo sapiens
  misc_RNA (1)...(19): siRNA sense strand
gcuggugcccaugggaaua

SEQ ID NO: 634715 - RNA, 19 nt, Homo sapiens
  misc_RNA (1)...(19): siRNA sense strand
ccaacaagaacaugcugau

SEQ ID NO: 634716 - RNA, 19 nt, Homo sapiens
  misc_RNA (1)...(19): siRNA sense strand
gagcucuuccucuucuuca

SEQ ID NO: 634717 - RNA, 19 nt, Homo sapiens
  misc_RNA (1)...(19): siRNA sense strand
guucaacccagaccguuuc

SEQ ID NO: 634718 - RNA, 19 nt, Homo sapiens
  misc_RNA (1)...(19): siRNA sense strand
aggcagcugaggaaguuua

SEQ ID NO: 634719 - RNA, 19 nt, Homo sapiens
  misc_RNA (1)...(19): siRNA sense strand
ggagcucuuccucuucuuc

SEQ ID NO: 634720 - RNA, 19 nt, Homo sapiens
  misc_RNA (1)...(19): siRNA sense strand
agaaggacgcccauucgau

SEQ ID NO: 634721 - RNA, 19 nt, Homo sapiens
  misc_RNA (1)...(19): siRNA sense strand
acagaauucaccaacaaga

SEQ ID NO: 634722 - RNA, 19 nt, Homo sapiens
  misc_RNA (1)...(19): siRNA sense strand
gucauuuauuugcuguuug

SEQ ID NO: 634723 - RNA, 19 nt, Homo sapiens
  misc_RNA (1)...(19): siRNA sense strand
caucuucaagcacccagaa

SEQ ID NO: 634724 - RNA, 19 nt, Homo sapiens
  misc_RNA (1)...(19): siRNA sense strand
gagagaauuucccagauug

SEQ ID NO: 634725 - RNA, 19 nt, Homo sapiens
  misc_RNA (1)...(19): siRNA sense strand
gaacaacacuggcgaugac

SEQ ID NO: 634726 - RNA, 19 nt, Homo sapiens
  misc_RNA (1)...(19): siRNA sense strand
ggaugacgcuccucugugu

SEQ ID NO: 634727 - RNA, 19 nt, Homo sapiens
  misc_RNA (1)...(19): siRNA sense strand
ugagagaauuucccagauu

SEQ ID NO: 634728 - RNA, 19 nt, Homo sapiens
  misc_RNA (1)...(19): siRNA sense strand
agaaacaccuugaaguaug

SEQ ID NO: 634729 - RNA, 19 nt, Homo sapiens
  misc_RNA (1)...(19): siRNA sense strand
ggacagggaggaugaggaa

SEQ ID NO: 634730 - RNA, 19 nt, Homo sapiens
  misc_RNA (1)...(19): siRNA sense strand
uuagaaacaccuugaagua

SEQ ID NO: 634731 - RNA, 19 nt, Homo sapiens
  misc_RNA (1)...(19): siRNA sense strand
gaucugaaagggaacauug

SEQ ID NO: 634732 - RNA, 19 nt, Homo sapiens
  misc_RNA (1)...(19): siRNA sense strand
gaaggcagacuaugucaca

SEQ ID NO: 634733 - RNA, 19 nt, Homo sapiens
  misc_RNA (1)...(19): siRNA sense strand
gaaacaccuugaaguaugc

SEQ ID NO: 634734 - RNA, 19 nt, Homo sapiens
  misc_RNA (1)...(19): siRNA sense strand
gcaaagggaugaggaugac

SEQ ID NO: 634735 - RNA, 19 nt, Homo sapiens
  misc_RNA (1)...(19): siRNA sense strand
ggaagagaaggcagacuau

SEQ ID NO: 634736 - RNA, 19 nt, Homo sapiens
  misc_RNA (1)...(19): siRNA sense strand
gcugucaucucuggaguga

SEQ ID NO: 634737 - RNA, 19 nt, Homo sapiens
  misc_RNA (1)...(19): siRNA sense strand
ugaugagccuccuggguuu

SEQ ID NO: 634738 - RNA, 19 nt, Homo sapiens
  misc_RNA (1)...(19): siRNA sense strand
ccuuggagcuggagaggaa

SEQ ID NO: 634739 - RNA, 19 nt, Homo sapiens
  misc_RNA (1)...(19): siRNA sense strand
ggagaggaaacucacagaa

SEQ ID NO: 634740 - RNA, 19 nt, Homo sapiens
  misc_RNA (1)...(19): siRNA sense strand
gaaagggaacauugacaag

SEQ ID NO: 634741 - RNA, 19 nt, Homo sapiens
  misc_RNA (1)...(19): siRNA sense strand
gaacucacccagcucuaca

SEQ ID NO: 634742 - RNA, 19 nt, Homo sapiens
  misc_RNA (1)...(19): siRNA sense strand
ggaacaacacuggcgauga

SEQ ID NO: 634743 - RNA, 19 nt, Homo sapiens
  misc_RNA (1)...(19): siRNA sense strand
gugaagacguggagcuaca

SEQ ID NO: 634744 - RNA, 19 nt, Homo sapiens
  misc_RNA (1)...(19): siRNA sense strand
aaaccgaggcuuacuggaa

SEQ ID NO: 634745 - RNA, 19 nt, Homo sapiens
  misc_RNA (1)...(19): siRNA sense strand
gaaagugaggcugguguug

SEQ ID NO: 634746 - RNA, 19 nt, Homo sapiens
  misc_RNA (1)...(19): siRNA sense strand
ugacaaaacccacaagaaa

SEQ ID NO: 634747 - RNA, 19 nt, Homo sapiens
  misc_RNA (1)...(19): siRNA sense strand
gagaauuucccagauugaa

SEQ ID NO: 634748 - RNA, 19 nt, Homo sapiens
  misc_RNA (1)...(19): siRNA sense strand
uaagggagcauguguggau

SEQ ID NO: 634749 - RNA, 19 nt, Homo sapiens
  misc_RNA (1)...(19): siRNA sense strand
gaagagaaggcagacuaug

SEQ ID NO: 634750 - RNA, 19 nt, Homo sapiens
  misc_RNA (1)...(19): siRNA sense strand
agaggaaacucacagaacu

SEQ ID NO: 634751 - RNA, 19 nt, Homo sapiens
  misc_RNA (1)...(19): siRNA sense strand
gcuaugacuuggccacucu

SEQ ID NO: 634752 - RNA, 19 nt, Homo sapiens
  misc_RNA (1)...(19): siRNA sense strand
gaaggagcaaggacaaagu

SEQ ID NO: 634753 - RNA, 19 nt, Homo sapiens
  misc_RNA (1)...(19): siRNA sense strand
ugaaagggaacauugacaa

SEQ ID NO: 634754 - RNA, 19 nt, Homo sapiens
  misc_RNA (1)...(19): siRNA sense strand
cgcagacgauauugacaaa

SEQ ID NO: 634755 - RNA, 19 nt, Homo sapiens
  misc_RNA (1)...(19): siRNA sense strand
uagaaacaccuugaaguau

SEQ ID NO: 634756 - RNA, 19 nt, Homo sapiens
  misc_RNA (1)...(19): siRNA sense strand
ugacuuggccacucucuca

SEQ ID NO: 634757 - RNA, 19 nt, Homo sapiens
  misc_RNA (1)...(19): siRNA sense strand
ggaaggagcaaggacaaag

SEQ ID NO: 634758 - RNA, 19 nt, Homo sapiens
  misc_RNA (1)...(19): siRNA sense strand
ugaaagaagaucugaaagg

SEQ ID NO: 634759 - RNA, 19 nt, Homo sapiens
  misc_RNA (1)...(19): siRNA sense strand
gagaggaaacucacagaac

SEQ ID NO: 634760 - RNA, 19 nt, Homo sapiens
  misc_RNA (1)...(19): siRNA sense strand
agaaauucaccaaggcuaa

SEQ ID NO: 634761 - RNA, 19 nt, Homo sapiens
  misc_RNA (1)...(19): siRNA sense strand
aaaguuugcggaagaguug

SEQ ID NO: 634762 - RNA, 19 nt, Homo sapiens
  misc_RNA (1)...(19): siRNA sense strand
gccacucucucaaaggaau

SEQ ID NO: 634763 - RNA, 19 nt, Homo sapiens
  misc_RNA (1)...(19): siRNA sense strand
gaugagccuccuggguuua

SEQ ID NO: 634764 - RNA, 19 nt, Homo sapiens
  misc_RNA (1)...(19): siRNA sense strand
gggaggaugaggaagagaa

SEQ ID NO: 634765 - RNA, 19 nt, Homo sapiens
  misc_RNA (1)...(19): siRNA sense strand
gagaaggcagacuauguca

SEQ ID NO: 634766 - RNA, 19 nt, Homo sapiens
  misc_RNA (1)...(19): siRNA sense strand
ggaauggaagcaccugaag

SEQ ID NO: 634767 - RNA, 19 nt, Homo sapiens
  misc_RNA (1)...(19): siRNA sense strand
caacacuggcgaugaccaa

SEQ ID NO: 634768 - RNA, 19 nt, Homo sapiens
  misc_RNA (1)...(19): siRNA sense strand
aaauaaagaagcccaagca

SEQ ID NO: 634769 - RNA, 19 nt, Homo sapiens
  misc_RNA (1)...(19): siRNA sense strand
uggccacucucucaaagga

SEQ ID NO: 634770 - RNA, 19 nt, Homo sapiens
  misc_RNA (1)...(19): siRNA sense strand
ggacaaccaggcggagaga

SEQ ID NO: 634771 - RNA, 19 nt, Homo sapiens
  misc_RNA (1)...(19): siRNA sense strand
aagagaaggcagacuaugu

SEQ ID NO: 634772 - RNA, 19 nt, Homo sapiens
  misc_RNA (1)...(19): siRNA sense strand
gagcuggagaggaaacuca

SEQ ID NO: 634773 - RNA, 19 nt, Homo sapiens
  misc_RNA (1)...(19): siRNA sense strand
gcuaccaagcgucuucuga

SEQ ID NO: 634774 - RNA, 19 nt, Homo sapiens
  misc_RNA (1)...(19): siRNA sense strand
caaccaggcggagagagaa

SEQ ID NO: 634775 - RNA, 19 nt, Homo sapiens
  misc_RNA (1)...(19): siRNA sense strand
aauggaagcaccugaagga

SEQ ID NO: 634776 - RNA, 19 nt, Homo sapiens
  misc_RNA (1)...(19): siRNA sense strand
aggaagagaaggcagacua

SEQ ID NO: 634777 - RNA, 19 nt, Homo sapiens
  misc_RNA (1)...(19): siRNA sense strand
ggucaagguuuggcaacag

SEQ ID NO: 634778 - RNA, 19 nt, Homo sapiens
  misc_RNA (1)...(19): siRNA sense strand
gaaauucaccaaggcuaac

SEQ ID NO: 634779 - RNA, 19 nt, Homo sapiens
  misc_RNA (1)...(19): siRNA sense strand
gggagcauguguggaugug

SEQ ID NO: 634780 - RNA, 19 nt, Homo sapiens
  misc_RNA (1)...(19): siRNA sense strand
aagacauacugcccaccua

SEQ ID NO: 634781 - RNA, 19 nt, Homo sapiens
  misc_RNA (1)...(19): siRNA sense strand
gcuacaagacggagaucug

SEQ ID NO: 634782 - RNA, 19 nt, Homo sapiens
  misc_RNA (1)...(19): siRNA sense strand
acaaaacccacaagaaauu

SEQ ID NO: 634783 - RNA, 19 nt, Homo sapiens
  misc_RNA (1)...(19): siRNA sense strand
ugaggcugguguugguuug

SEQ ID NO: 634784 - RNA, 19 nt, Homo sapiens
  misc_RNA (1)...(19): siRNA sense strand
acagggaggaugaggaaga

SEQ ID NO: 634785 - RNA, 19 nt, Homo sapiens
  misc_RNA (1)...(19): siRNA sense strand
cagcagaaagugaggucaa

SEQ ID NO: 634786 - RNA, 19 nt, Homo sapiens
  misc_RNA (1)...(19): siRNA sense strand
gacaaaacccacaagaaau

SEQ ID NO: 634787 - RNA, 19 nt, Homo sapiens
  misc_RNA (1)...(19): siRNA sense strand
gugugucuguguguaugua

SEQ ID NO: 634788 - RNA, 19 nt, Homo sapiens
  misc_RNA (1)...(19): siRNA sense strand
ccugcgaaaccgaggcuua

SEQ ID NO: 634789 - RNA, 19 nt, Homo sapiens
  misc_RNA (1)...(19): siRNA sense strand
gaagaucugaaagggaaca

SEQ ID NO: 634790 - RNA, 19 nt, Homo sapiens
  misc_RNA (1)...(19): siRNA sense strand
gaguuaagggagcaugugu

SEQ ID NO: 634791 - RNA, 19 nt, Homo sapiens
  misc_RNA (1)...(19): siRNA sense strand
ggaguuaagggagcaugug

SEQ ID NO: 634792 - RNA, 19 nt, Homo sapiens
  misc_RNA (1)...(19): siRNA sense strand
ggagcuacaagacggagau

SEQ ID NO: 634793 - RNA, 19 nt, Homo sapiens
  misc_RNA (1)...(19): siRNA sense strand
aagaggacagggaggauga

SEQ ID NO: 634794 - RNA, 19 nt, Homo sapiens
  misc_RNA (1)...(19): siRNA sense strand
agagaaggcagacuauguc

SEQ ID NO: 634795 - RNA, 19 nt, Homo sapiens
  misc_RNA (1)...(19): siRNA sense strand
ccaccgcuggucaagguuu

SEQ ID NO: 634796 - RNA, 19 nt, Homo sapiens
  misc_RNA (1)...(19): siRNA sense strand
gcgaaaccgaggcuuacug

SEQ ID NO: 634797 - RNA, 19 nt, Homo sapiens
  misc_RNA (1)...(19): siRNA sense strand
cuacaagacggagaucugu

SEQ ID NO: 634798 - RNA, 19 nt, Homo sapiens
  misc_RNA (1)...(19): siRNA sense strand
ggaggaugaggaagagaag

SEQ ID NO: 634799 - RNA, 19 nt, Homo sapiens
  misc_RNA (1)...(19): siRNA sense strand
ggaauaaauuggucugaaa

SEQ ID NO: 634800 - RNA, 19 nt, Homo sapiens
  misc_RNA (1)...(19): siRNA sense strand
ggagaagguuguaaagaaa

SEQ ID NO: 634801 - RNA, 19 nt, Homo sapiens
  misc_RNA (1)...(19): siRNA sense strand
gggagaagguuguaaagaa

SEQ ID NO: 634802 - RNA, 19 nt, Homo sapiens
  misc_RNA (1)...(19): siRNA sense strand
gaacagaacaucaaagaac

SEQ ID NO: 634803 - RNA, 19 nt, Homo sapiens
  misc_RNA (1)...(19): siRNA sense strand
aaagaaauguggcuucgaa

SEQ ID NO: 634804 - RNA, 19 nt, Homo sapiens
  misc_RNA (1)...(19): siRNA sense strand
gcacaaguuugagcuagaa

SEQ ID NO: 634805 - RNA, 19 nt, Homo sapiens
  misc_RNA (1)...(19): siRNA sense strand
gcacugaggacaccaaaga

SEQ ID NO: 634806 - RNA, 19 nt, Homo sapiens
  misc_RNA (1)...(19): siRNA sense strand
caacaucacaugaggcuuu

SEQ ID NO: 634807 - RNA, 19 nt, Homo sapiens
  misc_RNA (1)...(19): siRNA sense strand
caaggaaauuugcaaguuc

SEQ ID NO: 634808 - RNA, 19 nt, Homo sapiens
  misc_RNA (1)...(19): siRNA sense strand
gggaagacaccgacaauga

SEQ ID NO: 634809 - RNA, 19 nt, Homo sapiens
  misc_RNA (1)...(19): siRNA sense strand
gcacaacucuggccaugac

SEQ ID NO: 634810 - RNA, 19 nt, Homo sapiens
  misc_RNA (1)...(19): siRNA sense strand
aaucgaggcugcuggcuuu

SEQ ID NO: 634811 - RNA, 19 nt, Homo sapiens
  misc_RNA (1)...(19): siRNA sense strand
ucaccaacauaguaacaaa

SEQ ID NO: 634812 - RNA, 19 nt, Homo sapiens
  misc_RNA (1)...(19): siRNA sense strand
acaaggaaauuugcaaguu

SEQ ID NO: 634813 - RNA, 19 nt, Homo sapiens
  misc_RNA (1)...(19): siRNA sense strand
uggcuauggucaagaauuu

SEQ ID NO: 634814 - RNA, 19 nt, Homo sapiens
  misc_RNA (1)...(19): siRNA sense strand
gaugcgaugugacaaagau

SEQ ID NO: 634815 - RNA, 19 nt, Homo sapiens
  misc_RNA (1)...(19): siRNA sense strand
ucaugaacauccuggguuu

SEQ ID NO: 634816 - RNA, 19 nt, Homo sapiens
  misc_RNA (1)...(19): siRNA sense strand
gcuggcuucuuacuuauga

SEQ ID NO: 634817 - RNA, 19 nt, Homo sapiens
  misc_RNA (1)...(19): siRNA sense strand
gaacaucaaagaacuuaac

SEQ ID NO: 634818 - RNA, 19 nt, Homo sapiens
  misc_RNA (1)...(19): siRNA sense strand
gcugcuggcuuuuguguua

SEQ ID NO: 634819 - RNA, 19 nt, Homo sapiens
  misc_RNA (1)...(19): siRNA sense strand
gaggaucccgugugguuaa

SEQ ID NO: 634820 - RNA, 19 nt, Homo sapiens
  misc_RNA (1)...(19): siRNA sense strand
ugaaagacaugagcagcuu

SEQ ID NO: 634821 - RNA, 19 nt, Homo sapiens
  misc_RNA (1)...(19): siRNA sense strand
gaaauguggcuucgaaagg

SEQ ID NO: 634822 - RNA, 19 nt, Homo sapiens
  misc_RNA (1)...(19): siRNA sense strand
gguaugcuguccuacuuuc

SEQ ID NO: 634823 - RNA, 19 nt, Homo sapiens
  misc_RNA (1)...(19): siRNA sense strand
ggggcuggcuucuuacuua

SEQ ID NO: 634824 - RNA, 19 nt, Homo sapiens
  misc_RNA (1)...(19): siRNA sense strand
ccaagagacacaucccuuu

SEQ ID NO: 634825 - RNA, 19 nt, Homo sapiens
  misc_RNA (1)...(19): siRNA sense strand
cagaacaucaaagaacuua

SEQ ID NO: 634826 - RNA, 19 nt, Homo sapiens
  misc_RNA (1)...(19): siRNA sense strand
ugccagaguuggaaaauua

SEQ ID NO: 634827 - RNA, 19 nt, Homo sapiens
  misc_RNA (1)...(19): siRNA sense strand
uagaacagaacaucaaaga

SEQ ID NO: 634828 - RNA, 19 nt, Homo sapiens
  misc_RNA (1)...(19): siRNA sense strand
gcaauucagcagcaagaga

SEQ ID NO: 634829 - RNA, 19 nt, Homo sapiens
  misc_RNA (1)...(19): siRNA sense strand
gaagagcugaugcgaugug

SEQ ID NO: 634830 - RNA, 19 nt, Homo sapiens
  misc_RNA (1)...(19): siRNA sense strand
ucauggcuauggucaagaa

SEQ ID NO: 634831 - RNA, 19 nt, Homo sapiens
  misc_RNA (1)...(19): siRNA sense strand
gagcugaugcgaugugaca

SEQ ID NO: 634832 - RNA, 19 nt, Homo sapiens
  misc_RNA (1)...(19): siRNA sense strand
gggcuggcuucuuacuuau

SEQ ID NO: 634833 - RNA, 19 nt, Homo sapiens
  misc_RNA (1)...(19): siRNA sense strand
gcuagaacagaacaucaaa

SEQ ID NO: 634834 - RNA, 19 nt, Homo sapiens
  misc_RNA (1)...(19): siRNA sense strand
gagaagguuguaaagaaau

SEQ ID NO: 634835 - RNA, 19 nt, Homo sapiens
  misc_RNA (1)...(19): siRNA sense strand
caagagacacaucccuuuc

SEQ ID NO: 634836 - RNA, 19 nt, Homo sapiens
  misc_RNA (1)...(19): siRNA sense strand
gugaaccugugccagaguu

SEQ ID NO: 634837 - RNA, 19 nt, Homo sapiens
  misc_RNA (1)...(19): siRNA sense strand
agaagguuguaaagaaaug

SEQ ID NO: 634838 - RNA, 19 nt, Homo sapiens
  misc_RNA (1)...(19): siRNA sense strand
ggagacagcagaggaacug

SEQ ID NO: 634839 - RNA, 19 nt, Homo sapiens
  misc_RNA (1)...(19): siRNA sense strand
uguccuacuuucuguuuga

SEQ ID NO: 634840 - RNA, 19 nt, Homo sapiens
  misc_RNA (1)...(19): siRNA sense strand
ccuacuuucuguuugaaga

SEQ ID NO: 634841 - RNA, 19 nt, Homo sapiens
  misc_RNA (1)...(19): siRNA sense strand
uaaauuggucugaaaucga

SEQ ID NO: 634842 - RNA, 19 nt, Homo sapiens
  misc_RNA (1)...(19): siRNA sense strand
gagcuagaacagaacauca

SEQ ID NO: 634843 - RNA, 19 nt, Homo sapiens
  misc_RNA (1)...(19): siRNA sense strand
aguuugagcuagaacagaa

SEQ ID NO: 634844 - RNA, 19 nt, Homo sapiens
  misc_RNA (1)...(19): siRNA sense strand
gccaucaccaacauaguaa

SEQ ID NO: 634845 - RNA, 19 nt, Homo sapiens
  misc_RNA (1)...(19): siRNA sense strand
ccuaccagauggccaaauc

SEQ ID NO: 634846 - RNA, 19 nt, Homo sapiens
  misc_RNA (1)...(19): siRNA sense strand
gaaaauagaagcaauucag

SEQ ID NO: 634847 - RNA, 19 nt, Homo sapiens
  misc_RNA (1)...(19): siRNA sense strand
gcuguccuacuuucuguuu

SEQ ID NO: 634848 - RNA, 19 nt, Homo sapiens
  misc_RNA (1)...(19): siRNA sense strand
aaauguggcuucgaaaggu

SEQ ID NO: 634849 - RNA, 19 nt, Homo sapiens
  misc_RNA (1)...(19): siRNA sense strand
aggaauaaauuggucugaa

SEQ ID NO: 634850 - RNA, 19 nt, Homo sapiens
  misc_RNA (1)...(19): siRNA sense strand
cagcugccaucaccaacau

SEQ ID NO: 634851 - RNA, 19 nt, Homo sapiens
  misc_RNA (1)...(19): siRNA sense strand
gcugaugcgaugugacaaa

SEQ ID NO: 634852 - RNA, 19 nt, Homo sapiens
  misc_RNA (1)...(19): siRNA sense strand
ugccaucaccaacauagua

SEQ ID NO: 634853 - RNA, 19 nt, Homo sapiens
  misc_RNA (1)...(19): siRNA sense strand
gacagcagaggaacugaga

SEQ ID NO: 634854 - RNA, 19 nt, Homo sapiens
  misc_RNA (1)...(19): siRNA sense strand
aauguggcuucgaaaggua

SEQ ID NO: 634855 - RNA, 19 nt, Homo sapiens
  misc_RNA (1)...(19): siRNA sense strand
caccagcaccagcaagaaa

SEQ ID NO: 634856 - RNA, 19 nt, Homo sapiens
  misc_RNA (1)...(19): siRNA sense strand
agagacacaucccuuucug

SEQ ID NO: 634857 - RNA, 19 nt, Homo sapiens
  misc_RNA (1)...(19): siRNA sense strand
ucgaggaucccgugugguu

SEQ ID NO: 634858 - RNA, 19 nt, Homo sapiens
  misc_RNA (1)...(19): siRNA sense strand
aggcugguaugcuguccua

SEQ ID NO: 634859 - RNA, 19 nt, Homo sapiens
  misc_RNA (1)...(19): siRNA sense strand
cgaggaucccgugugguua

SEQ ID NO: 634860 - RNA, 19 nt, Homo sapiens
  misc_RNA (1)...(19): siRNA sense strand
cugguaugcuguccuacuu

SEQ ID NO: 634861 - RNA, 19 nt, Homo sapiens
  misc_RNA (1)...(19): siRNA sense strand
aaagauuccaugccagaug

SEQ ID NO: 634862 - RNA, 19 nt, Homo sapiens
  misc_RNA (1)...(19): siRNA sense strand
gcuuucggaggaauaaauu

SEQ ID NO: 634863 - RNA, 19 nt, Homo sapiens
  misc_RNA (1)...(19): siRNA sense strand
aacagaacaucaaagaacu

SEQ ID NO: 634864 - RNA, 19 nt, Homo sapiens
  misc_RNA (1)...(19): siRNA sense strand
gaggaacugagagcacuug

SEQ ID NO: 634865 - RNA, 19 nt, Homo sapiens
  misc_RNA (1)...(19): siRNA sense strand
caacucuggccaugaccaa

SEQ ID NO: 634866 - RNA, 19 nt, Homo sapiens
  misc_RNA (1)...(19): siRNA sense strand
auccaacucuggcuucaug

SEQ ID NO: 634867 - RNA, 19 nt, Homo sapiens
  misc_RNA (1)...(19): siRNA sense strand
uaacacccuugcggaccaa

SEQ ID NO: 634868 - RNA, 19 nt, Homo sapiens
  misc_RNA (1)...(19): siRNA sense strand
gcagcugccaucaccaaca

SEQ ID NO: 634869 - RNA, 19 nt, Homo sapiens
  misc_RNA (1)...(19): siRNA sense strand
caugaggcuuucggaggaa

SEQ ID NO: 634870 - RNA, 19 nt, Homo sapiens
  misc_RNA (1)...(19): siRNA sense strand
uuaccuggcuugggagaag

SEQ ID NO: 634871 - RNA, 19 nt, Homo sapiens
  misc_RNA (1)...(19): siRNA sense strand
cuucauggcuauggucaag

SEQ ID NO: 634872 - RNA, 19 nt, Homo sapiens
  misc_RNA (1)...(19): siRNA sense strand
ccauguggcaaacaaggaa

SEQ ID NO: 634873 - RNA, 19 nt, Homo sapiens
  misc_RNA (1)...(19): siRNA sense strand
gaggaauaaauuggucuga

SEQ ID NO: 634874 - RNA, 19 nt, Homo sapiens
  misc_RNA (1)...(19): siRNA sense strand
gaggcuuucggaggaauaa

SEQ ID NO: 634875 - RNA, 19 nt, Homo sapiens
  misc_RNA (1)...(19): siRNA sense strand
agaacagaacaucaaagaa

SEQ ID NO: 634876 - RNA, 19 nt, Homo sapiens
  misc_RNA (1)...(19): siRNA sense strand
auaaauuggucugaaaucg

SEQ ID NO: 634877 - RNA, 19 nt, Homo sapiens
  misc_RNA (1)...(19): siRNA sense strand
ccucugacaacaucacaug

SEQ ID NO: 634878 - RNA, 19 nt, Homo sapiens
  misc_RNA (1)...(19): siRNA sense strand
gcagaaagaugagcaguuu

SEQ ID NO: 634879 - RNA, 19 nt, Homo sapiens
  misc_RNA (1)...(19): siRNA sense strand
ugaagaagcuuagaacaua

SEQ ID NO: 634880 - RNA, 19 nt, Homo sapiens
  misc_RNA (1)...(19): siRNA sense strand
gaacauaugcagcuauuga

SEQ ID NO: 634881 - RNA, 19 nt, Homo sapiens
  misc_RNA (1)...(19): siRNA sense strand
gaagaagcuuagaacauau

SEQ ID NO: 634882 - RNA, 19 nt, Homo sapiens
  misc_RNA (1)...(19): siRNA sense strand
ugacaucacacccaacuua

SEQ ID NO: 634883 - RNA, 19 nt, Homo sapiens
  misc_RNA (1)...(19): siRNA sense strand
gaagguauuuaaggaaguu

SEQ ID NO: 634884 - RNA, 19 nt, Homo sapiens
  misc_RNA (1)...(19): siRNA sense strand
caacuuacuuucccuucuu

SEQ ID NO: 634885 - RNA, 19 nt, Homo sapiens
  misc_RNA (1)...(19): siRNA sense strand
gauugaagguauuuaagga

SEQ ID NO: 634886 - RNA, 19 nt, Homo sapiens
  misc_RNA (1)...(19): siRNA sense strand
uaauggagcucacucagau

SEQ ID NO: 634887 - RNA, 19 nt, Homo sapiens
  misc_RNA (1)...(19): siRNA sense strand
cugaagaggccaccaaaua

SEQ ID NO: 634888 - RNA, 19 nt, Homo sapiens
  misc_RNA (1)...(19): siRNA sense strand
aagaaacgcuuuacugaag

SEQ ID NO: 634889 - RNA, 19 nt, Homo sapiens
  misc_RNA (1)...(19): siRNA sense strand
ggacgagucuggcccuuac

SEQ ID NO: 634890 - RNA, 19 nt, Homo sapiens
  misc_RNA (1)...(19): siRNA sense strand
uagaacauaugcagcuauu

SEQ ID NO: 634891 - RNA, 19 nt, Homo sapiens
  misc_RNA (1)...(19): siRNA sense strand
gaugagcaguuuagggaau

SEQ ID NO: 634892 - RNA, 19 nt, Homo sapiens
  misc_RNA (1)...(19): siRNA sense strand
caaccagcauugaccgauu

SEQ ID NO: 634893 - RNA, 19 nt, Homo sapiens
  misc_RNA (1)...(19): siRNA sense strand
ggagcucacucagaucuau

SEQ ID NO: 634894 - RNA, 19 nt, Homo sapiens
  misc_RNA (1)...(19): siRNA sense strand
cuacgaagcucugaagaag

SEQ ID NO: 634895 - RNA, 19 nt, Homo sapiens
  misc_RNA (1)...(19): siRNA sense strand
gaaguuaugcgugacauca

SEQ ID NO: 634896 - RNA, 19 nt, Homo sapiens
  misc_RNA (1)...(19): siRNA sense strand
ggcagaugcucucuacgaa

SEQ ID NO: 634897 - RNA, 19 nt, Homo sapiens
  misc_RNA (1)...(19): siRNA sense strand
gaagauccaggaguccaua

SEQ ID NO: 634898 - RNA, 19 nt, Homo sapiens
  misc_RNA (1)...(19): siRNA sense strand
acgaauaugugcagcagaa

SEQ ID NO: 634899 - RNA, 19 nt, Homo sapiens
  misc_RNA (1)...(19): siRNA sense strand
agucaaagcacuugcauga

SEQ ID NO: 634900 - RNA, 19 nt, Homo sapiens
  misc_RNA (1)...(19): siRNA sense strand
ugcaaauccugcugacuaa

SEQ ID NO: 634901 - RNA, 19 nt, Homo sapiens
  misc_RNA (1)...(19): siRNA sense strand
caaugaagccuggaagaga

SEQ ID NO: 634902 - RNA, 19 nt, Homo sapiens
  misc_RNA (1)...(19): siRNA sense strand
gcacucauacacaucauca

SEQ ID NO: 634903 - RNA, 19 nt, Homo sapiens
  misc_RNA (1)...(19): siRNA sense strand
gaaacgcuuuacugaagag

SEQ ID NO: 634904 - RNA, 19 nt, Homo sapiens
  misc_RNA (1)...(19): siRNA sense strand
gaagaggccaccaaauacu

SEQ ID NO: 634905 - RNA, 19 nt, Homo sapiens
  misc_RNA (1)...(19): siRNA sense strand
cucaggagcuggaggagaa

SEQ ID NO: 634906 - RNA, 19 nt, Homo sapiens
  misc_RNA (1)...(19): siRNA sense strand
cugcaaauccugcugacua

SEQ ID NO: 634907 - RNA, 19 nt, Homo sapiens
  misc_RNA (1)...(19): siRNA sense strand
gauccaggaguccauagaa

SEQ ID NO: 634908 - RNA, 19 nt, Homo sapiens
  misc_RNA (1)...(19): siRNA sense strand
agaaacgcuuuacugaaga

SEQ ID NO: 634909 - RNA, 19 nt, Homo sapiens
  misc_RNA (1)...(19): siRNA sense strand
gaagccacacaaaccauug

SEQ ID NO: 634910 - RNA, 19 nt, Homo sapiens
  misc_RNA (1)...(19): siRNA sense strand
cacagaggcugcaccaucu

SEQ ID NO: 634911 - RNA, 19 nt, Homo sapiens
  misc_RNA (1)...(19): siRNA sense strand
gagcuggaggagaaucuaa

SEQ ID NO: 634912 - RNA, 19 nt, Homo sapiens
  misc_RNA (1)...(19): siRNA sense strand
cacaaaccauugggaguga

SEQ ID NO: 634913 - RNA, 19 nt, Homo sapiens
  misc_RNA (1)...(19): siRNA sense strand
caucacacccaacuuacuu

SEQ ID NO: 634914 - RNA, 19 nt, Homo sapiens
  misc_RNA (1)...(19): siRNA sense strand
ugaggcagaugcucucuac

SEQ ID NO: 634915 - RNA, 19 nt, Homo sapiens
  misc_RNA (1)...(19): siRNA sense strand
aaugaagccuggaagagau

SEQ ID NO: 634916 - RNA, 19 nt, Homo sapiens
  misc_RNA (1)...(19): siRNA sense strand
guggagcacucauacacau

SEQ ID NO: 634917 - RNA, 19 nt, Homo sapiens
  misc_RNA (1)...(19): siRNA sense strand
ugaagaggccaccaaauac

SEQ ID NO: 634918 - RNA, 19 nt, Homo sapiens
  misc_RNA (1)...(19): siRNA sense strand
caaauccugcugacuaaca

SEQ ID NO: 634919 - RNA, 19 nt, Homo sapiens
  misc_RNA (1)...(19): siRNA sense strand
uggcgaaucucagcuggaa

SEQ ID NO: 634920 - RNA, 19 nt, Homo sapiens
  misc_RNA (1)...(19): siRNA sense strand
gcucugaagaagcuuagaa

SEQ ID NO: 634921 - RNA, 19 nt, Homo sapiens
  misc_RNA (1)...(19): siRNA sense strand
ggagcacucauacacauca

SEQ ID NO: 634922 - RNA, 19 nt, Homo sapiens
  misc_RNA (1)...(19): siRNA sense strand
gcugcaccaucuccaaugu

SEQ ID NO: 634923 - RNA, 19 nt, Homo sapiens
  misc_RNA (1)...(19): siRNA sense strand
agaaagaugagcaguuuag

SEQ ID NO: 634924 - RNA, 19 nt, Homo sapiens
  misc_RNA (1)...(19): siRNA sense strand
gcaguuuagggaaugguuu

SEQ ID NO: 634925 - RNA, 19 nt, Homo sapiens
  misc_RNA (1)...(19): siRNA sense strand
ggauguggucaaccuugua

SEQ ID NO: 634926 - RNA, 19 nt, Homo sapiens
  misc_RNA (1)...(19): siRNA sense strand
gaauaugugcagcagaaag

SEQ ID NO: 634927 - RNA, 19 nt, Homo sapiens
  misc_RNA (1)...(19): siRNA sense strand
gauguggucaaccuuguau

SEQ ID NO: 634928 - RNA, 19 nt, Homo sapiens
  misc_RNA (1)...(19): siRNA sense strand
cagaaagaugagcaguuua

SEQ ID NO: 634929 - RNA, 19 nt, Homo sapiens
  misc_RNA (1)...(19): siRNA sense strand
cgucugaauccaugccaua

SEQ ID NO: 634930 - RNA, 19 nt, Homo sapiens
  misc_RNA (1)...(19): siRNA sense strand
gcgaaucucagcuggaagu

SEQ ID NO: 634931 - RNA, 19 nt, Homo sapiens
  misc_RNA (1)...(19): siRNA sense strand
gugaccaccuggcgaaucu

SEQ ID NO: 634932 - RNA, 19 nt, Homo sapiens
  misc_RNA (1)...(19): siRNA sense strand
auacacaucaucagcagaa

SEQ ID NO: 634933 - RNA, 19 nt, Homo sapiens
  misc_RNA (1)...(19): siRNA sense strand
gggacgagucuggcccuua

SEQ ID NO: 634934 - RNA, 19 nt, Homo sapiens
  misc_RNA (1)...(19): siRNA sense strand
cgaagccacacaaaccauu

SEQ ID NO: 634935 - RNA, 19 nt, Homo sapiens
  misc_RNA (1)...(19): siRNA sense strand
aacuuacuuucccuucuua

SEQ ID NO: 634936 - RNA, 19 nt, Homo sapiens
  misc_RNA (1)...(19): siRNA sense strand
ccaacuuacuuucccuucu

SEQ ID NO: 634937 - RNA, 19 nt, Homo sapiens
  misc_RNA (1)...(19): siRNA sense strand
aaccagcauugaccgauug

SEQ ID NO: 634938 - RNA, 19 nt, Homo sapiens
  misc_RNA (1)...(19): siRNA sense strand
caaaccauugggagugaaa

SEQ ID NO: 634939 - RNA, 19 nt, Homo sapiens
  misc_RNA (1)...(19): siRNA sense strand
gcauugaccgauugaaggu

SEQ ID NO: 634940 - RNA, 19 nt, Homo sapiens
  misc_RNA (1)...(19): siRNA sense strand
cuaauggagcucacucaga

SEQ ID NO: 634941 - RNA, 19 nt, Homo sapiens
  misc_RNA (1)...(19): siRNA sense strand
caucuuccuugcacuggau

SEQ ID NO: 634942 - RNA, 19 nt, Homo sapiens
  misc_RNA (1)...(19): siRNA sense strand
aaauccugcugacuaacaa

SEQ ID NO: 634943 - RNA, 19 nt, Homo sapiens
  misc_RNA (1)...(19): siRNA sense strand
gcccagggaugaggcagau

SEQ ID NO: 634944 - RNA, 19 nt, Homo sapiens
  misc_RNA (1)...(19): siRNA sense strand
ugaagguauuuaaggaagu

SEQ ID NO: 634945 - RNA, 19 nt, Homo sapiens
  misc_RNA (1)...(19): siRNA sense strand
aauaugugcagcagaaaga

SEQ ID NO: 634946 - RNA, 19 nt, Homo sapiens
  misc_RNA (1)...(19): siRNA sense strand
gcaucguggagcacucaua

SEQ ID NO: 634947 - RNA, 19 nt, Homo sapiens
  misc_RNA (1)...(19): siRNA sense strand
gucccuugcuggucuuguu

SEQ ID NO: 634948 - RNA, 19 nt, Homo sapiens
  misc_RNA (1)...(19): siRNA sense strand
ccuugcaaaugguauugaa

SEQ ID NO: 634949 - RNA, 19 nt, Homo sapiens
  misc_RNA (1)...(19): siRNA sense strand
uggaagugguggucaagca

SEQ ID NO: 634950 - RNA, 19 nt, Homo sapiens
  misc_RNA (1)...(19): siRNA sense strand
caagcagagagaacgauug

SEQ ID NO: 634951 - RNA, 19 nt, Homo sapiens
  misc_RNA (1)...(19): siRNA sense strand
ucaagcagagagaacgauu

SEQ ID NO: 634952 - RNA, 19 nt, Homo sapiens
  misc_RNA (1)...(19): siRNA sense strand
ccugcugacuaacaaugaa

SEQ ID NO: 634953 - RNA, 19 nt, Homo sapiens
  misc_RNA (1)...(19): siRNA sense strand
cuuagaacauaugcagcua

SEQ ID NO: 634954 - RNA, 19 nt, Homo sapiens
  misc_RNA (1)...(19): siRNA sense strand
gcuggaggagaaucuaaug

SEQ ID NO: 634955 - RNA, 19 nt, Homo sapiens
  misc_RNA (1)...(19): siRNA sense strand
ugacugcaaccagcauuga

SEQ ID NO: 634956 - RNA, 19 nt, Homo sapiens
  misc_RNA (1)...(19): siRNA sense strand
caaauacuuccgggagaga

SEQ ID NO: 634957 - RNA, 19 nt, Homo sapiens
  misc_RNA (1)...(19): siRNA sense strand
ggaagauccaggaguccau

SEQ ID NO: 634958 - RNA, 19 nt, Homo sapiens
  misc_RNA (1)...(19): siRNA sense strand
gguauuuaaggaaguuaug

SEQ ID NO: 634959 - RNA, 19 nt, Homo sapiens
  misc_RNA (1)...(19): siRNA sense strand
cagcauugaccgauugaag

SEQ ID NO: 634960 - RNA, 19 nt, Homo sapiens
  misc_RNA (1)...(19): siRNA sense strand
ucuacgaagcucugaagaa

SEQ ID NO: 634961 - RNA, 19 nt, Homo sapiens
  misc_RNA (1)...(19): siRNA sense strand
gagcacucauacacaucau

SEQ ID NO: 634962 - RNA, 19 nt, Homo sapiens
  misc_RNA (1)...(19): siRNA sense strand
auccaggaguccauagaaa

SEQ ID NO: 634963 - RNA, 19 nt, Homo sapiens
  misc_RNA (1)...(19): siRNA sense strand
gaaagaugagcaguuuagg

SEQ ID NO: 634964 - RNA, 19 nt, Homo sapiens
  misc_RNA (1)...(19): siRNA sense strand
ggagcuggaggagaaucua

SEQ ID NO: 634965 - RNA, 19 nt, Homo sapiens
  misc_RNA (1)...(19): siRNA sense strand
uggucaaccuuguauacga

SEQ ID NO: 634966 - RNA, 19 nt, Homo sapiens
  misc_RNA (1)...(19): siRNA sense strand
cugaagaagcuuagaacau

SEQ ID NO: 634967 - RNA, 19 nt, Homo sapiens
  misc_RNA (1)...(19): siRNA sense strand
uugcaaaugguauugaaga

SEQ ID NO: 634968 - RNA, 19 nt, Homo sapiens
  misc_RNA (1)...(19): siRNA sense strand
gcagaaagaugagcaguuu

SEQ ID NO: 634969 - RNA, 19 nt, Homo sapiens
  misc_RNA (1)...(19): siRNA sense strand
ugaagaagcuuagaacaua

SEQ ID NO: 634970 - RNA, 19 nt, Homo sapiens
  misc_RNA (1)...(19): siRNA sense strand
gaacauaugcagcuauuga

SEQ ID NO: 634971 - RNA, 19 nt, Homo sapiens
  misc_RNA (1)...(19): siRNA sense strand
gaagaagcuuagaacauau

SEQ ID NO: 634972 - RNA, 19 nt, Homo sapiens
  misc_RNA (1)...(19): siRNA sense strand
ugacaucacacccaacuua

SEQ ID NO: 634973 - RNA, 19 nt, Homo sapiens
  misc_RNA (1)...(19): siRNA sense strand
gaagguauuuaaggaaguu

SEQ ID NO: 634974 - RNA, 19 nt, Homo sapiens
  misc_RNA (1)...(19): siRNA sense strand
caacuuacuuucccuucuu

SEQ ID NO: 634975 - RNA, 19 nt, Homo sapiens
  misc_RNA (1)...(19): siRNA sense strand
gauugaagguauuuaagga

SEQ ID NO: 634976 - RNA, 19 nt, Homo sapiens
  misc_RNA (1)...(19): siRNA sense strand
uaauggagcucacucagau

SEQ ID NO: 634977 - RNA, 19 nt, Homo sapiens
  misc_RNA (1)...(19): siRNA sense strand
cugaagaggccaccaaaua

SEQ ID NO: 634978 - RNA, 19 nt, Homo sapiens
  misc_RNA (1)...(19): siRNA sense strand
aagaaacgcuuuacugaag

SEQ ID NO: 634979 - RNA, 19 nt, Homo sapiens
  misc_RNA (1)...(19): siRNA sense strand
ggacgagucuggcccuuac

SEQ ID NO: 634980 - RNA, 19 nt, Homo sapiens
  misc_RNA (1)...(19): siRNA sense strand
uagaacauaugcagcuauu

SEQ ID NO: 634981 - RNA, 19 nt, Homo sapiens
  misc_RNA (1)...(19): siRNA sense strand
gaugagcaguuuagggaau

SEQ ID NO: 634982 - RNA, 19 nt, Homo sapiens
  misc_RNA (1)...(19): siRNA sense strand
caaccagcauugaccgauu

SEQ ID NO: 634983 - RNA, 19 nt, Homo sapiens
  misc_RNA (1)...(19): siRNA sense strand
ggagcucacucagaucuau

SEQ ID NO: 634984 - RNA, 19 nt, Homo sapiens
  misc_RNA (1)...(19): siRNA sense strand
cuacgaagcucugaagaag

SEQ ID NO: 634985 - RNA, 19 nt, Homo sapiens
  misc_RNA (1)...(19): siRNA sense strand
gaaguuaugcgugacauca

SEQ ID NO: 634986 - RNA, 19 nt, Homo sapiens
  misc_RNA (1)...(19): siRNA sense strand
ggcagaugcucucuacgaa

SEQ ID NO: 634987 - RNA, 19 nt, Homo sapiens
  misc_RNA (1)...(19): siRNA sense strand
gaagauccaggaguccaua

SEQ ID NO: 634988 - RNA, 19 nt, Homo sapiens
  misc_RNA (1)...(19): siRNA sense strand
acgaauaugugcagcagaa

SEQ ID NO: 634989 - RNA, 19 nt, Homo sapiens
  misc_RNA (1)...(19): siRNA sense strand
agucaaagcacuugcauga

SEQ ID NO: 634990 - RNA, 19 nt, Homo sapiens
  misc_RNA (1)...(19): siRNA sense strand
ugcaaauccugcugacuaa

SEQ ID NO: 634991 - RNA, 19 nt, Homo sapiens
  misc_RNA (1)...(19): siRNA sense strand
caaugaagccuggaagaga

SEQ ID NO: 634992 - RNA, 19 nt, Homo sapiens
  misc_RNA (1)...(19): siRNA sense strand
gcacucauacacaucauca

SEQ ID NO: 634993 - RNA, 19 nt, Homo sapiens
  misc_RNA (1)...(19): siRNA sense strand
gaaacgcuuuacugaagag

SEQ ID NO: 634994 - RNA, 19 nt, Homo sapiens
  misc_RNA (1)...(19): siRNA sense strand
gaagaggccaccaaauacu

SEQ ID NO: 634995 - RNA, 19 nt, Homo sapiens
  misc_RNA (1)...(19): siRNA sense strand
cucaggagcuggaggagaa

SEQ ID NO: 634996 - RNA, 19 nt, Homo sapiens
  misc_RNA (1)...(19): siRNA sense strand
cugcaaauccugcugacua

SEQ ID NO: 634997 - RNA, 19 nt, Homo sapiens
  misc_RNA (1)...(19): siRNA sense strand
gauccaggaguccauagaa

SEQ ID NO: 634998 - RNA, 19 nt, Homo sapiens
  misc_RNA (1)...(19): siRNA sense strand
agaaacgcuuuacugaaga

SEQ ID NO: 634999 - RNA, 19 nt, Homo sapiens
  misc_RNA (1)...(19): siRNA sense strand
gaagccacacaaaccauug

SEQ ID NO: 635000 - RNA, 19 nt, Homo sapiens
  misc_RNA (1)...(19): siRNA sense strand
cacagaggcugcaccaucu

SEQ ID NO: 635001 - RNA, 19 nt, Homo sapiens
  misc_RNA (1)...(19): siRNA sense strand
gagcuggaggagaaucuaa

SEQ ID NO: 635002 - RNA, 19 nt, Homo sapiens
  misc_RNA (1)...(19): siRNA sense strand
cacaaaccauugggaguga

SEQ ID NO: 635003 - RNA, 19 nt, Homo sapiens
  misc_RNA (1)...(19): siRNA sense strand
caucacacccaacuuacuu

SEQ ID NO: 635004 - RNA, 19 nt, Homo sapiens
  misc_RNA (1)...(19): siRNA sense strand
ugaggcagaugcucucuac

SEQ ID NO: 635005 - RNA, 19 nt, Homo sapiens
  misc_RNA (1)...(19): siRNA sense strand
aaugaagccuggaagagau

SEQ ID NO: 635006 - RNA, 19 nt, Homo sapiens
  misc_RNA (1)...(19): siRNA sense strand
guggagcacucauacacau

SEQ ID NO: 635007 - RNA, 19 nt, Homo sapiens
  misc_RNA (1)...(19): siRNA sense strand
ugaagaggccaccaaauac

SEQ ID NO: 635008 - RNA, 19 nt, Homo sapiens
  misc_RNA (1)...(19): siRNA sense strand
caaauccugcugacuaaca

SEQ ID NO: 635009 - RNA, 19 nt, Homo sapiens
  misc_RNA (1)...(19): siRNA sense strand
uggcgaaucucagcuggaa

SEQ ID NO: 635010 - RNA, 19 nt, Homo sapiens
  misc_RNA (1)...(19): siRNA sense strand
gcucugaagaagcuuagaa

SEQ ID NO: 635011 - RNA, 19 nt, Homo sapiens
  misc_RNA (1)...(19): siRNA sense strand
ggagcacucauacacauca

SEQ ID NO: 635012 - RNA, 19 nt, Homo sapiens
  misc_RNA (1)...(19): siRNA sense strand
gcugcaccaucuccaaugu

SEQ ID NO: 635013 - RNA, 19 nt, Homo sapiens
  misc_RNA (1)...(19): siRNA sense strand
agaaagaugagcaguuuag

SEQ ID NO: 635014 - RNA, 19 nt, Homo sapiens
  misc_RNA (1)...(19): siRNA sense strand
gcaguuuagggaaugguuu

SEQ ID NO: 635015 - RNA, 19 nt, Homo sapiens
  misc_RNA (1)...(19): siRNA sense strand
ggauguggucaaccuugua

SEQ ID NO: 635016 - RNA, 19 nt, Homo sapiens
  misc_RNA (1)...(19): siRNA sense strand
gaauaugugcagcagaaag

SEQ ID NO: 635017 - RNA, 19 nt, Homo sapiens
  misc_RNA (1)...(19): siRNA sense strand
gauguggucaaccuuguau

SEQ ID NO: 635018 - RNA, 19 nt, Homo sapiens
  misc_RNA (1)...(19): siRNA sense strand
cagaaagaugagcaguuua

SEQ ID NO: 635019 - RNA, 19 nt, Homo sapiens
  misc_RNA (1)...(19): siRNA sense strand
cgucugaauccaugccaua

SEQ ID NO: 635020 - RNA, 19 nt, Homo sapiens
  misc_RNA (1)...(19): siRNA sense strand
gcgaaucucagcuggaagu

SEQ ID NO: 635021 - RNA, 19 nt, Homo sapiens
  misc_RNA (1)...(19): siRNA sense strand
gugaccaccuggcgaaucu

SEQ ID NO: 635022 - RNA, 19 nt, Homo sapiens
  misc_RNA (1)...(19): siRNA sense strand
auacacaucaucagcagaa

SEQ ID NO: 635023 - RNA, 19 nt, Homo sapiens
  misc_RNA (1)...(19): siRNA sense strand
gggacgagucuggcccuua

SEQ ID NO: 635024 - RNA, 19 nt, Homo sapiens
  misc_RNA (1)...(19): siRNA sense strand
cgaagccacacaaaccauu

SEQ ID NO: 635025 - RNA, 19 nt, Homo sapiens
  misc_RNA (1)...(19): siRNA sense strand
aacuuacuuucccuucuua

SEQ ID NO: 635026 - RNA, 19 nt, Homo sapiens
  misc_RNA (1)...(19): siRNA sense strand
ccaacuuacuuucccuucu

SEQ ID NO: 635027 - RNA, 19 nt, Homo sapiens
  misc_RNA (1)...(19): siRNA sense strand
aaccagcauugaccgauug

SEQ ID NO: 635028 - RNA, 19 nt, Homo sapiens
  misc_RNA (1)...(19): siRNA sense strand
caaaccauugggagugaaa

SEQ ID NO: 635029 - RNA, 19 nt, Homo sapiens
  misc_RNA (1)...(19): siRNA sense strand
gcauugaccgauugaaggu

SEQ ID NO: 635030 - RNA, 19 nt, Homo sapiens
  misc_RNA (1)...(19): siRNA sense strand
cuaauggagcucacucaga

SEQ ID NO: 635031 - RNA, 19 nt, Homo sapiens
  misc_RNA (1)...(19): siRNA sense strand
caucuuccuugcacuggau

SEQ ID NO: 635032 - RNA, 19 nt, Homo sapiens
  misc_RNA (1)...(19): siRNA sense strand
aaauccugcugacuaacaa

SEQ ID NO: 635033 - RNA, 19 nt, Homo sapiens
  misc_RNA (1)...(19): siRNA sense strand
gcccagggaugaggcagau

SEQ ID NO: 635034 - RNA, 19 nt, Homo sapiens
  misc_RNA (1)...(19): siRNA sense strand
ugaagguauuuaaggaagu

SEQ ID NO: 635035 - RNA, 19 nt, Homo sapiens
  misc_RNA (1)...(19): siRNA sense strand
aauaugugcagcagaaaga

SEQ ID NO: 635036 - RNA, 19 nt, Homo sapiens
  misc_RNA (1)...(19): siRNA sense strand
gcaucguggagcacucaua

SEQ ID NO: 635037 - RNA, 19 nt, Homo sapiens
  misc_RNA (1)...(19): siRNA sense strand
gucccuugcuggucuuguu

SEQ ID NO: 635038 - RNA, 19 nt, Homo sapiens
  misc_RNA (1)...(19): siRNA sense strand
ccuugcaaaugguauugaa

SEQ ID NO: 635039 - RNA, 19 nt, Homo sapiens
  misc_RNA (1)...(19): siRNA sense strand
uggaagugguggucaagca

SEQ ID NO: 635040 - RNA, 19 nt, Homo sapiens
  misc_RNA (1)...(19): siRNA sense strand
caagcagagagaacgauug

SEQ ID NO: 635041 - RNA, 19 nt, Homo sapiens
  misc_RNA (1)...(19): siRNA sense strand
ucaagcagagagaacgauu

SEQ ID NO: 635042 - RNA, 19 nt, Homo sapiens
  misc_RNA (1)...(19): siRNA sense strand
ccugcugacuaacaaugaa

SEQ ID NO: 635043 - RNA, 19 nt, Homo sapiens
  misc_RNA (1)...(19): siRNA sense strand
cuuagaacauaugcagcua

SEQ ID NO: 635044 - RNA, 19 nt, Homo sapiens
  misc_RNA (1)...(19): siRNA sense strand
gcuggaggagaaucuaaug

SEQ ID NO: 635045 - RNA, 19 nt, Homo sapiens
  misc_RNA (1)...(19): siRNA sense strand
ugacugcaaccagcauuga

SEQ ID NO: 635046 - RNA, 19 nt, Homo sapiens
  misc_RNA (1)...(19): siRNA sense strand
caaauacuuccgggagaga

SEQ ID NO: 635047 - RNA, 19 nt, Homo sapiens
  misc_RNA (1)...(19): siRNA sense strand
ggaagauccaggaguccau

SEQ ID NO: 635048 - RNA, 19 nt, Homo sapiens
  misc_RNA (1)...(19): siRNA sense strand
gguauuuaaggaaguuaug

SEQ ID NO: 635049 - RNA, 19 nt, Homo sapiens
  misc_RNA (1)...(19): siRNA sense strand
cagcauugaccgauugaag

SEQ ID NO: 635050 - RNA, 19 nt, Homo sapiens
  misc_RNA (1)...(19): siRNA sense strand
ucuacgaagcucugaagaa

SEQ ID NO: 635051 - RNA, 19 nt, Homo sapiens
  misc_RNA (1)...(19): siRNA sense strand
gagcacucauacacaucau

SEQ ID NO: 635052 - RNA, 19 nt, Homo sapiens
  misc_RNA (1)...(19): siRNA sense strand
auccaggaguccauagaaa

SEQ ID NO: 635053 - RNA, 19 nt, Homo sapiens
  misc_RNA (1)...(19): siRNA sense strand
gaaagaugagcaguuuagg

SEQ ID NO: 635054 - RNA, 19 nt, Homo sapiens
  misc_RNA (1)...(19): siRNA sense strand
ggagcuggaggagaaucua

SEQ ID NO: 635055 - RNA, 19 nt, Homo sapiens
  misc_RNA (1)...(19): siRNA sense strand
uggucaaccuuguauacga

SEQ ID NO: 635056 - RNA, 19 nt, Homo sapiens
  misc_RNA (1)...(19): siRNA sense strand
cugaagaagcuuagaacau

SEQ ID NO: 635057 - RNA, 19 nt, Homo sapiens
  misc_RNA (1)...(19): siRNA sense strand
uugcaaaugguauugaaga

SEQ ID NO: 635058 - RNA, 19 nt, Homo sapiens
  misc_RNA (1)...(19): siRNA sense strand
gcagaaagaugagcaguuu

SEQ ID NO: 635059 - RNA, 19 nt, Homo sapiens
  misc_RNA (1)...(19): siRNA sense strand
ugaagaagcuuagaacaua

SEQ ID NO: 635060 - RNA, 19 nt, Homo sapiens
  misc_RNA (1)...(19): siRNA sense strand
gaacauaugcagcuauuga

SEQ ID NO: 635061 - RNA, 19 nt, Homo sapiens
  misc_RNA (1)...(19): siRNA sense strand
gaagaagcuuagaacauau

SEQ ID NO: 635062 - RNA, 19 nt, Homo sapiens
  misc_RNA (1)...(19): siRNA sense strand
ugacaucacacccaacuua

SEQ ID NO: 635063 - RNA, 19 nt, Homo sapiens
  misc_RNA (1)...(19): siRNA sense strand
gaagguauuuaaggaaguu

SEQ ID NO: 635064 - RNA, 19 nt, Homo sapiens
  misc_RNA (1)...(19): siRNA sense strand
caacuuacuuucccuucuu

SEQ ID NO: 635065 - RNA, 19 nt, Homo sapiens
  misc_RNA (1)...(19): siRNA sense strand
gauugaagguauuuaagga

SEQ ID NO: 635066 - RNA, 19 nt, Homo sapiens
  misc_RNA (1)...(19): siRNA sense strand
uaauggagcucacucagau

SEQ ID NO: 635067 - RNA, 19 nt, Homo sapiens
  misc_RNA (1)...(19): siRNA sense strand
cugaagaggccaccaaaua

SEQ ID NO: 635068 - RNA, 19 nt, Homo sapiens
  misc_RNA (1)...(19): siRNA sense strand
aagaaacgcuuuacugaag

SEQ ID NO: 635069 - RNA, 19 nt, Homo sapiens
  misc_RNA (1)...(19): siRNA sense strand
ggacgagucuggcccuuac

SEQ ID NO: 635070 - RNA, 19 nt, Homo sapiens
  misc_RNA (1)...(19): siRNA sense strand
uagaacauaugcagcuauu

SEQ ID NO: 635071 - RNA, 19 nt, Homo sapiens
  misc_RNA (1)...(19): siRNA sense strand
gaugagcaguuuagggaau

SEQ ID NO: 635072 - RNA, 19 nt, Homo sapiens
  misc_RNA (1)...(19): siRNA sense strand
caaccagcauugaccgauu

SEQ ID NO: 635073 - RNA, 19 nt, Homo sapiens
  misc_RNA (1)...(19): siRNA sense strand
ggagcucacucagaucuau

SEQ ID NO: 635074 - RNA, 19 nt, Homo sapiens
  misc_RNA (1)...(19): siRNA sense strand
cuacgaagcucugaagaag

SEQ ID NO: 635075 - RNA, 19 nt, Homo sapiens
  misc_RNA (1)...(19): siRNA sense strand
gaaguuaugcgugacauca

SEQ ID NO: 635076 - RNA, 19 nt, Homo sapiens
  misc_RNA (1)...(19): siRNA sense strand
ggcagaugcucucuacgaa

SEQ ID NO: 635077 - RNA, 19 nt, Homo sapiens
  misc_RNA (1)...(19): siRNA sense strand
gaagauccaggaguccaua

SEQ ID NO: 635078 - RNA, 19 nt, Homo sapiens
  misc_RNA (1)...(19): siRNA sense strand
acgaauaugugcagcagaa

SEQ ID NO: 635079 - RNA, 19 nt, Homo sapiens
  misc_RNA (1)...(19): siRNA sense strand
agucaaagcacuugcauga

SEQ ID NO: 635080 - RNA, 19 nt, Homo sapiens
  misc_RNA (1)...(19): siRNA sense strand
ugcaaauccugcugacuaa

SEQ ID NO: 635081 - RNA, 19 nt, Homo sapiens
  misc_RNA (1)...(19): siRNA sense strand
caaugaagccuggaagaga

SEQ ID NO: 635082 - RNA, 19 nt, Homo sapiens
  misc_RNA (1)...(19): siRNA sense strand
gcacucauacacaucauca

SEQ ID NO: 635083 - RNA, 19 nt, Homo sapiens
  misc_RNA (1)...(19): siRNA sense strand
gaaacgcuuuacugaagag

SEQ ID NO: 635084 - RNA, 19 nt, Homo sapiens
  misc_RNA (1)...(19): siRNA sense strand
gaagaggccaccaaauacu

SEQ ID NO: 635085 - RNA, 19 nt, Homo sapiens
  misc_RNA (1)...(19): siRNA sense strand
cucaggagcuggaggagaa

SEQ ID NO: 635086 - RNA, 19 nt, Homo sapiens
  misc_RNA (1)...(19): siRNA sense strand
cugcaaauccugcugacua

SEQ ID NO: 635087 - RNA, 19 nt, Homo sapiens
  misc_RNA (1)...(19): siRNA sense strand
gauccaggaguccauagaa

SEQ ID NO: 635088 - RNA, 19 nt, Homo sapiens
  misc_RNA (1)...(19): siRNA sense strand
agaaacgcuuuacugaaga

SEQ ID NO: 635089 - RNA, 19 nt, Homo sapiens
  misc_RNA (1)...(19): siRNA sense strand
gaagccacacaaaccauug

SEQ ID NO: 635090 - RNA, 19 nt, Homo sapiens
  misc_RNA (1)...(19): siRNA sense strand
cacagaggcugcaccaucu

SEQ ID NO: 635091 - RNA, 19 nt, Homo sapiens
  misc_RNA (1)...(19): siRNA sense strand
gagcuggaggagaaucuaa

SEQ ID NO: 635092 - RNA, 19 nt, Homo sapiens
  misc_RNA (1)...(19): siRNA sense strand
cacaaaccauugggaguga

SEQ ID NO: 635093 - RNA, 19 nt, Homo sapiens
  misc_RNA (1)...(19): siRNA sense strand
caucacacccaacuuacuu

SEQ ID NO: 635094 - RNA, 19 nt, Homo sapiens
  misc_RNA (1)...(19): siRNA sense strand
ugaggcagaugcucucuac

SEQ ID NO: 635095 - RNA, 19 nt, Homo sapiens
  misc_RNA (1)...(19): siRNA sense strand
aaugaagccuggaagagau

SEQ ID NO: 635096 - RNA, 19 nt, Homo sapiens
  misc_RNA (1)...(19): siRNA sense strand
guggagcacucauacacau

SEQ ID NO: 635097 - RNA, 19 nt, Homo sapiens
  misc_RNA (1)...(19): siRNA sense strand
ugaagaggccaccaaauac

SEQ ID NO: 635098 - RNA, 19 nt, Homo sapiens
  misc_RNA (1)...(19): siRNA sense strand
caaauccugcugacuaaca

SEQ ID NO: 635099 - RNA, 19 nt, Homo sapiens
  misc_RNA (1)...(19): siRNA sense strand
uggcgaaucucagcuggaa

SEQ ID NO: 635100 - RNA, 19 nt, Homo sapiens
  misc_RNA (1)...(19): siRNA sense strand
gcucugaagaagcuuagaa

SEQ ID NO: 635101 - RNA, 19 nt, Homo sapiens
  misc_RNA (1)...(19): siRNA sense strand
ggagcacucauacacauca

SEQ ID NO: 635102 - RNA, 19 nt, Homo sapiens
  misc_RNA (1)...(19): siRNA sense strand
gcugcaccaucuccaaugu

SEQ ID NO: 635103 - RNA, 19 nt, Homo sapiens
  misc_RNA (1)...(19): siRNA sense strand
agaaagaugagcaguuuag

SEQ ID NO: 635104 - RNA, 19 nt, Homo sapiens
  misc_RNA (1)...(19): siRNA sense strand
gcaguuuagggaaugguuu

SEQ ID NO: 635105 - RNA, 19 nt, Homo sapiens
  misc_RNA (1)...(19): siRNA sense strand
ggauguggucaaccuugua

SEQ ID NO: 635106 - RNA, 19 nt, Homo sapiens
  misc_RNA (1)...(19): siRNA sense strand
gaauaugugcagcagaaag

SEQ ID NO: 635107 - RNA, 19 nt, Homo sapiens
  misc_RNA (1)...(19): siRNA sense strand
gauguggucaaccuuguau

SEQ ID NO: 635108 - RNA, 19 nt, Homo sapiens
  misc_RNA (1)...(19): siRNA sense strand
cagaaagaugagcaguuua

SEQ ID NO: 635109 - RNA, 19 nt, Homo sapiens
  misc_RNA (1)...(19): siRNA sense strand
cgucugaauccaugccaua

SEQ ID NO: 635110 - RNA, 19 nt, Homo sapiens
  misc_RNA (1)...(19): siRNA sense strand
gcgaaucucagcuggaagu

SEQ ID NO: 635111 - RNA, 19 nt, Homo sapiens
  misc_RNA (1)...(19): siRNA sense strand
gugaccaccuggcgaaucu

SEQ ID NO: 635112 - RNA, 19 nt, Homo sapiens
  misc_RNA (1)...(19): siRNA sense strand
auacacaucaucagcagaa

SEQ ID NO: 635113 - RNA, 19 nt, Homo sapiens
  misc_RNA (1)...(19): siRNA sense strand
gggacgagucuggcccuua

SEQ ID NO: 635114 - RNA, 19 nt, Homo sapiens
  misc_RNA (1)...(19): siRNA sense strand
cgaagccacacaaaccauu

SEQ ID NO: 635115 - RNA, 19 nt, Homo sapiens
  misc_RNA (1)...(19): siRNA sense strand
aacuuacuuucccuucuua

SEQ ID NO: 635116 - RNA, 19 nt, Homo sapiens
  misc_RNA (1)...(19): siRNA sense strand
ccaacuuacuuucccuucu

SEQ ID NO: 635117 - RNA, 19 nt, Homo sapiens
  misc_RNA (1)...(19): siRNA sense strand
aaccagcauugaccgauug

SEQ ID NO: 635118 - RNA, 19 nt, Homo sapiens
  misc_RNA (1)...(19): siRNA sense strand
caaaccauugggagugaaa

SEQ ID NO: 635119 - RNA, 19 nt, Homo sapiens
  misc_RNA (1)...(19): siRNA sense strand
gcauugaccgauugaaggu

SEQ ID NO: 635120 - RNA, 19 nt, Homo sapiens
  misc_RNA (1)...(19): siRNA sense strand
cuaauggagcucacucaga

SEQ ID NO: 635121 - RNA, 19 nt, Homo sapiens
  misc_RNA (1)...(19): siRNA sense strand
caucuuccuugcacuggau

SEQ ID NO: 635122 - RNA, 19 nt, Homo sapiens
  misc_RNA (1)...(19): siRNA sense strand
aaauccugcugacuaacaa

SEQ ID NO: 635123 - RNA, 19 nt, Homo sapiens
  misc_RNA (1)...(19): siRNA sense strand
gcccagggaugaggcagau

SEQ ID NO: 635124 - RNA, 19 nt, Homo sapiens
  misc_RNA (1)...(19): siRNA sense strand
ugaagguauuuaaggaagu

SEQ ID NO: 635125 - RNA, 19 nt, Homo sapiens
  misc_RNA (1)...(19): siRNA sense strand
aauaugugcagcagaaaga

SEQ ID NO: 635126 - RNA, 19 nt, Homo sapiens
  misc_RNA (1)...(19): siRNA sense strand
gcaucguggagcacucaua

SEQ ID NO: 635127 - RNA, 19 nt, Homo sapiens
  misc_RNA (1)...(19): siRNA sense strand
gucccuugcuggucuuguu

SEQ ID NO: 635128 - RNA, 19 nt, Homo sapiens
  misc_RNA (1)...(19): siRNA sense strand
ccuugcaaaugguauugaa

SEQ ID NO: 635129 - RNA, 19 nt, Homo sapiens
  misc_RNA (1)...(19): siRNA sense strand
uggaagugguggucaagca

SEQ ID NO: 635130 - RNA, 19 nt, Homo sapiens
  misc_RNA (1)...(19): siRNA sense strand
caagcagagagaacgauug

SEQ ID NO: 635131 - RNA, 19 nt, Homo sapiens
  misc_RNA (1)...(19): siRNA sense strand
ucaagcagagagaacgauu

SEQ ID NO: 635132 - RNA, 19 nt, Homo sapiens
  misc_RNA (1)...(19): siRNA sense strand
ccugcugacuaacaaugaa

SEQ ID NO: 635133 - RNA, 19 nt, Homo sapiens
  misc_RNA (1)...(19): siRNA sense strand
cuuagaacauaugcagcua

SEQ ID NO: 635134 - RNA, 19 nt, Homo sapiens
  misc_RNA (1)...(19): siRNA sense strand
gcuggaggagaaucuaaug

SEQ ID NO: 635135 - RNA, 19 nt, Homo sapiens
  misc_RNA (1)...(19): siRNA sense strand
ugacugcaaccagcauuga

SEQ ID NO: 635136 - RNA, 19 nt, Homo sapiens
  misc_RNA (1)...(19): siRNA sense strand
caaauacuuccgggagaga

SEQ ID NO: 635137 - RNA, 19 nt, Homo sapiens
  misc_RNA (1)...(19): siRNA sense strand
ggaagauccaggaguccau

SEQ ID NO: 635138 - RNA, 19 nt, Homo sapiens
  misc_RNA (1)...(19): siRNA sense strand
gguauuuaaggaaguuaug

SEQ ID NO: 635139 - RNA, 19 nt, Homo sapiens
  misc_RNA (1)...(19): siRNA sense strand
cagcauugaccgauugaag

SEQ ID NO: 635140 - RNA, 19 nt, Homo sapiens
  misc_RNA (1)...(19): siRNA sense strand
ucuacgaagcucugaagaa

SEQ ID NO: 635141 - RNA, 19 nt, Homo sapiens
  misc_RNA (1)...(19): siRNA sense strand
gagcacucauacacaucau

SEQ ID NO: 635142 - RNA, 19 nt, Homo sapiens
  misc_RNA (1)...(19): siRNA sense strand
auccaggaguccauagaaa

SEQ ID NO: 635143 - RNA, 19 nt, Homo sapiens
  misc_RNA (1)...(19): siRNA sense strand
gaaagaugagcaguuuagg

SEQ ID NO: 635144 - RNA, 19 nt, Homo sapiens
  misc_RNA (1)...(19): siRNA sense strand
ggagcuggaggagaaucua

SEQ ID NO: 635145 - RNA, 19 nt, Homo sapiens
  misc_RNA (1)...(19): siRNA sense strand
uggucaaccuuguauacga

SEQ ID NO: 635146 - RNA, 19 nt, Homo sapiens
  misc_RNA (1)...(19): siRNA sense strand
cugaagaagcuuagaacau

SEQ ID NO: 635147 - RNA, 19 nt, Homo sapiens
  misc_RNA (1)...(19): siRNA sense strand
uugcaaaugguauugaaga

SEQ ID NO: 635148 - RNA, 19 nt, Homo sapiens
  misc_RNA (1)...(19): siRNA sense strand
gaacgugucugguuauuau

SEQ ID NO: 635149 - RNA, 19 nt, Homo sapiens
  misc_RNA (1)...(19): siRNA sense strand
gcagaaagaugagcaguuu

SEQ ID NO: 635150 - RNA, 19 nt, Homo sapiens
  misc_RNA (1)...(19): siRNA sense strand
ugaagaagcuuagaacaua

SEQ ID NO: 635151 - RNA, 19 nt, Homo sapiens
  misc_RNA (1)...(19): siRNA sense strand
gaacauaugcagcuauuga

SEQ ID NO: 635152 - RNA, 19 nt, Homo sapiens
  misc_RNA (1)...(19): siRNA sense strand
gaagaagcuuagaacauau

SEQ ID NO: 635153 - RNA, 19 nt, Homo sapiens
  misc_RNA (1)...(19): siRNA sense strand
ugacaucacacccaacuua

SEQ ID NO: 635154 - RNA, 19 nt, Homo sapiens
  misc_RNA (1)...(19): siRNA sense strand
gaagguauuuaaggaaguu

SEQ ID NO: 635155 - RNA, 19 nt, Homo sapiens
  misc_RNA (1)...(19): siRNA sense strand
caacuuacuuucccuucuu

SEQ ID NO: 635156 - RNA, 19 nt, Homo sapiens
  misc_RNA (1)...(19): siRNA sense strand
gauugaagguauuuaagga

SEQ ID NO: 635157 - RNA, 19 nt, Homo sapiens
  misc_RNA (1)...(19): siRNA sense strand
uaauggagcucacucagau

SEQ ID NO: 635158 - RNA, 19 nt, Homo sapiens
  misc_RNA (1)...(19): siRNA sense strand
uggagaacgugucugguua

SEQ ID NO: 635159 - RNA, 19 nt, Homo sapiens
  misc_RNA (1)...(19): siRNA sense strand
cugaagaggccaccaaaua

SEQ ID NO: 635160 - RNA, 19 nt, Homo sapiens
  misc_RNA (1)...(19): siRNA sense strand
aagaaacgcuuuacugaag

SEQ ID NO: 635161 - RNA, 19 nt, Homo sapiens
  misc_RNA (1)...(19): siRNA sense strand
ggacgagucuggcccuuac

SEQ ID NO: 635162 - RNA, 19 nt, Homo sapiens
  misc_RNA (1)...(19): siRNA sense strand
uagaacauaugcagcuauu

SEQ ID NO: 635163 - RNA, 19 nt, Homo sapiens
  misc_RNA (1)...(19): siRNA sense strand
gaugagcaguuuagggaau

SEQ ID NO: 635164 - RNA, 19 nt, Homo sapiens
  misc_RNA (1)...(19): siRNA sense strand
caaccagcauugaccgauu

SEQ ID NO: 635165 - RNA, 19 nt, Homo sapiens
  misc_RNA (1)...(19): siRNA sense strand
gagaacgugucugguuauu

SEQ ID NO: 635166 - RNA, 19 nt, Homo sapiens
  misc_RNA (1)...(19): siRNA sense strand
ggagcucacucagaucuau

SEQ ID NO: 635167 - RNA, 19 nt, Homo sapiens
  misc_RNA (1)...(19): siRNA sense strand
cuacgaagcucugaagaag

SEQ ID NO: 635168 - RNA, 19 nt, Homo sapiens
  misc_RNA (1)...(19): siRNA sense strand
gaaguuaugcgugacauca

SEQ ID NO: 635169 - RNA, 19 nt, Homo sapiens
  misc_RNA (1)...(19): siRNA sense strand
ggcagaugcucucuacgaa

SEQ ID NO: 635170 - RNA, 19 nt, Homo sapiens
  misc_RNA (1)...(19): siRNA sense strand
gaagauccaggaguccaua

SEQ ID NO: 635171 - RNA, 19 nt, Homo sapiens
  misc_RNA (1)...(19): siRNA sense strand
acgaauaugugcagcagaa

SEQ ID NO: 635172 - RNA, 19 nt, Homo sapiens
  misc_RNA (1)...(19): siRNA sense strand
agucaaagcacuugcauga

SEQ ID NO: 635173 - RNA, 19 nt, Homo sapiens
  misc_RNA (1)...(19): siRNA sense strand
ugcaaauccugcugacuaa

SEQ ID NO: 635174 - RNA, 19 nt, Homo sapiens
  misc_RNA (1)...(19): siRNA sense strand
caaugaagccuggaagaga

SEQ ID NO: 635175 - RNA, 19 nt, Homo sapiens
  misc_RNA (1)...(19): siRNA sense strand
gcacucauacacaucauca

SEQ ID NO: 635176 - RNA, 19 nt, Homo sapiens
  misc_RNA (1)...(19): siRNA sense strand
gaaacgcuuuacugaagag

SEQ ID NO: 635177 - RNA, 19 nt, Homo sapiens
  misc_RNA (1)...(19): siRNA sense strand
gaagaggccaccaaauacu

SEQ ID NO: 635178 - RNA, 19 nt, Homo sapiens
  misc_RNA (1)...(19): siRNA sense strand
cucaggagcuggaggagaa

SEQ ID NO: 635179 - RNA, 19 nt, Homo sapiens
  misc_RNA (1)...(19): siRNA sense strand
cugcaaauccugcugacua

SEQ ID NO: 635180 - RNA, 19 nt, Homo sapiens
  misc_RNA (1)...(19): siRNA sense strand
ggagaacgugucugguuau

SEQ ID NO: 635181 - RNA, 19 nt, Homo sapiens
  misc_RNA (1)...(19): siRNA sense strand
gauccaggaguccauagaa

SEQ ID NO: 635182 - RNA, 19 nt, Homo sapiens
  misc_RNA (1)...(19): siRNA sense strand
agaaacgcuuuacugaaga

SEQ ID NO: 635183 - RNA, 19 nt, Homo sapiens
  misc_RNA (1)...(19): siRNA sense strand
gaagccacacaaaccauug

SEQ ID NO: 635184 - RNA, 19 nt, Homo sapiens
  misc_RNA (1)...(19): siRNA sense strand
gcucagaacagcuggaucu

SEQ ID NO: 635185 - RNA, 19 nt, Homo sapiens
  misc_RNA (1)...(19): siRNA sense strand
gaucuugcucacacucuuu

SEQ ID NO: 635186 - RNA, 19 nt, Homo sapiens
  misc_RNA (1)...(19): siRNA sense strand
cacagaggcugcaccaucu

SEQ ID NO: 635187 - RNA, 19 nt, Homo sapiens
  misc_RNA (1)...(19): siRNA sense strand
gagcuggaggagaaucuaa

SEQ ID NO: 635188 - RNA, 19 nt, Homo sapiens
  misc_RNA (1)...(19): siRNA sense strand
cacaaaccauugggaguga

SEQ ID NO: 635189 - RNA, 19 nt, Homo sapiens
  misc_RNA (1)...(19): siRNA sense strand
caucacacccaacuuacuu

SEQ ID NO: 635190 - RNA, 19 nt, Homo sapiens
  misc_RNA (1)...(19): siRNA sense strand
aaugaagccuggaagagau

SEQ ID NO: 635191 - RNA, 19 nt, Homo sapiens
  misc_RNA (1)...(19): siRNA sense strand
ggaucuugcucacacucuu

SEQ ID NO: 635192 - RNA, 19 nt, Homo sapiens
  misc_RNA (1)...(19): siRNA sense strand
ugaggcagaugcucucuac

SEQ ID NO: 635193 - RNA, 19 nt, Homo sapiens
  misc_RNA (1)...(19): siRNA sense strand
caaauccugcugacuaaca

SEQ ID NO: 635194 - RNA, 19 nt, Homo sapiens
  misc_RNA (1)...(19): siRNA sense strand
uggcgaaucucagcuggaa

SEQ ID NO: 635195 - RNA, 19 nt, Homo sapiens
  misc_RNA (1)...(19): siRNA sense strand
guggagcacucauacacau

SEQ ID NO: 635196 - RNA, 19 nt, Homo sapiens
  misc_RNA (1)...(19): siRNA sense strand
ugaagaggccaccaaauac

SEQ ID NO: 635197 - RNA, 19 nt, Homo sapiens
  misc_RNA (1)...(19): siRNA sense strand
gcucugaagaagcuuagaa

SEQ ID NO: 635198 - RNA, 19 nt, Homo sapiens
  misc_RNA (1)...(19): siRNA sense strand
ggagcacucauacacauca

SEQ ID NO: 635199 - RNA, 19 nt, Homo sapiens
  misc_RNA (1)...(19): siRNA sense strand
gcugcaccaucuccaaugu

SEQ ID NO: 635200 - RNA, 19 nt, Homo sapiens
  misc_RNA (1)...(19): siRNA sense strand
agaaagaugagcaguuuag

SEQ ID NO: 635201 - RNA, 19 nt, Homo sapiens
  misc_RNA (1)...(19): siRNA sense strand
gcaguuuagggaaugguuu

SEQ ID NO: 635202 - RNA, 19 nt, Homo sapiens
  misc_RNA (1)...(19): siRNA sense strand
ggauguggucaaccuugua

SEQ ID NO: 635203 - RNA, 19 nt, Homo sapiens
  misc_RNA (1)...(19): siRNA sense strand
gaauaugugcagcagaaag

SEQ ID NO: 635204 - RNA, 19 nt, Homo sapiens
  misc_RNA (1)...(19): siRNA sense strand
gauguggucaaccuuguau

SEQ ID NO: 635205 - RNA, 19 nt, Homo sapiens
  misc_RNA (1)...(19): siRNA sense strand
cagaaagaugagcaguuua

SEQ ID NO: 635206 - RNA, 19 nt, Homo sapiens
  misc_RNA (1)...(19): siRNA sense strand
cgucugaauccaugccaua

SEQ ID NO: 635207 - RNA, 19 nt, Homo sapiens
  misc_RNA (1)...(19): siRNA sense strand
gcgaaucucagcuggaagu

SEQ ID NO: 635208 - RNA, 19 nt, Homo sapiens
  misc_RNA (1)...(19): siRNA sense strand
gugaccaccuggcgaaucu

SEQ ID NO: 635209 - RNA, 19 nt, Homo sapiens
  misc_RNA (1)...(19): siRNA sense strand
auacacaucaucagcagaa

SEQ ID NO: 635210 - RNA, 19 nt, Homo sapiens
  misc_RNA (1)...(19): siRNA sense strand
gggacgagucuggcccuua

SEQ ID NO: 635211 - RNA, 19 nt, Homo sapiens
  misc_RNA (1)...(19): siRNA sense strand
cgaagccacacaaaccauu

SEQ ID NO: 635212 - RNA, 19 nt, Homo sapiens
  misc_RNA (1)...(19): siRNA sense strand
aacuuacuuucccuucuua

SEQ ID NO: 635213 - RNA, 19 nt, Homo sapiens
  misc_RNA (1)...(19): siRNA sense strand
ccaacuuacuuucccuucu

SEQ ID NO: 635214 - RNA, 19 nt, Homo sapiens
  misc_RNA (1)...(19): siRNA sense strand
aaccagcauugaccgauug

SEQ ID NO: 635215 - RNA, 19 nt, Homo sapiens
  misc_RNA (1)...(19): siRNA sense strand
caaaccauugggagugaaa

SEQ ID NO: 635216 - RNA, 19 nt, Homo sapiens
  misc_RNA (1)...(19): siRNA sense strand
gcccagggaugaggcagau

SEQ ID NO: 635217 - RNA, 19 nt, Homo sapiens
  misc_RNA (1)...(19): siRNA sense strand
cuaauggagcucacucaga

SEQ ID NO: 635218 - RNA, 19 nt, Homo sapiens
  misc_RNA (1)...(19): siRNA sense strand
caucuuccuugcacuggau

SEQ ID NO: 635219 - RNA, 19 nt, Homo sapiens
  misc_RNA (1)...(19): siRNA sense strand
ugaagguauuuaaggaagu

SEQ ID NO: 635220 - RNA, 19 nt, Homo sapiens
  misc_RNA (1)...(19): siRNA sense strand
gcauugaccgauugaaggu

SEQ ID NO: 635221 - RNA, 19 nt, Homo sapiens
  misc_RNA (1)...(19): siRNA sense strand
aaauccugcugacuaacaa

SEQ ID NO: 635222 - RNA, 19 nt, Homo sapiens
  misc_RNA (1)...(19): siRNA sense strand
aauaugugcagcagaaaga

SEQ ID NO: 635223 - RNA, 19 nt, Homo sapiens
  misc_RNA (1)...(19): siRNA sense strand
gcaucguggagcacucaua

SEQ ID NO: 635224 - RNA, 19 nt, Homo sapiens
  misc_RNA (1)...(19): siRNA sense strand
gucccuugcuggucuuguu

SEQ ID NO: 635225 - RNA, 19 nt, Homo sapiens
  misc_RNA (1)...(19): siRNA sense strand
ccuugcaaaugguauugaa

SEQ ID NO: 635226 - RNA, 19 nt, Homo sapiens
  misc_RNA (1)...(19): siRNA sense strand
uggaagugguggucaagca

SEQ ID NO: 635227 - RNA, 19 nt, Homo sapiens
  misc_RNA (1)...(19): siRNA sense strand
caagcagagagaacgauug

SEQ ID NO: 635228 - RNA, 19 nt, Homo sapiens
  misc_RNA (1)...(19): siRNA sense strand
agaacgugucugguuauua

SEQ ID NO: 635229 - RNA, 19 nt, Homo sapiens
  misc_RNA (1)...(19): siRNA sense strand
ucaagcagagagaacgauu

SEQ ID NO: 635230 - RNA, 19 nt, Homo sapiens
  misc_RNA (1)...(19): siRNA sense strand
ccugcugacuaacaaugaa

SEQ ID NO: 635231 - RNA, 19 nt, Homo sapiens
  misc_RNA (1)...(19): siRNA sense strand
cuuagaacauaugcagcua

SEQ ID NO: 635232 - RNA, 19 nt, Homo sapiens
  misc_RNA (1)...(19): siRNA sense strand
gcuggaggagaaucuaaug

SEQ ID NO: 635233 - RNA, 19 nt, Homo sapiens
  misc_RNA (1)...(19): siRNA sense strand
caaauacuuccgggagaga

SEQ ID NO: 635234 - RNA, 19 nt, Homo sapiens
  misc_RNA (1)...(19): siRNA sense strand
ugacugcaaccagcauuga

SEQ ID NO: 635235 - RNA, 19 nt, Homo sapiens
  misc_RNA (1)...(19): siRNA sense strand
ucagaacagcuggaucuug

SEQ ID NO: 635236 - RNA, 19 nt, Homo sapiens
  misc_RNA (1)...(19): siRNA sense strand
ucuacgaagcucugaagaa

SEQ ID NO: 635237 - RNA, 19 nt, Homo sapiens
  misc_RNA (1)...(19): siRNA sense strand
gguauuuaaggaaguuaug

SEQ ID NO: 635238 - RNA, 19 nt, Homo sapiens
  misc_RNA (1)...(19): siRNA sense strand
cagcauugaccgauugaag

SEQ ID NO: 635239 - RNA, 19 nt, Homo sapiens
  misc_RNA (1)...(19): siRNA sense strand
gagcacucauacacaucau

SEQ ID NO: 635240 - RNA, 19 nt, Homo sapiens
  misc_RNA (1)...(19): siRNA sense strand
auccaggaguccauagaaa

SEQ ID NO: 635241 - RNA, 19 nt, Homo sapiens
  misc_RNA (1)...(19): siRNA sense strand
ggaagauccaggaguccau

SEQ ID NO: 635242 - RNA, 19 nt, Homo sapiens
  misc_RNA (1)...(19): siRNA sense strand
gaaagaugagcaguuuagg

SEQ ID NO: 635243 - RNA, 19 nt, Homo sapiens
  misc_RNA (1)...(19): siRNA sense strand
ggagcuggaggagaaucua

SEQ ID NO: 635244 - RNA, 19 nt, Homo sapiens
  misc_RNA (1)...(19): siRNA sense strand
uggucaaccuuguauacga

SEQ ID NO: 635245 - RNA, 19 nt, Homo sapiens
  misc_RNA (1)...(19): siRNA sense strand
uugcaaaugguauugaaga

SEQ ID NO: 635246 - RNA, 19 nt, Homo sapiens
  misc_RNA (1)...(19): siRNA sense strand
cugaagaagcuuagaacau

SEQ ID NO: 635247 - RNA, 19 nt, Homo sapiens
  misc_RNA (1)...(19): siRNA sense strand
ugacaucacacccaacuua

SEQ ID NO: 635248 - RNA, 19 nt, Homo sapiens
  misc_RNA (1)...(19): siRNA sense strand
gaagguauuuaaggaaguu

SEQ ID NO: 635249 - RNA, 19 nt, Homo sapiens
  misc_RNA (1)...(19): siRNA sense strand
caacuuacuuucccuucuu

SEQ ID NO: 635250 - RNA, 19 nt, Homo sapiens
  misc_RNA (1)...(19): siRNA sense strand
gauugaagguauuuaagga

SEQ ID NO: 635251 - RNA, 19 nt, Homo sapiens
  misc_RNA (1)...(19): siRNA sense strand
uaauggagcucacucagau

SEQ ID NO: 635252 - RNA, 19 nt, Homo sapiens
  misc_RNA (1)...(19): siRNA sense strand
ggacgagucuggcccuuac

SEQ ID NO: 635253 - RNA, 19 nt, Homo sapiens
  misc_RNA (1)...(19): siRNA sense strand
caaccagcauugaccgauu

SEQ ID NO: 635254 - RNA, 19 nt, Homo sapiens
  misc_RNA (1)...(19): siRNA sense strand
ggagcucacucagaucuau

SEQ ID NO: 635255 - RNA, 19 nt, Homo sapiens
  misc_RNA (1)...(19): siRNA sense strand
gaaguuaugcgugacauca

SEQ ID NO: 635256 - RNA, 19 nt, Homo sapiens
  misc_RNA (1)...(19): siRNA sense strand
agucaaagcacuugcauga

SEQ ID NO: 635257 - RNA, 19 nt, Homo sapiens
  misc_RNA (1)...(19): siRNA sense strand
gcacucauacacaucauca

SEQ ID NO: 635258 - RNA, 19 nt, Homo sapiens
  misc_RNA (1)...(19): siRNA sense strand
cucaggagcuggaggagaa

SEQ ID NO: 635259 - RNA, 19 nt, Homo sapiens
  misc_RNA (1)...(19): siRNA sense strand
gaagccacacaaaccauug

SEQ ID NO: 635260 - RNA, 19 nt, Homo sapiens
  misc_RNA (1)...(19): siRNA sense strand
caucacacccaacuuacuu

SEQ ID NO: 635261 - RNA, 19 nt, Homo sapiens
  misc_RNA (1)...(19): siRNA sense strand
gagcuggaggagaaucuaa

SEQ ID NO: 635262 - RNA, 19 nt, Homo sapiens
  misc_RNA (1)...(19): siRNA sense strand
cacaaaccauugggaguga

SEQ ID NO: 635263 - RNA, 19 nt, Homo sapiens
  misc_RNA (1)...(19): siRNA sense strand
guggagcacucauacacau

SEQ ID NO: 635264 - RNA, 19 nt, Homo sapiens
  misc_RNA (1)...(19): siRNA sense strand
uggcgaaucucagcuggaa

SEQ ID NO: 635265 - RNA, 19 nt, Homo sapiens
  misc_RNA (1)...(19): siRNA sense strand
ggagcacucauacacauca

SEQ ID NO: 635266 - RNA, 19 nt, Homo sapiens
  misc_RNA (1)...(19): siRNA sense strand
ggauguggucaaccuugua

SEQ ID NO: 635267 - RNA, 19 nt, Homo sapiens
  misc_RNA (1)...(19): siRNA sense strand
gauguggucaaccuuguau

SEQ ID NO: 635268 - RNA, 19 nt, Homo sapiens
  misc_RNA (1)...(19): siRNA sense strand
gugaccaccuggcgaaucu

SEQ ID NO: 635269 - RNA, 19 nt, Homo sapiens
  misc_RNA (1)...(19): siRNA sense strand
cgucugaauccaugccaua

SEQ ID NO: 635270 - RNA, 19 nt, Homo sapiens
  misc_RNA (1)...(19): siRNA sense strand
gcgaaucucagcuggaagu

SEQ ID NO: 635271 - RNA, 19 nt, Homo sapiens
  misc_RNA (1)...(19): siRNA sense strand
auacacaucaucagcagaa

SEQ ID NO: 635272 - RNA, 19 nt, Homo sapiens
  misc_RNA (1)...(19): siRNA sense strand
aaccagcauugaccgauug

SEQ ID NO: 635273 - RNA, 19 nt, Homo sapiens
  misc_RNA (1)...(19): siRNA sense strand
gggacgagucuggcccuua

SEQ ID NO: 635274 - RNA, 19 nt, Homo sapiens
  misc_RNA (1)...(19): siRNA sense strand
cgaagccacacaaaccauu

SEQ ID NO: 635275 - RNA, 19 nt, Homo sapiens
  misc_RNA (1)...(19): siRNA sense strand
aacuuacuuucccuucuua

SEQ ID NO: 635276 - RNA, 19 nt, Homo sapiens
  misc_RNA (1)...(19): siRNA sense strand
ccaacuuacuuucccuucu

SEQ ID NO: 635277 - RNA, 19 nt, Homo sapiens
  misc_RNA (1)...(19): siRNA sense strand
caaaccauugggagugaaa

SEQ ID NO: 635278 - RNA, 19 nt, Homo sapiens
  misc_RNA (1)...(19): siRNA sense strand
gcauugaccgauugaaggu

SEQ ID NO: 635279 - RNA, 19 nt, Homo sapiens
  misc_RNA (1)...(19): siRNA sense strand
cuaauggagcucacucaga

SEQ ID NO: 635280 - RNA, 19 nt, Homo sapiens
  misc_RNA (1)...(19): siRNA sense strand
caucuuccuugcacuggau

SEQ ID NO: 635281 - RNA, 19 nt, Homo sapiens
  misc_RNA (1)...(19): siRNA sense strand
ugaagguauuuaaggaagu

SEQ ID NO: 635282 - RNA, 19 nt, Homo sapiens
  misc_RNA (1)...(19): siRNA sense strand
gucccuugcuggucuuguu

SEQ ID NO: 635283 - RNA, 19 nt, Homo sapiens
  misc_RNA (1)...(19): siRNA sense strand
gcaucguggagcacucaua

SEQ ID NO: 635284 - RNA, 19 nt, Homo sapiens
  misc_RNA (1)...(19): siRNA sense strand
uggaagugguggucaagca

SEQ ID NO: 635285 - RNA, 19 nt, Homo sapiens
  misc_RNA (1)...(19): siRNA sense strand
caagcagagagaacgauug

SEQ ID NO: 635286 - RNA, 19 nt, Homo sapiens
  misc_RNA (1)...(19): siRNA sense strand
ucaagcagagagaacgauu

SEQ ID NO: 635287 - RNA, 19 nt, Homo sapiens
  misc_RNA (1)...(19): siRNA sense strand
ugacugcaaccagcauuga

SEQ ID NO: 635288 - RNA, 19 nt, Homo sapiens
  misc_RNA (1)...(19): siRNA sense strand
gcuggaggagaaucuaaug

SEQ ID NO: 635289 - RNA, 19 nt, Homo sapiens
  misc_RNA (1)...(19): siRNA sense strand
cagcauugaccgauugaag

SEQ ID NO: 635290 - RNA, 19 nt, Homo sapiens
  misc_RNA (1)...(19): siRNA sense strand
gagcacucauacacaucau

SEQ ID NO: 635291 - RNA, 19 nt, Homo sapiens
  misc_RNA (1)...(19): siRNA sense strand
gguauuuaaggaaguuaug

SEQ ID NO: 635292 - RNA, 19 nt, Homo sapiens
  misc_RNA (1)...(19): siRNA sense strand
uggucaaccuuguauacga

SEQ ID NO: 635293 - RNA, 19 nt, Homo sapiens
  misc_RNA (1)...(19): siRNA sense strand
ggagcuggaggagaaucua

SEQ ID NO: 635294 - RNA, 19 nt, Homo sapiens
  misc_RNA (1)...(19): siRNA sense strand
ugacaucacacccaacuua

SEQ ID NO: 635295 - RNA, 19 nt, Homo sapiens
  misc_RNA (1)...(19): siRNA sense strand
gaagguauuuaaggaaguu

SEQ ID NO: 635296 - RNA, 19 nt, Homo sapiens
  misc_RNA (1)...(19): siRNA sense strand
caacuuacuuucccuucuu

SEQ ID NO: 635297 - RNA, 19 nt, Homo sapiens
  misc_RNA (1)...(19): siRNA sense strand
gauugaagguauuuaagga

SEQ ID NO: 635298 - RNA, 19 nt, Homo sapiens
  misc_RNA (1)...(19): siRNA sense strand
uaauggagcucacucagau

SEQ ID NO: 635299 - RNA, 19 nt, Homo sapiens
  misc_RNA (1)...(19): siRNA sense strand
ggacgagucuggcccuuac

SEQ ID NO: 635300 - RNA, 19 nt, Homo sapiens
  misc_RNA (1)...(19): siRNA sense strand
caaccagcauugaccgauu

SEQ ID NO: 635301 - RNA, 19 nt, Homo sapiens
  misc_RNA (1)...(19): siRNA sense strand
ggagcucacucagaucuau

SEQ ID NO: 635302 - RNA, 19 nt, Homo sapiens
  misc_RNA (1)...(19): siRNA sense strand
gaaguuaugcgugacauca

SEQ ID NO: 635303 - RNA, 19 nt, Homo sapiens
  misc_RNA (1)...(19): siRNA sense strand
agucaaagcacuugcauga

SEQ ID NO: 635304 - RNA, 19 nt, Homo sapiens
  misc_RNA (1)...(19): siRNA sense strand
gcacucauacacaucauca

SEQ ID NO: 635305 - RNA, 19 nt, Homo sapiens
  misc_RNA (1)...(19): siRNA sense strand
cucaggagcuggaggagaa

SEQ ID NO: 635306 - RNA, 19 nt, Homo sapiens
  misc_RNA (1)...(19): siRNA sense strand
gaagccacacaaaccauug

SEQ ID NO: 635307 - RNA, 19 nt, Homo sapiens
  misc_RNA (1)...(19): siRNA sense strand
caucacacccaacuuacuu

SEQ ID NO: 635308 - RNA, 19 nt, Homo sapiens
  misc_RNA (1)...(19): siRNA sense strand
gagcuggaggagaaucuaa

SEQ ID NO: 635309 - RNA, 19 nt, Homo sapiens
  misc_RNA (1)...(19): siRNA sense strand
cacaaaccauugggaguga

SEQ ID NO: 635310 - RNA, 19 nt, Homo sapiens
  misc_RNA (1)...(19): siRNA sense strand
guggagcacucauacacau

SEQ ID NO: 635311 - RNA, 19 nt, Homo sapiens
  misc_RNA (1)...(19): siRNA sense strand
uggcgaaucucagcuggaa

SEQ ID NO: 635312 - RNA, 19 nt, Homo sapiens
  misc_RNA (1)...(19): siRNA sense strand
ggagcacucauacacauca

SEQ ID NO: 635313 - RNA, 19 nt, Homo sapiens
  misc_RNA (1)...(19): siRNA sense strand
ggauguggucaaccuugua

SEQ ID NO: 635314 - RNA, 19 nt, Homo sapiens
  misc_RNA (1)...(19): siRNA sense strand
gauguggucaaccuuguau

SEQ ID NO: 635315 - RNA, 19 nt, Homo sapiens
  misc_RNA (1)...(19): siRNA sense strand
gugaccaccuggcgaaucu

SEQ ID NO: 635316 - RNA, 19 nt, Homo sapiens
  misc_RNA (1)...(19): siRNA sense strand
cgucugaauccaugccaua

SEQ ID NO: 635317 - RNA, 19 nt, Homo sapiens
  misc_RNA (1)...(19): siRNA sense strand
gcgaaucucagcuggaagu

SEQ ID NO: 635318 - RNA, 19 nt, Homo sapiens
  misc_RNA (1)...(19): siRNA sense strand
auacacaucaucagcagaa

SEQ ID NO: 635319 - RNA, 19 nt, Homo sapiens
  misc_RNA (1)...(19): siRNA sense strand
aaccagcauugaccgauug

SEQ ID NO: 635320 - RNA, 19 nt, Homo sapiens
  misc_RNA (1)...(19): siRNA sense strand
gggacgagucuggcccuua

SEQ ID NO: 635321 - RNA, 19 nt, Homo sapiens
  misc_RNA (1)...(19): siRNA sense strand
cgaagccacacaaaccauu

SEQ ID NO: 635322 - RNA, 19 nt, Homo sapiens
  misc_RNA (1)...(19): siRNA sense strand
aacuuacuuucccuucuua

SEQ ID NO: 635323 - RNA, 19 nt, Homo sapiens
  misc_RNA (1)...(19): siRNA sense strand
ccaacuuacuuucccuucu

SEQ ID NO: 635324 - RNA, 19 nt, Homo sapiens
  misc_RNA (1)...(19): siRNA sense strand
caaaccauugggagugaaa

SEQ ID NO: 635325 - RNA, 19 nt, Homo sapiens
  misc_RNA (1)...(19): siRNA sense strand
gcauugaccgauugaaggu

SEQ ID NO: 635326 - RNA, 19 nt, Homo sapiens
  misc_RNA (1)...(19): siRNA sense strand
cuaauggagcucacucaga

SEQ ID NO: 635327 - RNA, 19 nt, Homo sapiens
  misc_RNA (1)...(19): siRNA sense strand
caucuuccuugcacuggau

SEQ ID NO: 635328 - RNA, 19 nt, Homo sapiens
  misc_RNA (1)...(19): siRNA sense strand
ugaagguauuuaaggaagu

SEQ ID NO: 635329 - RNA, 19 nt, Homo sapiens
  misc_RNA (1)...(19): siRNA sense strand
gucccuugcuggucuuguu

SEQ ID NO: 635330 - RNA, 19 nt, Homo sapiens
  misc_RNA (1)...(19): siRNA sense strand
gcaucguggagcacucaua

SEQ ID NO: 635331 - RNA, 19 nt, Homo sapiens
  misc_RNA (1)...(19): siRNA sense strand
uggaagugguggucaagca

SEQ ID NO: 635332 - RNA, 19 nt, Homo sapiens
  misc_RNA (1)...(19): siRNA sense strand
caagcagagagaacgauug

SEQ ID NO: 635333 - RNA, 19 nt, Homo sapiens
  misc_RNA (1)...(19): siRNA sense strand
ucaagcagagagaacgauu

SEQ ID NO: 635334 - RNA, 19 nt, Homo sapiens
  misc_RNA (1)...(19): siRNA sense strand
ugacugcaaccagcauuga

SEQ ID NO: 635335 - RNA, 19 nt, Homo sapiens
  misc_RNA (1)...(19): siRNA sense strand
gcuggaggagaaucuaaug

SEQ ID NO: 635336 - RNA, 19 nt, Homo sapiens
  misc_RNA (1)...(19): siRNA sense strand
cagcauugaccgauugaag

SEQ ID NO: 635337 - RNA, 19 nt, Homo sapiens
  misc_RNA (1)...(19): siRNA sense strand
gagcacucauacacaucau

SEQ ID NO: 635338 - RNA, 19 nt, Homo sapiens
  misc_RNA (1)...(19): siRNA sense strand
gguauuuaaggaaguuaug

SEQ ID NO: 635339 - RNA, 19 nt, Homo sapiens
  misc_RNA (1)...(19): siRNA sense strand
uggucaaccuuguauacga

SEQ ID NO: 635340 - RNA, 19 nt, Homo sapiens
  misc_RNA (1)...(19): siRNA sense strand
ggagcuggaggagaaucua

SEQ ID NO: 635341 - RNA, 19 nt, Homo sapiens
  misc_RNA (1)...(19): siRNA sense strand
ucacugagcucauguuuga

SEQ ID NO: 635342 - RNA, 19 nt, Homo sapiens
  misc_RNA (1)...(19): siRNA sense strand
ggagauagacuuugagaaa

SEQ ID NO: 635343 - RNA, 19 nt, Homo sapiens
  misc_RNA (1)...(19): siRNA sense strand
gcaagaagcagaacaguug

SEQ ID NO: 635344 - RNA, 19 nt, Homo sapiens
  misc_RNA (1)...(19): siRNA sense strand
cgucagaucuaugugauua

SEQ ID NO: 635345 - RNA, 19 nt, Homo sapiens
  misc_RNA (1)...(19): siRNA sense strand
aaacaguuguggcugaaua

SEQ ID NO: 635346 - RNA, 19 nt, Homo sapiens
  misc_RNA (1)...(19): siRNA sense strand
ucaaagauaugucaguugu

SEQ ID NO: 635347 - RNA, 19 nt, Homo sapiens
  misc_RNA (1)...(19): siRNA sense strand
cagaugaccucgugggauu

SEQ ID NO: 635348 - RNA, 19 nt, Homo sapiens
  misc_RNA (1)...(19): siRNA sense strand
gaaugcagauacagaagga

SEQ ID NO: 635349 - RNA, 19 nt, Homo sapiens
  misc_RNA (1)...(19): siRNA sense strand
ccaagaggcugggagcuuu

SEQ ID NO: 635350 - RNA, 19 nt, Homo sapiens
  misc_RNA (1)...(19): siRNA sense strand
uacaguggcucagauguua

SEQ ID NO: 635351 - RNA, 19 nt, Homo sapiens
  misc_RNA (1)...(19): siRNA sense strand
gcucaaagauaugucaguu

SEQ ID NO: 635352 - RNA, 19 nt, Homo sapiens
  misc_RNA (1)...(19): siRNA sense strand
gaggagccuuccauacaaa

SEQ ID NO: 635353 - RNA, 19 nt, Homo sapiens
  misc_RNA (1)...(19): siRNA sense strand
gaaggguggugguugugaa

SEQ ID NO: 635354 - RNA, 19 nt, Homo sapiens
  misc_RNA (1)...(19): siRNA sense strand
ucaaggagaucguggagau

SEQ ID NO: 635355 - RNA, 19 nt, Homo sapiens
  misc_RNA (1)...(19): siRNA sense strand
gcaagaggcagcagccaaa

SEQ ID NO: 635356 - RNA, 19 nt, Homo sapiens
  misc_RNA (1)...(19): siRNA sense strand
ugacaugacuggccaacug

SEQ ID NO: 635357 - RNA, 19 nt, Homo sapiens
  misc_RNA (1)...(19): siRNA sense strand
uugaugagguucacuauau

SEQ ID NO: 635358 - RNA, 19 nt, Homo sapiens
  misc_RNA (1)...(19): siRNA sense strand
ucaaugaccugcagcucaa

SEQ ID NO: 635359 - RNA, 19 nt, Homo sapiens
  misc_RNA (1)...(19): siRNA sense strand
cgaggagccuuccauacaa

SEQ ID NO: 635360 - RNA, 19 nt, Homo sapiens
  misc_RNA (1)...(19): siRNA sense strand
aaacaugccugcucguaca

SEQ ID NO: 635361 - RNA, 19 nt, Homo sapiens
  misc_RNA (1)...(19): siRNA sense strand
gauacuggguuacaaagag

SEQ ID NO: 635362 - RNA, 19 nt, Homo sapiens
  misc_RNA (1)...(19): siRNA sense strand
aaagauaugucaguuguag

SEQ ID NO: 635363 - RNA, 19 nt, Homo sapiens
  misc_RNA (1)...(19): siRNA sense strand
uggaagaccuaguguugaa

SEQ ID NO: 635364 - RNA, 19 nt, Homo sapiens
  misc_RNA (1)...(19): siRNA sense strand
ugaguuugcugacuggauu

SEQ ID NO: 635365 - RNA, 19 nt, Homo sapiens
  misc_RNA (1)...(19): siRNA sense strand
ugguugagguuguauauga

SEQ ID NO: 635366 - RNA, 19 nt, Homo sapiens
  misc_RNA (1)...(19): siRNA sense strand
gaccacugcuguccaggaa

SEQ ID NO: 635367 - RNA, 19 nt, Homo sapiens
  misc_RNA (1)...(19): siRNA sense strand
acaaaucucucggcuacaa

SEQ ID NO: 635368 - RNA, 19 nt, Homo sapiens
  misc_RNA (1)...(19): siRNA sense strand
gggaggaggugcuuaucau

SEQ ID NO: 635369 - RNA, 19 nt, Homo sapiens
  misc_RNA (1)...(19): siRNA sense strand
gcaugacucugucuuuguc

SEQ ID NO: 635370 - RNA, 19 nt, Homo sapiens
  misc_RNA (1)...(19): siRNA sense strand
gagcucauguuugacaaug

SEQ ID NO: 635371 - RNA, 19 nt, Homo sapiens
  misc_RNA (1)...(19): siRNA sense strand
ccaagcagcccacacauca

SEQ ID NO: 635372 - RNA, 19 nt, Homo sapiens
  misc_RNA (1)...(19): siRNA sense strand
ggaggagccugacaugacu

SEQ ID NO: 635373 - RNA, 19 nt, Homo sapiens
  misc_RNA (1)...(19): siRNA sense strand
gacagcggcuaccuugcua

SEQ ID NO: 635374 - RNA, 19 nt, Homo sapiens
  misc_RNA (1)...(19): siRNA sense strand
gaccugcagcucaaagaua

SEQ ID NO: 635375 - RNA, 19 nt, Homo sapiens
  misc_RNA (1)...(19): siRNA sense strand
ucacacaucugcaggaaaa

SEQ ID NO: 635376 - RNA, 19 nt, Homo sapiens
  misc_RNA (1)...(19): siRNA sense strand
gaggugcccuauccagaug

SEQ ID NO: 635377 - RNA, 19 nt, Homo sapiens
  misc_RNA (1)...(19): siRNA sense strand
ggaggugcuuaucaugcua

SEQ ID NO: 635378 - RNA, 19 nt, Homo sapiens
  misc_RNA (1)...(19): siRNA sense strand
cauaacagaucugaacaca

SEQ ID NO: 635379 - RNA, 19 nt, Homo sapiens
  misc_RNA (1)...(19): siRNA sense strand
gcaaacacgcccagaccuu

SEQ ID NO: 635380 - RNA, 19 nt, Homo sapiens
  misc_RNA (1)...(19): siRNA sense strand
uggagugggucaucuuuga

SEQ ID NO: 635381 - RNA, 19 nt, Homo sapiens
  misc_RNA (1)...(19): siRNA sense strand
acggaucccuggucucuuu

SEQ ID NO: 635382 - RNA, 19 nt, Homo sapiens
  misc_RNA (1)...(19): siRNA sense strand
cggcugcgcuuccuacugu

SEQ ID NO: 635383 - RNA, 19 nt, Homo sapiens
  misc_RNA (1)...(19): siRNA sense strand
caacccuggucuuguguga

SEQ ID NO: 635384 - RNA, 19 nt, Homo sapiens
  misc_RNA (1)...(19): siRNA sense strand
cgaccugccugaauauuac

SEQ ID NO: 635385 - RNA, 19 nt, Homo sapiens
  misc_RNA (1)...(19): siRNA sense strand
gaggagcuucucugaguuu

SEQ ID NO: 635386 - RNA, 19 nt, Homo sapiens
  misc_RNA (1)...(19): siRNA sense strand
guaaacaugccugcucgua

SEQ ID NO: 635387 - RNA, 19 nt, Homo sapiens
  misc_RNA (1)...(19): siRNA sense strand
caugcuaccugaccacguu

SEQ ID NO: 635388 - RNA, 19 nt, Homo sapiens
  misc_RNA (1)...(19): siRNA sense strand
gaacccaccauaacagauc

SEQ ID NO: 635389 - RNA, 19 nt, Homo sapiens
  misc_RNA (1)...(19): siRNA sense strand
acacuaugauccucaacuu

SEQ ID NO: 635390 - RNA, 19 nt, Homo sapiens
  misc_RNA (1)...(19): siRNA sense strand
gaccugcaccgcaugauga

SEQ ID NO: 635391 - RNA, 19 nt, Homo sapiens
  misc_RNA (1)...(19): siRNA sense strand
caaacacgcccagaccuuu

SEQ ID NO: 635392 - RNA, 19 nt, Homo sapiens
  misc_RNA (1)...(19): siRNA sense strand
guacaguggcucagauguu

SEQ ID NO: 635393 - RNA, 19 nt, Homo sapiens
  misc_RNA (1)...(19): siRNA sense strand
gcucacacaucugcaggaa

SEQ ID NO: 635394 - RNA, 19 nt, Homo sapiens
  misc_RNA (1)...(19): siRNA sense strand
aggaggagauagacuuuga

SEQ ID NO: 635395 - RNA, 19 nt, Homo sapiens
  misc_RNA (1)...(19): siRNA sense strand
ugaagaaucaggagcauca

SEQ ID NO: 635396 - RNA, 19 nt, Homo sapiens
  misc_RNA (1)...(19): siRNA sense strand
ugaacgggcugaagucucu

SEQ ID NO: 635397 - RNA, 19 nt, Homo sapiens
  misc_RNA (1)...(19): siRNA sense strand
ggaugaacccaccauaaca

SEQ ID NO: 635398 - RNA, 19 nt, Homo sapiens
  misc_RNA (1)...(19): siRNA sense strand
gagcgaaugcagauacaga

SEQ ID NO: 635399 - RNA, 19 nt, Homo sapiens
  misc_RNA (1)...(19): siRNA sense strand
acccuggucuugugugaua

SEQ ID NO: 635400 - RNA, 19 nt, Homo sapiens
  misc_RNA (1)...(19): siRNA sense strand
acugggagcugcugaacuu

SEQ ID NO: 635401 - RNA, 19 nt, Homo sapiens
  misc_RNA (1)...(19): siRNA sense strand
ugauuucuaucgccucauu

SEQ ID NO: 635402 - RNA, 19 nt, Homo sapiens
  misc_RNA (1)...(19): siRNA sense strand
cuacaggucuccucgaacu

SEQ ID NO: 635403 - RNA, 19 nt, Homo sapiens
  misc_RNA (1)...(19): siRNA sense strand
ggaagcguccacagcugua

SEQ ID NO: 635404 - RNA, 19 nt, Homo sapiens
  misc_RNA (1)...(19): siRNA sense strand
ccacguuucuaucauccuu

SEQ ID NO: 635405 - RNA, 19 nt, Homo sapiens
  misc_RNA (1)...(19): siRNA sense strand
cggcaugacucugucuuug

SEQ ID NO: 635406 - RNA, 19 nt, Homo sapiens
  misc_RNA (1)...(19): siRNA sense strand
gcucauguuugacaaugca

SEQ ID NO: 635407 - RNA, 19 nt, Homo sapiens
  misc_RNA (1)...(19): siRNA sense strand
acagagacccagcacauga

SEQ ID NO: 635408 - RNA, 19 nt, Homo sapiens
  misc_RNA (1)...(19): siRNA sense strand
ggagacagagcgacuugug

SEQ ID NO: 635409 - RNA, 19 nt, Homo sapiens
  misc_RNA (1)...(19): siRNA sense strand
uggcugaacugaccaagag

SEQ ID NO: 635410 - RNA, 19 nt, Homo sapiens
  misc_RNA (1)...(19): siRNA sense strand
caggaaggguggugguugu

SEQ ID NO: 635411 - RNA, 19 nt, Homo sapiens
  misc_RNA (1)...(19): siRNA sense strand
gaggagauagacuuugaga

SEQ ID NO: 635412 - RNA, 19 nt, Homo sapiens
  misc_RNA (1)...(19): siRNA sense strand
ugaguaccaucagcgagua

SEQ ID NO: 635413 - RNA, 19 nt, Homo sapiens
  misc_RNA (1)...(19): siRNA sense strand
uggucgaccugccugaaua

SEQ ID NO: 635414 - RNA, 19 nt, Homo sapiens
  misc_RNA (1)...(19): siRNA sense strand
gaguuucccucccgcaaag

SEQ ID NO: 635415 - RNA, 19 nt, Homo sapiens
  misc_RNA (1)...(19): siRNA sense strand
gccaagaaggagagaauga

SEQ ID NO: 635416 - RNA, 19 nt, Homo sapiens
  misc_RNA (1)...(19): siRNA sense strand
gaagcgucgucagaucuau

SEQ ID NO: 635417 - RNA, 19 nt, Homo sapiens
  misc_RNA (1)...(19): siRNA sense strand
uguuggagccucuggauuu

SEQ ID NO: 635418 - RNA, 19 nt, Homo sapiens
  misc_RNA (1)...(19): siRNA sense strand
gcgccuggcugagaugugu

SEQ ID NO: 635419 - RNA, 19 nt, Homo sapiens
  misc_RNA (1)...(19): siRNA sense strand
ugacagagacccagcacau

SEQ ID NO: 635420 - RNA, 19 nt, Homo sapiens
  misc_RNA (1)...(19): siRNA sense strand
agccagauguguuucagaa

SEQ ID NO: 635421 - RNA, 19 nt, Homo sapiens
  misc_RNA (1)...(19): siRNA sense strand
gugacgaggaugagaauga

SEQ ID NO: 635422 - RNA, 19 nt, Homo sapiens
  misc_RNA (1)...(19): siRNA sense strand
ugucgcagcucacacaucu

SEQ ID NO: 635423 - RNA, 19 nt, Homo sapiens
  misc_RNA (1)...(19): siRNA sense strand
ggguggugguugugaagaa

SEQ ID NO: 635424 - RNA, 19 nt, Homo sapiens
  misc_RNA (1)...(19): siRNA sense strand
ugaccacguuucuaucauc

SEQ ID NO: 635425 - RNA, 19 nt, Homo sapiens
  misc_RNA (1)...(19): siRNA sense strand
caaagauaugucaguugua

SEQ ID NO: 635426 - RNA, 19 nt, Homo sapiens
  misc_RNA (1)...(19): siRNA sense strand
ccaaggugcuccgggugaa

SEQ ID NO: 635427 - RNA, 19 nt, Homo sapiens
  misc_RNA (1)...(19): siRNA sense strand
guuggagccucuggauuug

SEQ ID NO: 635428 - RNA, 19 nt, Homo sapiens
  misc_RNA (1)...(19): siRNA sense strand
gaaccagacgguggaggaa

SEQ ID NO: 635429 - RNA, 19 nt, Homo sapiens
  misc_RNA (1)...(19): siRNA sense strand
caugccugcucguacagua

SEQ ID NO: 635430 - RNA, 19 nt, Homo sapiens
  misc_RNA (1)...(19): siRNA sense strand
ccgaggagccuuccauaca

SEQ ID NO: 635431 - RNA, 19 nt, Homo sapiens
  misc_RNA (1)...(19): siRNA sense strand
ccaacgcccuugaguuugc

SEQ ID NO: 635432 - RNA, 19 nt, Homo sapiens
  misc_RNA (1)...(19): siRNA sense strand
gaugagguucacuauauca

SEQ ID NO: 635433 - RNA, 19 nt, Homo sapiens
  misc_RNA (1)...(19): siRNA sense strand
ggacuuccgaaacacauuc

SEQ ID NO: 635434 - RNA, 19 nt, Homo sapiens
  misc_RNA (1)...(19): siRNA sense strand
ucgaccugccugaauauua

SEQ ID NO: 635435 - RNA, 19 nt, Homo sapiens
  misc_RNA (1)...(19): siRNA sense strand
gcacucagcccgaaaaugg

SEQ ID NO: 635436 - RNA, 19 nt, Homo sapiens
  misc_RNA (1)...(19): siRNA sense strand
ggaggaggugcuuaucaug

SEQ ID NO: 635437 - RNA, 19 nt, Homo sapiens
  misc_RNA (1)...(19): siRNA sense strand
gcuguacaguggcucagau

SEQ ID NO: 635438 - RNA, 19 nt, Homo sapiens
  misc_RNA (1)...(19): siRNA sense strand
uuggaggacuucagcaaga

SEQ ID NO: 635439 - RNA, 19 nt, Homo sapiens
  misc_RNA (1)...(19): siRNA sense strand
ggaaggguggugguuguga

SEQ ID NO: 635440 - RNA, 19 nt, Homo sapiens
  misc_RNA (1)...(19): siRNA sense strand
cagcaaggcccaugaacag

SEQ ID NO: 635441 - RNA, 19 nt, Homo sapiens
  misc_RNA (1)...(19): siRNA sense strand
ugaagcagauccuguauuu

SEQ ID NO: 635442 - RNA, 19 nt, Homo sapiens
  misc_RNA (1)...(19): siRNA sense strand
caacuucucugacaaccua

SEQ ID NO: 635443 - RNA, 19 nt, Homo sapiens
  misc_RNA (1)...(19): siRNA sense strand
gaagaacacauaacuaaga

SEQ ID NO: 635444 - RNA, 19 nt, Homo sapiens
  misc_RNA (1)...(19): siRNA sense strand
ggacggagcugaagaccau

SEQ ID NO: 635445 - RNA, 19 nt, Homo sapiens
  misc_RNA (1)...(19): siRNA sense strand
ggaaggcucugguggagaa

SEQ ID NO: 635446 - RNA, 19 nt, Homo sapiens
  misc_RNA (1)...(19): siRNA sense strand
aaagagagcugccucagau

SEQ ID NO: 635447 - RNA, 19 nt, Homo sapiens
  misc_RNA (1)...(19): siRNA sense strand
gcagaaccuuuguguaaau

SEQ ID NO: 635448 - RNA, 19 nt, Homo sapiens
  misc_RNA (1)...(19): siRNA sense strand
gaagauggccuacuuggau

SEQ ID NO: 635449 - RNA, 19 nt, Homo sapiens
  misc_RNA (1)...(19): siRNA sense strand
gaauccagcugugcacuuu

SEQ ID NO: 635450 - RNA, 19 nt, Homo sapiens
  misc_RNA (1)...(19): siRNA sense strand
gaagaagcgugaagaagag

SEQ ID NO: 635451 - RNA, 19 nt, Homo sapiens
  misc_RNA (1)...(19): siRNA sense strand
gaaccuuuguguaaaugaa

SEQ ID NO: 635452 - RNA, 19 nt, Homo sapiens
  misc_RNA (1)...(19): siRNA sense strand
gcaggaagaagaagaaaga

SEQ ID NO: 635453 - RNA, 19 nt, Homo sapiens
  misc_RNA (1)...(19): siRNA sense strand
gcagagcuguaccggguuu

SEQ ID NO: 635454 - RNA, 19 nt, Homo sapiens
  misc_RNA (1)...(19): siRNA sense strand
cggcagaaccuuuguguaa

SEQ ID NO: 635455 - RNA, 19 nt, Homo sapiens
  misc_RNA (1)...(19): siRNA sense strand
gaaauucguggcugugcua

SEQ ID NO: 635456 - RNA, 19 nt, Homo sapiens
  misc_RNA (1)...(19): siRNA sense strand
gggaucaacuucucugaca

SEQ ID NO: 635457 - RNA, 19 nt, Homo sapiens
  misc_RNA (1)...(19): siRNA sense strand
ggcagaaccuuuguguaaa

SEQ ID NO: 635458 - RNA, 19 nt, Homo sapiens
  misc_RNA (1)...(19): siRNA sense strand
ccaagaaccugauguaccu

SEQ ID NO: 635459 - RNA, 19 nt, Homo sapiens
  misc_RNA (1)...(19): siRNA sense strand
agaagaagcgugaagaaga

SEQ ID NO: 635460 - RNA, 19 nt, Homo sapiens
  misc_RNA (1)...(19): siRNA sense strand
gaacagaagaagcgugaag

SEQ ID NO: 635461 - RNA, 19 nt, Homo sapiens
  misc_RNA (1)...(19): siRNA sense strand
guggagaaccugugcauga

SEQ ID NO: 635462 - RNA, 19 nt, Homo sapiens
  misc_RNA (1)...(19): siRNA sense strand
aggaagaacacauaacuaa

SEQ ID NO: 635463 - RNA, 19 nt, Homo sapiens
  misc_RNA (1)...(19): siRNA sense strand
gaagaagaagaaagagaga

SEQ ID NO: 635464 - RNA, 19 nt, Homo sapiens
  misc_RNA (1)...(19): siRNA sense strand
gaaagaugaaucccugugu

SEQ ID NO: 635465 - RNA, 19 nt, Homo sapiens
  misc_RNA (1)...(19): siRNA sense strand
gaagguuggugccauccau

SEQ ID NO: 635466 - RNA, 19 nt, Homo sapiens
  misc_RNA (1)...(19): siRNA sense strand
gaggaagaacacauaacua

SEQ ID NO: 635467 - RNA, 19 nt, Homo sapiens
  misc_RNA (1)...(19): siRNA sense strand
gaagaccaucaacgacuuu

SEQ ID NO: 635468 - RNA, 19 nt, Homo sapiens
  misc_RNA (1)...(19): siRNA sense strand
gugcagcgauacugugaga

SEQ ID NO: 635469 - RNA, 19 nt, Homo sapiens
  misc_RNA (1)...(19): siRNA sense strand
caucaacgacuuucucuuc

SEQ ID NO: 635470 - RNA, 19 nt, Homo sapiens
  misc_RNA (1)...(19): siRNA sense strand
gaacuggccccuuacauga

SEQ ID NO: 635471 - RNA, 19 nt, Homo sapiens
  misc_RNA (1)...(19): siRNA sense strand
cgagagugaugaggagaaa

SEQ ID NO: 635472 - RNA, 19 nt, Homo sapiens
  misc_RNA (1)...(19): siRNA sense strand
ggaggaagcagcgagaaga

SEQ ID NO: 635473 - RNA, 19 nt, Homo sapiens
  misc_RNA (1)...(19): siRNA sense strand
uuacucaguuugugcagaa

SEQ ID NO: 635474 - RNA, 19 nt, Homo sapiens
  misc_RNA (1)...(19): siRNA sense strand
ugaagaccaucaacgacuu

SEQ ID NO: 635475 - RNA, 19 nt, Homo sapiens
  misc_RNA (1)...(19): siRNA sense strand
ugauguaccugaagcagau

SEQ ID NO: 635476 - RNA, 19 nt, Homo sapiens
  misc_RNA (1)...(19): siRNA sense strand
aggaugaccuggaggaaga

SEQ ID NO: 635477 - RNA, 19 nt, Homo sapiens
  misc_RNA (1)...(19): siRNA sense strand
gaauucacguuccagaaaa

SEQ ID NO: 635478 - RNA, 19 nt, Homo sapiens
  misc_RNA (1)...(19): siRNA sense strand
guacggagcaguguucuca

SEQ ID NO: 635479 - RNA, 19 nt, Homo sapiens
  misc_RNA (1)...(19): siRNA sense strand
ggaggaagaacacauaacu

SEQ ID NO: 635480 - RNA, 19 nt, Homo sapiens
  misc_RNA (1)...(19): siRNA sense strand
ggccuggguuacucaguuu

SEQ ID NO: 635481 - RNA, 19 nt, Homo sapiens
  misc_RNA (1)...(19): siRNA sense strand
aggagaagauggccuacuu

SEQ ID NO: 635482 - RNA, 19 nt, Homo sapiens
  misc_RNA (1)...(19): siRNA sense strand
ggaagaacacauaacuaag

SEQ ID NO: 635483 - RNA, 19 nt, Homo sapiens
  misc_RNA (1)...(19): siRNA sense strand
ggaucaacuucucugacaa

SEQ ID NO: 635484 - RNA, 19 nt, Homo sapiens
  misc_RNA (1)...(19): siRNA sense strand
ggagagaggccaggugaca

SEQ ID NO: 635485 - RNA, 19 nt, Homo sapiens
  misc_RNA (1)...(19): siRNA sense strand
gcacgacuccuugaaacug

SEQ ID NO: 635486 - RNA, 19 nt, Homo sapiens
  misc_RNA (1)...(19): siRNA sense strand
ggagaagauggccuacuug

SEQ ID NO: 635487 - RNA, 19 nt, Homo sapiens
  misc_RNA (1)...(19): siRNA sense strand
cgaccagcuucuccacuga

SEQ ID NO: 635488 - RNA, 19 nt, Homo sapiens
  misc_RNA (1)...(19): siRNA sense strand
ugcaguacguggagcgaua

SEQ ID NO: 635489 - RNA, 19 nt, Homo sapiens
  misc_RNA (1)...(19): siRNA sense strand
gggugcagcucaaguaugc

SEQ ID NO: 635490 - RNA, 19 nt, Homo sapiens
  misc_RNA (1)...(19): siRNA sense strand
gaugaaucccugugucugu

SEQ ID NO: 635491 - RNA, 19 nt, Homo sapiens
  misc_RNA (1)...(19): siRNA sense strand
uggagaaccugugcaugaa

SEQ ID NO: 635492 - RNA, 19 nt, Homo sapiens
  misc_RNA (1)...(19): siRNA sense strand
gcacugggaaguccuuaag

SEQ ID NO: 635493 - RNA, 19 nt, Homo sapiens
  misc_RNA (1)...(19): siRNA sense strand
gcagcgggaucuccaacca

SEQ ID NO: 635494 - RNA, 19 nt, Homo sapiens
  misc_RNA (1)...(19): siRNA sense strand
ccaugcagccggugucuga

SEQ ID NO: 635495 - RNA, 19 nt, Homo sapiens
  misc_RNA (1)...(19): siRNA sense strand
uggcagaggugaaggacau

SEQ ID NO: 635496 - RNA, 19 nt, Homo sapiens
  misc_RNA (1)...(19): siRNA sense strand
ggaggaggcaggagaagca

SEQ ID NO: 635497 - RNA, 19 nt, Homo sapiens
  misc_RNA (1)...(19): siRNA sense strand
gaggaagcagcgagaagaa

SEQ ID NO: 635498 - RNA, 19 nt, Homo sapiens
  misc_RNA (1)...(19): siRNA sense strand
gaggcacgacuccuugaaa

SEQ ID NO: 635499 - RNA, 19 nt, Homo sapiens
  misc_RNA (1)...(19): siRNA sense strand
ucaggcaccagaaggauuu

SEQ ID NO: 635500 - RNA, 19 nt, Homo sapiens
  misc_RNA (1)...(19): siRNA sense strand
gaagaagaaagagagaauc

SEQ ID NO: 635501 - RNA, 19 nt, Homo sapiens
  misc_RNA (1)...(19): siRNA sense strand
ggaggaaagaugagugaag

SEQ ID NO: 635502 - RNA, 19 nt, Homo sapiens
  misc_RNA (1)...(19): siRNA sense strand
cagaaccuuuguguaaaug

SEQ ID NO: 635503 - RNA, 19 nt, Homo sapiens
  misc_RNA (1)...(19): siRNA sense strand
uguucaaggugcagcgaua

SEQ ID NO: 635504 - RNA, 19 nt, Homo sapiens
  misc_RNA (1)...(19): siRNA sense strand
cagcgauacugugagaaga

SEQ ID NO: 635505 - RNA, 19 nt, Homo sapiens
  misc_RNA (1)...(19): siRNA sense strand
gcaugaaggccgucaacca

SEQ ID NO: 635506 - RNA, 19 nt, Homo sapiens
  misc_RNA (1)...(19): siRNA sense strand
cggccuggguuacucaguu

SEQ ID NO: 635507 - RNA, 19 nt, Homo sapiens
  misc_RNA (1)...(19): siRNA sense strand
gcagcgauacugugagaag

SEQ ID NO: 635508 - RNA, 19 nt, Homo sapiens
  misc_RNA (1)...(19): siRNA sense strand
gaggcaggaagaagaagaa

SEQ ID NO: 635509 - RNA, 19 nt, Homo sapiens
  misc_RNA (1)...(19): siRNA sense strand
uggaugaggaugaggauga

SEQ ID NO: 635510 - RNA, 19 nt, Homo sapiens
  misc_RNA (1)...(19): siRNA sense strand
cccaaguggugaaggaaug

SEQ ID NO: 635511 - RNA, 19 nt, Homo sapiens
  misc_RNA (1)...(19): siRNA sense strand
caggacgacugaagcucuu

SEQ ID NO: 635512 - RNA, 19 nt, Homo sapiens
  misc_RNA (1)...(19): siRNA sense strand
uagguucugugcagcuuau

SEQ ID NO: 635513 - RNA, 19 nt, Homo sapiens
  misc_RNA (1)...(19): siRNA sense strand
ugcaugaggugaagaagag

SEQ ID NO: 635514 - RNA, 19 nt, Homo sapiens
  misc_RNA (1)...(19): siRNA sense strand
ggaccugguggaccgacua

SEQ ID NO: 635515 - RNA, 19 nt, Homo sapiens
  misc_RNA (1)...(19): siRNA sense strand
agagagcugccucagauga

SEQ ID NO: 635516 - RNA, 19 nt, Homo sapiens
  misc_RNA (1)...(19): siRNA sense strand
agacagggacggagcugaa

SEQ ID NO: 635517 - RNA, 19 nt, Homo sapiens
  misc_RNA (1)...(19): siRNA sense strand
aagcagauccuguauuugc

SEQ ID NO: 635518 - RNA, 19 nt, Homo sapiens
  misc_RNA (1)...(19): siRNA sense strand
agaagaagaaagagagaau

SEQ ID NO: 635519 - RNA, 19 nt, Homo sapiens
  misc_RNA (1)...(19): siRNA sense strand
acagggugcagcucaagua

SEQ ID NO: 635520 - RNA, 19 nt, Homo sapiens
  misc_RNA (1)...(19): siRNA sense strand
uacaugaugagaaagauga

SEQ ID NO: 635521 - RNA, 19 nt, Homo sapiens
  misc_RNA (1)...(19): siRNA sense strand
gcuccucucugugguugga

SEQ ID NO: 635522 - RNA, 19 nt, Homo sapiens
  misc_RNA (1)...(19): siRNA sense strand
gaacgguacggagcagugu

SEQ ID NO: 635523 - RNA, 19 nt, Homo sapiens
  misc_RNA (1)...(19): siRNA sense strand
gaagcagauccuguauuug

SEQ ID NO: 635524 - RNA, 19 nt, Homo sapiens
  misc_RNA (1)...(19): siRNA sense strand
ccuggaggaagaacacaua

SEQ ID NO: 635525 - RNA, 19 nt, Homo sapiens
  misc_RNA (1)...(19): siRNA sense strand
gaaucccugugucugucuu

SEQ ID NO: 635526 - RNA, 19 nt, Homo sapiens
  misc_RNA (1)...(19): siRNA sense strand
ucucuuggcuccgugacuu

SEQ ID NO: 635527 - RNA, 19 nt, Homo sapiens
  misc_RNA (1)...(19): siRNA sense strand
gaucaacuucucugacaac

SEQ ID NO: 635528 - RNA, 19 nt, Homo sapiens
  misc_RNA (1)...(19): siRNA sense strand
uaaugaaacacagaagguu

SEQ ID NO: 635529 - RNA, 19 nt, Homo sapiens
  misc_RNA (1)...(19): siRNA sense strand
gaggaggagaagccaaaga

SEQ ID NO: 635530 - RNA, 19 nt, Homo sapiens
  misc_RNA (1)...(19): siRNA sense strand
acagaagaagcgugaagaa

SEQ ID NO: 635531 - RNA, 19 nt, Homo sapiens
  misc_RNA (1)...(19): siRNA sense strand
ggaacuggccccuuacaug

SEQ ID NO: 635532 - RNA, 19 nt, Homo sapiens
  misc_RNA (1)...(19): siRNA sense strand
ugagugaagggaucaacuu

SEQ ID NO: 635533 - RNA, 19 nt, Homo sapiens
  misc_RNA (1)...(19): siRNA sense strand
gagagcugccucagaugau

SEQ ID NO: 635534 - RNA, 19 nt, Homo sapiens
  misc_RNA (1)...(19): siRNA sense strand
cgugaucccuccagacaac

SEQ ID NO: 635535 - RNA, 19 nt, Homo sapiens
  misc_RNA (1)...(19): siRNA sense strand
uggcccaguuugugcauga

SEQ ID NO: 635536 - RNA, 19 nt, Homo sapiens
  misc_RNA (1)...(19): siRNA sense strand
agaagaggcacgacuccuu

SEQ ID NO: 635537 - RNA, 19 nt, Homo sapiens
  misc_RNA (1)...(19): siRNA sense strand
gugcaugaggugaagaaga

SEQ ID NO: 635538 - RNA, 19 nt, Homo sapiens
  misc_RNA (1)...(19): siRNA sense strand
gugguuggaggaaagauga

SEQ ID NO: 635539 - RNA, 19 nt, Homo sapiens
  misc_RNA (1)...(19): siRNA sense strand
uguaaaugaagacgugaaa

SEQ ID NO: 635540 - RNA, 19 nt, Homo sapiens
  misc_RNA (1)...(19): siRNA sense strand
caaggugcagcgauacugu

SEQ ID NO: 635541 - RNA, 19 nt, Homo sapiens
  misc_RNA (1)...(19): siRNA sense strand
ugaagcagauccuguauuu

SEQ ID NO: 635542 - RNA, 19 nt, Homo sapiens
  misc_RNA (1)...(19): siRNA sense strand
caacuucucugacaaccua

SEQ ID NO: 635543 - RNA, 19 nt, Homo sapiens
  misc_RNA (1)...(19): siRNA sense strand
gaagaacacauaacuaaga

SEQ ID NO: 635544 - RNA, 19 nt, Homo sapiens
  misc_RNA (1)...(19): siRNA sense strand
ggacggagcugaagaccau

SEQ ID NO: 635545 - RNA, 19 nt, Homo sapiens
  misc_RNA (1)...(19): siRNA sense strand
ggaaggcucugguggagaa

SEQ ID NO: 635546 - RNA, 19 nt, Homo sapiens
  misc_RNA (1)...(19): siRNA sense strand
aaagagagcugccucagau

SEQ ID NO: 635547 - RNA, 19 nt, Homo sapiens
  misc_RNA (1)...(19): siRNA sense strand
gcagaaccuuuguguaaau

SEQ ID NO: 635548 - RNA, 19 nt, Homo sapiens
  misc_RNA (1)...(19): siRNA sense strand
gaagauggccuacuuggau

SEQ ID NO: 635549 - RNA, 19 nt, Homo sapiens
  misc_RNA (1)...(19): siRNA sense strand
gaauccagcugugcacuuu

SEQ ID NO: 635550 - RNA, 19 nt, Homo sapiens
  misc_RNA (1)...(19): siRNA sense strand
gaagaagcgugaagaagag

SEQ ID NO: 635551 - RNA, 19 nt, Homo sapiens
  misc_RNA (1)...(19): siRNA sense strand
gaaccuuuguguaaaugaa

SEQ ID NO: 635552 - RNA, 19 nt, Homo sapiens
  misc_RNA (1)...(19): siRNA sense strand
gcaggaagaagaagaaaga

SEQ ID NO: 635553 - RNA, 19 nt, Homo sapiens
  misc_RNA (1)...(19): siRNA sense strand
gcagagcuguaccggguuu

SEQ ID NO: 635554 - RNA, 19 nt, Homo sapiens
  misc_RNA (1)...(19): siRNA sense strand
cggcagaaccuuuguguaa

SEQ ID NO: 635555 - RNA, 19 nt, Homo sapiens
  misc_RNA (1)...(19): siRNA sense strand
gaaauucguggcugugcua

SEQ ID NO: 635556 - RNA, 19 nt, Homo sapiens
  misc_RNA (1)...(19): siRNA sense strand
gggaucaacuucucugaca

SEQ ID NO: 635557 - RNA, 19 nt, Homo sapiens
  misc_RNA (1)...(19): siRNA sense strand
ggcagaaccuuuguguaaa

SEQ ID NO: 635558 - RNA, 19 nt, Homo sapiens
  misc_RNA (1)...(19): siRNA sense strand
ccaagaaccugauguaccu

SEQ ID NO: 635559 - RNA, 19 nt, Homo sapiens
  misc_RNA (1)...(19): siRNA sense strand
agaagaagcgugaagaaga

SEQ ID NO: 635560 - RNA, 19 nt, Homo sapiens
  misc_RNA (1)...(19): siRNA sense strand
gaacagaagaagcgugaag

SEQ ID NO: 635561 - RNA, 19 nt, Homo sapiens
  misc_RNA (1)...(19): siRNA sense strand
guggagaaccugugcauga

SEQ ID NO: 635562 - RNA, 19 nt, Homo sapiens
  misc_RNA (1)...(19): siRNA sense strand
aggaagaacacauaacuaa

SEQ ID NO: 635563 - RNA, 19 nt, Homo sapiens
  misc_RNA (1)...(19): siRNA sense strand
gaagaagaagaaagagaga

SEQ ID NO: 635564 - RNA, 19 nt, Homo sapiens
  misc_RNA (1)...(19): siRNA sense strand
gaaagaugaaucccugugu

SEQ ID NO: 635565 - RNA, 19 nt, Homo sapiens
  misc_RNA (1)...(19): siRNA sense strand
gaagguuggugccauccau

SEQ ID NO: 635566 - RNA, 19 nt, Homo sapiens
  misc_RNA (1)...(19): siRNA sense strand
gaggaagaacacauaacua

SEQ ID NO: 635567 - RNA, 19 nt, Homo sapiens
  misc_RNA (1)...(19): siRNA sense strand
gaagaccaucaacgacuuu

SEQ ID NO: 635568 - RNA, 19 nt, Homo sapiens
  misc_RNA (1)...(19): siRNA sense strand
gugcagcgauacugugaga

SEQ ID NO: 635569 - RNA, 19 nt, Homo sapiens
  misc_RNA (1)...(19): siRNA sense strand
caucaacgacuuucucuuc

SEQ ID NO: 635570 - RNA, 19 nt, Homo sapiens
  misc_RNA (1)...(19): siRNA sense strand
gaacuggccccuuacauga

SEQ ID NO: 635571 - RNA, 19 nt, Homo sapiens
  misc_RNA (1)...(19): siRNA sense strand
cgagagugaugaggagaaa

SEQ ID NO: 635572 - RNA, 19 nt, Homo sapiens
  misc_RNA (1)...(19): siRNA sense strand
ggaggaagcagcgagaaga

SEQ ID NO: 635573 - RNA, 19 nt, Homo sapiens
  misc_RNA (1)...(19): siRNA sense strand
uuacucaguuugugcagaa

SEQ ID NO: 635574 - RNA, 19 nt, Homo sapiens
  misc_RNA (1)...(19): siRNA sense strand
ugaagaccaucaacgacuu

SEQ ID NO: 635575 - RNA, 19 nt, Homo sapiens
  misc_RNA (1)...(19): siRNA sense strand
ugauguaccugaagcagau

SEQ ID NO: 635576 - RNA, 19 nt, Homo sapiens
  misc_RNA (1)...(19): siRNA sense strand
aggaugaccuggaggaaga

SEQ ID NO: 635577 - RNA, 19 nt, Homo sapiens
  misc_RNA (1)...(19): siRNA sense strand
gaauucacguuccagaaaa

SEQ ID NO: 635578 - RNA, 19 nt, Homo sapiens
  misc_RNA (1)...(19): siRNA sense strand
guacggagcaguguucuca

SEQ ID NO: 635579 - RNA, 19 nt, Homo sapiens
  misc_RNA (1)...(19): siRNA sense strand
ggaggaagaacacauaacu

SEQ ID NO: 635580 - RNA, 19 nt, Homo sapiens
  misc_RNA (1)...(19): siRNA sense strand
ggccuggguuacucaguuu

SEQ ID NO: 635581 - RNA, 19 nt, Homo sapiens
  misc_RNA (1)...(19): siRNA sense strand
aggagaagauggccuacuu

SEQ ID NO: 635582 - RNA, 19 nt, Homo sapiens
  misc_RNA (1)...(19): siRNA sense strand
ggaagaacacauaacuaag

SEQ ID NO: 635583 - RNA, 19 nt, Homo sapiens
  misc_RNA (1)...(19): siRNA sense strand
ggaucaacuucucugacaa

SEQ ID NO: 635584 - RNA, 19 nt, Homo sapiens
  misc_RNA (1)...(19): siRNA sense strand
ggagagaggccaggugaca

SEQ ID NO: 635585 - RNA, 19 nt, Homo sapiens
  misc_RNA (1)...(19): siRNA sense strand
gcacgacuccuugaaacug

SEQ ID NO: 635586 - RNA, 19 nt, Homo sapiens
  misc_RNA (1)...(19): siRNA sense strand
ggagaagauggccuacuug

SEQ ID NO: 635587 - RNA, 19 nt, Homo sapiens
  misc_RNA (1)...(19): siRNA sense strand
cgaccagcuucuccacuga

SEQ ID NO: 635588 - RNA, 19 nt, Homo sapiens
  misc_RNA (1)...(19): siRNA sense strand
ugcaguacguggagcgaua

SEQ ID NO: 635589 - RNA, 19 nt, Homo sapiens
  misc_RNA (1)...(19): siRNA sense strand
gggugcagcucaaguaugc

SEQ ID NO: 635590 - RNA, 19 nt, Homo sapiens
  misc_RNA (1)...(19): siRNA sense strand
gaugaaucccugugucugu

SEQ ID NO: 635591 - RNA, 19 nt, Homo sapiens
  misc_RNA (1)...(19): siRNA sense strand
uggagaaccugugcaugaa

SEQ ID NO: 635592 - RNA, 19 nt, Homo sapiens
  misc_RNA (1)...(19): siRNA sense strand
gcacugggaaguccuuaag

SEQ ID NO: 635593 - RNA, 19 nt, Homo sapiens
  misc_RNA (1)...(19): siRNA sense strand
gcagcgggaucuccaacca

SEQ ID NO: 635594 - RNA, 19 nt, Homo sapiens
  misc_RNA (1)...(19): siRNA sense strand
ccaugcagccggugucuga

SEQ ID NO: 635595 - RNA, 19 nt, Homo sapiens
  misc_RNA (1)...(19): siRNA sense strand
uggcagaggugaaggacau

SEQ ID NO: 635596 - RNA, 19 nt, Homo sapiens
  misc_RNA (1)...(19): siRNA sense strand
ggaggaggcaggagaagca

SEQ ID NO: 635597 - RNA, 19 nt, Homo sapiens
  misc_RNA (1)...(19): siRNA sense strand
gaggaagcagcgagaagaa

SEQ ID NO: 635598 - RNA, 19 nt, Homo sapiens
  misc_RNA (1)...(19): siRNA sense strand
gaggcacgacuccuugaaa

SEQ ID NO: 635599 - RNA, 19 nt, Homo sapiens
  misc_RNA (1)...(19): siRNA sense strand
ucaggcaccagaaggauuu

SEQ ID NO: 635600 - RNA, 19 nt, Homo sapiens
  misc_RNA (1)...(19): siRNA sense strand
gaagaagaaagagagaauc

SEQ ID NO: 635601 - RNA, 19 nt, Homo sapiens
  misc_RNA (1)...(19): siRNA sense strand
ggaggaaagaugagugaag

SEQ ID NO: 635602 - RNA, 19 nt, Homo sapiens
  misc_RNA (1)...(19): siRNA sense strand
cagaaccuuuguguaaaug

SEQ ID NO: 635603 - RNA, 19 nt, Homo sapiens
  misc_RNA (1)...(19): siRNA sense strand
uguucaaggugcagcgaua

SEQ ID NO: 635604 - RNA, 19 nt, Homo sapiens
  misc_RNA (1)...(19): siRNA sense strand
cagcgauacugugagaaga

SEQ ID NO: 635605 - RNA, 19 nt, Homo sapiens
  misc_RNA (1)...(19): siRNA sense strand
gcaugaaggccgucaacca

SEQ ID NO: 635606 - RNA, 19 nt, Homo sapiens
  misc_RNA (1)...(19): siRNA sense strand
cggccuggguuacucaguu

SEQ ID NO: 635607 - RNA, 19 nt, Homo sapiens
  misc_RNA (1)...(19): siRNA sense strand
gcagcgauacugugagaag

SEQ ID NO: 635608 - RNA, 19 nt, Homo sapiens
  misc_RNA (1)...(19): siRNA sense strand
gaggcaggaagaagaagaa

SEQ ID NO: 635609 - RNA, 19 nt, Homo sapiens
  misc_RNA (1)...(19): siRNA sense strand
uggaugaggaugaggauga

SEQ ID NO: 635610 - RNA, 19 nt, Homo sapiens
  misc_RNA (1)...(19): siRNA sense strand
cccaaguggugaaggaaug

SEQ ID NO: 635611 - RNA, 19 nt, Homo sapiens
  misc_RNA (1)...(19): siRNA sense strand
caggacgacugaagcucuu

SEQ ID NO: 635612 - RNA, 19 nt, Homo sapiens
  misc_RNA (1)...(19): siRNA sense strand
uagguucugugcagcuuau

SEQ ID NO: 635613 - RNA, 19 nt, Homo sapiens
  misc_RNA (1)...(19): siRNA sense strand
ugcaugaggugaagaagag

SEQ ID NO: 635614 - RNA, 19 nt, Homo sapiens
  misc_RNA (1)...(19): siRNA sense strand
ggaccugguggaccgacua

SEQ ID NO: 635615 - RNA, 19 nt, Homo sapiens
  misc_RNA (1)...(19): siRNA sense strand
agagagcugccucagauga

SEQ ID NO: 635616 - RNA, 19 nt, Homo sapiens
  misc_RNA (1)...(19): siRNA sense strand
agacagggacggagcugaa

SEQ ID NO: 635617 - RNA, 19 nt, Homo sapiens
  misc_RNA (1)...(19): siRNA sense strand
aagcagauccuguauuugc

SEQ ID NO: 635618 - RNA, 19 nt, Homo sapiens
  misc_RNA (1)...(19): siRNA sense strand
agaagaagaaagagagaau

SEQ ID NO: 635619 - RNA, 19 nt, Homo sapiens
  misc_RNA (1)...(19): siRNA sense strand
acagggugcagcucaagua

SEQ ID NO: 635620 - RNA, 19 nt, Homo sapiens
  misc_RNA (1)...(19): siRNA sense strand
uacaugaugagaaagauga

SEQ ID NO: 635621 - RNA, 19 nt, Homo sapiens
  misc_RNA (1)...(19): siRNA sense strand
gcuccucucugugguugga

SEQ ID NO: 635622 - RNA, 19 nt, Homo sapiens
  misc_RNA (1)...(19): siRNA sense strand
gaacgguacggagcagugu

SEQ ID NO: 635623 - RNA, 19 nt, Homo sapiens
  misc_RNA (1)...(19): siRNA sense strand
gaagcagauccuguauuug

SEQ ID NO: 635624 - RNA, 19 nt, Homo sapiens
  misc_RNA (1)...(19): siRNA sense strand
ccuggaggaagaacacaua

SEQ ID NO: 635625 - RNA, 19 nt, Homo sapiens
  misc_RNA (1)...(19): siRNA sense strand
gaaucccugugucugucuu

SEQ ID NO: 635626 - RNA, 19 nt, Homo sapiens
  misc_RNA (1)...(19): siRNA sense strand
ucucuuggcuccgugacuu

SEQ ID NO: 635627 - RNA, 19 nt, Homo sapiens
  misc_RNA (1)...(19): siRNA sense strand
gaucaacuucucugacaac

SEQ ID NO: 635628 - RNA, 19 nt, Homo sapiens
  misc_RNA (1)...(19): siRNA sense strand
uaaugaaacacagaagguu

SEQ ID NO: 635629 - RNA, 19 nt, Homo sapiens
  misc_RNA (1)...(19): siRNA sense strand
gaggaggagaagccaaaga

SEQ ID NO: 635630 - RNA, 19 nt, Homo sapiens
  misc_RNA (1)...(19): siRNA sense strand
acagaagaagcgugaagaa

SEQ ID NO: 635631 - RNA, 19 nt, Homo sapiens
  misc_RNA (1)...(19): siRNA sense strand
ggaacuggccccuuacaug

SEQ ID NO: 635632 - RNA, 19 nt, Homo sapiens
  misc_RNA (1)...(19): siRNA sense strand
ugagugaagggaucaacuu

SEQ ID NO: 635633 - RNA, 19 nt, Homo sapiens
  misc_RNA (1)...(19): siRNA sense strand
gagagcugccucagaugau

SEQ ID NO: 635634 - RNA, 19 nt, Homo sapiens
  misc_RNA (1)...(19): siRNA sense strand
cgugaucccuccagacaac

SEQ ID NO: 635635 - RNA, 19 nt, Homo sapiens
  misc_RNA (1)...(19): siRNA sense strand
uggcccaguuugugcauga

SEQ ID NO: 635636 - RNA, 19 nt, Homo sapiens
  misc_RNA (1)...(19): siRNA sense strand
agaagaggcacgacuccuu

SEQ ID NO: 635637 - RNA, 19 nt, Homo sapiens
  misc_RNA (1)...(19): siRNA sense strand
gugcaugaggugaagaaga

SEQ ID NO: 635638 - RNA, 19 nt, Homo sapiens
  misc_RNA (1)...(19): siRNA sense strand
gugguuggaggaaagauga

SEQ ID NO: 635639 - RNA, 19 nt, Homo sapiens
  misc_RNA (1)...(19): siRNA sense strand
uguaaaugaagacgugaaa

SEQ ID NO: 635640 - RNA, 19 nt, Homo sapiens
  misc_RNA (1)...(19): siRNA sense strand
caaggugcagcgauacugu

SEQ ID NO: 635641 - RNA, 19 nt, Homo sapiens
  misc_RNA (1)...(19): siRNA sense strand
gaagaagcgugaagaagag

SEQ ID NO: 635642 - RNA, 19 nt, Homo sapiens
  misc_RNA (1)...(19): siRNA sense strand
gcaggaagaagaagaaaga

SEQ ID NO: 635643 - RNA, 19 nt, Homo sapiens
  misc_RNA (1)...(19): siRNA sense strand
gcagagcuguaccggguuu

SEQ ID NO: 635644 - RNA, 19 nt, Homo sapiens
  misc_RNA (1)...(19): siRNA sense strand
agaagaagcgugaagaaga

SEQ ID NO: 635645 - RNA, 19 nt, Homo sapiens
  misc_RNA (1)...(19): siRNA sense strand
gaacagaagaagcgugaag

SEQ ID NO: 635646 - RNA, 19 nt, Homo sapiens
  misc_RNA (1)...(19): siRNA sense strand
gaagaagaagaaagagaga

SEQ ID NO: 635647 - RNA, 19 nt, Homo sapiens
  misc_RNA (1)...(19): siRNA sense strand
gaagguuggugccauccau

SEQ ID NO: 635648 - RNA, 19 nt, Homo sapiens
  misc_RNA (1)...(19): siRNA sense strand
gaaagaugaaucccugugu

SEQ ID NO: 635649 - RNA, 19 nt, Homo sapiens
  misc_RNA (1)...(19): siRNA sense strand
gaacuggccccuuacauga

SEQ ID NO: 635650 - RNA, 19 nt, Homo sapiens
  misc_RNA (1)...(19): siRNA sense strand
cgagagugaugaggagaaa

SEQ ID NO: 635651 - RNA, 19 nt, Homo sapiens
  misc_RNA (1)...(19): siRNA sense strand
ggaggaagcagcgagaaga

SEQ ID NO: 635652 - RNA, 19 nt, Homo sapiens
  misc_RNA (1)...(19): siRNA sense strand
uuacucaguuugugcagaa

SEQ ID NO: 635653 - RNA, 19 nt, Homo sapiens
  misc_RNA (1)...(19): siRNA sense strand
aggaugaccuggaggaaga

SEQ ID NO: 635654 - RNA, 19 nt, Homo sapiens
  misc_RNA (1)...(19): siRNA sense strand
ggccuggguuacucaguuu

SEQ ID NO: 635655 - RNA, 19 nt, Homo sapiens
  misc_RNA (1)...(19): siRNA sense strand
gcacgacuccuugaaacug

SEQ ID NO: 635656 - RNA, 19 nt, Homo sapiens
  misc_RNA (1)...(19): siRNA sense strand
gggugcagcucaaguaugc

SEQ ID NO: 635657 - RNA, 19 nt, Homo sapiens
  misc_RNA (1)...(19): siRNA sense strand
gcacugggaaguccuuaag

SEQ ID NO: 635658 - RNA, 19 nt, Homo sapiens
  misc_RNA (1)...(19): siRNA sense strand
gaggaagcagcgagaagaa

SEQ ID NO: 635659 - RNA, 19 nt, Homo sapiens
  misc_RNA (1)...(19): siRNA sense strand
gaugaaucccugugucugu

SEQ ID NO: 635660 - RNA, 19 nt, Homo sapiens
  misc_RNA (1)...(19): siRNA sense strand
gaggcacgacuccuugaaa

SEQ ID NO: 635661 - RNA, 19 nt, Homo sapiens
  misc_RNA (1)...(19): siRNA sense strand
gaagaagaaagagagaauc

SEQ ID NO: 635662 - RNA, 19 nt, Homo sapiens
  misc_RNA (1)...(19): siRNA sense strand
cggccuggguuacucaguu

SEQ ID NO: 635663 - RNA, 19 nt, Homo sapiens
  misc_RNA (1)...(19): siRNA sense strand
gaggcaggaagaagaagaa

SEQ ID NO: 635664 - RNA, 19 nt, Homo sapiens
  misc_RNA (1)...(19): siRNA sense strand
uggaugaggaugaggauga

SEQ ID NO: 635665 - RNA, 19 nt, Homo sapiens
  misc_RNA (1)...(19): siRNA sense strand
ggaccugguggaccgacua

SEQ ID NO: 635666 - RNA, 19 nt, Homo sapiens
  misc_RNA (1)...(19): siRNA sense strand
agaagaagaaagagagaau

SEQ ID NO: 635667 - RNA, 19 nt, Homo sapiens
  misc_RNA (1)...(19): siRNA sense strand
acagggugcagcucaagua

SEQ ID NO: 635668 - RNA, 19 nt, Homo sapiens
  misc_RNA (1)...(19): siRNA sense strand
uacaugaugagaaagauga

SEQ ID NO: 635669 - RNA, 19 nt, Homo sapiens
  misc_RNA (1)...(19): siRNA sense strand
ccuggaggaagaacacaua

SEQ ID NO: 635670 - RNA, 19 nt, Homo sapiens
  misc_RNA (1)...(19): siRNA sense strand
ucucuuggcuccgugacuu

SEQ ID NO: 635671 - RNA, 19 nt, Homo sapiens
  misc_RNA (1)...(19): siRNA sense strand
gaaucccugugucugucuu

SEQ ID NO: 635672 - RNA, 19 nt, Homo sapiens
  misc_RNA (1)...(19): siRNA sense strand
uaaugaaacacagaagguu

SEQ ID NO: 635673 - RNA, 19 nt, Homo sapiens
  misc_RNA (1)...(19): siRNA sense strand
acagaagaagcgugaagaa

SEQ ID NO: 635674 - RNA, 19 nt, Homo sapiens
  misc_RNA (1)...(19): siRNA sense strand
ggaacuggccccuuacaug

SEQ ID NO: 635675 - RNA, 19 nt, Homo sapiens
  misc_RNA (1)...(19): siRNA sense strand
agaagaggcacgacuccuu

SEQ ID NO: 635676 - RNA, 19 nt, Homo sapiens
  misc_RNA (1)...(19): siRNA sense strand
gaccugguggaccgacuaa

SEQ ID NO: 635677 - RNA, 19 nt, Homo sapiens
  misc_RNA (1)...(19): siRNA sense strand
ccgaauacgagagugauga

SEQ ID NO: 635678 - RNA, 19 nt, Homo sapiens
  misc_RNA (1)...(19): siRNA sense strand
cuaaugaaacacagaaggu

SEQ ID NO: 635679 - RNA, 19 nt, Homo sapiens
  misc_RNA (1)...(19): siRNA sense strand
cagaagaagcgugaagaag

SEQ ID NO: 635680 - RNA, 19 nt, Homo sapiens
  misc_RNA (1)...(19): siRNA sense strand
ggaugaggaugaggaugac

SEQ ID NO: 635681 - RNA, 19 nt, Homo sapiens
  misc_RNA (1)...(19): siRNA sense strand
cagaguggaugaggaugag

SEQ ID NO: 635682 - RNA, 19 nt, Homo sapiens
  misc_RNA (1)...(19): siRNA sense strand
acugggaaguccuuaaguc

SEQ ID NO: 635683 - RNA, 19 nt, Homo sapiens
  misc_RNA (1)...(19): siRNA sense strand
gagcugguccucgccgaau

SEQ ID NO: 635684 - RNA, 19 nt, Homo sapiens
  misc_RNA (1)...(19): siRNA sense strand
ugaagcagauccuguauuu

SEQ ID NO: 635685 - RNA, 19 nt, Homo sapiens
  misc_RNA (1)...(19): siRNA sense strand
caacuucucugacaaccua

SEQ ID NO: 635686 - RNA, 19 nt, Homo sapiens
  misc_RNA (1)...(19): siRNA sense strand
gaagaacacauaacuaaga

SEQ ID NO: 635687 - RNA, 19 nt, Homo sapiens
  misc_RNA (1)...(19): siRNA sense strand
ggacggagcugaagaccau

SEQ ID NO: 635688 - RNA, 19 nt, Homo sapiens
  misc_RNA (1)...(19): siRNA sense strand
ggaaggcucugguggagaa

SEQ ID NO: 635689 - RNA, 19 nt, Homo sapiens
  misc_RNA (1)...(19): siRNA sense strand
aaagagagcugccucagau

SEQ ID NO: 635690 - RNA, 19 nt, Homo sapiens
  misc_RNA (1)...(19): siRNA sense strand
gcagaaccuuuguguaaau

SEQ ID NO: 635691 - RNA, 19 nt, Homo sapiens
  misc_RNA (1)...(19): siRNA sense strand
gaagauggccuacuuggau

SEQ ID NO: 635692 - RNA, 19 nt, Homo sapiens
  misc_RNA (1)...(19): siRNA sense strand
gaauccagcugugcacuuu

SEQ ID NO: 635693 - RNA, 19 nt, Homo sapiens
  misc_RNA (1)...(19): siRNA sense strand
gaagaagcgugaagaagag

SEQ ID NO: 635694 - RNA, 19 nt, Homo sapiens
  misc_RNA (1)...(19): siRNA sense strand
gaaccuuuguguaaaugaa

SEQ ID NO: 635695 - RNA, 19 nt, Homo sapiens
  misc_RNA (1)...(19): siRNA sense strand
gcaggaagaagaagaaaga

SEQ ID NO: 635696 - RNA, 19 nt, Homo sapiens
  misc_RNA (1)...(19): siRNA sense strand
gcagagcuguaccggguuu

SEQ ID NO: 635697 - RNA, 19 nt, Homo sapiens
  misc_RNA (1)...(19): siRNA sense strand
cggcagaaccuuuguguaa

SEQ ID NO: 635698 - RNA, 19 nt, Homo sapiens
  misc_RNA (1)...(19): siRNA sense strand
gaaauucguggcugugcua

SEQ ID NO: 635699 - RNA, 19 nt, Homo sapiens
  misc_RNA (1)...(19): siRNA sense strand
gggaucaacuucucugaca

SEQ ID NO: 635700 - RNA, 19 nt, Homo sapiens
  misc_RNA (1)...(19): siRNA sense strand
ggcagaaccuuuguguaaa

SEQ ID NO: 635701 - RNA, 19 nt, Homo sapiens
  misc_RNA (1)...(19): siRNA sense strand
ccaagaaccugauguaccu

SEQ ID NO: 635702 - RNA, 19 nt, Homo sapiens
  misc_RNA (1)...(19): siRNA sense strand
agaagaagcgugaagaaga

SEQ ID NO: 635703 - RNA, 19 nt, Homo sapiens
  misc_RNA (1)...(19): siRNA sense strand
gaacagaagaagcgugaag

SEQ ID NO: 635704 - RNA, 19 nt, Homo sapiens
  misc_RNA (1)...(19): siRNA sense strand
guggagaaccugugcauga

SEQ ID NO: 635705 - RNA, 19 nt, Homo sapiens
  misc_RNA (1)...(19): siRNA sense strand
aggaagaacacauaacuaa

SEQ ID NO: 635706 - RNA, 19 nt, Homo sapiens
  misc_RNA (1)...(19): siRNA sense strand
gaagaagaagaaagagaga

SEQ ID NO: 635707 - RNA, 19 nt, Homo sapiens
  misc_RNA (1)...(19): siRNA sense strand
gaaagaugaaucccugugu

SEQ ID NO: 635708 - RNA, 19 nt, Homo sapiens
  misc_RNA (1)...(19): siRNA sense strand
gaagguuggugccauccau

SEQ ID NO: 635709 - RNA, 19 nt, Homo sapiens
  misc_RNA (1)...(19): siRNA sense strand
gaggaagaacacauaacua

SEQ ID NO: 635710 - RNA, 19 nt, Homo sapiens
  misc_RNA (1)...(19): siRNA sense strand
gaagaccaucaacgacuuu

SEQ ID NO: 635711 - RNA, 19 nt, Homo sapiens
  misc_RNA (1)...(19): siRNA sense strand
gugcagcgauacugugaga

SEQ ID NO: 635712 - RNA, 19 nt, Homo sapiens
  misc_RNA (1)...(19): siRNA sense strand
caucaacgacuuucucuuc

SEQ ID NO: 635713 - RNA, 19 nt, Homo sapiens
  misc_RNA (1)...(19): siRNA sense strand
gaacuggccccuuacauga

SEQ ID NO: 635714 - RNA, 19 nt, Homo sapiens
  misc_RNA (1)...(19): siRNA sense strand
cgagagugaugaggagaaa

SEQ ID NO: 635715 - RNA, 19 nt, Homo sapiens
  misc_RNA (1)...(19): siRNA sense strand
ggaggaagcagcgagaaga

SEQ ID NO: 635716 - RNA, 19 nt, Homo sapiens
  misc_RNA (1)...(19): siRNA sense strand
uuacucaguuugugcagaa

SEQ ID NO: 635717 - RNA, 19 nt, Homo sapiens
  misc_RNA (1)...(19): siRNA sense strand
ugaagaccaucaacgacuu

SEQ ID NO: 635718 - RNA, 19 nt, Homo sapiens
  misc_RNA (1)...(19): siRNA sense strand
ugauguaccugaagcagau

SEQ ID NO: 635719 - RNA, 19 nt, Homo sapiens
  misc_RNA (1)...(19): siRNA sense strand
aggaugaccuggaggaaga

SEQ ID NO: 635720 - RNA, 19 nt, Homo sapiens
  misc_RNA (1)...(19): siRNA sense strand
gaauucacguuccagaaaa

SEQ ID NO: 635721 - RNA, 19 nt, Homo sapiens
  misc_RNA (1)...(19): siRNA sense strand
guacggagcaguguucuca

SEQ ID NO: 635722 - RNA, 19 nt, Homo sapiens
  misc_RNA (1)...(19): siRNA sense strand
ggaggaagaacacauaacu

SEQ ID NO: 635723 - RNA, 19 nt, Homo sapiens
  misc_RNA (1)...(19): siRNA sense strand
ggccuggguuacucaguuu

SEQ ID NO: 635724 - RNA, 19 nt, Homo sapiens
  misc_RNA (1)...(19): siRNA sense strand
aggagaagauggccuacuu

SEQ ID NO: 635725 - RNA, 19 nt, Homo sapiens
  misc_RNA (1)...(19): siRNA sense strand
ggaagaacacauaacuaag

SEQ ID NO: 635726 - RNA, 19 nt, Homo sapiens
  misc_RNA (1)...(19): siRNA sense strand
ggaucaacuucucugacaa

SEQ ID NO: 635727 - RNA, 19 nt, Homo sapiens
  misc_RNA (1)...(19): siRNA sense strand
ggagagaggccaggugaca

SEQ ID NO: 635728 - RNA, 19 nt, Homo sapiens
  misc_RNA (1)...(19): siRNA sense strand
gcacgacuccuugaaacug

SEQ ID NO: 635729 - RNA, 19 nt, Homo sapiens
  misc_RNA (1)...(19): siRNA sense strand
ggagaagauggccuacuug

SEQ ID NO: 635730 - RNA, 19 nt, Homo sapiens
  misc_RNA (1)...(19): siRNA sense strand
cgaccagcuucuccacuga

SEQ ID NO: 635731 - RNA, 19 nt, Homo sapiens
  misc_RNA (1)...(19): siRNA sense strand
ugcaguacguggagcgaua

SEQ ID NO: 635732 - RNA, 19 nt, Homo sapiens
  misc_RNA (1)...(19): siRNA sense strand
gggugcagcucaaguaugc

SEQ ID NO: 635733 - RNA, 19 nt, Homo sapiens
  misc_RNA (1)...(19): siRNA sense strand
gaugaaucccugugucugu

SEQ ID NO: 635734 - RNA, 19 nt, Homo sapiens
  misc_RNA (1)...(19): siRNA sense strand
uggagaaccugugcaugaa

SEQ ID NO: 635735 - RNA, 19 nt, Homo sapiens
  misc_RNA (1)...(19): siRNA sense strand
gcacugggaaguccuuaag

SEQ ID NO: 635736 - RNA, 19 nt, Homo sapiens
  misc_RNA (1)...(19): siRNA sense strand
gcagcgggaucuccaacca

SEQ ID NO: 635737 - RNA, 19 nt, Homo sapiens
  misc_RNA (1)...(19): siRNA sense strand
ccaugcagccggugucuga

SEQ ID NO: 635738 - RNA, 19 nt, Homo sapiens
  misc_RNA (1)...(19): siRNA sense strand
uggcagaggugaaggacau

SEQ ID NO: 635739 - RNA, 19 nt, Homo sapiens
  misc_RNA (1)...(19): siRNA sense strand
ggaggaggcaggagaagca

SEQ ID NO: 635740 - RNA, 19 nt, Homo sapiens
  misc_RNA (1)...(19): siRNA sense strand
gaggaagcagcgagaagaa

SEQ ID NO: 635741 - RNA, 19 nt, Homo sapiens
  misc_RNA (1)...(19): siRNA sense strand
gaggcacgacuccuugaaa

SEQ ID NO: 635742 - RNA, 19 nt, Homo sapiens
  misc_RNA (1)...(19): siRNA sense strand
ucaggcaccagaaggauuu

SEQ ID NO: 635743 - RNA, 19 nt, Homo sapiens
  misc_RNA (1)...(19): siRNA sense strand
gaagaagaaagagagaauc

SEQ ID NO: 635744 - RNA, 19 nt, Homo sapiens
  misc_RNA (1)...(19): siRNA sense strand
ggaggaaagaugagugaag

SEQ ID NO: 635745 - RNA, 19 nt, Homo sapiens
  misc_RNA (1)...(19): siRNA sense strand
cagaaccuuuguguaaaug

SEQ ID NO: 635746 - RNA, 19 nt, Homo sapiens
  misc_RNA (1)...(19): siRNA sense strand
uguucaaggugcagcgaua

SEQ ID NO: 635747 - RNA, 19 nt, Homo sapiens
  misc_RNA (1)...(19): siRNA sense strand
cagcgauacugugagaaga

SEQ ID NO: 635748 - RNA, 19 nt, Homo sapiens
  misc_RNA (1)...(19): siRNA sense strand
gcaugaaggccgucaacca

SEQ ID NO: 635749 - RNA, 19 nt, Homo sapiens
  misc_RNA (1)...(19): siRNA sense strand
cggccuggguuacucaguu

SEQ ID NO: 635750 - RNA, 19 nt, Homo sapiens
  misc_RNA (1)...(19): siRNA sense strand
gcagcgauacugugagaag

SEQ ID NO: 635751 - RNA, 19 nt, Homo sapiens
  misc_RNA (1)...(19): siRNA sense strand
gaggcaggaagaagaagaa

SEQ ID NO: 635752 - RNA, 19 nt, Homo sapiens
  misc_RNA (1)...(19): siRNA sense strand
uggaugaggaugaggauga

SEQ ID NO: 635753 - RNA, 19 nt, Homo sapiens
  misc_RNA (1)...(19): siRNA sense strand
cccaaguggugaaggaaug

SEQ ID NO: 635754 - RNA, 19 nt, Homo sapiens
  misc_RNA (1)...(19): siRNA sense strand
caggacgacugaagcucuu

SEQ ID NO: 635755 - RNA, 19 nt, Homo sapiens
  misc_RNA (1)...(19): siRNA sense strand
uagguucugugcagcuuau

SEQ ID NO: 635756 - RNA, 19 nt, Homo sapiens
  misc_RNA (1)...(19): siRNA sense strand
ugcaugaggugaagaagag

SEQ ID NO: 635757 - RNA, 19 nt, Homo sapiens
  misc_RNA (1)...(19): siRNA sense strand
ggaccugguggaccgacua

SEQ ID NO: 635758 - RNA, 19 nt, Homo sapiens
  misc_RNA (1)...(19): siRNA sense strand
agagagcugccucagauga

SEQ ID NO: 635759 - RNA, 19 nt, Homo sapiens
  misc_RNA (1)...(19): siRNA sense strand
agacagggacggagcugaa

SEQ ID NO: 635760 - RNA, 19 nt, Homo sapiens
  misc_RNA (1)...(19): siRNA sense strand
aagcagauccuguauuugc

SEQ ID NO: 635761 - RNA, 19 nt, Homo sapiens
  misc_RNA (1)...(19): siRNA sense strand
agaagaagaaagagagaau

SEQ ID NO: 635762 - RNA, 19 nt, Homo sapiens
  misc_RNA (1)...(19): siRNA sense strand
acagggugcagcucaagua

SEQ ID NO: 635763 - RNA, 19 nt, Homo sapiens
  misc_RNA (1)...(19): siRNA sense strand
uacaugaugagaaagauga

SEQ ID NO: 635764 - RNA, 19 nt, Homo sapiens
  misc_RNA (1)...(19): siRNA sense strand
gcuccucucugugguugga

SEQ ID NO: 635765 - RNA, 19 nt, Homo sapiens
  misc_RNA (1)...(19): siRNA sense strand
gaacgguacggagcagugu

SEQ ID NO: 635766 - RNA, 19 nt, Homo sapiens
  misc_RNA (1)...(19): siRNA sense strand
gaagcagauccuguauuug

SEQ ID NO: 635767 - RNA, 19 nt, Homo sapiens
  misc_RNA (1)...(19): siRNA sense strand
ccuggaggaagaacacaua

SEQ ID NO: 635768 - RNA, 19 nt, Homo sapiens
  misc_RNA (1)...(19): siRNA sense strand
gaaucccugugucugucuu

SEQ ID NO: 635769 - RNA, 19 nt, Homo sapiens
  misc_RNA (1)...(19): siRNA sense strand
ucucuuggcuccgugacuu

SEQ ID NO: 635770 - RNA, 19 nt, Homo sapiens
  misc_RNA (1)...(19): siRNA sense strand
gaucaacuucucugacaac

SEQ ID NO: 635771 - RNA, 19 nt, Homo sapiens
  misc_RNA (1)...(19): siRNA sense strand
uaaugaaacacagaagguu

SEQ ID NO: 635772 - RNA, 19 nt, Homo sapiens
  misc_RNA (1)...(19): siRNA sense strand
gaggaggagaagccaaaga

SEQ ID NO: 635773 - RNA, 19 nt, Homo sapiens
  misc_RNA (1)...(19): siRNA sense strand
acagaagaagcgugaagaa

SEQ ID NO: 635774 - RNA, 19 nt, Homo sapiens
  misc_RNA (1)...(19): siRNA sense strand
ggaacuggccccuuacaug

SEQ ID NO: 635775 - RNA, 19 nt, Homo sapiens
  misc_RNA (1)...(19): siRNA sense strand
ugagugaagggaucaacuu

SEQ ID NO: 635776 - RNA, 19 nt, Homo sapiens
  misc_RNA (1)...(19): siRNA sense strand
gagagcugccucagaugau

SEQ ID NO: 635777 - RNA, 19 nt, Homo sapiens
  misc_RNA (1)...(19): siRNA sense strand
cgugaucccuccagacaac

SEQ ID NO: 635778 - RNA, 19 nt, Homo sapiens
  misc_RNA (1)...(19): siRNA sense strand
uggcccaguuugugcauga

SEQ ID NO: 635779 - RNA, 19 nt, Homo sapiens
  misc_RNA (1)...(19): siRNA sense strand
agaagaggcacgacuccuu

SEQ ID NO: 635780 - RNA, 19 nt, Homo sapiens
  misc_RNA (1)...(19): siRNA sense strand
gugcaugaggugaagaaga

SEQ ID NO: 635781 - RNA, 19 nt, Homo sapiens
  misc_RNA (1)...(19): siRNA sense strand
gugguuggaggaaagauga

SEQ ID NO: 635782 - RNA, 19 nt, Homo sapiens
  misc_RNA (1)...(19): siRNA sense strand
uguaaaugaagacgugaaa

SEQ ID NO: 635783 - RNA, 19 nt, Homo sapiens
  misc_RNA (1)...(19): siRNA sense strand
caaggugcagcgauacugu

SEQ ID NO: 635784 - RNA, 19 nt, Homo sapiens
  misc_RNA (1)...(19): siRNA sense strand
ugaagcagauccuguauuu

SEQ ID NO: 635785 - RNA, 19 nt, Homo sapiens
  misc_RNA (1)...(19): siRNA sense strand
caacuucucugacaaccua

SEQ ID NO: 635786 - RNA, 19 nt, Homo sapiens
  misc_RNA (1)...(19): siRNA sense strand
gaagaacacauaacuaaga

SEQ ID NO: 635787 - RNA, 19 nt, Homo sapiens
  misc_RNA (1)...(19): siRNA sense strand
ggacggagcugaagaccau

SEQ ID NO: 635788 - RNA, 19 nt, Homo sapiens
  misc_RNA (1)...(19): siRNA sense strand
ggaaggcucugguggagaa

SEQ ID NO: 635789 - RNA, 19 nt, Homo sapiens
  misc_RNA (1)...(19): siRNA sense strand
aaagagagcugccucagau

SEQ ID NO: 635790 - RNA, 19 nt, Homo sapiens
  misc_RNA (1)...(19): siRNA sense strand
gcagaaccuuuguguaaau

SEQ ID NO: 635791 - RNA, 19 nt, Homo sapiens
  misc_RNA (1)...(19): siRNA sense strand
gaagauggccuacuuggau

SEQ ID NO: 635792 - RNA, 19 nt, Homo sapiens
  misc_RNA (1)...(19): siRNA sense strand
gaauccagcugugcacuuu

SEQ ID NO: 635793 - RNA, 19 nt, Homo sapiens
  misc_RNA (1)...(19): siRNA sense strand
gaagaagcgugaagaagag

SEQ ID NO: 635794 - RNA, 19 nt, Homo sapiens
  misc_RNA (1)...(19): siRNA sense strand
gaaccuuuguguaaaugaa

SEQ ID NO: 635795 - RNA, 19 nt, Homo sapiens
  misc_RNA (1)...(19): siRNA sense strand
gcaggaagaagaagaaaga

SEQ ID NO: 635796 - RNA, 19 nt, Homo sapiens
  misc_RNA (1)...(19): siRNA sense strand
gcagagcuguaccggguuu

SEQ ID NO: 635797 - RNA, 19 nt, Homo sapiens
  misc_RNA (1)...(19): siRNA sense strand
cggcagaaccuuuguguaa

SEQ ID NO: 635798 - RNA, 19 nt, Homo sapiens
  misc_RNA (1)...(19): siRNA sense strand
gaaauucguggcugugcua

SEQ ID NO: 635799 - RNA, 19 nt, Homo sapiens
  misc_RNA (1)...(19): siRNA sense strand
gggaucaacuucucugaca

SEQ ID NO: 635800 - RNA, 19 nt, Homo sapiens
  misc_RNA (1)...(19): siRNA sense strand
ggcagaaccuuuguguaaa

SEQ ID NO: 635801 - RNA, 19 nt, Homo sapiens
  misc_RNA (1)...(19): siRNA sense strand
ccaagaaccugauguaccu

SEQ ID NO: 635802 - RNA, 19 nt, Homo sapiens
  misc_RNA (1)...(19): siRNA sense strand
agaagaagcgugaagaaga

SEQ ID NO: 635803 - RNA, 19 nt, Homo sapiens
  misc_RNA (1)...(19): siRNA sense strand
gaacagaagaagcgugaag

SEQ ID NO: 635804 - RNA, 19 nt, Homo sapiens
  misc_RNA (1)...(19): siRNA sense strand
guggagaaccugugcauga

SEQ ID NO: 635805 - RNA, 19 nt, Homo sapiens
  misc_RNA (1)...(19): siRNA sense strand
aggaagaacacauaacuaa

SEQ ID NO: 635806 - RNA, 19 nt, Homo sapiens
  misc_RNA (1)...(19): siRNA sense strand
gaagaagaagaaagagaga

SEQ ID NO: 635807 - RNA, 19 nt, Homo sapiens
  misc_RNA (1)...(19): siRNA sense strand
gaaagaugaaucccugugu

SEQ ID NO: 635808 - RNA, 19 nt, Homo sapiens
  misc_RNA (1)...(19): siRNA sense strand
gaagguuggugccauccau

SEQ ID NO: 635809 - RNA, 19 nt, Homo sapiens
  misc_RNA (1)...(19): siRNA sense strand
gaggaagaacacauaacua

SEQ ID NO: 635810 - RNA, 19 nt, Homo sapiens
  misc_RNA (1)...(19): siRNA sense strand
gaagaccaucaacgacuuu

SEQ ID NO: 635811 - RNA, 19 nt, Homo sapiens
  misc_RNA (1)...(19): siRNA sense strand
gugcagcgauacugugaga

SEQ ID NO: 635812 - RNA, 19 nt, Homo sapiens
  misc_RNA (1)...(19): siRNA sense strand
caucaacgacuuucucuuc

SEQ ID NO: 635813 - RNA, 19 nt, Homo sapiens
  misc_RNA (1)...(19): siRNA sense strand
gaacuggccccuuacauga

SEQ ID NO: 635814 - RNA, 19 nt, Homo sapiens
  misc_RNA (1)...(19): siRNA sense strand
cgagagugaugaggagaaa

SEQ ID NO: 635815 - RNA, 19 nt, Homo sapiens
  misc_RNA (1)...(19): siRNA sense strand
ggaggaagcagcgagaaga

SEQ ID NO: 635816 - RNA, 19 nt, Homo sapiens
  misc_RNA (1)...(19): siRNA sense strand
uuacucaguuugugcagaa

SEQ ID NO: 635817 - RNA, 19 nt, Homo sapiens
  misc_RNA (1)...(19): siRNA sense strand
ugaagaccaucaacgacuu

SEQ ID NO: 635818 - RNA, 19 nt, Homo sapiens
  misc_RNA (1)...(19): siRNA sense strand
ugauguaccugaagcagau

SEQ ID NO: 635819 - RNA, 19 nt, Homo sapiens
  misc_RNA (1)...(19): siRNA sense strand
aggaugaccuggaggaaga

SEQ ID NO: 635820 - RNA, 19 nt, Homo sapiens
  misc_RNA (1)...(19): siRNA sense strand
gaauucacguuccagaaaa

SEQ ID NO: 635821 - RNA, 19 nt, Homo sapiens
  misc_RNA (1)...(19): siRNA sense strand
guacggagcaguguucuca

SEQ ID NO: 635822 - RNA, 19 nt, Homo sapiens
  misc_RNA (1)...(19): siRNA sense strand
ggaggaagaacacauaacu

SEQ ID NO: 635823 - RNA, 19 nt, Homo sapiens
  misc_RNA (1)...(19): siRNA sense strand
ggccuggguuacucaguuu

SEQ ID NO: 635824 - RNA, 19 nt, Homo sapiens
  misc_RNA (1)...(19): siRNA sense strand
aggagaagauggccuacuu

SEQ ID NO: 635825 - RNA, 19 nt, Homo sapiens
  misc_RNA (1)...(19): siRNA sense strand
ggaagaacacauaacuaag

SEQ ID NO: 635826 - RNA, 19 nt, Homo sapiens
  misc_RNA (1)...(19): siRNA sense strand
ggaucaacuucucugacaa

SEQ ID NO: 635827 - RNA, 19 nt, Homo sapiens
  misc_RNA (1)...(19): siRNA sense strand
ggagagaggccaggugaca

SEQ ID NO: 635828 - RNA, 19 nt, Homo sapiens
  misc_RNA (1)...(19): siRNA sense strand
gcacgacuccuugaaacug

SEQ ID NO: 635829 - RNA, 19 nt, Homo sapiens
  misc_RNA (1)...(19): siRNA sense strand
ggagaagauggccuacuug

SEQ ID NO: 635830 - RNA, 19 nt, Homo sapiens
  misc_RNA (1)...(19): siRNA sense strand
cgaccagcuucuccacuga

SEQ ID NO: 635831 - RNA, 19 nt, Homo sapiens
  misc_RNA (1)...(19): siRNA sense strand
ugcaguacguggagcgaua

SEQ ID NO: 635832 - RNA, 19 nt, Homo sapiens
  misc_RNA (1)...(19): siRNA sense strand
gggugcagcucaaguaugc

SEQ ID NO: 635833 - RNA, 19 nt, Homo sapiens
  misc_RNA (1)...(19): siRNA sense strand
gaugaaucccugugucugu

SEQ ID NO: 635834 - RNA, 19 nt, Homo sapiens
  misc_RNA (1)...(19): siRNA sense strand
uggagaaccugugcaugaa

SEQ ID NO: 635835 - RNA, 19 nt, Homo sapiens
  misc_RNA (1)...(19): siRNA sense strand
gcacugggaaguccuuaag

SEQ ID NO: 635836 - RNA, 19 nt, Homo sapiens
  misc_RNA (1)...(19): siRNA sense strand
gcagcgggaucuccaacca

SEQ ID NO: 635837 - RNA, 19 nt, Homo sapiens
  misc_RNA (1)...(19): siRNA sense strand
ccaugcagccggugucuga

SEQ ID NO: 635838 - RNA, 19 nt, Homo sapiens
  misc_RNA (1)...(19): siRNA sense strand
uggcagaggugaaggacau

SEQ ID NO: 635839 - RNA, 19 nt, Homo sapiens
  misc_RNA (1)...(19): siRNA sense strand
ggaggaggcaggagaagca

SEQ ID NO: 635840 - RNA, 19 nt, Homo sapiens
  misc_RNA (1)...(19): siRNA sense strand
gaggaagcagcgagaagaa

SEQ ID NO: 635841 - RNA, 19 nt, Homo sapiens
  misc_RNA (1)...(19): siRNA sense strand
gaggcacgacuccuugaaa

SEQ ID NO: 635842 - RNA, 19 nt, Homo sapiens
  misc_RNA (1)...(19): siRNA sense strand
ucaggcaccagaaggauuu

SEQ ID NO: 635843 - RNA, 19 nt, Homo sapiens
  misc_RNA (1)...(19): siRNA sense strand
gaagaagaaagagagaauc

SEQ ID NO: 635844 - RNA, 19 nt, Homo sapiens
  misc_RNA (1)...(19): siRNA sense strand
ggaggaaagaugagugaag

SEQ ID NO: 635845 - RNA, 19 nt, Homo sapiens
  misc_RNA (1)...(19): siRNA sense strand
cagaaccuuuguguaaaug

SEQ ID NO: 635846 - RNA, 19 nt, Homo sapiens
  misc_RNA (1)...(19): siRNA sense strand
uguucaaggugcagcgaua

SEQ ID NO: 635847 - RNA, 19 nt, Homo sapiens
  misc_RNA (1)...(19): siRNA sense strand
cagcgauacugugagaaga

SEQ ID NO: 635848 - RNA, 19 nt, Homo sapiens
  misc_RNA (1)...(19): siRNA sense strand
gcaugaaggccgucaacca

SEQ ID NO: 635849 - RNA, 19 nt, Homo sapiens
  misc_RNA (1)...(19): siRNA sense strand
cggccuggguuacucaguu

SEQ ID NO: 635850 - RNA, 19 nt, Homo sapiens
  misc_RNA (1)...(19): siRNA sense strand
gcagcgauacugugagaag

SEQ ID NO: 635851 - RNA, 19 nt, Homo sapiens
  misc_RNA (1)...(19): siRNA sense strand
gaggcaggaagaagaagaa

SEQ ID NO: 635852 - RNA, 19 nt, Homo sapiens
  misc_RNA (1)...(19): siRNA sense strand
uggaugaggaugaggauga

SEQ ID NO: 635853 - RNA, 19 nt, Homo sapiens
  misc_RNA (1)...(19): siRNA sense strand
cccaaguggugaaggaaug

SEQ ID NO: 635854 - RNA, 19 nt, Homo sapiens
  misc_RNA (1)...(19): siRNA sense strand
caggacgacugaagcucuu

SEQ ID NO: 635855 - RNA, 19 nt, Homo sapiens
  misc_RNA (1)...(19): siRNA sense strand
uagguucugugcagcuuau

SEQ ID NO: 635856 - RNA, 19 nt, Homo sapiens
  misc_RNA (1)...(19): siRNA sense strand
ugcaugaggugaagaagag

SEQ ID NO: 635857 - RNA, 19 nt, Homo sapiens
  misc_RNA (1)...(19): siRNA sense strand
ggaccugguggaccgacua

SEQ ID NO: 635858 - RNA, 19 nt, Homo sapiens
  misc_RNA (1)...(19): siRNA sense strand
agagagcugccucagauga

SEQ ID NO: 635859 - RNA, 19 nt, Homo sapiens
  misc_RNA (1)...(19): siRNA sense strand
agacagggacggagcugaa

SEQ ID NO: 635860 - RNA, 19 nt, Homo sapiens
  misc_RNA (1)...(19): siRNA sense strand
aagcagauccuguauuugc

SEQ ID NO: 635861 - RNA, 19 nt, Homo sapiens
  misc_RNA (1)...(19): siRNA sense strand
agaagaagaaagagagaau

SEQ ID NO: 635862 - RNA, 19 nt, Homo sapiens
  misc_RNA (1)...(19): siRNA sense strand
acagggugcagcucaagua

SEQ ID NO: 635863 - RNA, 19 nt, Homo sapiens
  misc_RNA (1)...(19): siRNA sense strand
uacaugaugagaaagauga

SEQ ID NO: 635864 - RNA, 19 nt, Homo sapiens
  misc_RNA (1)...(19): siRNA sense strand
gcuccucucugugguugga

SEQ ID NO: 635865 - RNA, 19 nt, Homo sapiens
  misc_RNA (1)...(19): siRNA sense strand
gaacgguacggagcagugu

SEQ ID NO: 635866 - RNA, 19 nt, Homo sapiens
  misc_RNA (1)...(19): siRNA sense strand
gaagcagauccuguauuug

SEQ ID NO: 635867 - RNA, 19 nt, Homo sapiens
  misc_RNA (1)...(19): siRNA sense strand
ccuggaggaagaacacaua

SEQ ID NO: 635868 - RNA, 19 nt, Homo sapiens
  misc_RNA (1)...(19): siRNA sense strand
gaaucccugugucugucuu

SEQ ID NO: 635869 - RNA, 19 nt, Homo sapiens
  misc_RNA (1)...(19): siRNA sense strand
ucucuuggcuccgugacuu

SEQ ID NO: 635870 - RNA, 19 nt, Homo sapiens
  misc_RNA (1)...(19): siRNA sense strand
gaucaacuucucugacaac

SEQ ID NO: 635871 - RNA, 19 nt, Homo sapiens
  misc_RNA (1)...(19): siRNA sense strand
uaaugaaacacagaagguu

SEQ ID NO: 635872 - RNA, 19 nt, Homo sapiens
  misc_RNA (1)...(19): siRNA sense strand
gaggaggagaagccaaaga

SEQ ID NO: 635873 - RNA, 19 nt, Homo sapiens
  misc_RNA (1)...(19): siRNA sense strand
acagaagaagcgugaagaa

SEQ ID NO: 635874 - RNA, 19 nt, Homo sapiens
  misc_RNA (1)...(19): siRNA sense strand
ggaacuggccccuuacaug

SEQ ID NO: 635875 - RNA, 19 nt, Homo sapiens
  misc_RNA (1)...(19): siRNA sense strand
ugagugaagggaucaacuu

SEQ ID NO: 635876 - RNA, 19 nt, Homo sapiens
  misc_RNA (1)...(19): siRNA sense strand
gagagcugccucagaugau

SEQ ID NO: 635877 - RNA, 19 nt, Homo sapiens
  misc_RNA (1)...(19): siRNA sense strand
cgugaucccuccagacaac

SEQ ID NO: 635878 - RNA, 19 nt, Homo sapiens
  misc_RNA (1)...(19): siRNA sense strand
uggcccaguuugugcauga

SEQ ID NO: 635879 - RNA, 19 nt, Homo sapiens
  misc_RNA (1)...(19): siRNA sense strand
agaagaggcacgacuccuu

SEQ ID NO: 635880 - RNA, 19 nt, Homo sapiens
  misc_RNA (1)...(19): siRNA sense strand
gugcaugaggugaagaaga

SEQ ID NO: 635881 - RNA, 19 nt, Homo sapiens
  misc_RNA (1)...(19): siRNA sense strand
gugguuggaggaaagauga

SEQ ID NO: 635882 - RNA, 19 nt, Homo sapiens
  misc_RNA (1)...(19): siRNA sense strand
uguaaaugaagacgugaaa

SEQ ID NO: 635883 - RNA, 19 nt, Homo sapiens
  misc_RNA (1)...(19): siRNA sense strand
caaggugcagcgauacugu

SEQ ID NO: 635884 - RNA, 19 nt, Homo sapiens
  misc_RNA (1)...(19): siRNA sense strand
gaagaagcgugaagaagag

SEQ ID NO: 635885 - RNA, 19 nt, Homo sapiens
  misc_RNA (1)...(19): siRNA sense strand
gcaggaagaagaagaaaga

SEQ ID NO: 635886 - RNA, 19 nt, Homo sapiens
  misc_RNA (1)...(19): siRNA sense strand
gcagagcuguaccggguuu

SEQ ID NO: 635887 - RNA, 19 nt, Homo sapiens
  misc_RNA (1)...(19): siRNA sense strand
agaagaagcgugaagaaga

SEQ ID NO: 635888 - RNA, 19 nt, Homo sapiens
  misc_RNA (1)...(19): siRNA sense strand
gaacagaagaagcgugaag

SEQ ID NO: 635889 - RNA, 19 nt, Homo sapiens
  misc_RNA (1)...(19): siRNA sense strand
gaagaagaagaaagagaga

SEQ ID NO: 635890 - RNA, 19 nt, Homo sapiens
  misc_RNA (1)...(19): siRNA sense strand
gaagguuggugccauccau

SEQ ID NO: 635891 - RNA, 19 nt, Homo sapiens
  misc_RNA (1)...(19): siRNA sense strand
gaaagaugaaucccugugu

SEQ ID NO: 635892 - RNA, 19 nt, Homo sapiens
  misc_RNA (1)...(19): siRNA sense strand
gaacuggccccuuacauga

SEQ ID NO: 635893 - RNA, 19 nt, Homo sapiens
  misc_RNA (1)...(19): siRNA sense strand
cgagagugaugaggagaaa

SEQ ID NO: 635894 - RNA, 19 nt, Homo sapiens
  misc_RNA (1)...(19): siRNA sense strand
ggaggaagcagcgagaaga

SEQ ID NO: 635895 - RNA, 19 nt, Homo sapiens
  misc_RNA (1)...(19): siRNA sense strand
uuacucaguuugugcagaa

SEQ ID NO: 635896 - RNA, 19 nt, Homo sapiens
  misc_RNA (1)...(19): siRNA sense strand
aggaugaccuggaggaaga

SEQ ID NO: 635897 - RNA, 19 nt, Homo sapiens
  misc_RNA (1)...(19): siRNA sense strand
ggccuggguuacucaguuu

SEQ ID NO: 635898 - RNA, 19 nt, Homo sapiens
  misc_RNA (1)...(19): siRNA sense strand
gcacgacuccuugaaacug

SEQ ID NO: 635899 - RNA, 19 nt, Homo sapiens
  misc_RNA (1)...(19): siRNA sense strand
gggugcagcucaaguaugc

SEQ ID NO: 635900 - RNA, 19 nt, Homo sapiens
  misc_RNA (1)...(19): siRNA sense strand
gcacugggaaguccuuaag

SEQ ID NO: 635901 - RNA, 19 nt, Homo sapiens
  misc_RNA (1)...(19): siRNA sense strand
gaggaagcagcgagaagaa

SEQ ID NO: 635902 - RNA, 19 nt, Homo sapiens
  misc_RNA (1)...(19): siRNA sense strand
gaugaaucccugugucugu

SEQ ID NO: 635903 - RNA, 19 nt, Homo sapiens
  misc_RNA (1)...(19): siRNA sense strand
gaggcacgacuccuugaaa

SEQ ID NO: 635904 - RNA, 19 nt, Homo sapiens
  misc_RNA (1)...(19): siRNA sense strand
gaagaagaaagagagaauc

SEQ ID NO: 635905 - RNA, 19 nt, Homo sapiens
  misc_RNA (1)...(19): siRNA sense strand
cggccuggguuacucaguu

SEQ ID NO: 635906 - RNA, 19 nt, Homo sapiens
  misc_RNA (1)...(19): siRNA sense strand
gaggcaggaagaagaagaa

SEQ ID NO: 635907 - RNA, 19 nt, Homo sapiens
  misc_RNA (1)...(19): siRNA sense strand
uggaugaggaugaggauga

SEQ ID NO: 635908 - RNA, 19 nt, Homo sapiens
  misc_RNA (1)...(19): siRNA sense strand
ggaccugguggaccgacua

SEQ ID NO: 635909 - RNA, 19 nt, Homo sapiens
  misc_RNA (1)...(19): siRNA sense strand
agaagaagaaagagagaau

SEQ ID NO: 635910 - RNA, 19 nt, Homo sapiens
  misc_RNA (1)...(19): siRNA sense strand
acagggugcagcucaagua

SEQ ID NO: 635911 - RNA, 19 nt, Homo sapiens
  misc_RNA (1)...(19): siRNA sense strand
uacaugaugagaaagauga

SEQ ID NO: 635912 - RNA, 19 nt, Homo sapiens
  misc_RNA (1)...(19): siRNA sense strand
ccuggaggaagaacacaua

SEQ ID NO: 635913 - RNA, 19 nt, Homo sapiens
  misc_RNA (1)...(19): siRNA sense strand
ucucuuggcuccgugacuu

SEQ ID NO: 635914 - RNA, 19 nt, Homo sapiens
  misc_RNA (1)...(19): siRNA sense strand
gaaucccugugucugucuu

SEQ ID NO: 635915 - RNA, 19 nt, Homo sapiens
  misc_RNA (1)...(19): siRNA sense strand
uaaugaaacacagaagguu

SEQ ID NO: 635916 - RNA, 19 nt, Homo sapiens
  misc_RNA (1)...(19): siRNA sense strand
acagaagaagcgugaagaa

SEQ ID NO: 635917 - RNA, 19 nt, Homo sapiens
  misc_RNA (1)...(19): siRNA sense strand
ggaacuggccccuuacaug

SEQ ID NO: 635918 - RNA, 19 nt, Homo sapiens
  misc_RNA (1)...(19): siRNA sense strand
agaagaggcacgacuccuu

SEQ ID NO: 635919 - RNA, 19 nt, Homo sapiens
  misc_RNA (1)...(19): siRNA sense strand
gaccugguggaccgacuaa

SEQ ID NO: 635920 - RNA, 19 nt, Homo sapiens
  misc_RNA (1)...(19): siRNA sense strand
ccgaauacgagagugauga

SEQ ID NO: 635921 - RNA, 19 nt, Homo sapiens
  misc_RNA (1)...(19): siRNA sense strand
cuaaugaaacacagaaggu

SEQ ID NO: 635922 - RNA, 19 nt, Homo sapiens
  misc_RNA (1)...(19): siRNA sense strand
cagaagaagcgugaagaag

SEQ ID NO: 635923 - RNA, 19 nt, Homo sapiens
  misc_RNA (1)...(19): siRNA sense strand
ggaugaggaugaggaugac

SEQ ID NO: 635924 - RNA, 19 nt, Homo sapiens
  misc_RNA (1)...(19): siRNA sense strand
cagaguggaugaggaugag

SEQ ID NO: 635925 - RNA, 19 nt, Homo sapiens
  misc_RNA (1)...(19): siRNA sense strand
acugggaaguccuuaaguc

SEQ ID NO: 635926 - RNA, 19 nt, Homo sapiens
  misc_RNA (1)...(19): siRNA sense strand
gagcugguccucgccgaau

SEQ ID NO: 635927 - RNA, 19 nt, Homo sapiens
  misc_RNA (1)...(19): siRNA sense strand
guacaaaucuuacuucaga

SEQ ID NO: 635928 - RNA, 19 nt, Homo sapiens
  misc_RNA (1)...(19): siRNA sense strand
uaacuugaauucucucuug

SEQ ID NO: 635929 - RNA, 19 nt, Homo sapiens
  misc_RNA (1)...(19): siRNA sense strand
acaggaagguuauucuaua

SEQ ID NO: 635930 - RNA, 19 nt, Homo sapiens
  misc_RNA (1)...(19): siRNA sense strand
ggacagaguucacauccau

SEQ ID NO: 635931 - RNA, 19 nt, Homo sapiens
  misc_RNA (1)...(19): siRNA sense strand
gcacuaagucgccaagaaa

SEQ ID NO: 635932 - RNA, 19 nt, Homo sapiens
  misc_RNA (1)...(19): siRNA sense strand
caagguaguuccagaaaca

SEQ ID NO: 635933 - RNA, 19 nt, Homo sapiens
  misc_RNA (1)...(19): siRNA sense strand
gaaacugucagaaaugauu

SEQ ID NO: 635934 - RNA, 19 nt, Homo sapiens
  misc_RNA (1)...(19): siRNA sense strand
gcaaugccuugaaaguuug

SEQ ID NO: 635935 - RNA, 19 nt, Homo sapiens
  misc_RNA (1)...(19): siRNA sense strand
ccaagaaauugacauggaa

SEQ ID NO: 635936 - RNA, 19 nt, Homo sapiens
  misc_RNA (1)...(19): siRNA sense strand
uauaagcaaugccuugaaa

SEQ ID NO: 635937 - RNA, 19 nt, Homo sapiens
  misc_RNA (1)...(19): siRNA sense strand
gaccaugucuuuagaaacu

SEQ ID NO: 635938 - RNA, 19 nt, Homo sapiens
  misc_RNA (1)...(19): siRNA sense strand
ccagaaacauaucucaaga

SEQ ID NO: 635939 - RNA, 19 nt, Homo sapiens
  misc_RNA (1)...(19): siRNA sense strand
gaacgaguguuagaagcaa

SEQ ID NO: 635940 - RNA, 19 nt, Homo sapiens
  misc_RNA (1)...(19): siRNA sense strand
aaauugacauggaagauga

SEQ ID NO: 635941 - RNA, 19 nt, Homo sapiens
  misc_RNA (1)...(19): siRNA sense strand
gaucgauccuauaaaugaa

SEQ ID NO: 635942 - RNA, 19 nt, Homo sapiens
  misc_RNA (1)...(19): siRNA sense strand
gccaagaaauugacaugga

SEQ ID NO: 635943 - RNA, 19 nt, Homo sapiens
  misc_RNA (1)...(19): siRNA sense strand
guucaacaguccagaguau

SEQ ID NO: 635944 - RNA, 19 nt, Homo sapiens
  misc_RNA (1)...(19): siRNA sense strand
uagaaacugucagaaauga

SEQ ID NO: 635945 - RNA, 19 nt, Homo sapiens
  misc_RNA (1)...(19): siRNA sense strand
gaccaacuccugcagauga

SEQ ID NO: 635946 - RNA, 19 nt, Homo sapiens
  misc_RNA (1)...(19): siRNA sense strand
cuugacggguccagaauua

SEQ ID NO: 635947 - RNA, 19 nt, Homo sapiens
  misc_RNA (1)...(19): siRNA sense strand
caacaggaagguuauucua

SEQ ID NO: 635948 - RNA, 19 nt, Homo sapiens
  misc_RNA (1)...(19): siRNA sense strand
gaaauugacauggaagaug

SEQ ID NO: 635949 - RNA, 19 nt, Homo sapiens
  misc_RNA (1)...(19): siRNA sense strand
caggaagguuauucuauau

SEQ ID NO: 635950 - RNA, 19 nt, Homo sapiens
  misc_RNA (1)...(19): siRNA sense strand
agcaaugccuugaaaguuu

SEQ ID NO: 635951 - RNA, 19 nt, Homo sapiens
  misc_RNA (1)...(19): siRNA sense strand
caacuccugcagaugauua

SEQ ID NO: 635952 - RNA, 19 nt, Homo sapiens
  misc_RNA (1)...(19): siRNA sense strand
gagcaaagaguccauaaaa

SEQ ID NO: 635953 - RNA, 19 nt, Homo sapiens
  misc_RNA (1)...(19): siRNA sense strand
acacagacaucagguacaa

SEQ ID NO: 635954 - RNA, 19 nt, Homo sapiens
  misc_RNA (1)...(19): siRNA sense strand
uuucuuggcucaauuacaa

SEQ ID NO: 635955 - RNA, 19 nt, Homo sapiens
  misc_RNA (1)...(19): siRNA sense strand
gacaucagguacaaaucuu

SEQ ID NO: 635956 - RNA, 19 nt, Homo sapiens
  misc_RNA (1)...(19): siRNA sense strand
caacagaugcaucgaccaa

SEQ ID NO: 635957 - RNA, 19 nt, Homo sapiens
  misc_RNA (1)...(19): siRNA sense strand
ggcacuaagucgccaagaa

SEQ ID NO: 635958 - RNA, 19 nt, Homo sapiens
  misc_RNA (1)...(19): siRNA sense strand
gagaagaauuagcacaacu

SEQ ID NO: 635959 - RNA, 19 nt, Homo sapiens
  misc_RNA (1)...(19): siRNA sense strand
gaaaggccagccaccaguu

SEQ ID NO: 635960 - RNA, 19 nt, Homo sapiens
  misc_RNA (1)...(19): siRNA sense strand
aaugauggcucaggaaugu

SEQ ID NO: 635961 - RNA, 19 nt, Homo sapiens
  misc_RNA (1)...(19): siRNA sense strand
gugaccaugucuuuagaaa

SEQ ID NO: 635962 - RNA, 19 nt, Homo sapiens
  misc_RNA (1)...(19): siRNA sense strand
uauaaggaacacugguuua

SEQ ID NO: 635963 - RNA, 19 nt, Homo sapiens
  misc_RNA (1)...(19): siRNA sense strand
gcaaaugauggcucaggaa

SEQ ID NO: 635964 - RNA, 19 nt, Homo sapiens
  misc_RNA (1)...(19): siRNA sense strand
gcaaagaguccauaaaaca

SEQ ID NO: 635965 - RNA, 19 nt, Homo sapiens
  misc_RNA (1)...(19): siRNA sense strand
ggagaagaauuagcacaac

SEQ ID NO: 635966 - RNA, 19 nt, Homo sapiens
  misc_RNA (1)...(19): siRNA sense strand
ugacauggaagaugaggaa

SEQ ID NO: 635967 - RNA, 19 nt, Homo sapiens
  misc_RNA (1)...(19): siRNA sense strand
gcaagguaguuccagaaac

SEQ ID NO: 635968 - RNA, 19 nt, Homo sapiens
  misc_RNA (1)...(19): siRNA sense strand
cagcuaaguaugcaaggua

SEQ ID NO: 635969 - RNA, 19 nt, Homo sapiens
  misc_RNA (1)...(19): siRNA sense strand
guccagaauuaauaucaga

SEQ ID NO: 635970 - RNA, 19 nt, Homo sapiens
  misc_RNA (1)...(19): siRNA sense strand
ggaccuaucaggacagagu

SEQ ID NO: 635971 - RNA, 19 nt, Homo sapiens
  misc_RNA (1)...(19): siRNA sense strand
ugauggcucaggaauguua

SEQ ID NO: 635972 - RNA, 19 nt, Homo sapiens
  misc_RNA (1)...(19): siRNA sense strand
gacggguccagaauuaaua

SEQ ID NO: 635973 - RNA, 19 nt, Homo sapiens
  misc_RNA (1)...(19): siRNA sense strand
caaaugauggcucaggaau

SEQ ID NO: 635974 - RNA, 19 nt, Homo sapiens
  misc_RNA (1)...(19): siRNA sense strand
cuauucagguuauaagcaa

SEQ ID NO: 635975 - RNA, 19 nt, Homo sapiens
  misc_RNA (1)...(19): siRNA sense strand
agaccuggaacgaguguua

SEQ ID NO: 635976 - RNA, 19 nt, Homo sapiens
  misc_RNA (1)...(19): siRNA sense strand
cuaagucgccaagaaauug

SEQ ID NO: 635977 - RNA, 19 nt, Homo sapiens
  misc_RNA (1)...(19): siRNA sense strand
agacgaagaugaggaggau

SEQ ID NO: 635978 - RNA, 19 nt, Homo sapiens
  misc_RNA (1)...(19): siRNA sense strand
cagcugugaccaugucuuu

SEQ ID NO: 635979 - RNA, 19 nt, Homo sapiens
  misc_RNA (1)...(19): siRNA sense strand
ggaacgaguguuagaagca

SEQ ID NO: 635980 - RNA, 19 nt, Homo sapiens
  misc_RNA (1)...(19): siRNA sense strand
ugaucuaggugaugcuaug

SEQ ID NO: 635981 - RNA, 19 nt, Homo sapiens
  misc_RNA (1)...(19): siRNA sense strand
agaagaauuagcacaacua

SEQ ID NO: 635982 - RNA, 19 nt, Homo sapiens
  misc_RNA (1)...(19): siRNA sense strand
caagauaugacacagacau

SEQ ID NO: 635983 - RNA, 19 nt, Homo sapiens
  misc_RNA (1)...(19): siRNA sense strand
cauggaagaugaggaagca

SEQ ID NO: 635984 - RNA, 19 nt, Homo sapiens
  misc_RNA (1)...(19): siRNA sense strand
gaauguuagacgaagauga

SEQ ID NO: 635985 - RNA, 19 nt, Homo sapiens
  misc_RNA (1)...(19): siRNA sense strand
gcugugaccaugucuuuag

SEQ ID NO: 635986 - RNA, 19 nt, Homo sapiens
  misc_RNA (1)...(19): siRNA sense strand
aauuacaacaggaagguua

SEQ ID NO: 635987 - RNA, 19 nt, Homo sapiens
  misc_RNA (1)...(19): siRNA sense strand
uaggugaugcuaugaguga

SEQ ID NO: 635988 - RNA, 19 nt, Homo sapiens
  misc_RNA (1)...(19): siRNA sense strand
gguaguuccagaaacauau

SEQ ID NO: 635989 - RNA, 19 nt, Homo sapiens
  misc_RNA (1)...(19): siRNA sense strand
ugauuaggguccaacagau

SEQ ID NO: 635990 - RNA, 19 nt, Homo sapiens
  misc_RNA (1)...(19): siRNA sense strand
uugcgaagcugaccaacuc

SEQ ID NO: 635991 - RNA, 19 nt, Homo sapiens
  misc_RNA (1)...(19): siRNA sense strand
gguuuaacuugaauucucu

SEQ ID NO: 635992 - RNA, 19 nt, Homo sapiens
  misc_RNA (1)...(19): siRNA sense strand
uaagcaaugccuugaaagu

SEQ ID NO: 635993 - RNA, 19 nt, Homo sapiens
  misc_RNA (1)...(19): siRNA sense strand
gugaugcuaugagugaaga

SEQ ID NO: 635994 - RNA, 19 nt, Homo sapiens
  misc_RNA (1)...(19): siRNA sense strand
aacagugguuuaacuugaa

SEQ ID NO: 635995 - RNA, 19 nt, Homo sapiens
  misc_RNA (1)...(19): siRNA sense strand
gauuaggguccaacagaug

SEQ ID NO: 635996 - RNA, 19 nt, Homo sapiens
  misc_RNA (1)...(19): siRNA sense strand
gcagaugauuaggguccaa

SEQ ID NO: 635997 - RNA, 19 nt, Homo sapiens
  misc_RNA (1)...(19): siRNA sense strand
acgaagaugaggaggauuu

SEQ ID NO: 635998 - RNA, 19 nt, Homo sapiens
  misc_RNA (1)...(19): siRNA sense strand
ggaagaugaggaagcagau

SEQ ID NO: 635999 - RNA, 19 nt, Homo sapiens
  misc_RNA (1)...(19): siRNA sense strand
aaggaacacugguuuacag

SEQ ID NO: 636000 - RNA, 19 nt, Homo sapiens
  misc_RNA (1)...(19): siRNA sense strand
gagugaagaagacaugcuu

SEQ ID NO: 636001 - RNA, 19 nt, Homo sapiens
  misc_RNA (1)...(19): siRNA sense strand
ucaacaguccagaguauca

SEQ ID NO: 636002 - RNA, 19 nt, Homo sapiens
  misc_RNA (1)...(19): siRNA sense strand
ugacggguccagaauuaau

SEQ ID NO: 636003 - RNA, 19 nt, Homo sapiens
  misc_RNA (1)...(19): siRNA sense strand
caggaauguuagacgaaga

SEQ ID NO: 636004 - RNA, 19 nt, Homo sapiens
  misc_RNA (1)...(19): siRNA sense strand
acagacaucagguacaaau

SEQ ID NO: 636005 - RNA, 19 nt, Homo sapiens
  misc_RNA (1)...(19): siRNA sense strand
aagcaaugccuugaaaguu

SEQ ID NO: 636006 - RNA, 19 nt, Homo sapiens
  misc_RNA (1)...(19): siRNA sense strand
guuauaagcaaugccuuga

SEQ ID NO: 636007 - RNA, 19 nt, Homo sapiens
  misc_RNA (1)...(19): siRNA sense strand
uuagaaacugucagaaaug

SEQ ID NO: 636008 - RNA, 19 nt, Homo sapiens
  misc_RNA (1)...(19): siRNA sense strand
gaucuaggugaugcuauga

SEQ ID NO: 636009 - RNA, 19 nt, Homo sapiens
  misc_RNA (1)...(19): siRNA sense strand
aaagagcaaagaguccaua

SEQ ID NO: 636010 - RNA, 19 nt, Homo sapiens
  misc_RNA (1)...(19): siRNA sense strand
uuauaaggaacacugguuu

SEQ ID NO: 636011 - RNA, 19 nt, Homo sapiens
  misc_RNA (1)...(19): siRNA sense strand
gguccagaauuaauaucag

SEQ ID NO: 636012 - RNA, 19 nt, Homo sapiens
  misc_RNA (1)...(19): siRNA sense strand
gcacuuuucuuggcucaau

SEQ ID NO: 636013 - RNA, 19 nt, Homo sapiens
  misc_RNA (1)...(19): siRNA sense strand
uaagucgccaagaaauuga

SEQ ID NO: 636014 - RNA, 19 nt, Homo sapiens
  misc_RNA (1)...(19): siRNA sense strand
cuaaguaugcaagguaguu

SEQ ID NO: 636015 - RNA, 19 nt, Homo sapiens
  misc_RNA (1)...(19): siRNA sense strand
cuuuagaaacugucagaaa

SEQ ID NO: 636016 - RNA, 19 nt, Homo sapiens
  misc_RNA (1)...(19): siRNA sense strand
agacaucagguacaaaucu

SEQ ID NO: 636017 - RNA, 19 nt, Homo sapiens
  misc_RNA (1)...(19): siRNA sense strand
acagaugcaucgaccaaaa

SEQ ID NO: 636018 - RNA, 19 nt, Homo sapiens
  misc_RNA (1)...(19): siRNA sense strand
gaaaguuugggguuuagaa

SEQ ID NO: 636019 - RNA, 19 nt, Homo sapiens
  misc_RNA (1)...(19): siRNA sense strand
uaaggaacacugguuuaca

SEQ ID NO: 636020 - RNA, 19 nt, Homo sapiens
  misc_RNA (1)...(19): siRNA sense strand
ugguuuaacuugaauucuc

SEQ ID NO: 636021 - RNA, 19 nt, Homo sapiens
  misc_RNA (1)...(19): siRNA sense strand
ccaugucuuuagaaacugu

SEQ ID NO: 636022 - RNA, 19 nt, Homo sapiens
  misc_RNA (1)...(19): siRNA sense strand
uggagaagaauuagcacaa

SEQ ID NO: 636023 - RNA, 19 nt, Homo sapiens
  misc_RNA (1)...(19): siRNA sense strand
gaagaugaggaagcagauc

SEQ ID NO: 636024 - RNA, 19 nt, Homo sapiens
  misc_RNA (1)...(19): siRNA sense strand
ucuaggugaugcuaugagu

SEQ ID NO: 636025 - RNA, 19 nt, Homo sapiens
  misc_RNA (1)...(19): siRNA sense strand
ucagguacaaaucuuacuu

SEQ ID NO: 636026 - RNA, 19 nt, Homo sapiens
  misc_RNA (1)...(19): siRNA sense strand
gauaugacacagacaucag

SEQ ID NO: 636027 - RNA, 19 nt, Homo sapiens
  misc_RNA (1)...(19): siRNA sense strand
guacaaaucuuacuucaga

SEQ ID NO: 636028 - RNA, 19 nt, Homo sapiens
  misc_RNA (1)...(19): siRNA sense strand
uaacuugaauucucucuug

SEQ ID NO: 636029 - RNA, 19 nt, Homo sapiens
  misc_RNA (1)...(19): siRNA sense strand
acaggaagguuauucuaua

SEQ ID NO: 636030 - RNA, 19 nt, Homo sapiens
  misc_RNA (1)...(19): siRNA sense strand
ggacagaguucacauccau

SEQ ID NO: 636031 - RNA, 19 nt, Homo sapiens
  misc_RNA (1)...(19): siRNA sense strand
gcacuaagucgccaagaaa

SEQ ID NO: 636032 - RNA, 19 nt, Homo sapiens
  misc_RNA (1)...(19): siRNA sense strand
caagguaguuccagaaaca

SEQ ID NO: 636033 - RNA, 19 nt, Homo sapiens
  misc_RNA (1)...(19): siRNA sense strand
gaaacugucagaaaugauu

SEQ ID NO: 636034 - RNA, 19 nt, Homo sapiens
  misc_RNA (1)...(19): siRNA sense strand
gcaaugccuugaaaguuug

SEQ ID NO: 636035 - RNA, 19 nt, Homo sapiens
  misc_RNA (1)...(19): siRNA sense strand
ccaagaaauugacauggaa

SEQ ID NO: 636036 - RNA, 19 nt, Homo sapiens
  misc_RNA (1)...(19): siRNA sense strand
uauaagcaaugccuugaaa

SEQ ID NO: 636037 - RNA, 19 nt, Homo sapiens
  misc_RNA (1)...(19): siRNA sense strand
gaccaugucuuuagaaacu

SEQ ID NO: 636038 - RNA, 19 nt, Homo sapiens
  misc_RNA (1)...(19): siRNA sense strand
ccagaaacauaucucaaga

SEQ ID NO: 636039 - RNA, 19 nt, Homo sapiens
  misc_RNA (1)...(19): siRNA sense strand
gaacgaguguuagaagcaa

SEQ ID NO: 636040 - RNA, 19 nt, Homo sapiens
  misc_RNA (1)...(19): siRNA sense strand
aaauugacauggaagauga

SEQ ID NO: 636041 - RNA, 19 nt, Homo sapiens
  misc_RNA (1)...(19): siRNA sense strand
gaucgauccuauaaaugaa

SEQ ID NO: 636042 - RNA, 19 nt, Homo sapiens
  misc_RNA (1)...(19): siRNA sense strand
gccaagaaauugacaugga

SEQ ID NO: 636043 - RNA, 19 nt, Homo sapiens
  misc_RNA (1)...(19): siRNA sense strand
guucaacaguccagaguau

SEQ ID NO: 636044 - RNA, 19 nt, Homo sapiens
  misc_RNA (1)...(19): siRNA sense strand
uagaaacugucagaaauga

SEQ ID NO: 636045 - RNA, 19 nt, Homo sapiens
  misc_RNA (1)...(19): siRNA sense strand
gaccaacuccugcagauga

SEQ ID NO: 636046 - RNA, 19 nt, Homo sapiens
  misc_RNA (1)...(19): siRNA sense strand
cuugacggguccagaauua

SEQ ID NO: 636047 - RNA, 19 nt, Homo sapiens
  misc_RNA (1)...(19): siRNA sense strand
caacaggaagguuauucua

SEQ ID NO: 636048 - RNA, 19 nt, Homo sapiens
  misc_RNA (1)...(19): siRNA sense strand
gaaauugacauggaagaug

SEQ ID NO: 636049 - RNA, 19 nt, Homo sapiens
  misc_RNA (1)...(19): siRNA sense strand
caggaagguuauucuauau

SEQ ID NO: 636050 - RNA, 19 nt, Homo sapiens
  misc_RNA (1)...(19): siRNA sense strand
agcaaugccuugaaaguuu

SEQ ID NO: 636051 - RNA, 19 nt, Homo sapiens
  misc_RNA (1)...(19): siRNA sense strand
caacuccugcagaugauua

SEQ ID NO: 636052 - RNA, 19 nt, Homo sapiens
  misc_RNA (1)...(19): siRNA sense strand
gagcaaagaguccauaaaa

SEQ ID NO: 636053 - RNA, 19 nt, Homo sapiens
  misc_RNA (1)...(19): siRNA sense strand
acacagacaucagguacaa

SEQ ID NO: 636054 - RNA, 19 nt, Homo sapiens
  misc_RNA (1)...(19): siRNA sense strand
uuucuuggcucaauuacaa

SEQ ID NO: 636055 - RNA, 19 nt, Homo sapiens
  misc_RNA (1)...(19): siRNA sense strand
gacaucagguacaaaucuu

SEQ ID NO: 636056 - RNA, 19 nt, Homo sapiens
  misc_RNA (1)...(19): siRNA sense strand
caacagaugcaucgaccaa

SEQ ID NO: 636057 - RNA, 19 nt, Homo sapiens
  misc_RNA (1)...(19): siRNA sense strand
ggcacuaagucgccaagaa

SEQ ID NO: 636058 - RNA, 19 nt, Homo sapiens
  misc_RNA (1)...(19): siRNA sense strand
gagaagaauuagcacaacu

SEQ ID NO: 636059 - RNA, 19 nt, Homo sapiens
  misc_RNA (1)...(19): siRNA sense strand
gaaaggccagccaccaguu

SEQ ID NO: 636060 - RNA, 19 nt, Homo sapiens
  misc_RNA (1)...(19): siRNA sense strand
aaugauggcucaggaaugu

SEQ ID NO: 636061 - RNA, 19 nt, Homo sapiens
  misc_RNA (1)...(19): siRNA sense strand
gugaccaugucuuuagaaa

SEQ ID NO: 636062 - RNA, 19 nt, Homo sapiens
  misc_RNA (1)...(19): siRNA sense strand
uauaaggaacacugguuua

SEQ ID NO: 636063 - RNA, 19 nt, Homo sapiens
  misc_RNA (1)...(19): siRNA sense strand
gcaaaugauggcucaggaa

SEQ ID NO: 636064 - RNA, 19 nt, Homo sapiens
  misc_RNA (1)...(19): siRNA sense strand
gcaaagaguccauaaaaca

SEQ ID NO: 636065 - RNA, 19 nt, Homo sapiens
  misc_RNA (1)...(19): siRNA sense strand
ggagaagaauuagcacaac

SEQ ID NO: 636066 - RNA, 19 nt, Homo sapiens
  misc_RNA (1)...(19): siRNA sense strand
ugacauggaagaugaggaa

SEQ ID NO: 636067 - RNA, 19 nt, Homo sapiens
  misc_RNA (1)...(19): siRNA sense strand
gcaagguaguuccagaaac

SEQ ID NO: 636068 - RNA, 19 nt, Homo sapiens
  misc_RNA (1)...(19): siRNA sense strand
cagcuaaguaugcaaggua

SEQ ID NO: 636069 - RNA, 19 nt, Homo sapiens
  misc_RNA (1)...(19): siRNA sense strand
guccagaauuaauaucaga

SEQ ID NO: 636070 - RNA, 19 nt, Homo sapiens
  misc_RNA (1)...(19): siRNA sense strand
ggaccuaucaggacagagu

SEQ ID NO: 636071 - RNA, 19 nt, Homo sapiens
  misc_RNA (1)...(19): siRNA sense strand
ugauggcucaggaauguua

SEQ ID NO: 636072 - RNA, 19 nt, Homo sapiens
  misc_RNA (1)...(19): siRNA sense strand
gacggguccagaauuaaua

SEQ ID NO: 636073 - RNA, 19 nt, Homo sapiens
  misc_RNA (1)...(19): siRNA sense strand
caaaugauggcucaggaau

SEQ ID NO: 636074 - RNA, 19 nt, Homo sapiens
  misc_RNA (1)...(19): siRNA sense strand
cuauucagguuauaagcaa

SEQ ID NO: 636075 - RNA, 19 nt, Homo sapiens
  misc_RNA (1)...(19): siRNA sense strand
agaccuggaacgaguguua

SEQ ID NO: 636076 - RNA, 19 nt, Homo sapiens
  misc_RNA (1)...(19): siRNA sense strand
cuaagucgccaagaaauug

SEQ ID NO: 636077 - RNA, 19 nt, Homo sapiens
  misc_RNA (1)...(19): siRNA sense strand
agacgaagaugaggaggau

SEQ ID NO: 636078 - RNA, 19 nt, Homo sapiens
  misc_RNA (1)...(19): siRNA sense strand
cagcugugaccaugucuuu

SEQ ID NO: 636079 - RNA, 19 nt, Homo sapiens
  misc_RNA (1)...(19): siRNA sense strand
ggaacgaguguuagaagca

SEQ ID NO: 636080 - RNA, 19 nt, Homo sapiens
  misc_RNA (1)...(19): siRNA sense strand
ugaucuaggugaugcuaug

SEQ ID NO: 636081 - RNA, 19 nt, Homo sapiens
  misc_RNA (1)...(19): siRNA sense strand
agaagaauuagcacaacua

SEQ ID NO: 636082 - RNA, 19 nt, Homo sapiens
  misc_RNA (1)...(19): siRNA sense strand
caagauaugacacagacau

SEQ ID NO: 636083 - RNA, 19 nt, Homo sapiens
  misc_RNA (1)...(19): siRNA sense strand
cauggaagaugaggaagca

SEQ ID NO: 636084 - RNA, 19 nt, Homo sapiens
  misc_RNA (1)...(19): siRNA sense strand
gaauguuagacgaagauga

SEQ ID NO: 636085 - RNA, 19 nt, Homo sapiens
  misc_RNA (1)...(19): siRNA sense strand
gcugugaccaugucuuuag

SEQ ID NO: 636086 - RNA, 19 nt, Homo sapiens
  misc_RNA (1)...(19): siRNA sense strand
aauuacaacaggaagguua

SEQ ID NO: 636087 - RNA, 19 nt, Homo sapiens
  misc_RNA (1)...(19): siRNA sense strand
uaggugaugcuaugaguga

SEQ ID NO: 636088 - RNA, 19 nt, Homo sapiens
  misc_RNA (1)...(19): siRNA sense strand
gguaguuccagaaacauau

SEQ ID NO: 636089 - RNA, 19 nt, Homo sapiens
  misc_RNA (1)...(19): siRNA sense strand
ugauuaggguccaacagau

SEQ ID NO: 636090 - RNA, 19 nt, Homo sapiens
  misc_RNA (1)...(19): siRNA sense strand
uugcgaagcugaccaacuc

SEQ ID NO: 636091 - RNA, 19 nt, Homo sapiens
  misc_RNA (1)...(19): siRNA sense strand
gguuuaacuugaauucucu

SEQ ID NO: 636092 - RNA, 19 nt, Homo sapiens
  misc_RNA (1)...(19): siRNA sense strand
uaagcaaugccuugaaagu

SEQ ID NO: 636093 - RNA, 19 nt, Homo sapiens
  misc_RNA (1)...(19): siRNA sense strand
gugaugcuaugagugaaga

SEQ ID NO: 636094 - RNA, 19 nt, Homo sapiens
  misc_RNA (1)...(19): siRNA sense strand
aacagugguuuaacuugaa

SEQ ID NO: 636095 - RNA, 19 nt, Homo sapiens
  misc_RNA (1)...(19): siRNA sense strand
gauuaggguccaacagaug

SEQ ID NO: 636096 - RNA, 19 nt, Homo sapiens
  misc_RNA (1)...(19): siRNA sense strand
gcagaugauuaggguccaa

SEQ ID NO: 636097 - RNA, 19 nt, Homo sapiens
  misc_RNA (1)...(19): siRNA sense strand
acgaagaugaggaggauuu

SEQ ID NO: 636098 - RNA, 19 nt, Homo sapiens
  misc_RNA (1)...(19): siRNA sense strand
ggaagaugaggaagcagau

SEQ ID NO: 636099 - RNA, 19 nt, Homo sapiens
  misc_RNA (1)...(19): siRNA sense strand
aaggaacacugguuuacag

SEQ ID NO: 636100 - RNA, 19 nt, Homo sapiens
  misc_RNA (1)...(19): siRNA sense strand
gagugaagaagacaugcuu

SEQ ID NO: 636101 - RNA, 19 nt, Homo sapiens
  misc_RNA (1)...(19): siRNA sense strand
ucaacaguccagaguauca

SEQ ID NO: 636102 - RNA, 19 nt, Homo sapiens
  misc_RNA (1)...(19): siRNA sense strand
ugacggguccagaauuaau

SEQ ID NO: 636103 - RNA, 19 nt, Homo sapiens
  misc_RNA (1)...(19): siRNA sense strand
caggaauguuagacgaaga

SEQ ID NO: 636104 - RNA, 19 nt, Homo sapiens
  misc_RNA (1)...(19): siRNA sense strand
acagacaucagguacaaau

SEQ ID NO: 636105 - RNA, 19 nt, Homo sapiens
  misc_RNA (1)...(19): siRNA sense strand
aagcaaugccuugaaaguu

SEQ ID NO: 636106 - RNA, 19 nt, Homo sapiens
  misc_RNA (1)...(19): siRNA sense strand
guuauaagcaaugccuuga

SEQ ID NO: 636107 - RNA, 19 nt, Homo sapiens
  misc_RNA (1)...(19): siRNA sense strand
uuagaaacugucagaaaug

SEQ ID NO: 636108 - RNA, 19 nt, Homo sapiens
  misc_RNA (1)...(19): siRNA sense strand
gaucuaggugaugcuauga

SEQ ID NO: 636109 - RNA, 19 nt, Homo sapiens
  misc_RNA (1)...(19): siRNA sense strand
aaagagcaaagaguccaua

SEQ ID NO: 636110 - RNA, 19 nt, Homo sapiens
  misc_RNA (1)...(19): siRNA sense strand
uuauaaggaacacugguuu

SEQ ID NO: 636111 - RNA, 19 nt, Homo sapiens
  misc_RNA (1)...(19): siRNA sense strand
gguccagaauuaauaucag

SEQ ID NO: 636112 - RNA, 19 nt, Homo sapiens
  misc_RNA (1)...(19): siRNA sense strand
gcacuuuucuuggcucaau

SEQ ID NO: 636113 - RNA, 19 nt, Homo sapiens
  misc_RNA (1)...(19): siRNA sense strand
uaagucgccaagaaauuga

SEQ ID NO: 636114 - RNA, 19 nt, Homo sapiens
  misc_RNA (1)...(19): siRNA sense strand
cuaaguaugcaagguaguu

SEQ ID NO: 636115 - RNA, 19 nt, Homo sapiens
  misc_RNA (1)...(19): siRNA sense strand
cuuuagaaacugucagaaa

SEQ ID NO: 636116 - RNA, 19 nt, Homo sapiens
  misc_RNA (1)...(19): siRNA sense strand
agacaucagguacaaaucu

SEQ ID NO: 636117 - RNA, 19 nt, Homo sapiens
  misc_RNA (1)...(19): siRNA sense strand
acagaugcaucgaccaaaa

SEQ ID NO: 636118 - RNA, 19 nt, Homo sapiens
  misc_RNA (1)...(19): siRNA sense strand
gaaaguuugggguuuagaa

SEQ ID NO: 636119 - RNA, 19 nt, Homo sapiens
  misc_RNA (1)...(19): siRNA sense strand
uaaggaacacugguuuaca

SEQ ID NO: 636120 - RNA, 19 nt, Homo sapiens
  misc_RNA (1)...(19): siRNA sense strand
ugguuuaacuugaauucuc

SEQ ID NO: 636121 - RNA, 19 nt, Homo sapiens
  misc_RNA (1)...(19): siRNA sense strand
ccaugucuuuagaaacugu

SEQ ID NO: 636122 - RNA, 19 nt, Homo sapiens
  misc_RNA (1)...(19): siRNA sense strand
uggagaagaauuagcacaa

SEQ ID NO: 636123 - RNA, 19 nt, Homo sapiens
  misc_RNA (1)...(19): siRNA sense strand
gaagaugaggaagcagauc

SEQ ID NO: 636124 - RNA, 19 nt, Homo sapiens
  misc_RNA (1)...(19): siRNA sense strand
ucuaggugaugcuaugagu

SEQ ID NO: 636125 - RNA, 19 nt, Homo sapiens
  misc_RNA (1)...(19): siRNA sense strand
ucagguacaaaucuuacuu

SEQ ID NO: 636126 - RNA, 19 nt, Homo sapiens
  misc_RNA (1)...(19): siRNA sense strand
gauaugacacagacaucag

SEQ ID NO: 636127 - RNA, 19 nt, Homo sapiens
  misc_RNA (1)...(19): siRNA sense strand
gggaguagcugauuucuuu

SEQ ID NO: 636128 - RNA, 19 nt, Homo sapiens
  misc_RNA (1)...(19): siRNA sense strand
caaagacucugacuauaaa

SEQ ID NO: 636129 - RNA, 19 nt, Homo sapiens
  misc_RNA (1)...(19): siRNA sense strand
caacaaaagucucagauua

SEQ ID NO: 636130 - RNA, 19 nt, Homo sapiens
  misc_RNA (1)...(19): siRNA sense strand
gaaaguauccugcaguuug

SEQ ID NO: 636131 - RNA, 19 nt, Homo sapiens
  misc_RNA (1)...(19): siRNA sense strand
acacaaacauccuaccaua

SEQ ID NO: 636132 - RNA, 19 nt, Homo sapiens
  misc_RNA (1)...(19): siRNA sense strand
caacugauguggaugaaga

SEQ ID NO: 636133 - RNA, 19 nt, Homo sapiens
  misc_RNA (1)...(19): siRNA sense strand
gagcaaaggucccaugauc

SEQ ID NO: 636134 - RNA, 19 nt, Homo sapiens
  misc_RNA (1)...(19): siRNA sense strand
caaguuggcuccagucaga

SEQ ID NO: 636135 - RNA, 19 nt, Homo sapiens
  misc_RNA (1)...(19): siRNA sense strand
ccaacuauauuccuggaua

SEQ ID NO: 636136 - RNA, 19 nt, Homo sapiens
  misc_RNA (1)...(19): siRNA sense strand
ccaaagacucugacuauaa

SEQ ID NO: 636137 - RNA, 19 nt, Homo sapiens
  misc_RNA (1)...(19): siRNA sense strand
caacuaugcugacgagaug

SEQ ID NO: 636138 - RNA, 19 nt, Homo sapiens
  misc_RNA (1)...(19): siRNA sense strand
guguggagcugguacauuu

SEQ ID NO: 636139 - RNA, 19 nt, Homo sapiens
  misc_RNA (1)...(19): siRNA sense strand
gaaauugauuggacuggau

SEQ ID NO: 636140 - RNA, 19 nt, Homo sapiens
  misc_RNA (1)...(19): siRNA sense strand
ggagaugauuucagaggaa

SEQ ID NO: 636141 - RNA, 19 nt, Homo sapiens
  misc_RNA (1)...(19): siRNA sense strand
caacaaugguuacagagau

SEQ ID NO: 636142 - RNA, 19 nt, Homo sapiens
  misc_RNA (1)...(19): siRNA sense strand
caaacauccuaccauauga

SEQ ID NO: 636143 - RNA, 19 nt, Homo sapiens
  misc_RNA (1)...(19): siRNA sense strand
aaaggagggugaaauguga

SEQ ID NO: 636144 - RNA, 19 nt, Homo sapiens
  misc_RNA (1)...(19): siRNA sense strand
cuacaucaaugccaacuau

SEQ ID NO: 636145 - RNA, 19 nt, Homo sapiens
  misc_RNA (1)...(19): siRNA sense strand
uuaaggauauggccaaaga

SEQ ID NO: 636146 - RNA, 19 nt, Homo sapiens
  misc_RNA (1)...(19): siRNA sense strand
gccaaagacucugacuaua

SEQ ID NO: 636147 - RNA, 19 nt, Homo sapiens
  misc_RNA (1)...(19): siRNA sense strand
gcugauuucuuugaaguuu

SEQ ID NO: 636148 - RNA, 19 nt, Homo sapiens
  misc_RNA (1)...(19): siRNA sense strand
ugacuuugaugccuauauu

SEQ ID NO: 636149 - RNA, 19 nt, Homo sapiens
  misc_RNA (1)...(19): siRNA sense strand
gcagauggcuagggagugu

SEQ ID NO: 636150 - RNA, 19 nt, Homo sapiens
  misc_RNA (1)...(19): siRNA sense strand
ggucauaccggaugucuau

SEQ ID NO: 636151 - RNA, 19 nt, Homo sapiens
  misc_RNA (1)...(19): siRNA sense strand
ggaagaugguccugcaaca

SEQ ID NO: 636152 - RNA, 19 nt, Homo sapiens
  misc_RNA (1)...(19): siRNA sense strand
cagaaaguauccugcaguu

SEQ ID NO: 636153 - RNA, 19 nt, Homo sapiens
  misc_RNA (1)...(19): siRNA sense strand
gaccauuacuggccauuca

SEQ ID NO: 636154 - RNA, 19 nt, Homo sapiens
  misc_RNA (1)...(19): siRNA sense strand
ggccaaagacucugacuau

SEQ ID NO: 636155 - RNA, 19 nt, Homo sapiens
  misc_RNA (1)...(19): siRNA sense strand
gaagagggaguagcugauu

SEQ ID NO: 636156 - RNA, 19 nt, Homo sapiens
  misc_RNA (1)...(19): siRNA sense strand
ugauguggaugaagaagaa

SEQ ID NO: 636157 - RNA, 19 nt, Homo sapiens
  misc_RNA (1)...(19): siRNA sense strand
gcaaaggucccaugaucau

SEQ ID NO: 636158 - RNA, 19 nt, Homo sapiens
  misc_RNA (1)...(19): siRNA sense strand
gcugguacauuugucaauu

SEQ ID NO: 636159 - RNA, 19 nt, Homo sapiens
  misc_RNA (1)...(19): siRNA sense strand
guucauagccgucucaaca

SEQ ID NO: 636160 - RNA, 19 nt, Homo sapiens
  misc_RNA (1)...(19): siRNA sense strand
agaaccagcuccacccaaa

SEQ ID NO: 636161 - RNA, 19 nt, Homo sapiens
  misc_RNA (1)...(19): siRNA sense strand
ucagugaugucauauacga

SEQ ID NO: 636162 - RNA, 19 nt, Homo sapiens
  misc_RNA (1)...(19): siRNA sense strand
cugcagaucuuccacugaa

SEQ ID NO: 636163 - RNA, 19 nt, Homo sapiens
  misc_RNA (1)...(19): siRNA sense strand
gggcuggugucagaaauga

SEQ ID NO: 636164 - RNA, 19 nt, Homo sapiens
  misc_RNA (1)...(19): siRNA sense strand
gcaaaugcugcagaaagua

SEQ ID NO: 636165 - RNA, 19 nt, Homo sapiens
  misc_RNA (1)...(19): siRNA sense strand
ggacggacaggaacauuca

SEQ ID NO: 636166 - RNA, 19 nt, Homo sapiens
  misc_RNA (1)...(19): siRNA sense strand
ggaaccaguugcuguuucu

SEQ ID NO: 636167 - RNA, 19 nt, Homo sapiens
  misc_RNA (1)...(19): siRNA sense strand
acaaacauccuaccauaug

SEQ ID NO: 636168 - RNA, 19 nt, Homo sapiens
  misc_RNA (1)...(19): siRNA sense strand
caucaaugccaacuauauu

SEQ ID NO: 636169 - RNA, 19 nt, Homo sapiens
  misc_RNA (1)...(19): siRNA sense strand
ucucaacaaugguuacaga

SEQ ID NO: 636170 - RNA, 19 nt, Homo sapiens
  misc_RNA (1)...(19): siRNA sense strand
gaagaugguccugcaacaa

SEQ ID NO: 636171 - RNA, 19 nt, Homo sapiens
  misc_RNA (1)...(19): siRNA sense strand
acacuuugcugcagaucuu

SEQ ID NO: 636172 - RNA, 19 nt, Homo sapiens
  misc_RNA (1)...(19): siRNA sense strand
uaauuggacuguugcuugu

SEQ ID NO: 636173 - RNA, 19 nt, Homo sapiens
  misc_RNA (1)...(19): siRNA sense strand
gaugaaucccaauguggua

SEQ ID NO: 636174 - RNA, 19 nt, Homo sapiens
  misc_RNA (1)...(19): siRNA sense strand
cuucagccgugugagauua

SEQ ID NO: 636175 - RNA, 19 nt, Homo sapiens
  misc_RNA (1)...(19): siRNA sense strand
uuaaagaagaggaaacuga

SEQ ID NO: 636176 - RNA, 19 nt, Homo sapiens
  misc_RNA (1)...(19): siRNA sense strand
agagagggauggaaagcuu

SEQ ID NO: 636177 - RNA, 19 nt, Homo sapiens
  misc_RNA (1)...(19): siRNA sense strand
ggaugacuuugaugccuau

SEQ ID NO: 636178 - RNA, 19 nt, Homo sapiens
  misc_RNA (1)...(19): siRNA sense strand
aaaguauccugcaguuugu

SEQ ID NO: 636179 - RNA, 19 nt, Homo sapiens
  misc_RNA (1)...(19): siRNA sense strand
caaaugcugcagaaaguau

SEQ ID NO: 636180 - RNA, 19 nt, Homo sapiens
  misc_RNA (1)...(19): siRNA sense strand
ugaagaagaagcagcaguu

SEQ ID NO: 636181 - RNA, 19 nt, Homo sapiens
  misc_RNA (1)...(19): siRNA sense strand
agauuagucuccaugaaug

SEQ ID NO: 636182 - RNA, 19 nt, Homo sapiens
  misc_RNA (1)...(19): siRNA sense strand
agaggaaggugcagacuac

SEQ ID NO: 636183 - RNA, 19 nt, Homo sapiens
  misc_RNA (1)...(19): siRNA sense strand
uguagacacuuccggauca

SEQ ID NO: 636184 - RNA, 19 nt, Homo sapiens
  misc_RNA (1)...(19): siRNA sense strand
ggaaggugcagacuacauc

SEQ ID NO: 636185 - RNA, 19 nt, Homo sapiens
  misc_RNA (1)...(19): siRNA sense strand
ggauauggccaaagacucu

SEQ ID NO: 636186 - RNA, 19 nt, Homo sapiens
  misc_RNA (1)...(19): siRNA sense strand
gaacaaaacccagacuuca

SEQ ID NO: 636187 - RNA, 19 nt, Homo sapiens
  misc_RNA (1)...(19): siRNA sense strand
agagaugaaucccaaugug

SEQ ID NO: 636188 - RNA, 19 nt, Homo sapiens
  misc_RNA (1)...(19): siRNA sense strand
ucuuagggcuggugucaga

SEQ ID NO: 636189 - RNA, 19 nt, Homo sapiens
  misc_RNA (1)...(19): siRNA sense strand
aagagggaguagcugauuu

SEQ ID NO: 636190 - RNA, 19 nt, Homo sapiens
  misc_RNA (1)...(19): siRNA sense strand
caacuauauuccuggauac

SEQ ID NO: 636191 - RNA, 19 nt, Homo sapiens
  misc_RNA (1)...(19): siRNA sense strand
uagcugauuucuuugaagu

SEQ ID NO: 636192 - RNA, 19 nt, Homo sapiens
  misc_RNA (1)...(19): siRNA sense strand
ucauagccgucucaacaau

SEQ ID NO: 636193 - RNA, 19 nt, Homo sapiens
  misc_RNA (1)...(19): siRNA sense strand
gaagaagaagcagcaguuc

SEQ ID NO: 636194 - RNA, 19 nt, Homo sapiens
  misc_RNA (1)...(19): siRNA sense strand
cugguacauuugucaauuu

SEQ ID NO: 636195 - RNA, 19 nt, Homo sapiens
  misc_RNA (1)...(19): siRNA sense strand
guuacccucauuauucuua

SEQ ID NO: 636196 - RNA, 19 nt, Homo sapiens
  misc_RNA (1)...(19): siRNA sense strand
auuggacuguugcuuguua

SEQ ID NO: 636197 - RNA, 19 nt, Homo sapiens
  misc_RNA (1)...(19): siRNA sense strand
ggugcagacuacaucaaug

SEQ ID NO: 636198 - RNA, 19 nt, Homo sapiens
  misc_RNA (1)...(19): siRNA sense strand
gcagaucuuccacugaauc

SEQ ID NO: 636199 - RNA, 19 nt, Homo sapiens
  misc_RNA (1)...(19): siRNA sense strand
gacuggauaucccacacuu

SEQ ID NO: 636200 - RNA, 19 nt, Homo sapiens
  misc_RNA (1)...(19): siRNA sense strand
uuugaggaguugaaauuga

SEQ ID NO: 636201 - RNA, 19 nt, Homo sapiens
  misc_RNA (1)...(19): siRNA sense strand
gacuuugaugccuauauua

SEQ ID NO: 636202 - RNA, 19 nt, Homo sapiens
  misc_RNA (1)...(19): siRNA sense strand
gaguagcugauuucuuuga

SEQ ID NO: 636203 - RNA, 19 nt, Homo sapiens
  misc_RNA (1)...(19): siRNA sense strand
gaaguuuucugucaacaag

SEQ ID NO: 636204 - RNA, 19 nt, Homo sapiens
  misc_RNA (1)...(19): siRNA sense strand
ccucauuauucuuaggaaa

SEQ ID NO: 636205 - RNA, 19 nt, Homo sapiens
  misc_RNA (1)...(19): siRNA sense strand
gaugucauauacgagaaug

SEQ ID NO: 636206 - RNA, 19 nt, Homo sapiens
  misc_RNA (1)...(19): siRNA sense strand
cgacagcaagcuaccaaga

SEQ ID NO: 636207 - RNA, 19 nt, Homo sapiens
  misc_RNA (1)...(19): siRNA sense strand
aagaugguccugcaacaaa

SEQ ID NO: 636208 - RNA, 19 nt, Homo sapiens
  misc_RNA (1)...(19): siRNA sense strand
gaucuuccacugaaucgau

SEQ ID NO: 636209 - RNA, 19 nt, Homo sapiens
  misc_RNA (1)...(19): siRNA sense strand
gaaagcuuccauacaacug

SEQ ID NO: 636210 - RNA, 19 nt, Homo sapiens
  misc_RNA (1)...(19): siRNA sense strand
uguagugucaccagcuuua

SEQ ID NO: 636211 - RNA, 19 nt, Homo sapiens
  misc_RNA (1)...(19): siRNA sense strand
gaaccagcuccacccaaau

SEQ ID NO: 636212 - RNA, 19 nt, Homo sapiens
  misc_RNA (1)...(19): siRNA sense strand
cuuguuacccucauuauuc

SEQ ID NO: 636213 - RNA, 19 nt, Homo sapiens
  misc_RNA (1)...(19): siRNA sense strand
cagaggagcaguacauuuu

SEQ ID NO: 636214 - RNA, 19 nt, Homo sapiens
  misc_RNA (1)...(19): siRNA sense strand
ggacaggaacauucauugc

SEQ ID NO: 636215 - RNA, 19 nt, Homo sapiens
  misc_RNA (1)...(19): siRNA sense strand
gaaggugcagacuacauca

SEQ ID NO: 636216 - RNA, 19 nt, Homo sapiens
  misc_RNA (1)...(19): siRNA sense strand
cagugucccuacguucaua

SEQ ID NO: 636217 - RNA, 19 nt, Homo sapiens
  misc_RNA (1)...(19): siRNA sense strand
ggaagagggaguagcugau

SEQ ID NO: 636218 - RNA, 19 nt, Homo sapiens
  misc_RNA (1)...(19): siRNA sense strand
cuguggagaugauuucaga

SEQ ID NO: 636219 - RNA, 19 nt, Homo sapiens
  misc_RNA (1)...(19): siRNA sense strand
cauccuaccauaugacuuc

SEQ ID NO: 636220 - RNA, 19 nt, Homo sapiens
  misc_RNA (1)...(19): siRNA sense strand
gauuagucuccaugaauga

SEQ ID NO: 636221 - RNA, 19 nt, Homo sapiens
  misc_RNA (1)...(19): siRNA sense strand
agacagaggagcaguacau

SEQ ID NO: 636222 - RNA, 19 nt, Homo sapiens
  misc_RNA (1)...(19): siRNA sense strand
gaccaucuccagccuucuu

SEQ ID NO: 636223 - RNA, 19 nt, Homo sapiens
  misc_RNA (1)...(19): siRNA sense strand
gugcaacugauguggauga

SEQ ID NO: 636224 - RNA, 19 nt, Homo sapiens
  misc_RNA (1)...(19): siRNA sense strand
acagaggagcaguacauuu

SEQ ID NO: 636225 - RNA, 19 nt, Homo sapiens
  misc_RNA (1)...(19): siRNA sense strand
cugacgagaugcaggaugu

SEQ ID NO: 636226 - RNA, 19 nt, Homo sapiens
  misc_RNA (1)...(19): siRNA sense strand
guagacacuuccggaucaa

SEQ ID NO: 636227 - RNA, 19 nt, Homo sapiens
  misc_RNA (1)...(19): siRNA sense strand
gggaguagcugauuucuuu

SEQ ID NO: 636228 - RNA, 19 nt, Homo sapiens
  misc_RNA (1)...(19): siRNA sense strand
caaagacucugacuauaaa

SEQ ID NO: 636229 - RNA, 19 nt, Homo sapiens
  misc_RNA (1)...(19): siRNA sense strand
caacaaaagucucagauua

SEQ ID NO: 636230 - RNA, 19 nt, Homo sapiens
  misc_RNA (1)...(19): siRNA sense strand
gaaaguauccugcaguuug

SEQ ID NO: 636231 - RNA, 19 nt, Homo sapiens
  misc_RNA (1)...(19): siRNA sense strand
acacaaacauccuaccaua

SEQ ID NO: 636232 - RNA, 19 nt, Homo sapiens
  misc_RNA (1)...(19): siRNA sense strand
caacugauguggaugaaga

SEQ ID NO: 636233 - RNA, 19 nt, Homo sapiens
  misc_RNA (1)...(19): siRNA sense strand
gagcaaaggucccaugauc

SEQ ID NO: 636234 - RNA, 19 nt, Homo sapiens
  misc_RNA (1)...(19): siRNA sense strand
caaguuggcuccagucaga

SEQ ID NO: 636235 - RNA, 19 nt, Homo sapiens
  misc_RNA (1)...(19): siRNA sense strand
ccaacuauauuccuggaua

SEQ ID NO: 636236 - RNA, 19 nt, Homo sapiens
  misc_RNA (1)...(19): siRNA sense strand
ccaaagacucugacuauaa

SEQ ID NO: 636237 - RNA, 19 nt, Homo sapiens
  misc_RNA (1)...(19): siRNA sense strand
caacuaugcugacgagaug

SEQ ID NO: 636238 - RNA, 19 nt, Homo sapiens
  misc_RNA (1)...(19): siRNA sense strand
guguggagcugguacauuu

SEQ ID NO: 636239 - RNA, 19 nt, Homo sapiens
  misc_RNA (1)...(19): siRNA sense strand
gaaauugauuggacuggau

SEQ ID NO: 636240 - RNA, 19 nt, Homo sapiens
  misc_RNA (1)...(19): siRNA sense strand
ggagaugauuucagaggaa

SEQ ID NO: 636241 - RNA, 19 nt, Homo sapiens
  misc_RNA (1)...(19): siRNA sense strand
caacaaugguuacagagau

SEQ ID NO: 636242 - RNA, 19 nt, Homo sapiens
  misc_RNA (1)...(19): siRNA sense strand
caaacauccuaccauauga

SEQ ID NO: 636243 - RNA, 19 nt, Homo sapiens
  misc_RNA (1)...(19): siRNA sense strand
aaaggagggugaaauguga

SEQ ID NO: 636244 - RNA, 19 nt, Homo sapiens
  misc_RNA (1)...(19): siRNA sense strand
cuacaucaaugccaacuau

SEQ ID NO: 636245 - RNA, 19 nt, Homo sapiens
  misc_RNA (1)...(19): siRNA sense strand
uuaaggauauggccaaaga

SEQ ID NO: 636246 - RNA, 19 nt, Homo sapiens
  misc_RNA (1)...(19): siRNA sense strand
gccaaagacucugacuaua

SEQ ID NO: 636247 - RNA, 19 nt, Homo sapiens
  misc_RNA (1)...(19): siRNA sense strand
gcugauuucuuugaaguuu

SEQ ID NO: 636248 - RNA, 19 nt, Homo sapiens
  misc_RNA (1)...(19): siRNA sense strand
ugacuuugaugccuauauu

SEQ ID NO: 636249 - RNA, 19 nt, Homo sapiens
  misc_RNA (1)...(19): siRNA sense strand
gcagauggcuagggagugu

SEQ ID NO: 636250 - RNA, 19 nt, Homo sapiens
  misc_RNA (1)...(19): siRNA sense strand
ggucauaccggaugucuau

SEQ ID NO: 636251 - RNA, 19 nt, Homo sapiens
  misc_RNA (1)...(19): siRNA sense strand
ggaagaugguccugcaaca

SEQ ID NO: 636252 - RNA, 19 nt, Homo sapiens
  misc_RNA (1)...(19): siRNA sense strand
cagaaaguauccugcaguu

SEQ ID NO: 636253 - RNA, 19 nt, Homo sapiens
  misc_RNA (1)...(19): siRNA sense strand
gaccauuacuggccauuca

SEQ ID NO: 636254 - RNA, 19 nt, Homo sapiens
  misc_RNA (1)...(19): siRNA sense strand
ggccaaagacucugacuau

SEQ ID NO: 636255 - RNA, 19 nt, Homo sapiens
  misc_RNA (1)...(19): siRNA sense strand
gaagagggaguagcugauu

SEQ ID NO: 636256 - RNA, 19 nt, Homo sapiens
  misc_RNA (1)...(19): siRNA sense strand
ugauguggaugaagaagaa

SEQ ID NO: 636257 - RNA, 19 nt, Homo sapiens
  misc_RNA (1)...(19): siRNA sense strand
gcaaaggucccaugaucau

SEQ ID NO: 636258 - RNA, 19 nt, Homo sapiens
  misc_RNA (1)...(19): siRNA sense strand
gcugguacauuugucaauu

SEQ ID NO: 636259 - RNA, 19 nt, Homo sapiens
  misc_RNA (1)...(19): siRNA sense strand
guucauagccgucucaaca

SEQ ID NO: 636260 - RNA, 19 nt, Homo sapiens
  misc_RNA (1)...(19): siRNA sense strand
agaaccagcuccacccaaa

SEQ ID NO: 636261 - RNA, 19 nt, Homo sapiens
  misc_RNA (1)...(19): siRNA sense strand
ucagugaugucauauacga

SEQ ID NO: 636262 - RNA, 19 nt, Homo sapiens
  misc_RNA (1)...(19): siRNA sense strand
cugcagaucuuccacugaa

SEQ ID NO: 636263 - RNA, 19 nt, Homo sapiens
  misc_RNA (1)...(19): siRNA sense strand
gggcuggugucagaaauga

SEQ ID NO: 636264 - RNA, 19 nt, Homo sapiens
  misc_RNA (1)...(19): siRNA sense strand
gcaaaugcugcagaaagua

SEQ ID NO: 636265 - RNA, 19 nt, Homo sapiens
  misc_RNA (1)...(19): siRNA sense strand
ggacggacaggaacauuca

SEQ ID NO: 636266 - RNA, 19 nt, Homo sapiens
  misc_RNA (1)...(19): siRNA sense strand
ggaaccaguugcuguuucu

SEQ ID NO: 636267 - RNA, 19 nt, Homo sapiens
  misc_RNA (1)...(19): siRNA sense strand
acaaacauccuaccauaug

SEQ ID NO: 636268 - RNA, 19 nt, Homo sapiens
  misc_RNA (1)...(19): siRNA sense strand
caucaaugccaacuauauu

SEQ ID NO: 636269 - RNA, 19 nt, Homo sapiens
  misc_RNA (1)...(19): siRNA sense strand
ucucaacaaugguuacaga

SEQ ID NO: 636270 - RNA, 19 nt, Homo sapiens
  misc_RNA (1)...(19): siRNA sense strand
gaagaugguccugcaacaa

SEQ ID NO: 636271 - RNA, 19 nt, Homo sapiens
  misc_RNA (1)...(19): siRNA sense strand
acacuuugcugcagaucuu

SEQ ID NO: 636272 - RNA, 19 nt, Homo sapiens
  misc_RNA (1)...(19): siRNA sense strand
uaauuggacuguugcuugu

SEQ ID NO: 636273 - RNA, 19 nt, Homo sapiens
  misc_RNA (1)...(19): siRNA sense strand
gaugaaucccaauguggua

SEQ ID NO: 636274 - RNA, 19 nt, Homo sapiens
  misc_RNA (1)...(19): siRNA sense strand
cuucagccgugugagauua

SEQ ID NO: 636275 - RNA, 19 nt, Homo sapiens
  misc_RNA (1)...(19): siRNA sense strand
uuaaagaagaggaaacuga

SEQ ID NO: 636276 - RNA, 19 nt, Homo sapiens
  misc_RNA (1)...(19): siRNA sense strand
agagagggauggaaagcuu

SEQ ID NO: 636277 - RNA, 19 nt, Homo sapiens
  misc_RNA (1)...(19): siRNA sense strand
ggaugacuuugaugccuau

SEQ ID NO: 636278 - RNA, 19 nt, Homo sapiens
  misc_RNA (1)...(19): siRNA sense strand
aaaguauccugcaguuugu

SEQ ID NO: 636279 - RNA, 19 nt, Homo sapiens
  misc_RNA (1)...(19): siRNA sense strand
caaaugcugcagaaaguau

SEQ ID NO: 636280 - RNA, 19 nt, Homo sapiens
  misc_RNA (1)...(19): siRNA sense strand
ugaagaagaagcagcaguu

SEQ ID NO: 636281 - RNA, 19 nt, Homo sapiens
  misc_RNA (1)...(19): siRNA sense strand
agauuagucuccaugaaug

SEQ ID NO: 636282 - RNA, 19 nt, Homo sapiens
  misc_RNA (1)...(19): siRNA sense strand
agaggaaggugcagacuac

SEQ ID NO: 636283 - RNA, 19 nt, Homo sapiens
  misc_RNA (1)...(19): siRNA sense strand
uguagacacuuccggauca

SEQ ID NO: 636284 - RNA, 19 nt, Homo sapiens
  misc_RNA (1)...(19): siRNA sense strand
ggaaggugcagacuacauc

SEQ ID NO: 636285 - RNA, 19 nt, Homo sapiens
  misc_RNA (1)...(19): siRNA sense strand
ggauauggccaaagacucu

SEQ ID NO: 636286 - RNA, 19 nt, Homo sapiens
  misc_RNA (1)...(19): siRNA sense strand
gaacaaaacccagacuuca

SEQ ID NO: 636287 - RNA, 19 nt, Homo sapiens
  misc_RNA (1)...(19): siRNA sense strand
agagaugaaucccaaugug

SEQ ID NO: 636288 - RNA, 19 nt, Homo sapiens
  misc_RNA (1)...(19): siRNA sense strand
ucuuagggcuggugucaga

SEQ ID NO: 636289 - RNA, 19 nt, Homo sapiens
  misc_RNA (1)...(19): siRNA sense strand
aagagggaguagcugauuu

SEQ ID NO: 636290 - RNA, 19 nt, Homo sapiens
  misc_RNA (1)...(19): siRNA sense strand
caacuauauuccuggauac

SEQ ID NO: 636291 - RNA, 19 nt, Homo sapiens
  misc_RNA (1)...(19): siRNA sense strand
uagcugauuucuuugaagu

SEQ ID NO: 636292 - RNA, 19 nt, Homo sapiens
  misc_RNA (1)...(19): siRNA sense strand
ucauagccgucucaacaau

SEQ ID NO: 636293 - RNA, 19 nt, Homo sapiens
  misc_RNA (1)...(19): siRNA sense strand
gaagaagaagcagcaguuc

SEQ ID NO: 636294 - RNA, 19 nt, Homo sapiens
  misc_RNA (1)...(19): siRNA sense strand
cugguacauuugucaauuu

SEQ ID NO: 636295 - RNA, 19 nt, Homo sapiens
  misc_RNA (1)...(19): siRNA sense strand
guuacccucauuauucuua

SEQ ID NO: 636296 - RNA, 19 nt, Homo sapiens
  misc_RNA (1)...(19): siRNA sense strand
auuggacuguugcuuguua

SEQ ID NO: 636297 - RNA, 19 nt, Homo sapiens
  misc_RNA (1)...(19): siRNA sense strand
ggugcagacuacaucaaug

SEQ ID NO: 636298 - RNA, 19 nt, Homo sapiens
  misc_RNA (1)...(19): siRNA sense strand
gcagaucuuccacugaauc

SEQ ID NO: 636299 - RNA, 19 nt, Homo sapiens
  misc_RNA (1)...(19): siRNA sense strand
gacuggauaucccacacuu

SEQ ID NO: 636300 - RNA, 19 nt, Homo sapiens
  misc_RNA (1)...(19): siRNA sense strand
uuugaggaguugaaauuga

SEQ ID NO: 636301 - RNA, 19 nt, Homo sapiens
  misc_RNA (1)...(19): siRNA sense strand
gacuuugaugccuauauua

SEQ ID NO: 636302 - RNA, 19 nt, Homo sapiens
  misc_RNA (1)...(19): siRNA sense strand
gaguagcugauuucuuuga

SEQ ID NO: 636303 - RNA, 19 nt, Homo sapiens
  misc_RNA (1)...(19): siRNA sense strand
gaaguuuucugucaacaag

SEQ ID NO: 636304 - RNA, 19 nt, Homo sapiens
  misc_RNA (1)...(19): siRNA sense strand
ccucauuauucuuaggaaa

SEQ ID NO: 636305 - RNA, 19 nt, Homo sapiens
  misc_RNA (1)...(19): siRNA sense strand
gaugucauauacgagaaug

SEQ ID NO: 636306 - RNA, 19 nt, Homo sapiens
  misc_RNA (1)...(19): siRNA sense strand
cgacagcaagcuaccaaga

SEQ ID NO: 636307 - RNA, 19 nt, Homo sapiens
  misc_RNA (1)...(19): siRNA sense strand
aagaugguccugcaacaaa

SEQ ID NO: 636308 - RNA, 19 nt, Homo sapiens
  misc_RNA (1)...(19): siRNA sense strand
gaucuuccacugaaucgau

SEQ ID NO: 636309 - RNA, 19 nt, Homo sapiens
  misc_RNA (1)...(19): siRNA sense strand
gaaagcuuccauacaacug

SEQ ID NO: 636310 - RNA, 19 nt, Homo sapiens
  misc_RNA (1)...(19): siRNA sense strand
uguagugucaccagcuuua

SEQ ID NO: 636311 - RNA, 19 nt, Homo sapiens
  misc_RNA (1)...(19): siRNA sense strand
gaaccagcuccacccaaau

SEQ ID NO: 636312 - RNA, 19 nt, Homo sapiens
  misc_RNA (1)...(19): siRNA sense strand
cuuguuacccucauuauuc

SEQ ID NO: 636313 - RNA, 19 nt, Homo sapiens
  misc_RNA (1)...(19): siRNA sense strand
cagaggagcaguacauuuu

SEQ ID NO: 636314 - RNA, 19 nt, Homo sapiens
  misc_RNA (1)...(19): siRNA sense strand
ggacaggaacauucauugc

SEQ ID NO: 636315 - RNA, 19 nt, Homo sapiens
  misc_RNA (1)...(19): siRNA sense strand
gaaggugcagacuacauca

SEQ ID NO: 636316 - RNA, 19 nt, Homo sapiens
  misc_RNA (1)...(19): siRNA sense strand
cagugucccuacguucaua

SEQ ID NO: 636317 - RNA, 19 nt, Homo sapiens
  misc_RNA (1)...(19): siRNA sense strand
ggaagagggaguagcugau

SEQ ID NO: 636318 - RNA, 19 nt, Homo sapiens
  misc_RNA (1)...(19): siRNA sense strand
cuguggagaugauuucaga

SEQ ID NO: 636319 - RNA, 19 nt, Homo sapiens
  misc_RNA (1)...(19): siRNA sense strand
cauccuaccauaugacuuc

SEQ ID NO: 636320 - RNA, 19 nt, Homo sapiens
  misc_RNA (1)...(19): siRNA sense strand
gauuagucuccaugaauga

SEQ ID NO: 636321 - RNA, 19 nt, Homo sapiens
  misc_RNA (1)...(19): siRNA sense strand
agacagaggagcaguacau

SEQ ID NO: 636322 - RNA, 19 nt, Homo sapiens
  misc_RNA (1)...(19): siRNA sense strand
gaccaucuccagccuucuu

SEQ ID NO: 636323 - RNA, 19 nt, Homo sapiens
  misc_RNA (1)...(19): siRNA sense strand
gugcaacugauguggauga

SEQ ID NO: 636324 - RNA, 19 nt, Homo sapiens
  misc_RNA (1)...(19): siRNA sense strand
acagaggagcaguacauuu

SEQ ID NO: 636325 - RNA, 19 nt, Homo sapiens
  misc_RNA (1)...(19): siRNA sense strand
cugacgagaugcaggaugu

SEQ ID NO: 636326 - RNA, 19 nt, Homo sapiens
  misc_RNA (1)...(19): siRNA sense strand
guagacacuuccggaucaa

SEQ ID NO: 636327 - RNA, 19 nt, Homo sapiens
  misc_RNA (1)...(19): siRNA sense strand
caaagacucugacuauaaa

SEQ ID NO: 636328 - RNA, 19 nt, Homo sapiens
  misc_RNA (1)...(19): siRNA sense strand
caacaaaagucucagauua

SEQ ID NO: 636329 - RNA, 19 nt, Homo sapiens
  misc_RNA (1)...(19): siRNA sense strand
gaaaguauccugcaguuug

SEQ ID NO: 636330 - RNA, 19 nt, Homo sapiens
  misc_RNA (1)...(19): siRNA sense strand
acacaaacauccuaccaua

SEQ ID NO: 636331 - RNA, 19 nt, Homo sapiens
  misc_RNA (1)...(19): siRNA sense strand
caacugauguggaugaaga

SEQ ID NO: 636332 - RNA, 19 nt, Homo sapiens
  misc_RNA (1)...(19): siRNA sense strand
gagcaaaggucccaugauc

SEQ ID NO: 636333 - RNA, 19 nt, Homo sapiens
  misc_RNA (1)...(19): siRNA sense strand
ccaacuauauuccuggaua

SEQ ID NO: 636334 - RNA, 19 nt, Homo sapiens
  misc_RNA (1)...(19): siRNA sense strand
ccaaagacucugacuauaa

SEQ ID NO: 636335 - RNA, 19 nt, Homo sapiens
  misc_RNA (1)...(19): siRNA sense strand
caacuaugcugacgagaug

SEQ ID NO: 636336 - RNA, 19 nt, Homo sapiens
  misc_RNA (1)...(19): siRNA sense strand
guguggagcugguacauuu

SEQ ID NO: 636337 - RNA, 19 nt, Homo sapiens
  misc_RNA (1)...(19): siRNA sense strand
gaaauugauuggacuggau

SEQ ID NO: 636338 - RNA, 19 nt, Homo sapiens
  misc_RNA (1)...(19): siRNA sense strand
ggagaugauuucagaggaa

SEQ ID NO: 636339 - RNA, 19 nt, Homo sapiens
  misc_RNA (1)...(19): siRNA sense strand
caaacauccuaccauauga

SEQ ID NO: 636340 - RNA, 19 nt, Homo sapiens
  misc_RNA (1)...(19): siRNA sense strand
aaaggagggugaaauguga

SEQ ID NO: 636341 - RNA, 19 nt, Homo sapiens
  misc_RNA (1)...(19): siRNA sense strand
cuacaucaaugccaacuau

SEQ ID NO: 636342 - RNA, 19 nt, Homo sapiens
  misc_RNA (1)...(19): siRNA sense strand
uuaaggauauggccaaaga

SEQ ID NO: 636343 - RNA, 19 nt, Homo sapiens
  misc_RNA (1)...(19): siRNA sense strand
gccaaagacucugacuaua

SEQ ID NO: 636344 - RNA, 19 nt, Homo sapiens
  misc_RNA (1)...(19): siRNA sense strand
ugacuuugaugccuauauu

SEQ ID NO: 636345 - RNA, 19 nt, Homo sapiens
  misc_RNA (1)...(19): siRNA sense strand
gcagauggcuagggagugu

SEQ ID NO: 636346 - RNA, 19 nt, Homo sapiens
  misc_RNA (1)...(19): siRNA sense strand
ggucauaccggaugucuau

SEQ ID NO: 636347 - RNA, 19 nt, Homo sapiens
  misc_RNA (1)...(19): siRNA sense strand
ggaagaugguccugcaaca

SEQ ID NO: 636348 - RNA, 19 nt, Homo sapiens
  misc_RNA (1)...(19): siRNA sense strand
cagaaaguauccugcaguu

SEQ ID NO: 636349 - RNA, 19 nt, Homo sapiens
  misc_RNA (1)...(19): siRNA sense strand
gaccauuacuggccauuca

SEQ ID NO: 636350 - RNA, 19 nt, Homo sapiens
  misc_RNA (1)...(19): siRNA sense strand
ggccaaagacucugacuau

SEQ ID NO: 636351 - RNA, 19 nt, Homo sapiens
  misc_RNA (1)...(19): siRNA sense strand
gcugguacauuugucaauu

SEQ ID NO: 636352 - RNA, 19 nt, Homo sapiens
  misc_RNA (1)...(19): siRNA sense strand
ugauguggaugaagaagaa

SEQ ID NO: 636353 - RNA, 19 nt, Homo sapiens
  misc_RNA (1)...(19): siRNA sense strand
gcaaaggucccaugaucau

SEQ ID NO: 636354 - RNA, 19 nt, Homo sapiens
  misc_RNA (1)...(19): siRNA sense strand
ucagugaugucauauacga

SEQ ID NO: 636355 - RNA, 19 nt, Homo sapiens
  misc_RNA (1)...(19): siRNA sense strand
cugcagaucuuccacugaa

SEQ ID NO: 636356 - RNA, 19 nt, Homo sapiens
  misc_RNA (1)...(19): siRNA sense strand
gggcuggugucagaaauga

SEQ ID NO: 636357 - RNA, 19 nt, Homo sapiens
  misc_RNA (1)...(19): siRNA sense strand
gcaaaugcugcagaaagua

SEQ ID NO: 636358 - RNA, 19 nt, Homo sapiens
  misc_RNA (1)...(19): siRNA sense strand
ggacggacaggaacauuca

SEQ ID NO: 636359 - RNA, 19 nt, Homo sapiens
  misc_RNA (1)...(19): siRNA sense strand
acaaacauccuaccauaug

SEQ ID NO: 636360 - RNA, 19 nt, Homo sapiens
  misc_RNA (1)...(19): siRNA sense strand
caucaaugccaacuauauu

SEQ ID NO: 636361 - RNA, 19 nt, Homo sapiens
  misc_RNA (1)...(19): siRNA sense strand
acacuuugcugcagaucuu

SEQ ID NO: 636362 - RNA, 19 nt, Homo sapiens
  misc_RNA (1)...(19): siRNA sense strand
gaagaugguccugcaacaa

SEQ ID NO: 636363 - RNA, 19 nt, Homo sapiens
  misc_RNA (1)...(19): siRNA sense strand
uaauuggacuguugcuugu

SEQ ID NO: 636364 - RNA, 19 nt, Homo sapiens
  misc_RNA (1)...(19): siRNA sense strand
agagagggauggaaagcuu

SEQ ID NO: 636365 - RNA, 19 nt, Homo sapiens
  misc_RNA (1)...(19): siRNA sense strand
gaugaaucccaauguggua

SEQ ID NO: 636366 - RNA, 19 nt, Homo sapiens
  misc_RNA (1)...(19): siRNA sense strand
cuucagccgugugagauua

SEQ ID NO: 636367 - RNA, 19 nt, Homo sapiens
  misc_RNA (1)...(19): siRNA sense strand
uuaaagaagaggaaacuga

SEQ ID NO: 636368 - RNA, 19 nt, Homo sapiens
  misc_RNA (1)...(19): siRNA sense strand
ggaugacuuugaugccuau

SEQ ID NO: 636369 - RNA, 19 nt, Homo sapiens
  misc_RNA (1)...(19): siRNA sense strand
aaaguauccugcaguuugu

SEQ ID NO: 636370 - RNA, 19 nt, Homo sapiens
  misc_RNA (1)...(19): siRNA sense strand
caaaugcugcagaaaguau

SEQ ID NO: 636371 - RNA, 19 nt, Homo sapiens
  misc_RNA (1)...(19): siRNA sense strand
ugaagaagaagcagcaguu

SEQ ID NO: 636372 - RNA, 19 nt, Homo sapiens
  misc_RNA (1)...(19): siRNA sense strand
agauuagucuccaugaaug

SEQ ID NO: 636373 - RNA, 19 nt, Homo sapiens
  misc_RNA (1)...(19): siRNA sense strand
agaggaaggugcagacuac

SEQ ID NO: 636374 - RNA, 19 nt, Homo sapiens
  misc_RNA (1)...(19): siRNA sense strand
uguagacacuuccggauca

SEQ ID NO: 636375 - RNA, 19 nt, Homo sapiens
  misc_RNA (1)...(19): siRNA sense strand
ggaaggugcagacuacauc

SEQ ID NO: 636376 - RNA, 19 nt, Homo sapiens
  misc_RNA (1)...(19): siRNA sense strand
ggauauggccaaagacucu

SEQ ID NO: 636377 - RNA, 19 nt, Homo sapiens
  misc_RNA (1)...(19): siRNA sense strand
caacuauauuccuggauac

SEQ ID NO: 636378 - RNA, 19 nt, Homo sapiens
  misc_RNA (1)...(19): siRNA sense strand
agagaugaaucccaaugug

SEQ ID NO: 636379 - RNA, 19 nt, Homo sapiens
  misc_RNA (1)...(19): siRNA sense strand
ucuuagggcuggugucaga

SEQ ID NO: 636380 - RNA, 19 nt, Homo sapiens
  misc_RNA (1)...(19): siRNA sense strand
cugguacauuugucaauuu

SEQ ID NO: 636381 - RNA, 19 nt, Homo sapiens
  misc_RNA (1)...(19): siRNA sense strand
gaagaagaagcagcaguuc

SEQ ID NO: 636382 - RNA, 19 nt, Homo sapiens
  misc_RNA (1)...(19): siRNA sense strand
guuacccucauuauucuua

SEQ ID NO: 636383 - RNA, 19 nt, Homo sapiens
  misc_RNA (1)...(19): siRNA sense strand
gacuuugaugccuauauua

SEQ ID NO: 636384 - RNA, 19 nt, Homo sapiens
  misc_RNA (1)...(19): siRNA sense strand
auuggacuguugcuuguua

SEQ ID NO: 636385 - RNA, 19 nt, Homo sapiens
  misc_RNA (1)...(19): siRNA sense strand
ggugcagacuacaucaaug

SEQ ID NO: 636386 - RNA, 19 nt, Homo sapiens
  misc_RNA (1)...(19): siRNA sense strand
gcagaucuuccacugaauc

SEQ ID NO: 636387 - RNA, 19 nt, Homo sapiens
  misc_RNA (1)...(19): siRNA sense strand
gacuggauaucccacacuu

SEQ ID NO: 636388 - RNA, 19 nt, Homo sapiens
  misc_RNA (1)...(19): siRNA sense strand
uuugaggaguugaaauuga

SEQ ID NO: 636389 - RNA, 19 nt, Homo sapiens
  misc_RNA (1)...(19): siRNA sense strand
gaaagcuuccauacaacug

SEQ ID NO: 636390 - RNA, 19 nt, Homo sapiens
  misc_RNA (1)...(19): siRNA sense strand
gaugucauauacgagaaug

SEQ ID NO: 636391 - RNA, 19 nt, Homo sapiens
  misc_RNA (1)...(19): siRNA sense strand
ccucauuauucuuaggaaa

SEQ ID NO: 636392 - RNA, 19 nt, Homo sapiens
  misc_RNA (1)...(19): siRNA sense strand
cgacagcaagcuaccaaga

SEQ ID NO: 636393 - RNA, 19 nt, Homo sapiens
  misc_RNA (1)...(19): siRNA sense strand
aagaugguccugcaacaaa

SEQ ID NO: 636394 - RNA, 19 nt, Homo sapiens
  misc_RNA (1)...(19): siRNA sense strand
gaucuuccacugaaucgau

SEQ ID NO: 636395 - RNA, 19 nt, Homo sapiens
  misc_RNA (1)...(19): siRNA sense strand
cuuguuacccucauuauuc

SEQ ID NO: 636396 - RNA, 19 nt, Homo sapiens
  misc_RNA (1)...(19): siRNA sense strand
cagaggagcaguacauuuu

SEQ ID NO: 636397 - RNA, 19 nt, Homo sapiens
  misc_RNA (1)...(19): siRNA sense strand
ggacaggaacauucauugc

SEQ ID NO: 636398 - RNA, 19 nt, Homo sapiens
  misc_RNA (1)...(19): siRNA sense strand
gaaggugcagacuacauca

SEQ ID NO: 636399 - RNA, 19 nt, Homo sapiens
  misc_RNA (1)...(19): siRNA sense strand
cauccuaccauaugacuuc

SEQ ID NO: 636400 - RNA, 19 nt, Homo sapiens
  misc_RNA (1)...(19): siRNA sense strand
cuguggagaugauuucaga

SEQ ID NO: 636401 - RNA, 19 nt, Homo sapiens
  misc_RNA (1)...(19): siRNA sense strand
gauuagucuccaugaauga

SEQ ID NO: 636402 - RNA, 19 nt, Homo sapiens
  misc_RNA (1)...(19): siRNA sense strand
agacagaggagcaguacau

SEQ ID NO: 636403 - RNA, 19 nt, Homo sapiens
  misc_RNA (1)...(19): siRNA sense strand
guagacacuuccggaucaa

SEQ ID NO: 636404 - RNA, 19 nt, Homo sapiens
  misc_RNA (1)...(19): siRNA sense strand
gugcaacugauguggauga

SEQ ID NO: 636405 - RNA, 19 nt, Homo sapiens
  misc_RNA (1)...(19): siRNA sense strand
acagaggagcaguacauuu

SEQ ID NO: 636406 - RNA, 19 nt, Homo sapiens
  misc_RNA (1)...(19): siRNA sense strand
cugacgagaugcaggaugu

SEQ ID NO: 636407 - RNA, 19 nt, Homo sapiens
  misc_RNA (1)...(19): siRNA sense strand
cuggauaucccacacuuug

SEQ ID NO: 636408 - RNA, 19 nt, Homo sapiens
  misc_RNA (1)...(19): siRNA sense strand
aaaggucccaugaucauuc

SEQ ID NO: 636409 - RNA, 19 nt, Homo sapiens
  misc_RNA (1)...(19): siRNA sense strand
caaaggucccaugaucauu

SEQ ID NO: 636410 - RNA, 19 nt, Homo sapiens
  misc_RNA (1)...(19): siRNA sense strand
ggacgacugggccuguaga

SEQ ID NO: 636411 - RNA, 19 nt, Homo sapiens
  misc_RNA (1)...(19): siRNA sense strand
cuccaugaaugaagaggaa

SEQ ID NO: 636412 - RNA, 19 nt, Homo sapiens
  misc_RNA (1)...(19): siRNA sense strand
uugaggaguugaaauugau

SEQ ID NO: 636413 - RNA, 19 nt, Homo sapiens
  misc_RNA (1)...(19): siRNA sense strand
ugacuucagccgugugaga

SEQ ID NO: 636414 - RNA, 19 nt, Homo sapiens
  misc_RNA (1)...(19): siRNA sense strand
aaauugauuggacuggaua

SEQ ID NO: 636415 - RNA, 19 nt, Homo sapiens
  misc_RNA (1)...(19): siRNA sense strand
gucauauacgagaauguua

SEQ ID NO: 636416 - RNA, 19 nt, Homo sapiens
  misc_RNA (1)...(19): siRNA sense strand
gugaugucauauacgagaa

SEQ ID NO: 636417 - RNA, 19 nt, Homo sapiens
  misc_RNA (1)...(19): siRNA sense strand
agaagaggaaacugacaaa

SEQ ID NO: 636418 - RNA, 19 nt, Homo sapiens
  misc_RNA (1)...(19): siRNA sense strand
gaaucccaaugugguagug

SEQ ID NO: 636419 - RNA, 19 nt, Homo sapiens
  misc_RNA (1)...(19): siRNA sense strand
ccacugaaucgauguaaaa

SEQ ID NO: 636420 - RNA, 19 nt, Homo sapiens
  misc_RNA (1)...(19): siRNA sense strand
gcaacaaaagucucagauu

SEQ ID NO: 636421 - RNA, 19 nt, Homo sapiens
  misc_RNA (1)...(19): siRNA sense strand
gcuuguuacccucauuauu

SEQ ID NO: 636422 - RNA, 19 nt, Homo sapiens
  misc_RNA (1)...(19): siRNA sense strand
cgagaugcaggaugugaug

SEQ ID NO: 636423 - RNA, 19 nt, Homo sapiens
  misc_RNA (1)...(19): siRNA sense strand
cacaaacauccuaccauau

SEQ ID NO: 636424 - RNA, 19 nt, Homo sapiens
  misc_RNA (1)...(19): siRNA sense strand
gugugcaacugauguggau

SEQ ID NO: 636425 - RNA, 19 nt, Homo sapiens
  misc_RNA (1)...(19): siRNA sense strand
gacagaggagcaguacauu

SEQ ID NO: 636426 - RNA, 19 nt, Homo sapiens
  misc_RNA (1)...(19): siRNA sense strand
ugucauauacgagaauguu

SEQ ID NO: 636427 - RNA, 19 nt, Homo sapiens
  misc_RNA (1)...(19): siRNA sense strand
caaagacucugacuauaaa

SEQ ID NO: 636428 - RNA, 19 nt, Homo sapiens
  misc_RNA (1)...(19): siRNA sense strand
caacaaaagucucagauua

SEQ ID NO: 636429 - RNA, 19 nt, Homo sapiens
  misc_RNA (1)...(19): siRNA sense strand
gaaaguauccugcaguuug

SEQ ID NO: 636430 - RNA, 19 nt, Homo sapiens
  misc_RNA (1)...(19): siRNA sense strand
acacaaacauccuaccaua

SEQ ID NO: 636431 - RNA, 19 nt, Homo sapiens
  misc_RNA (1)...(19): siRNA sense strand
caacugauguggaugaaga

SEQ ID NO: 636432 - RNA, 19 nt, Homo sapiens
  misc_RNA (1)...(19): siRNA sense strand
gagcaaaggucccaugauc

SEQ ID NO: 636433 - RNA, 19 nt, Homo sapiens
  misc_RNA (1)...(19): siRNA sense strand
ccaacuauauuccuggaua

SEQ ID NO: 636434 - RNA, 19 nt, Homo sapiens
  misc_RNA (1)...(19): siRNA sense strand
ccaaagacucugacuauaa

SEQ ID NO: 636435 - RNA, 19 nt, Homo sapiens
  misc_RNA (1)...(19): siRNA sense strand
caacuaugcugacgagaug

SEQ ID NO: 636436 - RNA, 19 nt, Homo sapiens
  misc_RNA (1)...(19): siRNA sense strand
guguggagcugguacauuu

SEQ ID NO: 636437 - RNA, 19 nt, Homo sapiens
  misc_RNA (1)...(19): siRNA sense strand
gaaauugauuggacuggau

SEQ ID NO: 636438 - RNA, 19 nt, Homo sapiens
  misc_RNA (1)...(19): siRNA sense strand
ggagaugauuucagaggaa

SEQ ID NO: 636439 - RNA, 19 nt, Homo sapiens
  misc_RNA (1)...(19): siRNA sense strand
caaacauccuaccauauga

SEQ ID NO: 636440 - RNA, 19 nt, Homo sapiens
  misc_RNA (1)...(19): siRNA sense strand
aaaggagggugaaauguga

SEQ ID NO: 636441 - RNA, 19 nt, Homo sapiens
  misc_RNA (1)...(19): siRNA sense strand
cuacaucaaugccaacuau

SEQ ID NO: 636442 - RNA, 19 nt, Homo sapiens
  misc_RNA (1)...(19): siRNA sense strand
uuaaggauauggccaaaga

SEQ ID NO: 636443 - RNA, 19 nt, Homo sapiens
  misc_RNA (1)...(19): siRNA sense strand
gccaaagacucugacuaua

SEQ ID NO: 636444 - RNA, 19 nt, Homo sapiens
  misc_RNA (1)...(19): siRNA sense strand
ugacuuugaugccuauauu

SEQ ID NO: 636445 - RNA, 19 nt, Homo sapiens
  misc_RNA (1)...(19): siRNA sense strand
gcagauggcuagggagugu

SEQ ID NO: 636446 - RNA, 19 nt, Homo sapiens
  misc_RNA (1)...(19): siRNA sense strand
ggucauaccggaugucuau

SEQ ID NO: 636447 - RNA, 19 nt, Homo sapiens
  misc_RNA (1)...(19): siRNA sense strand
ggaagaugguccugcaaca

SEQ ID NO: 636448 - RNA, 19 nt, Homo sapiens
  misc_RNA (1)...(19): siRNA sense strand
cagaaaguauccugcaguu

SEQ ID NO: 636449 - RNA, 19 nt, Homo sapiens
  misc_RNA (1)...(19): siRNA sense strand
gaccauuacuggccauuca

SEQ ID NO: 636450 - RNA, 19 nt, Homo sapiens
  misc_RNA (1)...(19): siRNA sense strand
ggccaaagacucugacuau

SEQ ID NO: 636451 - RNA, 19 nt, Homo sapiens
  misc_RNA (1)...(19): siRNA sense strand
gcugguacauuugucaauu

SEQ ID NO: 636452 - RNA, 19 nt, Homo sapiens
  misc_RNA (1)...(19): siRNA sense strand
ugauguggaugaagaagaa

SEQ ID NO: 636453 - RNA, 19 nt, Homo sapiens
  misc_RNA (1)...(19): siRNA sense strand
gcaaaggucccaugaucau

SEQ ID NO: 636454 - RNA, 19 nt, Homo sapiens
  misc_RNA (1)...(19): siRNA sense strand
ucagugaugucauauacga

SEQ ID NO: 636455 - RNA, 19 nt, Homo sapiens
  misc_RNA (1)...(19): siRNA sense strand
cugcagaucuuccacugaa

SEQ ID NO: 636456 - RNA, 19 nt, Homo sapiens
  misc_RNA (1)...(19): siRNA sense strand
gggcuggugucagaaauga

SEQ ID NO: 636457 - RNA, 19 nt, Homo sapiens
  misc_RNA (1)...(19): siRNA sense strand
gcaaaugcugcagaaagua

SEQ ID NO: 636458 - RNA, 19 nt, Homo sapiens
  misc_RNA (1)...(19): siRNA sense strand
ggacggacaggaacauuca

SEQ ID NO: 636459 - RNA, 19 nt, Homo sapiens
  misc_RNA (1)...(19): siRNA sense strand
acaaacauccuaccauaug

SEQ ID NO: 636460 - RNA, 19 nt, Homo sapiens
  misc_RNA (1)...(19): siRNA sense strand
caucaaugccaacuauauu

SEQ ID NO: 636461 - RNA, 19 nt, Homo sapiens
  misc_RNA (1)...(19): siRNA sense strand
acacuuugcugcagaucuu

SEQ ID NO: 636462 - RNA, 19 nt, Homo sapiens
  misc_RNA (1)...(19): siRNA sense strand
gaagaugguccugcaacaa

SEQ ID NO: 636463 - RNA, 19 nt, Homo sapiens
  misc_RNA (1)...(19): siRNA sense strand
uaauuggacuguugcuugu

SEQ ID NO: 636464 - RNA, 19 nt, Homo sapiens
  misc_RNA (1)...(19): siRNA sense strand
agagagggauggaaagcuu

SEQ ID NO: 636465 - RNA, 19 nt, Homo sapiens
  misc_RNA (1)...(19): siRNA sense strand
gaugaaucccaauguggua

SEQ ID NO: 636466 - RNA, 19 nt, Homo sapiens
  misc_RNA (1)...(19): siRNA sense strand
cuucagccgugugagauua

SEQ ID NO: 636467 - RNA, 19 nt, Homo sapiens
  misc_RNA (1)...(19): siRNA sense strand
uuaaagaagaggaaacuga

SEQ ID NO: 636468 - RNA, 19 nt, Homo sapiens
  misc_RNA (1)...(19): siRNA sense strand
ggaugacuuugaugccuau

SEQ ID NO: 636469 - RNA, 19 nt, Homo sapiens
  misc_RNA (1)...(19): siRNA sense strand
aaaguauccugcaguuugu

SEQ ID NO: 636470 - RNA, 19 nt, Homo sapiens
  misc_RNA (1)...(19): siRNA sense strand
caaaugcugcagaaaguau

SEQ ID NO: 636471 - RNA, 19 nt, Homo sapiens
  misc_RNA (1)...(19): siRNA sense strand
ugaagaagaagcagcaguu

SEQ ID NO: 636472 - RNA, 19 nt, Homo sapiens
  misc_RNA (1)...(19): siRNA sense strand
agauuagucuccaugaaug

SEQ ID NO: 636473 - RNA, 19 nt, Homo sapiens
  misc_RNA (1)...(19): siRNA sense strand
agaggaaggugcagacuac

SEQ ID NO: 636474 - RNA, 19 nt, Homo sapiens
  misc_RNA (1)...(19): siRNA sense strand
uguagacacuuccggauca

SEQ ID NO: 636475 - RNA, 19 nt, Homo sapiens
  misc_RNA (1)...(19): siRNA sense strand
ggaaggugcagacuacauc

SEQ ID NO: 636476 - RNA, 19 nt, Homo sapiens
  misc_RNA (1)...(19): siRNA sense strand
ggauauggccaaagacucu

SEQ ID NO: 636477 - RNA, 19 nt, Homo sapiens
  misc_RNA (1)...(19): siRNA sense strand
caacuauauuccuggauac

SEQ ID NO: 636478 - RNA, 19 nt, Homo sapiens
  misc_RNA (1)...(19): siRNA sense strand
agagaugaaucccaaugug

SEQ ID NO: 636479 - RNA, 19 nt, Homo sapiens
  misc_RNA (1)...(19): siRNA sense strand
ucuuagggcuggugucaga

SEQ ID NO: 636480 - RNA, 19 nt, Homo sapiens
  misc_RNA (1)...(19): siRNA sense strand
cugguacauuugucaauuu

SEQ ID NO: 636481 - RNA, 19 nt, Homo sapiens
  misc_RNA (1)...(19): siRNA sense strand
gaagaagaagcagcaguuc

SEQ ID NO: 636482 - RNA, 19 nt, Homo sapiens
  misc_RNA (1)...(19): siRNA sense strand
guuacccucauuauucuua

SEQ ID NO: 636483 - RNA, 19 nt, Homo sapiens
  misc_RNA (1)...(19): siRNA sense strand
gacuuugaugccuauauua

SEQ ID NO: 636484 - RNA, 19 nt, Homo sapiens
  misc_RNA (1)...(19): siRNA sense strand
auuggacuguugcuuguua

SEQ ID NO: 636485 - RNA, 19 nt, Homo sapiens
  misc_RNA (1)...(19): siRNA sense strand
ggugcagacuacaucaaug

SEQ ID NO: 636486 - RNA, 19 nt, Homo sapiens
  misc_RNA (1)...(19): siRNA sense strand
gcagaucuuccacugaauc

SEQ ID NO: 636487 - RNA, 19 nt, Homo sapiens
  misc_RNA (1)...(19): siRNA sense strand
gacuggauaucccacacuu

SEQ ID NO: 636488 - RNA, 19 nt, Homo sapiens
  misc_RNA (1)...(19): siRNA sense strand
uuugaggaguugaaauuga

SEQ ID NO: 636489 - RNA, 19 nt, Homo sapiens
  misc_RNA (1)...(19): siRNA sense strand
gaaagcuuccauacaacug

SEQ ID NO: 636490 - RNA, 19 nt, Homo sapiens
  misc_RNA (1)...(19): siRNA sense strand
gaugucauauacgagaaug

SEQ ID NO: 636491 - RNA, 19 nt, Homo sapiens
  misc_RNA (1)...(19): siRNA sense strand
ccucauuauucuuaggaaa

SEQ ID NO: 636492 - RNA, 19 nt, Homo sapiens
  misc_RNA (1)...(19): siRNA sense strand
cgacagcaagcuaccaaga

SEQ ID NO: 636493 - RNA, 19 nt, Homo sapiens
  misc_RNA (1)...(19): siRNA sense strand
aagaugguccugcaacaaa

SEQ ID NO: 636494 - RNA, 19 nt, Homo sapiens
  misc_RNA (1)...(19): siRNA sense strand
gaucuuccacugaaucgau

SEQ ID NO: 636495 - RNA, 19 nt, Homo sapiens
  misc_RNA (1)...(19): siRNA sense strand
cuuguuacccucauuauuc

SEQ ID NO: 636496 - RNA, 19 nt, Homo sapiens
  misc_RNA (1)...(19): siRNA sense strand
cagaggagcaguacauuuu

SEQ ID NO: 636497 - RNA, 19 nt, Homo sapiens
  misc_RNA (1)...(19): siRNA sense strand
ggacaggaacauucauugc

SEQ ID NO: 636498 - RNA, 19 nt, Homo sapiens
  misc_RNA (1)...(19): siRNA sense strand
gaaggugcagacuacauca

SEQ ID NO: 636499 - RNA, 19 nt, Homo sapiens
  misc_RNA (1)...(19): siRNA sense strand
cauccuaccauaugacuuc

SEQ ID NO: 636500 - RNA, 19 nt, Homo sapiens
  misc_RNA (1)...(19): siRNA sense strand
cuguggagaugauuucaga

SEQ ID NO: 636501 - RNA, 19 nt, Homo sapiens
  misc_RNA (1)...(19): siRNA sense strand
gauuagucuccaugaauga

SEQ ID NO: 636502 - RNA, 19 nt, Homo sapiens
  misc_RNA (1)...(19): siRNA sense strand
agacagaggagcaguacau

SEQ ID NO: 636503 - RNA, 19 nt, Homo sapiens
  misc_RNA (1)...(19): siRNA sense strand
guagacacuuccggaucaa

SEQ ID NO: 636504 - RNA, 19 nt, Homo sapiens
  misc_RNA (1)...(19): siRNA sense strand
gugcaacugauguggauga

SEQ ID NO: 636505 - RNA, 19 nt, Homo sapiens
  misc_RNA (1)...(19): siRNA sense strand
acagaggagcaguacauuu

SEQ ID NO: 636506 - RNA, 19 nt, Homo sapiens
  misc_RNA (1)...(19): siRNA sense strand
cugacgagaugcaggaugu

SEQ ID NO: 636507 - RNA, 19 nt, Homo sapiens
  misc_RNA (1)...(19): siRNA sense strand
cuggauaucccacacuuug

SEQ ID NO: 636508 - RNA, 19 nt, Homo sapiens
  misc_RNA (1)...(19): siRNA sense strand
aaaggucccaugaucauuc

SEQ ID NO: 636509 - RNA, 19 nt, Homo sapiens
  misc_RNA (1)...(19): siRNA sense strand
caaaggucccaugaucauu

SEQ ID NO: 636510 - RNA, 19 nt, Homo sapiens
  misc_RNA (1)...(19): siRNA sense strand
ggacgacugggccuguaga

SEQ ID NO: 636511 - RNA, 19 nt, Homo sapiens
  misc_RNA (1)...(19): siRNA sense strand
cuccaugaaugaagaggaa

SEQ ID NO: 636512 - RNA, 19 nt, Homo sapiens
  misc_RNA (1)...(19): siRNA sense strand
uugaggaguugaaauugau

SEQ ID NO: 636513 - RNA, 19 nt, Homo sapiens
  misc_RNA (1)...(19): siRNA sense strand
ugacuucagccgugugaga

SEQ ID NO: 636514 - RNA, 19 nt, Homo sapiens
  misc_RNA (1)...(19): siRNA sense strand
aaauugauuggacuggaua

SEQ ID NO: 636515 - RNA, 19 nt, Homo sapiens
  misc_RNA (1)...(19): siRNA sense strand
gucauauacgagaauguua

SEQ ID NO: 636516 - RNA, 19 nt, Homo sapiens
  misc_RNA (1)...(19): siRNA sense strand
gugaugucauauacgagaa

SEQ ID NO: 636517 - RNA, 19 nt, Homo sapiens
  misc_RNA (1)...(19): siRNA sense strand
agaagaggaaacugacaaa

SEQ ID NO: 636518 - RNA, 19 nt, Homo sapiens
  misc_RNA (1)...(19): siRNA sense strand
gaaucccaaugugguagug

SEQ ID NO: 636519 - RNA, 19 nt, Homo sapiens
  misc_RNA (1)...(19): siRNA sense strand
ccacugaaucgauguaaaa

SEQ ID NO: 636520 - RNA, 19 nt, Homo sapiens
  misc_RNA (1)...(19): siRNA sense strand
gcaacaaaagucucagauu

SEQ ID NO: 636521 - RNA, 19 nt, Homo sapiens
  misc_RNA (1)...(19): siRNA sense strand
gcuuguuacccucauuauu

SEQ ID NO: 636522 - RNA, 19 nt, Homo sapiens
  misc_RNA (1)...(19): siRNA sense strand
cgagaugcaggaugugaug

SEQ ID NO: 636523 - RNA, 19 nt, Homo sapiens
  misc_RNA (1)...(19): siRNA sense strand
cacaaacauccuaccauau

SEQ ID NO: 636524 - RNA, 19 nt, Homo sapiens
  misc_RNA (1)...(19): siRNA sense strand
gugugcaacugauguggau

SEQ ID NO: 636525 - RNA, 19 nt, Homo sapiens
  misc_RNA (1)...(19): siRNA sense strand
gacagaggagcaguacauu

SEQ ID NO: 636526 - RNA, 19 nt, Homo sapiens
  misc_RNA (1)...(19): siRNA sense strand
ugucauauacgagaauguu

SEQ ID NO: 636527 - RNA, 19 nt, Homo sapiens
  misc_RNA (1)...(19): siRNA sense strand
caaagacucugacuauaaa

SEQ ID NO: 636528 - RNA, 19 nt, Homo sapiens
  misc_RNA (1)...(19): siRNA sense strand
caacaaaagucucagauua

SEQ ID NO: 636529 - RNA, 19 nt, Homo sapiens
  misc_RNA (1)...(19): siRNA sense strand
gaaaguauccugcaguuug

SEQ ID NO: 636530 - RNA, 19 nt, Homo sapiens
  misc_RNA (1)...(19): siRNA sense strand
acacaaacauccuaccaua

SEQ ID NO: 636531 - RNA, 19 nt, Homo sapiens
  misc_RNA (1)...(19): siRNA sense strand
caacugauguggaugaaga

SEQ ID NO: 636532 - RNA, 19 nt, Homo sapiens
  misc_RNA (1)...(19): siRNA sense strand
gagcaaaggucccaugauc

SEQ ID NO: 636533 - RNA, 19 nt, Homo sapiens
  misc_RNA (1)...(19): siRNA sense strand
ccaacuauauuccuggaua

SEQ ID NO: 636534 - RNA, 19 nt, Homo sapiens
  misc_RNA (1)...(19): siRNA sense strand
ccaaagacucugacuauaa

SEQ ID NO: 636535 - RNA, 19 nt, Homo sapiens
  misc_RNA (1)...(19): siRNA sense strand
caacuaugcugacgagaug

SEQ ID NO: 636536 - RNA, 19 nt, Homo sapiens
  misc_RNA (1)...(19): siRNA sense strand
guguggagcugguacauuu

SEQ ID NO: 636537 - RNA, 19 nt, Homo sapiens
  misc_RNA (1)...(19): siRNA sense strand
gaaauugauuggacuggau

SEQ ID NO: 636538 - RNA, 19 nt, Homo sapiens
  misc_RNA (1)...(19): siRNA sense strand
ggagaugauuucagaggaa

SEQ ID NO: 636539 - RNA, 19 nt, Homo sapiens
  misc_RNA (1)...(19): siRNA sense strand
caaacauccuaccauauga

SEQ ID NO: 636540 - RNA, 19 nt, Homo sapiens
  misc_RNA (1)...(19): siRNA sense strand
aaaggagggugaaauguga

SEQ ID NO: 636541 - RNA, 19 nt, Homo sapiens
  misc_RNA (1)...(19): siRNA sense strand
cuacaucaaugccaacuau

SEQ ID NO: 636542 - RNA, 19 nt, Homo sapiens
  misc_RNA (1)...(19): siRNA sense strand
uuaaggauauggccaaaga

SEQ ID NO: 636543 - RNA, 19 nt, Homo sapiens
  misc_RNA (1)...(19): siRNA sense strand
gccaaagacucugacuaua

SEQ ID NO: 636544 - RNA, 19 nt, Homo sapiens
  misc_RNA (1)...(19): siRNA sense strand
ugacuuugaugccuauauu

SEQ ID NO: 636545 - RNA, 19 nt, Homo sapiens
  misc_RNA (1)...(19): siRNA sense strand
gcagauggcuagggagugu

SEQ ID NO: 636546 - RNA, 19 nt, Homo sapiens
  misc_RNA (1)...(19): siRNA sense strand
ggucauaccggaugucuau

SEQ ID NO: 636547 - RNA, 19 nt, Homo sapiens
  misc_RNA (1)...(19): siRNA sense strand
ggaagaugguccugcaaca

SEQ ID NO: 636548 - RNA, 19 nt, Homo sapiens
  misc_RNA (1)...(19): siRNA sense strand
cagaaaguauccugcaguu

SEQ ID NO: 636549 - RNA, 19 nt, Homo sapiens
  misc_RNA (1)...(19): siRNA sense strand
gaccauuacuggccauuca

SEQ ID NO: 636550 - RNA, 19 nt, Homo sapiens
  misc_RNA (1)...(19): siRNA sense strand
ggccaaagacucugacuau

SEQ ID NO: 636551 - RNA, 19 nt, Homo sapiens
  misc_RNA (1)...(19): siRNA sense strand
gcugguacauuugucaauu

SEQ ID NO: 636552 - RNA, 19 nt, Homo sapiens
  misc_RNA (1)...(19): siRNA sense strand
ugauguggaugaagaagaa

SEQ ID NO: 636553 - RNA, 19 nt, Homo sapiens
  misc_RNA (1)...(19): siRNA sense strand
gcaaaggucccaugaucau

SEQ ID NO: 636554 - RNA, 19 nt, Homo sapiens
  misc_RNA (1)...(19): siRNA sense strand
ucagugaugucauauacga

SEQ ID NO: 636555 - RNA, 19 nt, Homo sapiens
  misc_RNA (1)...(19): siRNA sense strand
cugcagaucuuccacugaa

SEQ ID NO: 636556 - RNA, 19 nt, Homo sapiens
  misc_RNA (1)...(19): siRNA sense strand
gggcuggugucagaaauga

SEQ ID NO: 636557 - RNA, 19 nt, Homo sapiens
  misc_RNA (1)...(19): siRNA sense strand
gcaaaugcugcagaaagua

SEQ ID NO: 636558 - RNA, 19 nt, Homo sapiens
  misc_RNA (1)...(19): siRNA sense strand
ggacggacaggaacauuca

SEQ ID NO: 636559 - RNA, 19 nt, Homo sapiens
  misc_RNA (1)...(19): siRNA sense strand
acaaacauccuaccauaug

SEQ ID NO: 636560 - RNA, 19 nt, Homo sapiens
  misc_RNA (1)...(19): siRNA sense strand
caucaaugccaacuauauu

SEQ ID NO: 636561 - RNA, 19 nt, Homo sapiens
  misc_RNA (1)...(19): siRNA sense strand
acacuuugcugcagaucuu

SEQ ID NO: 636562 - RNA, 19 nt, Homo sapiens
  misc_RNA (1)...(19): siRNA sense strand
gaagaugguccugcaacaa

SEQ ID NO: 636563 - RNA, 19 nt, Homo sapiens
  misc_RNA (1)...(19): siRNA sense strand
uaauuggacuguugcuugu

SEQ ID NO: 636564 - RNA, 19 nt, Homo sapiens
  misc_RNA (1)...(19): siRNA sense strand
agagagggauggaaagcuu

SEQ ID NO: 636565 - RNA, 19 nt, Homo sapiens
  misc_RNA (1)...(19): siRNA sense strand
gaugaaucccaauguggua

SEQ ID NO: 636566 - RNA, 19 nt, Homo sapiens
  misc_RNA (1)...(19): siRNA sense strand
cuucagccgugugagauua

SEQ ID NO: 636567 - RNA, 19 nt, Homo sapiens
  misc_RNA (1)...(19): siRNA sense strand
uuaaagaagaggaaacuga

SEQ ID NO: 636568 - RNA, 19 nt, Homo sapiens
  misc_RNA (1)...(19): siRNA sense strand
ggaugacuuugaugccuau

SEQ ID NO: 636569 - RNA, 19 nt, Homo sapiens
  misc_RNA (1)...(19): siRNA sense strand
aaaguauccugcaguuugu

SEQ ID NO: 636570 - RNA, 19 nt, Homo sapiens
  misc_RNA (1)...(19): siRNA sense strand
caaaugcugcagaaaguau

SEQ ID NO: 636571 - RNA, 19 nt, Homo sapiens
  misc_RNA (1)...(19): siRNA sense strand
ugaagaagaagcagcaguu

SEQ ID NO: 636572 - RNA, 19 nt, Homo sapiens
  misc_RNA (1)...(19): siRNA sense strand
agauuagucuccaugaaug

SEQ ID NO: 636573 - RNA, 19 nt, Homo sapiens
  misc_RNA (1)...(19): siRNA sense strand
agaggaaggugcagacuac

SEQ ID NO: 636574 - RNA, 19 nt, Homo sapiens
  misc_RNA (1)...(19): siRNA sense strand
uguagacacuuccggauca

SEQ ID NO: 636575 - RNA, 19 nt, Homo sapiens
  misc_RNA (1)...(19): siRNA sense strand
ggaaggugcagacuacauc

SEQ ID NO: 636576 - RNA, 19 nt, Homo sapiens
  misc_RNA (1)...(19): siRNA sense strand
ggauauggccaaagacucu

SEQ ID NO: 636577 - RNA, 19 nt, Homo sapiens
  misc_RNA (1)...(19): siRNA sense strand
caacuauauuccuggauac

SEQ ID NO: 636578 - RNA, 19 nt, Homo sapiens
  misc_RNA (1)...(19): siRNA sense strand
agagaugaaucccaaugug

SEQ ID NO: 636579 - RNA, 19 nt, Homo sapiens
  misc_RNA (1)...(19): siRNA sense strand
ucuuagggcuggugucaga

SEQ ID NO: 636580 - RNA, 19 nt, Homo sapiens
  misc_RNA (1)...(19): siRNA sense strand
cugguacauuugucaauuu

SEQ ID NO: 636581 - RNA, 19 nt, Homo sapiens
  misc_RNA (1)...(19): siRNA sense strand
gaagaagaagcagcaguuc

SEQ ID NO: 636582 - RNA, 19 nt, Homo sapiens
  misc_RNA (1)...(19): siRNA sense strand
guuacccucauuauucuua

SEQ ID NO: 636583 - RNA, 19 nt, Homo sapiens
  misc_RNA (1)...(19): siRNA sense strand
gacuuugaugccuauauua

SEQ ID NO: 636584 - RNA, 19 nt, Homo sapiens
  misc_RNA (1)...(19): siRNA sense strand
auuggacuguugcuuguua

SEQ ID NO: 636585 - RNA, 19 nt, Homo sapiens
  misc_RNA (1)...(19): siRNA sense strand
ggugcagacuacaucaaug

SEQ ID NO: 636586 - RNA, 19 nt, Homo sapiens
  misc_RNA (1)...(19): siRNA sense strand
gcagaucuuccacugaauc

SEQ ID NO: 636587 - RNA, 19 nt, Homo sapiens
  misc_RNA (1)...(19): siRNA sense strand
gacuggauaucccacacuu

SEQ ID NO: 636588 - RNA, 19 nt, Homo sapiens
  misc_RNA (1)...(19): siRNA sense strand
uuugaggaguugaaauuga

SEQ ID NO: 636589 - RNA, 19 nt, Homo sapiens
  misc_RNA (1)...(19): siRNA sense strand
gaaagcuuccauacaacug

SEQ ID NO: 636590 - RNA, 19 nt, Homo sapiens
  misc_RNA (1)...(19): siRNA sense strand
gaugucauauacgagaaug

SEQ ID NO: 636591 - RNA, 19 nt, Homo sapiens
  misc_RNA (1)...(19): siRNA sense strand
ccucauuauucuuaggaaa

SEQ ID NO: 636592 - RNA, 19 nt, Homo sapiens
  misc_RNA (1)...(19): siRNA sense strand
cgacagcaagcuaccaaga

SEQ ID NO: 636593 - RNA, 19 nt, Homo sapiens
  misc_RNA (1)...(19): siRNA sense strand
aagaugguccugcaacaaa

SEQ ID NO: 636594 - RNA, 19 nt, Homo sapiens
  misc_RNA (1)...(19): siRNA sense strand
gaucuuccacugaaucgau

SEQ ID NO: 636595 - RNA, 19 nt, Homo sapiens
  misc_RNA (1)...(19): siRNA sense strand
cuuguuacccucauuauuc

SEQ ID NO: 636596 - RNA, 19 nt, Homo sapiens
  misc_RNA (1)...(19): siRNA sense strand
cagaggagcaguacauuuu

SEQ ID NO: 636597 - RNA, 19 nt, Homo sapiens
  misc_RNA (1)...(19): siRNA sense strand
ggacaggaacauucauugc

SEQ ID NO: 636598 - RNA, 19 nt, Homo sapiens
  misc_RNA (1)...(19): siRNA sense strand
gaaggugcagacuacauca

SEQ ID NO: 636599 - RNA, 19 nt, Homo sapiens
  misc_RNA (1)...(19): siRNA sense strand
cauccuaccauaugacuuc

SEQ ID NO: 636600 - RNA, 19 nt, Homo sapiens
  misc_RNA (1)...(19): siRNA sense strand
cuguggagaugauuucaga

SEQ ID NO: 636601 - RNA, 19 nt, Homo sapiens
  misc_RNA (1)...(19): siRNA sense strand
gauuagucuccaugaauga

SEQ ID NO: 636602 - RNA, 19 nt, Homo sapiens
  misc_RNA (1)...(19): siRNA sense strand
agacagaggagcaguacau

SEQ ID NO: 636603 - RNA, 19 nt, Homo sapiens
  misc_RNA (1)...(19): siRNA sense strand
guagacacuuccggaucaa

SEQ ID NO: 636604 - RNA, 19 nt, Homo sapiens
  misc_RNA (1)...(19): siRNA sense strand
gugcaacugauguggauga

SEQ ID NO: 636605 - RNA, 19 nt, Homo sapiens
  misc_RNA (1)...(19): siRNA sense strand
acagaggagcaguacauuu

SEQ ID NO: 636606 - RNA, 19 nt, Homo sapiens
  misc_RNA (1)...(19): siRNA sense strand
cugacgagaugcaggaugu

SEQ ID NO: 636607 - RNA, 19 nt, Homo sapiens
  misc_RNA (1)...(19): siRNA sense strand
cuggauaucccacacuuug

SEQ ID NO: 636608 - RNA, 19 nt, Homo sapiens
  misc_RNA (1)...(19): siRNA sense strand
aaaggucccaugaucauuc

SEQ ID NO: 636609 - RNA, 19 nt, Homo sapiens
  misc_RNA (1)...(19): siRNA sense strand
caaaggucccaugaucauu

SEQ ID NO: 636610 - RNA, 19 nt, Homo sapiens
  misc_RNA (1)...(19): siRNA sense strand
ggacgacugggccuguaga

SEQ ID NO: 636611 - RNA, 19 nt, Homo sapiens
  misc_RNA (1)...(19): siRNA sense strand
cuccaugaaugaagaggaa

SEQ ID NO: 636612 - RNA, 19 nt, Homo sapiens
  misc_RNA (1)...(19): siRNA sense strand
uugaggaguugaaauugau

SEQ ID NO: 636613 - RNA, 19 nt, Homo sapiens
  misc_RNA (1)...(19): siRNA sense strand
ugacuucagccgugugaga

SEQ ID NO: 636614 - RNA, 19 nt, Homo sapiens
  misc_RNA (1)...(19): siRNA sense strand
aaauugauuggacuggaua

SEQ ID NO: 636615 - RNA, 19 nt, Homo sapiens
  misc_RNA (1)...(19): siRNA sense strand
gucauauacgagaauguua

SEQ ID NO: 636616 - RNA, 19 nt, Homo sapiens
  misc_RNA (1)...(19): siRNA sense strand
gugaugucauauacgagaa

SEQ ID NO: 636617 - RNA, 19 nt, Homo sapiens
  misc_RNA (1)...(19): siRNA sense strand
agaagaggaaacugacaaa

SEQ ID NO: 636618 - RNA, 19 nt, Homo sapiens
  misc_RNA (1)...(19): siRNA sense strand
gaaucccaaugugguagug

SEQ ID NO: 636619 - RNA, 19 nt, Homo sapiens
  misc_RNA (1)...(19): siRNA sense strand
ccacugaaucgauguaaaa

SEQ ID NO: 636620 - RNA, 19 nt, Homo sapiens
  misc_RNA (1)...(19): siRNA sense strand
gcaacaaaagucucagauu

SEQ ID NO: 636621 - RNA, 19 nt, Homo sapiens
  misc_RNA (1)...(19): siRNA sense strand
gcuuguuacccucauuauu

SEQ ID NO: 636622 - RNA, 19 nt, Homo sapiens
  misc_RNA (1)...(19): siRNA sense strand
cgagaugcaggaugugaug

SEQ ID NO: 636623 - RNA, 19 nt, Homo sapiens
  misc_RNA (1)...(19): siRNA sense strand
cacaaacauccuaccauau

SEQ ID NO: 636624 - RNA, 19 nt, Homo sapiens
  misc_RNA (1)...(19): siRNA sense strand
gugugcaacugauguggau

SEQ ID NO: 636625 - RNA, 19 nt, Homo sapiens
  misc_RNA (1)...(19): siRNA sense strand
gacagaggagcaguacauu

SEQ ID NO: 636626 - RNA, 19 nt, Homo sapiens
  misc_RNA (1)...(19): siRNA sense strand
ugucauauacgagaauguu

SEQ ID NO: 636627 - RNA, 19 nt, Homo sapiens
  misc_RNA (1)...(19): siRNA sense strand
caaagacucugacuauaaa

SEQ ID NO: 636628 - RNA, 19 nt, Homo sapiens
  misc_RNA (1)...(19): siRNA sense strand
caacaaaagucucagauua

SEQ ID NO: 636629 - RNA, 19 nt, Homo sapiens
  misc_RNA (1)...(19): siRNA sense strand
gaaaguauccugcaguuug

SEQ ID NO: 636630 - RNA, 19 nt, Homo sapiens
  misc_RNA (1)...(19): siRNA sense strand
acacaaacauccuaccaua

SEQ ID NO: 636631 - RNA, 19 nt, Homo sapiens
  misc_RNA (1)...(19): siRNA sense strand
caacugauguggaugaaga

SEQ ID NO: 636632 - RNA, 19 nt, Homo sapiens
  misc_RNA (1)...(19): siRNA sense strand
gagcaaaggucccaugauc

SEQ ID NO: 636633 - RNA, 19 nt, Homo sapiens
  misc_RNA (1)...(19): siRNA sense strand
ccaacuauauuccuggaua

SEQ ID NO: 636634 - RNA, 19 nt, Homo sapiens
  misc_RNA (1)...(19): siRNA sense strand
ccaaagacucugacuauaa

SEQ ID NO: 636635 - RNA, 19 nt, Homo sapiens
  misc_RNA (1)...(19): siRNA sense strand
caacuaugcugacgagaug

SEQ ID NO: 636636 - RNA, 19 nt, Homo sapiens
  misc_RNA (1)...(19): siRNA sense strand
guguggagcugguacauuu

SEQ ID NO: 636637 - RNA, 19 nt, Homo sapiens
  misc_RNA (1)...(19): siRNA sense strand
gaaauugauuggacuggau

SEQ ID NO: 636638 - RNA, 19 nt, Homo sapiens
  misc_RNA (1)...(19): siRNA sense strand
ggagaugauuucagaggaa

SEQ ID NO: 636639 - RNA, 19 nt, Homo sapiens
  misc_RNA (1)...(19): siRNA sense strand
caaacauccuaccauauga

SEQ ID NO: 636640 - RNA, 19 nt, Homo sapiens
  misc_RNA (1)...(19): siRNA sense strand
aaaggagggugaaauguga

SEQ ID NO: 636641 - RNA, 19 nt, Homo sapiens
  misc_RNA (1)...(19): siRNA sense strand
cuacaucaaugccaacuau

SEQ ID NO: 636642 - RNA, 19 nt, Homo sapiens
  misc_RNA (1)...(19): siRNA sense strand
uuaaggauauggccaaaga

SEQ ID NO: 636643 - RNA, 19 nt, Homo sapiens
  misc_RNA (1)...(19): siRNA sense strand
gccaaagacucugacuaua

SEQ ID NO: 636644 - RNA, 19 nt, Homo sapiens
  misc_RNA (1)...(19): siRNA sense strand
ugacuuugaugccuauauu

SEQ ID NO: 636645 - RNA, 19 nt, Homo sapiens
  misc_RNA (1)...(19): siRNA sense strand
gcagauggcuagggagugu

SEQ ID NO: 636646 - RNA, 19 nt, Homo sapiens
  misc_RNA (1)...(19): siRNA sense strand
ggucauaccggaugucuau

SEQ ID NO: 636647 - RNA, 19 nt, Homo sapiens
  misc_RNA (1)...(19): siRNA sense strand
ggaagaugguccugcaaca

SEQ ID NO: 636648 - RNA, 19 nt, Homo sapiens
  misc_RNA (1)...(19): siRNA sense strand
cagaaaguauccugcaguu

SEQ ID NO: 636649 - RNA, 19 nt, Homo sapiens
  misc_RNA (1)...(19): siRNA sense strand
gaccauuacuggccauuca

SEQ ID NO: 636650 - RNA, 19 nt, Homo sapiens
  misc_RNA (1)...(19): siRNA sense strand
ggccaaagacucugacuau

SEQ ID NO: 636651 - RNA, 19 nt, Homo sapiens
  misc_RNA (1)...(19): siRNA sense strand
gcugguacauuugucaauu

SEQ ID NO: 636652 - RNA, 19 nt, Homo sapiens
  misc_RNA (1)...(19): siRNA sense strand
ugauguggaugaagaagaa

SEQ ID NO: 636653 - RNA, 19 nt, Homo sapiens
  misc_RNA (1)...(19): siRNA sense strand
gcaaaggucccaugaucau

SEQ ID NO: 636654 - RNA, 19 nt, Homo sapiens
  misc_RNA (1)...(19): siRNA sense strand
ucagugaugucauauacga

SEQ ID NO: 636655 - RNA, 19 nt, Homo sapiens
  misc_RNA (1)...(19): siRNA sense strand
cugcagaucuuccacugaa

SEQ ID NO: 636656 - RNA, 19 nt, Homo sapiens
  misc_RNA (1)...(19): siRNA sense strand
gggcuggugucagaaauga

SEQ ID NO: 636657 - RNA, 19 nt, Homo sapiens
  misc_RNA (1)...(19): siRNA sense strand
gcaaaugcugcagaaagua

SEQ ID NO: 636658 - RNA, 19 nt, Homo sapiens
  misc_RNA (1)...(19): siRNA sense strand
ggacggacaggaacauuca

SEQ ID NO: 636659 - RNA, 19 nt, Homo sapiens
  misc_RNA (1)...(19): siRNA sense strand
acaaacauccuaccauaug

SEQ ID NO: 636660 - RNA, 19 nt, Homo sapiens
  misc_RNA (1)...(19): siRNA sense strand
caucaaugccaacuauauu

SEQ ID NO: 636661 - RNA, 19 nt, Homo sapiens
  misc_RNA (1)...(19): siRNA sense strand
acacuuugcugcagaucuu

SEQ ID NO: 636662 - RNA, 19 nt, Homo sapiens
  misc_RNA (1)...(19): siRNA sense strand
gaagaugguccugcaacaa

SEQ ID NO: 636663 - RNA, 19 nt, Homo sapiens
  misc_RNA (1)...(19): siRNA sense strand
uaauuggacuguugcuugu

SEQ ID NO: 636664 - RNA, 19 nt, Homo sapiens
  misc_RNA (1)...(19): siRNA sense strand
agagagggauggaaagcuu

SEQ ID NO: 636665 - RNA, 19 nt, Homo sapiens
  misc_RNA (1)...(19): siRNA sense strand
gaugaaucccaauguggua

SEQ ID NO: 636666 - RNA, 19 nt, Homo sapiens
  misc_RNA (1)...(19): siRNA sense strand
cuucagccgugugagauua

SEQ ID NO: 636667 - RNA, 19 nt, Homo sapiens
  misc_RNA (1)...(19): siRNA sense strand
uuaaagaagaggaaacuga

SEQ ID NO: 636668 - RNA, 19 nt, Homo sapiens
  misc_RNA (1)...(19): siRNA sense strand
ggaugacuuugaugccuau

SEQ ID NO: 636669 - RNA, 19 nt, Homo sapiens
  misc_RNA (1)...(19): siRNA sense strand
aaaguauccugcaguuugu

SEQ ID NO: 636670 - RNA, 19 nt, Homo sapiens
  misc_RNA (1)...(19): siRNA sense strand
caaaugcugcagaaaguau

SEQ ID NO: 636671 - RNA, 19 nt, Homo sapiens
  misc_RNA (1)...(19): siRNA sense strand
ugaagaagaagcagcaguu

SEQ ID NO: 636672 - RNA, 19 nt, Homo sapiens
  misc_RNA (1)...(19): siRNA sense strand
agauuagucuccaugaaug

SEQ ID NO: 636673 - RNA, 19 nt, Homo sapiens
  misc_RNA (1)...(19): siRNA sense strand
agaggaaggugcagacuac

SEQ ID NO: 636674 - RNA, 19 nt, Homo sapiens
  misc_RNA (1)...(19): siRNA sense strand
uguagacacuuccggauca

SEQ ID NO: 636675 - RNA, 19 nt, Homo sapiens
  misc_RNA (1)...(19): siRNA sense strand
ggaaggugcagacuacauc

SEQ ID NO: 636676 - RNA, 19 nt, Homo sapiens
  misc_RNA (1)...(19): siRNA sense strand
ggauauggccaaagacucu

SEQ ID NO: 636677 - RNA, 19 nt, Homo sapiens
  misc_RNA (1)...(19): siRNA sense strand
caacuauauuccuggauac

SEQ ID NO: 636678 - RNA, 19 nt, Homo sapiens
  misc_RNA (1)...(19): siRNA sense strand
agagaugaaucccaaugug

SEQ ID NO: 636679 - RNA, 19 nt, Homo sapiens
  misc_RNA (1)...(19): siRNA sense strand
ucuuagggcuggugucaga

SEQ ID NO: 636680 - RNA, 19 nt, Homo sapiens
  misc_RNA (1)...(19): siRNA sense strand
cugguacauuugucaauuu

SEQ ID NO: 636681 - RNA, 19 nt, Homo sapiens
  misc_RNA (1)...(19): siRNA sense strand
gaagaagaagcagcaguuc

SEQ ID NO: 636682 - RNA, 19 nt, Homo sapiens
  misc_RNA (1)...(19): siRNA sense strand
guuacccucauuauucuua

SEQ ID NO: 636683 - RNA, 19 nt, Homo sapiens
  misc_RNA (1)...(19): siRNA sense strand
gacuuugaugccuauauua

SEQ ID NO: 636684 - RNA, 19 nt, Homo sapiens
  misc_RNA (1)...(19): siRNA sense strand
auuggacuguugcuuguua

SEQ ID NO: 636685 - RNA, 19 nt, Homo sapiens
  misc_RNA (1)...(19): siRNA sense strand
ggugcagacuacaucaaug

SEQ ID NO: 636686 - RNA, 19 nt, Homo sapiens
  misc_RNA (1)...(19): siRNA sense strand
gcagaucuuccacugaauc

SEQ ID NO: 636687 - RNA, 19 nt, Homo sapiens
  misc_RNA (1)...(19): siRNA sense strand
gacuggauaucccacacuu

SEQ ID NO: 636688 - RNA, 19 nt, Homo sapiens
  misc_RNA (1)...(19): siRNA sense strand
uuugaggaguugaaauuga

SEQ ID NO: 636689 - RNA, 19 nt, Homo sapiens
  misc_RNA (1)...(19): siRNA sense strand
gaaagcuuccauacaacug

SEQ ID NO: 636690 - RNA, 19 nt, Homo sapiens
  misc_RNA (1)...(19): siRNA sense strand
gaugucauauacgagaaug

SEQ ID NO: 636691 - RNA, 19 nt, Homo sapiens
  misc_RNA (1)...(19): siRNA sense strand
ccucauuauucuuaggaaa

SEQ ID NO: 636692 - RNA, 19 nt, Homo sapiens
  misc_RNA (1)...(19): siRNA sense strand
cgacagcaagcuaccaaga

SEQ ID NO: 636693 - RNA, 19 nt, Homo sapiens
  misc_RNA (1)...(19): siRNA sense strand
aagaugguccugcaacaaa

SEQ ID NO: 636694 - RNA, 19 nt, Homo sapiens
  misc_RNA (1)...(19): siRNA sense strand
gaucuuccacugaaucgau

SEQ ID NO: 636695 - RNA, 19 nt, Homo sapiens
  misc_RNA (1)...(19): siRNA sense strand
cuuguuacccucauuauuc

SEQ ID NO: 636696 - RNA, 19 nt, Homo sapiens
  misc_RNA (1)...(19): siRNA sense strand
cagaggagcaguacauuuu

SEQ ID NO: 636697 - RNA, 19 nt, Homo sapiens
  misc_RNA (1)...(19): siRNA sense strand
ggacaggaacauucauugc

SEQ ID NO: 636698 - RNA, 19 nt, Homo sapiens
  misc_RNA (1)...(19): siRNA sense strand
gaaggugcagacuacauca

SEQ ID NO: 636699 - RNA, 19 nt, Homo sapiens
  misc_RNA (1)...(19): siRNA sense strand
cauccuaccauaugacuuc

SEQ ID NO: 636700 - RNA, 19 nt, Homo sapiens
  misc_RNA (1)...(19): siRNA sense strand
cuguggagaugauuucaga

SEQ ID NO: 636701 - RNA, 19 nt, Homo sapiens
  misc_RNA (1)...(19): siRNA sense strand
gauuagucuccaugaauga

SEQ ID NO: 636702 - RNA, 19 nt, Homo sapiens
  misc_RNA (1)...(19): siRNA sense strand
agacagaggagcaguacau

SEQ ID NO: 636703 - RNA, 19 nt, Homo sapiens
  misc_RNA (1)...(19): siRNA sense strand
guagacacuuccggaucaa

SEQ ID NO: 636704 - RNA, 19 nt, Homo sapiens
  misc_RNA (1)...(19): siRNA sense strand
gugcaacugauguggauga

SEQ ID NO: 636705 - RNA, 19 nt, Homo sapiens
  misc_RNA (1)...(19): siRNA sense strand
acagaggagcaguacauuu

SEQ ID NO: 636706 - RNA, 19 nt, Homo sapiens
  misc_RNA (1)...(19): siRNA sense strand
cugacgagaugcaggaugu

SEQ ID NO: 636707 - RNA, 19 nt, Homo sapiens
  misc_RNA (1)...(19): siRNA sense strand
cuggauaucccacacuuug

SEQ ID NO: 636708 - RNA, 19 nt, Homo sapiens
  misc_RNA (1)...(19): siRNA sense strand
aaaggucccaugaucauuc

SEQ ID NO: 636709 - RNA, 19 nt, Homo sapiens
  misc_RNA (1)...(19): siRNA sense strand
caaaggucccaugaucauu

SEQ ID NO: 636710 - RNA, 19 nt, Homo sapiens
  misc_RNA (1)...(19): siRNA sense strand
ggacgacugggccuguaga

SEQ ID NO: 636711 - RNA, 19 nt, Homo sapiens
  misc_RNA (1)...(19): siRNA sense strand
cuccaugaaugaagaggaa

SEQ ID NO: 636712 - RNA, 19 nt, Homo sapiens
  misc_RNA (1)...(19): siRNA sense strand
uugaggaguugaaauugau

SEQ ID NO: 636713 - RNA, 19 nt, Homo sapiens
  misc_RNA (1)...(19): siRNA sense strand
ugacuucagccgugugaga

SEQ ID NO: 636714 - RNA, 19 nt, Homo sapiens
  misc_RNA (1)...(19): siRNA sense strand
aaauugauuggacuggaua

SEQ ID NO: 636715 - RNA, 19 nt, Homo sapiens
  misc_RNA (1)...(19): siRNA sense strand
gucauauacgagaauguua

SEQ ID NO: 636716 - RNA, 19 nt, Homo sapiens
  misc_RNA (1)...(19): siRNA sense strand
gugaugucauauacgagaa

SEQ ID NO: 636717 - RNA, 19 nt, Homo sapiens
  misc_RNA (1)...(19): siRNA sense strand
agaagaggaaacugacaaa

SEQ ID NO: 636718 - RNA, 19 nt, Homo sapiens
  misc_RNA (1)...(19): siRNA sense strand
gaaucccaaugugguagug

SEQ ID NO: 636719 - RNA, 19 nt, Homo sapiens
  misc_RNA (1)...(19): siRNA sense strand
ccacugaaucgauguaaaa

SEQ ID NO: 636720 - RNA, 19 nt, Homo sapiens
  misc_RNA (1)...(19): siRNA sense strand
gcaacaaaagucucagauu

SEQ ID NO: 636721 - RNA, 19 nt, Homo sapiens
  misc_RNA (1)...(19): siRNA sense strand
gcuuguuacccucauuauu

SEQ ID NO: 636722 - RNA, 19 nt, Homo sapiens
  misc_RNA (1)...(19): siRNA sense strand
cgagaugcaggaugugaug

SEQ ID NO: 636723 - RNA, 19 nt, Homo sapiens
  misc_RNA (1)...(19): siRNA sense strand
cacaaacauccuaccauau

SEQ ID NO: 636724 - RNA, 19 nt, Homo sapiens
  misc_RNA (1)...(19): siRNA sense strand
gugugcaacugauguggau

SEQ ID NO: 636725 - RNA, 19 nt, Homo sapiens
  misc_RNA (1)...(19): siRNA sense strand
gacagaggagcaguacauu

SEQ ID NO: 636726 - RNA, 19 nt, Homo sapiens
  misc_RNA (1)...(19): siRNA sense strand
ugucauauacgagaauguu

SEQ ID NO: 636727 - RNA, 19 nt, Homo sapiens
  misc_RNA (1)...(19): siRNA sense strand
gggaguagcugauuucuuu

SEQ ID NO: 636728 - RNA, 19 nt, Homo sapiens
  misc_RNA (1)...(19): siRNA sense strand
caaagacucugacuauaaa

SEQ ID NO: 636729 - RNA, 19 nt, Homo sapiens
  misc_RNA (1)...(19): siRNA sense strand
caacaaaagucucagauua

SEQ ID NO: 636730 - RNA, 19 nt, Homo sapiens
  misc_RNA (1)...(19): siRNA sense strand
gaaaguauccugcaguuug

SEQ ID NO: 636731 - RNA, 19 nt, Homo sapiens
  misc_RNA (1)...(19): siRNA sense strand
acacaaacauccuaccaua

SEQ ID NO: 636732 - RNA, 19 nt, Homo sapiens
  misc_RNA (1)...(19): siRNA sense strand
caacugauguggaugaaga

SEQ ID NO: 636733 - RNA, 19 nt, Homo sapiens
  misc_RNA (1)...(19): siRNA sense strand
gagcaaaggucccaugauc

SEQ ID NO: 636734 - RNA, 19 nt, Homo sapiens
  misc_RNA (1)...(19): siRNA sense strand
caaguuggcuccagucaga

SEQ ID NO: 636735 - RNA, 19 nt, Homo sapiens
  misc_RNA (1)...(19): siRNA sense strand
ccaacuauauuccuggaua

SEQ ID NO: 636736 - RNA, 19 nt, Homo sapiens
  misc_RNA (1)...(19): siRNA sense strand
ccaaagacucugacuauaa

SEQ ID NO: 636737 - RNA, 19 nt, Homo sapiens
  misc_RNA (1)...(19): siRNA sense strand
caacuaugcugacgagaug

SEQ ID NO: 636738 - RNA, 19 nt, Homo sapiens
  misc_RNA (1)...(19): siRNA sense strand
guguggagcugguacauuu

SEQ ID NO: 636739 - RNA, 19 nt, Homo sapiens
  misc_RNA (1)...(19): siRNA sense strand
gaaauugauuggacuggau

SEQ ID NO: 636740 - RNA, 19 nt, Homo sapiens
  misc_RNA (1)...(19): siRNA sense strand
ggagaugauuucagaggaa

SEQ ID NO: 636741 - RNA, 19 nt, Homo sapiens
  misc_RNA (1)...(19): siRNA sense strand
caacaaugguuacagagau

SEQ ID NO: 636742 - RNA, 19 nt, Homo sapiens
  misc_RNA (1)...(19): siRNA sense strand
caaacauccuaccauauga

SEQ ID NO: 636743 - RNA, 19 nt, Homo sapiens
  misc_RNA (1)...(19): siRNA sense strand
aaaggagggugaaauguga

SEQ ID NO: 636744 - RNA, 19 nt, Homo sapiens
  misc_RNA (1)...(19): siRNA sense strand
cuacaucaaugccaacuau

SEQ ID NO: 636745 - RNA, 19 nt, Homo sapiens
  misc_RNA (1)...(19): siRNA sense strand
uuaaggauauggccaaaga

SEQ ID NO: 636746 - RNA, 19 nt, Homo sapiens
  misc_RNA (1)...(19): siRNA sense strand
gccaaagacucugacuaua

SEQ ID NO: 636747 - RNA, 19 nt, Homo sapiens
  misc_RNA (1)...(19): siRNA sense strand
gcugauuucuuugaaguuu

SEQ ID NO: 636748 - RNA, 19 nt, Homo sapiens
  misc_RNA (1)...(19): siRNA sense strand
ugacuuugaugccuauauu

SEQ ID NO: 636749 - RNA, 19 nt, Homo sapiens
  misc_RNA (1)...(19): siRNA sense strand
gcagauggcuagggagugu

SEQ ID NO: 636750 - RNA, 19 nt, Homo sapiens
  misc_RNA (1)...(19): siRNA sense strand
ggucauaccggaugucuau

SEQ ID NO: 636751 - RNA, 19 nt, Homo sapiens
  misc_RNA (1)...(19): siRNA sense strand
ggaagaugguccugcaaca

SEQ ID NO: 636752 - RNA, 19 nt, Homo sapiens
  misc_RNA (1)...(19): siRNA sense strand
cagaaaguauccugcaguu

SEQ ID NO: 636753 - RNA, 19 nt, Homo sapiens
  misc_RNA (1)...(19): siRNA sense strand
gaccauuacuggccauuca

SEQ ID NO: 636754 - RNA, 19 nt, Homo sapiens
  misc_RNA (1)...(19): siRNA sense strand
ggccaaagacucugacuau

SEQ ID NO: 636755 - RNA, 19 nt, Homo sapiens
  misc_RNA (1)...(19): siRNA sense strand
gaagagggaguagcugauu

SEQ ID NO: 636756 - RNA, 19 nt, Homo sapiens
  misc_RNA (1)...(19): siRNA sense strand
ugauguggaugaagaagaa

SEQ ID NO: 636757 - RNA, 19 nt, Homo sapiens
  misc_RNA (1)...(19): siRNA sense strand
gcaaaggucccaugaucau

SEQ ID NO: 636758 - RNA, 19 nt, Homo sapiens
  misc_RNA (1)...(19): siRNA sense strand
gcugguacauuugucaauu

SEQ ID NO: 636759 - RNA, 19 nt, Homo sapiens
  misc_RNA (1)...(19): siRNA sense strand
guucauagccgucucaaca

SEQ ID NO: 636760 - RNA, 19 nt, Homo sapiens
  misc_RNA (1)...(19): siRNA sense strand
agaaccagcuccacccaaa

SEQ ID NO: 636761 - RNA, 19 nt, Homo sapiens
  misc_RNA (1)...(19): siRNA sense strand
ucagugaugucauauacga

SEQ ID NO: 636762 - RNA, 19 nt, Homo sapiens
  misc_RNA (1)...(19): siRNA sense strand
cugcagaucuuccacugaa

SEQ ID NO: 636763 - RNA, 19 nt, Homo sapiens
  misc_RNA (1)...(19): siRNA sense strand
gggcuggugucagaaauga

SEQ ID NO: 636764 - RNA, 19 nt, Homo sapiens
  misc_RNA (1)...(19): siRNA sense strand
gcaaaugcugcagaaagua

SEQ ID NO: 636765 - RNA, 19 nt, Homo sapiens
  misc_RNA (1)...(19): siRNA sense strand
ggacggacaggaacauuca

SEQ ID NO: 636766 - RNA, 19 nt, Homo sapiens
  misc_RNA (1)...(19): siRNA sense strand
ggaaccaguugcuguuucu

SEQ ID NO: 636767 - RNA, 19 nt, Homo sapiens
  misc_RNA (1)...(19): siRNA sense strand
acaaacauccuaccauaug

SEQ ID NO: 636768 - RNA, 19 nt, Homo sapiens
  misc_RNA (1)...(19): siRNA sense strand
caucaaugccaacuauauu

SEQ ID NO: 636769 - RNA, 19 nt, Homo sapiens
  misc_RNA (1)...(19): siRNA sense strand
ucucaacaaugguuacaga

SEQ ID NO: 636770 - RNA, 19 nt, Homo sapiens
  misc_RNA (1)...(19): siRNA sense strand
gaagaugguccugcaacaa

SEQ ID NO: 636771 - RNA, 19 nt, Homo sapiens
  misc_RNA (1)...(19): siRNA sense strand
acacuuugcugcagaucuu

SEQ ID NO: 636772 - RNA, 19 nt, Homo sapiens
  misc_RNA (1)...(19): siRNA sense strand
uaauuggacuguugcuugu

SEQ ID NO: 636773 - RNA, 19 nt, Homo sapiens
  misc_RNA (1)...(19): siRNA sense strand
gaugaaucccaauguggua

SEQ ID NO: 636774 - RNA, 19 nt, Homo sapiens
  misc_RNA (1)...(19): siRNA sense strand
cuucagccgugugagauua

SEQ ID NO: 636775 - RNA, 19 nt, Homo sapiens
  misc_RNA (1)...(19): siRNA sense strand
uuaaagaagaggaaacuga

SEQ ID NO: 636776 - RNA, 19 nt, Homo sapiens
  misc_RNA (1)...(19): siRNA sense strand
agagagggauggaaagcuu

SEQ ID NO: 636777 - RNA, 19 nt, Homo sapiens
  misc_RNA (1)...(19): siRNA sense strand
ggaugacuuugaugccuau

SEQ ID NO: 636778 - RNA, 19 nt, Homo sapiens
  misc_RNA (1)...(19): siRNA sense strand
aaaguauccugcaguuugu

SEQ ID NO: 636779 - RNA, 19 nt, Homo sapiens
  misc_RNA (1)...(19): siRNA sense strand
caaaugcugcagaaaguau

SEQ ID NO: 636780 - RNA, 19 nt, Homo sapiens
  misc_RNA (1)...(19): siRNA sense strand
ugaagaagaagcagcaguu

SEQ ID NO: 636781 - RNA, 19 nt, Homo sapiens
  misc_RNA (1)...(19): siRNA sense strand
agauuagucuccaugaaug

SEQ ID NO: 636782 - RNA, 19 nt, Homo sapiens
  misc_RNA (1)...(19): siRNA sense strand
agaggaaggugcagacuac

SEQ ID NO: 636783 - RNA, 19 nt, Homo sapiens
  misc_RNA (1)...(19): siRNA sense strand
uguagacacuuccggauca

SEQ ID NO: 636784 - RNA, 19 nt, Homo sapiens
  misc_RNA (1)...(19): siRNA sense strand
ggaaggugcagacuacauc

SEQ ID NO: 636785 - RNA, 19 nt, Homo sapiens
  misc_RNA (1)...(19): siRNA sense strand
ggauauggccaaagacucu

SEQ ID NO: 636786 - RNA, 19 nt, Homo sapiens
  misc_RNA (1)...(19): siRNA sense strand
gaacaaaacccagacuuca

SEQ ID NO: 636787 - RNA, 19 nt, Homo sapiens
  misc_RNA (1)...(19): siRNA sense strand
agagaugaaucccaaugug

SEQ ID NO: 636788 - RNA, 19 nt, Homo sapiens
  misc_RNA (1)...(19): siRNA sense strand
ucuuagggcuggugucaga

SEQ ID NO: 636789 - RNA, 19 nt, Homo sapiens
  misc_RNA (1)...(19): siRNA sense strand
aagagggaguagcugauuu

SEQ ID NO: 636790 - RNA, 19 nt, Homo sapiens
  misc_RNA (1)...(19): siRNA sense strand
caacuauauuccuggauac

SEQ ID NO: 636791 - RNA, 19 nt, Homo sapiens
  misc_RNA (1)...(19): siRNA sense strand
uagcugauuucuuugaagu

SEQ ID NO: 636792 - RNA, 19 nt, Homo sapiens
  misc_RNA (1)...(19): siRNA sense strand
ucauagccgucucaacaau

SEQ ID NO: 636793 - RNA, 19 nt, Homo sapiens
  misc_RNA (1)...(19): siRNA sense strand
gaagaagaagcagcaguuc

SEQ ID NO: 636794 - RNA, 19 nt, Homo sapiens
  misc_RNA (1)...(19): siRNA sense strand
cugguacauuugucaauuu

SEQ ID NO: 636795 - RNA, 19 nt, Homo sapiens
  misc_RNA (1)...(19): siRNA sense strand
guuacccucauuauucuua

SEQ ID NO: 636796 - RNA, 19 nt, Homo sapiens
  misc_RNA (1)...(19): siRNA sense strand
auuggacuguugcuuguua

SEQ ID NO: 636797 - RNA, 19 nt, Homo sapiens
  misc_RNA (1)...(19): siRNA sense strand
ggugcagacuacaucaaug

SEQ ID NO: 636798 - RNA, 19 nt, Homo sapiens
  misc_RNA (1)...(19): siRNA sense strand
gcagaucuuccacugaauc

SEQ ID NO: 636799 - RNA, 19 nt, Homo sapiens
  misc_RNA (1)...(19): siRNA sense strand
gacuggauaucccacacuu

SEQ ID NO: 636800 - RNA, 19 nt, Homo sapiens
  misc_RNA (1)...(19): siRNA sense strand
uuugaggaguugaaauuga

SEQ ID NO: 636801 - RNA, 19 nt, Homo sapiens
  misc_RNA (1)...(19): siRNA sense strand
gacuuugaugccuauauua

SEQ ID NO: 636802 - RNA, 19 nt, Homo sapiens
  misc_RNA (1)...(19): siRNA sense strand
gaguagcugauuucuuuga

SEQ ID NO: 636803 - RNA, 19 nt, Homo sapiens
  misc_RNA (1)...(19): siRNA sense strand
gaaguuuucugucaacaag

SEQ ID NO: 636804 - RNA, 19 nt, Homo sapiens
  misc_RNA (1)...(19): siRNA sense strand
ccucauuauucuuaggaaa

SEQ ID NO: 636805 - RNA, 19 nt, Homo sapiens
  misc_RNA (1)...(19): siRNA sense strand
gaugucauauacgagaaug

SEQ ID NO: 636806 - RNA, 19 nt, Homo sapiens
  misc_RNA (1)...(19): siRNA sense strand
cgacagcaagcuaccaaga

SEQ ID NO: 636807 - RNA, 19 nt, Homo sapiens
  misc_RNA (1)...(19): siRNA sense strand
aagaugguccugcaacaaa

SEQ ID NO: 636808 - RNA, 19 nt, Homo sapiens
  misc_RNA (1)...(19): siRNA sense strand
gaucuuccacugaaucgau

SEQ ID NO: 636809 - RNA, 19 nt, Homo sapiens
  misc_RNA (1)...(19): siRNA sense strand
gaaagcuuccauacaacug

SEQ ID NO: 636810 - RNA, 19 nt, Homo sapiens
  misc_RNA (1)...(19): siRNA sense strand
uguagugucaccagcuuua

SEQ ID NO: 636811 - RNA, 19 nt, Homo sapiens
  misc_RNA (1)...(19): siRNA sense strand
gaaccagcuccacccaaau

SEQ ID NO: 636812 - RNA, 19 nt, Homo sapiens
  misc_RNA (1)...(19): siRNA sense strand
cuuguuacccucauuauuc

SEQ ID NO: 636813 - RNA, 19 nt, Homo sapiens
  misc_RNA (1)...(19): siRNA sense strand
cagaggagcaguacauuuu

SEQ ID NO: 636814 - RNA, 19 nt, Homo sapiens
  misc_RNA (1)...(19): siRNA sense strand
ggacaggaacauucauugc

SEQ ID NO: 636815 - RNA, 19 nt, Homo sapiens
  misc_RNA (1)...(19): siRNA sense strand
gaaggugcagacuacauca

SEQ ID NO: 636816 - RNA, 19 nt, Homo sapiens
  misc_RNA (1)...(19): siRNA sense strand
cagugucccuacguucaua

SEQ ID NO: 636817 - RNA, 19 nt, Homo sapiens
  misc_RNA (1)...(19): siRNA sense strand
ggaagagggaguagcugau

SEQ ID NO: 636818 - RNA, 19 nt, Homo sapiens
  misc_RNA (1)...(19): siRNA sense strand
cuguggagaugauuucaga

SEQ ID NO: 636819 - RNA, 19 nt, Homo sapiens
  misc_RNA (1)...(19): siRNA sense strand
cauccuaccauaugacuuc

SEQ ID NO: 636820 - RNA, 19 nt, Homo sapiens
  misc_RNA (1)...(19): siRNA sense strand
gauuagucuccaugaauga

SEQ ID NO: 636821 - RNA, 19 nt, Homo sapiens
  misc_RNA (1)...(19): siRNA sense strand
agacagaggagcaguacau

SEQ ID NO: 636822 - RNA, 19 nt, Homo sapiens
  misc_RNA (1)...(19): siRNA sense strand
gaccaucuccagccuucuu

SEQ ID NO: 636823 - RNA, 19 nt, Homo sapiens
  misc_RNA (1)...(19): siRNA sense strand
gugcaacugauguggauga

SEQ ID NO: 636824 - RNA, 19 nt, Homo sapiens
  misc_RNA (1)...(19): siRNA sense strand
acagaggagcaguacauuu

SEQ ID NO: 636825 - RNA, 19 nt, Homo sapiens
  misc_RNA (1)...(19): siRNA sense strand
cugacgagaugcaggaugu

SEQ ID NO: 636826 - RNA, 19 nt, Homo sapiens
  misc_RNA (1)...(19): siRNA sense strand
guagacacuuccggaucaa

SEQ ID NO: 636827 - RNA, 19 nt, Homo sapiens
  misc_RNA (1)...(19): siRNA sense strand
gggaguagcugauuucuuu

SEQ ID NO: 636828 - RNA, 19 nt, Homo sapiens
  misc_RNA (1)...(19): siRNA sense strand
caaagacucugacuauaaa

SEQ ID NO: 636829 - RNA, 19 nt, Homo sapiens
  misc_RNA (1)...(19): siRNA sense strand
caacaaaagucucagauua

SEQ ID NO: 636830 - RNA, 19 nt, Homo sapiens
  misc_RNA (1)...(19): siRNA sense strand
gaaaguauccugcaguuug

SEQ ID NO: 636831 - RNA, 19 nt, Homo sapiens
  misc_RNA (1)...(19): siRNA sense strand
acacaaacauccuaccaua

SEQ ID NO: 636832 - RNA, 19 nt, Homo sapiens
  misc_RNA (1)...(19): siRNA sense strand
caacugauguggaugaaga

SEQ ID NO: 636833 - RNA, 19 nt, Homo sapiens
  misc_RNA (1)...(19): siRNA sense strand
gagcaaaggucccaugauc

SEQ ID NO: 636834 - RNA, 19 nt, Homo sapiens
  misc_RNA (1)...(19): siRNA sense strand
caaguuggcuccagucaga

SEQ ID NO: 636835 - RNA, 19 nt, Homo sapiens
  misc_RNA (1)...(19): siRNA sense strand
ccaacuauauuccuggaua

SEQ ID NO: 636836 - RNA, 19 nt, Homo sapiens
  misc_RNA (1)...(19): siRNA sense strand
ccaaagacucugacuauaa

SEQ ID NO: 636837 - RNA, 19 nt, Homo sapiens
  misc_RNA (1)...(19): siRNA sense strand
caacuaugcugacgagaug

SEQ ID NO: 636838 - RNA, 19 nt, Homo sapiens
  misc_RNA (1)...(19): siRNA sense strand
guguggagcugguacauuu

SEQ ID NO: 636839 - RNA, 19 nt, Homo sapiens
  misc_RNA (1)...(19): siRNA sense strand
gaaauugauuggacuggau

SEQ ID NO: 636840 - RNA, 19 nt, Homo sapiens
  misc_RNA (1)...(19): siRNA sense strand
ggagaugauuucagaggaa

SEQ ID NO: 636841 - RNA, 19 nt, Homo sapiens
  misc_RNA (1)...(19): siRNA sense strand
caacaaugguuacagagau

SEQ ID NO: 636842 - RNA, 19 nt, Homo sapiens
  misc_RNA (1)...(19): siRNA sense strand
caaacauccuaccauauga

SEQ ID NO: 636843 - RNA, 19 nt, Homo sapiens
  misc_RNA (1)...(19): siRNA sense strand
aaaggagggugaaauguga

SEQ ID NO: 636844 - RNA, 19 nt, Homo sapiens
  misc_RNA (1)...(19): siRNA sense strand
cuacaucaaugccaacuau

SEQ ID NO: 636845 - RNA, 19 nt, Homo sapiens
  misc_RNA (1)...(19): siRNA sense strand
uuaaggauauggccaaaga

SEQ ID NO: 636846 - RNA, 19 nt, Homo sapiens
  misc_RNA (1)...(19): siRNA sense strand
gccaaagacucugacuaua

SEQ ID NO: 636847 - RNA, 19 nt, Homo sapiens
  misc_RNA (1)...(19): siRNA sense strand
gcugauuucuuugaaguuu

SEQ ID NO: 636848 - RNA, 19 nt, Homo sapiens
  misc_RNA (1)...(19): siRNA sense strand
ugacuuugaugccuauauu

SEQ ID NO: 636849 - RNA, 19 nt, Homo sapiens
  misc_RNA (1)...(19): siRNA sense strand
gcagauggcuagggagugu

SEQ ID NO: 636850 - RNA, 19 nt, Homo sapiens
  misc_RNA (1)...(19): siRNA sense strand
ggucauaccggaugucuau

SEQ ID NO: 636851 - RNA, 19 nt, Homo sapiens
  misc_RNA (1)...(19): siRNA sense strand
ggaagaugguccugcaaca

SEQ ID NO: 636852 - RNA, 19 nt, Homo sapiens
  misc_RNA (1)...(19): siRNA sense strand
cagaaaguauccugcaguu

SEQ ID NO: 636853 - RNA, 19 nt, Homo sapiens
  misc_RNA (1)...(19): siRNA sense strand
gaccauuacuggccauuca

SEQ ID NO: 636854 - RNA, 19 nt, Homo sapiens
  misc_RNA (1)...(19): siRNA sense strand
ggccaaagacucugacuau

SEQ ID NO: 636855 - RNA, 19 nt, Homo sapiens
  misc_RNA (1)...(19): siRNA sense strand
gaagagggaguagcugauu

SEQ ID NO: 636856 - RNA, 19 nt, Homo sapiens
  misc_RNA (1)...(19): siRNA sense strand
ugauguggaugaagaagaa

SEQ ID NO: 636857 - RNA, 19 nt, Homo sapiens
  misc_RNA (1)...(19): siRNA sense strand
gcaaaggucccaugaucau

SEQ ID NO: 636858 - RNA, 19 nt, Homo sapiens
  misc_RNA (1)...(19): siRNA sense strand
gcugguacauuugucaauu

SEQ ID NO: 636859 - RNA, 19 nt, Homo sapiens
  misc_RNA (1)...(19): siRNA sense strand
guucauagccgucucaaca

SEQ ID NO: 636860 - RNA, 19 nt, Homo sapiens
  misc_RNA (1)...(19): siRNA sense strand
agaaccagcuccacccaaa

SEQ ID NO: 636861 - RNA, 19 nt, Homo sapiens
  misc_RNA (1)...(19): siRNA sense strand
ucagugaugucauauacga

SEQ ID NO: 636862 - RNA, 19 nt, Homo sapiens
  misc_RNA (1)...(19): siRNA sense strand
cugcagaucuuccacugaa

SEQ ID NO: 636863 - RNA, 19 nt, Homo sapiens
  misc_RNA (1)...(19): siRNA sense strand
gggcuggugucagaaauga

SEQ ID NO: 636864 - RNA, 19 nt, Homo sapiens
  misc_RNA (1)...(19): siRNA sense strand
gcaaaugcugcagaaagua

SEQ ID NO: 636865 - RNA, 19 nt, Homo sapiens
  misc_RNA (1)...(19): siRNA sense strand
ggacggacaggaacauuca

SEQ ID NO: 636866 - RNA, 19 nt, Homo sapiens
  misc_RNA (1)...(19): siRNA sense strand
ggaaccaguugcuguuucu

SEQ ID NO: 636867 - RNA, 19 nt, Homo sapiens
  misc_RNA (1)...(19): siRNA sense strand
acaaacauccuaccauaug

SEQ ID NO: 636868 - RNA, 19 nt, Homo sapiens
  misc_RNA (1)...(19): siRNA sense strand
caucaaugccaacuauauu

SEQ ID NO: 636869 - RNA, 19 nt, Homo sapiens
  misc_RNA (1)...(19): siRNA sense strand
ucucaacaaugguuacaga

SEQ ID NO: 636870 - RNA, 19 nt, Homo sapiens
  misc_RNA (1)...(19): siRNA sense strand
gaagaugguccugcaacaa

SEQ ID NO: 636871 - RNA, 19 nt, Homo sapiens
  misc_RNA (1)...(19): siRNA sense strand
acacuuugcugcagaucuu

SEQ ID NO: 636872 - RNA, 19 nt, Homo sapiens
  misc_RNA (1)...(19): siRNA sense strand
uaauuggacuguugcuugu

SEQ ID NO: 636873 - RNA, 19 nt, Homo sapiens
  misc_RNA (1)...(19): siRNA sense strand
gaugaaucccaauguggua

SEQ ID NO: 636874 - RNA, 19 nt, Homo sapiens
  misc_RNA (1)...(19): siRNA sense strand
cuucagccgugugagauua

SEQ ID NO: 636875 - RNA, 19 nt, Homo sapiens
  misc_RNA (1)...(19): siRNA sense strand
uuaaagaagaggaaacuga

SEQ ID NO: 636876 - RNA, 19 nt, Homo sapiens
  misc_RNA (1)...(19): siRNA sense strand
agagagggauggaaagcuu

SEQ ID NO: 636877 - RNA, 19 nt, Homo sapiens
  misc_RNA (1)...(19): siRNA sense strand
ggaugacuuugaugccuau

SEQ ID NO: 636878 - RNA, 19 nt, Homo sapiens
  misc_RNA (1)...(19): siRNA sense strand
aaaguauccugcaguuugu

SEQ ID NO: 636879 - RNA, 19 nt, Homo sapiens
  misc_RNA (1)...(19): siRNA sense strand
caaaugcugcagaaaguau

SEQ ID NO: 636880 - RNA, 19 nt, Homo sapiens
  misc_RNA (1)...(19): siRNA sense strand
ugaagaagaagcagcaguu

SEQ ID NO: 636881 - RNA, 19 nt, Homo sapiens
  misc_RNA (1)...(19): siRNA sense strand
agauuagucuccaugaaug

SEQ ID NO: 636882 - RNA, 19 nt, Homo sapiens
  misc_RNA (1)...(19): siRNA sense strand
agaggaaggugcagacuac

SEQ ID NO: 636883 - RNA, 19 nt, Homo sapiens
  misc_RNA (1)...(19): siRNA sense strand
uguagacacuuccggauca

SEQ ID NO: 636884 - RNA, 19 nt, Homo sapiens
  misc_RNA (1)...(19): siRNA sense strand
ggaaggugcagacuacauc

SEQ ID NO: 636885 - RNA, 19 nt, Homo sapiens
  misc_RNA (1)...(19): siRNA sense strand
ggauauggccaaagacucu

SEQ ID NO: 636886 - RNA, 19 nt, Homo sapiens
  misc_RNA (1)...(19): siRNA sense strand
gaacaaaacccagacuuca

SEQ ID NO: 636887 - RNA, 19 nt, Homo sapiens
  misc_RNA (1)...(19): siRNA sense strand
agagaugaaucccaaugug

SEQ ID NO: 636888 - RNA, 19 nt, Homo sapiens
  misc_RNA (1)...(19): siRNA sense strand
ucuuagggcuggugucaga

SEQ ID NO: 636889 - RNA, 19 nt, Homo sapiens
  misc_RNA (1)...(19): siRNA sense strand
aagagggaguagcugauuu

SEQ ID NO: 636890 - RNA, 19 nt, Homo sapiens
  misc_RNA (1)...(19): siRNA sense strand
caacuauauuccuggauac

SEQ ID NO: 636891 - RNA, 19 nt, Homo sapiens
  misc_RNA (1)...(19): siRNA sense strand
uagcugauuucuuugaagu

SEQ ID NO: 636892 - RNA, 19 nt, Homo sapiens
  misc_RNA (1)...(19): siRNA sense strand
ucauagccgucucaacaau

SEQ ID NO: 636893 - RNA, 19 nt, Homo sapiens
  misc_RNA (1)...(19): siRNA sense strand
gaagaagaagcagcaguuc

SEQ ID NO: 636894 - RNA, 19 nt, Homo sapiens
  misc_RNA (1)...(19): siRNA sense strand
cugguacauuugucaauuu

SEQ ID NO: 636895 - RNA, 19 nt, Homo sapiens
  misc_RNA (1)...(19): siRNA sense strand
guuacccucauuauucuua

SEQ ID NO: 636896 - RNA, 19 nt, Homo sapiens
  misc_RNA (1)...(19): siRNA sense strand
auuggacuguugcuuguua

SEQ ID NO: 636897 - RNA, 19 nt, Homo sapiens
  misc_RNA (1)...(19): siRNA sense strand
ggugcagacuacaucaaug

SEQ ID NO: 636898 - RNA, 19 nt, Homo sapiens
  misc_RNA (1)...(19): siRNA sense strand
gcagaucuuccacugaauc

SEQ ID NO: 636899 - RNA, 19 nt, Homo sapiens
  misc_RNA (1)...(19): siRNA sense strand
gacuggauaucccacacuu

SEQ ID NO: 636900 - RNA, 19 nt, Homo sapiens
  misc_RNA (1)...(19): siRNA sense strand
uuugaggaguugaaauuga

SEQ ID NO: 636901 - RNA, 19 nt, Homo sapiens
  misc_RNA (1)...(19): siRNA sense strand
gacuuugaugccuauauua

SEQ ID NO: 636902 - RNA, 19 nt, Homo sapiens
  misc_RNA (1)...(19): siRNA sense strand
gaguagcugauuucuuuga

SEQ ID NO: 636903 - RNA, 19 nt, Homo sapiens
  misc_RNA (1)...(19): siRNA sense strand
gaaguuuucugucaacaag

SEQ ID NO: 636904 - RNA, 19 nt, Homo sapiens
  misc_RNA (1)...(19): siRNA sense strand
ccucauuauucuuaggaaa

SEQ ID NO: 636905 - RNA, 19 nt, Homo sapiens
  misc_RNA (1)...(19): siRNA sense strand
gaugucauauacgagaaug

SEQ ID NO: 636906 - RNA, 19 nt, Homo sapiens
  misc_RNA (1)...(19): siRNA sense strand
cgacagcaagcuaccaaga

SEQ ID NO: 636907 - RNA, 19 nt, Homo sapiens
  misc_RNA (1)...(19): siRNA sense strand
aagaugguccugcaacaaa

SEQ ID NO: 636908 - RNA, 19 nt, Homo sapiens
  misc_RNA (1)...(19): siRNA sense strand
gaucuuccacugaaucgau

SEQ ID NO: 636909 - RNA, 19 nt, Homo sapiens
  misc_RNA (1)...(19): siRNA sense strand
gaaagcuuccauacaacug

SEQ ID NO: 636910 - RNA, 19 nt, Homo sapiens
  misc_RNA (1)...(19): siRNA sense strand
uguagugucaccagcuuua

SEQ ID NO: 636911 - RNA, 19 nt, Homo sapiens
  misc_RNA (1)...(19): siRNA sense strand
gaaccagcuccacccaaau

SEQ ID NO: 636912 - RNA, 19 nt, Homo sapiens
  misc_RNA (1)...(19): siRNA sense strand
cuuguuacccucauuauuc

SEQ ID NO: 636913 - RNA, 19 nt, Homo sapiens
  misc_RNA (1)...(19): siRNA sense strand
cagaggagcaguacauuuu

SEQ ID NO: 636914 - RNA, 19 nt, Homo sapiens
  misc_RNA (1)...(19): siRNA sense strand
ggacaggaacauucauugc

SEQ ID NO: 636915 - RNA, 19 nt, Homo sapiens
  misc_RNA (1)...(19): siRNA sense strand
gaaggugcagacuacauca

SEQ ID NO: 636916 - RNA, 19 nt, Homo sapiens
  misc_RNA (1)...(19): siRNA sense strand
cagugucccuacguucaua

SEQ ID NO: 636917 - RNA, 19 nt, Homo sapiens
  misc_RNA (1)...(19): siRNA sense strand
ggaagagggaguagcugau

SEQ ID NO: 636918 - RNA, 19 nt, Homo sapiens
  misc_RNA (1)...(19): siRNA sense strand
cuguggagaugauuucaga

SEQ ID NO: 636919 - RNA, 19 nt, Homo sapiens
  misc_RNA (1)...(19): siRNA sense strand
cauccuaccauaugacuuc

SEQ ID NO: 636920 - RNA, 19 nt, Homo sapiens
  misc_RNA (1)...(19): siRNA sense strand
gauuagucuccaugaauga

SEQ ID NO: 636921 - RNA, 19 nt, Homo sapiens
  misc_RNA (1)...(19): siRNA sense strand
agacagaggagcaguacau

SEQ ID NO: 636922 - RNA, 19 nt, Homo sapiens
  misc_RNA (1)...(19): siRNA sense strand
gaccaucuccagccuucuu

SEQ ID NO: 636923 - RNA, 19 nt, Homo sapiens
  misc_RNA (1)...(19): siRNA sense strand
gugcaacugauguggauga

SEQ ID NO: 636924 - RNA, 19 nt, Homo sapiens
  misc_RNA (1)...(19): siRNA sense strand
acagaggagcaguacauuu

SEQ ID NO: 636925 - RNA, 19 nt, Homo sapiens
  misc_RNA (1)...(19): siRNA sense strand
cugacgagaugcaggaugu

SEQ ID NO: 636926 - RNA, 19 nt, Homo sapiens
  misc_RNA (1)...(19): siRNA sense strand
guagacacuuccggaucaa

SEQ ID NO: 636927 - RNA, 19 nt, Homo sapiens
  misc_RNA (1)...(19): siRNA sense strand
caaagacucugacuauaaa

SEQ ID NO: 636928 - RNA, 19 nt, Homo sapiens
  misc_RNA (1)...(19): siRNA sense strand
caacaaaagucucagauua

SEQ ID NO: 636929 - RNA, 19 nt, Homo sapiens
  misc_RNA (1)...(19): siRNA sense strand
gaaaguauccugcaguuug

SEQ ID NO: 636930 - RNA, 19 nt, Homo sapiens
  misc_RNA (1)...(19): siRNA sense strand
acacaaacauccuaccaua

SEQ ID NO: 636931 - RNA, 19 nt, Homo sapiens
  misc_RNA (1)...(19): siRNA sense strand
caacugauguggaugaaga

SEQ ID NO: 636932 - RNA, 19 nt, Homo sapiens
  misc_RNA (1)...(19): siRNA sense strand
gagcaaaggucccaugauc

SEQ ID NO: 636933 - RNA, 19 nt, Homo sapiens
  misc_RNA (1)...(19): siRNA sense strand
ccaacuauauuccuggaua

SEQ ID NO: 636934 - RNA, 19 nt, Homo sapiens
  misc_RNA (1)...(19): siRNA sense strand
ccaaagacucugacuauaa

SEQ ID NO: 636935 - RNA, 19 nt, Homo sapiens
  misc_RNA (1)...(19): siRNA sense strand
caacuaugcugacgagaug

SEQ ID NO: 636936 - RNA, 19 nt, Homo sapiens
  misc_RNA (1)...(19): siRNA sense strand
guguggagcugguacauuu

SEQ ID NO: 636937 - RNA, 19 nt, Homo sapiens
  misc_RNA (1)...(19): siRNA sense strand
gaaauugauuggacuggau

SEQ ID NO: 636938 - RNA, 19 nt, Homo sapiens
  misc_RNA (1)...(19): siRNA sense strand
ggagaugauuucagaggaa

SEQ ID NO: 636939 - RNA, 19 nt, Homo sapiens
  misc_RNA (1)...(19): siRNA sense strand
caaacauccuaccauauga

SEQ ID NO: 636940 - RNA, 19 nt, Homo sapiens
  misc_RNA (1)...(19): siRNA sense strand
aaaggagggugaaauguga

SEQ ID NO: 636941 - RNA, 19 nt, Homo sapiens
  misc_RNA (1)...(19): siRNA sense strand
cuacaucaaugccaacuau

SEQ ID NO: 636942 - RNA, 19 nt, Homo sapiens
  misc_RNA (1)...(19): siRNA sense strand
uuaaggauauggccaaaga

SEQ ID NO: 636943 - RNA, 19 nt, Homo sapiens
  misc_RNA (1)...(19): siRNA sense strand
gccaaagacucugacuaua

SEQ ID NO: 636944 - RNA, 19 nt, Homo sapiens
  misc_RNA (1)...(19): siRNA sense strand
ugacuuugaugccuauauu

SEQ ID NO: 636945 - RNA, 19 nt, Homo sapiens
  misc_RNA (1)...(19): siRNA sense strand
gcagauggcuagggagugu

SEQ ID NO: 636946 - RNA, 19 nt, Homo sapiens
  misc_RNA (1)...(19): siRNA sense strand
ggucauaccggaugucuau

SEQ ID NO: 636947 - RNA, 19 nt, Homo sapiens
  misc_RNA (1)...(19): siRNA sense strand
ggaagaugguccugcaaca

SEQ ID NO: 636948 - RNA, 19 nt, Homo sapiens
  misc_RNA (1)...(19): siRNA sense strand
cagaaaguauccugcaguu

SEQ ID NO: 636949 - RNA, 19 nt, Homo sapiens
  misc_RNA (1)...(19): siRNA sense strand
gaccauuacuggccauuca

SEQ ID NO: 636950 - RNA, 19 nt, Homo sapiens
  misc_RNA (1)...(19): siRNA sense strand
ggccaaagacucugacuau

SEQ ID NO: 636951 - RNA, 19 nt, Homo sapiens
  misc_RNA (1)...(19): siRNA sense strand
gcugguacauuugucaauu

SEQ ID NO: 636952 - RNA, 19 nt, Homo sapiens
  misc_RNA (1)...(19): siRNA sense strand
ugauguggaugaagaagaa

SEQ ID NO: 636953 - RNA, 19 nt, Homo sapiens
  misc_RNA (1)...(19): siRNA sense strand
gcaaaggucccaugaucau

SEQ ID NO: 636954 - RNA, 19 nt, Homo sapiens
  misc_RNA (1)...(19): siRNA sense strand
ucagugaugucauauacga

SEQ ID NO: 636955 - RNA, 19 nt, Homo sapiens
  misc_RNA (1)...(19): siRNA sense strand
cugcagaucuuccacugaa

SEQ ID NO: 636956 - RNA, 19 nt, Homo sapiens
  misc_RNA (1)...(19): siRNA sense strand
gggcuggugucagaaauga

SEQ ID NO: 636957 - RNA, 19 nt, Homo sapiens
  misc_RNA (1)...(19): siRNA sense strand
gcaaaugcugcagaaagua

SEQ ID NO: 636958 - RNA, 19 nt, Homo sapiens
  misc_RNA (1)...(19): siRNA sense strand
ggacggacaggaacauuca

SEQ ID NO: 636959 - RNA, 19 nt, Homo sapiens
  misc_RNA (1)...(19): siRNA sense strand
acaaacauccuaccauaug

SEQ ID NO: 636960 - RNA, 19 nt, Homo sapiens
  misc_RNA (1)...(19): siRNA sense strand
caucaaugccaacuauauu

SEQ ID NO: 636961 - RNA, 19 nt, Homo sapiens
  misc_RNA (1)...(19): siRNA sense strand
acacuuugcugcagaucuu

SEQ ID NO: 636962 - RNA, 19 nt, Homo sapiens
  misc_RNA (1)...(19): siRNA sense strand
gaagaugguccugcaacaa

SEQ ID NO: 636963 - RNA, 19 nt, Homo sapiens
  misc_RNA (1)...(19): siRNA sense strand
uaauuggacuguugcuugu

SEQ ID NO: 636964 - RNA, 19 nt, Homo sapiens
  misc_RNA (1)...(19): siRNA sense strand
agagagggauggaaagcuu

SEQ ID NO: 636965 - RNA, 19 nt, Homo sapiens
  misc_RNA (1)...(19): siRNA sense strand
gaugaaucccaauguggua

SEQ ID NO: 636966 - RNA, 19 nt, Homo sapiens
  misc_RNA (1)...(19): siRNA sense strand
cuucagccgugugagauua

SEQ ID NO: 636967 - RNA, 19 nt, Homo sapiens
  misc_RNA (1)...(19): siRNA sense strand
uuaaagaagaggaaacuga

SEQ ID NO: 636968 - RNA, 19 nt, Homo sapiens
  misc_RNA (1)...(19): siRNA sense strand
ggaugacuuugaugccuau

SEQ ID NO: 636969 - RNA, 19 nt, Homo sapiens
  misc_RNA (1)...(19): siRNA sense strand
aaaguauccugcaguuugu

SEQ ID NO: 636970 - RNA, 19 nt, Homo sapiens
  misc_RNA (1)...(19): siRNA sense strand
caaaugcugcagaaaguau

SEQ ID NO: 636971 - RNA, 19 nt, Homo sapiens
  misc_RNA (1)...(19): siRNA sense strand
ugaagaagaagcagcaguu

SEQ ID NO: 636972 - RNA, 19 nt, Homo sapiens
  misc_RNA (1)...(19): siRNA sense strand
agauuagucuccaugaaug

SEQ ID NO: 636973 - RNA, 19 nt, Homo sapiens
  misc_RNA (1)...(19): siRNA sense strand
agaggaaggugcagacuac

SEQ ID NO: 636974 - RNA, 19 nt, Homo sapiens
  misc_RNA (1)...(19): siRNA sense strand
uguagacacuuccggauca

SEQ ID NO: 636975 - RNA, 19 nt, Homo sapiens
  misc_RNA (1)...(19): siRNA sense strand
ggaaggugcagacuacauc

SEQ ID NO: 636976 - RNA, 19 nt, Homo sapiens
  misc_RNA (1)...(19): siRNA sense strand
ggauauggccaaagacucu

SEQ ID NO: 636977 - RNA, 19 nt, Homo sapiens
  misc_RNA (1)...(19): siRNA sense strand
caacuauauuccuggauac

SEQ ID NO: 636978 - RNA, 19 nt, Homo sapiens
  misc_RNA (1)...(19): siRNA sense strand
agagaugaaucccaaugug

SEQ ID NO: 636979 - RNA, 19 nt, Homo sapiens
  misc_RNA (1)...(19): siRNA sense strand
ucuuagggcuggugucaga

SEQ ID NO: 636980 - RNA, 19 nt, Homo sapiens
  misc_RNA (1)...(19): siRNA sense strand
cugguacauuugucaauuu

SEQ ID NO: 636981 - RNA, 19 nt, Homo sapiens
  misc_RNA (1)...(19): siRNA sense strand
gaagaagaagcagcaguuc

SEQ ID NO: 636982 - RNA, 19 nt, Homo sapiens
  misc_RNA (1)...(19): siRNA sense strand
guuacccucauuauucuua

SEQ ID NO: 636983 - RNA, 19 nt, Homo sapiens
  misc_RNA (1)...(19): siRNA sense strand
gacuuugaugccuauauua

SEQ ID NO: 636984 - RNA, 19 nt, Homo sapiens
  misc_RNA (1)...(19): siRNA sense strand
auuggacuguugcuuguua

SEQ ID NO: 636985 - RNA, 19 nt, Homo sapiens
  misc_RNA (1)...(19): siRNA sense strand
ggugcagacuacaucaaug

SEQ ID NO: 636986 - RNA, 19 nt, Homo sapiens
  misc_RNA (1)...(19): siRNA sense strand
gcagaucuuccacugaauc

SEQ ID NO: 636987 - RNA, 19 nt, Homo sapiens
  misc_RNA (1)...(19): siRNA sense strand
gacuggauaucccacacuu

SEQ ID NO: 636988 - RNA, 19 nt, Homo sapiens
  misc_RNA (1)...(19): siRNA sense strand
uuugaggaguugaaauuga

SEQ ID NO: 636989 - RNA, 19 nt, Homo sapiens
  misc_RNA (1)...(19): siRNA sense strand
gaaagcuuccauacaacug

SEQ ID NO: 636990 - RNA, 19 nt, Homo sapiens
  misc_RNA (1)...(19): siRNA sense strand
gaugucauauacgagaaug

SEQ ID NO: 636991 - RNA, 19 nt, Homo sapiens
  misc_RNA (1)...(19): siRNA sense strand
ccucauuauucuuaggaaa

SEQ ID NO: 636992 - RNA, 19 nt, Homo sapiens
  misc_RNA (1)...(19): siRNA sense strand
cgacagcaagcuaccaaga

SEQ ID NO: 636993 - RNA, 19 nt, Homo sapiens
  misc_RNA (1)...(19): siRNA sense strand
aagaugguccugcaacaaa

SEQ ID NO: 636994 - RNA, 19 nt, Homo sapiens
  misc_RNA (1)...(19): siRNA sense strand
gaucuuccacugaaucgau

SEQ ID NO: 636995 - RNA, 19 nt, Homo sapiens
  misc_RNA (1)...(19): siRNA sense strand
cuuguuacccucauuauuc

SEQ ID NO: 636996 - RNA, 19 nt, Homo sapiens
  misc_RNA (1)...(19): siRNA sense strand
cagaggagcaguacauuuu

SEQ ID NO: 636997 - RNA, 19 nt, Homo sapiens
  misc_RNA (1)...(19): siRNA sense strand
ggacaggaacauucauugc

SEQ ID NO: 636998 - RNA, 19 nt, Homo sapiens
  misc_RNA (1)...(19): siRNA sense strand
gaaggugcagacuacauca

SEQ ID NO: 636999 - RNA, 19 nt, Homo sapiens
  misc_RNA (1)...(19): siRNA sense strand
cauccuaccauaugacuuc

SEQ ID NO: 637000 - RNA, 19 nt, Homo sapiens
  misc_RNA (1)...(19): siRNA sense strand
cuguggagaugauuucaga

SEQ ID NO: 637001 - RNA, 19 nt, Homo sapiens
  misc_RNA (1)...(19): siRNA sense strand
gauuagucuccaugaauga

SEQ ID NO: 637002 - RNA, 19 nt, Homo sapiens
  misc_RNA (1)...(19): siRNA sense strand
agacagaggagcaguacau

SEQ ID NO: 637003 - RNA, 19 nt, Homo sapiens
  misc_RNA (1)...(19): siRNA sense strand
guagacacuuccggaucaa

SEQ ID NO: 637004 - RNA, 19 nt, Homo sapiens
  misc_RNA (1)...(19): siRNA sense strand
gugcaacugauguggauga

SEQ ID NO: 637005 - RNA, 19 nt, Homo sapiens
  misc_RNA (1)...(19): siRNA sense strand
acagaggagcaguacauuu

SEQ ID NO: 637006 - RNA, 19 nt, Homo sapiens
  misc_RNA (1)...(19): siRNA sense strand
cugacgagaugcaggaugu

SEQ ID NO: 637007 - RNA, 19 nt, Homo sapiens
  misc_RNA (1)...(19): siRNA sense strand
cuggauaucccacacuuug

SEQ ID NO: 637008 - RNA, 19 nt, Homo sapiens
  misc_RNA (1)...(19): siRNA sense strand
aaaggucccaugaucauuc

SEQ ID NO: 637009 - RNA, 19 nt, Homo sapiens
  misc_RNA (1)...(19): siRNA sense strand
caaaggucccaugaucauu

SEQ ID NO: 637010 - RNA, 19 nt, Homo sapiens
  misc_RNA (1)...(19): siRNA sense strand
ggacgacugggccuguaga

SEQ ID NO: 637011 - RNA, 19 nt, Homo sapiens
  misc_RNA (1)...(19): siRNA sense strand
cuccaugaaugaagaggaa

SEQ ID NO: 637012 - RNA, 19 nt, Homo sapiens
  misc_RNA (1)...(19): siRNA sense strand
uugaggaguugaaauugau

SEQ ID NO: 637013 - RNA, 19 nt, Homo sapiens
  misc_RNA (1)...(19): siRNA sense strand
ugacuucagccgugugaga

SEQ ID NO: 637014 - RNA, 19 nt, Homo sapiens
  misc_RNA (1)...(19): siRNA sense strand
aaauugauuggacuggaua

SEQ ID NO: 637015 - RNA, 19 nt, Homo sapiens
  misc_RNA (1)...(19): siRNA sense strand
gucauauacgagaauguua

SEQ ID NO: 637016 - RNA, 19 nt, Homo sapiens
  misc_RNA (1)...(19): siRNA sense strand
gugaugucauauacgagaa

SEQ ID NO: 637017 - RNA, 19 nt, Homo sapiens
  misc_RNA (1)...(19): siRNA sense strand
agaagaggaaacugacaaa

SEQ ID NO: 637018 - RNA, 19 nt, Homo sapiens
  misc_RNA (1)...(19): siRNA sense strand
gaaucccaaugugguagug

SEQ ID NO: 637019 - RNA, 19 nt, Homo sapiens
  misc_RNA (1)...(19): siRNA sense strand
ccacugaaucgauguaaaa

SEQ ID NO: 637020 - RNA, 19 nt, Homo sapiens
  misc_RNA (1)...(19): siRNA sense strand
gcaacaaaagucucagauu

SEQ ID NO: 637021 - RNA, 19 nt, Homo sapiens
  misc_RNA (1)...(19): siRNA sense strand
gcuuguuacccucauuauu

SEQ ID NO: 637022 - RNA, 19 nt, Homo sapiens
  misc_RNA (1)...(19): siRNA sense strand
cgagaugcaggaugugaug

SEQ ID NO: 637023 - RNA, 19 nt, Homo sapiens
  misc_RNA (1)...(19): siRNA sense strand
cacaaacauccuaccauau

SEQ ID NO: 637024 - RNA, 19 nt, Homo sapiens
  misc_RNA (1)...(19): siRNA sense strand
gugugcaacugauguggau

SEQ ID NO: 637025 - RNA, 19 nt, Homo sapiens
  misc_RNA (1)...(19): siRNA sense strand
gacagaggagcaguacauu

SEQ ID NO: 637026 - RNA, 19 nt, Homo sapiens
  misc_RNA (1)...(19): siRNA sense strand
ugucauauacgagaauguu

SEQ ID NO: 637027 - RNA, 19 nt, Homo sapiens
  misc_RNA (1)...(19): siRNA sense strand
caaagacucugacuauaaa

SEQ ID NO: 637028 - RNA, 19 nt, Homo sapiens
  misc_RNA (1)...(19): siRNA sense strand
caacaaaagucucagauua

SEQ ID NO: 637029 - RNA, 19 nt, Homo sapiens
  misc_RNA (1)...(19): siRNA sense strand
gaaaguauccugcaguuug

SEQ ID NO: 637030 - RNA, 19 nt, Homo sapiens
  misc_RNA (1)...(19): siRNA sense strand
acacaaacauccuaccaua

SEQ ID NO: 637031 - RNA, 19 nt, Homo sapiens
  misc_RNA (1)...(19): siRNA sense strand
caacugauguggaugaaga

SEQ ID NO: 637032 - RNA, 19 nt, Homo sapiens
  misc_RNA (1)...(19): siRNA sense strand
gagcaaaggucccaugauc

SEQ ID NO: 637033 - RNA, 19 nt, Homo sapiens
  misc_RNA (1)...(19): siRNA sense strand
ccaacuauauuccuggaua

SEQ ID NO: 637034 - RNA, 19 nt, Homo sapiens
  misc_RNA (1)...(19): siRNA sense strand
ccaaagacucugacuauaa

SEQ ID NO: 637035 - RNA, 19 nt, Homo sapiens
  misc_RNA (1)...(19): siRNA sense strand
caacuaugcugacgagaug

SEQ ID NO: 637036 - RNA, 19 nt, Homo sapiens
  misc_RNA (1)...(19): siRNA sense strand
guguggagcugguacauuu

SEQ ID NO: 637037 - RNA, 19 nt, Homo sapiens
  misc_RNA (1)...(19): siRNA sense strand
gaaauugauuggacuggau

SEQ ID NO: 637038 - RNA, 19 nt, Homo sapiens
  misc_RNA (1)...(19): siRNA sense strand
ggagaugauuucagaggaa

SEQ ID NO: 637039 - RNA, 19 nt, Homo sapiens
  misc_RNA (1)...(19): siRNA sense strand
caaacauccuaccauauga

SEQ ID NO: 637040 - RNA, 19 nt, Homo sapiens
  misc_RNA (1)...(19): siRNA sense strand
aaaggagggugaaauguga

SEQ ID NO: 637041 - RNA, 19 nt, Homo sapiens
  misc_RNA (1)...(19): siRNA sense strand
cuacaucaaugccaacuau

SEQ ID NO: 637042 - RNA, 19 nt, Homo sapiens
  misc_RNA (1)...(19): siRNA sense strand
uuaaggauauggccaaaga

SEQ ID NO: 637043 - RNA, 19 nt, Homo sapiens
  misc_RNA (1)...(19): siRNA sense strand
gccaaagacucugacuaua

SEQ ID NO: 637044 - RNA, 19 nt, Homo sapiens
  misc_RNA (1)...(19): siRNA sense strand
ugacuuugaugccuauauu

SEQ ID NO: 637045 - RNA, 19 nt, Homo sapiens
  misc_RNA (1)...(19): siRNA sense strand
gcagauggcuagggagugu

SEQ ID NO: 637046 - RNA, 19 nt, Homo sapiens
  misc_RNA (1)...(19): siRNA sense strand
ggucauaccggaugucuau

SEQ ID NO: 637047 - RNA, 19 nt, Homo sapiens
  misc_RNA (1)...(19): siRNA sense strand
ggaagaugguccugcaaca

SEQ ID NO: 637048 - RNA, 19 nt, Homo sapiens
  misc_RNA (1)...(19): siRNA sense strand
cagaaaguauccugcaguu

SEQ ID NO: 637049 - RNA, 19 nt, Homo sapiens
  misc_RNA (1)...(19): siRNA sense strand
gaccauuacuggccauuca

SEQ ID NO: 637050 - RNA, 19 nt, Homo sapiens
  misc_RNA (1)...(19): siRNA sense strand
ggccaaagacucugacuau

SEQ ID NO: 637051 - RNA, 19 nt, Homo sapiens
  misc_RNA (1)...(19): siRNA sense strand
gcugguacauuugucaauu

SEQ ID NO: 637052 - RNA, 19 nt, Homo sapiens
  misc_RNA (1)...(19): siRNA sense strand
ugauguggaugaagaagaa

SEQ ID NO: 637053 - RNA, 19 nt, Homo sapiens
  misc_RNA (1)...(19): siRNA sense strand
gcaaaggucccaugaucau

SEQ ID NO: 637054 - RNA, 19 nt, Homo sapiens
  misc_RNA (1)...(19): siRNA sense strand
ucagugaugucauauacga

SEQ ID NO: 637055 - RNA, 19 nt, Homo sapiens
  misc_RNA (1)...(19): siRNA sense strand
cugcagaucuuccacugaa

SEQ ID NO: 637056 - RNA, 19 nt, Homo sapiens
  misc_RNA (1)...(19): siRNA sense strand
gggcuggugucagaaauga

SEQ ID NO: 637057 - RNA, 19 nt, Homo sapiens
  misc_RNA (1)...(19): siRNA sense strand
gcaaaugcugcagaaagua

SEQ ID NO: 637058 - RNA, 19 nt, Homo sapiens
  misc_RNA (1)...(19): siRNA sense strand
ggacggacaggaacauuca

SEQ ID NO: 637059 - RNA, 19 nt, Homo sapiens
  misc_RNA (1)...(19): siRNA sense strand
acaaacauccuaccauaug

SEQ ID NO: 637060 - RNA, 19 nt, Homo sapiens
  misc_RNA (1)...(19): siRNA sense strand
caucaaugccaacuauauu

SEQ ID NO: 637061 - RNA, 19 nt, Homo sapiens
  misc_RNA (1)...(19): siRNA sense strand
acacuuugcugcagaucuu

SEQ ID NO: 637062 - RNA, 19 nt, Homo sapiens
  misc_RNA (1)...(19): siRNA sense strand
gaagaugguccugcaacaa

SEQ ID NO: 637063 - RNA, 19 nt, Homo sapiens
  misc_RNA (1)...(19): siRNA sense strand
uaauuggacuguugcuugu

SEQ ID NO: 637064 - RNA, 19 nt, Homo sapiens
  misc_RNA (1)...(19): siRNA sense strand
agagagggauggaaagcuu

SEQ ID NO: 637065 - RNA, 19 nt, Homo sapiens
  misc_RNA (1)...(19): siRNA sense strand
gaugaaucccaauguggua

SEQ ID NO: 637066 - RNA, 19 nt, Homo sapiens
  misc_RNA (1)...(19): siRNA sense strand
cuucagccgugugagauua

SEQ ID NO: 637067 - RNA, 19 nt, Homo sapiens
  misc_RNA (1)...(19): siRNA sense strand
uuaaagaagaggaaacuga

SEQ ID NO: 637068 - RNA, 19 nt, Homo sapiens
  misc_RNA (1)...(19): siRNA sense strand
ggaugacuuugaugccuau

SEQ ID NO: 637069 - RNA, 19 nt, Homo sapiens
  misc_RNA (1)...(19): siRNA sense strand
aaaguauccugcaguuugu

SEQ ID NO: 637070 - RNA, 19 nt, Homo sapiens
  misc_RNA (1)...(19): siRNA sense strand
caaaugcugcagaaaguau

SEQ ID NO: 637071 - RNA, 19 nt, Homo sapiens
  misc_RNA (1)...(19): siRNA sense strand
ugaagaagaagcagcaguu

SEQ ID NO: 637072 - RNA, 19 nt, Homo sapiens
  misc_RNA (1)...(19): siRNA sense strand
agauuagucuccaugaaug

SEQ ID NO: 637073 - RNA, 19 nt, Homo sapiens
  misc_RNA (1)...(19): siRNA sense strand
agaggaaggugcagacuac

SEQ ID NO: 637074 - RNA, 19 nt, Homo sapiens
  misc_RNA (1)...(19): siRNA sense strand
uguagacacuuccggauca

SEQ ID NO: 637075 - RNA, 19 nt, Homo sapiens
  misc_RNA (1)...(19): siRNA sense strand
ggaaggugcagacuacauc

SEQ ID NO: 637076 - RNA, 19 nt, Homo sapiens
  misc_RNA (1)...(19): siRNA sense strand
ggauauggccaaagacucu

SEQ ID NO: 637077 - RNA, 19 nt, Homo sapiens
  misc_RNA (1)...(19): siRNA sense strand
caacuauauuccuggauac

SEQ ID NO: 637078 - RNA, 19 nt, Homo sapiens
  misc_RNA (1)...(19): siRNA sense strand
agagaugaaucccaaugug

SEQ ID NO: 637079 - RNA, 19 nt, Homo sapiens
  misc_RNA (1)...(19): siRNA sense strand
ucuuagggcuggugucaga

SEQ ID NO: 637080 - RNA, 19 nt, Homo sapiens
  misc_RNA (1)...(19): siRNA sense strand
cugguacauuugucaauuu

SEQ ID NO: 637081 - RNA, 19 nt, Homo sapiens
  misc_RNA (1)...(19): siRNA sense strand
gaagaagaagcagcaguuc

SEQ ID NO: 637082 - RNA, 19 nt, Homo sapiens
  misc_RNA (1)...(19): siRNA sense strand
guuacccucauuauucuua

SEQ ID NO: 637083 - RNA, 19 nt, Homo sapiens
  misc_RNA (1)...(19): siRNA sense strand
gacuuugaugccuauauua

SEQ ID NO: 637084 - RNA, 19 nt, Homo sapiens
  misc_RNA (1)...(19): siRNA sense strand
auuggacuguugcuuguua

SEQ ID NO: 637085 - RNA, 19 nt, Homo sapiens
  misc_RNA (1)...(19): siRNA sense strand
ggugcagacuacaucaaug

SEQ ID NO: 637086 - RNA, 19 nt, Homo sapiens
  misc_RNA (1)...(19): siRNA sense strand
gcagaucuuccacugaauc

SEQ ID NO: 637087 - RNA, 19 nt, Homo sapiens
  misc_RNA (1)...(19): siRNA sense strand
gacuggauaucccacacuu

SEQ ID NO: 637088 - RNA, 19 nt, Homo sapiens
  misc_RNA (1)...(19): siRNA sense strand
uuugaggaguugaaauuga

SEQ ID NO: 637089 - RNA, 19 nt, Homo sapiens
  misc_RNA (1)...(19): siRNA sense strand
gaaagcuuccauacaacug

SEQ ID NO: 637090 - RNA, 19 nt, Homo sapiens
  misc_RNA (1)...(19): siRNA sense strand
gaugucauauacgagaaug

SEQ ID NO: 637091 - RNA, 19 nt, Homo sapiens
  misc_RNA (1)...(19): siRNA sense strand
ccucauuauucuuaggaaa

SEQ ID NO: 637092 - RNA, 19 nt, Homo sapiens
  misc_RNA (1)...(19): siRNA sense strand
cgacagcaagcuaccaaga

SEQ ID NO: 637093 - RNA, 19 nt, Homo sapiens
  misc_RNA (1)...(19): siRNA sense strand
aagaugguccugcaacaaa

SEQ ID NO: 637094 - RNA, 19 nt, Homo sapiens
  misc_RNA (1)...(19): siRNA sense strand
gaucuuccacugaaucgau

SEQ ID NO: 637095 - RNA, 19 nt, Homo sapiens
  misc_RNA (1)...(19): siRNA sense strand
cuuguuacccucauuauuc

SEQ ID NO: 637096 - RNA, 19 nt, Homo sapiens
  misc_RNA (1)...(19): siRNA sense strand
cagaggagcaguacauuuu

SEQ ID NO: 637097 - RNA, 19 nt, Homo sapiens
  misc_RNA (1)...(19): siRNA sense strand
ggacaggaacauucauugc

SEQ ID NO: 637098 - RNA, 19 nt, Homo sapiens
  misc_RNA (1)...(19): siRNA sense strand
gaaggugcagacuacauca

SEQ ID NO: 637099 - RNA, 19 nt, Homo sapiens
  misc_RNA (1)...(19): siRNA sense strand
cauccuaccauaugacuuc

SEQ ID NO: 637100 - RNA, 19 nt, Homo sapiens
  misc_RNA (1)...(19): siRNA sense strand
cuguggagaugauuucaga

SEQ ID NO: 637101 - RNA, 19 nt, Homo sapiens
  misc_RNA (1)...(19): siRNA sense strand
gauuagucuccaugaauga

SEQ ID NO: 637102 - RNA, 19 nt, Homo sapiens
  misc_RNA (1)...(19): siRNA sense strand
agacagaggagcaguacau

SEQ ID NO: 637103 - RNA, 19 nt, Homo sapiens
  misc_RNA (1)...(19): siRNA sense strand
guagacacuuccggaucaa

SEQ ID NO: 637104 - RNA, 19 nt, Homo sapiens
  misc_RNA (1)...(19): siRNA sense strand
gugcaacugauguggauga

SEQ ID NO: 637105 - RNA, 19 nt, Homo sapiens
  misc_RNA (1)...(19): siRNA sense strand
acagaggagcaguacauuu

SEQ ID NO: 637106 - RNA, 19 nt, Homo sapiens
  misc_RNA (1)...(19): siRNA sense strand
cugacgagaugcaggaugu

SEQ ID NO: 637107 - RNA, 19 nt, Homo sapiens
  misc_RNA (1)...(19): siRNA sense strand
cuggauaucccacacuuug

SEQ ID NO: 637108 - RNA, 19 nt, Homo sapiens
  misc_RNA (1)...(19): siRNA sense strand
aaaggucccaugaucauuc

SEQ ID NO: 637109 - RNA, 19 nt, Homo sapiens
  misc_RNA (1)...(19): siRNA sense strand
caaaggucccaugaucauu

SEQ ID NO: 637110 - RNA, 19 nt, Homo sapiens
  misc_RNA (1)...(19): siRNA sense strand
ggacgacugggccuguaga

SEQ ID NO: 637111 - RNA, 19 nt, Homo sapiens
  misc_RNA (1)...(19): siRNA sense strand
cuccaugaaugaagaggaa

SEQ ID NO: 637112 - RNA, 19 nt, Homo sapiens
  misc_RNA (1)...(19): siRNA sense strand
uugaggaguugaaauugau

SEQ ID NO: 637113 - RNA, 19 nt, Homo sapiens
  misc_RNA (1)...(19): siRNA sense strand
ugacuucagccgugugaga

SEQ ID NO: 637114 - RNA, 19 nt, Homo sapiens
  misc_RNA (1)...(19): siRNA sense strand
aaauugauuggacuggaua

SEQ ID NO: 637115 - RNA, 19 nt, Homo sapiens
  misc_RNA (1)...(19): siRNA sense strand
gucauauacgagaauguua

SEQ ID NO: 637116 - RNA, 19 nt, Homo sapiens
  misc_RNA (1)...(19): siRNA sense strand
gugaugucauauacgagaa

SEQ ID NO: 637117 - RNA, 19 nt, Homo sapiens
  misc_RNA (1)...(19): siRNA sense strand
agaagaggaaacugacaaa

SEQ ID NO: 637118 - RNA, 19 nt, Homo sapiens
  misc_RNA (1)...(19): siRNA sense strand
gaaucccaaugugguagug

SEQ ID NO: 637119 - RNA, 19 nt, Homo sapiens
  misc_RNA (1)...(19): siRNA sense strand
ccacugaaucgauguaaaa

SEQ ID NO: 637120 - RNA, 19 nt, Homo sapiens
  misc_RNA (1)...(19): siRNA sense strand
gcaacaaaagucucagauu

SEQ ID NO: 637121 - RNA, 19 nt, Homo sapiens
  misc_RNA (1)...(19): siRNA sense strand
gcuuguuacccucauuauu

SEQ ID NO: 637122 - RNA, 19 nt, Homo sapiens
  misc_RNA (1)...(19): siRNA sense strand
cgagaugcaggaugugaug

SEQ ID NO: 637123 - RNA, 19 nt, Homo sapiens
  misc_RNA (1)...(19): siRNA sense strand
cacaaacauccuaccauau

SEQ ID NO: 637124 - RNA, 19 nt, Homo sapiens
  misc_RNA (1)...(19): siRNA sense strand
gugugcaacugauguggau

SEQ ID NO: 637125 - RNA, 19 nt, Homo sapiens
  misc_RNA (1)...(19): siRNA sense strand
gacagaggagcaguacauu

SEQ ID NO: 637126 - RNA, 19 nt, Homo sapiens
  misc_RNA (1)...(19): siRNA sense strand
ugucauauacgagaauguu

SEQ ID NO: 637127 - RNA, 19 nt, Homo sapiens
  misc_RNA (1)...(19): siRNA sense strand
caaagacucugacuauaaa

SEQ ID NO: 637128 - RNA, 19 nt, Homo sapiens
  misc_RNA (1)...(19): siRNA sense strand
caacaaaagucucagauua

SEQ ID NO: 637129 - RNA, 19 nt, Homo sapiens
  misc_RNA (1)...(19): siRNA sense strand
gaaaguauccugcaguuug

SEQ ID NO: 637130 - RNA, 19 nt, Homo sapiens
  misc_RNA (1)...(19): siRNA sense strand
acacaaacauccuaccaua

SEQ ID NO: 637131 - RNA, 19 nt, Homo sapiens
  misc_RNA (1)...(19): siRNA sense strand
caacugauguggaugaaga

SEQ ID NO: 637132 - RNA, 19 nt, Homo sapiens
  misc_RNA (1)...(19): siRNA sense strand
gagcaaaggucccaugauc

SEQ ID NO: 637133 - RNA, 19 nt, Homo sapiens
  misc_RNA (1)...(19): siRNA sense strand
ccaacuauauuccuggaua

SEQ ID NO: 637134 - RNA, 19 nt, Homo sapiens
  misc_RNA (1)...(19): siRNA sense strand
ccaaagacucugacuauaa

SEQ ID NO: 637135 - RNA, 19 nt, Homo sapiens
  misc_RNA (1)...(19): siRNA sense strand
caacuaugcugacgagaug

SEQ ID NO: 637136 - RNA, 19 nt, Homo sapiens
  misc_RNA (1)...(19): siRNA sense strand
guguggagcugguacauuu

SEQ ID NO: 637137 - RNA, 19 nt, Homo sapiens
  misc_RNA (1)...(19): siRNA sense strand
gaaauugauuggacuggau

SEQ ID NO: 637138 - RNA, 19 nt, Homo sapiens
  misc_RNA (1)...(19): siRNA sense strand
ggagaugauuucagaggaa

SEQ ID NO: 637139 - RNA, 19 nt, Homo sapiens
  misc_RNA (1)...(19): siRNA sense strand
caaacauccuaccauauga

SEQ ID NO: 637140 - RNA, 19 nt, Homo sapiens
  misc_RNA (1)...(19): siRNA sense strand
aaaggagggugaaauguga

SEQ ID NO: 637141 - RNA, 19 nt, Homo sapiens
  misc_RNA (1)...(19): siRNA sense strand
cuacaucaaugccaacuau

SEQ ID NO: 637142 - RNA, 19 nt, Homo sapiens
  misc_RNA (1)...(19): siRNA sense strand
uuaaggauauggccaaaga

SEQ ID NO: 637143 - RNA, 19 nt, Homo sapiens
  misc_RNA (1)...(19): siRNA sense strand
gccaaagacucugacuaua

SEQ ID NO: 637144 - RNA, 19 nt, Homo sapiens
  misc_RNA (1)...(19): siRNA sense strand
ugacuuugaugccuauauu

SEQ ID NO: 637145 - RNA, 19 nt, Homo sapiens
  misc_RNA (1)...(19): siRNA sense strand
gcagauggcuagggagugu

SEQ ID NO: 637146 - RNA, 19 nt, Homo sapiens
  misc_RNA (1)...(19): siRNA sense strand
ggucauaccggaugucuau

SEQ ID NO: 637147 - RNA, 19 nt, Homo sapiens
  misc_RNA (1)...(19): siRNA sense strand
ggaagaugguccugcaaca

SEQ ID NO: 637148 - RNA, 19 nt, Homo sapiens
  misc_RNA (1)...(19): siRNA sense strand
cagaaaguauccugcaguu

SEQ ID NO: 637149 - RNA, 19 nt, Homo sapiens
  misc_RNA (1)...(19): siRNA sense strand
gaccauuacuggccauuca

SEQ ID NO: 637150 - RNA, 19 nt, Homo sapiens
  misc_RNA (1)...(19): siRNA sense strand
ggccaaagacucugacuau

SEQ ID NO: 637151 - RNA, 19 nt, Homo sapiens
  misc_RNA (1)...(19): siRNA sense strand
gcugguacauuugucaauu

SEQ ID NO: 637152 - RNA, 19 nt, Homo sapiens
  misc_RNA (1)...(19): siRNA sense strand
ugauguggaugaagaagaa

SEQ ID NO: 637153 - RNA, 19 nt, Homo sapiens
  misc_RNA (1)...(19): siRNA sense strand
gcaaaggucccaugaucau

SEQ ID NO: 637154 - RNA, 19 nt, Homo sapiens
  misc_RNA (1)...(19): siRNA sense strand
ucagugaugucauauacga

SEQ ID NO: 637155 - RNA, 19 nt, Homo sapiens
  misc_RNA (1)...(19): siRNA sense strand
cugcagaucuuccacugaa

SEQ ID NO: 637156 - RNA, 19 nt, Homo sapiens
  misc_RNA (1)...(19): siRNA sense strand
gggcuggugucagaaauga

SEQ ID NO: 637157 - RNA, 19 nt, Homo sapiens
  misc_RNA (1)...(19): siRNA sense strand
gcaaaugcugcagaaagua

SEQ ID NO: 637158 - RNA, 19 nt, Homo sapiens
  misc_RNA (1)...(19): siRNA sense strand
ggacggacaggaacauuca

SEQ ID NO: 637159 - RNA, 19 nt, Homo sapiens
  misc_RNA (1)...(19): siRNA sense strand
acaaacauccuaccauaug

SEQ ID NO: 637160 - RNA, 19 nt, Homo sapiens
  misc_RNA (1)...(19): siRNA sense strand
caucaaugccaacuauauu

SEQ ID NO: 637161 - RNA, 19 nt, Homo sapiens
  misc_RNA (1)...(19): siRNA sense strand
acacuuugcugcagaucuu

SEQ ID NO: 637162 - RNA, 19 nt, Homo sapiens
  misc_RNA (1)...(19): siRNA sense strand
gaagaugguccugcaacaa

SEQ ID NO: 637163 - RNA, 19 nt, Homo sapiens
  misc_RNA (1)...(19): siRNA sense strand
uaauuggacuguugcuugu

SEQ ID NO: 637164 - RNA, 19 nt, Homo sapiens
  misc_RNA (1)...(19): siRNA sense strand
agagagggauggaaagcuu

SEQ ID NO: 637165 - RNA, 19 nt, Homo sapiens
  misc_RNA (1)...(19): siRNA sense strand
gaugaaucccaauguggua

SEQ ID NO: 637166 - RNA, 19 nt, Homo sapiens
  misc_RNA (1)...(19): siRNA sense strand
cuucagccgugugagauua

SEQ ID NO: 637167 - RNA, 19 nt, Homo sapiens
  misc_RNA (1)...(19): siRNA sense strand
uuaaagaagaggaaacuga

SEQ ID NO: 637168 - RNA, 19 nt, Homo sapiens
  misc_RNA (1)...(19): siRNA sense strand
ggaugacuuugaugccuau

SEQ ID NO: 637169 - RNA, 19 nt, Homo sapiens
  misc_RNA (1)...(19): siRNA sense strand
aaaguauccugcaguuugu

SEQ ID NO: 637170 - RNA, 19 nt, Homo sapiens
  misc_RNA (1)...(19): siRNA sense strand
caaaugcugcagaaaguau

SEQ ID NO: 637171 - RNA, 19 nt, Homo sapiens
  misc_RNA (1)...(19): siRNA sense strand
ugaagaagaagcagcaguu

SEQ ID NO: 637172 - RNA, 19 nt, Homo sapiens
  misc_RNA (1)...(19): siRNA sense strand
agauuagucuccaugaaug

SEQ ID NO: 637173 - RNA, 19 nt, Homo sapiens
  misc_RNA (1)...(19): siRNA sense strand
agaggaaggugcagacuac

SEQ ID NO: 637174 - RNA, 19 nt, Homo sapiens
  misc_RNA (1)...(19): siRNA sense strand
uguagacacuuccggauca

SEQ ID NO: 637175 - RNA, 19 nt, Homo sapiens
  misc_RNA (1)...(19): siRNA sense strand
ggaaggugcagacuacauc

SEQ ID NO: 637176 - RNA, 19 nt, Homo sapiens
  misc_RNA (1)...(19): siRNA sense strand
ggauauggccaaagacucu

SEQ ID NO: 637177 - RNA, 19 nt, Homo sapiens
  misc_RNA (1)...(19): siRNA sense strand
caacuauauuccuggauac

SEQ ID NO: 637178 - RNA, 19 nt, Homo sapiens
  misc_RNA (1)...(19): siRNA sense strand
agagaugaaucccaaugug

SEQ ID NO: 637179 - RNA, 19 nt, Homo sapiens
  misc_RNA (1)...(19): siRNA sense strand
ucuuagggcuggugucaga

SEQ ID NO: 637180 - RNA, 19 nt, Homo sapiens
  misc_RNA (1)...(19): siRNA sense strand
cugguacauuugucaauuu

SEQ ID NO: 637181 - RNA, 19 nt, Homo sapiens
  misc_RNA (1)...(19): siRNA sense strand
gaagaagaagcagcaguuc

SEQ ID NO: 637182 - RNA, 19 nt, Homo sapiens
  misc_RNA (1)...(19): siRNA sense strand
guuacccucauuauucuua

SEQ ID NO: 637183 - RNA, 19 nt, Homo sapiens
  misc_RNA (1)...(19): siRNA sense strand
gacuuugaugccuauauua

SEQ ID NO: 637184 - RNA, 19 nt, Homo sapiens
  misc_RNA (1)...(19): siRNA sense strand
auuggacuguugcuuguua

SEQ ID NO: 637185 - RNA, 19 nt, Homo sapiens
  misc_RNA (1)...(19): siRNA sense strand
ggugcagacuacaucaaug

SEQ ID NO: 637186 - RNA, 19 nt, Homo sapiens
  misc_RNA (1)...(19): siRNA sense strand
gcagaucuuccacugaauc

SEQ ID NO: 637187 - RNA, 19 nt, Homo sapiens
  misc_RNA (1)...(19): siRNA sense strand
gacuggauaucccacacuu

SEQ ID NO: 637188 - RNA, 19 nt, Homo sapiens
  misc_RNA (1)...(19): siRNA sense strand
uuugaggaguugaaauuga

SEQ ID NO: 637189 - RNA, 19 nt, Homo sapiens
  misc_RNA (1)...(19): siRNA sense strand
gaaagcuuccauacaacug

SEQ ID NO: 637190 - RNA, 19 nt, Homo sapiens
  misc_RNA (1)...(19): siRNA sense strand
gaugucauauacgagaaug

SEQ ID NO: 637191 - RNA, 19 nt, Homo sapiens
  misc_RNA (1)...(19): siRNA sense strand
ccucauuauucuuaggaaa

SEQ ID NO: 637192 - RNA, 19 nt, Homo sapiens
  misc_RNA (1)...(19): siRNA sense strand
cgacagcaagcuaccaaga

SEQ ID NO: 637193 - RNA, 19 nt, Homo sapiens
  misc_RNA (1)...(19): siRNA sense strand
aagaugguccugcaacaaa

SEQ ID NO: 637194 - RNA, 19 nt, Homo sapiens
  misc_RNA (1)...(19): siRNA sense strand
gaucuuccacugaaucgau

SEQ ID NO: 637195 - RNA, 19 nt, Homo sapiens
  misc_RNA (1)...(19): siRNA sense strand
cuuguuacccucauuauuc

SEQ ID NO: 637196 - RNA, 19 nt, Homo sapiens
  misc_RNA (1)...(19): siRNA sense strand
cagaggagcaguacauuuu

SEQ ID NO: 637197 - RNA, 19 nt, Homo sapiens
  misc_RNA (1)...(19): siRNA sense strand
ggacaggaacauucauugc

SEQ ID NO: 637198 - RNA, 19 nt, Homo sapiens
  misc_RNA (1)...(19): siRNA sense strand
gaaggugcagacuacauca

SEQ ID NO: 637199 - RNA, 19 nt, Homo sapiens
  misc_RNA (1)...(19): siRNA sense strand
cauccuaccauaugacuuc

SEQ ID NO: 637200 - RNA, 19 nt, Homo sapiens
  misc_RNA (1)...(19): siRNA sense strand
cuguggagaugauuucaga

SEQ ID NO: 637201 - RNA, 19 nt, Homo sapiens
  misc_RNA (1)...(19): siRNA sense strand
gauuagucuccaugaauga

SEQ ID NO: 637202 - RNA, 19 nt, Homo sapiens
  misc_RNA (1)...(19): siRNA sense strand
agacagaggagcaguacau

SEQ ID NO: 637203 - RNA, 19 nt, Homo sapiens
  misc_RNA (1)...(19): siRNA sense strand
guagacacuuccggaucaa

SEQ ID NO: 637204 - RNA, 19 nt, Homo sapiens
  misc_RNA (1)...(19): siRNA sense strand
gugcaacugauguggauga

SEQ ID NO: 637205 - RNA, 19 nt, Homo sapiens
  misc_RNA (1)...(19): siRNA sense strand
acagaggagcaguacauuu

SEQ ID NO: 637206 - RNA, 19 nt, Homo sapiens
  misc_RNA (1)...(19): siRNA sense strand
cugacgagaugcaggaugu

SEQ ID NO: 637207 - RNA, 19 nt, Homo sapiens
  misc_RNA (1)...(19): siRNA sense strand
cuggauaucccacacuuug

SEQ ID NO: 637208 - RNA, 19 nt, Homo sapiens
  misc_RNA (1)...(19): siRNA sense strand
aaaggucccaugaucauuc

SEQ ID NO: 637209 - RNA, 19 nt, Homo sapiens
  misc_RNA (1)...(19): siRNA sense strand
caaaggucccaugaucauu

SEQ ID NO: 637210 - RNA, 19 nt, Homo sapiens
  misc_RNA (1)...(19): siRNA sense strand
ggacgacugggccuguaga

SEQ ID NO: 637211 - RNA, 19 nt, Homo sapiens
  misc_RNA (1)...(19): siRNA sense strand
cuccaugaaugaagaggaa

SEQ ID NO: 637212 - RNA, 19 nt, Homo sapiens
  misc_RNA (1)...(19): siRNA sense strand
uugaggaguugaaauugau

SEQ ID NO: 637213 - RNA, 19 nt, Homo sapiens
  misc_RNA (1)...(19): siRNA sense strand
ugacuucagccgugugaga

SEQ ID NO: 637214 - RNA, 19 nt, Homo sapiens
  misc_RNA (1)...(19): siRNA sense strand
aaauugauuggacuggaua

SEQ ID NO: 637215 - RNA, 19 nt, Homo sapiens
  misc_RNA (1)...(19): siRNA sense strand
gucauauacgagaauguua

SEQ ID NO: 637216 - RNA, 19 nt, Homo sapiens
  misc_RNA (1)...(19): siRNA sense strand
gugaugucauauacgagaa

SEQ ID NO: 637217 - RNA, 19 nt, Homo sapiens
  misc_RNA (1)...(19): siRNA sense strand
agaagaggaaacugacaaa

SEQ ID NO: 637218 - RNA, 19 nt, Homo sapiens
  misc_RNA (1)...(19): siRNA sense strand
gaaucccaaugugguagug

SEQ ID NO: 637219 - RNA, 19 nt, Homo sapiens
  misc_RNA (1)...(19): siRNA sense strand
ccacugaaucgauguaaaa

SEQ ID NO: 637220 - RNA, 19 nt, Homo sapiens
  misc_RNA (1)...(19): siRNA sense strand
gcaacaaaagucucagauu

SEQ ID NO: 637221 - RNA, 19 nt, Homo sapiens
  misc_RNA (1)...(19): siRNA sense strand
gcuuguuacccucauuauu

SEQ ID NO: 637222 - RNA, 19 nt, Homo sapiens
  misc_RNA (1)...(19): siRNA sense strand
cgagaugcaggaugugaug

SEQ ID NO: 637223 - RNA, 19 nt, Homo sapiens
  misc_RNA (1)...(19): siRNA sense strand
cacaaacauccuaccauau

SEQ ID NO: 637224 - RNA, 19 nt, Homo sapiens
  misc_RNA (1)...(19): siRNA sense strand
gugugcaacugauguggau

SEQ ID NO: 637225 - RNA, 19 nt, Homo sapiens
  misc_RNA (1)...(19): siRNA sense strand
gacagaggagcaguacauu

SEQ ID NO: 637226 - RNA, 19 nt, Homo sapiens
  misc_RNA (1)...(19): siRNA sense strand
ugucauauacgagaauguu

SEQ ID NO: 637227 - RNA, 19 nt, Homo sapiens
  misc_RNA (1)...(19): siRNA sense strand
caaagacucugacuauaaa

SEQ ID NO: 637228 - RNA, 19 nt, Homo sapiens
  misc_RNA (1)...(19): siRNA sense strand
caacaaaagucucagauua

SEQ ID NO: 637229 - RNA, 19 nt, Homo sapiens
  misc_RNA (1)...(19): siRNA sense strand
gaaaguauccugcaguuug

SEQ ID NO: 637230 - RNA, 19 nt, Homo sapiens
  misc_RNA (1)...(19): siRNA sense strand
acacaaacauccuaccaua

SEQ ID NO: 637231 - RNA, 19 nt, Homo sapiens
  misc_RNA (1)...(19): siRNA sense strand
caacugauguggaugaaga

SEQ ID NO: 637232 - RNA, 19 nt, Homo sapiens
  misc_RNA (1)...(19): siRNA sense strand
gagcaaaggucccaugauc

SEQ ID NO: 637233 - RNA, 19 nt, Homo sapiens
  misc_RNA (1)...(19): siRNA sense strand
ccaacuauauuccuggaua

SEQ ID NO: 637234 - RNA, 19 nt, Homo sapiens
  misc_RNA (1)...(19): siRNA sense strand
ccaaagacucugacuauaa

SEQ ID NO: 637235 - RNA, 19 nt, Homo sapiens
  misc_RNA (1)...(19): siRNA sense strand
caacuaugcugacgagaug

SEQ ID NO: 637236 - RNA, 19 nt, Homo sapiens
  misc_RNA (1)...(19): siRNA sense strand
guguggagcugguacauuu

SEQ ID NO: 637237 - RNA, 19 nt, Homo sapiens
  misc_RNA (1)...(19): siRNA sense strand
gaaauugauuggacuggau

SEQ ID NO: 637238 - RNA, 19 nt, Homo sapiens
  misc_RNA (1)...(19): siRNA sense strand
ggagaugauuucagaggaa

SEQ ID NO: 637239 - RNA, 19 nt, Homo sapiens
  misc_RNA (1)...(19): siRNA sense strand
caaacauccuaccauauga

SEQ ID NO: 637240 - RNA, 19 nt, Homo sapiens
  misc_RNA (1)...(19): siRNA sense strand
aaaggagggugaaauguga

SEQ ID NO: 637241 - RNA, 19 nt, Homo sapiens
  misc_RNA (1)...(19): siRNA sense strand
cuacaucaaugccaacuau

SEQ ID NO: 637242 - RNA, 19 nt, Homo sapiens
  misc_RNA (1)...(19): siRNA sense strand
uuaaggauauggccaaaga

SEQ ID NO: 637243 - RNA, 19 nt, Homo sapiens
  misc_RNA (1)...(19): siRNA sense strand
gccaaagacucugacuaua

SEQ ID NO: 637244 - RNA, 19 nt, Homo sapiens
  misc_RNA (1)...(19): siRNA sense strand
ugacuuugaugccuauauu

SEQ ID NO: 637245 - RNA, 19 nt, Homo sapiens
  misc_RNA (1)...(19): siRNA sense strand
gcagauggcuagggagugu

SEQ ID NO: 637246 - RNA, 19 nt, Homo sapiens
  misc_RNA (1)...(19): siRNA sense strand
ggucauaccggaugucuau

SEQ ID NO: 637247 - RNA, 19 nt, Homo sapiens
  misc_RNA (1)...(19): siRNA sense strand
ggaagaugguccugcaaca

SEQ ID NO: 637248 - RNA, 19 nt, Homo sapiens
  misc_RNA (1)...(19): siRNA sense strand
cagaaaguauccugcaguu

SEQ ID NO: 637249 - RNA, 19 nt, Homo sapiens
  misc_RNA (1)...(19): siRNA sense strand
gaccauuacuggccauuca

SEQ ID NO: 637250 - RNA, 19 nt, Homo sapiens
  misc_RNA (1)...(19): siRNA sense strand
ggccaaagacucugacuau

SEQ ID NO: 637251 - RNA, 19 nt, Homo sapiens
  misc_RNA (1)...(19): siRNA sense strand
gcugguacauuugucaauu

SEQ ID NO: 637252 - RNA, 19 nt, Homo sapiens
  misc_RNA (1)...(19): siRNA sense strand
ugauguggaugaagaagaa

SEQ ID NO: 637253 - RNA, 19 nt, Homo sapiens
  misc_RNA (1)...(19): siRNA sense strand
gcaaaggucccaugaucau

SEQ ID NO: 637254 - RNA, 19 nt, Homo sapiens
  misc_RNA (1)...(19): siRNA sense strand
ucagugaugucauauacga

SEQ ID NO: 637255 - RNA, 19 nt, Homo sapiens
  misc_RNA (1)...(19): siRNA sense strand
cugcagaucuuccacugaa

SEQ ID NO: 637256 - RNA, 19 nt, Homo sapiens
  misc_RNA (1)...(19): siRNA sense strand
gggcuggugucagaaauga

SEQ ID NO: 637257 - RNA, 19 nt, Homo sapiens
  misc_RNA (1)...(19): siRNA sense strand
gcaaaugcugcagaaagua

SEQ ID NO: 637258 - RNA, 19 nt, Homo sapiens
  misc_RNA (1)...(19): siRNA sense strand
ggacggacaggaacauuca

SEQ ID NO: 637259 - RNA, 19 nt, Homo sapiens
  misc_RNA (1)...(19): siRNA sense strand
acaaacauccuaccauaug

SEQ ID NO: 637260 - RNA, 19 nt, Homo sapiens
  misc_RNA (1)...(19): siRNA sense strand
caucaaugccaacuauauu

SEQ ID NO: 637261 - RNA, 19 nt, Homo sapiens
  misc_RNA (1)...(19): siRNA sense strand
acacuuugcugcagaucuu

SEQ ID NO: 637262 - RNA, 19 nt, Homo sapiens
  misc_RNA (1)...(19): siRNA sense strand
gaagaugguccugcaacaa

SEQ ID NO: 637263 - RNA, 19 nt, Homo sapiens
  misc_RNA (1)...(19): siRNA sense strand
uaauuggacuguugcuugu

SEQ ID NO: 637264 - RNA, 19 nt, Homo sapiens
  misc_RNA (1)...(19): siRNA sense strand
agagagggauggaaagcuu

SEQ ID NO: 637265 - RNA, 19 nt, Homo sapiens
  misc_RNA (1)...(19): siRNA sense strand
gaugaaucccaauguggua

SEQ ID NO: 637266 - RNA, 19 nt, Homo sapiens
  misc_RNA (1)...(19): siRNA sense strand
cuucagccgugugagauua

SEQ ID NO: 637267 - RNA, 19 nt, Homo sapiens
  misc_RNA (1)...(19): siRNA sense strand
uuaaagaagaggaaacuga

SEQ ID NO: 637268 - RNA, 19 nt, Homo sapiens
  misc_RNA (1)...(19): siRNA sense strand
ggaugacuuugaugccuau

SEQ ID NO: 637269 - RNA, 19 nt, Homo sapiens
  misc_RNA (1)...(19): siRNA sense strand
aaaguauccugcaguuugu

SEQ ID NO: 637270 - RNA, 19 nt, Homo sapiens
  misc_RNA (1)...(19): siRNA sense strand
caaaugcugcagaaaguau

SEQ ID NO: 637271 - RNA, 19 nt, Homo sapiens
  misc_RNA (1)...(19): siRNA sense strand
ugaagaagaagcagcaguu

SEQ ID NO: 637272 - RNA, 19 nt, Homo sapiens
  misc_RNA (1)...(19): siRNA sense strand
agauuagucuccaugaaug

SEQ ID NO: 637273 - RNA, 19 nt, Homo sapiens
  misc_RNA (1)...(19): siRNA sense strand
agaggaaggugcagacuac

SEQ ID NO: 637274 - RNA, 19 nt, Homo sapiens
  misc_RNA (1)...(19): siRNA sense strand
uguagacacuuccggauca

SEQ ID NO: 637275 - RNA, 19 nt, Homo sapiens
  misc_RNA (1)...(19): siRNA sense strand
ggaaggugcagacuacauc

SEQ ID NO: 637276 - RNA, 19 nt, Homo sapiens
  misc_RNA (1)...(19): siRNA sense strand
ggauauggccaaagacucu

SEQ ID NO: 637277 - RNA, 19 nt, Homo sapiens
  misc_RNA (1)...(19): siRNA sense strand
caacuauauuccuggauac

SEQ ID NO: 637278 - RNA, 19 nt, Homo sapiens
  misc_RNA (1)...(19): siRNA sense strand
agagaugaaucccaaugug

SEQ ID NO: 637279 - RNA, 19 nt, Homo sapiens
  misc_RNA (1)...(19): siRNA sense strand
ucuuagggcuggugucaga

SEQ ID NO: 637280 - RNA, 19 nt, Homo sapiens
  misc_RNA (1)...(19): siRNA sense strand
cugguacauuugucaauuu

SEQ ID NO: 637281 - RNA, 19 nt, Homo sapiens
  misc_RNA (1)...(19): siRNA sense strand
gaagaagaagcagcaguuc

SEQ ID NO: 637282 - RNA, 19 nt, Homo sapiens
  misc_RNA (1)...(19): siRNA sense strand
guuacccucauuauucuua

SEQ ID NO: 637283 - RNA, 19 nt, Homo sapiens
  misc_RNA (1)...(19): siRNA sense strand
gacuuugaugccuauauua

SEQ ID NO: 637284 - RNA, 19 nt, Homo sapiens
  misc_RNA (1)...(19): siRNA sense strand
auuggacuguugcuuguua

SEQ ID NO: 637285 - RNA, 19 nt, Homo sapiens
  misc_RNA (1)...(19): siRNA sense strand
ggugcagacuacaucaaug

SEQ ID NO: 637286 - RNA, 19 nt, Homo sapiens
  misc_RNA (1)...(19): siRNA sense strand
gcagaucuuccacugaauc

SEQ ID NO: 637287 - RNA, 19 nt, Homo sapiens
  misc_RNA (1)...(19): siRNA sense strand
gacuggauaucccacacuu

SEQ ID NO: 637288 - RNA, 19 nt, Homo sapiens
  misc_RNA (1)...(19): siRNA sense strand
uuugaggaguugaaauuga

SEQ ID NO: 637289 - RNA, 19 nt, Homo sapiens
  misc_RNA (1)...(19): siRNA sense strand
gaaagcuuccauacaacug

SEQ ID NO: 637290 - RNA, 19 nt, Homo sapiens
  misc_RNA (1)...(19): siRNA sense strand
gaugucauauacgagaaug

SEQ ID NO: 637291 - RNA, 19 nt, Homo sapiens
  misc_RNA (1)...(19): siRNA sense strand
ccucauuauucuuaggaaa

SEQ ID NO: 637292 - RNA, 19 nt, Homo sapiens
  misc_RNA (1)...(19): siRNA sense strand
cgacagcaagcuaccaaga

SEQ ID NO: 637293 - RNA, 19 nt, Homo sapiens
  misc_RNA (1)...(19): siRNA sense strand
aagaugguccugcaacaaa

SEQ ID NO: 637294 - RNA, 19 nt, Homo sapiens
  misc_RNA (1)...(19): siRNA sense strand
gaucuuccacugaaucgau

SEQ ID NO: 637295 - RNA, 19 nt, Homo sapiens
  misc_RNA (1)...(19): siRNA sense strand
cuuguuacccucauuauuc

SEQ ID NO: 637296 - RNA, 19 nt, Homo sapiens
  misc_RNA (1)...(19): siRNA sense strand
cagaggagcaguacauuuu

SEQ ID NO: 637297 - RNA, 19 nt, Homo sapiens
  misc_RNA (1)...(19): siRNA sense strand
ggacaggaacauucauugc

SEQ ID NO: 637298 - RNA, 19 nt, Homo sapiens
  misc_RNA (1)...(19): siRNA sense strand
gaaggugcagacuacauca

SEQ ID NO: 637299 - RNA, 19 nt, Homo sapiens
  misc_RNA (1)...(19): siRNA sense strand
cauccuaccauaugacuuc

SEQ ID NO: 637300 - RNA, 19 nt, Homo sapiens
  misc_RNA (1)...(19): siRNA sense strand
cuguggagaugauuucaga

SEQ ID NO: 637301 - RNA, 19 nt, Homo sapiens
  misc_RNA (1)...(19): siRNA sense strand
gauuagucuccaugaauga

SEQ ID NO: 637302 - RNA, 19 nt, Homo sapiens
  misc_RNA (1)...(19): siRNA sense strand
agacagaggagcaguacau

SEQ ID NO: 637303 - RNA, 19 nt, Homo sapiens
  misc_RNA (1)...(19): siRNA sense strand
guagacacuuccggaucaa

SEQ ID NO: 637304 - RNA, 19 nt, Homo sapiens
  misc_RNA (1)...(19): siRNA sense strand
gugcaacugauguggauga

SEQ ID NO: 637305 - RNA, 19 nt, Homo sapiens
  misc_RNA (1)...(19): siRNA sense strand
acagaggagcaguacauuu

SEQ ID NO: 637306 - RNA, 19 nt, Homo sapiens
  misc_RNA (1)...(19): siRNA sense strand
cugacgagaugcaggaugu

SEQ ID NO: 637307 - RNA, 19 nt, Homo sapiens
  misc_RNA (1)...(19): siRNA sense strand
cuggauaucccacacuuug

SEQ ID NO: 637308 - RNA, 19 nt, Homo sapiens
  misc_RNA (1)...(19): siRNA sense strand
aaaggucccaugaucauuc

SEQ ID NO: 637309 - RNA, 19 nt, Homo sapiens
  misc_RNA (1)...(19): siRNA sense strand
caaaggucccaugaucauu

SEQ ID NO: 637310 - RNA, 19 nt, Homo sapiens
  misc_RNA (1)...(19): siRNA sense strand
ggacgacugggccuguaga

SEQ ID NO: 637311 - RNA, 19 nt, Homo sapiens
  misc_RNA (1)...(19): siRNA sense strand
cuccaugaaugaagaggaa

SEQ ID NO: 637312 - RNA, 19 nt, Homo sapiens
  misc_RNA (1)...(19): siRNA sense strand
uugaggaguugaaauugau

SEQ ID NO: 637313 - RNA, 19 nt, Homo sapiens
  misc_RNA (1)...(19): siRNA sense strand
ugacuucagccgugugaga

SEQ ID NO: 637314 - RNA, 19 nt, Homo sapiens
  misc_RNA (1)...(19): siRNA sense strand
aaauugauuggacuggaua

SEQ ID NO: 637315 - RNA, 19 nt, Homo sapiens
  misc_RNA (1)...(19): siRNA sense strand
gucauauacgagaauguua

SEQ ID NO: 637316 - RNA, 19 nt, Homo sapiens
  misc_RNA (1)...(19): siRNA sense strand
gugaugucauauacgagaa

SEQ ID NO: 637317 - RNA, 19 nt, Homo sapiens
  misc_RNA (1)...(19): siRNA sense strand
agaagaggaaacugacaaa

SEQ ID NO: 637318 - RNA, 19 nt, Homo sapiens
  misc_RNA (1)...(19): siRNA sense strand
gaaucccaaugugguagug

SEQ ID NO: 637319 - RNA, 19 nt, Homo sapiens
  misc_RNA (1)...(19): siRNA sense strand
ccacugaaucgauguaaaa

SEQ ID NO: 637320 - RNA, 19 nt, Homo sapiens
  misc_RNA (1)...(19): siRNA sense strand
gcaacaaaagucucagauu

SEQ ID NO: 637321 - RNA, 19 nt, Homo sapiens
  misc_RNA (1)...(19): siRNA sense strand
gcuuguuacccucauuauu

SEQ ID NO: 637322 - RNA, 19 nt, Homo sapiens
  misc_RNA (1)...(19): siRNA sense strand
cgagaugcaggaugugaug

SEQ ID NO: 637323 - RNA, 19 nt, Homo sapiens
  misc_RNA (1)...(19): siRNA sense strand
cacaaacauccuaccauau

SEQ ID NO: 637324 - RNA, 19 nt, Homo sapiens
  misc_RNA (1)...(19): siRNA sense strand
gugugcaacugauguggau

SEQ ID NO: 637325 - RNA, 19 nt, Homo sapiens
  misc_RNA (1)...(19): siRNA sense strand
gacagaggagcaguacauu

SEQ ID NO: 637326 - RNA, 19 nt, Homo sapiens
  misc_RNA (1)...(19): siRNA sense strand
ugucauauacgagaauguu

SEQ ID NO: 637327 - RNA, 19 nt, Homo sapiens
  misc_RNA (1)...(19): siRNA sense strand
uaaggaggauugugauuua

SEQ ID NO: 637328 - RNA, 19 nt, Homo sapiens
  misc_RNA (1)...(19): siRNA sense strand
gaagaaagaagaagaagaa

SEQ ID NO: 637329 - RNA, 19 nt, Homo sapiens
  misc_RNA (1)...(19): siRNA sense strand
ggagaacucugaucgagaa

SEQ ID NO: 637330 - RNA, 19 nt, Homo sapiens
  misc_RNA (1)...(19): siRNA sense strand
gcaacaagcugcccugcaa

SEQ ID NO: 637331 - RNA, 19 nt, Homo sapiens
  misc_RNA (1)...(19): siRNA sense strand
gaaucaaagugcccaacua

SEQ ID NO: 637332 - RNA, 19 nt, Homo sapiens
  misc_RNA (1)...(19): siRNA sense strand
gcacccagcuauaugagaa

SEQ ID NO: 637333 - RNA, 19 nt, Homo sapiens
  misc_RNA (1)...(19): siRNA sense strand
cagcgacccuccuaugaua

SEQ ID NO: 637334 - RNA, 19 nt, Homo sapiens
  misc_RNA (1)...(19): siRNA sense strand
ucaagaggguguccacuuu

SEQ ID NO: 637335 - RNA, 19 nt, Homo sapiens
  misc_RNA (1)...(19): siRNA sense strand
gaagcuggaugacgaggaa

SEQ ID NO: 637336 - RNA, 19 nt, Homo sapiens
  misc_RNA (1)...(19): siRNA sense strand
aagaauauccggcaguuua

SEQ ID NO: 637337 - RNA, 19 nt, Homo sapiens
  misc_RNA (1)...(19): siRNA sense strand
gaacucugaucgagaaagu

SEQ ID NO: 637338 - RNA, 19 nt, Homo sapiens
  misc_RNA (1)...(19): siRNA sense strand
agacaucucuccuuuagug

SEQ ID NO: 637339 - RNA, 19 nt, Homo sapiens
  misc_RNA (1)...(19): siRNA sense strand
gaaggcgccuggacaagga

SEQ ID NO: 637340 - RNA, 19 nt, Homo sapiens
  misc_RNA (1)...(19): siRNA sense strand
gcaaguauuugugaagaug

SEQ ID NO: 637341 - RNA, 19 nt, Homo sapiens
  misc_RNA (1)...(19): siRNA sense strand
gaagagacgguccauccua

SEQ ID NO: 637342 - RNA, 19 nt, Homo sapiens
  misc_RNA (1)...(19): siRNA sense strand
gaagugcaccuuugacaug

SEQ ID NO: 637343 - RNA, 19 nt, Homo sapiens
  misc_RNA (1)...(19): siRNA sense strand
ggcgaggccuguucuguaa

SEQ ID NO: 637344 - RNA, 19 nt, Homo sapiens
  misc_RNA (1)...(19): siRNA sense strand
gagccaaagugcagcuauu

SEQ ID NO: 637345 - RNA, 19 nt, Homo sapiens
  misc_RNA (1)...(19): siRNA sense strand
gaaggaagaaagagcugua

SEQ ID NO: 637346 - RNA, 19 nt, Homo sapiens
  misc_RNA (1)...(19): siRNA sense strand
ucagacaucucuccuuuag

SEQ ID NO: 637347 - RNA, 19 nt, Homo sapiens
  misc_RNA (1)...(19): siRNA sense strand
gcagaagucucccgauggu

SEQ ID NO: 637348 - RNA, 19 nt, Homo sapiens
  misc_RNA (1)...(19): siRNA sense strand
gaagacaacgacuaugaga

SEQ ID NO: 637349 - RNA, 19 nt, Homo sapiens
  misc_RNA (1)...(19): siRNA sense strand
gaggagaaccagaccauug

SEQ ID NO: 637350 - RNA, 19 nt, Homo sapiens
  misc_RNA (1)...(19): siRNA sense strand
uaugauaucuucgaggauu

SEQ ID NO: 637351 - RNA, 19 nt, Homo sapiens
  misc_RNA (1)...(19): siRNA sense strand
uaagaagacguccaaagaa

SEQ ID NO: 637352 - RNA, 19 nt, Homo sapiens
  misc_RNA (1)...(19): siRNA sense strand
guaaagaugggacaauugu

SEQ ID NO: 637353 - RNA, 19 nt, Homo sapiens
  misc_RNA (1)...(19): siRNA sense strand
acucagacaucucuccuuu

SEQ ID NO: 637354 - RNA, 19 nt, Homo sapiens
  misc_RNA (1)...(19): siRNA sense strand
ggaaacuacugcccgaucu

SEQ ID NO: 637355 - RNA, 19 nt, Homo sapiens
  misc_RNA (1)...(19): siRNA sense strand
gagaagagaaggaagaaag

SEQ ID NO: 637356 - RNA, 19 nt, Homo sapiens
  misc_RNA (1)...(19): siRNA sense strand
cgaaucaggucaaggucaa

SEQ ID NO: 637357 - RNA, 19 nt, Homo sapiens
  misc_RNA (1)...(19): siRNA sense strand
ggaagggcaucgggugcua

SEQ ID NO: 637358 - RNA, 19 nt, Homo sapiens
  misc_RNA (1)...(19): siRNA sense strand
gcucucagaugaagacuac

SEQ ID NO: 637359 - RNA, 19 nt, Homo sapiens
  misc_RNA (1)...(19): siRNA sense strand
ggaagaagagaagaaagaa

SEQ ID NO: 637360 - RNA, 19 nt, Homo sapiens
  misc_RNA (1)...(19): siRNA sense strand
cccaauggcuggacuggaa

SEQ ID NO: 637361 - RNA, 19 nt, Homo sapiens
  misc_RNA (1)...(19): siRNA sense strand
uuaagaagacguccaaaga

SEQ ID NO: 637362 - RNA, 19 nt, Homo sapiens
  misc_RNA (1)...(19): siRNA sense strand
gggcaaguauuugugaaga

SEQ ID NO: 637363 - RNA, 19 nt, Homo sapiens
  misc_RNA (1)...(19): siRNA sense strand
aagagacgguccauccuaa

SEQ ID NO: 637364 - RNA, 19 nt, Homo sapiens
  misc_RNA (1)...(19): siRNA sense strand
ggacggcucuuccccauug

SEQ ID NO: 637365 - RNA, 19 nt, Homo sapiens
  misc_RNA (1)...(19): siRNA sense strand
gaacgacggcucccucaag

SEQ ID NO: 637366 - RNA, 19 nt, Homo sapiens
  misc_RNA (1)...(19): siRNA sense strand
gggcgaggccuguucugua

SEQ ID NO: 637367 - RNA, 19 nt, Homo sapiens
  misc_RNA (1)...(19): siRNA sense strand
ugaagaauauccggcaguu

SEQ ID NO: 637368 - RNA, 19 nt, Homo sapiens
  misc_RNA (1)...(19): siRNA sense strand
gagcugguguucugucaag

SEQ ID NO: 637369 - RNA, 19 nt, Homo sapiens
  misc_RNA (1)...(19): siRNA sense strand
ccacagaggauacaucauc

SEQ ID NO: 637370 - RNA, 19 nt, Homo sapiens
  misc_RNA (1)...(19): siRNA sense strand
ggucaccacuccuguuaag

SEQ ID NO: 637371 - RNA, 19 nt, Homo sapiens
  misc_RNA (1)...(19): siRNA sense strand
gaccugccaucggaaauug

SEQ ID NO: 637372 - RNA, 19 nt, Homo sapiens
  misc_RNA (1)...(19): siRNA sense strand
ggaugacuuugauguagug

SEQ ID NO: 637373 - RNA, 19 nt, Homo sapiens
  misc_RNA (1)...(19): siRNA sense strand
gcuacgugcuccaggaaga

SEQ ID NO: 637374 - RNA, 19 nt, Homo sapiens
  misc_RNA (1)...(19): siRNA sense strand
gcccugggauuccgaugaa

SEQ ID NO: 637375 - RNA, 19 nt, Homo sapiens
  misc_RNA (1)...(19): siRNA sense strand
cgaguggucuggagauuac

SEQ ID NO: 637376 - RNA, 19 nt, Homo sapiens
  misc_RNA (1)...(19): siRNA sense strand
caacuuccacuucaugugu

SEQ ID NO: 637377 - RNA, 19 nt, Homo sapiens
  misc_RNA (1)...(19): siRNA sense strand
gcagaugccuccccuggaa

SEQ ID NO: 637378 - RNA, 19 nt, Homo sapiens
  misc_RNA (1)...(19): siRNA sense strand
ccgcauggaugacuuugau

SEQ ID NO: 637379 - RNA, 19 nt, Homo sapiens
  misc_RNA (1)...(19): siRNA sense strand
aagaagacguccaaagaag

SEQ ID NO: 637380 - RNA, 19 nt, Homo sapiens
  misc_RNA (1)...(19): siRNA sense strand
ggaggauugugauuuagag

SEQ ID NO: 637381 - RNA, 19 nt, Homo sapiens
  misc_RNA (1)...(19): siRNA sense strand
aaguaaagaugggacaauu

SEQ ID NO: 637382 - RNA, 19 nt, Homo sapiens
  misc_RNA (1)...(19): siRNA sense strand
ggauccggcugccuucuca

SEQ ID NO: 637383 - RNA, 19 nt, Homo sapiens
  misc_RNA (1)...(19): siRNA sense strand
aagaagagaagaaagaaga

SEQ ID NO: 637384 - RNA, 19 nt, Homo sapiens
  misc_RNA (1)...(19): siRNA sense strand
ggcaucgggugcuauaugu

SEQ ID NO: 637385 - RNA, 19 nt, Homo sapiens
  misc_RNA (1)...(19): siRNA sense strand
cgaguacucuggcauuguc

SEQ ID NO: 637386 - RNA, 19 nt, Homo sapiens
  misc_RNA (1)...(19): siRNA sense strand
aggaggaguuucaggguuu

SEQ ID NO: 637387 - RNA, 19 nt, Homo sapiens
  misc_RNA (1)...(19): siRNA sense strand
agaagcagcugugacaauc

SEQ ID NO: 637388 - RNA, 19 nt, Homo sapiens
  misc_RNA (1)...(19): siRNA sense strand
gcgaggggcucucagauga

SEQ ID NO: 637389 - RNA, 19 nt, Homo sapiens
  misc_RNA (1)...(19): siRNA sense strand
gcuaugaagacaacgacua

SEQ ID NO: 637390 - RNA, 19 nt, Homo sapiens
  misc_RNA (1)...(19): siRNA sense strand
caaauucugccacgucugu

SEQ ID NO: 637391 - RNA, 19 nt, Homo sapiens
  misc_RNA (1)...(19): siRNA sense strand
gaggaagcagcaagcagua

SEQ ID NO: 637392 - RNA, 19 nt, Homo sapiens
  misc_RNA (1)...(19): siRNA sense strand
gaagaauauccggcaguuu

SEQ ID NO: 637393 - RNA, 19 nt, Homo sapiens
  misc_RNA (1)...(19): siRNA sense strand
gaagacuacgagauccuuu

SEQ ID NO: 637394 - RNA, 19 nt, Homo sapiens
  misc_RNA (1)...(19): siRNA sense strand
ucaaacagcgacccuccua

SEQ ID NO: 637395 - RNA, 19 nt, Homo sapiens
  misc_RNA (1)...(19): siRNA sense strand
guccugcgaccucccauua

SEQ ID NO: 637396 - RNA, 19 nt, Homo sapiens
  misc_RNA (1)...(19): siRNA sense strand
gcaaaggucguggauccaa

SEQ ID NO: 637397 - RNA, 19 nt, Homo sapiens
  misc_RNA (1)...(19): siRNA sense strand
ccaaagugcagcuauucaa

SEQ ID NO: 637398 - RNA, 19 nt, Homo sapiens
  misc_RNA (1)...(19): siRNA sense strand
ccuaagggaacccacauuu

SEQ ID NO: 637399 - RNA, 19 nt, Homo sapiens
  misc_RNA (1)...(19): siRNA sense strand
aauagaggcucggaagaug

SEQ ID NO: 637400 - RNA, 19 nt, Homo sapiens
  misc_RNA (1)...(19): siRNA sense strand
caucucuccuuuaguggaa

SEQ ID NO: 637401 - RNA, 19 nt, Homo sapiens
  misc_RNA (1)...(19): siRNA sense strand
ggaccugccaucggaaauu

SEQ ID NO: 637402 - RNA, 19 nt, Homo sapiens
  misc_RNA (1)...(19): siRNA sense strand
ggaguacccggcugccaaa

SEQ ID NO: 637403 - RNA, 19 nt, Homo sapiens
  misc_RNA (1)...(19): siRNA sense strand
gaggauggccacuacaagu

SEQ ID NO: 637404 - RNA, 19 nt, Homo sapiens
  misc_RNA (1)...(19): siRNA sense strand
ggauugugauuuagagaac

SEQ ID NO: 637405 - RNA, 19 nt, Homo sapiens
  misc_RNA (1)...(19): siRNA sense strand
aaacagcgacccuccuaug

SEQ ID NO: 637406 - RNA, 19 nt, Homo sapiens
  misc_RNA (1)...(19): siRNA sense strand
ggagggagaagagaaggaa

SEQ ID NO: 637407 - RNA, 19 nt, Homo sapiens
  misc_RNA (1)...(19): siRNA sense strand
uacauccacuucccuguga

SEQ ID NO: 637408 - RNA, 19 nt, Homo sapiens
  misc_RNA (1)...(19): siRNA sense strand
cgacggcucccucaagaau

SEQ ID NO: 637409 - RNA, 19 nt, Homo sapiens
  misc_RNA (1)...(19): siRNA sense strand
ccagcuauaugagaaagga

SEQ ID NO: 637410 - RNA, 19 nt, Homo sapiens
  misc_RNA (1)...(19): siRNA sense strand
gaagaagagaagaaagaag

SEQ ID NO: 637411 - RNA, 19 nt, Homo sapiens
  misc_RNA (1)...(19): siRNA sense strand
uuaaggaggauugugauuu

SEQ ID NO: 637412 - RNA, 19 nt, Homo sapiens
  misc_RNA (1)...(19): siRNA sense strand
aagcccaccugaagaucua

SEQ ID NO: 637413 - RNA, 19 nt, Homo sapiens
  misc_RNA (1)...(19): siRNA sense strand
gcugcgagcucugccugaa

SEQ ID NO: 637414 - RNA, 19 nt, Homo sapiens
  misc_RNA (1)...(19): siRNA sense strand
ccacguggagggccagaaa

SEQ ID NO: 637415 - RNA, 19 nt, Homo sapiens
  misc_RNA (1)...(19): siRNA sense strand
gggcaucgggugcuauaug

SEQ ID NO: 637416 - RNA, 19 nt, Homo sapiens
  misc_RNA (1)...(19): siRNA sense strand
ggccaccugugaugaggaa

SEQ ID NO: 637417 - RNA, 19 nt, Homo sapiens
  misc_RNA (1)...(19): siRNA sense strand
uaccagugcucccgucugu

SEQ ID NO: 637418 - RNA, 19 nt, Homo sapiens
  misc_RNA (1)...(19): siRNA sense strand
cuuccaggaugacaagaaa

SEQ ID NO: 637419 - RNA, 19 nt, Homo sapiens
  misc_RNA (1)...(19): siRNA sense strand
cgaggaagaagagaagaaa

SEQ ID NO: 637420 - RNA, 19 nt, Homo sapiens
  misc_RNA (1)...(19): siRNA sense strand
gcauggaugacuuugaugu

SEQ ID NO: 637421 - RNA, 19 nt, Homo sapiens
  misc_RNA (1)...(19): siRNA sense strand
ggaagugcaccuuugacau

SEQ ID NO: 637422 - RNA, 19 nt, Homo sapiens
  misc_RNA (1)...(19): siRNA sense strand
gcuucgagaucagcaguga

SEQ ID NO: 637423 - RNA, 19 nt, Homo sapiens
  misc_RNA (1)...(19): siRNA sense strand
gacuguggguccuguguca

SEQ ID NO: 637424 - RNA, 19 nt, Homo sapiens
  misc_RNA (1)...(19): siRNA sense strand
gcaacgggccacagacaca

SEQ ID NO: 637425 - RNA, 19 nt, Homo sapiens
  misc_RNA (1)...(19): siRNA sense strand
ggcgauuuauggaugaaga

SEQ ID NO: 637426 - RNA, 19 nt, Homo sapiens
  misc_RNA (1)...(19): siRNA sense strand
cagugaagcagccaccuuu

SEQ ID NO: 637427 - RNA, 19 nt, Homo sapiens
  misc_RNA (1)...(19): siRNA sense strand
gggaagagcuggaggacaa

SEQ ID NO: 637428 - RNA, 19 nt, Homo sapiens
  misc_RNA (1)...(19): siRNA sense strand
ucacaagccugcccaccua

SEQ ID NO: 637429 - RNA, 19 nt, Homo sapiens
  misc_RNA (1)...(19): siRNA sense strand
aggagaaggugaucgagua

SEQ ID NO: 637430 - RNA, 19 nt, Homo sapiens
  misc_RNA (1)...(19): siRNA sense strand
ugagcuacguggagaugua

SEQ ID NO: 637431 - RNA, 19 nt, Homo sapiens
  misc_RNA (1)...(19): siRNA sense strand
ucgcagaaguugagugaga

SEQ ID NO: 637432 - RNA, 19 nt, Homo sapiens
  misc_RNA (1)...(19): siRNA sense strand
ggccggaacucccucacaa

SEQ ID NO: 637433 - RNA, 19 nt, Homo sapiens
  misc_RNA (1)...(19): siRNA sense strand
gcagugaccacaccgaugu

SEQ ID NO: 637434 - RNA, 19 nt, Homo sapiens
  misc_RNA (1)...(19): siRNA sense strand
gcguguggcuggaggagaa

SEQ ID NO: 637435 - RNA, 19 nt, Homo sapiens
  misc_RNA (1)...(19): siRNA sense strand
ggauagaggaaacuaagug

SEQ ID NO: 637436 - RNA, 19 nt, Homo sapiens
  misc_RNA (1)...(19): siRNA sense strand
ccaagaauuuccacuccau

SEQ ID NO: 637437 - RNA, 19 nt, Homo sapiens
  misc_RNA (1)...(19): siRNA sense strand
gcauugaguccacagaaau

SEQ ID NO: 637438 - RNA, 19 nt, Homo sapiens
  misc_RNA (1)...(19): siRNA sense strand
ccaacucccucuaccucaa

SEQ ID NO: 637439 - RNA, 19 nt, Homo sapiens
  misc_RNA (1)...(19): siRNA sense strand
gccuacagcugcagguguu

SEQ ID NO: 637440 - RNA, 19 nt, Homo sapiens
  misc_RNA (1)...(19): siRNA sense strand
gcccaggaguuugccauga

SEQ ID NO: 637441 - RNA, 19 nt, Homo sapiens
  misc_RNA (1)...(19): siRNA sense strand
gcggaugugucgcagaagu

SEQ ID NO: 637442 - RNA, 19 nt, Homo sapiens
  misc_RNA (1)...(19): siRNA sense strand
gagcgacgaggcuaagaug

SEQ ID NO: 637443 - RNA, 19 nt, Homo sapiens
  misc_RNA (1)...(19): siRNA sense strand
cccaggaguuugccaugaa

SEQ ID NO: 637444 - RNA, 19 nt, Homo sapiens
  misc_RNA (1)...(19): siRNA sense strand
cgcauugaguccacagaaa

SEQ ID NO: 637445 - RNA, 19 nt, Homo sapiens
  misc_RNA (1)...(19): siRNA sense strand
acaagggucucgccaacuc

SEQ ID NO: 637446 - RNA, 19 nt, Homo sapiens
  misc_RNA (1)...(19): siRNA sense strand
gcugccgccuccuugguuu

SEQ ID NO: 637447 - RNA, 19 nt, Homo sapiens
  misc_RNA (1)...(19): siRNA sense strand
uccacuccaugcagaauuu

SEQ ID NO: 637448 - RNA, 19 nt, Homo sapiens
  misc_RNA (1)...(19): siRNA sense strand
gagugggaguggccucuca

SEQ ID NO: 637449 - RNA, 19 nt, Homo sapiens
  misc_RNA (1)...(19): siRNA sense strand
agaaggagcaggccgacuu

SEQ ID NO: 637450 - RNA, 19 nt, Homo sapiens
  misc_RNA (1)...(19): siRNA sense strand
cgagaucucccuccugaag

SEQ ID NO: 637451 - RNA, 19 nt, Homo sapiens
  misc_RNA (1)...(19): siRNA sense strand
aggcggaugugucgcagaa

SEQ ID NO: 637452 - RNA, 19 nt, Homo sapiens
  misc_RNA (1)...(19): siRNA sense strand
gugcucagaaccacuaguu

SEQ ID NO: 637453 - RNA, 19 nt, Homo sapiens
  misc_RNA (1)...(19): siRNA sense strand
gcgcauugaguccacagaa

SEQ ID NO: 637454 - RNA, 19 nt, Homo sapiens
  misc_RNA (1)...(19): siRNA sense strand
ggaugugucgcagaaguug

SEQ ID NO: 637455 - RNA, 19 nt, Homo sapiens
  misc_RNA (1)...(19): siRNA sense strand
gggaguggccucucagacu

SEQ ID NO: 637456 - RNA, 19 nt, Homo sapiens
  misc_RNA (1)...(19): siRNA sense strand
ccaggaguuugccaugaag

SEQ ID NO: 637457 - RNA, 19 nt, Homo sapiens
  misc_RNA (1)...(19): siRNA sense strand
agaaggugaucgaguacca

SEQ ID NO: 637458 - RNA, 19 nt, Homo sapiens
  misc_RNA (1)...(19): siRNA sense strand
ugaccacaccgaugucugu

SEQ ID NO: 637459 - RNA, 19 nt, Homo sapiens
  misc_RNA (1)...(19): siRNA sense strand
gcuagaccagugcucagaa

SEQ ID NO: 637460 - RNA, 19 nt, Homo sapiens
  misc_RNA (1)...(19): siRNA sense strand
gcgagagcgacgaggcuaa

SEQ ID NO: 637461 - RNA, 19 nt, Homo sapiens
  misc_RNA (1)...(19): siRNA sense strand
gacaagucucggaccauga

SEQ ID NO: 637462 - RNA, 19 nt, Homo sapiens
  misc_RNA (1)...(19): siRNA sense strand
caacucccucuaccucaau

SEQ ID NO: 637463 - RNA, 19 nt, Homo sapiens
  misc_RNA (1)...(19): siRNA sense strand
ggugaucgaguaccagaag

SEQ ID NO: 637464 - RNA, 19 nt, Homo sapiens
  misc_RNA (1)...(19): siRNA sense strand
ggccuucaagccugucgua

SEQ ID NO: 637465 - RNA, 19 nt, Homo sapiens
  misc_RNA (1)...(19): siRNA sense strand
ggagaaggugaucgaguac

SEQ ID NO: 637466 - RNA, 19 nt, Homo sapiens
  misc_RNA (1)...(19): siRNA sense strand
agaaggagaaggugaucga

SEQ ID NO: 637467 - RNA, 19 nt, Homo sapiens
  misc_RNA (1)...(19): siRNA sense strand
ugucgcagaaguugaguga

SEQ ID NO: 637468 - RNA, 19 nt, Homo sapiens
  misc_RNA (1)...(19): siRNA sense strand
gggaguagcugauuucuuu

SEQ ID NO: 637469 - RNA, 19 nt, Homo sapiens
  misc_RNA (1)...(19): siRNA sense strand
caaagacucugacuauaaa

SEQ ID NO: 637470 - RNA, 19 nt, Homo sapiens
  misc_RNA (1)...(19): siRNA sense strand
caacaaaagucucagauua

SEQ ID NO: 637471 - RNA, 19 nt, Homo sapiens
  misc_RNA (1)...(19): siRNA sense strand
gaaaguauccugcaguuug

SEQ ID NO: 637472 - RNA, 19 nt, Homo sapiens
  misc_RNA (1)...(19): siRNA sense strand
acacaaacauccuaccaua

SEQ ID NO: 637473 - RNA, 19 nt, Homo sapiens
  misc_RNA (1)...(19): siRNA sense strand
caacugauguggaugaaga

SEQ ID NO: 637474 - RNA, 19 nt, Homo sapiens
  misc_RNA (1)...(19): siRNA sense strand
gagcaaaggucccaugauc

SEQ ID NO: 637475 - RNA, 19 nt, Homo sapiens
  misc_RNA (1)...(19): siRNA sense strand
caaguuggcuccagucaga

SEQ ID NO: 637476 - RNA, 19 nt, Homo sapiens
  misc_RNA (1)...(19): siRNA sense strand
ccaacuauauuccuggaua

SEQ ID NO: 637477 - RNA, 19 nt, Homo sapiens
  misc_RNA (1)...(19): siRNA sense strand
ccaaagacucugacuauaa

SEQ ID NO: 637478 - RNA, 19 nt, Homo sapiens
  misc_RNA (1)...(19): siRNA sense strand
caacuaugcugacgagaug

SEQ ID NO: 637479 - RNA, 19 nt, Homo sapiens
  misc_RNA (1)...(19): siRNA sense strand
guguggagcugguacauuu

SEQ ID NO: 637480 - RNA, 19 nt, Homo sapiens
  misc_RNA (1)...(19): siRNA sense strand
gaaauugauuggacuggau

SEQ ID NO: 637481 - RNA, 19 nt, Homo sapiens
  misc_RNA (1)...(19): siRNA sense strand
ggagaugauuucagaggaa

SEQ ID NO: 637482 - RNA, 19 nt, Homo sapiens
  misc_RNA (1)...(19): siRNA sense strand
caacaaugguuacagagau

SEQ ID NO: 637483 - RNA, 19 nt, Homo sapiens
  misc_RNA (1)...(19): siRNA sense strand
caaacauccuaccauauga

SEQ ID NO: 637484 - RNA, 19 nt, Homo sapiens
  misc_RNA (1)...(19): siRNA sense strand
aaaggagggugaaauguga

SEQ ID NO: 637485 - RNA, 19 nt, Homo sapiens
  misc_RNA (1)...(19): siRNA sense strand
cuacaucaaugccaacuau

SEQ ID NO: 637486 - RNA, 19 nt, Homo sapiens
  misc_RNA (1)...(19): siRNA sense strand
uuaaggauauggccaaaga

SEQ ID NO: 637487 - RNA, 19 nt, Homo sapiens
  misc_RNA (1)...(19): siRNA sense strand
gccaaagacucugacuaua

SEQ ID NO: 637488 - RNA, 19 nt, Homo sapiens
  misc_RNA (1)...(19): siRNA sense strand
gcugauuucuuugaaguuu

SEQ ID NO: 637489 - RNA, 19 nt, Homo sapiens
  misc_RNA (1)...(19): siRNA sense strand
ugacuuugaugccuauauu

SEQ ID NO: 637490 - RNA, 19 nt, Homo sapiens
  misc_RNA (1)...(19): siRNA sense strand
gcagauggcuagggagugu

SEQ ID NO: 637491 - RNA, 19 nt, Homo sapiens
  misc_RNA (1)...(19): siRNA sense strand
ggucauaccggaugucuau

SEQ ID NO: 637492 - RNA, 19 nt, Homo sapiens
  misc_RNA (1)...(19): siRNA sense strand
ggaagaugguccugcaaca

SEQ ID NO: 637493 - RNA, 19 nt, Homo sapiens
  misc_RNA (1)...(19): siRNA sense strand
cagaaaguauccugcaguu

SEQ ID NO: 637494 - RNA, 19 nt, Homo sapiens
  misc_RNA (1)...(19): siRNA sense strand
gaccauuacuggccauuca

SEQ ID NO: 637495 - RNA, 19 nt, Homo sapiens
  misc_RNA (1)...(19): siRNA sense strand
ggccaaagacucugacuau

SEQ ID NO: 637496 - RNA, 19 nt, Homo sapiens
  misc_RNA (1)...(19): siRNA sense strand
gaagagggaguagcugauu

SEQ ID NO: 637497 - RNA, 19 nt, Homo sapiens
  misc_RNA (1)...(19): siRNA sense strand
ugauguggaugaagaagaa

SEQ ID NO: 637498 - RNA, 19 nt, Homo sapiens
  misc_RNA (1)...(19): siRNA sense strand
gcaaaggucccaugaucau

SEQ ID NO: 637499 - RNA, 19 nt, Homo sapiens
  misc_RNA (1)...(19): siRNA sense strand
gcugguacauuugucaauu

SEQ ID NO: 637500 - RNA, 19 nt, Homo sapiens
  misc_RNA (1)...(19): siRNA sense strand
guucauagccgucucaaca

SEQ ID NO: 637501 - RNA, 19 nt, Homo sapiens
  misc_RNA (1)...(19): siRNA sense strand
agaaccagcuccacccaaa

SEQ ID NO: 637502 - RNA, 19 nt, Homo sapiens
  misc_RNA (1)...(19): siRNA sense strand
ucagugaugucauauacga

SEQ ID NO: 637503 - RNA, 19 nt, Homo sapiens
  misc_RNA (1)...(19): siRNA sense strand
cugcagaucuuccacugaa

SEQ ID NO: 637504 - RNA, 19 nt, Homo sapiens
  misc_RNA (1)...(19): siRNA sense strand
gggcuggugucagaaauga

SEQ ID NO: 637505 - RNA, 19 nt, Homo sapiens
  misc_RNA (1)...(19): siRNA sense strand
gcaaaugcugcagaaagua

SEQ ID NO: 637506 - RNA, 19 nt, Homo sapiens
  misc_RNA (1)...(19): siRNA sense strand
ggacggacaggaacauuca

SEQ ID NO: 637507 - RNA, 19 nt, Homo sapiens
  misc_RNA (1)...(19): siRNA sense strand
ggaaccaguugcuguuucu

SEQ ID NO: 637508 - RNA, 19 nt, Homo sapiens
  misc_RNA (1)...(19): siRNA sense strand
acaaacauccuaccauaug

SEQ ID NO: 637509 - RNA, 19 nt, Homo sapiens
  misc_RNA (1)...(19): siRNA sense strand
caucaaugccaacuauauu

SEQ ID NO: 637510 - RNA, 19 nt, Homo sapiens
  misc_RNA (1)...(19): siRNA sense strand
ucucaacaaugguuacaga

SEQ ID NO: 637511 - RNA, 19 nt, Homo sapiens
  misc_RNA (1)...(19): siRNA sense strand
gaagaugguccugcaacaa

SEQ ID NO: 637512 - RNA, 19 nt, Homo sapiens
  misc_RNA (1)...(19): siRNA sense strand
acacuuugcugcagaucuu

SEQ ID NO: 637513 - RNA, 19 nt, Homo sapiens
  misc_RNA (1)...(19): siRNA sense strand
uaauuggacuguugcuugu

SEQ ID NO: 637514 - RNA, 19 nt, Homo sapiens
  misc_RNA (1)...(19): siRNA sense strand
gaugaaucccaauguggua

SEQ ID NO: 637515 - RNA, 19 nt, Homo sapiens
  misc_RNA (1)...(19): siRNA sense strand
cuucagccgugugagauua

SEQ ID NO: 637516 - RNA, 19 nt, Homo sapiens
  misc_RNA (1)...(19): siRNA sense strand
uuaaagaagaggaaacuga

SEQ ID NO: 637517 - RNA, 19 nt, Homo sapiens
  misc_RNA (1)...(19): siRNA sense strand
agagagggauggaaagcuu

SEQ ID NO: 637518 - RNA, 19 nt, Homo sapiens
  misc_RNA (1)...(19): siRNA sense strand
ggaugacuuugaugccuau

SEQ ID NO: 637519 - RNA, 19 nt, Homo sapiens
  misc_RNA (1)...(19): siRNA sense strand
aaaguauccugcaguuugu

SEQ ID NO: 637520 - RNA, 19 nt, Homo sapiens
  misc_RNA (1)...(19): siRNA sense strand
caaaugcugcagaaaguau

SEQ ID NO: 637521 - RNA, 19 nt, Homo sapiens
  misc_RNA (1)...(19): siRNA sense strand
ugaagaagaagcagcaguu

SEQ ID NO: 637522 - RNA, 19 nt, Homo sapiens
  misc_RNA (1)...(19): siRNA sense strand
agauuagucuccaugaaug

SEQ ID NO: 637523 - RNA, 19 nt, Homo sapiens
  misc_RNA (1)...(19): siRNA sense strand
agaggaaggugcagacuac

SEQ ID NO: 637524 - RNA, 19 nt, Homo sapiens
  misc_RNA (1)...(19): siRNA sense strand
uguagacacuuccggauca

SEQ ID NO: 637525 - RNA, 19 nt, Homo sapiens
  misc_RNA (1)...(19): siRNA sense strand
ggaaggugcagacuacauc

SEQ ID NO: 637526 - RNA, 19 nt, Homo sapiens
  misc_RNA (1)...(19): siRNA sense strand
ggauauggccaaagacucu

SEQ ID NO: 637527 - RNA, 19 nt, Homo sapiens
  misc_RNA (1)...(19): siRNA sense strand
gaacaaaacccagacuuca

SEQ ID NO: 637528 - RNA, 19 nt, Homo sapiens
  misc_RNA (1)...(19): siRNA sense strand
agagaugaaucccaaugug

SEQ ID NO: 637529 - RNA, 19 nt, Homo sapiens
  misc_RNA (1)...(19): siRNA sense strand
ucuuagggcuggugucaga

SEQ ID NO: 637530 - RNA, 19 nt, Homo sapiens
  misc_RNA (1)...(19): siRNA sense strand
aagagggaguagcugauuu

SEQ ID NO: 637531 - RNA, 19 nt, Homo sapiens
  misc_RNA (1)...(19): siRNA sense strand
caacuauauuccuggauac

SEQ ID NO: 637532 - RNA, 19 nt, Homo sapiens
  misc_RNA (1)...(19): siRNA sense strand
uagcugauuucuuugaagu

SEQ ID NO: 637533 - RNA, 19 nt, Homo sapiens
  misc_RNA (1)...(19): siRNA sense strand
ucauagccgucucaacaau

SEQ ID NO: 637534 - RNA, 19 nt, Homo sapiens
  misc_RNA (1)...(19): siRNA sense strand
gaagaagaagcagcaguuc

SEQ ID NO: 637535 - RNA, 19 nt, Homo sapiens
  misc_RNA (1)...(19): siRNA sense strand
cugguacauuugucaauuu

SEQ ID NO: 637536 - RNA, 19 nt, Homo sapiens
  misc_RNA (1)...(19): siRNA sense strand
guuacccucauuauucuua

SEQ ID NO: 637537 - RNA, 19 nt, Homo sapiens
  misc_RNA (1)...(19): siRNA sense strand
auuggacuguugcuuguua

SEQ ID NO: 637538 - RNA, 19 nt, Homo sapiens
  misc_RNA (1)...(19): siRNA sense strand
ggugcagacuacaucaaug

SEQ ID NO: 637539 - RNA, 19 nt, Homo sapiens
  misc_RNA (1)...(19): siRNA sense strand
gcagaucuuccacugaauc

SEQ ID NO: 637540 - RNA, 19 nt, Homo sapiens
  misc_RNA (1)...(19): siRNA sense strand
gacuggauaucccacacuu

SEQ ID NO: 637541 - RNA, 19 nt, Homo sapiens
  misc_RNA (1)...(19): siRNA sense strand
uuugaggaguugaaauuga

SEQ ID NO: 637542 - RNA, 19 nt, Homo sapiens
  misc_RNA (1)...(19): siRNA sense strand
gacuuugaugccuauauua

SEQ ID NO: 637543 - RNA, 19 nt, Homo sapiens
  misc_RNA (1)...(19): siRNA sense strand
gaguagcugauuucuuuga

SEQ ID NO: 637544 - RNA, 19 nt, Homo sapiens
  misc_RNA (1)...(19): siRNA sense strand
gaaguuuucugucaacaag

SEQ ID NO: 637545 - RNA, 19 nt, Homo sapiens
  misc_RNA (1)...(19): siRNA sense strand
ccucauuauucuuaggaaa

SEQ ID NO: 637546 - RNA, 19 nt, Homo sapiens
  misc_RNA (1)...(19): siRNA sense strand
gaugucauauacgagaaug

SEQ ID NO: 637547 - RNA, 19 nt, Homo sapiens
  misc_RNA (1)...(19): siRNA sense strand
cgacagcaagcuaccaaga

SEQ ID NO: 637548 - RNA, 19 nt, Homo sapiens
  misc_RNA (1)...(19): siRNA sense strand
aagaugguccugcaacaaa

SEQ ID NO: 637549 - RNA, 19 nt, Homo sapiens
  misc_RNA (1)...(19): siRNA sense strand
gaucuuccacugaaucgau

SEQ ID NO: 637550 - RNA, 19 nt, Homo sapiens
  misc_RNA (1)...(19): siRNA sense strand
gaaagcuuccauacaacug

SEQ ID NO: 637551 - RNA, 19 nt, Homo sapiens
  misc_RNA (1)...(19): siRNA sense strand
uguagugucaccagcuuua

SEQ ID NO: 637552 - RNA, 19 nt, Homo sapiens
  misc_RNA (1)...(19): siRNA sense strand
gaaccagcuccacccaaau

SEQ ID NO: 637553 - RNA, 19 nt, Homo sapiens
  misc_RNA (1)...(19): siRNA sense strand
cuuguuacccucauuauuc

SEQ ID NO: 637554 - RNA, 19 nt, Homo sapiens
  misc_RNA (1)...(19): siRNA sense strand
cagaggagcaguacauuuu

SEQ ID NO: 637555 - RNA, 19 nt, Homo sapiens
  misc_RNA (1)...(19): siRNA sense strand
ggacaggaacauucauugc

SEQ ID NO: 637556 - RNA, 19 nt, Homo sapiens
  misc_RNA (1)...(19): siRNA sense strand
gaaggugcagacuacauca

SEQ ID NO: 637557 - RNA, 19 nt, Homo sapiens
  misc_RNA (1)...(19): siRNA sense strand
cagugucccuacguucaua

SEQ ID NO: 637558 - RNA, 19 nt, Homo sapiens
  misc_RNA (1)...(19): siRNA sense strand
ggaagagggaguagcugau

SEQ ID NO: 637559 - RNA, 19 nt, Homo sapiens
  misc_RNA (1)...(19): siRNA sense strand
cuguggagaugauuucaga

SEQ ID NO: 637560 - RNA, 19 nt, Homo sapiens
  misc_RNA (1)...(19): siRNA sense strand
cauccuaccauaugacuuc

SEQ ID NO: 637561 - RNA, 19 nt, Homo sapiens
  misc_RNA (1)...(19): siRNA sense strand
gauuagucuccaugaauga

SEQ ID NO: 637562 - RNA, 19 nt, Homo sapiens
  misc_RNA (1)...(19): siRNA sense strand
agacagaggagcaguacau

SEQ ID NO: 637563 - RNA, 19 nt, Homo sapiens
  misc_RNA (1)...(19): siRNA sense strand
gaccaucuccagccuucuu

SEQ ID NO: 637564 - RNA, 19 nt, Homo sapiens
  misc_RNA (1)...(19): siRNA sense strand
gugcaacugauguggauga

SEQ ID NO: 637565 - RNA, 19 nt, Homo sapiens
  misc_RNA (1)...(19): siRNA sense strand
acagaggagcaguacauuu

SEQ ID NO: 637566 - RNA, 19 nt, Homo sapiens
  misc_RNA (1)...(19): siRNA sense strand
cugacgagaugcaggaugu

SEQ ID NO: 637567 - RNA, 19 nt, Homo sapiens
  misc_RNA (1)...(19): siRNA sense strand
guagacacuuccggaucaa

SEQ ID NO: 637568 - RNA, 19 nt, Homo sapiens
  misc_RNA (1)...(19): siRNA sense strand
gggaguagcugauuucuuu

SEQ ID NO: 637569 - RNA, 19 nt, Homo sapiens
  misc_RNA (1)...(19): siRNA sense strand
caaagacucugacuauaaa

SEQ ID NO: 637570 - RNA, 19 nt, Homo sapiens
  misc_RNA (1)...(19): siRNA sense strand
caacaaaagucucagauua

SEQ ID NO: 637571 - RNA, 19 nt, Homo sapiens
  misc_RNA (1)...(19): siRNA sense strand
gaaaguauccugcaguuug

SEQ ID NO: 637572 - RNA, 19 nt, Homo sapiens
  misc_RNA (1)...(19): siRNA sense strand
acacaaacauccuaccaua

SEQ ID NO: 637573 - RNA, 19 nt, Homo sapiens
  misc_RNA (1)...(19): siRNA sense strand
caacugauguggaugaaga

SEQ ID NO: 637574 - RNA, 19 nt, Homo sapiens
  misc_RNA (1)...(19): siRNA sense strand
gagcaaaggucccaugauc

SEQ ID NO: 637575 - RNA, 19 nt, Homo sapiens
  misc_RNA (1)...(19): siRNA sense strand
caaguuggcuccagucaga

SEQ ID NO: 637576 - RNA, 19 nt, Homo sapiens
  misc_RNA (1)...(19): siRNA sense strand
ccaacuauauuccuggaua

SEQ ID NO: 637577 - RNA, 19 nt, Homo sapiens
  misc_RNA (1)...(19): siRNA sense strand
ccaaagacucugacuauaa

SEQ ID NO: 637578 - RNA, 19 nt, Homo sapiens
  misc_RNA (1)...(19): siRNA sense strand
caacuaugcugacgagaug

SEQ ID NO: 637579 - RNA, 19 nt, Homo sapiens
  misc_RNA (1)...(19): siRNA sense strand
guguggagcugguacauuu

SEQ ID NO: 637580 - RNA, 19 nt, Homo sapiens
  misc_RNA (1)...(19): siRNA sense strand
gaaauugauuggacuggau

SEQ ID NO: 637581 - RNA, 19 nt, Homo sapiens
  misc_RNA (1)...(19): siRNA sense strand
ggagaugauuucagaggaa

SEQ ID NO: 637582 - RNA, 19 nt, Homo sapiens
  misc_RNA (1)...(19): siRNA sense strand
caacaaugguuacagagau

SEQ ID NO: 637583 - RNA, 19 nt, Homo sapiens
  misc_RNA (1)...(19): siRNA sense strand
caaacauccuaccauauga

SEQ ID NO: 637584 - RNA, 19 nt, Homo sapiens
  misc_RNA (1)...(19): siRNA sense strand
aaaggagggugaaauguga

SEQ ID NO: 637585 - RNA, 19 nt, Homo sapiens
  misc_RNA (1)...(19): siRNA sense strand
cuacaucaaugccaacuau

SEQ ID NO: 637586 - RNA, 19 nt, Homo sapiens
  misc_RNA (1)...(19): siRNA sense strand
uuaaggauauggccaaaga

SEQ ID NO: 637587 - RNA, 19 nt, Homo sapiens
  misc_RNA (1)...(19): siRNA sense strand
gccaaagacucugacuaua

SEQ ID NO: 637588 - RNA, 19 nt, Homo sapiens
  misc_RNA (1)...(19): siRNA sense strand
gcugauuucuuugaaguuu

SEQ ID NO: 637589 - RNA, 19 nt, Homo sapiens
  misc_RNA (1)...(19): siRNA sense strand
ugacuuugaugccuauauu

SEQ ID NO: 637590 - RNA, 19 nt, Homo sapiens
  misc_RNA (1)...(19): siRNA sense strand
gcagauggcuagggagugu

SEQ ID NO: 637591 - RNA, 19 nt, Homo sapiens
  misc_RNA (1)...(19): siRNA sense strand
ggucauaccggaugucuau

SEQ ID NO: 637592 - RNA, 19 nt, Homo sapiens
  misc_RNA (1)...(19): siRNA sense strand
ggaagaugguccugcaaca

SEQ ID NO: 637593 - RNA, 19 nt, Homo sapiens
  misc_RNA (1)...(19): siRNA sense strand
cagaaaguauccugcaguu

SEQ ID NO: 637594 - RNA, 19 nt, Homo sapiens
  misc_RNA (1)...(19): siRNA sense strand
gaccauuacuggccauuca

SEQ ID NO: 637595 - RNA, 19 nt, Homo sapiens
  misc_RNA (1)...(19): siRNA sense strand
ggccaaagacucugacuau

SEQ ID NO: 637596 - RNA, 19 nt, Homo sapiens
  misc_RNA (1)...(19): siRNA sense strand
gaagagggaguagcugauu

SEQ ID NO: 637597 - RNA, 19 nt, Homo sapiens
  misc_RNA (1)...(19): siRNA sense strand
ugauguggaugaagaagaa

SEQ ID NO: 637598 - RNA, 19 nt, Homo sapiens
  misc_RNA (1)...(19): siRNA sense strand
gcaaaggucccaugaucau

SEQ ID NO: 637599 - RNA, 19 nt, Homo sapiens
  misc_RNA (1)...(19): siRNA sense strand
gcugguacauuugucaauu

SEQ ID NO: 637600 - RNA, 19 nt, Homo sapiens
  misc_RNA (1)...(19): siRNA sense strand
guucauagccgucucaaca

SEQ ID NO: 637601 - RNA, 19 nt, Homo sapiens
  misc_RNA (1)...(19): siRNA sense strand
agaaccagcuccacccaaa

SEQ ID NO: 637602 - RNA, 19 nt, Homo sapiens
  misc_RNA (1)...(19): siRNA sense strand
ucagugaugucauauacga

SEQ ID NO: 637603 - RNA, 19 nt, Homo sapiens
  misc_RNA (1)...(19): siRNA sense strand
cugcagaucuuccacugaa

SEQ ID NO: 637604 - RNA, 19 nt, Homo sapiens
  misc_RNA (1)...(19): siRNA sense strand
gggcuggugucagaaauga

SEQ ID NO: 637605 - RNA, 19 nt, Homo sapiens
  misc_RNA (1)...(19): siRNA sense strand
gcaaaugcugcagaaagua

SEQ ID NO: 637606 - RNA, 19 nt, Homo sapiens
  misc_RNA (1)...(19): siRNA sense strand
ggacggacaggaacauuca

SEQ ID NO: 637607 - RNA, 19 nt, Homo sapiens
  misc_RNA (1)...(19): siRNA sense strand
ggaaccaguugcuguuucu

SEQ ID NO: 637608 - RNA, 19 nt, Homo sapiens
  misc_RNA (1)...(19): siRNA sense strand
acaaacauccuaccauaug

SEQ ID NO: 637609 - RNA, 19 nt, Homo sapiens
  misc_RNA (1)...(19): siRNA sense strand
caucaaugccaacuauauu

SEQ ID NO: 637610 - RNA, 19 nt, Homo sapiens
  misc_RNA (1)...(19): siRNA sense strand
ucucaacaaugguuacaga

SEQ ID NO: 637611 - RNA, 19 nt, Homo sapiens
  misc_RNA (1)...(19): siRNA sense strand
gaagaugguccugcaacaa

SEQ ID NO: 637612 - RNA, 19 nt, Homo sapiens
  misc_RNA (1)...(19): siRNA sense strand
acacuuugcugcagaucuu

SEQ ID NO: 637613 - RNA, 19 nt, Homo sapiens
  misc_RNA (1)...(19): siRNA sense strand
uaauuggacuguugcuugu

SEQ ID NO: 637614 - RNA, 19 nt, Homo sapiens
  misc_RNA (1)...(19): siRNA sense strand
gaugaaucccaauguggua

SEQ ID NO: 637615 - RNA, 19 nt, Homo sapiens
  misc_RNA (1)...(19): siRNA sense strand
cuucagccgugugagauua

SEQ ID NO: 637616 - RNA, 19 nt, Homo sapiens
  misc_RNA (1)...(19): siRNA sense strand
uuaaagaagaggaaacuga

SEQ ID NO: 637617 - RNA, 19 nt, Homo sapiens
  misc_RNA (1)...(19): siRNA sense strand
agagagggauggaaagcuu

SEQ ID NO: 637618 - RNA, 19 nt, Homo sapiens
  misc_RNA (1)...(19): siRNA sense strand
ggaugacuuugaugccuau

SEQ ID NO: 637619 - RNA, 19 nt, Homo sapiens
  misc_RNA (1)...(19): siRNA sense strand
aaaguauccugcaguuugu

SEQ ID NO: 637620 - RNA, 19 nt, Homo sapiens
  misc_RNA (1)...(19): siRNA sense strand
caaaugcugcagaaaguau

SEQ ID NO: 637621 - RNA, 19 nt, Homo sapiens
  misc_RNA (1)...(19): siRNA sense strand
ugaagaagaagcagcaguu

SEQ ID NO: 637622 - RNA, 19 nt, Homo sapiens
  misc_RNA (1)...(19): siRNA sense strand
agauuagucuccaugaaug

SEQ ID NO: 637623 - RNA, 19 nt, Homo sapiens
  misc_RNA (1)...(19): siRNA sense strand
agaggaaggugcagacuac

SEQ ID NO: 637624 - RNA, 19 nt, Homo sapiens
  misc_RNA (1)...(19): siRNA sense strand
uguagacacuuccggauca

SEQ ID NO: 637625 - RNA, 19 nt, Homo sapiens
  misc_RNA (1)...(19): siRNA sense strand
ggaaggugcagacuacauc

SEQ ID NO: 637626 - RNA, 19 nt, Homo sapiens
  misc_RNA (1)...(19): siRNA sense strand
ggauauggccaaagacucu

SEQ ID NO: 637627 - RNA, 19 nt, Homo sapiens
  misc_RNA (1)...(19): siRNA sense strand
gaacaaaacccagacuuca

SEQ ID NO: 637628 - RNA, 19 nt, Homo sapiens
  misc_RNA (1)...(19): siRNA sense strand
agagaugaaucccaaugug

SEQ ID NO: 637629 - RNA, 19 nt, Homo sapiens
  misc_RNA (1)...(19): siRNA sense strand
ucuuagggcuggugucaga

SEQ ID NO: 637630 - RNA, 19 nt, Homo sapiens
  misc_RNA (1)...(19): siRNA sense strand
aagagggaguagcugauuu

SEQ ID NO: 637631 - RNA, 19 nt, Homo sapiens
  misc_RNA (1)...(19): siRNA sense strand
caacuauauuccuggauac

SEQ ID NO: 637632 - RNA, 19 nt, Homo sapiens
  misc_RNA (1)...(19): siRNA sense strand
uagcugauuucuuugaagu

SEQ ID NO: 637633 - RNA, 19 nt, Homo sapiens
  misc_RNA (1)...(19): siRNA sense strand
ucauagccgucucaacaau

SEQ ID NO: 637634 - RNA, 19 nt, Homo sapiens
  misc_RNA (1)...(19): siRNA sense strand
gaagaagaagcagcaguuc

SEQ ID NO: 637635 - RNA, 19 nt, Homo sapiens
  misc_RNA (1)...(19): siRNA sense strand
cugguacauuugucaauuu

SEQ ID NO: 637636 - RNA, 19 nt, Homo sapiens
  misc_RNA (1)...(19): siRNA sense strand
guuacccucauuauucuua

SEQ ID NO: 637637 - RNA, 19 nt, Homo sapiens
  misc_RNA (1)...(19): siRNA sense strand
auuggacuguugcuuguua

SEQ ID NO: 637638 - RNA, 19 nt, Homo sapiens
  misc_RNA (1)...(19): siRNA sense strand
ggugcagacuacaucaaug

SEQ ID NO: 637639 - RNA, 19 nt, Homo sapiens
  misc_RNA (1)...(19): siRNA sense strand
gcagaucuuccacugaauc

SEQ ID NO: 637640 - RNA, 19 nt, Homo sapiens
  misc_RNA (1)...(19): siRNA sense strand
gacuggauaucccacacuu

SEQ ID NO: 637641 - RNA, 19 nt, Homo sapiens
  misc_RNA (1)...(19): siRNA sense strand
uuugaggaguugaaauuga

SEQ ID NO: 637642 - RNA, 19 nt, Homo sapiens
  misc_RNA (1)...(19): siRNA sense strand
gacuuugaugccuauauua

SEQ ID NO: 637643 - RNA, 19 nt, Homo sapiens
  misc_RNA (1)...(19): siRNA sense strand
gaguagcugauuucuuuga

SEQ ID NO: 637644 - RNA, 19 nt, Homo sapiens
  misc_RNA (1)...(19): siRNA sense strand
gaaguuuucugucaacaag

SEQ ID NO: 637645 - RNA, 19 nt, Homo sapiens
  misc_RNA (1)...(19): siRNA sense strand
ccucauuauucuuaggaaa

SEQ ID NO: 637646 - RNA, 19 nt, Homo sapiens
  misc_RNA (1)...(19): siRNA sense strand
gaugucauauacgagaaug

SEQ ID NO: 637647 - RNA, 19 nt, Homo sapiens
  misc_RNA (1)...(19): siRNA sense strand
cgacagcaagcuaccaaga

SEQ ID NO: 637648 - RNA, 19 nt, Homo sapiens
  misc_RNA (1)...(19): siRNA sense strand
aagaugguccugcaacaaa

SEQ ID NO: 637649 - RNA, 19 nt, Homo sapiens
  misc_RNA (1)...(19): siRNA sense strand
gaucuuccacugaaucgau

SEQ ID NO: 637650 - RNA, 19 nt, Homo sapiens
  misc_RNA (1)...(19): siRNA sense strand
gaaagcuuccauacaacug

SEQ ID NO: 637651 - RNA, 19 nt, Homo sapiens
  misc_RNA (1)...(19): siRNA sense strand
uguagugucaccagcuuua

SEQ ID NO: 637652 - RNA, 19 nt, Homo sapiens
  misc_RNA (1)...(19): siRNA sense strand
gaaccagcuccacccaaau

SEQ ID NO: 637653 - RNA, 19 nt, Homo sapiens
  misc_RNA (1)...(19): siRNA sense strand
cuuguuacccucauuauuc

SEQ ID NO: 637654 - RNA, 19 nt, Homo sapiens
  misc_RNA (1)...(19): siRNA sense strand
cagaggagcaguacauuuu

SEQ ID NO: 637655 - RNA, 19 nt, Homo sapiens
  misc_RNA (1)...(19): siRNA sense strand
ggacaggaacauucauugc

SEQ ID NO: 637656 - RNA, 19 nt, Homo sapiens
  misc_RNA (1)...(19): siRNA sense strand
gaaggugcagacuacauca

SEQ ID NO: 637657 - RNA, 19 nt, Homo sapiens
  misc_RNA (1)...(19): siRNA sense strand
cagugucccuacguucaua

SEQ ID NO: 637658 - RNA, 19 nt, Homo sapiens
  misc_RNA (1)...(19): siRNA sense strand
ggaagagggaguagcugau

SEQ ID NO: 637659 - RNA, 19 nt, Homo sapiens
  misc_RNA (1)...(19): siRNA sense strand
cuguggagaugauuucaga

SEQ ID NO: 637660 - RNA, 19 nt, Homo sapiens
  misc_RNA (1)...(19): siRNA sense strand
cauccuaccauaugacuuc

SEQ ID NO: 637661 - RNA, 19 nt, Homo sapiens
  misc_RNA (1)...(19): siRNA sense strand
gauuagucuccaugaauga

SEQ ID NO: 637662 - RNA, 19 nt, Homo sapiens
  misc_RNA (1)...(19): siRNA sense strand
agacagaggagcaguacau

SEQ ID NO: 637663 - RNA, 19 nt, Homo sapiens
  misc_RNA (1)...(19): siRNA sense strand
gaccaucuccagccuucuu

SEQ ID NO: 637664 - RNA, 19 nt, Homo sapiens
  misc_RNA (1)...(19): siRNA sense strand
gugcaacugauguggauga

SEQ ID NO: 637665 - RNA, 19 nt, Homo sapiens
  misc_RNA (1)...(19): siRNA sense strand
acagaggagcaguacauuu

SEQ ID NO: 637666 - RNA, 19 nt, Homo sapiens
  misc_RNA (1)...(19): siRNA sense strand
cugacgagaugcaggaugu

SEQ ID NO: 637667 - RNA, 19 nt, Homo sapiens
  misc_RNA (1)...(19): siRNA sense strand
guagacacuuccggaucaa

SEQ ID NO: 637668 - RNA, 19 nt, Homo sapiens
  misc_RNA (1)...(19): siRNA sense strand
caaagacucugacuauaaa

SEQ ID NO: 637669 - RNA, 19 nt, Homo sapiens
  misc_RNA (1)...(19): siRNA sense strand
caacaaaagucucagauua

SEQ ID NO: 637670 - RNA, 19 nt, Homo sapiens
  misc_RNA (1)...(19): siRNA sense strand
gaaaguauccugcaguuug

SEQ ID NO: 637671 - RNA, 19 nt, Homo sapiens
  misc_RNA (1)...(19): siRNA sense strand
acacaaacauccuaccaua

SEQ ID NO: 637672 - RNA, 19 nt, Homo sapiens
  misc_RNA (1)...(19): siRNA sense strand
caacugauguggaugaaga

SEQ ID NO: 637673 - RNA, 19 nt, Homo sapiens
  misc_RNA (1)...(19): siRNA sense strand
gagcaaaggucccaugauc

SEQ ID NO: 637674 - RNA, 19 nt, Homo sapiens
  misc_RNA (1)...(19): siRNA sense strand
ccaacuauauuccuggaua

SEQ ID NO: 637675 - RNA, 19 nt, Homo sapiens
  misc_RNA (1)...(19): siRNA sense strand
ccaaagacucugacuauaa

SEQ ID NO: 637676 - RNA, 19 nt, Homo sapiens
  misc_RNA (1)...(19): siRNA sense strand
caacuaugcugacgagaug

SEQ ID NO: 637677 - RNA, 19 nt, Homo sapiens
  misc_RNA (1)...(19): siRNA sense strand
guguggagcugguacauuu

SEQ ID NO: 637678 - RNA, 19 nt, Homo sapiens
  misc_RNA (1)...(19): siRNA sense strand
gaaauugauuggacuggau

SEQ ID NO: 637679 - RNA, 19 nt, Homo sapiens
  misc_RNA (1)...(19): siRNA sense strand
ggagaugauuucagaggaa

SEQ ID NO: 637680 - RNA, 19 nt, Homo sapiens
  misc_RNA (1)...(19): siRNA sense strand
caaacauccuaccauauga

SEQ ID NO: 637681 - RNA, 19 nt, Homo sapiens
  misc_RNA (1)...(19): siRNA sense strand
aaaggagggugaaauguga

SEQ ID NO: 637682 - RNA, 19 nt, Homo sapiens
  misc_RNA (1)...(19): siRNA sense strand
cuacaucaaugccaacuau

SEQ ID NO: 637683 - RNA, 19 nt, Homo sapiens
  misc_RNA (1)...(19): siRNA sense strand
uuaaggauauggccaaaga

SEQ ID NO: 637684 - RNA, 19 nt, Homo sapiens
  misc_RNA (1)...(19): siRNA sense strand
gccaaagacucugacuaua

SEQ ID NO: 637685 - RNA, 19 nt, Homo sapiens
  misc_RNA (1)...(19): siRNA sense strand
ugacuuugaugccuauauu

SEQ ID NO: 637686 - RNA, 19 nt, Homo sapiens
  misc_RNA (1)...(19): siRNA sense strand
gcagauggcuagggagugu

SEQ ID NO: 637687 - RNA, 19 nt, Homo sapiens
  misc_RNA (1)...(19): siRNA sense strand
ggucauaccggaugucuau

SEQ ID NO: 637688 - RNA, 19 nt, Homo sapiens
  misc_RNA (1)...(19): siRNA sense strand
ggaagaugguccugcaaca

SEQ ID NO: 637689 - RNA, 19 nt, Homo sapiens
  misc_RNA (1)...(19): siRNA sense strand
cagaaaguauccugcaguu

SEQ ID NO: 637690 - RNA, 19 nt, Homo sapiens
  misc_RNA (1)...(19): siRNA sense strand
gaccauuacuggccauuca

SEQ ID NO: 637691 - RNA, 19 nt, Homo sapiens
  misc_RNA (1)...(19): siRNA sense strand
ggccaaagacucugacuau

SEQ ID NO: 637692 - RNA, 19 nt, Homo sapiens
  misc_RNA (1)...(19): siRNA sense strand
gcugguacauuugucaauu

SEQ ID NO: 637693 - RNA, 19 nt, Homo sapiens
  misc_RNA (1)...(19): siRNA sense strand
ugauguggaugaagaagaa

SEQ ID NO: 637694 - RNA, 19 nt, Homo sapiens
  misc_RNA (1)...(19): siRNA sense strand
gcaaaggucccaugaucau

SEQ ID NO: 637695 - RNA, 19 nt, Homo sapiens
  misc_RNA (1)...(19): siRNA sense strand
ucagugaugucauauacga

SEQ ID NO: 637696 - RNA, 19 nt, Homo sapiens
  misc_RNA (1)...(19): siRNA sense strand
cugcagaucuuccacugaa

SEQ ID NO: 637697 - RNA, 19 nt, Homo sapiens
  misc_RNA (1)...(19): siRNA sense strand
gggcuggugucagaaauga

SEQ ID NO: 637698 - RNA, 19 nt, Homo sapiens
  misc_RNA (1)...(19): siRNA sense strand
gcaaaugcugcagaaagua

SEQ ID NO: 637699 - RNA, 19 nt, Homo sapiens
  misc_RNA (1)...(19): siRNA sense strand
ggacggacaggaacauuca

SEQ ID NO: 637700 - RNA, 19 nt, Homo sapiens
  misc_RNA (1)...(19): siRNA sense strand
acaaacauccuaccauaug

SEQ ID NO: 637701 - RNA, 19 nt, Homo sapiens
  misc_RNA (1)...(19): siRNA sense strand
caucaaugccaacuauauu

SEQ ID NO: 637702 - RNA, 19 nt, Homo sapiens
  misc_RNA (1)...(19): siRNA sense strand
acacuuugcugcagaucuu

SEQ ID NO: 637703 - RNA, 19 nt, Homo sapiens
  misc_RNA (1)...(19): siRNA sense strand
gaagaugguccugcaacaa

SEQ ID NO: 637704 - RNA, 19 nt, Homo sapiens
  misc_RNA (1)...(19): siRNA sense strand
uaauuggacuguugcuugu

SEQ ID NO: 637705 - RNA, 19 nt, Homo sapiens
  misc_RNA (1)...(19): siRNA sense strand
agagagggauggaaagcuu

SEQ ID NO: 637706 - RNA, 19 nt, Homo sapiens
  misc_RNA (1)...(19): siRNA sense strand
gaugaaucccaauguggua

SEQ ID NO: 637707 - RNA, 19 nt, Homo sapiens
  misc_RNA (1)...(19): siRNA sense strand
cuucagccgugugagauua

SEQ ID NO: 637708 - RNA, 19 nt, Homo sapiens
  misc_RNA (1)...(19): siRNA sense strand
uuaaagaagaggaaacuga

SEQ ID NO: 637709 - RNA, 19 nt, Homo sapiens
  misc_RNA (1)...(19): siRNA sense strand
ggaugacuuugaugccuau

SEQ ID NO: 637710 - RNA, 19 nt, Homo sapiens
  misc_RNA (1)...(19): siRNA sense strand
aaaguauccugcaguuugu

SEQ ID NO: 637711 - RNA, 19 nt, Homo sapiens
  misc_RNA (1)...(19): siRNA sense strand
caaaugcugcagaaaguau

SEQ ID NO: 637712 - RNA, 19 nt, Homo sapiens
  misc_RNA (1)...(19): siRNA sense strand
ugaagaagaagcagcaguu

SEQ ID NO: 637713 - RNA, 19 nt, Homo sapiens
  misc_RNA (1)...(19): siRNA sense strand
agauuagucuccaugaaug

SEQ ID NO: 637714 - RNA, 19 nt, Homo sapiens
  misc_RNA (1)...(19): siRNA sense strand
agaggaaggugcagacuac

SEQ ID NO: 637715 - RNA, 19 nt, Homo sapiens
  misc_RNA (1)...(19): siRNA sense strand
uguagacacuuccggauca

SEQ ID NO: 637716 - RNA, 19 nt, Homo sapiens
  misc_RNA (1)...(19): siRNA sense strand
ggaaggugcagacuacauc

SEQ ID NO: 637717 - RNA, 19 nt, Homo sapiens
  misc_RNA (1)...(19): siRNA sense strand
ggauauggccaaagacucu

SEQ ID NO: 637718 - RNA, 19 nt, Homo sapiens
  misc_RNA (1)...(19): siRNA sense strand
caacuauauuccuggauac

SEQ ID NO: 637719 - RNA, 19 nt, Homo sapiens
  misc_RNA (1)...(19): siRNA sense strand
agagaugaaucccaaugug

SEQ ID NO: 637720 - RNA, 19 nt, Homo sapiens
  misc_RNA (1)...(19): siRNA sense strand
ucuuagggcuggugucaga

SEQ ID NO: 637721 - RNA, 19 nt, Homo sapiens
  misc_RNA (1)...(19): siRNA sense strand
cugguacauuugucaauuu

SEQ ID NO: 637722 - RNA, 19 nt, Homo sapiens
  misc_RNA (1)...(19): siRNA sense strand
gaagaagaagcagcaguuc

SEQ ID NO: 637723 - RNA, 19 nt, Homo sapiens
  misc_RNA (1)...(19): siRNA sense strand
guuacccucauuauucuua

SEQ ID NO: 637724 - RNA, 19 nt, Homo sapiens
  misc_RNA (1)...(19): siRNA sense strand
gacuuugaugccuauauua

SEQ ID NO: 637725 - RNA, 19 nt, Homo sapiens
  misc_RNA (1)...(19): siRNA sense strand
auuggacuguugcuuguua

SEQ ID NO: 637726 - RNA, 19 nt, Homo sapiens
  misc_RNA (1)...(19): siRNA sense strand
ggugcagacuacaucaaug

SEQ ID NO: 637727 - RNA, 19 nt, Homo sapiens
  misc_RNA (1)...(19): siRNA sense strand
gcagaucuuccacugaauc

SEQ ID NO: 637728 - RNA, 19 nt, Homo sapiens
  misc_RNA (1)...(19): siRNA sense strand
gacuggauaucccacacuu

SEQ ID NO: 637729 - RNA, 19 nt, Homo sapiens
  misc_RNA (1)...(19): siRNA sense strand
uuugaggaguugaaauuga

SEQ ID NO: 637730 - RNA, 19 nt, Homo sapiens
  misc_RNA (1)...(19): siRNA sense strand
gaaagcuuccauacaacug

SEQ ID NO: 637731 - RNA, 19 nt, Homo sapiens
  misc_RNA (1)...(19): siRNA sense strand
gaugucauauacgagaaug

SEQ ID NO: 637732 - RNA, 19 nt, Homo sapiens
  misc_RNA (1)...(19): siRNA sense strand
ccucauuauucuuaggaaa

SEQ ID NO: 637733 - RNA, 19 nt, Homo sapiens
  misc_RNA (1)...(19): siRNA sense strand
cgacagcaagcuaccaaga

SEQ ID NO: 637734 - RNA, 19 nt, Homo sapiens
  misc_RNA (1)...(19): siRNA sense strand
aagaugguccugcaacaaa

SEQ ID NO: 637735 - RNA, 19 nt, Homo sapiens
  misc_RNA (1)...(19): siRNA sense strand
gaucuuccacugaaucgau

SEQ ID NO: 637736 - RNA, 19 nt, Homo sapiens
  misc_RNA (1)...(19): siRNA sense strand
cuuguuacccucauuauuc

SEQ ID NO: 637737 - RNA, 19 nt, Homo sapiens
  misc_RNA (1)...(19): siRNA sense strand
cagaggagcaguacauuuu

SEQ ID NO: 637738 - RNA, 19 nt, Homo sapiens
  misc_RNA (1)...(19): siRNA sense strand
ggacaggaacauucauugc

SEQ ID NO: 637739 - RNA, 19 nt, Homo sapiens
  misc_RNA (1)...(19): siRNA sense strand
gaaggugcagacuacauca

SEQ ID NO: 637740 - RNA, 19 nt, Homo sapiens
  misc_RNA (1)...(19): siRNA sense strand
cauccuaccauaugacuuc

SEQ ID NO: 637741 - RNA, 19 nt, Homo sapiens
  misc_RNA (1)...(19): siRNA sense strand
cuguggagaugauuucaga

SEQ ID NO: 637742 - RNA, 19 nt, Homo sapiens
  misc_RNA (1)...(19): siRNA sense strand
gauuagucuccaugaauga

SEQ ID NO: 637743 - RNA, 19 nt, Homo sapiens
  misc_RNA (1)...(19): siRNA sense strand
agacagaggagcaguacau

SEQ ID NO: 637744 - RNA, 19 nt, Homo sapiens
  misc_RNA (1)...(19): siRNA sense strand
guagacacuuccggaucaa

SEQ ID NO: 637745 - RNA, 19 nt, Homo sapiens
  misc_RNA (1)...(19): siRNA sense strand
gugcaacugauguggauga

SEQ ID NO: 637746 - RNA, 19 nt, Homo sapiens
  misc_RNA (1)...(19): siRNA sense strand
acagaggagcaguacauuu

SEQ ID NO: 637747 - RNA, 19 nt, Homo sapiens
  misc_RNA (1)...(19): siRNA sense strand
cugacgagaugcaggaugu

SEQ ID NO: 637748 - RNA, 19 nt, Homo sapiens
  misc_RNA (1)...(19): siRNA sense strand
cuggauaucccacacuuug

SEQ ID NO: 637749 - RNA, 19 nt, Homo sapiens
  misc_RNA (1)...(19): siRNA sense strand
aaaggucccaugaucauuc

SEQ ID NO: 637750 - RNA, 19 nt, Homo sapiens
  misc_RNA (1)...(19): siRNA sense strand
caaaggucccaugaucauu

SEQ ID NO: 637751 - RNA, 19 nt, Homo sapiens
  misc_RNA (1)...(19): siRNA sense strand
ggacgacugggccuguaga

SEQ ID NO: 637752 - RNA, 19 nt, Homo sapiens
  misc_RNA (1)...(19): siRNA sense strand
cuccaugaaugaagaggaa

SEQ ID NO: 637753 - RNA, 19 nt, Homo sapiens
  misc_RNA (1)...(19): siRNA sense strand
uugaggaguugaaauugau

SEQ ID NO: 637754 - RNA, 19 nt, Homo sapiens
  misc_RNA (1)...(19): siRNA sense strand
ugacuucagccgugugaga

SEQ ID NO: 637755 - RNA, 19 nt, Homo sapiens
  misc_RNA (1)...(19): siRNA sense strand
aaauugauuggacuggaua

SEQ ID NO: 637756 - RNA, 19 nt, Homo sapiens
  misc_RNA (1)...(19): siRNA sense strand
gucauauacgagaauguua

SEQ ID NO: 637757 - RNA, 19 nt, Homo sapiens
  misc_RNA (1)...(19): siRNA sense strand
gugaugucauauacgagaa

SEQ ID NO: 637758 - RNA, 19 nt, Homo sapiens
  misc_RNA (1)...(19): siRNA sense strand
agaagaggaaacugacaaa

SEQ ID NO: 637759 - RNA, 19 nt, Homo sapiens
  misc_RNA (1)...(19): siRNA sense strand
gaaucccaaugugguagug

SEQ ID NO: 637760 - RNA, 19 nt, Homo sapiens
  misc_RNA (1)...(19): siRNA sense strand
ccacugaaucgauguaaaa

SEQ ID NO: 637761 - RNA, 19 nt, Homo sapiens
  misc_RNA (1)...(19): siRNA sense strand
gcaacaaaagucucagauu

SEQ ID NO: 637762 - RNA, 19 nt, Homo sapiens
  misc_RNA (1)...(19): siRNA sense strand
gcuuguuacccucauuauu

SEQ ID NO: 637763 - RNA, 19 nt, Homo sapiens
  misc_RNA (1)...(19): siRNA sense strand
cgagaugcaggaugugaug

SEQ ID NO: 637764 - RNA, 19 nt, Homo sapiens
  misc_RNA (1)...(19): siRNA sense strand
cacaaacauccuaccauau

SEQ ID NO: 637765 - RNA, 19 nt, Homo sapiens
  misc_RNA (1)...(19): siRNA sense strand
gugugcaacugauguggau

SEQ ID NO: 637766 - RNA, 19 nt, Homo sapiens
  misc_RNA (1)...(19): siRNA sense strand
gacagaggagcaguacauu

SEQ ID NO: 637767 - RNA, 19 nt, Homo sapiens
  misc_RNA (1)...(19): siRNA sense strand
ugucauauacgagaauguu

SEQ ID NO: 637768 - RNA, 19 nt, Homo sapiens
  misc_RNA (1)...(19): siRNA sense strand
caaagacucugacuauaaa

SEQ ID NO: 637769 - RNA, 19 nt, Homo sapiens
  misc_RNA (1)...(19): siRNA sense strand
caacaaaagucucagauua

SEQ ID NO: 637770 - RNA, 19 nt, Homo sapiens
  misc_RNA (1)...(19): siRNA sense strand
gaaaguauccugcaguuug

SEQ ID NO: 637771 - RNA, 19 nt, Homo sapiens
  misc_RNA (1)...(19): siRNA sense strand
acacaaacauccuaccaua

SEQ ID NO: 637772 - RNA, 19 nt, Homo sapiens
  misc_RNA (1)...(19): siRNA sense strand
caacugauguggaugaaga

SEQ ID NO: 637773 - RNA, 19 nt, Homo sapiens
  misc_RNA (1)...(19): siRNA sense strand
gagcaaaggucccaugauc

SEQ ID NO: 637774 - RNA, 19 nt, Homo sapiens
  misc_RNA (1)...(19): siRNA sense strand
ccaacuauauuccuggaua

SEQ ID NO: 637775 - RNA, 19 nt, Homo sapiens
  misc_RNA (1)...(19): siRNA sense strand
ccaaagacucugacuauaa

SEQ ID NO: 637776 - RNA, 19 nt, Homo sapiens
  misc_RNA (1)...(19): siRNA sense strand
caacuaugcugacgagaug

SEQ ID NO: 637777 - RNA, 19 nt, Homo sapiens
  misc_RNA (1)...(19): siRNA sense strand
guguggagcugguacauuu

SEQ ID NO: 637778 - RNA, 19 nt, Homo sapiens
  misc_RNA (1)...(19): siRNA sense strand
gaaauugauuggacuggau

SEQ ID NO: 637779 - RNA, 19 nt, Homo sapiens
  misc_RNA (1)...(19): siRNA sense strand
ggagaugauuucagaggaa

SEQ ID NO: 637780 - RNA, 19 nt, Homo sapiens
  misc_RNA (1)...(19): siRNA sense strand
caaacauccuaccauauga

SEQ ID NO: 637781 - RNA, 19 nt, Homo sapiens
  misc_RNA (1)...(19): siRNA sense strand
aaaggagggugaaauguga

SEQ ID NO: 637782 - RNA, 19 nt, Homo sapiens
  misc_RNA (1)...(19): siRNA sense strand
cuacaucaaugccaacuau

SEQ ID NO: 637783 - RNA, 19 nt, Homo sapiens
  misc_RNA (1)...(19): siRNA sense strand
uuaaggauauggccaaaga

SEQ ID NO: 637784 - RNA, 19 nt, Homo sapiens
  misc_RNA (1)...(19): siRNA sense strand
gccaaagacucugacuaua

SEQ ID NO: 637785 - RNA, 19 nt, Homo sapiens
  misc_RNA (1)...(19): siRNA sense strand
ugacuuugaugccuauauu

SEQ ID NO: 637786 - RNA, 19 nt, Homo sapiens
  misc_RNA (1)...(19): siRNA sense strand
gcagauggcuagggagugu

SEQ ID NO: 637787 - RNA, 19 nt, Homo sapiens
  misc_RNA (1)...(19): siRNA sense strand
ggucauaccggaugucuau

SEQ ID NO: 637788 - RNA, 19 nt, Homo sapiens
  misc_RNA (1)...(19): siRNA sense strand
ggaagaugguccugcaaca

SEQ ID NO: 637789 - RNA, 19 nt, Homo sapiens
  misc_RNA (1)...(19): siRNA sense strand
cagaaaguauccugcaguu

SEQ ID NO: 637790 - RNA, 19 nt, Homo sapiens
  misc_RNA (1)...(19): siRNA sense strand
gaccauuacuggccauuca

SEQ ID NO: 637791 - RNA, 19 nt, Homo sapiens
  misc_RNA (1)...(19): siRNA sense strand
ggccaaagacucugacuau

SEQ ID NO: 637792 - RNA, 19 nt, Homo sapiens
  misc_RNA (1)...(19): siRNA sense strand
gcugguacauuugucaauu

SEQ ID NO: 637793 - RNA, 19 nt, Homo sapiens
  misc_RNA (1)...(19): siRNA sense strand
ugauguggaugaagaagaa

SEQ ID NO: 637794 - RNA, 19 nt, Homo sapiens
  misc_RNA (1)...(19): siRNA sense strand
gcaaaggucccaugaucau

SEQ ID NO: 637795 - RNA, 19 nt, Homo sapiens
  misc_RNA (1)...(19): siRNA sense strand
ucagugaugucauauacga

SEQ ID NO: 637796 - RNA, 19 nt, Homo sapiens
  misc_RNA (1)...(19): siRNA sense strand
cugcagaucuuccacugaa

SEQ ID NO: 637797 - RNA, 19 nt, Homo sapiens
  misc_RNA (1)...(19): siRNA sense strand
gggcuggugucagaaauga

SEQ ID NO: 637798 - RNA, 19 nt, Homo sapiens
  misc_RNA (1)...(19): siRNA sense strand
gcaaaugcugcagaaagua

SEQ ID NO: 637799 - RNA, 19 nt, Homo sapiens
  misc_RNA (1)...(19): siRNA sense strand
ggacggacaggaacauuca

SEQ ID NO: 637800 - RNA, 19 nt, Homo sapiens
  misc_RNA (1)...(19): siRNA sense strand
acaaacauccuaccauaug

SEQ ID NO: 637801 - RNA, 19 nt, Homo sapiens
  misc_RNA (1)...(19): siRNA sense strand
caucaaugccaacuauauu

SEQ ID NO: 637802 - RNA, 19 nt, Homo sapiens
  misc_RNA (1)...(19): siRNA sense strand
acacuuugcugcagaucuu

SEQ ID NO: 637803 - RNA, 19 nt, Homo sapiens
  misc_RNA (1)...(19): siRNA sense strand
gaagaugguccugcaacaa

SEQ ID NO: 637804 - RNA, 19 nt, Homo sapiens
  misc_RNA (1)...(19): siRNA sense strand
uaauuggacuguugcuugu

SEQ ID NO: 637805 - RNA, 19 nt, Homo sapiens
  misc_RNA (1)...(19): siRNA sense strand
agagagggauggaaagcuu

SEQ ID NO: 637806 - RNA, 19 nt, Homo sapiens
  misc_RNA (1)...(19): siRNA sense strand
gaugaaucccaauguggua

SEQ ID NO: 637807 - RNA, 19 nt, Homo sapiens
  misc_RNA (1)...(19): siRNA sense strand
cuucagccgugugagauua

SEQ ID NO: 637808 - RNA, 19 nt, Homo sapiens
  misc_RNA (1)...(19): siRNA sense strand
uuaaagaagaggaaacuga

SEQ ID NO: 637809 - RNA, 19 nt, Homo sapiens
  misc_RNA (1)...(19): siRNA sense strand
ggaugacuuugaugccuau

SEQ ID NO: 637810 - RNA, 19 nt, Homo sapiens
  misc_RNA (1)...(19): siRNA sense strand
aaaguauccugcaguuugu

SEQ ID NO: 637811 - RNA, 19 nt, Homo sapiens
  misc_RNA (1)...(19): siRNA sense strand
caaaugcugcagaaaguau

SEQ ID NO: 637812 - RNA, 19 nt, Homo sapiens
  misc_RNA (1)...(19): siRNA sense strand
ugaagaagaagcagcaguu

SEQ ID NO: 637813 - RNA, 19 nt, Homo sapiens
  misc_RNA (1)...(19): siRNA sense strand
agauuagucuccaugaaug

SEQ ID NO: 637814 - RNA, 19 nt, Homo sapiens
  misc_RNA (1)...(19): siRNA sense strand
agaggaaggugcagacuac

SEQ ID NO: 637815 - RNA, 19 nt, Homo sapiens
  misc_RNA (1)...(19): siRNA sense strand
uguagacacuuccggauca

SEQ ID NO: 637816 - RNA, 19 nt, Homo sapiens
  misc_RNA (1)...(19): siRNA sense strand
ggaaggugcagacuacauc

SEQ ID NO: 637817 - RNA, 19 nt, Homo sapiens
  misc_RNA (1)...(19): siRNA sense strand
ggauauggccaaagacucu

SEQ ID NO: 637818 - RNA, 19 nt, Homo sapiens
  misc_RNA (1)...(19): siRNA sense strand
caacuauauuccuggauac

SEQ ID NO: 637819 - RNA, 19 nt, Homo sapiens
  misc_RNA (1)...(19): siRNA sense strand
agagaugaaucccaaugug

SEQ ID NO: 637820 - RNA, 19 nt, Homo sapiens
  misc_RNA (1)...(19): siRNA sense strand
ucuuagggcuggugucaga

SEQ ID NO: 637821 - RNA, 19 nt, Homo sapiens
  misc_RNA (1)...(19): siRNA sense strand
cugguacauuugucaauuu

SEQ ID NO: 637822 - RNA, 19 nt, Homo sapiens
  misc_RNA (1)...(19): siRNA sense strand
gaagaagaagcagcaguuc

SEQ ID NO: 637823 - RNA, 19 nt, Homo sapiens
  misc_RNA (1)...(19): siRNA sense strand
guuacccucauuauucuua

SEQ ID NO: 637824 - RNA, 19 nt, Homo sapiens
  misc_RNA (1)...(19): siRNA sense strand
gacuuugaugccuauauua

SEQ ID NO: 637825 - RNA, 19 nt, Homo sapiens
  misc_RNA (1)...(19): siRNA sense strand
auuggacuguugcuuguua

SEQ ID NO: 637826 - RNA, 19 nt, Homo sapiens
  misc_RNA (1)...(19): siRNA sense strand
ggugcagacuacaucaaug

SEQ ID NO: 637827 - RNA, 19 nt, Homo sapiens
  misc_RNA (1)...(19): siRNA sense strand
gcagaucuuccacugaauc

SEQ ID NO: 637828 - RNA, 19 nt, Homo sapiens
  misc_RNA (1)...(19): siRNA sense strand
gacuggauaucccacacuu

SEQ ID NO: 637829 - RNA, 19 nt, Homo sapiens
  misc_RNA (1)...(19): siRNA sense strand
uuugaggaguugaaauuga

SEQ ID NO: 637830 - RNA, 19 nt, Homo sapiens
  misc_RNA (1)...(19): siRNA sense strand
gaaagcuuccauacaacug

SEQ ID NO: 637831 - RNA, 19 nt, Homo sapiens
  misc_RNA (1)...(19): siRNA sense strand
gaugucauauacgagaaug

SEQ ID NO: 637832 - RNA, 19 nt, Homo sapiens
  misc_RNA (1)...(19): siRNA sense strand
ccucauuauucuuaggaaa

SEQ ID NO: 637833 - RNA, 19 nt, Homo sapiens
  misc_RNA (1)...(19): siRNA sense strand
cgacagcaagcuaccaaga

SEQ ID NO: 637834 - RNA, 19 nt, Homo sapiens
  misc_RNA (1)...(19): siRNA sense strand
aagaugguccugcaacaaa

SEQ ID NO: 637835 - RNA, 19 nt, Homo sapiens
  misc_RNA (1)...(19): siRNA sense strand
gaucuuccacugaaucgau

SEQ ID NO: 637836 - RNA, 19 nt, Homo sapiens
  misc_RNA (1)...(19): siRNA sense strand
cuuguuacccucauuauuc

SEQ ID NO: 637837 - RNA, 19 nt, Homo sapiens
  misc_RNA (1)...(19): siRNA sense strand
cagaggagcaguacauuuu

SEQ ID NO: 637838 - RNA, 19 nt, Homo sapiens
  misc_RNA (1)...(19): siRNA sense strand
ggacaggaacauucauugc

SEQ ID NO: 637839 - RNA, 19 nt, Homo sapiens
  misc_RNA (1)...(19): siRNA sense strand
gaaggugcagacuacauca

SEQ ID NO: 637840 - RNA, 19 nt, Homo sapiens
  misc_RNA (1)...(19): siRNA sense strand
cauccuaccauaugacuuc

SEQ ID NO: 637841 - RNA, 19 nt, Homo sapiens
  misc_RNA (1)...(19): siRNA sense strand
cuguggagaugauuucaga

SEQ ID NO: 637842 - RNA, 19 nt, Homo sapiens
  misc_RNA (1)...(19): siRNA sense strand
gauuagucuccaugaauga

SEQ ID NO: 637843 - RNA, 19 nt, Homo sapiens
  misc_RNA (1)...(19): siRNA sense strand
agacagaggagcaguacau

SEQ ID NO: 637844 - RNA, 19 nt, Homo sapiens
  misc_RNA (1)...(19): siRNA sense strand
guagacacuuccggaucaa

SEQ ID NO: 637845 - RNA, 19 nt, Homo sapiens
  misc_RNA (1)...(19): siRNA sense strand
gugcaacugauguggauga

SEQ ID NO: 637846 - RNA, 19 nt, Homo sapiens
  misc_RNA (1)...(19): siRNA sense strand
acagaggagcaguacauuu

SEQ ID NO: 637847 - RNA, 19 nt, Homo sapiens
  misc_RNA (1)...(19): siRNA sense strand
cugacgagaugcaggaugu

SEQ ID NO: 637848 - RNA, 19 nt, Homo sapiens
  misc_RNA (1)...(19): siRNA sense strand
cuggauaucccacacuuug

SEQ ID NO: 637849 - RNA, 19 nt, Homo sapiens
  misc_RNA (1)...(19): siRNA sense strand
aaaggucccaugaucauuc

SEQ ID NO: 637850 - RNA, 19 nt, Homo sapiens
  misc_RNA (1)...(19): siRNA sense strand
caaaggucccaugaucauu

SEQ ID NO: 637851 - RNA, 19 nt, Homo sapiens
  misc_RNA (1)...(19): siRNA sense strand
ggacgacugggccuguaga

SEQ ID NO: 637852 - RNA, 19 nt, Homo sapiens
  misc_RNA (1)...(19): siRNA sense strand
cuccaugaaugaagaggaa

SEQ ID NO: 637853 - RNA, 19 nt, Homo sapiens
  misc_RNA (1)...(19): siRNA sense strand
uugaggaguugaaauugau

SEQ ID NO: 637854 - RNA, 19 nt, Homo sapiens
  misc_RNA (1)...(19): siRNA sense strand
ugacuucagccgugugaga

SEQ ID NO: 637855 - RNA, 19 nt, Homo sapiens
  misc_RNA (1)...(19): siRNA sense strand
aaauugauuggacuggaua

SEQ ID NO: 637856 - RNA, 19 nt, Homo sapiens
  misc_RNA (1)...(19): siRNA sense strand
gucauauacgagaauguua

SEQ ID NO: 637857 - RNA, 19 nt, Homo sapiens
  misc_RNA (1)...(19): siRNA sense strand
gugaugucauauacgagaa

SEQ ID NO: 637858 - RNA, 19 nt, Homo sapiens
  misc_RNA (1)...(19): siRNA sense strand
agaagaggaaacugacaaa

SEQ ID NO: 637859 - RNA, 19 nt, Homo sapiens
  misc_RNA (1)...(19): siRNA sense strand
gaaucccaaugugguagug

SEQ ID NO: 637860 - RNA, 19 nt, Homo sapiens
  misc_RNA (1)...(19): siRNA sense strand
ccacugaaucgauguaaaa

SEQ ID NO: 637861 - RNA, 19 nt, Homo sapiens
  misc_RNA (1)...(19): siRNA sense strand
gcaacaaaagucucagauu

SEQ ID NO: 637862 - RNA, 19 nt, Homo sapiens
  misc_RNA (1)...(19): siRNA sense strand
gcuuguuacccucauuauu

SEQ ID NO: 637863 - RNA, 19 nt, Homo sapiens
  misc_RNA (1)...(19): siRNA sense strand
cgagaugcaggaugugaug

SEQ ID NO: 637864 - RNA, 19 nt, Homo sapiens
  misc_RNA (1)...(19): siRNA sense strand
cacaaacauccuaccauau

SEQ ID NO: 637865 - RNA, 19 nt, Homo sapiens
  misc_RNA (1)...(19): siRNA sense strand
gugugcaacugauguggau

SEQ ID NO: 637866 - RNA, 19 nt, Homo sapiens
  misc_RNA (1)...(19): siRNA sense strand
gacagaggagcaguacauu

SEQ ID NO: 637867 - RNA, 19 nt, Homo sapiens
  misc_RNA (1)...(19): siRNA sense strand
ugucauauacgagaauguu

SEQ ID NO: 637868 - RNA, 19 nt, Homo sapiens
  misc_RNA (1)...(19): siRNA sense strand
caaagacucugacuauaaa

SEQ ID NO: 637869 - RNA, 19 nt, Homo sapiens
  misc_RNA (1)...(19): siRNA sense strand
caacaaaagucucagauua

SEQ ID NO: 637870 - RNA, 19 nt, Homo sapiens
  misc_RNA (1)...(19): siRNA sense strand
gaaaguauccugcaguuug

SEQ ID NO: 637871 - RNA, 19 nt, Homo sapiens
  misc_RNA (1)...(19): siRNA sense strand
acacaaacauccuaccaua

SEQ ID NO: 637872 - RNA, 19 nt, Homo sapiens
  misc_RNA (1)...(19): siRNA sense strand
caacugauguggaugaaga

SEQ ID NO: 637873 - RNA, 19 nt, Homo sapiens
  misc_RNA (1)...(19): siRNA sense strand
gagcaaaggucccaugauc

SEQ ID NO: 637874 - RNA, 19 nt, Homo sapiens
  misc_RNA (1)...(19): siRNA sense strand
ccaacuauauuccuggaua

SEQ ID NO: 637875 - RNA, 19 nt, Homo sapiens
  misc_RNA (1)...(19): siRNA sense strand
ccaaagacucugacuauaa

SEQ ID NO: 637876 - RNA, 19 nt, Homo sapiens
  misc_RNA (1)...(19): siRNA sense strand
caacuaugcugacgagaug

SEQ ID NO: 637877 - RNA, 19 nt, Homo sapiens
  misc_RNA (1)...(19): siRNA sense strand
guguggagcugguacauuu

SEQ ID NO: 637878 - RNA, 19 nt, Homo sapiens
  misc_RNA (1)...(19): siRNA sense strand
gaaauugauuggacuggau

SEQ ID NO: 637879 - RNA, 19 nt, Homo sapiens
  misc_RNA (1)...(19): siRNA sense strand
ggagaugauuucagaggaa

SEQ ID NO: 637880 - RNA, 19 nt, Homo sapiens
  misc_RNA (1)...(19): siRNA sense strand
caaacauccuaccauauga

SEQ ID NO: 637881 - RNA, 19 nt, Homo sapiens
  misc_RNA (1)...(19): siRNA sense strand
aaaggagggugaaauguga

SEQ ID NO: 637882 - RNA, 19 nt, Homo sapiens
  misc_RNA (1)...(19): siRNA sense strand
cuacaucaaugccaacuau

SEQ ID NO: 637883 - RNA, 19 nt, Homo sapiens
  misc_RNA (1)...(19): siRNA sense strand
uuaaggauauggccaaaga

SEQ ID NO: 637884 - RNA, 19 nt, Homo sapiens
  misc_RNA (1)...(19): siRNA sense strand
gccaaagacucugacuaua

SEQ ID NO: 637885 - RNA, 19 nt, Homo sapiens
  misc_RNA (1)...(19): siRNA sense strand
ugacuuugaugccuauauu

SEQ ID NO: 637886 - RNA, 19 nt, Homo sapiens
  misc_RNA (1)...(19): siRNA sense strand
gcagauggcuagggagugu

SEQ ID NO: 637887 - RNA, 19 nt, Homo sapiens
  misc_RNA (1)...(19): siRNA sense strand
ggucauaccggaugucuau

SEQ ID NO: 637888 - RNA, 19 nt, Homo sapiens
  misc_RNA (1)...(19): siRNA sense strand
ggaagaugguccugcaaca

SEQ ID NO: 637889 - RNA, 19 nt, Homo sapiens
  misc_RNA (1)...(19): siRNA sense strand
cagaaaguauccugcaguu

SEQ ID NO: 637890 - RNA, 19 nt, Homo sapiens
  misc_RNA (1)...(19): siRNA sense strand
gaccauuacuggccauuca

SEQ ID NO: 637891 - RNA, 19 nt, Homo sapiens
  misc_RNA (1)...(19): siRNA sense strand
ggccaaagacucugacuau

SEQ ID NO: 637892 - RNA, 19 nt, Homo sapiens
  misc_RNA (1)...(19): siRNA sense strand
gcugguacauuugucaauu

SEQ ID NO: 637893 - RNA, 19 nt, Homo sapiens
  misc_RNA (1)...(19): siRNA sense strand
ugauguggaugaagaagaa

SEQ ID NO: 637894 - RNA, 19 nt, Homo sapiens
  misc_RNA (1)...(19): siRNA sense strand
gcaaaggucccaugaucau

SEQ ID NO: 637895 - RNA, 19 nt, Homo sapiens
  misc_RNA (1)...(19): siRNA sense strand
ucagugaugucauauacga

SEQ ID NO: 637896 - RNA, 19 nt, Homo sapiens
  misc_RNA (1)...(19): siRNA sense strand
cugcagaucuuccacugaa

SEQ ID NO: 637897 - RNA, 19 nt, Homo sapiens
  misc_RNA (1)...(19): siRNA sense strand
gggcuggugucagaaauga

SEQ ID NO: 637898 - RNA, 19 nt, Homo sapiens
  misc_RNA (1)...(19): siRNA sense strand
gcaaaugcugcagaaagua

SEQ ID NO: 637899 - RNA, 19 nt, Homo sapiens
  misc_RNA (1)...(19): siRNA sense strand
ggacggacaggaacauuca

SEQ ID NO: 637900 - RNA, 19 nt, Homo sapiens
  misc_RNA (1)...(19): siRNA sense strand
acaaacauccuaccauaug

SEQ ID NO: 637901 - RNA, 19 nt, Homo sapiens
  misc_RNA (1)...(19): siRNA sense strand
caucaaugccaacuauauu

SEQ ID NO: 637902 - RNA, 19 nt, Homo sapiens
  misc_RNA (1)...(19): siRNA sense strand
acacuuugcugcagaucuu

SEQ ID NO: 637903 - RNA, 19 nt, Homo sapiens
  misc_RNA (1)...(19): siRNA sense strand
gaagaugguccugcaacaa

SEQ ID NO: 637904 - RNA, 19 nt, Homo sapiens
  misc_RNA (1)...(19): siRNA sense strand
uaauuggacuguugcuugu

SEQ ID NO: 637905 - RNA, 19 nt, Homo sapiens
  misc_RNA (1)...(19): siRNA sense strand
agagagggauggaaagcuu

SEQ ID NO: 637906 - RNA, 19 nt, Homo sapiens
  misc_RNA (1)...(19): siRNA sense strand
gaugaaucccaauguggua

SEQ ID NO: 637907 - RNA, 19 nt, Homo sapiens
  misc_RNA (1)...(19): siRNA sense strand
cuucagccgugugagauua

SEQ ID NO: 637908 - RNA, 19 nt, Homo sapiens
  misc_RNA (1)...(19): siRNA sense strand
uuaaagaagaggaaacuga

SEQ ID NO: 637909 - RNA, 19 nt, Homo sapiens
  misc_RNA (1)...(19): siRNA sense strand
ggaugacuuugaugccuau

SEQ ID NO: 637910 - RNA, 19 nt, Homo sapiens
  misc_RNA (1)...(19): siRNA sense strand
aaaguauccugcaguuugu

SEQ ID NO: 637911 - RNA, 19 nt, Homo sapiens
  misc_RNA (1)...(19): siRNA sense strand
caaaugcugcagaaaguau

SEQ ID NO: 637912 - RNA, 19 nt, Homo sapiens
  misc_RNA (1)...(19): siRNA sense strand
ugaagaagaagcagcaguu

SEQ ID NO: 637913 - RNA, 19 nt, Homo sapiens
  misc_RNA (1)...(19): siRNA sense strand
agauuagucuccaugaaug

SEQ ID NO: 637914 - RNA, 19 nt, Homo sapiens
  misc_RNA (1)...(19): siRNA sense strand
agaggaaggugcagacuac

SEQ ID NO: 637915 - RNA, 19 nt, Homo sapiens
  misc_RNA (1)...(19): siRNA sense strand
uguagacacuuccggauca

SEQ ID NO: 637916 - RNA, 19 nt, Homo sapiens
  misc_RNA (1)...(19): siRNA sense strand
ggaaggugcagacuacauc

SEQ ID NO: 637917 - RNA, 19 nt, Homo sapiens
  misc_RNA (1)...(19): siRNA sense strand
ggauauggccaaagacucu

SEQ ID NO: 637918 - RNA, 19 nt, Homo sapiens
  misc_RNA (1)...(19): siRNA sense strand
caacuauauuccuggauac

SEQ ID NO: 637919 - RNA, 19 nt, Homo sapiens
  misc_RNA (1)...(19): siRNA sense strand
agagaugaaucccaaugug

SEQ ID NO: 637920 - RNA, 19 nt, Homo sapiens
  misc_RNA (1)...(19): siRNA sense strand
ucuuagggcuggugucaga

SEQ ID NO: 637921 - RNA, 19 nt, Homo sapiens
  misc_RNA (1)...(19): siRNA sense strand
cugguacauuugucaauuu

SEQ ID NO: 637922 - RNA, 19 nt, Homo sapiens
  misc_RNA (1)...(19): siRNA sense strand
gaagaagaagcagcaguuc

SEQ ID NO: 637923 - RNA, 19 nt, Homo sapiens
  misc_RNA (1)...(19): siRNA sense strand
guuacccucauuauucuua

SEQ ID NO: 637924 - RNA, 19 nt, Homo sapiens
  misc_RNA (1)...(19): siRNA sense strand
gacuuugaugccuauauua

SEQ ID NO: 637925 - RNA, 19 nt, Homo sapiens
  misc_RNA (1)...(19): siRNA sense strand
auuggacuguugcuuguua

SEQ ID NO: 637926 - RNA, 19 nt, Homo sapiens
  misc_RNA (1)...(19): siRNA sense strand
ggugcagacuacaucaaug

SEQ ID NO: 637927 - RNA, 19 nt, Homo sapiens
  misc_RNA (1)...(19): siRNA sense strand
gcagaucuuccacugaauc

SEQ ID NO: 637928 - RNA, 19 nt, Homo sapiens
  misc_RNA (1)...(19): siRNA sense strand
gacuggauaucccacacuu

SEQ ID NO: 637929 - RNA, 19 nt, Homo sapiens
  misc_RNA (1)...(19): siRNA sense strand
uuugaggaguugaaauuga

SEQ ID NO: 637930 - RNA, 19 nt, Homo sapiens
  misc_RNA (1)...(19): siRNA sense strand
gaaagcuuccauacaacug

SEQ ID NO: 637931 - RNA, 19 nt, Homo sapiens
  misc_RNA (1)...(19): siRNA sense strand
gaugucauauacgagaaug

SEQ ID NO: 637932 - RNA, 19 nt, Homo sapiens
  misc_RNA (1)...(19): siRNA sense strand
ccucauuauucuuaggaaa

SEQ ID NO: 637933 - RNA, 19 nt, Homo sapiens
  misc_RNA (1)...(19): siRNA sense strand
cgacagcaagcuaccaaga

SEQ ID NO: 637934 - RNA, 19 nt, Homo sapiens
  misc_RNA (1)...(19): siRNA sense strand
aagaugguccugcaacaaa

SEQ ID NO: 637935 - RNA, 19 nt, Homo sapiens
  misc_RNA (1)...(19): siRNA sense strand
gaucuuccacugaaucgau

SEQ ID NO: 637936 - RNA, 19 nt, Homo sapiens
  misc_RNA (1)...(19): siRNA sense strand
cuuguuacccucauuauuc

SEQ ID NO: 637937 - RNA, 19 nt, Homo sapiens
  misc_RNA (1)...(19): siRNA sense strand
cagaggagcaguacauuuu

SEQ ID NO: 637938 - RNA, 19 nt, Homo sapiens
  misc_RNA (1)...(19): siRNA sense strand
ggacaggaacauucauugc

SEQ ID NO: 637939 - RNA, 19 nt, Homo sapiens
  misc_RNA (1)...(19): siRNA sense strand
gaaggugcagacuacauca

SEQ ID NO: 637940 - RNA, 19 nt, Homo sapiens
  misc_RNA (1)...(19): siRNA sense strand
cauccuaccauaugacuuc

SEQ ID NO: 637941 - RNA, 19 nt, Homo sapiens
  misc_RNA (1)...(19): siRNA sense strand
cuguggagaugauuucaga

SEQ ID NO: 637942 - RNA, 19 nt, Homo sapiens
  misc_RNA (1)...(19): siRNA sense strand
gauuagucuccaugaauga

SEQ ID NO: 637943 - RNA, 19 nt, Homo sapiens
  misc_RNA (1)...(19): siRNA sense strand
agacagaggagcaguacau

SEQ ID NO: 637944 - RNA, 19 nt, Homo sapiens
  misc_RNA (1)...(19): siRNA sense strand
guagacacuuccggaucaa

SEQ ID NO: 637945 - RNA, 19 nt, Homo sapiens
  misc_RNA (1)...(19): siRNA sense strand
gugcaacugauguggauga

SEQ ID NO: 637946 - RNA, 19 nt, Homo sapiens
  misc_RNA (1)...(19): siRNA sense strand
acagaggagcaguacauuu

SEQ ID NO: 637947 - RNA, 19 nt, Homo sapiens
  misc_RNA (1)...(19): siRNA sense strand
cugacgagaugcaggaugu

SEQ ID NO: 637948 - RNA, 19 nt, Homo sapiens
  misc_RNA (1)...(19): siRNA sense strand
cuggauaucccacacuuug

SEQ ID NO: 637949 - RNA, 19 nt, Homo sapiens
  misc_RNA (1)...(19): siRNA sense strand
aaaggucccaugaucauuc

SEQ ID NO: 637950 - RNA, 19 nt, Homo sapiens
  misc_RNA (1)...(19): siRNA sense strand
caaaggucccaugaucauu

SEQ ID NO: 637951 - RNA, 19 nt, Homo sapiens
  misc_RNA (1)...(19): siRNA sense strand
ggacgacugggccuguaga

SEQ ID NO: 637952 - RNA, 19 nt, Homo sapiens
  misc_RNA (1)...(19): siRNA sense strand
cuccaugaaugaagaggaa

SEQ ID NO: 637953 - RNA, 19 nt, Homo sapiens
  misc_RNA (1)...(19): siRNA sense strand
uugaggaguugaaauugau

SEQ ID NO: 637954 - RNA, 19 nt, Homo sapiens
  misc_RNA (1)...(19): siRNA sense strand
ugacuucagccgugugaga

SEQ ID NO: 637955 - RNA, 19 nt, Homo sapiens
  misc_RNA (1)...(19): siRNA sense strand
aaauugauuggacuggaua

SEQ ID NO: 637956 - RNA, 19 nt, Homo sapiens
  misc_RNA (1)...(19): siRNA sense strand
gucauauacgagaauguua

SEQ ID NO: 637957 - RNA, 19 nt, Homo sapiens
  misc_RNA (1)...(19): siRNA sense strand
gugaugucauauacgagaa

SEQ ID NO: 637958 - RNA, 19 nt, Homo sapiens
  misc_RNA (1)...(19): siRNA sense strand
agaagaggaaacugacaaa

SEQ ID NO: 637959 - RNA, 19 nt, Homo sapiens
  misc_RNA (1)...(19): siRNA sense strand
gaaucccaaugugguagug

SEQ ID NO: 637960 - RNA, 19 nt, Homo sapiens
  misc_RNA (1)...(19): siRNA sense strand
ccacugaaucgauguaaaa

SEQ ID NO: 637961 - RNA, 19 nt, Homo sapiens
  misc_RNA (1)...(19): siRNA sense strand
gcaacaaaagucucagauu

SEQ ID NO: 637962 - RNA, 19 nt, Homo sapiens
  misc_RNA (1)...(19): siRNA sense strand
gcuuguuacccucauuauu

SEQ ID NO: 637963 - RNA, 19 nt, Homo sapiens
  misc_RNA (1)...(19): siRNA sense strand
cgagaugcaggaugugaug

SEQ ID NO: 637964 - RNA, 19 nt, Homo sapiens
  misc_RNA (1)...(19): siRNA sense strand
cacaaacauccuaccauau

SEQ ID NO: 637965 - RNA, 19 nt, Homo sapiens
  misc_RNA (1)...(19): siRNA sense strand
gugugcaacugauguggau

SEQ ID NO: 637966 - RNA, 19 nt, Homo sapiens
  misc_RNA (1)...(19): siRNA sense strand
gacagaggagcaguacauu

SEQ ID NO: 637967 - RNA, 19 nt, Homo sapiens
  misc_RNA (1)...(19): siRNA sense strand
ugucauauacgagaauguu

SEQ ID NO: 637968 - RNA, 19 nt, Homo sapiens
  misc_RNA (1)...(19): siRNA sense strand
caaagacucugacuauaaa

SEQ ID NO: 637969 - RNA, 19 nt, Homo sapiens
  misc_RNA (1)...(19): siRNA sense strand
caacaaaagucucagauua

SEQ ID NO: 637970 - RNA, 19 nt, Homo sapiens
  misc_RNA (1)...(19): siRNA sense strand
gaaaguauccugcaguuug

SEQ ID NO: 637971 - RNA, 19 nt, Homo sapiens
  misc_RNA (1)...(19): siRNA sense strand
acacaaacauccuaccaua

SEQ ID NO: 637972 - RNA, 19 nt, Homo sapiens
  misc_RNA (1)...(19): siRNA sense strand
caacugauguggaugaaga

SEQ ID NO: 637973 - RNA, 19 nt, Homo sapiens
  misc_RNA (1)...(19): siRNA sense strand
gagcaaaggucccaugauc

SEQ ID NO: 637974 - RNA, 19 nt, Homo sapiens
  misc_RNA (1)...(19): siRNA sense strand
ccaacuauauuccuggaua

SEQ ID NO: 637975 - RNA, 19 nt, Homo sapiens
  misc_RNA (1)...(19): siRNA sense strand
ccaaagacucugacuauaa

SEQ ID NO: 637976 - RNA, 19 nt, Homo sapiens
  misc_RNA (1)...(19): siRNA sense strand
caacuaugcugacgagaug

SEQ ID NO: 637977 - RNA, 19 nt, Homo sapiens
  misc_RNA (1)...(19): siRNA sense strand
guguggagcugguacauuu

SEQ ID NO: 637978 - RNA, 19 nt, Homo sapiens
  misc_RNA (1)...(19): siRNA sense strand
gaaauugauuggacuggau

SEQ ID NO: 637979 - RNA, 19 nt, Homo sapiens
  misc_RNA (1)...(19): siRNA sense strand
ggagaugauuucagaggaa

SEQ ID NO: 637980 - RNA, 19 nt, Homo sapiens
  misc_RNA (1)...(19): siRNA sense strand
caaacauccuaccauauga

SEQ ID NO: 637981 - RNA, 19 nt, Homo sapiens
  misc_RNA (1)...(19): siRNA sense strand
aaaggagggugaaauguga

SEQ ID NO: 637982 - RNA, 19 nt, Homo sapiens
  misc_RNA (1)...(19): siRNA sense strand
cuacaucaaugccaacuau

SEQ ID NO: 637983 - RNA, 19 nt, Homo sapiens
  misc_RNA (1)...(19): siRNA sense strand
uuaaggauauggccaaaga

SEQ ID NO: 637984 - RNA, 19 nt, Homo sapiens
  misc_RNA (1)...(19): siRNA sense strand
gccaaagacucugacuaua

SEQ ID NO: 637985 - RNA, 19 nt, Homo sapiens
  misc_RNA (1)...(19): siRNA sense strand
ugacuuugaugccuauauu

SEQ ID NO: 637986 - RNA, 19 nt, Homo sapiens
  misc_RNA (1)...(19): siRNA sense strand
gcagauggcuagggagugu

SEQ ID NO: 637987 - RNA, 19 nt, Homo sapiens
  misc_RNA (1)...(19): siRNA sense strand
ggucauaccggaugucuau

SEQ ID NO: 637988 - RNA, 19 nt, Homo sapiens
  misc_RNA (1)...(19): siRNA sense strand
ggaagaugguccugcaaca

SEQ ID NO: 637989 - RNA, 19 nt, Homo sapiens
  misc_RNA (1)...(19): siRNA sense strand
cagaaaguauccugcaguu

SEQ ID NO: 637990 - RNA, 19 nt, Homo sapiens
  misc_RNA (1)...(19): siRNA sense strand
gaccauuacuggccauuca

SEQ ID NO: 637991 - RNA, 19 nt, Homo sapiens
  misc_RNA (1)...(19): siRNA sense strand
ggccaaagacucugacuau

SEQ ID NO: 637992 - RNA, 19 nt, Homo sapiens
  misc_RNA (1)...(19): siRNA sense strand
gcugguacauuugucaauu

SEQ ID NO: 637993 - RNA, 19 nt, Homo sapiens
  misc_RNA (1)...(19): siRNA sense strand
ugauguggaugaagaagaa

SEQ ID NO: 637994 - RNA, 19 nt, Homo sapiens
  misc_RNA (1)...(19): siRNA sense strand
gcaaaggucccaugaucau

SEQ ID NO: 637995 - RNA, 19 nt, Homo sapiens
  misc_RNA (1)...(19): siRNA sense strand
ucagugaugucauauacga

SEQ ID NO: 637996 - RNA, 19 nt, Homo sapiens
  misc_RNA (1)...(19): siRNA sense strand
cugcagaucuuccacugaa

SEQ ID NO: 637997 - RNA, 19 nt, Homo sapiens
  misc_RNA (1)...(19): siRNA sense strand
gggcuggugucagaaauga

SEQ ID NO: 637998 - RNA, 19 nt, Homo sapiens
  misc_RNA (1)...(19): siRNA sense strand
gcaaaugcugcagaaagua

SEQ ID NO: 637999 - RNA, 19 nt, Homo sapiens
  misc_RNA (1)...(19): siRNA sense strand
ggacggacaggaacauuca

SEQ ID NO: 638000 - RNA, 19 nt, Homo sapiens
  misc_RNA (1)...(19): siRNA sense strand
acaaacauccuaccauaug

SEQ ID NO: 638001 - RNA, 19 nt, Homo sapiens
  misc_RNA (1)...(19): siRNA sense strand
caucaaugccaacuauauu

SEQ ID NO: 638002 - RNA, 19 nt, Homo sapiens
  misc_RNA (1)...(19): siRNA sense strand
acacuuugcugcagaucuu

SEQ ID NO: 638003 - RNA, 19 nt, Homo sapiens
  misc_RNA (1)...(19): siRNA sense strand
gaagaugguccugcaacaa

SEQ ID NO: 638004 - RNA, 19 nt, Homo sapiens
  misc_RNA (1)...(19): siRNA sense strand
uaauuggacuguugcuugu

SEQ ID NO: 638005 - RNA, 19 nt, Homo sapiens
  misc_RNA (1)...(19): siRNA sense strand
agagagggauggaaagcuu

SEQ ID NO: 638006 - RNA, 19 nt, Homo sapiens
  misc_RNA (1)...(19): siRNA sense strand
gaugaaucccaauguggua

SEQ ID NO: 638007 - RNA, 19 nt, Homo sapiens
  misc_RNA (1)...(19): siRNA sense strand
cuucagccgugugagauua

SEQ ID NO: 638008 - RNA, 19 nt, Homo sapiens
  misc_RNA (1)...(19): siRNA sense strand
uuaaagaagaggaaacuga

SEQ ID NO: 638009 - RNA, 19 nt, Homo sapiens
  misc_RNA (1)...(19): siRNA sense strand
ggaugacuuugaugccuau

SEQ ID NO: 638010 - RNA, 19 nt, Homo sapiens
  misc_RNA (1)...(19): siRNA sense strand
aaaguauccugcaguuugu

SEQ ID NO: 638011 - RNA, 19 nt, Homo sapiens
  misc_RNA (1)...(19): siRNA sense strand
caaaugcugcagaaaguau

SEQ ID NO: 638012 - RNA, 19 nt, Homo sapiens
  misc_RNA (1)...(19): siRNA sense strand
ugaagaagaagcagcaguu

SEQ ID NO: 638013 - RNA, 19 nt, Homo sapiens
  misc_RNA (1)...(19): siRNA sense strand
agauuagucuccaugaaug

SEQ ID NO: 638014 - RNA, 19 nt, Homo sapiens
  misc_RNA (1)...(19): siRNA sense strand
agaggaaggugcagacuac

SEQ ID NO: 638015 - RNA, 19 nt, Homo sapiens
  misc_RNA (1)...(19): siRNA sense strand
uguagacacuuccggauca

SEQ ID NO: 638016 - RNA, 19 nt, Homo sapiens
  misc_RNA (1)...(19): siRNA sense strand
ggaaggugcagacuacauc

SEQ ID NO: 638017 - RNA, 19 nt, Homo sapiens
  misc_RNA (1)...(19): siRNA sense strand
ggauauggccaaagacucu

SEQ ID NO: 638018 - RNA, 19 nt, Homo sapiens
  misc_RNA (1)...(19): siRNA sense strand
caacuauauuccuggauac

SEQ ID NO: 638019 - RNA, 19 nt, Homo sapiens
  misc_RNA (1)...(19): siRNA sense strand
agagaugaaucccaaugug

SEQ ID NO: 638020 - RNA, 19 nt, Homo sapiens
  misc_RNA (1)...(19): siRNA sense strand
ucuuagggcuggugucaga

SEQ ID NO: 638021 - RNA, 19 nt, Homo sapiens
  misc_RNA (1)...(19): siRNA sense strand
cugguacauuugucaauuu

SEQ ID NO: 638022 - RNA, 19 nt, Homo sapiens
  misc_RNA (1)...(19): siRNA sense strand
gaagaagaagcagcaguuc

SEQ ID NO: 638023 - RNA, 19 nt, Homo sapiens
  misc_RNA (1)...(19): siRNA sense strand
guuacccucauuauucuua

SEQ ID NO: 638024 - RNA, 19 nt, Homo sapiens
  misc_RNA (1)...(19): siRNA sense strand
gacuuugaugccuauauua

SEQ ID NO: 638025 - RNA, 19 nt, Homo sapiens
  misc_RNA (1)...(19): siRNA sense strand
auuggacuguugcuuguua

SEQ ID NO: 638026 - RNA, 19 nt, Homo sapiens
  misc_RNA (1)...(19): siRNA sense strand
ggugcagacuacaucaaug

SEQ ID NO: 638027 - RNA, 19 nt, Homo sapiens
  misc_RNA (1)...(19): siRNA sense strand
gcagaucuuccacugaauc

SEQ ID NO: 638028 - RNA, 19 nt, Homo sapiens
  misc_RNA (1)...(19): siRNA sense strand
gacuggauaucccacacuu

SEQ ID NO: 638029 - RNA, 19 nt, Homo sapiens
  misc_RNA (1)...(19): siRNA sense strand
uuugaggaguugaaauuga

SEQ ID NO: 638030 - RNA, 19 nt, Homo sapiens
  misc_RNA (1)...(19): siRNA sense strand
gaaagcuuccauacaacug

SEQ ID NO: 638031 - RNA, 19 nt, Homo sapiens
  misc_RNA (1)...(19): siRNA sense strand
gaugucauauacgagaaug

SEQ ID NO: 638032 - RNA, 19 nt, Homo sapiens
  misc_RNA (1)...(19): siRNA sense strand
ccucauuauucuuaggaaa

SEQ ID NO: 638033 - RNA, 19 nt, Homo sapiens
  misc_RNA (1)...(19): siRNA sense strand
cgacagcaagcuaccaaga

SEQ ID NO: 638034 - RNA, 19 nt, Homo sapiens
  misc_RNA (1)...(19): siRNA sense strand
aagaugguccugcaacaaa

SEQ ID NO: 638035 - RNA, 19 nt, Homo sapiens
  misc_RNA (1)...(19): siRNA sense strand
gaucuuccacugaaucgau

SEQ ID NO: 638036 - RNA, 19 nt, Homo sapiens
  misc_RNA (1)...(19): siRNA sense strand
cuuguuacccucauuauuc

SEQ ID NO: 638037 - RNA, 19 nt, Homo sapiens
  misc_RNA (1)...(19): siRNA sense strand
cagaggagcaguacauuuu

SEQ ID NO: 638038 - RNA, 19 nt, Homo sapiens
  misc_RNA (1)...(19): siRNA sense strand
ggacaggaacauucauugc

SEQ ID NO: 638039 - RNA, 19 nt, Homo sapiens
  misc_RNA (1)...(19): siRNA sense strand
gaaggugcagacuacauca

SEQ ID NO: 638040 - RNA, 19 nt, Homo sapiens
  misc_RNA (1)...(19): siRNA sense strand
cauccuaccauaugacuuc

SEQ ID NO: 638041 - RNA, 19 nt, Homo sapiens
  misc_RNA (1)...(19): siRNA sense strand
cuguggagaugauuucaga

SEQ ID NO: 638042 - RNA, 19 nt, Homo sapiens
  misc_RNA (1)...(19): siRNA sense strand
gauuagucuccaugaauga

SEQ ID NO: 638043 - RNA, 19 nt, Homo sapiens
  misc_RNA (1)...(19): siRNA sense strand
agacagaggagcaguacau

SEQ ID NO: 638044 - RNA, 19 nt, Homo sapiens
  misc_RNA (1)...(19): siRNA sense strand
guagacacuuccggaucaa

SEQ ID NO: 638045 - RNA, 19 nt, Homo sapiens
  misc_RNA (1)...(19): siRNA sense strand
gugcaacugauguggauga

SEQ ID NO: 638046 - RNA, 19 nt, Homo sapiens
  misc_RNA (1)...(19): siRNA sense strand
acagaggagcaguacauuu

SEQ ID NO: 638047 - RNA, 19 nt, Homo sapiens
  misc_RNA (1)...(19): siRNA sense strand
cugacgagaugcaggaugu

SEQ ID NO: 638048 - RNA, 19 nt, Homo sapiens
  misc_RNA (1)...(19): siRNA sense strand
cuggauaucccacacuuug

SEQ ID NO: 638049 - RNA, 19 nt, Homo sapiens
  misc_RNA (1)...(19): siRNA sense strand
aaaggucccaugaucauuc

SEQ ID NO: 638050 - RNA, 19 nt, Homo sapiens
  misc_RNA (1)...(19): siRNA sense strand
caaaggucccaugaucauu

SEQ ID NO: 638051 - RNA, 19 nt, Homo sapiens
  misc_RNA (1)...(19): siRNA sense strand
ggacgacugggccuguaga

SEQ ID NO: 638052 - RNA, 19 nt, Homo sapiens
  misc_RNA (1)...(19): siRNA sense strand
cuccaugaaugaagaggaa

SEQ ID NO: 638053 - RNA, 19 nt, Homo sapiens
  misc_RNA (1)...(19): siRNA sense strand
uugaggaguugaaauugau

SEQ ID NO: 638054 - RNA, 19 nt, Homo sapiens
  misc_RNA (1)...(19): siRNA sense strand
ugacuucagccgugugaga

SEQ ID NO: 638055 - RNA, 19 nt, Homo sapiens
  misc_RNA (1)...(19): siRNA sense strand
aaauugauuggacuggaua

SEQ ID NO: 638056 - RNA, 19 nt, Homo sapiens
  misc_RNA (1)...(19): siRNA sense strand
gucauauacgagaauguua

SEQ ID NO: 638057 - RNA, 19 nt, Homo sapiens
  misc_RNA (1)...(19): siRNA sense strand
gugaugucauauacgagaa

SEQ ID NO: 638058 - RNA, 19 nt, Homo sapiens
  misc_RNA (1)...(19): siRNA sense strand
agaagaggaaacugacaaa

SEQ ID NO: 638059 - RNA, 19 nt, Homo sapiens
  misc_RNA (1)...(19): siRNA sense strand
gaaucccaaugugguagug

SEQ ID NO: 638060 - RNA, 19 nt, Homo sapiens
  misc_RNA (1)...(19): siRNA sense strand
ccacugaaucgauguaaaa

SEQ ID NO: 638061 - RNA, 19 nt, Homo sapiens
  misc_RNA (1)...(19): siRNA sense strand
gcaacaaaagucucagauu

SEQ ID NO: 638062 - RNA, 19 nt, Homo sapiens
  misc_RNA (1)...(19): siRNA sense strand
gcuuguuacccucauuauu

SEQ ID NO: 638063 - RNA, 19 nt, Homo sapiens
  misc_RNA (1)...(19): siRNA sense strand
cgagaugcaggaugugaug

SEQ ID NO: 638064 - RNA, 19 nt, Homo sapiens
  misc_RNA (1)...(19): siRNA sense strand
cacaaacauccuaccauau

SEQ ID NO: 638065 - RNA, 19 nt, Homo sapiens
  misc_RNA (1)...(19): siRNA sense strand
gugugcaacugauguggau

SEQ ID NO: 638066 - RNA, 19 nt, Homo sapiens
  misc_RNA (1)...(19): siRNA sense strand
gacagaggagcaguacauu

SEQ ID NO: 638067 - RNA, 19 nt, Homo sapiens
  misc_RNA (1)...(19): siRNA sense strand
ugucauauacgagaauguu

SEQ ID NO: 638068 - RNA, 19 nt, Homo sapiens
  misc_RNA (1)...(19): siRNA sense strand
gggaguagcugauuucuuu

SEQ ID NO: 638069 - RNA, 19 nt, Homo sapiens
  misc_RNA (1)...(19): siRNA sense strand
caaagacucugacuauaaa

SEQ ID NO: 638070 - RNA, 19 nt, Homo sapiens
  misc_RNA (1)...(19): siRNA sense strand
caacaaaagucucagauua

SEQ ID NO: 638071 - RNA, 19 nt, Homo sapiens
  misc_RNA (1)...(19): siRNA sense strand
gaaaguauccugcaguuug

SEQ ID NO: 638072 - RNA, 19 nt, Homo sapiens
  misc_RNA (1)...(19): siRNA sense strand
acacaaacauccuaccaua

SEQ ID NO: 638073 - RNA, 19 nt, Homo sapiens
  misc_RNA (1)...(19): siRNA sense strand
caacugauguggaugaaga

SEQ ID NO: 638074 - RNA, 19 nt, Homo sapiens
  misc_RNA (1)...(19): siRNA sense strand
gagcaaaggucccaugauc

SEQ ID NO: 638075 - RNA, 19 nt, Homo sapiens
  misc_RNA (1)...(19): siRNA sense strand
caaguuggcuccagucaga

SEQ ID NO: 638076 - RNA, 19 nt, Homo sapiens
  misc_RNA (1)...(19): siRNA sense strand
ccaacuauauuccuggaua

SEQ ID NO: 638077 - RNA, 19 nt, Homo sapiens
  misc_RNA (1)...(19): siRNA sense strand
ccaaagacucugacuauaa

SEQ ID NO: 638078 - RNA, 19 nt, Homo sapiens
  misc_RNA (1)...(19): siRNA sense strand
caacuaugcugacgagaug

SEQ ID NO: 638079 - RNA, 19 nt, Homo sapiens
  misc_RNA (1)...(19): siRNA sense strand
guguggagcugguacauuu

SEQ ID NO: 638080 - RNA, 19 nt, Homo sapiens
  misc_RNA (1)...(19): siRNA sense strand
gaaauugauuggacuggau

SEQ ID NO: 638081 - RNA, 19 nt, Homo sapiens
  misc_RNA (1)...(19): siRNA sense strand
ggagaugauuucagaggaa

SEQ ID NO: 638082 - RNA, 19 nt, Homo sapiens
  misc_RNA (1)...(19): siRNA sense strand
caacaaugguuacagagau

SEQ ID NO: 638083 - RNA, 19 nt, Homo sapiens
  misc_RNA (1)...(19): siRNA sense strand
caaacauccuaccauauga

SEQ ID NO: 638084 - RNA, 19 nt, Homo sapiens
  misc_RNA (1)...(19): siRNA sense strand
aaaggagggugaaauguga

SEQ ID NO: 638085 - RNA, 19 nt, Homo sapiens
  misc_RNA (1)...(19): siRNA sense strand
cuacaucaaugccaacuau

SEQ ID NO: 638086 - RNA, 19 nt, Homo sapiens
  misc_RNA (1)...(19): siRNA sense strand
uuaaggauauggccaaaga

SEQ ID NO: 638087 - RNA, 19 nt, Homo sapiens
  misc_RNA (1)...(19): siRNA sense strand
gccaaagacucugacuaua

SEQ ID NO: 638088 - RNA, 19 nt, Homo sapiens
  misc_RNA (1)...(19): siRNA sense strand
gcugauuucuuugaaguuu

SEQ ID NO: 638089 - RNA, 19 nt, Homo sapiens
  misc_RNA (1)...(19): siRNA sense strand
ugacuuugaugccuauauu

SEQ ID NO: 638090 - RNA, 19 nt, Homo sapiens
  misc_RNA (1)...(19): siRNA sense strand
gcagauggcuagggagugu

SEQ ID NO: 638091 - RNA, 19 nt, Homo sapiens
  misc_RNA (1)...(19): siRNA sense strand
ggucauaccggaugucuau

SEQ ID NO: 638092 - RNA, 19 nt, Homo sapiens
  misc_RNA (1)...(19): siRNA sense strand
ggaagaugguccugcaaca

SEQ ID NO: 638093 - RNA, 19 nt, Homo sapiens
  misc_RNA (1)...(19): siRNA sense strand
cagaaaguauccugcaguu

SEQ ID NO: 638094 - RNA, 19 nt, Homo sapiens
  misc_RNA (1)...(19): siRNA sense strand
gaccauuacuggccauuca

SEQ ID NO: 638095 - RNA, 19 nt, Homo sapiens
  misc_RNA (1)...(19): siRNA sense strand
ggccaaagacucugacuau

SEQ ID NO: 638096 - RNA, 19 nt, Homo sapiens
  misc_RNA (1)...(19): siRNA sense strand
gaagagggaguagcugauu

SEQ ID NO: 638097 - RNA, 19 nt, Homo sapiens
  misc_RNA (1)...(19): siRNA sense strand
ugauguggaugaagaagaa

SEQ ID NO: 638098 - RNA, 19 nt, Homo sapiens
  misc_RNA (1)...(19): siRNA sense strand
gcaaaggucccaugaucau

SEQ ID NO: 638099 - RNA, 19 nt, Homo sapiens
  misc_RNA (1)...(19): siRNA sense strand
gcugguacauuugucaauu

SEQ ID NO: 638100 - RNA, 19 nt, Homo sapiens
  misc_RNA (1)...(19): siRNA sense strand
guucauagccgucucaaca

SEQ ID NO: 638101 - RNA, 19 nt, Homo sapiens
  misc_RNA (1)...(19): siRNA sense strand
agaaccagcuccacccaaa

SEQ ID NO: 638102 - RNA, 19 nt, Homo sapiens
  misc_RNA (1)...(19): siRNA sense strand
ucagugaugucauauacga

SEQ ID NO: 638103 - RNA, 19 nt, Homo sapiens
  misc_RNA (1)...(19): siRNA sense strand
cugcagaucuuccacugaa

SEQ ID NO: 638104 - RNA, 19 nt, Homo sapiens
  misc_RNA (1)...(19): siRNA sense strand
gggcuggugucagaaauga

SEQ ID NO: 638105 - RNA, 19 nt, Homo sapiens
  misc_RNA (1)...(19): siRNA sense strand
gcaaaugcugcagaaagua

SEQ ID NO: 638106 - RNA, 19 nt, Homo sapiens
  misc_RNA (1)...(19): siRNA sense strand
ggacggacaggaacauuca

SEQ ID NO: 638107 - RNA, 19 nt, Homo sapiens
  misc_RNA (1)...(19): siRNA sense strand
ggaaccaguugcuguuucu

SEQ ID NO: 638108 - RNA, 19 nt, Homo sapiens
  misc_RNA (1)...(19): siRNA sense strand
acaaacauccuaccauaug

SEQ ID NO: 638109 - RNA, 19 nt, Homo sapiens
  misc_RNA (1)...(19): siRNA sense strand
caucaaugccaacuauauu

SEQ ID NO: 638110 - RNA, 19 nt, Homo sapiens
  misc_RNA (1)...(19): siRNA sense strand
ucucaacaaugguuacaga

SEQ ID NO: 638111 - RNA, 19 nt, Homo sapiens
  misc_RNA (1)...(19): siRNA sense strand
gaagaugguccugcaacaa

SEQ ID NO: 638112 - RNA, 19 nt, Homo sapiens
  misc_RNA (1)...(19): siRNA sense strand
acacuuugcugcagaucuu

SEQ ID NO: 638113 - RNA, 19 nt, Homo sapiens
  misc_RNA (1)...(19): siRNA sense strand
uaauuggacuguugcuugu

SEQ ID NO: 638114 - RNA, 19 nt, Homo sapiens
  misc_RNA (1)...(19): siRNA sense strand
gaugaaucccaauguggua

SEQ ID NO: 638115 - RNA, 19 nt, Homo sapiens
  misc_RNA (1)...(19): siRNA sense strand
cuucagccgugugagauua

SEQ ID NO: 638116 - RNA, 19 nt, Homo sapiens
  misc_RNA (1)...(19): siRNA sense strand
uuaaagaagaggaaacuga

SEQ ID NO: 638117 - RNA, 19 nt, Homo sapiens
  misc_RNA (1)...(19): siRNA sense strand
agagagggauggaaagcuu

SEQ ID NO: 638118 - RNA, 19 nt, Homo sapiens
  misc_RNA (1)...(19): siRNA sense strand
ggaugacuuugaugccuau

SEQ ID NO: 638119 - RNA, 19 nt, Homo sapiens
  misc_RNA (1)...(19): siRNA sense strand
aaaguauccugcaguuugu

SEQ ID NO: 638120 - RNA, 19 nt, Homo sapiens
  misc_RNA (1)...(19): siRNA sense strand
caaaugcugcagaaaguau

SEQ ID NO: 638121 - RNA, 19 nt, Homo sapiens
  misc_RNA (1)...(19): siRNA sense strand
ugaagaagaagcagcaguu

SEQ ID NO: 638122 - RNA, 19 nt, Homo sapiens
  misc_RNA (1)...(19): siRNA sense strand
agauuagucuccaugaaug

SEQ ID NO: 638123 - RNA, 19 nt, Homo sapiens
  misc_RNA (1)...(19): siRNA sense strand
agaggaaggugcagacuac

SEQ ID NO: 638124 - RNA, 19 nt, Homo sapiens
  misc_RNA (1)...(19): siRNA sense strand
uguagacacuuccggauca

SEQ ID NO: 638125 - RNA, 19 nt, Homo sapiens
  misc_RNA (1)...(19): siRNA sense strand
ggaaggugcagacuacauc

SEQ ID NO: 638126 - RNA, 19 nt, Homo sapiens
  misc_RNA (1)...(19): siRNA sense strand
ggauauggccaaagacucu

SEQ ID NO: 638127 - RNA, 19 nt, Homo sapiens
  misc_RNA (1)...(19): siRNA sense strand
gaacaaaacccagacuuca

SEQ ID NO: 638128 - RNA, 19 nt, Homo sapiens
  misc_RNA (1)...(19): siRNA sense strand
agagaugaaucccaaugug

SEQ ID NO: 638129 - RNA, 19 nt, Homo sapiens
  misc_RNA (1)...(19): siRNA sense strand
ucuuagggcuggugucaga

SEQ ID NO: 638130 - RNA, 19 nt, Homo sapiens
  misc_RNA (1)...(19): siRNA sense strand
aagagggaguagcugauuu

SEQ ID NO: 638131 - RNA, 19 nt, Homo sapiens
  misc_RNA (1)...(19): siRNA sense strand
caacuauauuccuggauac

SEQ ID NO: 638132 - RNA, 19 nt, Homo sapiens
  misc_RNA (1)...(19): siRNA sense strand
uagcugauuucuuugaagu

SEQ ID NO: 638133 - RNA, 19 nt, Homo sapiens
  misc_RNA (1)...(19): siRNA sense strand
ucauagccgucucaacaau

SEQ ID NO: 638134 - RNA, 19 nt, Homo sapiens
  misc_RNA (1)...(19): siRNA sense strand
gaagaagaagcagcaguuc

SEQ ID NO: 638135 - RNA, 19 nt, Homo sapiens
  misc_RNA (1)...(19): siRNA sense strand
cugguacauuugucaauuu

SEQ ID NO: 638136 - RNA, 19 nt, Homo sapiens
  misc_RNA (1)...(19): siRNA sense strand
guuacccucauuauucuua

SEQ ID NO: 638137 - RNA, 19 nt, Homo sapiens
  misc_RNA (1)...(19): siRNA sense strand
auuggacuguugcuuguua

SEQ ID NO: 638138 - RNA, 19 nt, Homo sapiens
  misc_RNA (1)...(19): siRNA sense strand
ggugcagacuacaucaaug

SEQ ID NO: 638139 - RNA, 19 nt, Homo sapiens
  misc_RNA (1)...(19): siRNA sense strand
gcagaucuuccacugaauc

SEQ ID NO: 638140 - RNA, 19 nt, Homo sapiens
  misc_RNA (1)...(19): siRNA sense strand
gacuggauaucccacacuu

SEQ ID NO: 638141 - RNA, 19 nt, Homo sapiens
  misc_RNA (1)...(19): siRNA sense strand
uuugaggaguugaaauuga

SEQ ID NO: 638142 - RNA, 19 nt, Homo sapiens
  misc_RNA (1)...(19): siRNA sense strand
gacuuugaugccuauauua

SEQ ID NO: 638143 - RNA, 19 nt, Homo sapiens
  misc_RNA (1)...(19): siRNA sense strand
gaguagcugauuucuuuga

SEQ ID NO: 638144 - RNA, 19 nt, Homo sapiens
  misc_RNA (1)...(19): siRNA sense strand
gaaguuuucugucaacaag

SEQ ID NO: 638145 - RNA, 19 nt, Homo sapiens
  misc_RNA (1)...(19): siRNA sense strand
ccucauuauucuuaggaaa

SEQ ID NO: 638146 - RNA, 19 nt, Homo sapiens
  misc_RNA (1)...(19): siRNA sense strand
gaugucauauacgagaaug

SEQ ID NO: 638147 - RNA, 19 nt, Homo sapiens
  misc_RNA (1)...(19): siRNA sense strand
cgacagcaagcuaccaaga

SEQ ID NO: 638148 - RNA, 19 nt, Homo sapiens
  misc_RNA (1)...(19): siRNA sense strand
aagaugguccugcaacaaa

SEQ ID NO: 638149 - RNA, 19 nt, Homo sapiens
  misc_RNA (1)...(19): siRNA sense strand
gaucuuccacugaaucgau

SEQ ID NO: 638150 - RNA, 19 nt, Homo sapiens
  misc_RNA (1)...(19): siRNA sense strand
gaaagcuuccauacaacug

SEQ ID NO: 638151 - RNA, 19 nt, Homo sapiens
  misc_RNA (1)...(19): siRNA sense strand
uguagugucaccagcuuua

SEQ ID NO: 638152 - RNA, 19 nt, Homo sapiens
  misc_RNA (1)...(19): siRNA sense strand
gaaccagcuccacccaaau

SEQ ID NO: 638153 - RNA, 19 nt, Homo sapiens
  misc_RNA (1)...(19): siRNA sense strand
cuuguuacccucauuauuc

SEQ ID NO: 638154 - RNA, 19 nt, Homo sapiens
  misc_RNA (1)...(19): siRNA sense strand
cagaggagcaguacauuuu

SEQ ID NO: 638155 - RNA, 19 nt, Homo sapiens
  misc_RNA (1)...(19): siRNA sense strand
ggacaggaacauucauugc

SEQ ID NO: 638156 - RNA, 19 nt, Homo sapiens
  misc_RNA (1)...(19): siRNA sense strand
gaaggugcagacuacauca

SEQ ID NO: 638157 - RNA, 19 nt, Homo sapiens
  misc_RNA (1)...(19): siRNA sense strand
cagugucccuacguucaua

SEQ ID NO: 638158 - RNA, 19 nt, Homo sapiens
  misc_RNA (1)...(19): siRNA sense strand
ggaagagggaguagcugau

SEQ ID NO: 638159 - RNA, 19 nt, Homo sapiens
  misc_RNA (1)...(19): siRNA sense strand
cuguggagaugauuucaga

SEQ ID NO: 638160 - RNA, 19 nt, Homo sapiens
  misc_RNA (1)...(19): siRNA sense strand
cauccuaccauaugacuuc

SEQ ID NO: 638161 - RNA, 19 nt, Homo sapiens
  misc_RNA (1)...(19): siRNA sense strand
gauuagucuccaugaauga

SEQ ID NO: 638162 - RNA, 19 nt, Homo sapiens
  misc_RNA (1)...(19): siRNA sense strand
agacagaggagcaguacau

SEQ ID NO: 638163 - RNA, 19 nt, Homo sapiens
  misc_RNA (1)...(19): siRNA sense strand
gaccaucuccagccuucuu

SEQ ID NO: 638164 - RNA, 19 nt, Homo sapiens
  misc_RNA (1)...(19): siRNA sense strand
gugcaacugauguggauga

SEQ ID NO: 638165 - RNA, 19 nt, Homo sapiens
  misc_RNA (1)...(19): siRNA sense strand
acagaggagcaguacauuu

SEQ ID NO: 638166 - RNA, 19 nt, Homo sapiens
  misc_RNA (1)...(19): siRNA sense strand
cugacgagaugcaggaugu

SEQ ID NO: 638167 - RNA, 19 nt, Homo sapiens
  misc_RNA (1)...(19): siRNA sense strand
guagacacuuccggaucaa

SEQ ID NO: 638168 - RNA, 19 nt, Homo sapiens
  misc_RNA (1)...(19): siRNA sense strand
gggaguagcugauuucuuu

SEQ ID NO: 638169 - RNA, 19 nt, Homo sapiens
  misc_RNA (1)...(19): siRNA sense strand
caaagacucugacuauaaa

SEQ ID NO: 638170 - RNA, 19 nt, Homo sapiens
  misc_RNA (1)...(19): siRNA sense strand
caacaaaagucucagauua

SEQ ID NO: 638171 - RNA, 19 nt, Homo sapiens
  misc_RNA (1)...(19): siRNA sense strand
gaaaguauccugcaguuug

SEQ ID NO: 638172 - RNA, 19 nt, Homo sapiens
  misc_RNA (1)...(19): siRNA sense strand
acacaaacauccuaccaua

SEQ ID NO: 638173 - RNA, 19 nt, Homo sapiens
  misc_RNA (1)...(19): siRNA sense strand
caacugauguggaugaaga

SEQ ID NO: 638174 - RNA, 19 nt, Homo sapiens
  misc_RNA (1)...(19): siRNA sense strand
gagcaaaggucccaugauc

SEQ ID NO: 638175 - RNA, 19 nt, Homo sapiens
  misc_RNA (1)...(19): siRNA sense strand
caaguuggcuccagucaga

SEQ ID NO: 638176 - RNA, 19 nt, Homo sapiens
  misc_RNA (1)...(19): siRNA sense strand
ccaacuauauuccuggaua

SEQ ID NO: 638177 - RNA, 19 nt, Homo sapiens
  misc_RNA (1)...(19): siRNA sense strand
ccaaagacucugacuauaa

SEQ ID NO: 638178 - RNA, 19 nt, Homo sapiens
  misc_RNA (1)...(19): siRNA sense strand
caacuaugcugacgagaug

SEQ ID NO: 638179 - RNA, 19 nt, Homo sapiens
  misc_RNA (1)...(19): siRNA sense strand
guguggagcugguacauuu

SEQ ID NO: 638180 - RNA, 19 nt, Homo sapiens
  misc_RNA (1)...(19): siRNA sense strand
gaaauugauuggacuggau

SEQ ID NO: 638181 - RNA, 19 nt, Homo sapiens
  misc_RNA (1)...(19): siRNA sense strand
ggagaugauuucagaggaa

SEQ ID NO: 638182 - RNA, 19 nt, Homo sapiens
  misc_RNA (1)...(19): siRNA sense strand
caacaaugguuacagagau

SEQ ID NO: 638183 - RNA, 19 nt, Homo sapiens
  misc_RNA (1)...(19): siRNA sense strand
caaacauccuaccauauga

SEQ ID NO: 638184 - RNA, 19 nt, Homo sapiens
  misc_RNA (1)...(19): siRNA sense strand
aaaggagggugaaauguga

SEQ ID NO: 638185 - RNA, 19 nt, Homo sapiens
  misc_RNA (1)...(19): siRNA sense strand
cuacaucaaugccaacuau

SEQ ID NO: 638186 - RNA, 19 nt, Homo sapiens
  misc_RNA (1)...(19): siRNA sense strand
uuaaggauauggccaaaga

SEQ ID NO: 638187 - RNA, 19 nt, Homo sapiens
  misc_RNA (1)...(19): siRNA sense strand
gccaaagacucugacuaua

SEQ ID NO: 638188 - RNA, 19 nt, Homo sapiens
  misc_RNA (1)...(19): siRNA sense strand
gcugauuucuuugaaguuu

SEQ ID NO: 638189 - RNA, 19 nt, Homo sapiens
  misc_RNA (1)...(19): siRNA sense strand
ugacuuugaugccuauauu

SEQ ID NO: 638190 - RNA, 19 nt, Homo sapiens
  misc_RNA (1)...(19): siRNA sense strand
gcagauggcuagggagugu

SEQ ID NO: 638191 - RNA, 19 nt, Homo sapiens
  misc_RNA (1)...(19): siRNA sense strand
ggucauaccggaugucuau

SEQ ID NO: 638192 - RNA, 19 nt, Homo sapiens
  misc_RNA (1)...(19): siRNA sense strand
ggaagaugguccugcaaca

SEQ ID NO: 638193 - RNA, 19 nt, Homo sapiens
  misc_RNA (1)...(19): siRNA sense strand
cagaaaguauccugcaguu

SEQ ID NO: 638194 - RNA, 19 nt, Homo sapiens
  misc_RNA (1)...(19): siRNA sense strand
gaccauuacuggccauuca

SEQ ID NO: 638195 - RNA, 19 nt, Homo sapiens
  misc_RNA (1)...(19): siRNA sense strand
ggccaaagacucugacuau

SEQ ID NO: 638196 - RNA, 19 nt, Homo sapiens
  misc_RNA (1)...(19): siRNA sense strand
gaagagggaguagcugauu

SEQ ID NO: 638197 - RNA, 19 nt, Homo sapiens
  misc_RNA (1)...(19): siRNA sense strand
ugauguggaugaagaagaa

SEQ ID NO: 638198 - RNA, 19 nt, Homo sapiens
  misc_RNA (1)...(19): siRNA sense strand
gcaaaggucccaugaucau

SEQ ID NO: 638199 - RNA, 19 nt, Homo sapiens
  misc_RNA (1)...(19): siRNA sense strand
gcugguacauuugucaauu

SEQ ID NO: 638200 - RNA, 19 nt, Homo sapiens
  misc_RNA (1)...(19): siRNA sense strand
guucauagccgucucaaca

SEQ ID NO: 638201 - RNA, 19 nt, Homo sapiens
  misc_RNA (1)...(19): siRNA sense strand
agaaccagcuccacccaaa

SEQ ID NO: 638202 - RNA, 19 nt, Homo sapiens
  misc_RNA (1)...(19): siRNA sense strand
ucagugaugucauauacga

SEQ ID NO: 638203 - RNA, 19 nt, Homo sapiens
  misc_RNA (1)...(19): siRNA sense strand
cugcagaucuuccacugaa

SEQ ID NO: 638204 - RNA, 19 nt, Homo sapiens
  misc_RNA (1)...(19): siRNA sense strand
gggcuggugucagaaauga

SEQ ID NO: 638205 - RNA, 19 nt, Homo sapiens
  misc_RNA (1)...(19): siRNA sense strand
gcaaaugcugcagaaagua

SEQ ID NO: 638206 - RNA, 19 nt, Homo sapiens
  misc_RNA (1)...(19): siRNA sense strand
ggacggacaggaacauuca

SEQ ID NO: 638207 - RNA, 19 nt, Homo sapiens
  misc_RNA (1)...(19): siRNA sense strand
ggaaccaguugcuguuucu

SEQ ID NO: 638208 - RNA, 19 nt, Homo sapiens
  misc_RNA (1)...(19): siRNA sense strand
acaaacauccuaccauaug

SEQ ID NO: 638209 - RNA, 19 nt, Homo sapiens
  misc_RNA (1)...(19): siRNA sense strand
caucaaugccaacuauauu

SEQ ID NO: 638210 - RNA, 19 nt, Homo sapiens
  misc_RNA (1)...(19): siRNA sense strand
ucucaacaaugguuacaga

SEQ ID NO: 638211 - RNA, 19 nt, Homo sapiens
  misc_RNA (1)...(19): siRNA sense strand
gaagaugguccugcaacaa

SEQ ID NO: 638212 - RNA, 19 nt, Homo sapiens
  misc_RNA (1)...(19): siRNA sense strand
acacuuugcugcagaucuu

SEQ ID NO: 638213 - RNA, 19 nt, Homo sapiens
  misc_RNA (1)...(19): siRNA sense strand
uaauuggacuguugcuugu

SEQ ID NO: 638214 - RNA, 19 nt, Homo sapiens
  misc_RNA (1)...(19): siRNA sense strand
gaugaaucccaauguggua

SEQ ID NO: 638215 - RNA, 19 nt, Homo sapiens
  misc_RNA (1)...(19): siRNA sense strand
cuucagccgugugagauua

SEQ ID NO: 638216 - RNA, 19 nt, Homo sapiens
  misc_RNA (1)...(19): siRNA sense strand
uuaaagaagaggaaacuga

SEQ ID NO: 638217 - RNA, 19 nt, Homo sapiens
  misc_RNA (1)...(19): siRNA sense strand
agagagggauggaaagcuu

SEQ ID NO: 638218 - RNA, 19 nt, Homo sapiens
  misc_RNA (1)...(19): siRNA sense strand
ggaugacuuugaugccuau

SEQ ID NO: 638219 - RNA, 19 nt, Homo sapiens
  misc_RNA (1)...(19): siRNA sense strand
aaaguauccugcaguuugu

SEQ ID NO: 638220 - RNA, 19 nt, Homo sapiens
  misc_RNA (1)...(19): siRNA sense strand
caaaugcugcagaaaguau

SEQ ID NO: 638221 - RNA, 19 nt, Homo sapiens
  misc_RNA (1)...(19): siRNA sense strand
ugaagaagaagcagcaguu

SEQ ID NO: 638222 - RNA, 19 nt, Homo sapiens
  misc_RNA (1)...(19): siRNA sense strand
agauuagucuccaugaaug

SEQ ID NO: 638223 - RNA, 19 nt, Homo sapiens
  misc_RNA (1)...(19): siRNA sense strand
agaggaaggugcagacuac

SEQ ID NO: 638224 - RNA, 19 nt, Homo sapiens
  misc_RNA (1)...(19): siRNA sense strand
uguagacacuuccggauca

SEQ ID NO: 638225 - RNA, 19 nt, Homo sapiens
  misc_RNA (1)...(19): siRNA sense strand
ggaaggugcagacuacauc

SEQ ID NO: 638226 - RNA, 19 nt, Homo sapiens
  misc_RNA (1)...(19): siRNA sense strand
ggauauggccaaagacucu

SEQ ID NO: 638227 - RNA, 19 nt, Homo sapiens
  misc_RNA (1)...(19): siRNA sense strand
gaacaaaacccagacuuca

SEQ ID NO: 638228 - RNA, 19 nt, Homo sapiens
  misc_RNA (1)...(19): siRNA sense strand
agagaugaaucccaaugug

SEQ ID NO: 638229 - RNA, 19 nt, Homo sapiens
  misc_RNA (1)...(19): siRNA sense strand
ucuuagggcuggugucaga

SEQ ID NO: 638230 - RNA, 19 nt, Homo sapiens
  misc_RNA (1)...(19): siRNA sense strand
aagagggaguagcugauuu

SEQ ID NO: 638231 - RNA, 19 nt, Homo sapiens
  misc_RNA (1)...(19): siRNA sense strand
caacuauauuccuggauac

SEQ ID NO: 638232 - RNA, 19 nt, Homo sapiens
  misc_RNA (1)...(19): siRNA sense strand
uagcugauuucuuugaagu

SEQ ID NO: 638233 - RNA, 19 nt, Homo sapiens
  misc_RNA (1)...(19): siRNA sense strand
ucauagccgucucaacaau

SEQ ID NO: 638234 - RNA, 19 nt, Homo sapiens
  misc_RNA (1)...(19): siRNA sense strand
gaagaagaagcagcaguuc

SEQ ID NO: 638235 - RNA, 19 nt, Homo sapiens
  misc_RNA (1)...(19): siRNA sense strand
cugguacauuugucaauuu

SEQ ID NO: 638236 - RNA, 19 nt, Homo sapiens
  misc_RNA (1)...(19): siRNA sense strand
guuacccucauuauucuua

SEQ ID NO: 638237 - RNA, 19 nt, Homo sapiens
  misc_RNA (1)...(19): siRNA sense strand
auuggacuguugcuuguua

SEQ ID NO: 638238 - RNA, 19 nt, Homo sapiens
  misc_RNA (1)...(19): siRNA sense strand
ggugcagacuacaucaaug

SEQ ID NO: 638239 - RNA, 19 nt, Homo sapiens
  misc_RNA (1)...(19): siRNA sense strand
gcagaucuuccacugaauc

SEQ ID NO: 638240 - RNA, 19 nt, Homo sapiens
  misc_RNA (1)...(19): siRNA sense strand
gacuggauaucccacacuu

SEQ ID NO: 638241 - RNA, 19 nt, Homo sapiens
  misc_RNA (1)...(19): siRNA sense strand
uuugaggaguugaaauuga

SEQ ID NO: 638242 - RNA, 19 nt, Homo sapiens
  misc_RNA (1)...(19): siRNA sense strand
gacuuugaugccuauauua

SEQ ID NO: 638243 - RNA, 19 nt, Homo sapiens
  misc_RNA (1)...(19): siRNA sense strand
gaguagcugauuucuuuga

SEQ ID NO: 638244 - RNA, 19 nt, Homo sapiens
  misc_RNA (1)...(19): siRNA sense strand
gaaguuuucugucaacaag

SEQ ID NO: 638245 - RNA, 19 nt, Homo sapiens
  misc_RNA (1)...(19): siRNA sense strand
ccucauuauucuuaggaaa

SEQ ID NO: 638246 - RNA, 19 nt, Homo sapiens
  misc_RNA (1)...(19): siRNA sense strand
gaugucauauacgagaaug

SEQ ID NO: 638247 - RNA, 19 nt, Homo sapiens
  misc_RNA (1)...(19): siRNA sense strand
cgacagcaagcuaccaaga

SEQ ID NO: 638248 - RNA, 19 nt, Homo sapiens
  misc_RNA (1)...(19): siRNA sense strand
aagaugguccugcaacaaa

SEQ ID NO: 638249 - RNA, 19 nt, Homo sapiens
  misc_RNA (1)...(19): siRNA sense strand
gaucuuccacugaaucgau

SEQ ID NO: 638250 - RNA, 19 nt, Homo sapiens
  misc_RNA (1)...(19): siRNA sense strand
gaaagcuuccauacaacug

SEQ ID NO: 638251 - RNA, 19 nt, Homo sapiens
  misc_RNA (1)...(19): siRNA sense strand
uguagugucaccagcuuua

SEQ ID NO: 638252 - RNA, 19 nt, Homo sapiens
  misc_RNA (1)...(19): siRNA sense strand
gaaccagcuccacccaaau

SEQ ID NO: 638253 - RNA, 19 nt, Homo sapiens
  misc_RNA (1)...(19): siRNA sense strand
cuuguuacccucauuauuc

SEQ ID NO: 638254 - RNA, 19 nt, Homo sapiens
  misc_RNA (1)...(19): siRNA sense strand
cagaggagcaguacauuuu

SEQ ID NO: 638255 - RNA, 19 nt, Homo sapiens
  misc_RNA (1)...(19): siRNA sense strand
ggacaggaacauucauugc

SEQ ID NO: 638256 - RNA, 19 nt, Homo sapiens
  misc_RNA (1)...(19): siRNA sense strand
gaaggugcagacuacauca

SEQ ID NO: 638257 - RNA, 19 nt, Homo sapiens
  misc_RNA (1)...(19): siRNA sense strand
cagugucccuacguucaua

SEQ ID NO: 638258 - RNA, 19 nt, Homo sapiens
  misc_RNA (1)...(19): siRNA sense strand
ggaagagggaguagcugau

SEQ ID NO: 638259 - RNA, 19 nt, Homo sapiens
  misc_RNA (1)...(19): siRNA sense strand
cuguggagaugauuucaga

SEQ ID NO: 638260 - RNA, 19 nt, Homo sapiens
  misc_RNA (1)...(19): siRNA sense strand
cauccuaccauaugacuuc

SEQ ID NO: 638261 - RNA, 19 nt, Homo sapiens
  misc_RNA (1)...(19): siRNA sense strand
gauuagucuccaugaauga

SEQ ID NO: 638262 - RNA, 19 nt, Homo sapiens
  misc_RNA (1)...(19): siRNA sense strand
agacagaggagcaguacau

SEQ ID NO: 638263 - RNA, 19 nt, Homo sapiens
  misc_RNA (1)...(19): siRNA sense strand
gaccaucuccagccuucuu

SEQ ID NO: 638264 - RNA, 19 nt, Homo sapiens
  misc_RNA (1)...(19): siRNA sense strand
gugcaacugauguggauga

SEQ ID NO: 638265 - RNA, 19 nt, Homo sapiens
  misc_RNA (1)...(19): siRNA sense strand
acagaggagcaguacauuu

SEQ ID NO: 638266 - RNA, 19 nt, Homo sapiens
  misc_RNA (1)...(19): siRNA sense strand
cugacgagaugcaggaugu

SEQ ID NO: 638267 - RNA, 19 nt, Homo sapiens
  misc_RNA (1)...(19): siRNA sense strand
guagacacuuccggaucaa

SEQ ID NO: 638268 - RNA, 19 nt, Homo sapiens
  misc_RNA (1)...(19): siRNA sense strand
caaagacucugacuauaaa

SEQ ID NO: 638269 - RNA, 19 nt, Homo sapiens
  misc_RNA (1)...(19): siRNA sense strand
caacaaaagucucagauua

SEQ ID NO: 638270 - RNA, 19 nt, Homo sapiens
  misc_RNA (1)...(19): siRNA sense strand
gaaaguauccugcaguuug

SEQ ID NO: 638271 - RNA, 19 nt, Homo sapiens
  misc_RNA (1)...(19): siRNA sense strand
acacaaacauccuaccaua

SEQ ID NO: 638272 - RNA, 19 nt, Homo sapiens
  misc_RNA (1)...(19): siRNA sense strand
caacugauguggaugaaga

SEQ ID NO: 638273 - RNA, 19 nt, Homo sapiens
  misc_RNA (1)...(19): siRNA sense strand
gagcaaaggucccaugauc

SEQ ID NO: 638274 - RNA, 19 nt, Homo sapiens
  misc_RNA (1)...(19): siRNA sense strand
ccaacuauauuccuggaua

SEQ ID NO: 638275 - RNA, 19 nt, Homo sapiens
  misc_RNA (1)...(19): siRNA sense strand
ccaaagacucugacuauaa

SEQ ID NO: 638276 - RNA, 19 nt, Homo sapiens
  misc_RNA (1)...(19): siRNA sense strand
caacuaugcugacgagaug

SEQ ID NO: 638277 - RNA, 19 nt, Homo sapiens
  misc_RNA (1)...(19): siRNA sense strand
guguggagcugguacauuu

SEQ ID NO: 638278 - RNA, 19 nt, Homo sapiens
  misc_RNA (1)...(19): siRNA sense strand
gaaauugauuggacuggau

SEQ ID NO: 638279 - RNA, 19 nt, Homo sapiens
  misc_RNA (1)...(19): siRNA sense strand
ggagaugauuucagaggaa

SEQ ID NO: 638280 - RNA, 19 nt, Homo sapiens
  misc_RNA (1)...(19): siRNA sense strand
caaacauccuaccauauga

SEQ ID NO: 638281 - RNA, 19 nt, Homo sapiens
  misc_RNA (1)...(19): siRNA sense strand
aaaggagggugaaauguga

SEQ ID NO: 638282 - RNA, 19 nt, Homo sapiens
  misc_RNA (1)...(19): siRNA sense strand
cuacaucaaugccaacuau

SEQ ID NO: 638283 - RNA, 19 nt, Homo sapiens
  misc_RNA (1)...(19): siRNA sense strand
uuaaggauauggccaaaga

SEQ ID NO: 638284 - RNA, 19 nt, Homo sapiens
  misc_RNA (1)...(19): siRNA sense strand
gccaaagacucugacuaua

SEQ ID NO: 638285 - RNA, 19 nt, Homo sapiens
  misc_RNA (1)...(19): siRNA sense strand
ugacuuugaugccuauauu

SEQ ID NO: 638286 - RNA, 19 nt, Homo sapiens
  misc_RNA (1)...(19): siRNA sense strand
gcagauggcuagggagugu

SEQ ID NO: 638287 - RNA, 19 nt, Homo sapiens
  misc_RNA (1)...(19): siRNA sense strand
ggucauaccggaugucuau

SEQ ID NO: 638288 - RNA, 19 nt, Homo sapiens
  misc_RNA (1)...(19): siRNA sense strand
ggaagaugguccugcaaca

SEQ ID NO: 638289 - RNA, 19 nt, Homo sapiens
  misc_RNA (1)...(19): siRNA sense strand
cagaaaguauccugcaguu

SEQ ID NO: 638290 - RNA, 19 nt, Homo sapiens
  misc_RNA (1)...(19): siRNA sense strand
gaccauuacuggccauuca

SEQ ID NO: 638291 - RNA, 19 nt, Homo sapiens
  misc_RNA (1)...(19): siRNA sense strand
ggccaaagacucugacuau

SEQ ID NO: 638292 - RNA, 19 nt, Homo sapiens
  misc_RNA (1)...(19): siRNA sense strand
gcugguacauuugucaauu

SEQ ID NO: 638293 - RNA, 19 nt, Homo sapiens
  misc_RNA (1)...(19): siRNA sense strand
ugauguggaugaagaagaa

SEQ ID NO: 638294 - RNA, 19 nt, Homo sapiens
  misc_RNA (1)...(19): siRNA sense strand
gcaaaggucccaugaucau

SEQ ID NO: 638295 - RNA, 19 nt, Homo sapiens
  misc_RNA (1)...(19): siRNA sense strand
ucagugaugucauauacga

SEQ ID NO: 638296 - RNA, 19 nt, Homo sapiens
  misc_RNA (1)...(19): siRNA sense strand
cugcagaucuuccacugaa

SEQ ID NO: 638297 - RNA, 19 nt, Homo sapiens
  misc_RNA (1)...(19): siRNA sense strand
gggcuggugucagaaauga

SEQ ID NO: 638298 - RNA, 19 nt, Homo sapiens
  misc_RNA (1)...(19): siRNA sense strand
gcaaaugcugcagaaagua

SEQ ID NO: 638299 - RNA, 19 nt, Homo sapiens
  misc_RNA (1)...(19): siRNA sense strand
ggacggacaggaacauuca

SEQ ID NO: 638300 - RNA, 19 nt, Homo sapiens
  misc_RNA (1)...(19): siRNA sense strand
acaaacauccuaccauaug

SEQ ID NO: 638301 - RNA, 19 nt, Homo sapiens
  misc_RNA (1)...(19): siRNA sense strand
caucaaugccaacuauauu

SEQ ID NO: 638302 - RNA, 19 nt, Homo sapiens
  misc_RNA (1)...(19): siRNA sense strand
acacuuugcugcagaucuu

SEQ ID NO: 638303 - RNA, 19 nt, Homo sapiens
  misc_RNA (1)...(19): siRNA sense strand
gaagaugguccugcaacaa

SEQ ID NO: 638304 - RNA, 19 nt, Homo sapiens
  misc_RNA (1)...(19): siRNA sense strand
uaauuggacuguugcuugu

SEQ ID NO: 638305 - RNA, 19 nt, Homo sapiens
  misc_RNA (1)...(19): siRNA sense strand
agagagggauggaaagcuu

SEQ ID NO: 638306 - RNA, 19 nt, Homo sapiens
  misc_RNA (1)...(19): siRNA sense strand
gaugaaucccaauguggua

SEQ ID NO: 638307 - RNA, 19 nt, Homo sapiens
  misc_RNA (1)...(19): siRNA sense strand
cuucagccgugugagauua

SEQ ID NO: 638308 - RNA, 19 nt, Homo sapiens
  misc_RNA (1)...(19): siRNA sense strand
uuaaagaagaggaaacuga

SEQ ID NO: 638309 - RNA, 19 nt, Homo sapiens
  misc_RNA (1)...(19): siRNA sense strand
ggaugacuuugaugccuau

SEQ ID NO: 638310 - RNA, 19 nt, Homo sapiens
  misc_RNA (1)...(19): siRNA sense strand
aaaguauccugcaguuugu

SEQ ID NO: 638311 - RNA, 19 nt, Homo sapiens
  misc_RNA (1)...(19): siRNA sense strand
caaaugcugcagaaaguau

SEQ ID NO: 638312 - RNA, 19 nt, Homo sapiens
  misc_RNA (1)...(19): siRNA sense strand
ugaagaagaagcagcaguu

SEQ ID NO: 638313 - RNA, 19 nt, Homo sapiens
  misc_RNA (1)...(19): siRNA sense strand
agauuagucuccaugaaug

SEQ ID NO: 638314 - RNA, 19 nt, Homo sapiens
  misc_RNA (1)...(19): siRNA sense strand
agaggaaggugcagacuac

SEQ ID NO: 638315 - RNA, 19 nt, Homo sapiens
  misc_RNA (1)...(19): siRNA sense strand
uguagacacuuccggauca

SEQ ID NO: 638316 - RNA, 19 nt, Homo sapiens
  misc_RNA (1)...(19): siRNA sense strand
ggaaggugcagacuacauc

SEQ ID NO: 638317 - RNA, 19 nt, Homo sapiens
  misc_RNA (1)...(19): siRNA sense strand
ggauauggccaaagacucu

SEQ ID NO: 638318 - RNA, 19 nt, Homo sapiens
  misc_RNA (1)...(19): siRNA sense strand
caacuauauuccuggauac

SEQ ID NO: 638319 - RNA, 19 nt, Homo sapiens
  misc_RNA (1)...(19): siRNA sense strand
agagaugaaucccaaugug

SEQ ID NO: 638320 - RNA, 19 nt, Homo sapiens
  misc_RNA (1)...(19): siRNA sense strand
ucuuagggcuggugucaga

SEQ ID NO: 638321 - RNA, 19 nt, Homo sapiens
  misc_RNA (1)...(19): siRNA sense strand
cugguacauuugucaauuu

SEQ ID NO: 638322 - RNA, 19 nt, Homo sapiens
  misc_RNA (1)...(19): siRNA sense strand
gaagaagaagcagcaguuc

SEQ ID NO: 638323 - RNA, 19 nt, Homo sapiens
  misc_RNA (1)...(19): siRNA sense strand
guuacccucauuauucuua

SEQ ID NO: 638324 - RNA, 19 nt, Homo sapiens
  misc_RNA (1)...(19): siRNA sense strand
gacuuugaugccuauauua

SEQ ID NO: 638325 - RNA, 19 nt, Homo sapiens
  misc_RNA (1)...(19): siRNA sense strand
auuggacuguugcuuguua

SEQ ID NO: 638326 - RNA, 19 nt, Homo sapiens
  misc_RNA (1)...(19): siRNA sense strand
ggugcagacuacaucaaug

SEQ ID NO: 638327 - RNA, 19 nt, Homo sapiens
  misc_RNA (1)...(19): siRNA sense strand
gcagaucuuccacugaauc

SEQ ID NO: 638328 - RNA, 19 nt, Homo sapiens
  misc_RNA (1)...(19): siRNA sense strand
gacuggauaucccacacuu

SEQ ID NO: 638329 - RNA, 19 nt, Homo sapiens
  misc_RNA (1)...(19): siRNA sense strand
uuugaggaguugaaauuga

SEQ ID NO: 638330 - RNA, 19 nt, Homo sapiens
  misc_RNA (1)...(19): siRNA sense strand
gaaagcuuccauacaacug

SEQ ID NO: 638331 - RNA, 19 nt, Homo sapiens
  misc_RNA (1)...(19): siRNA sense strand
gaugucauauacgagaaug

SEQ ID NO: 638332 - RNA, 19 nt, Homo sapiens
  misc_RNA (1)...(19): siRNA sense strand
ccucauuauucuuaggaaa

SEQ ID NO: 638333 - RNA, 19 nt, Homo sapiens
  misc_RNA (1)...(19): siRNA sense strand
cgacagcaagcuaccaaga

SEQ ID NO: 638334 - RNA, 19 nt, Homo sapiens
  misc_RNA (1)...(19): siRNA sense strand
aagaugguccugcaacaaa

SEQ ID NO: 638335 - RNA, 19 nt, Homo sapiens
  misc_RNA (1)...(19): siRNA sense strand
gaucuuccacugaaucgau

SEQ ID NO: 638336 - RNA, 19 nt, Homo sapiens
  misc_RNA (1)...(19): siRNA sense strand
cuuguuacccucauuauuc

SEQ ID NO: 638337 - RNA, 19 nt, Homo sapiens
  misc_RNA (1)...(19): siRNA sense strand
cagaggagcaguacauuuu

SEQ ID NO: 638338 - RNA, 19 nt, Homo sapiens
  misc_RNA (1)...(19): siRNA sense strand
ggacaggaacauucauugc

SEQ ID NO: 638339 - RNA, 19 nt, Homo sapiens
  misc_RNA (1)...(19): siRNA sense strand
gaaggugcagacuacauca

SEQ ID NO: 638340 - RNA, 19 nt, Homo sapiens
  misc_RNA (1)...(19): siRNA sense strand
cauccuaccauaugacuuc

SEQ ID NO: 638341 - RNA, 19 nt, Homo sapiens
  misc_RNA (1)...(19): siRNA sense strand
cuguggagaugauuucaga

SEQ ID NO: 638342 - RNA, 19 nt, Homo sapiens
  misc_RNA (1)...(19): siRNA sense strand
gauuagucuccaugaauga

SEQ ID NO: 638343 - RNA, 19 nt, Homo sapiens
  misc_RNA (1)...(19): siRNA sense strand
agacagaggagcaguacau

SEQ ID NO: 638344 - RNA, 19 nt, Homo sapiens
  misc_RNA (1)...(19): siRNA sense strand
guagacacuuccggaucaa

SEQ ID NO: 638345 - RNA, 19 nt, Homo sapiens
  misc_RNA (1)...(19): siRNA sense strand
gugcaacugauguggauga

SEQ ID NO: 638346 - RNA, 19 nt, Homo sapiens
  misc_RNA (1)...(19): siRNA sense strand
acagaggagcaguacauuu

SEQ ID NO: 638347 - RNA, 19 nt, Homo sapiens
  misc_RNA (1)...(19): siRNA sense strand
cugacgagaugcaggaugu

SEQ ID NO: 638348 - RNA, 19 nt, Homo sapiens
  misc_RNA (1)...(19): siRNA sense strand
cuggauaucccacacuuug

SEQ ID NO: 638349 - RNA, 19 nt, Homo sapiens
  misc_RNA (1)...(19): siRNA sense strand
aaaggucccaugaucauuc

SEQ ID NO: 638350 - RNA, 19 nt, Homo sapiens
  misc_RNA (1)...(19): siRNA sense strand
caaaggucccaugaucauu

SEQ ID NO: 638351 - RNA, 19 nt, Homo sapiens
  misc_RNA (1)...(19): siRNA sense strand
ggacgacugggccuguaga

SEQ ID NO: 638352 - RNA, 19 nt, Homo sapiens
  misc_RNA (1)...(19): siRNA sense strand
cuccaugaaugaagaggaa

SEQ ID NO: 638353 - RNA, 19 nt, Homo sapiens
  misc_RNA (1)...(19): siRNA sense strand
uugaggaguugaaauugau

SEQ ID NO: 638354 - RNA, 19 nt, Homo sapiens
  misc_RNA (1)...(19): siRNA sense strand
ugacuucagccgugugaga

SEQ ID NO: 638355 - RNA, 19 nt, Homo sapiens
  misc_RNA (1)...(19): siRNA sense strand
aaauugauuggacuggaua

SEQ ID NO: 638356 - RNA, 19 nt, Homo sapiens
  misc_RNA (1)...(19): siRNA sense strand
gucauauacgagaauguua

SEQ ID NO: 638357 - RNA, 19 nt, Homo sapiens
  misc_RNA (1)...(19): siRNA sense strand
gugaugucauauacgagaa

SEQ ID NO: 638358 - RNA, 19 nt, Homo sapiens
  misc_RNA (1)...(19): siRNA sense strand
agaagaggaaacugacaaa

SEQ ID NO: 638359 - RNA, 19 nt, Homo sapiens
  misc_RNA (1)...(19): siRNA sense strand
gaaucccaaugugguagug

SEQ ID NO: 638360 - RNA, 19 nt, Homo sapiens
  misc_RNA (1)...(19): siRNA sense strand
ccacugaaucgauguaaaa

SEQ ID NO: 638361 - RNA, 19 nt, Homo sapiens
  misc_RNA (1)...(19): siRNA sense strand
gcaacaaaagucucagauu

SEQ ID NO: 638362 - RNA, 19 nt, Homo sapiens
  misc_RNA (1)...(19): siRNA sense strand
gcuuguuacccucauuauu

SEQ ID NO: 638363 - RNA, 19 nt, Homo sapiens
  misc_RNA (1)...(19): siRNA sense strand
cgagaugcaggaugugaug

SEQ ID NO: 638364 - RNA, 19 nt, Homo sapiens
  misc_RNA (1)...(19): siRNA sense strand
cacaaacauccuaccauau

SEQ ID NO: 638365 - RNA, 19 nt, Homo sapiens
  misc_RNA (1)...(19): siRNA sense strand
gugugcaacugauguggau

SEQ ID NO: 638366 - RNA, 19 nt, Homo sapiens
  misc_RNA (1)...(19): siRNA sense strand
gacagaggagcaguacauu

SEQ ID NO: 638367 - RNA, 19 nt, Homo sapiens
  misc_RNA (1)...(19): siRNA sense strand
ugucauauacgagaauguu

SEQ ID NO: 638368 - RNA, 19 nt, Homo sapiens
  misc_RNA (1)...(19): siRNA sense strand
caaagacucugacuauaaa

SEQ ID NO: 638369 - RNA, 19 nt, Homo sapiens
  misc_RNA (1)...(19): siRNA sense strand
caacaaaagucucagauua

SEQ ID NO: 638370 - RNA, 19 nt, Homo sapiens
  misc_RNA (1)...(19): siRNA sense strand
gaaaguauccugcaguuug

SEQ ID NO: 638371 - RNA, 19 nt, Homo sapiens
  misc_RNA (1)...(19): siRNA sense strand
acacaaacauccuaccaua

SEQ ID NO: 638372 - RNA, 19 nt, Homo sapiens
  misc_RNA (1)...(19): siRNA sense strand
caacugauguggaugaaga

SEQ ID NO: 638373 - RNA, 19 nt, Homo sapiens
  misc_RNA (1)...(19): siRNA sense strand
gagcaaaggucccaugauc

SEQ ID NO: 638374 - RNA, 19 nt, Homo sapiens
  misc_RNA (1)...(19): siRNA sense strand
ccaacuauauuccuggaua

SEQ ID NO: 638375 - RNA, 19 nt, Homo sapiens
  misc_RNA (1)...(19): siRNA sense strand
ccaaagacucugacuauaa

SEQ ID NO: 638376 - RNA, 19 nt, Homo sapiens
  misc_RNA (1)...(19): siRNA sense strand
caacuaugcugacgagaug

SEQ ID NO: 638377 - RNA, 19 nt, Homo sapiens
  misc_RNA (1)...(19): siRNA sense strand
guguggagcugguacauuu

SEQ ID NO: 638378 - RNA, 19 nt, Homo sapiens
  misc_RNA (1)...(19): siRNA sense strand
gaaauugauuggacuggau

SEQ ID NO: 638379 - RNA, 19 nt, Homo sapiens
  misc_RNA (1)...(19): siRNA sense strand
ggagaugauuucagaggaa

SEQ ID NO: 638380 - RNA, 19 nt, Homo sapiens
  misc_RNA (1)...(19): siRNA sense strand
caaacauccuaccauauga

SEQ ID NO: 638381 - RNA, 19 nt, Homo sapiens
  misc_RNA (1)...(19): siRNA sense strand
aaaggagggugaaauguga

SEQ ID NO: 638382 - RNA, 19 nt, Homo sapiens
  misc_RNA (1)...(19): siRNA sense strand
cuacaucaaugccaacuau

SEQ ID NO: 638383 - RNA, 19 nt, Homo sapiens
  misc_RNA (1)...(19): siRNA sense strand
uuaaggauauggccaaaga

SEQ ID NO: 638384 - RNA, 19 nt, Homo sapiens
  misc_RNA (1)...(19): siRNA sense strand
gccaaagacucugacuaua

SEQ ID NO: 638385 - RNA, 19 nt, Homo sapiens
  misc_RNA (1)...(19): siRNA sense strand
ugacuuugaugccuauauu

SEQ ID NO: 638386 - RNA, 19 nt, Homo sapiens
  misc_RNA (1)...(19): siRNA sense strand
gcagauggcuagggagugu

SEQ ID NO: 638387 - RNA, 19 nt, Homo sapiens
  misc_RNA (1)...(19): siRNA sense strand
ggucauaccggaugucuau

SEQ ID NO: 638388 - RNA, 19 nt, Homo sapiens
  misc_RNA (1)...(19): siRNA sense strand
ggaagaugguccugcaaca

SEQ ID NO: 638389 - RNA, 19 nt, Homo sapiens
  misc_RNA (1)...(19): siRNA sense strand
cagaaaguauccugcaguu

SEQ ID NO: 638390 - RNA, 19 nt, Homo sapiens
  misc_RNA (1)...(19): siRNA sense strand
gaccauuacuggccauuca

SEQ ID NO: 638391 - RNA, 19 nt, Homo sapiens
  misc_RNA (1)...(19): siRNA sense strand
ggccaaagacucugacuau

SEQ ID NO: 638392 - RNA, 19 nt, Homo sapiens
  misc_RNA (1)...(19): siRNA sense strand
gcugguacauuugucaauu

SEQ ID NO: 638393 - RNA, 19 nt, Homo sapiens
  misc_RNA (1)...(19): siRNA sense strand
ugauguggaugaagaagaa

SEQ ID NO: 638394 - RNA, 19 nt, Homo sapiens
  misc_RNA (1)...(19): siRNA sense strand
gcaaaggucccaugaucau

SEQ ID NO: 638395 - RNA, 19 nt, Homo sapiens
  misc_RNA (1)...(19): siRNA sense strand
ucagugaugucauauacga

SEQ ID NO: 638396 - RNA, 19 nt, Homo sapiens
  misc_RNA (1)...(19): siRNA sense strand
cugcagaucuuccacugaa

SEQ ID NO: 638397 - RNA, 19 nt, Homo sapiens
  misc_RNA (1)...(19): siRNA sense strand
gggcuggugucagaaauga

SEQ ID NO: 638398 - RNA, 19 nt, Homo sapiens
  misc_RNA (1)...(19): siRNA sense strand
gcaaaugcugcagaaagua

SEQ ID NO: 638399 - RNA, 19 nt, Homo sapiens
  misc_RNA (1)...(19): siRNA sense strand
ggacggacaggaacauuca

SEQ ID NO: 638400 - RNA, 19 nt, Homo sapiens
  misc_RNA (1)...(19): siRNA sense strand
acaaacauccuaccauaug

SEQ ID NO: 638401 - RNA, 19 nt, Homo sapiens
  misc_RNA (1)...(19): siRNA sense strand
caucaaugccaacuauauu

SEQ ID NO: 638402 - RNA, 19 nt, Homo sapiens
  misc_RNA (1)...(19): siRNA sense strand
acacuuugcugcagaucuu

SEQ ID NO: 638403 - RNA, 19 nt, Homo sapiens
  misc_RNA (1)...(19): siRNA sense strand
gaagaugguccugcaacaa

SEQ ID NO: 638404 - RNA, 19 nt, Homo sapiens
  misc_RNA (1)...(19): siRNA sense strand
uaauuggacuguugcuugu

SEQ ID NO: 638405 - RNA, 19 nt, Homo sapiens
  misc_RNA (1)...(19): siRNA sense strand
agagagggauggaaagcuu

SEQ ID NO: 638406 - RNA, 19 nt, Homo sapiens
  misc_RNA (1)...(19): siRNA sense strand
gaugaaucccaauguggua

SEQ ID NO: 638407 - RNA, 19 nt, Homo sapiens
  misc_RNA (1)...(19): siRNA sense strand
cuucagccgugugagauua

SEQ ID NO: 638408 - RNA, 19 nt, Homo sapiens
  misc_RNA (1)...(19): siRNA sense strand
uuaaagaagaggaaacuga

SEQ ID NO: 638409 - RNA, 19 nt, Homo sapiens
  misc_RNA (1)...(19): siRNA sense strand
ggaugacuuugaugccuau

SEQ ID NO: 638410 - RNA, 19 nt, Homo sapiens
  misc_RNA (1)...(19): siRNA sense strand
aaaguauccugcaguuugu

SEQ ID NO: 638411 - RNA, 19 nt, Homo sapiens
  misc_RNA (1)...(19): siRNA sense strand
caaaugcugcagaaaguau

SEQ ID NO: 638412 - RNA, 19 nt, Homo sapiens
  misc_RNA (1)...(19): siRNA sense strand
ugaagaagaagcagcaguu

SEQ ID NO: 638413 - RNA, 19 nt, Homo sapiens
  misc_RNA (1)...(19): siRNA sense strand
agauuagucuccaugaaug

SEQ ID NO: 638414 - RNA, 19 nt, Homo sapiens
  misc_RNA (1)...(19): siRNA sense strand
agaggaaggugcagacuac

SEQ ID NO: 638415 - RNA, 19 nt, Homo sapiens
  misc_RNA (1)...(19): siRNA sense strand
uguagacacuuccggauca

SEQ ID NO: 638416 - RNA, 19 nt, Homo sapiens
  misc_RNA (1)...(19): siRNA sense strand
ggaaggugcagacuacauc

SEQ ID NO: 638417 - RNA, 19 nt, Homo sapiens
  misc_RNA (1)...(19): siRNA sense strand
ggauauggccaaagacucu

SEQ ID NO: 638418 - RNA, 19 nt, Homo sapiens
  misc_RNA (1)...(19): siRNA sense strand
caacuauauuccuggauac

SEQ ID NO: 638419 - RNA, 19 nt, Homo sapiens
  misc_RNA (1)...(19): siRNA sense strand
agagaugaaucccaaugug

SEQ ID NO: 638420 - RNA, 19 nt, Homo sapiens
  misc_RNA (1)...(19): siRNA sense strand
ucuuagggcuggugucaga

SEQ ID NO: 638421 - RNA, 19 nt, Homo sapiens
  misc_RNA (1)...(19): siRNA sense strand
cugguacauuugucaauuu

SEQ ID NO: 638422 - RNA, 19 nt, Homo sapiens
  misc_RNA (1)...(19): siRNA sense strand
gaagaagaagcagcaguuc

SEQ ID NO: 638423 - RNA, 19 nt, Homo sapiens
  misc_RNA (1)...(19): siRNA sense strand
guuacccucauuauucuua

SEQ ID NO: 638424 - RNA, 19 nt, Homo sapiens
  misc_RNA (1)...(19): siRNA sense strand
gacuuugaugccuauauua

SEQ ID NO: 638425 - RNA, 19 nt, Homo sapiens
  misc_RNA (1)...(19): siRNA sense strand
auuggacuguugcuuguua

SEQ ID NO: 638426 - RNA, 19 nt, Homo sapiens
  misc_RNA (1)...(19): siRNA sense strand
ggugcagacuacaucaaug

SEQ ID NO: 638427 - RNA, 19 nt, Homo sapiens
  misc_RNA (1)...(19): siRNA sense strand
gcagaucuuccacugaauc

SEQ ID NO: 638428 - RNA, 19 nt, Homo sapiens
  misc_RNA (1)...(19): siRNA sense strand
gacuggauaucccacacuu

SEQ ID NO: 638429 - RNA, 19 nt, Homo sapiens
  misc_RNA (1)...(19): siRNA sense strand
uuugaggaguugaaauuga

SEQ ID NO: 638430 - RNA, 19 nt, Homo sapiens
  misc_RNA (1)...(19): siRNA sense strand
gaaagcuuccauacaacug

SEQ ID NO: 638431 - RNA, 19 nt, Homo sapiens
  misc_RNA (1)...(19): siRNA sense strand
gaugucauauacgagaaug

SEQ ID NO: 638432 - RNA, 19 nt, Homo sapiens
  misc_RNA (1)...(19): siRNA sense strand
ccucauuauucuuaggaaa

SEQ ID NO: 638433 - RNA, 19 nt, Homo sapiens
  misc_RNA (1)...(19): siRNA sense strand
cgacagcaagcuaccaaga

SEQ ID NO: 638434 - RNA, 19 nt, Homo sapiens
  misc_RNA (1)...(19): siRNA sense strand
aagaugguccugcaacaaa

SEQ ID NO: 638435 - RNA, 19 nt, Homo sapiens
  misc_RNA (1)...(19): siRNA sense strand
gaucuuccacugaaucgau

SEQ ID NO: 638436 - RNA, 19 nt, Homo sapiens
  misc_RNA (1)...(19): siRNA sense strand
cuuguuacccucauuauuc

SEQ ID NO: 638437 - RNA, 19 nt, Homo sapiens
  misc_RNA (1)...(19): siRNA sense strand
cagaggagcaguacauuuu

SEQ ID NO: 638438 - RNA, 19 nt, Homo sapiens
  misc_RNA (1)...(19): siRNA sense strand
ggacaggaacauucauugc

SEQ ID NO: 638439 - RNA, 19 nt, Homo sapiens
  misc_RNA (1)...(19): siRNA sense strand
gaaggugcagacuacauca

SEQ ID NO: 638440 - RNA, 19 nt, Homo sapiens
  misc_RNA (1)...(19): siRNA sense strand
cauccuaccauaugacuuc

SEQ ID NO: 638441 - RNA, 19 nt, Homo sapiens
  misc_RNA (1)...(19): siRNA sense strand
cuguggagaugauuucaga

SEQ ID NO: 638442 - RNA, 19 nt, Homo sapiens
  misc_RNA (1)...(19): siRNA sense strand
gauuagucuccaugaauga

SEQ ID NO: 638443 - RNA, 19 nt, Homo sapiens
  misc_RNA (1)...(19): siRNA sense strand
agacagaggagcaguacau

SEQ ID NO: 638444 - RNA, 19 nt, Homo sapiens
  misc_RNA (1)...(19): siRNA sense strand
guagacacuuccggaucaa

SEQ ID NO: 638445 - RNA, 19 nt, Homo sapiens
  misc_RNA (1)...(19): siRNA sense strand
gugcaacugauguggauga

SEQ ID NO: 638446 - RNA, 19 nt, Homo sapiens
  misc_RNA (1)...(19): siRNA sense strand
acagaggagcaguacauuu

SEQ ID NO: 638447 - RNA, 19 nt, Homo sapiens
  misc_RNA (1)...(19): siRNA sense strand
cugacgagaugcaggaugu

SEQ ID NO: 638448 - RNA, 19 nt, Homo sapiens
  misc_RNA (1)...(19): siRNA sense strand
cuggauaucccacacuuug

SEQ ID NO: 638449 - RNA, 19 nt, Homo sapiens
  misc_RNA (1)...(19): siRNA sense strand
aaaggucccaugaucauuc

SEQ ID NO: 638450 - RNA, 19 nt, Homo sapiens
  misc_RNA (1)...(19): siRNA sense strand
caaaggucccaugaucauu

SEQ ID NO: 638451 - RNA, 19 nt, Homo sapiens
  misc_RNA (1)...(19): siRNA sense strand
ggacgacugggccuguaga

SEQ ID NO: 638452 - RNA, 19 nt, Homo sapiens
  misc_RNA (1)...(19): siRNA sense strand
cuccaugaaugaagaggaa

SEQ ID NO: 638453 - RNA, 19 nt, Homo sapiens
  misc_RNA (1)...(19): siRNA sense strand
uugaggaguugaaauugau

SEQ ID NO: 638454 - RNA, 19 nt, Homo sapiens
  misc_RNA (1)...(19): siRNA sense strand
ugacuucagccgugugaga

SEQ ID NO: 638455 - RNA, 19 nt, Homo sapiens
  misc_RNA (1)...(19): siRNA sense strand
aaauugauuggacuggaua

SEQ ID NO: 638456 - RNA, 19 nt, Homo sapiens
  misc_RNA (1)...(19): siRNA sense strand
gucauauacgagaauguua

SEQ ID NO: 638457 - RNA, 19 nt, Homo sapiens
  misc_RNA (1)...(19): siRNA sense strand
gugaugucauauacgagaa

SEQ ID NO: 638458 - RNA, 19 nt, Homo sapiens
  misc_RNA (1)...(19): siRNA sense strand
agaagaggaaacugacaaa

SEQ ID NO: 638459 - RNA, 19 nt, Homo sapiens
  misc_RNA (1)...(19): siRNA sense strand
gaaucccaaugugguagug

SEQ ID NO: 638460 - RNA, 19 nt, Homo sapiens
  misc_RNA (1)...(19): siRNA sense strand
ccacugaaucgauguaaaa

SEQ ID NO: 638461 - RNA, 19 nt, Homo sapiens
  misc_RNA (1)...(19): siRNA sense strand
gcaacaaaagucucagauu

SEQ ID NO: 638462 - RNA, 19 nt, Homo sapiens
  misc_RNA (1)...(19): siRNA sense strand
gcuuguuacccucauuauu

SEQ ID NO: 638463 - RNA, 19 nt, Homo sapiens
  misc_RNA (1)...(19): siRNA sense strand
cgagaugcaggaugugaug

SEQ ID NO: 638464 - RNA, 19 nt, Homo sapiens
  misc_RNA (1)...(19): siRNA sense strand
cacaaacauccuaccauau

SEQ ID NO: 638465 - RNA, 19 nt, Homo sapiens
  misc_RNA (1)...(19): siRNA sense strand
gugugcaacugauguggau

SEQ ID NO: 638466 - RNA, 19 nt, Homo sapiens
  misc_RNA (1)...(19): siRNA sense strand
gacagaggagcaguacauu

SEQ ID NO: 638467 - RNA, 19 nt, Homo sapiens
  misc_RNA (1)...(19): siRNA sense strand
ugucauauacgagaauguu

SEQ ID NO: 638468 - RNA, 19 nt, Homo sapiens
  misc_RNA (1)...(19): siRNA sense strand
caaagacucugacuauaaa

SEQ ID NO: 638469 - RNA, 19 nt, Homo sapiens
  misc_RNA (1)...(19): siRNA sense strand
caacaaaagucucagauua

SEQ ID NO: 638470 - RNA, 19 nt, Homo sapiens
  misc_RNA (1)...(19): siRNA sense strand
gaaaguauccugcaguuug

SEQ ID NO: 638471 - RNA, 19 nt, Homo sapiens
  misc_RNA (1)...(19): siRNA sense strand
acacaaacauccuaccaua

SEQ ID NO: 638472 - RNA, 19 nt, Homo sapiens
  misc_RNA (1)...(19): siRNA sense strand
caacugauguggaugaaga

SEQ ID NO: 638473 - RNA, 19 nt, Homo sapiens
  misc_RNA (1)...(19): siRNA sense strand
gagcaaaggucccaugauc

SEQ ID NO: 638474 - RNA, 19 nt, Homo sapiens
  misc_RNA (1)...(19): siRNA sense strand
ccaacuauauuccuggaua

SEQ ID NO: 638475 - RNA, 19 nt, Homo sapiens
  misc_RNA (1)...(19): siRNA sense strand
ccaaagacucugacuauaa

SEQ ID NO: 638476 - RNA, 19 nt, Homo sapiens
  misc_RNA (1)...(19): siRNA sense strand
caacuaugcugacgagaug

SEQ ID NO: 638477 - RNA, 19 nt, Homo sapiens
  misc_RNA (1)...(19): siRNA sense strand
guguggagcugguacauuu

SEQ ID NO: 638478 - RNA, 19 nt, Homo sapiens
  misc_RNA (1)...(19): siRNA sense strand
gaaauugauuggacuggau

SEQ ID NO: 638479 - RNA, 19 nt, Homo sapiens
  misc_RNA (1)...(19): siRNA sense strand
ggagaugauuucagaggaa

SEQ ID NO: 638480 - RNA, 19 nt, Homo sapiens
  misc_RNA (1)...(19): siRNA sense strand
caaacauccuaccauauga

SEQ ID NO: 638481 - RNA, 19 nt, Homo sapiens
  misc_RNA (1)...(19): siRNA sense strand
aaaggagggugaaauguga

SEQ ID NO: 638482 - RNA, 19 nt, Homo sapiens
  misc_RNA (1)...(19): siRNA sense strand
cuacaucaaugccaacuau

SEQ ID NO: 638483 - RNA, 19 nt, Homo sapiens
  misc_RNA (1)...(19): siRNA sense strand
uuaaggauauggccaaaga

SEQ ID NO: 638484 - RNA, 19 nt, Homo sapiens
  misc_RNA (1)...(19): siRNA sense strand
gccaaagacucugacuaua

SEQ ID NO: 638485 - RNA, 19 nt, Homo sapiens
  misc_RNA (1)...(19): siRNA sense strand
ugacuuugaugccuauauu

SEQ ID NO: 638486 - RNA, 19 nt, Homo sapiens
  misc_RNA (1)...(19): siRNA sense strand
gcagauggcuagggagugu

SEQ ID NO: 638487 - RNA, 19 nt, Homo sapiens
  misc_RNA (1)...(19): siRNA sense strand
ggucauaccggaugucuau

SEQ ID NO: 638488 - RNA, 19 nt, Homo sapiens
  misc_RNA (1)...(19): siRNA sense strand
ggaagaugguccugcaaca

SEQ ID NO: 638489 - RNA, 19 nt, Homo sapiens
  misc_RNA (1)...(19): siRNA sense strand
cagaaaguauccugcaguu

SEQ ID NO: 638490 - RNA, 19 nt, Homo sapiens
  misc_RNA (1)...(19): siRNA sense strand
gaccauuacuggccauuca

SEQ ID NO: 638491 - RNA, 19 nt, Homo sapiens
  misc_RNA (1)...(19): siRNA sense strand
ggccaaagacucugacuau

SEQ ID NO: 638492 - RNA, 19 nt, Homo sapiens
  misc_RNA (1)...(19): siRNA sense strand
gcugguacauuugucaauu

SEQ ID NO: 638493 - RNA, 19 nt, Homo sapiens
  misc_RNA (1)...(19): siRNA sense strand
ugauguggaugaagaagaa

SEQ ID NO: 638494 - RNA, 19 nt, Homo sapiens
  misc_RNA (1)...(19): siRNA sense strand
gcaaaggucccaugaucau

SEQ ID NO: 638495 - RNA, 19 nt, Homo sapiens
  misc_RNA (1)...(19): siRNA sense strand
ucagugaugucauauacga

SEQ ID NO: 638496 - RNA, 19 nt, Homo sapiens
  misc_RNA (1)...(19): siRNA sense strand
cugcagaucuuccacugaa

SEQ ID NO: 638497 - RNA, 19 nt, Homo sapiens
  misc_RNA (1)...(19): siRNA sense strand
gggcuggugucagaaauga

SEQ ID NO: 638498 - RNA, 19 nt, Homo sapiens
  misc_RNA (1)...(19): siRNA sense strand
gcaaaugcugcagaaagua

SEQ ID NO: 638499 - RNA, 19 nt, Homo sapiens
  misc_RNA (1)...(19): siRNA sense strand
ggacggacaggaacauuca

SEQ ID NO: 638500 - RNA, 19 nt, Homo sapiens
  misc_RNA (1)...(19): siRNA sense strand
acaaacauccuaccauaug

SEQ ID NO: 638501 - RNA, 19 nt, Homo sapiens
  misc_RNA (1)...(19): siRNA sense strand
caucaaugccaacuauauu

SEQ ID NO: 638502 - RNA, 19 nt, Homo sapiens
  misc_RNA (1)...(19): siRNA sense strand
acacuuugcugcagaucuu

SEQ ID NO: 638503 - RNA, 19 nt, Homo sapiens
  misc_RNA (1)...(19): siRNA sense strand
gaagaugguccugcaacaa

SEQ ID NO: 638504 - RNA, 19 nt, Homo sapiens
  misc_RNA (1)...(19): siRNA sense strand
uaauuggacuguugcuugu

SEQ ID NO: 638505 - RNA, 19 nt, Homo sapiens
  misc_RNA (1)...(19): siRNA sense strand
agagagggauggaaagcuu

SEQ ID NO: 638506 - RNA, 19 nt, Homo sapiens
  misc_RNA (1)...(19): siRNA sense strand
gaugaaucccaauguggua

SEQ ID NO: 638507 - RNA, 19 nt, Homo sapiens
  misc_RNA (1)...(19): siRNA sense strand
cuucagccgugugagauua

SEQ ID NO: 638508 - RNA, 19 nt, Homo sapiens
  misc_RNA (1)...(19): siRNA sense strand
uuaaagaagaggaaacuga

SEQ ID NO: 638509 - RNA, 19 nt, Homo sapiens
  misc_RNA (1)...(19): siRNA sense strand
ggaugacuuugaugccuau

SEQ ID NO: 638510 - RNA, 19 nt, Homo sapiens
  misc_RNA (1)...(19): siRNA sense strand
aaaguauccugcaguuugu

SEQ ID NO: 638511 - RNA, 19 nt, Homo sapiens
  misc_RNA (1)...(19): siRNA sense strand
caaaugcugcagaaaguau

SEQ ID NO: 638512 - RNA, 19 nt, Homo sapiens
  misc_RNA (1)...(19): siRNA sense strand
ugaagaagaagcagcaguu

SEQ ID NO: 638513 - RNA, 19 nt, Homo sapiens
  misc_RNA (1)...(19): siRNA sense strand
agauuagucuccaugaaug

SEQ ID NO: 638514 - RNA, 19 nt, Homo sapiens
  misc_RNA (1)...(19): siRNA sense strand
agaggaaggugcagacuac

SEQ ID NO: 638515 - RNA, 19 nt, Homo sapiens
  misc_RNA (1)...(19): siRNA sense strand
uguagacacuuccggauca

SEQ ID NO: 638516 - RNA, 19 nt, Homo sapiens
  misc_RNA (1)...(19): siRNA sense strand
ggaaggugcagacuacauc

SEQ ID NO: 638517 - RNA, 19 nt, Homo sapiens
  misc_RNA (1)...(19): siRNA sense strand
ggauauggccaaagacucu

SEQ ID NO: 638518 - RNA, 19 nt, Homo sapiens
  misc_RNA (1)...(19): siRNA sense strand
caacuauauuccuggauac

SEQ ID NO: 638519 - RNA, 19 nt, Homo sapiens
  misc_RNA (1)...(19): siRNA sense strand
agagaugaaucccaaugug

SEQ ID NO: 638520 - RNA, 19 nt, Homo sapiens
  misc_RNA (1)...(19): siRNA sense strand
ucuuagggcuggugucaga

SEQ ID NO: 638521 - RNA, 19 nt, Homo sapiens
  misc_RNA (1)...(19): siRNA sense strand
cugguacauuugucaauuu

SEQ ID NO: 638522 - RNA, 19 nt, Homo sapiens
  misc_RNA (1)...(19): siRNA sense strand
gaagaagaagcagcaguuc

SEQ ID NO: 638523 - RNA, 19 nt, Homo sapiens
  misc_RNA (1)...(19): siRNA sense strand
guuacccucauuauucuua

SEQ ID NO: 638524 - RNA, 19 nt, Homo sapiens
  misc_RNA (1)...(19): siRNA sense strand
gacuuugaugccuauauua

SEQ ID NO: 638525 - RNA, 19 nt, Homo sapiens
  misc_RNA (1)...(19): siRNA sense strand
auuggacuguugcuuguua

SEQ ID NO: 638526 - RNA, 19 nt, Homo sapiens
  misc_RNA (1)...(19): siRNA sense strand
ggugcagacuacaucaaug

SEQ ID NO: 638527 - RNA, 19 nt, Homo sapiens
  misc_RNA (1)...(19): siRNA sense strand
gcagaucuuccacugaauc

SEQ ID NO: 638528 - RNA, 19 nt, Homo sapiens
  misc_RNA (1)...(19): siRNA sense strand
gacuggauaucccacacuu

SEQ ID NO: 638529 - RNA, 19 nt, Homo sapiens
  misc_RNA (1)...(19): siRNA sense strand
uuugaggaguugaaauuga

SEQ ID NO: 638530 - RNA, 19 nt, Homo sapiens
  misc_RNA (1)...(19): siRNA sense strand
gaaagcuuccauacaacug

SEQ ID NO: 638531 - RNA, 19 nt, Homo sapiens
  misc_RNA (1)...(19): siRNA sense strand
gaugucauauacgagaaug

SEQ ID NO: 638532 - RNA, 19 nt, Homo sapiens
  misc_RNA (1)...(19): siRNA sense strand
ccucauuauucuuaggaaa

SEQ ID NO: 638533 - RNA, 19 nt, Homo sapiens
  misc_RNA (1)...(19): siRNA sense strand
cgacagcaagcuaccaaga

SEQ ID NO: 638534 - RNA, 19 nt, Homo sapiens
  misc_RNA (1)...(19): siRNA sense strand
aagaugguccugcaacaaa

SEQ ID NO: 638535 - RNA, 19 nt, Homo sapiens
  misc_RNA (1)...(19): siRNA sense strand
gaucuuccacugaaucgau

SEQ ID NO: 638536 - RNA, 19 nt, Homo sapiens
  misc_RNA (1)...(19): siRNA sense strand
cuuguuacccucauuauuc

SEQ ID NO: 638537 - RNA, 19 nt, Homo sapiens
  misc_RNA (1)...(19): siRNA sense strand
cagaggagcaguacauuuu

SEQ ID NO: 638538 - RNA, 19 nt, Homo sapiens
  misc_RNA (1)...(19): siRNA sense strand
ggacaggaacauucauugc

SEQ ID NO: 638539 - RNA, 19 nt, Homo sapiens
  misc_RNA (1)...(19): siRNA sense strand
gaaggugcagacuacauca

SEQ ID NO: 638540 - RNA, 19 nt, Homo sapiens
  misc_RNA (1)...(19): siRNA sense strand
cauccuaccauaugacuuc

SEQ ID NO: 638541 - RNA, 19 nt, Homo sapiens
  misc_RNA (1)...(19): siRNA sense strand
cuguggagaugauuucaga

SEQ ID NO: 638542 - RNA, 19 nt, Homo sapiens
  misc_RNA (1)...(19): siRNA sense strand
gauuagucuccaugaauga

SEQ ID NO: 638543 - RNA, 19 nt, Homo sapiens
  misc_RNA (1)...(19): siRNA sense strand
agacagaggagcaguacau

SEQ ID NO: 638544 - RNA, 19 nt, Homo sapiens
  misc_RNA (1)...(19): siRNA sense strand
guagacacuuccggaucaa

SEQ ID NO: 638545 - RNA, 19 nt, Homo sapiens
  misc_RNA (1)...(19): siRNA sense strand
gugcaacugauguggauga

SEQ ID NO: 638546 - RNA, 19 nt, Homo sapiens
  misc_RNA (1)...(19): siRNA sense strand
acagaggagcaguacauuu

SEQ ID NO: 638547 - RNA, 19 nt, Homo sapiens
  misc_RNA (1)...(19): siRNA sense strand
cugacgagaugcaggaugu

SEQ ID NO: 638548 - RNA, 19 nt, Homo sapiens
  misc_RNA (1)...(19): siRNA sense strand
cuggauaucccacacuuug

SEQ ID NO: 638549 - RNA, 19 nt, Homo sapiens
  misc_RNA (1)...(19): siRNA sense strand
aaaggucccaugaucauuc

SEQ ID NO: 638550 - RNA, 19 nt, Homo sapiens
  misc_RNA (1)...(19): siRNA sense strand
caaaggucccaugaucauu

SEQ ID NO: 638551 - RNA, 19 nt, Homo sapiens
  misc_RNA (1)...(19): siRNA sense strand
ggacgacugggccuguaga

SEQ ID NO: 638552 - RNA, 19 nt, Homo sapiens
  misc_RNA (1)...(19): siRNA sense strand
cuccaugaaugaagaggaa

SEQ ID NO: 638553 - RNA, 19 nt, Homo sapiens
  misc_RNA (1)...(19): siRNA sense strand
uugaggaguugaaauugau

SEQ ID NO: 638554 - RNA, 19 nt, Homo sapiens
  misc_RNA (1)...(19): siRNA sense strand
ugacuucagccgugugaga

SEQ ID NO: 638555 - RNA, 19 nt, Homo sapiens
  misc_RNA (1)...(19): siRNA sense strand
aaauugauuggacuggaua

SEQ ID NO: 638556 - RNA, 19 nt, Homo sapiens
  misc_RNA (1)...(19): siRNA sense strand
gucauauacgagaauguua

SEQ ID NO: 638557 - RNA, 19 nt, Homo sapiens
  misc_RNA (1)...(19): siRNA sense strand
gugaugucauauacgagaa

SEQ ID NO: 638558 - RNA, 19 nt, Homo sapiens
  misc_RNA (1)...(19): siRNA sense strand
agaagaggaaacugacaaa

SEQ ID NO: 638559 - RNA, 19 nt, Homo sapiens
  misc_RNA (1)...(19): siRNA sense strand
gaaucccaaugugguagug

SEQ ID NO: 638560 - RNA, 19 nt, Homo sapiens
  misc_RNA (1)...(19): siRNA sense strand
ccacugaaucgauguaaaa

SEQ ID NO: 638561 - RNA, 19 nt, Homo sapiens
  misc_RNA (1)...(19): siRNA sense strand
gcaacaaaagucucagauu

SEQ ID NO: 638562 - RNA, 19 nt, Homo sapiens
  misc_RNA (1)...(19): siRNA sense strand
gcuuguuacccucauuauu

SEQ ID NO: 638563 - RNA, 19 nt, Homo sapiens
  misc_RNA (1)...(19): siRNA sense strand
cgagaugcaggaugugaug

SEQ ID NO: 638564 - RNA, 19 nt, Homo sapiens
  misc_RNA (1)...(19): siRNA sense strand
cacaaacauccuaccauau

SEQ ID NO: 638565 - RNA, 19 nt, Homo sapiens
  misc_RNA (1)...(19): siRNA sense strand
gugugcaacugauguggau

SEQ ID NO: 638566 - RNA, 19 nt, Homo sapiens
  misc_RNA (1)...(19): siRNA sense strand
gacagaggagcaguacauu

SEQ ID NO: 638567 - RNA, 19 nt, Homo sapiens
  misc_RNA (1)...(19): siRNA sense strand
ugucauauacgagaauguu

SEQ ID NO: 638568 - RNA, 19 nt, Homo sapiens
  misc_RNA (1)...(19): siRNA sense strand
caaagacucugacuauaaa

SEQ ID NO: 638569 - RNA, 19 nt, Homo sapiens
  misc_RNA (1)...(19): siRNA sense strand
caacaaaagucucagauua

SEQ ID NO: 638570 - RNA, 19 nt, Homo sapiens
  misc_RNA (1)...(19): siRNA sense strand
gaaaguauccugcaguuug

SEQ ID NO: 638571 - RNA, 19 nt, Homo sapiens
  misc_RNA (1)...(19): siRNA sense strand
acacaaacauccuaccaua

SEQ ID NO: 638572 - RNA, 19 nt, Homo sapiens
  misc_RNA (1)...(19): siRNA sense strand
caacugauguggaugaaga

SEQ ID NO: 638573 - RNA, 19 nt, Homo sapiens
  misc_RNA (1)...(19): siRNA sense strand
gagcaaaggucccaugauc

SEQ ID NO: 638574 - RNA, 19 nt, Homo sapiens
  misc_RNA (1)...(19): siRNA sense strand
ccaacuauauuccuggaua

SEQ ID NO: 638575 - RNA, 19 nt, Homo sapiens
  misc_RNA (1)...(19): siRNA sense strand
ccaaagacucugacuauaa

SEQ ID NO: 638576 - RNA, 19 nt, Homo sapiens
  misc_RNA (1)...(19): siRNA sense strand
caacuaugcugacgagaug

SEQ ID NO: 638577 - RNA, 19 nt, Homo sapiens
  misc_RNA (1)...(19): siRNA sense strand
guguggagcugguacauuu

SEQ ID NO: 638578 - RNA, 19 nt, Homo sapiens
  misc_RNA (1)...(19): siRNA sense strand
gaaauugauuggacuggau

SEQ ID NO: 638579 - RNA, 19 nt, Homo sapiens
  misc_RNA (1)...(19): siRNA sense strand
ggagaugauuucagaggaa

SEQ ID NO: 638580 - RNA, 19 nt, Homo sapiens
  misc_RNA (1)...(19): siRNA sense strand
caaacauccuaccauauga

SEQ ID NO: 638581 - RNA, 19 nt, Homo sapiens
  misc_RNA (1)...(19): siRNA sense strand
aaaggagggugaaauguga

SEQ ID NO: 638582 - RNA, 19 nt, Homo sapiens
  misc_RNA (1)...(19): siRNA sense strand
cuacaucaaugccaacuau

SEQ ID NO: 638583 - RNA, 19 nt, Homo sapiens
  misc_RNA (1)...(19): siRNA sense strand
uuaaggauauggccaaaga

SEQ ID NO: 638584 - RNA, 19 nt, Homo sapiens
  misc_RNA (1)...(19): siRNA sense strand
gccaaagacucugacuaua

SEQ ID NO: 638585 - RNA, 19 nt, Homo sapiens
  misc_RNA (1)...(19): siRNA sense strand
ugacuuugaugccuauauu

SEQ ID NO: 638586 - RNA, 19 nt, Homo sapiens
  misc_RNA (1)...(19): siRNA sense strand
gcagauggcuagggagugu

SEQ ID NO: 638587 - RNA, 19 nt, Homo sapiens
  misc_RNA (1)...(19): siRNA sense strand
ggucauaccggaugucuau

SEQ ID NO: 638588 - RNA, 19 nt, Homo sapiens
  misc_RNA (1)...(19): siRNA sense strand
ggaagaugguccugcaaca

SEQ ID NO: 638589 - RNA, 19 nt, Homo sapiens
  misc_RNA (1)...(19): siRNA sense strand
cagaaaguauccugcaguu

SEQ ID NO: 638590 - RNA, 19 nt, Homo sapiens
  misc_RNA (1)...(19): siRNA sense strand
gaccauuacuggccauuca

SEQ ID NO: 638591 - RNA, 19 nt, Homo sapiens
  misc_RNA (1)...(19): siRNA sense strand
ggccaaagacucugacuau

SEQ ID NO: 638592 - RNA, 19 nt, Homo sapiens
  misc_RNA (1)...(19): siRNA sense strand
gcugguacauuugucaauu

SEQ ID NO: 638593 - RNA, 19 nt, Homo sapiens
  misc_RNA (1)...(19): siRNA sense strand
ugauguggaugaagaagaa

SEQ ID NO: 638594 - RNA, 19 nt, Homo sapiens
  misc_RNA (1)...(19): siRNA sense strand
gcaaaggucccaugaucau

SEQ ID NO: 638595 - RNA, 19 nt, Homo sapiens
  misc_RNA (1)...(19): siRNA sense strand
ucagugaugucauauacga

SEQ ID NO: 638596 - RNA, 19 nt, Homo sapiens
  misc_RNA (1)...(19): siRNA sense strand
cugcagaucuuccacugaa

SEQ ID NO: 638597 - RNA, 19 nt, Homo sapiens
  misc_RNA (1)...(19): siRNA sense strand
gggcuggugucagaaauga

SEQ ID NO: 638598 - RNA, 19 nt, Homo sapiens
  misc_RNA (1)...(19): siRNA sense strand
gcaaaugcugcagaaagua

SEQ ID NO: 638599 - RNA, 19 nt, Homo sapiens
  misc_RNA (1)...(19): siRNA sense strand
ggacggacaggaacauuca

SEQ ID NO: 638600 - RNA, 19 nt, Homo sapiens
  misc_RNA (1)...(19): siRNA sense strand
acaaacauccuaccauaug

SEQ ID NO: 638601 - RNA, 19 nt, Homo sapiens
  misc_RNA (1)...(19): siRNA sense strand
caucaaugccaacuauauu

SEQ ID NO: 638602 - RNA, 19 nt, Homo sapiens
  misc_RNA (1)...(19): siRNA sense strand
acacuuugcugcagaucuu

SEQ ID NO: 638603 - RNA, 19 nt, Homo sapiens
  misc_RNA (1)...(19): siRNA sense strand
gaagaugguccugcaacaa

SEQ ID NO: 638604 - RNA, 19 nt, Homo sapiens
  misc_RNA (1)...(19): siRNA sense strand
uaauuggacuguugcuugu

SEQ ID NO: 638605 - RNA, 19 nt, Homo sapiens
  misc_RNA (1)...(19): siRNA sense strand
agagagggauggaaagcuu

SEQ ID NO: 638606 - RNA, 19 nt, Homo sapiens
  misc_RNA (1)...(19): siRNA sense strand
gaugaaucccaauguggua

SEQ ID NO: 638607 - RNA, 19 nt, Homo sapiens
  misc_RNA (1)...(19): siRNA sense strand
cuucagccgugugagauua

SEQ ID NO: 638608 - RNA, 19 nt, Homo sapiens
  misc_RNA (1)...(19): siRNA sense strand
uuaaagaagaggaaacuga

SEQ ID NO: 638609 - RNA, 19 nt, Homo sapiens
  misc_RNA (1)...(19): siRNA sense strand
ggaugacuuugaugccuau

SEQ ID NO: 638610 - RNA, 19 nt, Homo sapiens
  misc_RNA (1)...(19): siRNA sense strand
aaaguauccugcaguuugu

SEQ ID NO: 638611 - RNA, 19 nt, Homo sapiens
  misc_RNA (1)...(19): siRNA sense strand
caaaugcugcagaaaguau

SEQ ID NO: 638612 - RNA, 19 nt, Homo sapiens
  misc_RNA (1)...(19): siRNA sense strand
ugaagaagaagcagcaguu

SEQ ID NO: 638613 - RNA, 19 nt, Homo sapiens
  misc_RNA (1)...(19): siRNA sense strand
agauuagucuccaugaaug

SEQ ID NO: 638614 - RNA, 19 nt, Homo sapiens
  misc_RNA (1)...(19): siRNA sense strand
agaggaaggugcagacuac

SEQ ID NO: 638615 - RNA, 19 nt, Homo sapiens
  misc_RNA (1)...(19): siRNA sense strand
uguagacacuuccggauca

SEQ ID NO: 638616 - RNA, 19 nt, Homo sapiens
  misc_RNA (1)...(19): siRNA sense strand
ggaaggugcagacuacauc

SEQ ID NO: 638617 - RNA, 19 nt, Homo sapiens
  misc_RNA (1)...(19): siRNA sense strand
ggauauggccaaagacucu

SEQ ID NO: 638618 - RNA, 19 nt, Homo sapiens
  misc_RNA (1)...(19): siRNA sense strand
caacuauauuccuggauac

SEQ ID NO: 638619 - RNA, 19 nt, Homo sapiens
  misc_RNA (1)...(19): siRNA sense strand
agagaugaaucccaaugug

SEQ ID NO: 638620 - RNA, 19 nt, Homo sapiens
  misc_RNA (1)...(19): siRNA sense strand
ucuuagggcuggugucaga

SEQ ID NO: 638621 - RNA, 19 nt, Homo sapiens
  misc_RNA (1)...(19): siRNA sense strand
cugguacauuugucaauuu

SEQ ID NO: 638622 - RNA, 19 nt, Homo sapiens
  misc_RNA (1)...(19): siRNA sense strand
gaagaagaagcagcaguuc

SEQ ID NO: 638623 - RNA, 19 nt, Homo sapiens
  misc_RNA (1)...(19): siRNA sense strand
guuacccucauuauucuua

SEQ ID NO: 638624 - RNA, 19 nt, Homo sapiens
  misc_RNA (1)...(19): siRNA sense strand
gacuuugaugccuauauua

SEQ ID NO: 638625 - RNA, 19 nt, Homo sapiens
  misc_RNA (1)...(19): siRNA sense strand
auuggacuguugcuuguua

SEQ ID NO: 638626 - RNA, 19 nt, Homo sapiens
  misc_RNA (1)...(19): siRNA sense strand
ggugcagacuacaucaaug

SEQ ID NO: 638627 - RNA, 19 nt, Homo sapiens
  misc_RNA (1)...(19): siRNA sense strand
gcagaucuuccacugaauc

SEQ ID NO: 638628 - RNA, 19 nt, Homo sapiens
  misc_RNA (1)...(19): siRNA sense strand
gacuggauaucccacacuu

SEQ ID NO: 638629 - RNA, 19 nt, Homo sapiens
  misc_RNA (1)...(19): siRNA sense strand
uuugaggaguugaaauuga

SEQ ID NO: 638630 - RNA, 19 nt, Homo sapiens
  misc_RNA (1)...(19): siRNA sense strand
gaaagcuuccauacaacug

SEQ ID NO: 638631 - RNA, 19 nt, Homo sapiens
  misc_RNA (1)...(19): siRNA sense strand
gaugucauauacgagaaug

SEQ ID NO: 638632 - RNA, 19 nt, Homo sapiens
  misc_RNA (1)...(19): siRNA sense strand
ccucauuauucuuaggaaa

SEQ ID NO: 638633 - RNA, 19 nt, Homo sapiens
  misc_RNA (1)...(19): siRNA sense strand
cgacagcaagcuaccaaga

SEQ ID NO: 638634 - RNA, 19 nt, Homo sapiens
  misc_RNA (1)...(19): siRNA sense strand
aagaugguccugcaacaaa

SEQ ID NO: 638635 - RNA, 19 nt, Homo sapiens
  misc_RNA (1)...(19): siRNA sense strand
gaucuuccacugaaucgau

SEQ ID NO: 638636 - RNA, 19 nt, Homo sapiens
  misc_RNA (1)...(19): siRNA sense strand
cuuguuacccucauuauuc

SEQ ID NO: 638637 - RNA, 19 nt, Homo sapiens
  misc_RNA (1)...(19): siRNA sense strand
cagaggagcaguacauuuu

SEQ ID NO: 638638 - RNA, 19 nt, Homo sapiens
  misc_RNA (1)...(19): siRNA sense strand
ggacaggaacauucauugc

SEQ ID NO: 638639 - RNA, 19 nt, Homo sapiens
  misc_RNA (1)...(19): siRNA sense strand
gaaggugcagacuacauca

SEQ ID NO: 638640 - RNA, 19 nt, Homo sapiens
  misc_RNA (1)...(19): siRNA sense strand
cauccuaccauaugacuuc

SEQ ID NO: 638641 - RNA, 19 nt, Homo sapiens
  misc_RNA (1)...(19): siRNA sense strand
cuguggagaugauuucaga

SEQ ID NO: 638642 - RNA, 19 nt, Homo sapiens
  misc_RNA (1)...(19): siRNA sense strand
gauuagucuccaugaauga

SEQ ID NO: 638643 - RNA, 19 nt, Homo sapiens
  misc_RNA (1)...(19): siRNA sense strand
agacagaggagcaguacau

SEQ ID NO: 638644 - RNA, 19 nt, Homo sapiens
  misc_RNA (1)...(19): siRNA sense strand
guagacacuuccggaucaa

SEQ ID NO: 638645 - RNA, 19 nt, Homo sapiens
  misc_RNA (1)...(19): siRNA sense strand
gugcaacugauguggauga

SEQ ID NO: 638646 - RNA, 19 nt, Homo sapiens
  misc_RNA (1)...(19): siRNA sense strand
acagaggagcaguacauuu

SEQ ID NO: 638647 - RNA, 19 nt, Homo sapiens
  misc_RNA (1)...(19): siRNA sense strand
cugacgagaugcaggaugu

SEQ ID NO: 638648 - RNA, 19 nt, Homo sapiens
  misc_RNA (1)...(19): siRNA sense strand
cuggauaucccacacuuug

SEQ ID NO: 638649 - RNA, 19 nt, Homo sapiens
  misc_RNA (1)...(19): siRNA sense strand
aaaggucccaugaucauuc

SEQ ID NO: 638650 - RNA, 19 nt, Homo sapiens
  misc_RNA (1)...(19): siRNA sense strand
caaaggucccaugaucauu

SEQ ID NO: 638651 - RNA, 19 nt, Homo sapiens
  misc_RNA (1)...(19): siRNA sense strand
ggacgacugggccuguaga

SEQ ID NO: 638652 - RNA, 19 nt, Homo sapiens
  misc_RNA (1)...(19): siRNA sense strand
cuccaugaaugaagaggaa

SEQ ID NO: 638653 - RNA, 19 nt, Homo sapiens
  misc_RNA (1)...(19): siRNA sense strand
uugaggaguugaaauugau

SEQ ID NO: 638654 - RNA, 19 nt, Homo sapiens
  misc_RNA (1)...(19): siRNA sense strand
ugacuucagccgugugaga

SEQ ID NO: 638655 - RNA, 19 nt, Homo sapiens
  misc_RNA (1)...(19): siRNA sense strand
aaauugauuggacuggaua

SEQ ID NO: 638656 - RNA, 19 nt, Homo sapiens
  misc_RNA (1)...(19): siRNA sense strand
gucauauacgagaauguua

SEQ ID NO: 638657 - RNA, 19 nt, Homo sapiens
  misc_RNA (1)...(19): siRNA sense strand
gugaugucauauacgagaa

SEQ ID NO: 638658 - RNA, 19 nt, Homo sapiens
  misc_RNA (1)...(19): siRNA sense strand
agaagaggaaacugacaaa

SEQ ID NO: 638659 - RNA, 19 nt, Homo sapiens
  misc_RNA (1)...(19): siRNA sense strand
gaaucccaaugugguagug

SEQ ID NO: 638660 - RNA, 19 nt, Homo sapiens
  misc_RNA (1)...(19): siRNA sense strand
ccacugaaucgauguaaaa

SEQ ID NO: 638661 - RNA, 19 nt, Homo sapiens
  misc_RNA (1)...(19): siRNA sense strand
gcaacaaaagucucagauu

SEQ ID NO: 638662 - RNA, 19 nt, Homo sapiens
  misc_RNA (1)...(19): siRNA sense strand
gcuuguuacccucauuauu

SEQ ID NO: 638663 - RNA, 19 nt, Homo sapiens
  misc_RNA (1)...(19): siRNA sense strand
cgagaugcaggaugugaug

SEQ ID NO: 638664 - RNA, 19 nt, Homo sapiens
  misc_RNA (1)...(19): siRNA sense strand
cacaaacauccuaccauau

SEQ ID NO: 638665 - RNA, 19 nt, Homo sapiens
  misc_RNA (1)...(19): siRNA sense strand
gugugcaacugauguggau

SEQ ID NO: 638666 - RNA, 19 nt, Homo sapiens
  misc_RNA (1)...(19): siRNA sense strand
gacagaggagcaguacauu

SEQ ID NO: 638667 - RNA, 19 nt, Homo sapiens
  misc_RNA (1)...(19): siRNA sense strand
ugucauauacgagaauguu

SEQ ID NO: 638668 - RNA, 19 nt, Homo sapiens
  misc_RNA (1)...(19): siRNA sense strand
gaaguuaguuggcauccau

SEQ ID NO: 638669 - RNA, 19 nt, Homo sapiens
  misc_RNA (1)...(19): siRNA sense strand
gggaagggaccuacucaaa

SEQ ID NO: 638670 - RNA, 19 nt, Homo sapiens
  misc_RNA (1)...(19): siRNA sense strand
gaacaucauccagguguau

SEQ ID NO: 638671 - RNA, 19 nt, Homo sapiens
  misc_RNA (1)...(19): siRNA sense strand
gcaugggugugguccugua

SEQ ID NO: 638672 - RNA, 19 nt, Homo sapiens
  misc_RNA (1)...(19): siRNA sense strand
gaagggaccuacucaaaag

SEQ ID NO: 638673 - RNA, 19 nt, Homo sapiens
  misc_RNA (1)...(19): siRNA sense strand
caaagaagcauuuuccaaa

SEQ ID NO: 638674 - RNA, 19 nt, Homo sapiens
  misc_RNA (1)...(19): siRNA sense strand
gggagggccagaagaguuu

SEQ ID NO: 638675 - RNA, 19 nt, Homo sapiens
  misc_RNA (1)...(19): siRNA sense strand
caaagaaaaguggcaauua

SEQ ID NO: 638676 - RNA, 19 nt, Homo sapiens
  misc_RNA (1)...(19): siRNA sense strand
ggaagggaccuacucaaaa

SEQ ID NO: 638677 - RNA, 19 nt, Homo sapiens
  misc_RNA (1)...(19): siRNA sense strand
gagcugagccagaccuucu

SEQ ID NO: 638678 - RNA, 19 nt, Homo sapiens
  misc_RNA (1)...(19): siRNA sense strand
aagaguuuauccagagauu

SEQ ID NO: 638679 - RNA, 19 nt, Homo sapiens
  misc_RNA (1)...(19): siRNA sense strand
gccaagguguugcccaagu

SEQ ID NO: 638680 - RNA, 19 nt, Homo sapiens
  misc_RNA (1)...(19): siRNA sense strand
caauugaagaaguuaguug

SEQ ID NO: 638681 - RNA, 19 nt, Homo sapiens
  misc_RNA (1)...(19): siRNA sense strand
ccaccgggaccucaaaugu

SEQ ID NO: 638682 - RNA, 19 nt, Homo sapiens
  misc_RNA (1)...(19): siRNA sense strand
ggugugguccuguauguca

SEQ ID NO: 638683 - RNA, 19 nt, Homo sapiens
  misc_RNA (1)...(19): siRNA sense strand
accgggaccucaaauguga

SEQ ID NO: 638684 - RNA, 19 nt, Homo sapiens
  misc_RNA (1)...(19): siRNA sense strand
agaagaguuuauccagaga

SEQ ID NO: 638685 - RNA, 19 nt, Homo sapiens
  misc_RNA (1)...(19): siRNA sense strand
ccaagguguugcccaaguc

SEQ ID NO: 638686 - RNA, 19 nt, Homo sapiens
  misc_RNA (1)...(19): siRNA sense strand
gaaaaguggcaauuaaagu

SEQ ID NO: 638687 - RNA, 19 nt, Homo sapiens
  misc_RNA (1)...(19): siRNA sense strand
uggcauccauggcuagcaa

SEQ ID NO: 638688 - RNA, 19 nt, Homo sapiens
  misc_RNA (1)...(19): siRNA sense strand
cagcugggcaagaccauug

SEQ ID NO: 638689 - RNA, 19 nt, Homo sapiens
  misc_RNA (1)...(19): siRNA sense strand
gcucaagaggcuccuggaa

SEQ ID NO: 638690 - RNA, 19 nt, Homo sapiens
  misc_RNA (1)...(19): siRNA sense strand
agaacaucauccaggugua

SEQ ID NO: 638691 - RNA, 19 nt, Homo sapiens
  misc_RNA (1)...(19): siRNA sense strand
gcugacugacuuuggcuuu

SEQ ID NO: 638692 - RNA, 19 nt, Homo sapiens
  misc_RNA (1)...(19): siRNA sense strand
aaaucugccuggugaugga

SEQ ID NO: 638693 - RNA, 19 nt, Homo sapiens
  misc_RNA (1)...(19): siRNA sense strand
acacagacauccccaagau

SEQ ID NO: 638694 - RNA, 19 nt, Homo sapiens
  misc_RNA (1)...(19): siRNA sense strand
gauccuccggccuucaauu

SEQ ID NO: 638695 - RNA, 19 nt, Homo sapiens
  misc_RNA (1)...(19): siRNA sense strand
gagcaucucggccgauugc

SEQ ID NO: 638696 - RNA, 19 nt, Homo sapiens
  misc_RNA (1)...(19): siRNA sense strand
caagaugggagggccagaa

SEQ ID NO: 638697 - RNA, 19 nt, Homo sapiens
  misc_RNA (1)...(19): siRNA sense strand
gaagaguuuauccagagau

SEQ ID NO: 638698 - RNA, 19 nt, Homo sapiens
  misc_RNA (1)...(19): siRNA sense strand
ggagggccagaagaguuua

SEQ ID NO: 638699 - RNA, 19 nt, Homo sapiens
  misc_RNA (1)...(19): siRNA sense strand
gaugggagggccagaagag

SEQ ID NO: 638700 - RNA, 19 nt, Homo sapiens
  misc_RNA (1)...(19): siRNA sense strand
gaaaaucugccuggugaug

SEQ ID NO: 638701 - RNA, 19 nt, Homo sapiens
  misc_RNA (1)...(19): siRNA sense strand
gguaccagcugggcaagac

SEQ ID NO: 638702 - RNA, 19 nt, Homo sapiens
  misc_RNA (1)...(19): siRNA sense strand
ccuggaacccgauaugauc

SEQ ID NO: 638703 - RNA, 19 nt, Homo sapiens
  misc_RNA (1)...(19): siRNA sense strand
ccucuuccgucagaugguu

SEQ ID NO: 638704 - RNA, 19 nt, Homo sapiens
  misc_RNA (1)...(19): siRNA sense strand
accugaagcugacugacuu

SEQ ID NO: 638705 - RNA, 19 nt, Homo sapiens
  misc_RNA (1)...(19): siRNA sense strand
ugggugugguccuguaugu

SEQ ID NO: 638706 - RNA, 19 nt, Homo sapiens
  misc_RNA (1)...(19): siRNA sense strand
ccagaaauuuccagacaaa

SEQ ID NO: 638707 - RNA, 19 nt, Homo sapiens
  misc_RNA (1)...(19): siRNA sense strand
gcaaccaaaucggaugaua

SEQ ID NO: 638708 - RNA, 19 nt, Homo sapiens
  misc_RNA (1)...(19): siRNA sense strand
caagagcugugaaggaaga

SEQ ID NO: 638709 - RNA, 19 nt, Homo sapiens
  misc_RNA (1)...(19): siRNA sense strand
acaaagagauacugagaau

SEQ ID NO: 638710 - RNA, 19 nt, Homo sapiens
  misc_RNA (1)...(19): siRNA sense strand
gcacacugcuccucuuucu

SEQ ID NO: 638711 - RNA, 19 nt, Homo sapiens
  misc_RNA (1)...(19): siRNA sense strand
gaagcaccgucaaggaaga

SEQ ID NO: 638712 - RNA, 19 nt, Homo sapiens
  misc_RNA (1)...(19): siRNA sense strand
caagcaccauggccaguuu

SEQ ID NO: 638713 - RNA, 19 nt, Homo sapiens
  misc_RNA (1)...(19): siRNA sense strand
gaugguacgcguugcuaua

SEQ ID NO: 638714 - RNA, 19 nt, Homo sapiens
  misc_RNA (1)...(19): siRNA sense strand
gcaaugcucagcucauaau

SEQ ID NO: 638715 - RNA, 19 nt, Homo sapiens
  misc_RNA (1)...(19): siRNA sense strand
ggagggagacggauuucuu

SEQ ID NO: 638716 - RNA, 19 nt, Homo sapiens
  misc_RNA (1)...(19): siRNA sense strand
uacagaacaugcaguaaug

SEQ ID NO: 638717 - RNA, 19 nt, Homo sapiens
  misc_RNA (1)...(19): siRNA sense strand
aaaagguccugaucacuua

SEQ ID NO: 638718 - RNA, 19 nt, Homo sapiens
  misc_RNA (1)...(19): siRNA sense strand
gagggagacggauuucuuu

SEQ ID NO: 638719 - RNA, 19 nt, Homo sapiens
  misc_RNA (1)...(19): siRNA sense strand
gacaacccauguucacuca

SEQ ID NO: 638720 - RNA, 19 nt, Homo sapiens
  misc_RNA (1)...(19): siRNA sense strand
ugacaucggcugagugcua

SEQ ID NO: 638721 - RNA, 19 nt, Homo sapiens
  misc_RNA (1)...(19): siRNA sense strand
cagcagauuucauugucaa

SEQ ID NO: 638722 - RNA, 19 nt, Homo sapiens
  misc_RNA (1)...(19): siRNA sense strand
gggaagcaccgucaaggaa

SEQ ID NO: 638723 - RNA, 19 nt, Homo sapiens
  misc_RNA (1)...(19): siRNA sense strand
gaucacuuauaucuggaaa

SEQ ID NO: 638724 - RNA, 19 nt, Homo sapiens
  misc_RNA (1)...(19): siRNA sense strand
cauauucgccuugucuuaa

SEQ ID NO: 638725 - RNA, 19 nt, Homo sapiens
  misc_RNA (1)...(19): siRNA sense strand
gaaauuuccagacaaagag

SEQ ID NO: 638726 - RNA, 19 nt, Homo sapiens
  misc_RNA (1)...(19): siRNA sense strand
ccaaaucggaugauacugu

SEQ ID NO: 638727 - RNA, 19 nt, Homo sapiens
  misc_RNA (1)...(19): siRNA sense strand
aaagagauacugagaaugg

SEQ ID NO: 638728 - RNA, 19 nt, Homo sapiens
  misc_RNA (1)...(19): siRNA sense strand
caacccauguucacucaag

SEQ ID NO: 638729 - RNA, 19 nt, Homo sapiens
  misc_RNA (1)...(19): siRNA sense strand
gauggagggagacggauuu

SEQ ID NO: 638730 - RNA, 19 nt, Homo sapiens
  misc_RNA (1)...(19): siRNA sense strand
gauaugugcaucagugguu

SEQ ID NO: 638731 - RNA, 19 nt, Homo sapiens
  misc_RNA (1)...(19): siRNA sense strand
cagaaucuuuggauaugug

SEQ ID NO: 638732 - RNA, 19 nt, Homo sapiens
  misc_RNA (1)...(19): siRNA sense strand
uacagaaucuuuggauaug

SEQ ID NO: 638733 - RNA, 19 nt, Homo sapiens
  misc_RNA (1)...(19): siRNA sense strand
gcugagugcuacgaucuga

SEQ ID NO: 638734 - RNA, 19 nt, Homo sapiens
  misc_RNA (1)...(19): siRNA sense strand
gcuacgaucugaggagcaa

SEQ ID NO: 638735 - RNA, 19 nt, Homo sapiens
  misc_RNA (1)...(19): siRNA sense strand
gaguggaaaugcauguaca

SEQ ID NO: 638736 - RNA, 19 nt, Homo sapiens
  misc_RNA (1)...(19): siRNA sense strand
cgauacagaacaugcagua

SEQ ID NO: 638737 - RNA, 19 nt, Homo sapiens
  misc_RNA (1)...(19): siRNA sense strand
agcaagagcugugaaggaa

SEQ ID NO: 638738 - RNA, 19 nt, Homo sapiens
  misc_RNA (1)...(19): siRNA sense strand
agacaaagagauacugaga

SEQ ID NO: 638739 - RNA, 19 nt, Homo sapiens
  misc_RNA (1)...(19): siRNA sense strand
guagacauauucgccuugu

SEQ ID NO: 638740 - RNA, 19 nt, Homo sapiens
  misc_RNA (1)...(19): siRNA sense strand
gagguuaucagcugacauc

SEQ ID NO: 638741 - RNA, 19 nt, Homo sapiens
  misc_RNA (1)...(19): siRNA sense strand
gggcuccgcugacaguaca

SEQ ID NO: 638742 - RNA, 19 nt, Homo sapiens
  misc_RNA (1)...(19): siRNA sense strand
cagauuucauugucaagau

SEQ ID NO: 638743 - RNA, 19 nt, Homo sapiens
  misc_RNA (1)...(19): siRNA sense strand
acuuauaucuggaaaccaa

SEQ ID NO: 638744 - RNA, 19 nt, Homo sapiens
  misc_RNA (1)...(19): siRNA sense strand
gacaaagagauacugagaa

SEQ ID NO: 638745 - RNA, 19 nt, Homo sapiens
  misc_RNA (1)...(19): siRNA sense strand
gaagaguggaaaugcaugu

SEQ ID NO: 638746 - RNA, 19 nt, Homo sapiens
  misc_RNA (1)...(19): siRNA sense strand
gagacggauuucuuuccuu

SEQ ID NO: 638747 - RNA, 19 nt, Homo sapiens
  misc_RNA (1)...(19): siRNA sense strand
agucucaacuccacaggaa

SEQ ID NO: 638748 - RNA, 19 nt, Homo sapiens
  misc_RNA (1)...(19): siRNA sense strand
ggagacggauuucuuuccu

SEQ ID NO: 638749 - RNA, 19 nt, Homo sapiens
  misc_RNA (1)...(19): siRNA sense strand
acucacagcagauuucauu

SEQ ID NO: 638750 - RNA, 19 nt, Homo sapiens
  misc_RNA (1)...(19): siRNA sense strand
ggacugcccaccagaagca

SEQ ID NO: 638751 - RNA, 19 nt, Homo sapiens
  misc_RNA (1)...(19): siRNA sense strand
agaaauuuccagacaaaga

SEQ ID NO: 638752 - RNA, 19 nt, Homo sapiens
  misc_RNA (1)...(19): siRNA sense strand
gcaccgucaaggaagauaa

SEQ ID NO: 638753 - RNA, 19 nt, Homo sapiens
  misc_RNA (1)...(19): siRNA sense strand
gcagauuucauugucaaga

SEQ ID NO: 638754 - RNA, 19 nt, Homo sapiens
  misc_RNA (1)...(19): siRNA sense strand
cacagcagauuucauuguc

SEQ ID NO: 638755 - RNA, 19 nt, Homo sapiens
  misc_RNA (1)...(19): siRNA sense strand
guacaguccaguucaucuu

SEQ ID NO: 638756 - RNA, 19 nt, Homo sapiens
  misc_RNA (1)...(19): siRNA sense strand
ggaccacucacagcagauu

SEQ ID NO: 638757 - RNA, 19 nt, Homo sapiens
  misc_RNA (1)...(19): siRNA sense strand
gagugcaacuuggauccuu

SEQ ID NO: 638758 - RNA, 19 nt, Homo sapiens
  misc_RNA (1)...(19): siRNA sense strand
acauauucgccuugucuua

SEQ ID NO: 638759 - RNA, 19 nt, Homo sapiens
  misc_RNA (1)...(19): siRNA sense strand
ucacagcagauuucauugu

SEQ ID NO: 638760 - RNA, 19 nt, Homo sapiens
  misc_RNA (1)...(19): siRNA sense strand
auacagaacaugcaguaau

SEQ ID NO: 638761 - RNA, 19 nt, Homo sapiens
  misc_RNA (1)...(19): siRNA sense strand
auauucgccuugucuuaaa

SEQ ID NO: 638762 - RNA, 19 nt, Homo sapiens
  misc_RNA (1)...(19): siRNA sense strand
ccagacaaagagauacuga

SEQ ID NO: 638763 - RNA, 19 nt, Homo sapiens
  misc_RNA (1)...(19): siRNA sense strand
caacuccacaggaacuuuc

SEQ ID NO: 638764 - RNA, 19 nt, Homo sapiens
  misc_RNA (1)...(19): siRNA sense strand
ggcuuccugugucuaauga

SEQ ID NO: 638765 - RNA, 19 nt, Homo sapiens
  misc_RNA (1)...(19): siRNA sense strand
gagcugugaaggaagaaau

SEQ ID NO: 638766 - RNA, 19 nt, Homo sapiens
  misc_RNA (1)...(19): siRNA sense strand
caaccaaaucggaugauac

SEQ ID NO: 638767 - RNA, 19 nt, Homo sapiens
  misc_RNA (1)...(19): siRNA sense strand
ugaauggcuuccugugucu

SEQ ID NO: 638768 - RNA, 19 nt, Homo sapiens
  misc_RNA (1)...(19): siRNA sense strand
gauacagaacaugcaguaa

SEQ ID NO: 638769 - RNA, 19 nt, Homo sapiens
  misc_RNA (1)...(19): siRNA sense strand
gagaacaucaaacccaaac

SEQ ID NO: 638770 - RNA, 19 nt, Homo sapiens
  misc_RNA (1)...(19): siRNA sense strand
caguucaucuucuaucaac

SEQ ID NO: 638771 - RNA, 19 nt, Homo sapiens
  misc_RNA (1)...(19): siRNA sense strand
ugacaguacaguccaguuc

SEQ ID NO: 638772 - RNA, 19 nt, Homo sapiens
  misc_RNA (1)...(19): siRNA sense strand
uuguugaacuagcaccuaa

SEQ ID NO: 638773 - RNA, 19 nt, Homo sapiens
  misc_RNA (1)...(19): siRNA sense strand
guggaagaguggaaaugca

SEQ ID NO: 638774 - RNA, 19 nt, Homo sapiens
  misc_RNA (1)...(19): siRNA sense strand
cgucaaggaagauaacugu

SEQ ID NO: 638775 - RNA, 19 nt, Homo sapiens
  misc_RNA (1)...(19): siRNA sense strand
gguuuaugccaaauuguug

SEQ ID NO: 638776 - RNA, 19 nt, Homo sapiens
  misc_RNA (1)...(19): siRNA sense strand
guugcuauacagaaucuuu

SEQ ID NO: 638777 - RNA, 19 nt, Homo sapiens
  misc_RNA (1)...(19): siRNA sense strand
caagugccaagccaaagga

SEQ ID NO: 638778 - RNA, 19 nt, Homo sapiens
  misc_RNA (1)...(19): siRNA sense strand
gacaguacaguccaguuca

SEQ ID NO: 638779 - RNA, 19 nt, Homo sapiens
  misc_RNA (1)...(19): siRNA sense strand
uuccagaaauuuccagaca

SEQ ID NO: 638780 - RNA, 19 nt, Homo sapiens
  misc_RNA (1)...(19): siRNA sense strand
gacuaaaggugaaaacagu

SEQ ID NO: 638781 - RNA, 19 nt, Homo sapiens
  misc_RNA (1)...(19): siRNA sense strand
uaaaagguccugaucacuu

SEQ ID NO: 638782 - RNA, 19 nt, Homo sapiens
  misc_RNA (1)...(19): siRNA sense strand
ccagcucuccgcaaccaaa

SEQ ID NO: 638783 - RNA, 19 nt, Homo sapiens
  misc_RNA (1)...(19): siRNA sense strand
ucacuuauaucuggaaacc

SEQ ID NO: 638784 - RNA, 19 nt, Homo sapiens
  misc_RNA (1)...(19): siRNA sense strand
guccugaucacuuauaucu

SEQ ID NO: 638785 - RNA, 19 nt, Homo sapiens
  misc_RNA (1)...(19): siRNA sense strand
agugguuuaugccaaauug

SEQ ID NO: 638786 - RNA, 19 nt, Homo sapiens
  misc_RNA (1)...(19): siRNA sense strand
caguccaguucaucuucua

SEQ ID NO: 638787 - RNA, 19 nt, Homo sapiens
  misc_RNA (1)...(19): siRNA sense strand
gguccgagggcaguauaaa

SEQ ID NO: 638788 - RNA, 19 nt, Homo sapiens
  misc_RNA (1)...(19): siRNA sense strand
gguacgcguugcuauacag

SEQ ID NO: 638789 - RNA, 19 nt, Homo sapiens
  misc_RNA (1)...(19): siRNA sense strand
ggaugauacugugguugca

SEQ ID NO: 638790 - RNA, 19 nt, Homo sapiens
  misc_RNA (1)...(19): siRNA sense strand
acgcguugcuauacagaau

SEQ ID NO: 638791 - RNA, 19 nt, Homo sapiens
  misc_RNA (1)...(19): siRNA sense strand
uccagaaauuuccagacaa

SEQ ID NO: 638792 - RNA, 19 nt, Homo sapiens
  misc_RNA (1)...(19): siRNA sense strand
gugccaagccaaaggaaca

SEQ ID NO: 638793 - RNA, 19 nt, Homo sapiens
  misc_RNA (1)...(19): siRNA sense strand
gcguugcuauacagaaucu

SEQ ID NO: 638794 - RNA, 19 nt, Homo sapiens
  misc_RNA (1)...(19): siRNA sense strand
gaccacucacagcagauuu

SEQ ID NO: 638795 - RNA, 19 nt, Homo sapiens
  misc_RNA (1)...(19): siRNA sense strand
acagcagauuucauuguca

SEQ ID NO: 638796 - RNA, 19 nt, Homo sapiens
  misc_RNA (1)...(19): siRNA sense strand
acagaaucuuuggauaugu

SEQ ID NO: 638797 - RNA, 19 nt, Homo sapiens
  misc_RNA (1)...(19): siRNA sense strand
uccaguucaucuucuauca

SEQ ID NO: 638798 - RNA, 19 nt, Homo sapiens
  misc_RNA (1)...(19): siRNA sense strand
acaguacaguccaguucau

SEQ ID NO: 638799 - RNA, 19 nt, Homo sapiens
  misc_RNA (1)...(19): siRNA sense strand
gguugcaauucccuaugga

SEQ ID NO: 638800 - RNA, 19 nt, Homo sapiens
  misc_RNA (1)...(19): siRNA sense strand
ccagaaauuuccagacaaa

SEQ ID NO: 638801 - RNA, 19 nt, Homo sapiens
  misc_RNA (1)...(19): siRNA sense strand
gcaaccaaaucggaugaua

SEQ ID NO: 638802 - RNA, 19 nt, Homo sapiens
  misc_RNA (1)...(19): siRNA sense strand
caagagcugugaaggaaga

SEQ ID NO: 638803 - RNA, 19 nt, Homo sapiens
  misc_RNA (1)...(19): siRNA sense strand
acaaagagauacugagaau

SEQ ID NO: 638804 - RNA, 19 nt, Homo sapiens
  misc_RNA (1)...(19): siRNA sense strand
gcacacugcuccucuuucu

SEQ ID NO: 638805 - RNA, 19 nt, Homo sapiens
  misc_RNA (1)...(19): siRNA sense strand
gaagcaccgucaaggaaga

SEQ ID NO: 638806 - RNA, 19 nt, Homo sapiens
  misc_RNA (1)...(19): siRNA sense strand
caagcaccauggccaguuu

SEQ ID NO: 638807 - RNA, 19 nt, Homo sapiens
  misc_RNA (1)...(19): siRNA sense strand
gaugguacgcguugcuaua

SEQ ID NO: 638808 - RNA, 19 nt, Homo sapiens
  misc_RNA (1)...(19): siRNA sense strand
gcaaugcucagcucauaau

SEQ ID NO: 638809 - RNA, 19 nt, Homo sapiens
  misc_RNA (1)...(19): siRNA sense strand
ggagggagacggauuucuu

SEQ ID NO: 638810 - RNA, 19 nt, Homo sapiens
  misc_RNA (1)...(19): siRNA sense strand
uacagaacaugcaguaaug

SEQ ID NO: 638811 - RNA, 19 nt, Homo sapiens
  misc_RNA (1)...(19): siRNA sense strand
aaaagguccugaucacuua

SEQ ID NO: 638812 - RNA, 19 nt, Homo sapiens
  misc_RNA (1)...(19): siRNA sense strand
gagggagacggauuucuuu

SEQ ID NO: 638813 - RNA, 19 nt, Homo sapiens
  misc_RNA (1)...(19): siRNA sense strand
gacaacccauguucacuca

SEQ ID NO: 638814 - RNA, 19 nt, Homo sapiens
  misc_RNA (1)...(19): siRNA sense strand
ugacaucggcugagugcua

SEQ ID NO: 638815 - RNA, 19 nt, Homo sapiens
  misc_RNA (1)...(19): siRNA sense strand
cagcagauuucauugucaa

SEQ ID NO: 638816 - RNA, 19 nt, Homo sapiens
  misc_RNA (1)...(19): siRNA sense strand
gggaagcaccgucaaggaa

SEQ ID NO: 638817 - RNA, 19 nt, Homo sapiens
  misc_RNA (1)...(19): siRNA sense strand
gaucacuuauaucuggaaa

SEQ ID NO: 638818 - RNA, 19 nt, Homo sapiens
  misc_RNA (1)...(19): siRNA sense strand
cauauucgccuugucuuaa

SEQ ID NO: 638819 - RNA, 19 nt, Homo sapiens
  misc_RNA (1)...(19): siRNA sense strand
gaaauuuccagacaaagag

SEQ ID NO: 638820 - RNA, 19 nt, Homo sapiens
  misc_RNA (1)...(19): siRNA sense strand
ccaaaucggaugauacugu

SEQ ID NO: 638821 - RNA, 19 nt, Homo sapiens
  misc_RNA (1)...(19): siRNA sense strand
aaagagauacugagaaugg

SEQ ID NO: 638822 - RNA, 19 nt, Homo sapiens
  misc_RNA (1)...(19): siRNA sense strand
caacccauguucacucaag

SEQ ID NO: 638823 - RNA, 19 nt, Homo sapiens
  misc_RNA (1)...(19): siRNA sense strand
gauggagggagacggauuu

SEQ ID NO: 638824 - RNA, 19 nt, Homo sapiens
  misc_RNA (1)...(19): siRNA sense strand
gauaugugcaucagugguu

SEQ ID NO: 638825 - RNA, 19 nt, Homo sapiens
  misc_RNA (1)...(19): siRNA sense strand
cagaaucuuuggauaugug

SEQ ID NO: 638826 - RNA, 19 nt, Homo sapiens
  misc_RNA (1)...(19): siRNA sense strand
uacagaaucuuuggauaug

SEQ ID NO: 638827 - RNA, 19 nt, Homo sapiens
  misc_RNA (1)...(19): siRNA sense strand
gcugagugcuacgaucuga

SEQ ID NO: 638828 - RNA, 19 nt, Homo sapiens
  misc_RNA (1)...(19): siRNA sense strand
gcuacgaucugaggagcaa

SEQ ID NO: 638829 - RNA, 19 nt, Homo sapiens
  misc_RNA (1)...(19): siRNA sense strand
gaguggaaaugcauguaca

SEQ ID NO: 638830 - RNA, 19 nt, Homo sapiens
  misc_RNA (1)...(19): siRNA sense strand
cgauacagaacaugcagua

SEQ ID NO: 638831 - RNA, 19 nt, Homo sapiens
  misc_RNA (1)...(19): siRNA sense strand
agcaagagcugugaaggaa

SEQ ID NO: 638832 - RNA, 19 nt, Homo sapiens
  misc_RNA (1)...(19): siRNA sense strand
agacaaagagauacugaga

SEQ ID NO: 638833 - RNA, 19 nt, Homo sapiens
  misc_RNA (1)...(19): siRNA sense strand
guagacauauucgccuugu

SEQ ID NO: 638834 - RNA, 19 nt, Homo sapiens
  misc_RNA (1)...(19): siRNA sense strand
gagguuaucagcugacauc

SEQ ID NO: 638835 - RNA, 19 nt, Homo sapiens
  misc_RNA (1)...(19): siRNA sense strand
gggcuccgcugacaguaca

SEQ ID NO: 638836 - RNA, 19 nt, Homo sapiens
  misc_RNA (1)...(19): siRNA sense strand
cagauuucauugucaagau

SEQ ID NO: 638837 - RNA, 19 nt, Homo sapiens
  misc_RNA (1)...(19): siRNA sense strand
acuuauaucuggaaaccaa

SEQ ID NO: 638838 - RNA, 19 nt, Homo sapiens
  misc_RNA (1)...(19): siRNA sense strand
gacaaagagauacugagaa

SEQ ID NO: 638839 - RNA, 19 nt, Homo sapiens
  misc_RNA (1)...(19): siRNA sense strand
gaagaguggaaaugcaugu

SEQ ID NO: 638840 - RNA, 19 nt, Homo sapiens
  misc_RNA (1)...(19): siRNA sense strand
gagacggauuucuuuccuu

SEQ ID NO: 638841 - RNA, 19 nt, Homo sapiens
  misc_RNA (1)...(19): siRNA sense strand
agucucaacuccacaggaa

SEQ ID NO: 638842 - RNA, 19 nt, Homo sapiens
  misc_RNA (1)...(19): siRNA sense strand
ggagacggauuucuuuccu

SEQ ID NO: 638843 - RNA, 19 nt, Homo sapiens
  misc_RNA (1)...(19): siRNA sense strand
acucacagcagauuucauu

SEQ ID NO: 638844 - RNA, 19 nt, Homo sapiens
  misc_RNA (1)...(19): siRNA sense strand
ggacugcccaccagaagca

SEQ ID NO: 638845 - RNA, 19 nt, Homo sapiens
  misc_RNA (1)...(19): siRNA sense strand
agaaauuuccagacaaaga

SEQ ID NO: 638846 - RNA, 19 nt, Homo sapiens
  misc_RNA (1)...(19): siRNA sense strand
gcaccgucaaggaagauaa

SEQ ID NO: 638847 - RNA, 19 nt, Homo sapiens
  misc_RNA (1)...(19): siRNA sense strand
gcagauuucauugucaaga

SEQ ID NO: 638848 - RNA, 19 nt, Homo sapiens
  misc_RNA (1)...(19): siRNA sense strand
cacagcagauuucauuguc

SEQ ID NO: 638849 - RNA, 19 nt, Homo sapiens
  misc_RNA (1)...(19): siRNA sense strand
guacaguccaguucaucuu

SEQ ID NO: 638850 - RNA, 19 nt, Homo sapiens
  misc_RNA (1)...(19): siRNA sense strand
ggaccacucacagcagauu

SEQ ID NO: 638851 - RNA, 19 nt, Homo sapiens
  misc_RNA (1)...(19): siRNA sense strand
gagugcaacuuggauccuu

SEQ ID NO: 638852 - RNA, 19 nt, Homo sapiens
  misc_RNA (1)...(19): siRNA sense strand
acauauucgccuugucuua

SEQ ID NO: 638853 - RNA, 19 nt, Homo sapiens
  misc_RNA (1)...(19): siRNA sense strand
ucacagcagauuucauugu

SEQ ID NO: 638854 - RNA, 19 nt, Homo sapiens
  misc_RNA (1)...(19): siRNA sense strand
auacagaacaugcaguaau

SEQ ID NO: 638855 - RNA, 19 nt, Homo sapiens
  misc_RNA (1)...(19): siRNA sense strand
auauucgccuugucuuaaa

SEQ ID NO: 638856 - RNA, 19 nt, Homo sapiens
  misc_RNA (1)...(19): siRNA sense strand
ccagacaaagagauacuga

SEQ ID NO: 638857 - RNA, 19 nt, Homo sapiens
  misc_RNA (1)...(19): siRNA sense strand
caacuccacaggaacuuuc

SEQ ID NO: 638858 - RNA, 19 nt, Homo sapiens
  misc_RNA (1)...(19): siRNA sense strand
ggcuuccugugucuaauga

SEQ ID NO: 638859 - RNA, 19 nt, Homo sapiens
  misc_RNA (1)...(19): siRNA sense strand
gagcugugaaggaagaaau

SEQ ID NO: 638860 - RNA, 19 nt, Homo sapiens
  misc_RNA (1)...(19): siRNA sense strand
caaccaaaucggaugauac

SEQ ID NO: 638861 - RNA, 19 nt, Homo sapiens
  misc_RNA (1)...(19): siRNA sense strand
ugaauggcuuccugugucu

SEQ ID NO: 638862 - RNA, 19 nt, Homo sapiens
  misc_RNA (1)...(19): siRNA sense strand
gauacagaacaugcaguaa

SEQ ID NO: 638863 - RNA, 19 nt, Homo sapiens
  misc_RNA (1)...(19): siRNA sense strand
gagaacaucaaacccaaac

SEQ ID NO: 638864 - RNA, 19 nt, Homo sapiens
  misc_RNA (1)...(19): siRNA sense strand
caguucaucuucuaucaac

SEQ ID NO: 638865 - RNA, 19 nt, Homo sapiens
  misc_RNA (1)...(19): siRNA sense strand
ugacaguacaguccaguuc

SEQ ID NO: 638866 - RNA, 19 nt, Homo sapiens
  misc_RNA (1)...(19): siRNA sense strand
uuguugaacuagcaccuaa

SEQ ID NO: 638867 - RNA, 19 nt, Homo sapiens
  misc_RNA (1)...(19): siRNA sense strand
guggaagaguggaaaugca

SEQ ID NO: 638868 - RNA, 19 nt, Homo sapiens
  misc_RNA (1)...(19): siRNA sense strand
cgucaaggaagauaacugu

SEQ ID NO: 638869 - RNA, 19 nt, Homo sapiens
  misc_RNA (1)...(19): siRNA sense strand
gguuuaugccaaauuguug

SEQ ID NO: 638870 - RNA, 19 nt, Homo sapiens
  misc_RNA (1)...(19): siRNA sense strand
guugcuauacagaaucuuu

SEQ ID NO: 638871 - RNA, 19 nt, Homo sapiens
  misc_RNA (1)...(19): siRNA sense strand
caagugccaagccaaagga

SEQ ID NO: 638872 - RNA, 19 nt, Homo sapiens
  misc_RNA (1)...(19): siRNA sense strand
gacaguacaguccaguuca

SEQ ID NO: 638873 - RNA, 19 nt, Homo sapiens
  misc_RNA (1)...(19): siRNA sense strand
uuccagaaauuuccagaca

SEQ ID NO: 638874 - RNA, 19 nt, Homo sapiens
  misc_RNA (1)...(19): siRNA sense strand
gacuaaaggugaaaacagu

SEQ ID NO: 638875 - RNA, 19 nt, Homo sapiens
  misc_RNA (1)...(19): siRNA sense strand
uaaaagguccugaucacuu

SEQ ID NO: 638876 - RNA, 19 nt, Homo sapiens
  misc_RNA (1)...(19): siRNA sense strand
ccagcucuccgcaaccaaa

SEQ ID NO: 638877 - RNA, 19 nt, Homo sapiens
  misc_RNA (1)...(19): siRNA sense strand
ucacuuauaucuggaaacc

SEQ ID NO: 638878 - RNA, 19 nt, Homo sapiens
  misc_RNA (1)...(19): siRNA sense strand
guccugaucacuuauaucu

SEQ ID NO: 638879 - RNA, 19 nt, Homo sapiens
  misc_RNA (1)...(19): siRNA sense strand
agugguuuaugccaaauug

SEQ ID NO: 638880 - RNA, 19 nt, Homo sapiens
  misc_RNA (1)...(19): siRNA sense strand
caguccaguucaucuucua

SEQ ID NO: 638881 - RNA, 19 nt, Homo sapiens
  misc_RNA (1)...(19): siRNA sense strand
gguccgagggcaguauaaa

SEQ ID NO: 638882 - RNA, 19 nt, Homo sapiens
  misc_RNA (1)...(19): siRNA sense strand
gguacgcguugcuauacag

SEQ ID NO: 638883 - RNA, 19 nt, Homo sapiens
  misc_RNA (1)...(19): siRNA sense strand
ggaugauacugugguugca

SEQ ID NO: 638884 - RNA, 19 nt, Homo sapiens
  misc_RNA (1)...(19): siRNA sense strand
acgcguugcuauacagaau

SEQ ID NO: 638885 - RNA, 19 nt, Homo sapiens
  misc_RNA (1)...(19): siRNA sense strand
uccagaaauuuccagacaa

SEQ ID NO: 638886 - RNA, 19 nt, Homo sapiens
  misc_RNA (1)...(19): siRNA sense strand
gugccaagccaaaggaaca

SEQ ID NO: 638887 - RNA, 19 nt, Homo sapiens
  misc_RNA (1)...(19): siRNA sense strand
gcguugcuauacagaaucu

SEQ ID NO: 638888 - RNA, 19 nt, Homo sapiens
  misc_RNA (1)...(19): siRNA sense strand
gaccacucacagcagauuu

SEQ ID NO: 638889 - RNA, 19 nt, Homo sapiens
  misc_RNA (1)...(19): siRNA sense strand
acagcagauuucauuguca

SEQ ID NO: 638890 - RNA, 19 nt, Homo sapiens
  misc_RNA (1)...(19): siRNA sense strand
acagaaucuuuggauaugu

SEQ ID NO: 638891 - RNA, 19 nt, Homo sapiens
  misc_RNA (1)...(19): siRNA sense strand
uccaguucaucuucuauca

SEQ ID NO: 638892 - RNA, 19 nt, Homo sapiens
  misc_RNA (1)...(19): siRNA sense strand
acaguacaguccaguucau

SEQ ID NO: 638893 - RNA, 19 nt, Homo sapiens
  misc_RNA (1)...(19): siRNA sense strand
gguugcaauucccuaugga

SEQ ID NO: 638894 - RNA, 19 nt, Homo sapiens
  misc_RNA (1)...(19): siRNA sense strand
ccagaaauuuccagacaaa

SEQ ID NO: 638895 - RNA, 19 nt, Homo sapiens
  misc_RNA (1)...(19): siRNA sense strand
gcaaccaaaucggaugaua

SEQ ID NO: 638896 - RNA, 19 nt, Homo sapiens
  misc_RNA (1)...(19): siRNA sense strand
caagagcugugaaggaaga

SEQ ID NO: 638897 - RNA, 19 nt, Homo sapiens
  misc_RNA (1)...(19): siRNA sense strand
acaaagagauacugagaau

SEQ ID NO: 638898 - RNA, 19 nt, Homo sapiens
  misc_RNA (1)...(19): siRNA sense strand
gcacacugcuccucuuucu

SEQ ID NO: 638899 - RNA, 19 nt, Homo sapiens
  misc_RNA (1)...(19): siRNA sense strand
gaagcaccgucaaggaaga

SEQ ID NO: 638900 - RNA, 19 nt, Homo sapiens
  misc_RNA (1)...(19): siRNA sense strand
caagcaccauggccaguuu

SEQ ID NO: 638901 - RNA, 19 nt, Homo sapiens
  misc_RNA (1)...(19): siRNA sense strand
gaugguacgcguugcuaua

SEQ ID NO: 638902 - RNA, 19 nt, Homo sapiens
  misc_RNA (1)...(19): siRNA sense strand
gcaaugcucagcucauaau

SEQ ID NO: 638903 - RNA, 19 nt, Homo sapiens
  misc_RNA (1)...(19): siRNA sense strand
ggagggagacggauuucuu

SEQ ID NO: 638904 - RNA, 19 nt, Homo sapiens
  misc_RNA (1)...(19): siRNA sense strand
uacagaacaugcaguaaug

SEQ ID NO: 638905 - RNA, 19 nt, Homo sapiens
  misc_RNA (1)...(19): siRNA sense strand
aaaagguccugaucacuua

SEQ ID NO: 638906 - RNA, 19 nt, Homo sapiens
  misc_RNA (1)...(19): siRNA sense strand
gagggagacggauuucuuu

SEQ ID NO: 638907 - RNA, 19 nt, Homo sapiens
  misc_RNA (1)...(19): siRNA sense strand
gacaacccauguucacuca

SEQ ID NO: 638908 - RNA, 19 nt, Homo sapiens
  misc_RNA (1)...(19): siRNA sense strand
ugacaucggcugagugcua

SEQ ID NO: 638909 - RNA, 19 nt, Homo sapiens
  misc_RNA (1)...(19): siRNA sense strand
cagcagauuucauugucaa

SEQ ID NO: 638910 - RNA, 19 nt, Homo sapiens
  misc_RNA (1)...(19): siRNA sense strand
gggaagcaccgucaaggaa

SEQ ID NO: 638911 - RNA, 19 nt, Homo sapiens
  misc_RNA (1)...(19): siRNA sense strand
gaucacuuauaucuggaaa

SEQ ID NO: 638912 - RNA, 19 nt, Homo sapiens
  misc_RNA (1)...(19): siRNA sense strand
cauauucgccuugucuuaa

SEQ ID NO: 638913 - RNA, 19 nt, Homo sapiens
  misc_RNA (1)...(19): siRNA sense strand
gaaauuuccagacaaagag

SEQ ID NO: 638914 - RNA, 19 nt, Homo sapiens
  misc_RNA (1)...(19): siRNA sense strand
ccaaaucggaugauacugu

SEQ ID NO: 638915 - RNA, 19 nt, Homo sapiens
  misc_RNA (1)...(19): siRNA sense strand
aaagagauacugagaaugg

SEQ ID NO: 638916 - RNA, 19 nt, Homo sapiens
  misc_RNA (1)...(19): siRNA sense strand
caacccauguucacucaag

SEQ ID NO: 638917 - RNA, 19 nt, Homo sapiens
  misc_RNA (1)...(19): siRNA sense strand
gauggagggagacggauuu

SEQ ID NO: 638918 - RNA, 19 nt, Homo sapiens
  misc_RNA (1)...(19): siRNA sense strand
gauaugugcaucagugguu

SEQ ID NO: 638919 - RNA, 19 nt, Homo sapiens
  misc_RNA (1)...(19): siRNA sense strand
cagaaucuuuggauaugug

SEQ ID NO: 638920 - RNA, 19 nt, Homo sapiens
  misc_RNA (1)...(19): siRNA sense strand
uacagaaucuuuggauaug

SEQ ID NO: 638921 - RNA, 19 nt, Homo sapiens
  misc_RNA (1)...(19): siRNA sense strand
gcugagugcuacgaucuga

SEQ ID NO: 638922 - RNA, 19 nt, Homo sapiens
  misc_RNA (1)...(19): siRNA sense strand
gcuacgaucugaggagcaa

SEQ ID NO: 638923 - RNA, 19 nt, Homo sapiens
  misc_RNA (1)...(19): siRNA sense strand
gaguggaaaugcauguaca

SEQ ID NO: 638924 - RNA, 19 nt, Homo sapiens
  misc_RNA (1)...(19): siRNA sense strand
cgauacagaacaugcagua

SEQ ID NO: 638925 - RNA, 19 nt, Homo sapiens
  misc_RNA (1)...(19): siRNA sense strand
agcaagagcugugaaggaa

SEQ ID NO: 638926 - RNA, 19 nt, Homo sapiens
  misc_RNA (1)...(19): siRNA sense strand
agacaaagagauacugaga

SEQ ID NO: 638927 - RNA, 19 nt, Homo sapiens
  misc_RNA (1)...(19): siRNA sense strand
guagacauauucgccuugu

SEQ ID NO: 638928 - RNA, 19 nt, Homo sapiens
  misc_RNA (1)...(19): siRNA sense strand
gagguuaucagcugacauc

SEQ ID NO: 638929 - RNA, 19 nt, Homo sapiens
  misc_RNA (1)...(19): siRNA sense strand
gggcuccgcugacaguaca

SEQ ID NO: 638930 - RNA, 19 nt, Homo sapiens
  misc_RNA (1)...(19): siRNA sense strand
cagauuucauugucaagau

SEQ ID NO: 638931 - RNA, 19 nt, Homo sapiens
  misc_RNA (1)...(19): siRNA sense strand
acuuauaucuggaaaccaa

SEQ ID NO: 638932 - RNA, 19 nt, Homo sapiens
  misc_RNA (1)...(19): siRNA sense strand
gacaaagagauacugagaa

SEQ ID NO: 638933 - RNA, 19 nt, Homo sapiens
  misc_RNA (1)...(19): siRNA sense strand
gaagaguggaaaugcaugu

SEQ ID NO: 638934 - RNA, 19 nt, Homo sapiens
  misc_RNA (1)...(19): siRNA sense strand
gagacggauuucuuuccuu

SEQ ID NO: 638935 - RNA, 19 nt, Homo sapiens
  misc_RNA (1)...(19): siRNA sense strand
agucucaacuccacaggaa

SEQ ID NO: 638936 - RNA, 19 nt, Homo sapiens
  misc_RNA (1)...(19): siRNA sense strand
ggagacggauuucuuuccu

SEQ ID NO: 638937 - RNA, 19 nt, Homo sapiens
  misc_RNA (1)...(19): siRNA sense strand
acucacagcagauuucauu

SEQ ID NO: 638938 - RNA, 19 nt, Homo sapiens
  misc_RNA (1)...(19): siRNA sense strand
ggacugcccaccagaagca

SEQ ID NO: 638939 - RNA, 19 nt, Homo sapiens
  misc_RNA (1)...(19): siRNA sense strand
agaaauuuccagacaaaga

SEQ ID NO: 638940 - RNA, 19 nt, Homo sapiens
  misc_RNA (1)...(19): siRNA sense strand
gcaccgucaaggaagauaa

SEQ ID NO: 638941 - RNA, 19 nt, Homo sapiens
  misc_RNA (1)...(19): siRNA sense strand
gcagauuucauugucaaga

SEQ ID NO: 638942 - RNA, 19 nt, Homo sapiens
  misc_RNA (1)...(19): siRNA sense strand
cacagcagauuucauuguc

SEQ ID NO: 638943 - RNA, 19 nt, Homo sapiens
  misc_RNA (1)...(19): siRNA sense strand
guacaguccaguucaucuu

SEQ ID NO: 638944 - RNA, 19 nt, Homo sapiens
  misc_RNA (1)...(19): siRNA sense strand
ggaccacucacagcagauu

SEQ ID NO: 638945 - RNA, 19 nt, Homo sapiens
  misc_RNA (1)...(19): siRNA sense strand
gagugcaacuuggauccuu

SEQ ID NO: 638946 - RNA, 19 nt, Homo sapiens
  misc_RNA (1)...(19): siRNA sense strand
acauauucgccuugucuua

SEQ ID NO: 638947 - RNA, 19 nt, Homo sapiens
  misc_RNA (1)...(19): siRNA sense strand
ucacagcagauuucauugu

SEQ ID NO: 638948 - RNA, 19 nt, Homo sapiens
  misc_RNA (1)...(19): siRNA sense strand
auacagaacaugcaguaau

SEQ ID NO: 638949 - RNA, 19 nt, Homo sapiens
  misc_RNA (1)...(19): siRNA sense strand
auauucgccuugucuuaaa

SEQ ID NO: 638950 - RNA, 19 nt, Homo sapiens
  misc_RNA (1)...(19): siRNA sense strand
ccagacaaagagauacuga

SEQ ID NO: 638951 - RNA, 19 nt, Homo sapiens
  misc_RNA (1)...(19): siRNA sense strand
caacuccacaggaacuuuc

SEQ ID NO: 638952 - RNA, 19 nt, Homo sapiens
  misc_RNA (1)...(19): siRNA sense strand
ggcuuccugugucuaauga

SEQ ID NO: 638953 - RNA, 19 nt, Homo sapiens
  misc_RNA (1)...(19): siRNA sense strand
gagcugugaaggaagaaau

SEQ ID NO: 638954 - RNA, 19 nt, Homo sapiens
  misc_RNA (1)...(19): siRNA sense strand
caaccaaaucggaugauac

SEQ ID NO: 638955 - RNA, 19 nt, Homo sapiens
  misc_RNA (1)...(19): siRNA sense strand
ugaauggcuuccugugucu

SEQ ID NO: 638956 - RNA, 19 nt, Homo sapiens
  misc_RNA (1)...(19): siRNA sense strand
gauacagaacaugcaguaa

SEQ ID NO: 638957 - RNA, 19 nt, Homo sapiens
  misc_RNA (1)...(19): siRNA sense strand
gagaacaucaaacccaaac

SEQ ID NO: 638958 - RNA, 19 nt, Homo sapiens
  misc_RNA (1)...(19): siRNA sense strand
caguucaucuucuaucaac

SEQ ID NO: 638959 - RNA, 19 nt, Homo sapiens
  misc_RNA (1)...(19): siRNA sense strand
ugacaguacaguccaguuc

SEQ ID NO: 638960 - RNA, 19 nt, Homo sapiens
  misc_RNA (1)...(19): siRNA sense strand
uuguugaacuagcaccuaa

SEQ ID NO: 638961 - RNA, 19 nt, Homo sapiens
  misc_RNA (1)...(19): siRNA sense strand
guggaagaguggaaaugca

SEQ ID NO: 638962 - RNA, 19 nt, Homo sapiens
  misc_RNA (1)...(19): siRNA sense strand
cgucaaggaagauaacugu

SEQ ID NO: 638963 - RNA, 19 nt, Homo sapiens
  misc_RNA (1)...(19): siRNA sense strand
gguuuaugccaaauuguug

SEQ ID NO: 638964 - RNA, 19 nt, Homo sapiens
  misc_RNA (1)...(19): siRNA sense strand
guugcuauacagaaucuuu

SEQ ID NO: 638965 - RNA, 19 nt, Homo sapiens
  misc_RNA (1)...(19): siRNA sense strand
caagugccaagccaaagga

SEQ ID NO: 638966 - RNA, 19 nt, Homo sapiens
  misc_RNA (1)...(19): siRNA sense strand
gacaguacaguccaguuca

SEQ ID NO: 638967 - RNA, 19 nt, Homo sapiens
  misc_RNA (1)...(19): siRNA sense strand
uuccagaaauuuccagaca

SEQ ID NO: 638968 - RNA, 19 nt, Homo sapiens
  misc_RNA (1)...(19): siRNA sense strand
gacuaaaggugaaaacagu

SEQ ID NO: 638969 - RNA, 19 nt, Homo sapiens
  misc_RNA (1)...(19): siRNA sense strand
uaaaagguccugaucacuu

SEQ ID NO: 638970 - RNA, 19 nt, Homo sapiens
  misc_RNA (1)...(19): siRNA sense strand
ccagcucuccgcaaccaaa

SEQ ID NO: 638971 - RNA, 19 nt, Homo sapiens
  misc_RNA (1)...(19): siRNA sense strand
ucacuuauaucuggaaacc

SEQ ID NO: 638972 - RNA, 19 nt, Homo sapiens
  misc_RNA (1)...(19): siRNA sense strand
guccugaucacuuauaucu

SEQ ID NO: 638973 - RNA, 19 nt, Homo sapiens
  misc_RNA (1)...(19): siRNA sense strand
agugguuuaugccaaauug

SEQ ID NO: 638974 - RNA, 19 nt, Homo sapiens
  misc_RNA (1)...(19): siRNA sense strand
caguccaguucaucuucua

SEQ ID NO: 638975 - RNA, 19 nt, Homo sapiens
  misc_RNA (1)...(19): siRNA sense strand
gguccgagggcaguauaaa

SEQ ID NO: 638976 - RNA, 19 nt, Homo sapiens
  misc_RNA (1)...(19): siRNA sense strand
gguacgcguugcuauacag

SEQ ID NO: 638977 - RNA, 19 nt, Homo sapiens
  misc_RNA (1)...(19): siRNA sense strand
ggaugauacugugguugca

SEQ ID NO: 638978 - RNA, 19 nt, Homo sapiens
  misc_RNA (1)...(19): siRNA sense strand
acgcguugcuauacagaau

SEQ ID NO: 638979 - RNA, 19 nt, Homo sapiens
  misc_RNA (1)...(19): siRNA sense strand
uccagaaauuuccagacaa

SEQ ID NO: 638980 - RNA, 19 nt, Homo sapiens
  misc_RNA (1)...(19): siRNA sense strand
gugccaagccaaaggaaca

SEQ ID NO: 638981 - RNA, 19 nt, Homo sapiens
  misc_RNA (1)...(19): siRNA sense strand
gcguugcuauacagaaucu

SEQ ID NO: 638982 - RNA, 19 nt, Homo sapiens
  misc_RNA (1)...(19): siRNA sense strand
gaccacucacagcagauuu

SEQ ID NO: 638983 - RNA, 19 nt, Homo sapiens
  misc_RNA (1)...(19): siRNA sense strand
acagcagauuucauuguca

SEQ ID NO: 638984 - RNA, 19 nt, Homo sapiens
  misc_RNA (1)...(19): siRNA sense strand
acagaaucuuuggauaugu

SEQ ID NO: 638985 - RNA, 19 nt, Homo sapiens
  misc_RNA (1)...(19): siRNA sense strand
uccaguucaucuucuauca

SEQ ID NO: 638986 - RNA, 19 nt, Homo sapiens
  misc_RNA (1)...(19): siRNA sense strand
acaguacaguccaguucau

SEQ ID NO: 638987 - RNA, 19 nt, Homo sapiens
  misc_RNA (1)...(19): siRNA sense strand
gguugcaauucccuaugga

SEQ ID NO: 638988 - RNA, 19 nt, Homo sapiens
  misc_RNA (1)...(19): siRNA sense strand
gaggaggacuucaucucua

SEQ ID NO: 638989 - RNA, 19 nt, Homo sapiens
  misc_RNA (1)...(19): siRNA sense strand
ggccugaucugguggauga

SEQ ID NO: 638990 - RNA, 19 nt, Homo sapiens
  misc_RNA (1)...(19): siRNA sense strand
ccucgaguaucuugcauua

SEQ ID NO: 638991 - RNA, 19 nt, Homo sapiens
  misc_RNA (1)...(19): siRNA sense strand
ggaccuggaucccgucaug

SEQ ID NO: 638992 - RNA, 19 nt, Homo sapiens
  misc_RNA (1)...(19): siRNA sense strand
gcagcuuccuccucgagua

SEQ ID NO: 638993 - RNA, 19 nt, Homo sapiens
  misc_RNA (1)...(19): siRNA sense strand
ugacagugcuaucauuuua

SEQ ID NO: 638994 - RNA, 19 nt, Homo sapiens
  misc_RNA (1)...(19): siRNA sense strand
gcaggugaccggcuucaaa

SEQ ID NO: 638995 - RNA, 19 nt, Homo sapiens
  misc_RNA (1)...(19): siRNA sense strand
gguaaagccuggcccuuag

SEQ ID NO: 638996 - RNA, 19 nt, Homo sapiens
  misc_RNA (1)...(19): siRNA sense strand
caagauagacggcuucaag

SEQ ID NO: 638997 - RNA, 19 nt, Homo sapiens
  misc_RNA (1)...(19): siRNA sense strand
caggugauauggaguguau

SEQ ID NO: 638998 - RNA, 19 nt, Homo sapiens
  misc_RNA (1)...(19): siRNA sense strand
ucaagggcaugaagagcua

SEQ ID NO: 638999 - RNA, 19 nt, Homo sapiens
  misc_RNA (1)...(19): siRNA sense strand
ccaccaagcagaccaaguu

SEQ ID NO: 639000 - RNA, 19 nt, Homo sapiens
  misc_RNA (1)...(19): siRNA sense strand
ucaagugcuucaccaagaa

SEQ ID NO: 639001 - RNA, 19 nt, Homo sapiens
  misc_RNA (1)...(19): siRNA sense strand
ggagguggagagcaagaua

SEQ ID NO: 639002 - RNA, 19 nt, Homo sapiens
  misc_RNA (1)...(19): siRNA sense strand
ggaagcagggcaagaggaa

SEQ ID NO: 639003 - RNA, 19 nt, Homo sapiens
  misc_RNA (1)...(19): siRNA sense strand
cagcagcaccgacgagaaa

SEQ ID NO: 639004 - RNA, 19 nt, Homo sapiens
  misc_RNA (1)...(19): siRNA sense strand
gcaagaggaaggccgagaa

SEQ ID NO: 639005 - RNA, 19 nt, Homo sapiens
  misc_RNA (1)...(19): siRNA sense strand
caucauccacguucagaaa

SEQ ID NO: 639006 - RNA, 19 nt, Homo sapiens
  misc_RNA (1)...(19): siRNA sense strand
aggaggacuucaucucuaa

SEQ ID NO: 639007 - RNA, 19 nt, Homo sapiens
  misc_RNA (1)...(19): siRNA sense strand
ucucgaagguucaaagagu

SEQ ID NO: 639008 - RNA, 19 nt, Homo sapiens
  misc_RNA (1)...(19): siRNA sense strand
ggugauauggaguguauug

SEQ ID NO: 639009 - RNA, 19 nt, Homo sapiens
  misc_RNA (1)...(19): siRNA sense strand
ggagaacccaggagagauc

SEQ ID NO: 639010 - RNA, 19 nt, Homo sapiens
  misc_RNA (1)...(19): siRNA sense strand
gggaaugaguacucuuucu

SEQ ID NO: 639011 - RNA, 19 nt, Homo sapiens
  misc_RNA (1)...(19): siRNA sense strand
ccaagcagaccaaguucaa

SEQ ID NO: 639012 - RNA, 19 nt, Homo sapiens
  misc_RNA (1)...(19): siRNA sense strand
agagcuacaucuccuacaa

SEQ ID NO: 639013 - RNA, 19 nt, Homo sapiens
  misc_RNA (1)...(19): siRNA sense strand
aagaguaccuuugaugaca

SEQ ID NO: 639014 - RNA, 19 nt, Homo sapiens
  misc_RNA (1)...(19): siRNA sense strand
ucgaguaucuugcauuagg

SEQ ID NO: 639015 - RNA, 19 nt, Homo sapiens
  misc_RNA (1)...(19): siRNA sense strand
guuucagacucauauucua

SEQ ID NO: 639016 - RNA, 19 nt, Homo sapiens
  misc_RNA (1)...(19): siRNA sense strand
ccacacggccaacgaguuc

SEQ ID NO: 639017 - RNA, 19 nt, Homo sapiens
  misc_RNA (1)...(19): siRNA sense strand
gcccuuagagcaggugaua

SEQ ID NO: 639018 - RNA, 19 nt, Homo sapiens
  misc_RNA (1)...(19): siRNA sense strand
ggaaugaguacucuuucuc

SEQ ID NO: 639019 - RNA, 19 nt, Homo sapiens
  misc_RNA (1)...(19): siRNA sense strand
uaacuucccggacaucauc

SEQ ID NO: 639020 - RNA, 19 nt, Homo sapiens
  misc_RNA (1)...(19): siRNA sense strand
gcagcgagcaggacaucga

SEQ ID NO: 639021 - RNA, 19 nt, Homo sapiens
  misc_RNA (1)...(19): siRNA sense strand
uagggaaugaguacucuuu

SEQ ID NO: 639022 - RNA, 19 nt, Homo sapiens
  misc_RNA (1)...(19): siRNA sense strand
gcacuucgacuggcuguac

SEQ ID NO: 639023 - RNA, 19 nt, Homo sapiens
  misc_RNA (1)...(19): siRNA sense strand
cucgaagguucaaagagua

SEQ ID NO: 639024 - RNA, 19 nt, Homo sapiens
  misc_RNA (1)...(19): siRNA sense strand
agaggaaggccgagaagga

SEQ ID NO: 639025 - RNA, 19 nt, Homo sapiens
  misc_RNA (1)...(19): siRNA sense strand
uucaagugcuucaccaaga

SEQ ID NO: 639026 - RNA, 19 nt, Homo sapiens
  misc_RNA (1)...(19): siRNA sense strand
guaaagccuggcccuuaga

SEQ ID NO: 639027 - RNA, 19 nt, Homo sapiens
  misc_RNA (1)...(19): siRNA sense strand
ccuuagagcaggugauaug

SEQ ID NO: 639028 - RNA, 19 nt, Homo sapiens
  misc_RNA (1)...(19): siRNA sense strand
ugcaggagguggagagcaa

SEQ ID NO: 639029 - RNA, 19 nt, Homo sapiens
  misc_RNA (1)...(19): siRNA sense strand
agguaaagccuggcccuua

SEQ ID NO: 639030 - RNA, 19 nt, Homo sapiens
  misc_RNA (1)...(19): siRNA sense strand
gccaaggcagcgaugauga

SEQ ID NO: 639031 - RNA, 19 nt, Homo sapiens
  misc_RNA (1)...(19): siRNA sense strand
caccggagaugccuaugac

SEQ ID NO: 639032 - RNA, 19 nt, Homo sapiens
  misc_RNA (1)...(19): siRNA sense strand
gaguaccuuugaugacagu

SEQ ID NO: 639033 - RNA, 19 nt, Homo sapiens
  misc_RNA (1)...(19): siRNA sense strand
gcaugaagagcuacaucuc

SEQ ID NO: 639034 - RNA, 19 nt, Homo sapiens
  misc_RNA (1)...(19): siRNA sense strand
uagaguguaaguuggauug

SEQ ID NO: 639035 - RNA, 19 nt, Homo sapiens
  misc_RNA (1)...(19): siRNA sense strand
ggacaucauccacguucag

SEQ ID NO: 639036 - RNA, 19 nt, Homo sapiens
  misc_RNA (1)...(19): siRNA sense strand
gagcuacaucuccuacaag

SEQ ID NO: 639037 - RNA, 19 nt, Homo sapiens
  misc_RNA (1)...(19): siRNA sense strand
ggaccuauuagcgcuguau

SEQ ID NO: 639038 - RNA, 19 nt, Homo sapiens
  misc_RNA (1)...(19): siRNA sense strand
ucaaucgcuucuccaccuu

SEQ ID NO: 639039 - RNA, 19 nt, Homo sapiens
  misc_RNA (1)...(19): siRNA sense strand
cgaggaggacuucaucucu

SEQ ID NO: 639040 - RNA, 19 nt, Homo sapiens
  misc_RNA (1)...(19): siRNA sense strand
ucaccggagaugccuauga

SEQ ID NO: 639041 - RNA, 19 nt, Homo sapiens
  misc_RNA (1)...(19): siRNA sense strand
caagaggaaggccgagaag

SEQ ID NO: 639042 - RNA, 19 nt, Homo sapiens
  misc_RNA (1)...(19): siRNA sense strand
cguggacgccugggucuuu

SEQ ID NO: 639043 - RNA, 19 nt, Homo sapiens
  misc_RNA (1)...(19): siRNA sense strand
gagaaguucccggucaucu

SEQ ID NO: 639044 - RNA, 19 nt, Homo sapiens
  misc_RNA (1)...(19): siRNA sense strand
ugauauggaguguauugug

SEQ ID NO: 639045 - RNA, 19 nt, Homo sapiens
  misc_RNA (1)...(19): siRNA sense strand
gacaucauccacguucaga

SEQ ID NO: 639046 - RNA, 19 nt, Homo sapiens
  misc_RNA (1)...(19): siRNA sense strand
gaagacaucuccaugaauu

SEQ ID NO: 639047 - RNA, 19 nt, Homo sapiens
  misc_RNA (1)...(19): siRNA sense strand
caccaaggcugcucuguuu

SEQ ID NO: 639048 - RNA, 19 nt, Homo sapiens
  misc_RNA (1)...(19): siRNA sense strand
ggaauuacacugucacuug

SEQ ID NO: 639049 - RNA, 19 nt, Homo sapiens
  misc_RNA (1)...(19): siRNA sense strand
guaugaagcuugacauugg

SEQ ID NO: 639050 - RNA, 19 nt, Homo sapiens
  misc_RNA (1)...(19): siRNA sense strand
gaacuugggcugcaucaau

SEQ ID NO: 639051 - RNA, 19 nt, Homo sapiens
  misc_RNA (1)...(19): siRNA sense strand
gagguaguaugaagcuuga

SEQ ID NO: 639052 - RNA, 19 nt, Homo sapiens
  misc_RNA (1)...(19): siRNA sense strand
caucaaugcucaaggaaag

SEQ ID NO: 639053 - RNA, 19 nt, Homo sapiens
  misc_RNA (1)...(19): siRNA sense strand
gcaccaaggcugcucuguu

SEQ ID NO: 639054 - RNA, 19 nt, Homo sapiens
  misc_RNA (1)...(19): siRNA sense strand
gaaaggaagacaucuccau

SEQ ID NO: 639055 - RNA, 19 nt, Homo sapiens
  misc_RNA (1)...(19): siRNA sense strand
aggaagacaucuccaugaa

SEQ ID NO: 639056 - RNA, 19 nt, Homo sapiens
  misc_RNA (1)...(19): siRNA sense strand
agaaggugcuggugacugu

SEQ ID NO: 639057 - RNA, 19 nt, Homo sapiens
  misc_RNA (1)...(19): siRNA sense strand
gaaaauccccaaaguagga

SEQ ID NO: 639058 - RNA, 19 nt, Homo sapiens
  misc_RNA (1)...(19): siRNA sense strand
gcguuuccaugucacguaa

SEQ ID NO: 639059 - RNA, 19 nt, Homo sapiens
  misc_RNA (1)...(19): siRNA sense strand
ggaagacaucuccaugaau

SEQ ID NO: 639060 - RNA, 19 nt, Homo sapiens
  misc_RNA (1)...(19): siRNA sense strand
gccaggagguaguaugaag

SEQ ID NO: 639061 - RNA, 19 nt, Homo sapiens
  misc_RNA (1)...(19): siRNA sense strand
cauccaccaugugcaguaa

SEQ ID NO: 639062 - RNA, 19 nt, Homo sapiens
  misc_RNA (1)...(19): siRNA sense strand
caaggcugcucuguuucuu

SEQ ID NO: 639063 - RNA, 19 nt, Homo sapiens
  misc_RNA (1)...(19): siRNA sense strand
ccagcgcguuuccauguca

SEQ ID NO: 639064 - RNA, 19 nt, Homo sapiens
  misc_RNA (1)...(19): siRNA sense strand
aggcugcucuguuucuuuc

SEQ ID NO: 639065 - RNA, 19 nt, Homo sapiens
  misc_RNA (1)...(19): siRNA sense strand
ucaaggaaaggaagacauc

SEQ ID NO: 639066 - RNA, 19 nt, Homo sapiens
  misc_RNA (1)...(19): siRNA sense strand
aaggaagacaucuccauga

SEQ ID NO: 639067 - RNA, 19 nt, Homo sapiens
  misc_RNA (1)...(19): siRNA sense strand
ugaauuccguucccaucca

SEQ ID NO: 639068 - RNA, 19 nt, Homo sapiens
  misc_RNA (1)...(19): siRNA sense strand
gugccaggagguaguauga

SEQ ID NO: 639069 - RNA, 19 nt, Homo sapiens
  misc_RNA (1)...(19): siRNA sense strand
aacuugggcugcaucaaug

SEQ ID NO: 639070 - RNA, 19 nt, Homo sapiens
  misc_RNA (1)...(19): siRNA sense strand
ggcuugccuuucugaguga

SEQ ID NO: 639071 - RNA, 19 nt, Homo sapiens
  misc_RNA (1)...(19): siRNA sense strand
ccaaggcugcucuguuucu

SEQ ID NO: 639072 - RNA, 19 nt, Homo sapiens
  misc_RNA (1)...(19): siRNA sense strand
guacuugcugcugucgaua

SEQ ID NO: 639073 - RNA, 19 nt, Homo sapiens
  misc_RNA (1)...(19): siRNA sense strand
gguaguaugaagcuugaca

SEQ ID NO: 639074 - RNA, 19 nt, Homo sapiens
  misc_RNA (1)...(19): siRNA sense strand
gauauuggggcuugccuuu

SEQ ID NO: 639075 - RNA, 19 nt, Homo sapiens
  misc_RNA (1)...(19): siRNA sense strand
gaagacaucuccaugaauu

SEQ ID NO: 639076 - RNA, 19 nt, Homo sapiens
  misc_RNA (1)...(19): siRNA sense strand
caccaaggcugcucuguuu

SEQ ID NO: 639077 - RNA, 19 nt, Homo sapiens
  misc_RNA (1)...(19): siRNA sense strand
ggaauuacacugucacuug

SEQ ID NO: 639078 - RNA, 19 nt, Homo sapiens
  misc_RNA (1)...(19): siRNA sense strand
gaacuugggcugcaucaau

SEQ ID NO: 639079 - RNA, 19 nt, Homo sapiens
  misc_RNA (1)...(19): siRNA sense strand
caucaaugcucaaggaaag

SEQ ID NO: 639080 - RNA, 19 nt, Homo sapiens
  misc_RNA (1)...(19): siRNA sense strand
gcaccaaggcugcucuguu

SEQ ID NO: 639081 - RNA, 19 nt, Homo sapiens
  misc_RNA (1)...(19): siRNA sense strand
gaaaggaagacaucuccau

SEQ ID NO: 639082 - RNA, 19 nt, Homo sapiens
  misc_RNA (1)...(19): siRNA sense strand
aggaagacaucuccaugaa

SEQ ID NO: 639083 - RNA, 19 nt, Homo sapiens
  misc_RNA (1)...(19): siRNA sense strand
agaaggugcuggugacugu

SEQ ID NO: 639084 - RNA, 19 nt, Homo sapiens
  misc_RNA (1)...(19): siRNA sense strand
gcguuuccaugucacguaa

SEQ ID NO: 639085 - RNA, 19 nt, Homo sapiens
  misc_RNA (1)...(19): siRNA sense strand
ggaagacaucuccaugaau

SEQ ID NO: 639086 - RNA, 19 nt, Homo sapiens
  misc_RNA (1)...(19): siRNA sense strand
cauccaccaugugcaguaa

SEQ ID NO: 639087 - RNA, 19 nt, Homo sapiens
  misc_RNA (1)...(19): siRNA sense strand
caaggcugcucuguuucuu

SEQ ID NO: 639088 - RNA, 19 nt, Homo sapiens
  misc_RNA (1)...(19): siRNA sense strand
ccagcgcguuuccauguca

SEQ ID NO: 639089 - RNA, 19 nt, Homo sapiens
  misc_RNA (1)...(19): siRNA sense strand
aggcugcucuguuucuuuc

SEQ ID NO: 639090 - RNA, 19 nt, Homo sapiens
  misc_RNA (1)...(19): siRNA sense strand
ucaaggaaaggaagacauc

SEQ ID NO: 639091 - RNA, 19 nt, Homo sapiens
  misc_RNA (1)...(19): siRNA sense strand
aaggaagacaucuccauga

SEQ ID NO: 639092 - RNA, 19 nt, Homo sapiens
  misc_RNA (1)...(19): siRNA sense strand
ugaauuccguucccaucca

SEQ ID NO: 639093 - RNA, 19 nt, Homo sapiens
  misc_RNA (1)...(19): siRNA sense strand
aacuugggcugcaucaaug

SEQ ID NO: 639094 - RNA, 19 nt, Homo sapiens
  misc_RNA (1)...(19): siRNA sense strand
ccaaggcugcucuguuucu

SEQ ID NO: 639095 - RNA, 19 nt, Homo sapiens
  misc_RNA (1)...(19): siRNA sense strand
gauaaugccuguguucuuu

SEQ ID NO: 639096 - RNA, 19 nt, Homo sapiens
  misc_RNA (1)...(19): siRNA sense strand
gaacugcuauaaauacauc

SEQ ID NO: 639097 - RNA, 19 nt, Homo sapiens
  misc_RNA (1)...(19): siRNA sense strand
uuaguucucucaccuauuu

SEQ ID NO: 639098 - RNA, 19 nt, Homo sapiens
  misc_RNA (1)...(19): siRNA sense strand
ggaagugacucauccaaac

SEQ ID NO: 639099 - RNA, 19 nt, Homo sapiens
  misc_RNA (1)...(19): siRNA sense strand
ucaguucaaugcugguuua

SEQ ID NO: 639100 - RNA, 19 nt, Homo sapiens
  misc_RNA (1)...(19): siRNA sense strand
caaagaauaucuggaucaa

SEQ ID NO: 639101 - RNA, 19 nt, Homo sapiens
  misc_RNA (1)...(19): siRNA sense strand
guucaaugcugguuuaugg

SEQ ID NO: 639102 - RNA, 19 nt, Homo sapiens
  misc_RNA (1)...(19): siRNA sense strand
guuuggaacugcuauaaau

SEQ ID NO: 639103 - RNA, 19 nt, Homo sapiens
  misc_RNA (1)...(19): siRNA sense strand
ugccaagaaucaaagaaua

SEQ ID NO: 639104 - RNA, 19 nt, Homo sapiens
  misc_RNA (1)...(19): siRNA sense strand
cuaauuaacuguguuugga

SEQ ID NO: 639105 - RNA, 19 nt, Homo sapiens
  misc_RNA (1)...(19): siRNA sense strand
caugccagcugucaacauu

SEQ ID NO: 639106 - RNA, 19 nt, Homo sapiens
  misc_RNA (1)...(19): siRNA sense strand
caaguggguuggcugauuc

SEQ ID NO: 639107 - RNA, 19 nt, Homo sapiens
  misc_RNA (1)...(19): siRNA sense strand
aagaauaucuggaucaacu

SEQ ID NO: 639108 - RNA, 19 nt, Homo sapiens
  misc_RNA (1)...(19): siRNA sense strand
guacaugguaguaaaccua

SEQ ID NO: 639109 - RNA, 19 nt, Homo sapiens
  misc_RNA (1)...(19): siRNA sense strand
ucaaguggguuggcugauu

SEQ ID NO: 639110 - RNA, 19 nt, Homo sapiens
  misc_RNA (1)...(19): siRNA sense strand
guaauuacuauucgucuga

SEQ ID NO: 639111 - RNA, 19 nt, Homo sapiens
  misc_RNA (1)...(19): siRNA sense strand
gguaguaaaccuauugaug

SEQ ID NO: 639112 - RNA, 19 nt, Homo sapiens
  misc_RNA (1)...(19): siRNA sense strand
ucaguugccugguugcuau

SEQ ID NO: 639113 - RNA, 19 nt, Homo sapiens
  misc_RNA (1)...(19): siRNA sense strand
ugaagcaccuccucaguac

SEQ ID NO: 639114 - RNA, 19 nt, Homo sapiens
  misc_RNA (1)...(19): siRNA sense strand
ugauuccauucuucuguua

SEQ ID NO: 639115 - RNA, 19 nt, Homo sapiens
  misc_RNA (1)...(19): siRNA sense strand
agucaucgguaauuacuau

SEQ ID NO: 639116 - RNA, 19 nt, Homo sapiens
  misc_RNA (1)...(19): siRNA sense strand
guucauuguucuuguguuc

SEQ ID NO: 639117 - RNA, 19 nt, Homo sapiens
  misc_RNA (1)...(19): siRNA sense strand
cugagagaauggcugauaa

SEQ ID NO: 639118 - RNA, 19 nt, Homo sapiens
  misc_RNA (1)...(19): siRNA sense strand
uggguuggcugauuccauu

SEQ ID NO: 639119 - RNA, 19 nt, Homo sapiens
  misc_RNA (1)...(19): siRNA sense strand
ccugguacaugguaguaaa

SEQ ID NO: 639120 - RNA, 19 nt, Homo sapiens
  misc_RNA (1)...(19): siRNA sense strand
ucaccuauuugccaagaau

SEQ ID NO: 639121 - RNA, 19 nt, Homo sapiens
  misc_RNA (1)...(19): siRNA sense strand
ccuaugaaauggccgugaa

SEQ ID NO: 639122 - RNA, 19 nt, Homo sapiens
  misc_RNA (1)...(19): siRNA sense strand
gaagucaucgguaauuacu

SEQ ID NO: 639123 - RNA, 19 nt, Homo sapiens
  misc_RNA (1)...(19): siRNA sense strand
ugccggagauugcugugua

SEQ ID NO: 639124 - RNA, 19 nt, Homo sapiens
  misc_RNA (1)...(19): siRNA sense strand
gccaagaaucaaagaauau

SEQ ID NO: 639125 - RNA, 19 nt, Homo sapiens
  misc_RNA (1)...(19): siRNA sense strand
accaccaccuccuuacuua

SEQ ID NO: 639126 - RNA, 19 nt, Homo sapiens
  misc_RNA (1)...(19): siRNA sense strand
gagagaauggcugauaaug

SEQ ID NO: 639127 - RNA, 19 nt, Homo sapiens
  misc_RNA (1)...(19): siRNA sense strand
ucaaagaauaucuggauca

SEQ ID NO: 639128 - RNA, 19 nt, Homo sapiens
  misc_RNA (1)...(19): siRNA sense strand
aggcuuaucuaauuaacug

SEQ ID NO: 639129 - RNA, 19 nt, Homo sapiens
  misc_RNA (1)...(19): siRNA sense strand
cgucucuguucuuauguuu

SEQ ID NO: 639130 - RNA, 19 nt, Homo sapiens
  misc_RNA (1)...(19): siRNA sense strand
gaaacgugccggagauugc

SEQ ID NO: 639131 - RNA, 19 nt, Homo sapiens
  misc_RNA (1)...(19): siRNA sense strand
uauuaguucucucaccuau

SEQ ID NO: 639132 - RNA, 19 nt, Homo sapiens
  misc_RNA (1)...(19): siRNA sense strand
uguguacccugccuuugaa

SEQ ID NO: 639133 - RNA, 19 nt, Homo sapiens
  misc_RNA (1)...(19): siRNA sense strand
gcagugaccgguucuacag

SEQ ID NO: 639134 - RNA, 19 nt, Homo sapiens
  misc_RNA (1)...(19): siRNA sense strand
gaagugacucauccaaacu

SEQ ID NO: 639135 - RNA, 19 nt, Homo sapiens
  misc_RNA (1)...(19): siRNA sense strand
ugccgucucuguucuuaug

SEQ ID NO: 639136 - RNA, 19 nt, Homo sapiens
  misc_RNA (1)...(19): siRNA sense strand
aagaaccaccaccuccuua

SEQ ID NO: 639137 - RNA, 19 nt, Homo sapiens
  misc_RNA (1)...(19): siRNA sense strand
uugaagcaccuccucagua

SEQ ID NO: 639138 - RNA, 19 nt, Homo sapiens
  misc_RNA (1)...(19): siRNA sense strand
ucauuguucuuguguucuu

SEQ ID NO: 639139 - RNA, 19 nt, Homo sapiens
  misc_RNA (1)...(19): siRNA sense strand
guucuuugccuuauucauc

SEQ ID NO: 639140 - RNA, 19 nt, Homo sapiens
  misc_RNA (1)...(19): siRNA sense strand
cugucaacauucaguauga

SEQ ID NO: 639141 - RNA, 19 nt, Homo sapiens
  misc_RNA (1)...(19): siRNA sense strand
caugguaguaaaccuauug

SEQ ID NO: 639142 - RNA, 19 nt, Homo sapiens
  misc_RNA (1)...(19): siRNA sense strand
ucugagagaauggcugaua

SEQ ID NO: 639143 - RNA, 19 nt, Homo sapiens
  misc_RNA (1)...(19): siRNA sense strand
gaauaucuggaucaacuac

SEQ ID NO: 639144 - RNA, 19 nt, Homo sapiens
  misc_RNA (1)...(19): siRNA sense strand
gcugauaaugccuguguuc

SEQ ID NO: 639145 - RNA, 19 nt, Homo sapiens
  misc_RNA (1)...(19): siRNA sense strand
gaaccaccaccuccuuacu

SEQ ID NO: 639146 - RNA, 19 nt, Homo sapiens
  misc_RNA (1)...(19): siRNA sense strand
gcaccuccucaguacguuu

SEQ ID NO: 639147 - RNA, 19 nt, Homo sapiens
  misc_RNA (1)...(19): siRNA sense strand
uggaacugcuauaaauaca

SEQ ID NO: 639148 - RNA, 19 nt, Homo sapiens
  misc_RNA (1)...(19): siRNA sense strand
ugccagcugucaacauuca

SEQ ID NO: 639149 - RNA, 19 nt, Homo sapiens
  misc_RNA (1)...(19): siRNA sense strand
ugauaaugccuguguucuu

SEQ ID NO: 639150 - RNA, 19 nt, Homo sapiens
  misc_RNA (1)...(19): siRNA sense strand
uguguucuuugccuuauuc

SEQ ID NO: 639151 - RNA, 19 nt, Homo sapiens
  misc_RNA (1)...(19): siRNA sense strand
ccaagaaucaaagaauauc

SEQ ID NO: 639152 - RNA, 19 nt, Homo sapiens
  misc_RNA (1)...(19): siRNA sense strand
cugauuccauucuucuguu

SEQ ID NO: 639153 - RNA, 19 nt, Homo sapiens
  misc_RNA (1)...(19): siRNA sense strand
ccagcugccuccuguucau

SEQ ID NO: 639154 - RNA, 19 nt, Homo sapiens
  misc_RNA (1)...(19): siRNA sense strand
aaagaaccaccaccuccuu

SEQ ID NO: 639155 - RNA, 19 nt, Homo sapiens
  misc_RNA (1)...(19): siRNA sense strand
gaccugguacaugguagua

SEQ ID NO: 639156 - RNA, 19 nt, Homo sapiens
  misc_RNA (1)...(19): siRNA sense strand
ugagagaauggcugauaau

SEQ ID NO: 639157 - RNA, 19 nt, Homo sapiens
  misc_RNA (1)...(19): siRNA sense strand
gcugucaacauucaguaug

SEQ ID NO: 639158 - RNA, 19 nt, Homo sapiens
  misc_RNA (1)...(19): siRNA sense strand
gcugauuccauucuucugu

SEQ ID NO: 639159 - RNA, 19 nt, Homo sapiens
  misc_RNA (1)...(19): siRNA sense strand
ugaaauggccgugaaaaug

SEQ ID NO: 639160 - RNA, 19 nt, Homo sapiens
  misc_RNA (1)...(19): siRNA sense strand
gaaauggccgugaaaaugc

SEQ ID NO: 639161 - RNA, 19 nt, Homo sapiens
  misc_RNA (1)...(19): siRNA sense strand
cguccucaguugccugguu

SEQ ID NO: 639162 - RNA, 19 nt, Homo sapiens
  misc_RNA (1)...(19): siRNA sense strand
cgaaacgugccggagauug

SEQ ID NO: 639163 - RNA, 19 nt, Homo sapiens
  misc_RNA (1)...(19): siRNA sense strand
ggaacugcuauaaauacau

SEQ ID NO: 639164 - RNA, 19 nt, Homo sapiens
  misc_RNA (1)...(19): siRNA sense strand
caucgguaauuacuauucg

SEQ ID NO: 639165 - RNA, 19 nt, Homo sapiens
  misc_RNA (1)...(19): siRNA sense strand
gauuuucccuacaaagaug

SEQ ID NO: 639166 - RNA, 19 nt, Homo sapiens
  misc_RNA (1)...(19): siRNA sense strand
cagcugucaacauucagua

SEQ ID NO: 639167 - RNA, 19 nt, Homo sapiens
  misc_RNA (1)...(19): siRNA sense strand
gaaaguagagcacacaaga

SEQ ID NO: 639168 - RNA, 19 nt, Homo sapiens
  misc_RNA (1)...(19): siRNA sense strand
ugacaaugcuccacaguug

SEQ ID NO: 639169 - RNA, 19 nt, Homo sapiens
  misc_RNA (1)...(19): siRNA sense strand
cgacaacccuccaguguuc

SEQ ID NO: 639170 - RNA, 19 nt, Homo sapiens
  misc_RNA (1)...(19): siRNA sense strand
agaacgcccugcucacuua

SEQ ID NO: 639171 - RNA, 19 nt, Homo sapiens
  misc_RNA (1)...(19): siRNA sense strand
cuacugcucucgcuucuga

SEQ ID NO: 639172 - RNA, 19 nt, Homo sapiens
  misc_RNA (1)...(19): siRNA sense strand
ugaaggacauuaacgacaa

SEQ ID NO: 639173 - RNA, 19 nt, Homo sapiens
  misc_RNA (1)...(19): siRNA sense strand
ggagguaaaucugcagaau

SEQ ID NO: 639174 - RNA, 19 nt, Homo sapiens
  misc_RNA (1)...(19): siRNA sense strand
ggacuuguauuacggaaac

SEQ ID NO: 639175 - RNA, 19 nt, Homo sapiens
  misc_RNA (1)...(19): siRNA sense strand
gcagaagaccgaccucaug

SEQ ID NO: 639176 - RNA, 19 nt, Homo sapiens
  misc_RNA (1)...(19): siRNA sense strand
cuccggagcuucauuuauu

SEQ ID NO: 639177 - RNA, 19 nt, Homo sapiens
  misc_RNA (1)...(19): siRNA sense strand
ugauguuucuccagauaua

SEQ ID NO: 639178 - RNA, 19 nt, Homo sapiens
  misc_RNA (1)...(19): siRNA sense strand
gacuggcaccguucaauua

SEQ ID NO: 639179 - RNA, 19 nt, Homo sapiens
  misc_RNA (1)...(19): siRNA sense strand
gaaauuaccagaaaacguu

SEQ ID NO: 639180 - RNA, 19 nt, Homo sapiens
  misc_RNA (1)...(19): siRNA sense strand
ggacaguuauugcccugau

SEQ ID NO: 639181 - RNA, 19 nt, Homo sapiens
  misc_RNA (1)...(19): siRNA sense strand
gguaaaaccucuuggacuu

SEQ ID NO: 639182 - RNA, 19 nt, Homo sapiens
  misc_RNA (1)...(19): siRNA sense strand
gcuccacaguugacuauca

SEQ ID NO: 639183 - RNA, 19 nt, Homo sapiens
  misc_RNA (1)...(19): siRNA sense strand
ucacgguacuggacaacaa

SEQ ID NO: 639184 - RNA, 19 nt, Homo sapiens
  misc_RNA (1)...(19): siRNA sense strand
ucggaacgcuggugauuca

SEQ ID NO: 639185 - RNA, 19 nt, Homo sapiens
  misc_RNA (1)...(19): siRNA sense strand
ugauaggacauauggauuu

SEQ ID NO: 639186 - RNA, 19 nt, Homo sapiens
  misc_RNA (1)...(19): siRNA sense strand
ccaccuacaagaauuacua

SEQ ID NO: 639187 - RNA, 19 nt, Homo sapiens
  misc_RNA (1)...(19): siRNA sense strand
agaagaaacuccggagcuu

SEQ ID NO: 639188 - RNA, 19 nt, Homo sapiens
  misc_RNA (1)...(19): siRNA sense strand
ggauguaaaugacaaugcu

SEQ ID NO: 639189 - RNA, 19 nt, Homo sapiens
  misc_RNA (1)...(19): siRNA sense strand
gggauauuauuuacuccuu

SEQ ID NO: 639190 - RNA, 19 nt, Homo sapiens
  misc_RNA (1)...(19): siRNA sense strand
gaagaaaguagagcacaca

SEQ ID NO: 639191 - RNA, 19 nt, Homo sapiens
  misc_RNA (1)...(19): siRNA sense strand
agaacgcccugguguccua

SEQ ID NO: 639192 - RNA, 19 nt, Homo sapiens
  misc_RNA (1)...(19): siRNA sense strand
acggugaaauuaccagaaa

SEQ ID NO: 639193 - RNA, 19 nt, Homo sapiens
  misc_RNA (1)...(19): siRNA sense strand
ggaaguuguggauguaaau

SEQ ID NO: 639194 - RNA, 19 nt, Homo sapiens
  misc_RNA (1)...(19): siRNA sense strand
agugauguuucuccagaua

SEQ ID NO: 639195 - RNA, 19 nt, Homo sapiens
  misc_RNA (1)...(19): siRNA sense strand
acaguuauugcccugauua

SEQ ID NO: 639196 - RNA, 19 nt, Homo sapiens
  misc_RNA (1)...(19): siRNA sense strand
gacaguuauugcccugauu

SEQ ID NO: 639197 - RNA, 19 nt, Homo sapiens
  misc_RNA (1)...(19): siRNA sense strand
gaaggacauuaacgacaac

SEQ ID NO: 639198 - RNA, 19 nt, Homo sapiens
  misc_RNA (1)...(19): siRNA sense strand
gauaggacauauggauuuu

SEQ ID NO: 639199 - RNA, 19 nt, Homo sapiens
  misc_RNA (1)...(19): siRNA sense strand
gagguaaaucugcagaaug

SEQ ID NO: 639200 - RNA, 19 nt, Homo sapiens
  misc_RNA (1)...(19): siRNA sense strand
aaacuccggagcuucauuu

SEQ ID NO: 639201 - RNA, 19 nt, Homo sapiens
  misc_RNA (1)...(19): siRNA sense strand
gaaacuccggagcuucauu

SEQ ID NO: 639202 - RNA, 19 nt, Homo sapiens
  misc_RNA (1)...(19): siRNA sense strand
gagaacgcccugcucacuu

SEQ ID NO: 639203 - RNA, 19 nt, Homo sapiens
  misc_RNA (1)...(19): siRNA sense strand
guuauugcccugauuagug

SEQ ID NO: 639204 - RNA, 19 nt, Homo sapiens
  misc_RNA (1)...(19): siRNA sense strand
ccgcuugacucucgguuuc

SEQ ID NO: 639205 - RNA, 19 nt, Homo sapiens
  misc_RNA (1)...(19): siRNA sense strand
acgcguggcuuucauacga

SEQ ID NO: 639206 - RNA, 19 nt, Homo sapiens
  misc_RNA (1)...(19): siRNA sense strand
agguaaaucugcagaaugg

SEQ ID NO: 639207 - RNA, 19 nt, Homo sapiens
  misc_RNA (1)...(19): siRNA sense strand
gcuggucauuguacacuuc

SEQ ID NO: 639208 - RNA, 19 nt, Homo sapiens
  misc_RNA (1)...(19): siRNA sense strand
ugacuggcaccguucaauu

SEQ ID NO: 639209 - RNA, 19 nt, Homo sapiens
  misc_RNA (1)...(19): siRNA sense strand
ccuacgagcuggugguuac

SEQ ID NO: 639210 - RNA, 19 nt, Homo sapiens
  misc_RNA (1)...(19): siRNA sense strand
ugccucagauuuagacgaa

SEQ ID NO: 639211 - RNA, 19 nt, Homo sapiens
  misc_RNA (1)...(19): siRNA sense strand
uuauugcccugauuagugu

SEQ ID NO: 639212 - RNA, 19 nt, Homo sapiens
  misc_RNA (1)...(19): siRNA sense strand
uggaaguuguggauguaaa

SEQ ID NO: 639213 - RNA, 19 nt, Homo sapiens
  misc_RNA (1)...(19): siRNA sense strand
uguggaaguuguggaugua

SEQ ID NO: 639214 - RNA, 19 nt, Homo sapiens
  misc_RNA (1)...(19): siRNA sense strand
gacaaugcuccacaguuga

SEQ ID NO: 639215 - RNA, 19 nt, Homo sapiens
  misc_RNA (1)...(19): siRNA sense strand
gaaguuguggauguaaaug

SEQ ID NO: 639216 - RNA, 19 nt, Homo sapiens
  misc_RNA (1)...(19): siRNA sense strand
ggucauuguacacuucuug

SEQ ID NO: 639217 - RNA, 19 nt, Homo sapiens
  misc_RNA (1)...(19): siRNA sense strand
ggagaacgcccugcucacu

SEQ ID NO: 639218 - RNA, 19 nt, Homo sapiens
  misc_RNA (1)...(19): siRNA sense strand
gacaggccgcugcagguuu

SEQ ID NO: 639219 - RNA, 19 nt, Homo sapiens
  misc_RNA (1)...(19): siRNA sense strand
cccaaugccucagauuuag

SEQ ID NO: 639220 - RNA, 19 nt, Homo sapiens
  misc_RNA (1)...(19): siRNA sense strand
ggagaacccucugcuuccu

SEQ ID NO: 639221 - RNA, 19 nt, Homo sapiens
  misc_RNA (1)...(19): siRNA sense strand
ccagcaaccagcagguaaa

SEQ ID NO: 639222 - RNA, 19 nt, Homo sapiens
  misc_RNA (1)...(19): siRNA sense strand
gugauaggacauauggauu

SEQ ID NO: 639223 - RNA, 19 nt, Homo sapiens
  misc_RNA (1)...(19): siRNA sense strand
gauguuucuccagauauaa

SEQ ID NO: 639224 - RNA, 19 nt, Homo sapiens
  misc_RNA (1)...(19): siRNA sense strand
gaauggggauauuauuuac

SEQ ID NO: 639225 - RNA, 19 nt, Homo sapiens
  misc_RNA (1)...(19): siRNA sense strand
guacuggacaacaaugaca

SEQ ID NO: 639226 - RNA, 19 nt, Homo sapiens
  misc_RNA (1)...(19): siRNA sense strand
cuacaacgcguggcuuuca

SEQ ID NO: 639227 - RNA, 19 nt, Homo sapiens
  misc_RNA (1)...(19): siRNA sense strand
ugguggaugucaacgugua

SEQ ID NO: 639228 - RNA, 19 nt, Homo sapiens
  misc_RNA (1)...(19): siRNA sense strand
gacucucgguuuccacuag

SEQ ID NO: 639229 - RNA, 19 nt, Homo sapiens
  misc_RNA (1)...(19): siRNA sense strand
agccgacgcugguguguuc

SEQ ID NO: 639230 - RNA, 19 nt, Homo sapiens
  misc_RNA (1)...(19): siRNA sense strand
uacuggugcuggugaaaga

SEQ ID NO: 639231 - RNA, 19 nt, Homo sapiens
  misc_RNA (1)...(19): siRNA sense strand
gcucucgguuccuguaaaa

SEQ ID NO: 639232 - RNA, 19 nt, Homo sapiens
  misc_RNA (1)...(19): siRNA sense strand
gcauuuuguuugugaauuc

SEQ ID NO: 639233 - RNA, 19 nt, Homo sapiens
  misc_RNA (1)...(19): siRNA sense strand
aagaaacuccggagcuuca

SEQ ID NO: 639234 - RNA, 19 nt, Homo sapiens
  misc_RNA (1)...(19): siRNA sense strand
acaagaauuacuacucguu

SEQ ID NO: 639235 - RNA, 19 nt, Homo sapiens
  misc_RNA (1)...(19): siRNA sense strand
auacucaagucgaggagau

SEQ ID NO: 639236 - RNA, 19 nt, Homo sapiens
  misc_RNA (1)...(19): siRNA sense strand
uaggacauauggauuuuga

SEQ ID NO: 639237 - RNA, 19 nt, Homo sapiens
  misc_RNA (1)...(19): siRNA sense strand
uaucggaacgcuggugauu

SEQ ID NO: 639238 - RNA, 19 nt, Homo sapiens
  misc_RNA (1)...(19): siRNA sense strand
ccuguauacggugaaauua

SEQ ID NO: 639239 - RNA, 19 nt, Homo sapiens
  misc_RNA (1)...(19): siRNA sense strand
caacguguaccugaucauc

SEQ ID NO: 639240 - RNA, 19 nt, Homo sapiens
  misc_RNA (1)...(19): siRNA sense strand
guguccaccuacaagaauu

SEQ ID NO: 639241 - RNA, 19 nt, Homo sapiens
  misc_RNA (1)...(19): siRNA sense strand
uuagugugaucgaccuaga

SEQ ID NO: 639242 - RNA, 19 nt, Homo sapiens
  misc_RNA (1)...(19): siRNA sense strand
acaacgcguggcuuucaua

SEQ ID NO: 639243 - RNA, 19 nt, Homo sapiens
  misc_RNA (1)...(19): siRNA sense strand
ugucuagccuguugguucu

SEQ ID NO: 639244 - RNA, 19 nt, Homo sapiens
  misc_RNA (1)...(19): siRNA sense strand
gcgcguccgaugcagauau

SEQ ID NO: 639245 - RNA, 19 nt, Homo sapiens
  misc_RNA (1)...(19): siRNA sense strand
ccaaugccucagauuuaga

SEQ ID NO: 639246 - RNA, 19 nt, Homo sapiens
  misc_RNA (1)...(19): siRNA sense strand
aaguagagcacacaagauc

SEQ ID NO: 639247 - RNA, 19 nt, Homo sapiens
  misc_RNA (1)...(19): siRNA sense strand
uccggagcuucauuuauug

SEQ ID NO: 639248 - RNA, 19 nt, Homo sapiens
  misc_RNA (1)...(19): siRNA sense strand
cgacgcugguguguucuag

SEQ ID NO: 639249 - RNA, 19 nt, Homo sapiens
  misc_RNA (1)...(19): siRNA sense strand
cugcugacaccucggauga

SEQ ID NO: 639250 - RNA, 19 nt, Homo sapiens
  misc_RNA (1)...(19): siRNA sense strand
uguccaccuacaagaauua

SEQ ID NO: 639251 - RNA, 19 nt, Homo sapiens
  misc_RNA (1)...(19): siRNA sense strand
gaaaguagagcacacaaga

SEQ ID NO: 639252 - RNA, 19 nt, Homo sapiens
  misc_RNA (1)...(19): siRNA sense strand
ugacaaugcuccacaguug

SEQ ID NO: 639253 - RNA, 19 nt, Homo sapiens
  misc_RNA (1)...(19): siRNA sense strand
cgacaacccuccaguguuc

SEQ ID NO: 639254 - RNA, 19 nt, Homo sapiens
  misc_RNA (1)...(19): siRNA sense strand
agaacgcccugcucacuua

SEQ ID NO: 639255 - RNA, 19 nt, Homo sapiens
  misc_RNA (1)...(19): siRNA sense strand
cuacugcucucgcuucuga

SEQ ID NO: 639256 - RNA, 19 nt, Homo sapiens
  misc_RNA (1)...(19): siRNA sense strand
ugaaggacauuaacgacaa

SEQ ID NO: 639257 - RNA, 19 nt, Homo sapiens
  misc_RNA (1)...(19): siRNA sense strand
ggagguaaaucugcagaau

SEQ ID NO: 639258 - RNA, 19 nt, Homo sapiens
  misc_RNA (1)...(19): siRNA sense strand
ggacuuguauuacggaaac

SEQ ID NO: 639259 - RNA, 19 nt, Homo sapiens
  misc_RNA (1)...(19): siRNA sense strand
gcagaagaccgaccucaug

SEQ ID NO: 639260 - RNA, 19 nt, Homo sapiens
  misc_RNA (1)...(19): siRNA sense strand
cuccggagcuucauuuauu

SEQ ID NO: 639261 - RNA, 19 nt, Homo sapiens
  misc_RNA (1)...(19): siRNA sense strand
ugauguuucuccagauaua

SEQ ID NO: 639262 - RNA, 19 nt, Homo sapiens
  misc_RNA (1)...(19): siRNA sense strand
gacuggcaccguucaauua

SEQ ID NO: 639263 - RNA, 19 nt, Homo sapiens
  misc_RNA (1)...(19): siRNA sense strand
gaaauuaccagaaaacguu

SEQ ID NO: 639264 - RNA, 19 nt, Homo sapiens
  misc_RNA (1)...(19): siRNA sense strand
ggacaguuauugcccugau

SEQ ID NO: 639265 - RNA, 19 nt, Homo sapiens
  misc_RNA (1)...(19): siRNA sense strand
gguaaaaccucuuggacuu

SEQ ID NO: 639266 - RNA, 19 nt, Homo sapiens
  misc_RNA (1)...(19): siRNA sense strand
gcuccacaguugacuauca

SEQ ID NO: 639267 - RNA, 19 nt, Homo sapiens
  misc_RNA (1)...(19): siRNA sense strand
ucacgguacuggacaacaa

SEQ ID NO: 639268 - RNA, 19 nt, Homo sapiens
  misc_RNA (1)...(19): siRNA sense strand
ucggaacgcuggugauuca

SEQ ID NO: 639269 - RNA, 19 nt, Homo sapiens
  misc_RNA (1)...(19): siRNA sense strand
ugauaggacauauggauuu

SEQ ID NO: 639270 - RNA, 19 nt, Homo sapiens
  misc_RNA (1)...(19): siRNA sense strand
ccaccuacaagaauuacua

SEQ ID NO: 639271 - RNA, 19 nt, Homo sapiens
  misc_RNA (1)...(19): siRNA sense strand
agaagaaacuccggagcuu

SEQ ID NO: 639272 - RNA, 19 nt, Homo sapiens
  misc_RNA (1)...(19): siRNA sense strand
ggauguaaaugacaaugcu

SEQ ID NO: 639273 - RNA, 19 nt, Homo sapiens
  misc_RNA (1)...(19): siRNA sense strand
gggauauuauuuacuccuu

SEQ ID NO: 639274 - RNA, 19 nt, Homo sapiens
  misc_RNA (1)...(19): siRNA sense strand
gaagaaaguagagcacaca

SEQ ID NO: 639275 - RNA, 19 nt, Homo sapiens
  misc_RNA (1)...(19): siRNA sense strand
agaacgcccugguguccua

SEQ ID NO: 639276 - RNA, 19 nt, Homo sapiens
  misc_RNA (1)...(19): siRNA sense strand
acggugaaauuaccagaaa

SEQ ID NO: 639277 - RNA, 19 nt, Homo sapiens
  misc_RNA (1)...(19): siRNA sense strand
ggaaguuguggauguaaau

SEQ ID NO: 639278 - RNA, 19 nt, Homo sapiens
  misc_RNA (1)...(19): siRNA sense strand
agugauguuucuccagaua

SEQ ID NO: 639279 - RNA, 19 nt, Homo sapiens
  misc_RNA (1)...(19): siRNA sense strand
acaguuauugcccugauua

SEQ ID NO: 639280 - RNA, 19 nt, Homo sapiens
  misc_RNA (1)...(19): siRNA sense strand
gacaguuauugcccugauu

SEQ ID NO: 639281 - RNA, 19 nt, Homo sapiens
  misc_RNA (1)...(19): siRNA sense strand
gaaggacauuaacgacaac

SEQ ID NO: 639282 - RNA, 19 nt, Homo sapiens
  misc_RNA (1)...(19): siRNA sense strand
gauaggacauauggauuuu

SEQ ID NO: 639283 - RNA, 19 nt, Homo sapiens
  misc_RNA (1)...(19): siRNA sense strand
gagguaaaucugcagaaug

SEQ ID NO: 639284 - RNA, 19 nt, Homo sapiens
  misc_RNA (1)...(19): siRNA sense strand
aaacuccggagcuucauuu

SEQ ID NO: 639285 - RNA, 19 nt, Homo sapiens
  misc_RNA (1)...(19): siRNA sense strand
gaaacuccggagcuucauu

SEQ ID NO: 639286 - RNA, 19 nt, Homo sapiens
  misc_RNA (1)...(19): siRNA sense strand
gagaacgcccugcucacuu

SEQ ID NO: 639287 - RNA, 19 nt, Homo sapiens
  misc_RNA (1)...(19): siRNA sense strand
guuauugcccugauuagug

SEQ ID NO: 639288 - RNA, 19 nt, Homo sapiens
  misc_RNA (1)...(19): siRNA sense strand
ccgcuugacucucgguuuc

SEQ ID NO: 639289 - RNA, 19 nt, Homo sapiens
  misc_RNA (1)...(19): siRNA sense strand
acgcguggcuuucauacga

SEQ ID NO: 639290 - RNA, 19 nt, Homo sapiens
  misc_RNA (1)...(19): siRNA sense strand
agguaaaucugcagaaugg

SEQ ID NO: 639291 - RNA, 19 nt, Homo sapiens
  misc_RNA (1)...(19): siRNA sense strand
gcuggucauuguacacuuc

SEQ ID NO: 639292 - RNA, 19 nt, Homo sapiens
  misc_RNA (1)...(19): siRNA sense strand
ugacuggcaccguucaauu

SEQ ID NO: 639293 - RNA, 19 nt, Homo sapiens
  misc_RNA (1)...(19): siRNA sense strand
ccuacgagcuggugguuac

SEQ ID NO: 639294 - RNA, 19 nt, Homo sapiens
  misc_RNA (1)...(19): siRNA sense strand
ugccucagauuuagacgaa

SEQ ID NO: 639295 - RNA, 19 nt, Homo sapiens
  misc_RNA (1)...(19): siRNA sense strand
uuauugcccugauuagugu

SEQ ID NO: 639296 - RNA, 19 nt, Homo sapiens
  misc_RNA (1)...(19): siRNA sense strand
uggaaguuguggauguaaa

SEQ ID NO: 639297 - RNA, 19 nt, Homo sapiens
  misc_RNA (1)...(19): siRNA sense strand
uguggaaguuguggaugua

SEQ ID NO: 639298 - RNA, 19 nt, Homo sapiens
  misc_RNA (1)...(19): siRNA sense strand
gacaaugcuccacaguuga

SEQ ID NO: 639299 - RNA, 19 nt, Homo sapiens
  misc_RNA (1)...(19): siRNA sense strand
gaaguuguggauguaaaug

SEQ ID NO: 639300 - RNA, 19 nt, Homo sapiens
  misc_RNA (1)...(19): siRNA sense strand
ggucauuguacacuucuug

SEQ ID NO: 639301 - RNA, 19 nt, Homo sapiens
  misc_RNA (1)...(19): siRNA sense strand
ggagaacgcccugcucacu

SEQ ID NO: 639302 - RNA, 19 nt, Homo sapiens
  misc_RNA (1)...(19): siRNA sense strand
gacaggccgcugcagguuu

SEQ ID NO: 639303 - RNA, 19 nt, Homo sapiens
  misc_RNA (1)...(19): siRNA sense strand
cccaaugccucagauuuag

SEQ ID NO: 639304 - RNA, 19 nt, Homo sapiens
  misc_RNA (1)...(19): siRNA sense strand
ggagaacccucugcuuccu

SEQ ID NO: 639305 - RNA, 19 nt, Homo sapiens
  misc_RNA (1)...(19): siRNA sense strand
ccagcaaccagcagguaaa

SEQ ID NO: 639306 - RNA, 19 nt, Homo sapiens
  misc_RNA (1)...(19): siRNA sense strand
gugauaggacauauggauu

SEQ ID NO: 639307 - RNA, 19 nt, Homo sapiens
  misc_RNA (1)...(19): siRNA sense strand
gauguuucuccagauauaa

SEQ ID NO: 639308 - RNA, 19 nt, Homo sapiens
  misc_RNA (1)...(19): siRNA sense strand
gaauggggauauuauuuac

SEQ ID NO: 639309 - RNA, 19 nt, Homo sapiens
  misc_RNA (1)...(19): siRNA sense strand
guacuggacaacaaugaca

SEQ ID NO: 639310 - RNA, 19 nt, Homo sapiens
  misc_RNA (1)...(19): siRNA sense strand
cuacaacgcguggcuuuca

SEQ ID NO: 639311 - RNA, 19 nt, Homo sapiens
  misc_RNA (1)...(19): siRNA sense strand
ugguggaugucaacgugua

SEQ ID NO: 639312 - RNA, 19 nt, Homo sapiens
  misc_RNA (1)...(19): siRNA sense strand
gacucucgguuuccacuag

SEQ ID NO: 639313 - RNA, 19 nt, Homo sapiens
  misc_RNA (1)...(19): siRNA sense strand
agccgacgcugguguguuc

SEQ ID NO: 639314 - RNA, 19 nt, Homo sapiens
  misc_RNA (1)...(19): siRNA sense strand
uacuggugcuggugaaaga

SEQ ID NO: 639315 - RNA, 19 nt, Homo sapiens
  misc_RNA (1)...(19): siRNA sense strand
gcucucgguuccuguaaaa

SEQ ID NO: 639316 - RNA, 19 nt, Homo sapiens
  misc_RNA (1)...(19): siRNA sense strand
gcauuuuguuugugaauuc

SEQ ID NO: 639317 - RNA, 19 nt, Homo sapiens
  misc_RNA (1)...(19): siRNA sense strand
aagaaacuccggagcuuca

SEQ ID NO: 639318 - RNA, 19 nt, Homo sapiens
  misc_RNA (1)...(19): siRNA sense strand
acaagaauuacuacucguu

SEQ ID NO: 639319 - RNA, 19 nt, Homo sapiens
  misc_RNA (1)...(19): siRNA sense strand
auacucaagucgaggagau

SEQ ID NO: 639320 - RNA, 19 nt, Homo sapiens
  misc_RNA (1)...(19): siRNA sense strand
uaggacauauggauuuuga

SEQ ID NO: 639321 - RNA, 19 nt, Homo sapiens
  misc_RNA (1)...(19): siRNA sense strand
uaucggaacgcuggugauu

SEQ ID NO: 639322 - RNA, 19 nt, Homo sapiens
  misc_RNA (1)...(19): siRNA sense strand
ccuguauacggugaaauua

SEQ ID NO: 639323 - RNA, 19 nt, Homo sapiens
  misc_RNA (1)...(19): siRNA sense strand
caacguguaccugaucauc

SEQ ID NO: 639324 - RNA, 19 nt, Homo sapiens
  misc_RNA (1)...(19): siRNA sense strand
guguccaccuacaagaauu

SEQ ID NO: 639325 - RNA, 19 nt, Homo sapiens
  misc_RNA (1)...(19): siRNA sense strand
uuagugugaucgaccuaga

SEQ ID NO: 639326 - RNA, 19 nt, Homo sapiens
  misc_RNA (1)...(19): siRNA sense strand
acaacgcguggcuuucaua

SEQ ID NO: 639327 - RNA, 19 nt, Homo sapiens
  misc_RNA (1)...(19): siRNA sense strand
ugucuagccuguugguucu

SEQ ID NO: 639328 - RNA, 19 nt, Homo sapiens
  misc_RNA (1)...(19): siRNA sense strand
gcgcguccgaugcagauau

SEQ ID NO: 639329 - RNA, 19 nt, Homo sapiens
  misc_RNA (1)...(19): siRNA sense strand
ccaaugccucagauuuaga

SEQ ID NO: 639330 - RNA, 19 nt, Homo sapiens
  misc_RNA (1)...(19): siRNA sense strand
aaguagagcacacaagauc

SEQ ID NO: 639331 - RNA, 19 nt, Homo sapiens
  misc_RNA (1)...(19): siRNA sense strand
uccggagcuucauuuauug

SEQ ID NO: 639332 - RNA, 19 nt, Homo sapiens
  misc_RNA (1)...(19): siRNA sense strand
cgacgcugguguguucuag

SEQ ID NO: 639333 - RNA, 19 nt, Homo sapiens
  misc_RNA (1)...(19): siRNA sense strand
cugcugacaccucggauga

SEQ ID NO: 639334 - RNA, 19 nt, Homo sapiens
  misc_RNA (1)...(19): siRNA sense strand
uguccaccuacaagaauua

SEQ ID NO: 639335 - RNA, 19 nt, Homo sapiens
  misc_RNA (1)...(19): siRNA sense strand
gggaguagcugauuucuuu

SEQ ID NO: 639336 - RNA, 19 nt, Homo sapiens
  misc_RNA (1)...(19): siRNA sense strand
caaagacucugacuauaaa

SEQ ID NO: 639337 - RNA, 19 nt, Homo sapiens
  misc_RNA (1)...(19): siRNA sense strand
caacaaaagucucagauua

SEQ ID NO: 639338 - RNA, 19 nt, Homo sapiens
  misc_RNA (1)...(19): siRNA sense strand
gaaaguauccugcaguuug

SEQ ID NO: 639339 - RNA, 19 nt, Homo sapiens
  misc_RNA (1)...(19): siRNA sense strand
acacaaacauccuaccaua

SEQ ID NO: 639340 - RNA, 19 nt, Homo sapiens
  misc_RNA (1)...(19): siRNA sense strand
caacugauguggaugaaga

SEQ ID NO: 639341 - RNA, 19 nt, Homo sapiens
  misc_RNA (1)...(19): siRNA sense strand
gagcaaaggucccaugauc

SEQ ID NO: 639342 - RNA, 19 nt, Homo sapiens
  misc_RNA (1)...(19): siRNA sense strand
caaguuggcuccagucaga

SEQ ID NO: 639343 - RNA, 19 nt, Homo sapiens
  misc_RNA (1)...(19): siRNA sense strand
ccaacuauauuccuggaua

SEQ ID NO: 639344 - RNA, 19 nt, Homo sapiens
  misc_RNA (1)...(19): siRNA sense strand
ccaaagacucugacuauaa

SEQ ID NO: 639345 - RNA, 19 nt, Homo sapiens
  misc_RNA (1)...(19): siRNA sense strand
caacuaugcugacgagaug

SEQ ID NO: 639346 - RNA, 19 nt, Homo sapiens
  misc_RNA (1)...(19): siRNA sense strand
guguggagcugguacauuu

SEQ ID NO: 639347 - RNA, 19 nt, Homo sapiens
  misc_RNA (1)...(19): siRNA sense strand
gaaauugauuggacuggau

SEQ ID NO: 639348 - RNA, 19 nt, Homo sapiens
  misc_RNA (1)...(19): siRNA sense strand
ggagaugauuucagaggaa

SEQ ID NO: 639349 - RNA, 19 nt, Homo sapiens
  misc_RNA (1)...(19): siRNA sense strand
caacaaugguuacagagau

SEQ ID NO: 639350 - RNA, 19 nt, Homo sapiens
  misc_RNA (1)...(19): siRNA sense strand
caaacauccuaccauauga

SEQ ID NO: 639351 - RNA, 19 nt, Homo sapiens
  misc_RNA (1)...(19): siRNA sense strand
aaaggagggugaaauguga

SEQ ID NO: 639352 - RNA, 19 nt, Homo sapiens
  misc_RNA (1)...(19): siRNA sense strand
cuacaucaaugccaacuau

SEQ ID NO: 639353 - RNA, 19 nt, Homo sapiens
  misc_RNA (1)...(19): siRNA sense strand
uuaaggauauggccaaaga

SEQ ID NO: 639354 - RNA, 19 nt, Homo sapiens
  misc_RNA (1)...(19): siRNA sense strand
gccaaagacucugacuaua

SEQ ID NO: 639355 - RNA, 19 nt, Homo sapiens
  misc_RNA (1)...(19): siRNA sense strand
gcugauuucuuugaaguuu

SEQ ID NO: 639356 - RNA, 19 nt, Homo sapiens
  misc_RNA (1)...(19): siRNA sense strand
ugacuuugaugccuauauu

SEQ ID NO: 639357 - RNA, 19 nt, Homo sapiens
  misc_RNA (1)...(19): siRNA sense strand
gcagauggcuagggagugu

SEQ ID NO: 639358 - RNA, 19 nt, Homo sapiens
  misc_RNA (1)...(19): siRNA sense strand
ggucauaccggaugucuau

SEQ ID NO: 639359 - RNA, 19 nt, Homo sapiens
  misc_RNA (1)...(19): siRNA sense strand
ggaagaugguccugcaaca

SEQ ID NO: 639360 - RNA, 19 nt, Homo sapiens
  misc_RNA (1)...(19): siRNA sense strand
cagaaaguauccugcaguu

SEQ ID NO: 639361 - RNA, 19 nt, Homo sapiens
  misc_RNA (1)...(19): siRNA sense strand
gaccauuacuggccauuca

SEQ ID NO: 639362 - RNA, 19 nt, Homo sapiens
  misc_RNA (1)...(19): siRNA sense strand
ggccaaagacucugacuau

SEQ ID NO: 639363 - RNA, 19 nt, Homo sapiens
  misc_RNA (1)...(19): siRNA sense strand
gaagagggaguagcugauu

SEQ ID NO: 639364 - RNA, 19 nt, Homo sapiens
  misc_RNA (1)...(19): siRNA sense strand
ugauguggaugaagaagaa

SEQ ID NO: 639365 - RNA, 19 nt, Homo sapiens
  misc_RNA (1)...(19): siRNA sense strand
gcaaaggucccaugaucau

SEQ ID NO: 639366 - RNA, 19 nt, Homo sapiens
  misc_RNA (1)...(19): siRNA sense strand
gcugguacauuugucaauu

SEQ ID NO: 639367 - RNA, 19 nt, Homo sapiens
  misc_RNA (1)...(19): siRNA sense strand
guucauagccgucucaaca

SEQ ID NO: 639368 - RNA, 19 nt, Homo sapiens
  misc_RNA (1)...(19): siRNA sense strand
agaaccagcuccacccaaa

SEQ ID NO: 639369 - RNA, 19 nt, Homo sapiens
  misc_RNA (1)...(19): siRNA sense strand
ucagugaugucauauacga

SEQ ID NO: 639370 - RNA, 19 nt, Homo sapiens
  misc_RNA (1)...(19): siRNA sense strand
cugcagaucuuccacugaa

SEQ ID NO: 639371 - RNA, 19 nt, Homo sapiens
  misc_RNA (1)...(19): siRNA sense strand
gggcuggugucagaaauga

SEQ ID NO: 639372 - RNA, 19 nt, Homo sapiens
  misc_RNA (1)...(19): siRNA sense strand
gcaaaugcugcagaaagua

SEQ ID NO: 639373 - RNA, 19 nt, Homo sapiens
  misc_RNA (1)...(19): siRNA sense strand
ggacggacaggaacauuca

SEQ ID NO: 639374 - RNA, 19 nt, Homo sapiens
  misc_RNA (1)...(19): siRNA sense strand
ggaaccaguugcuguuucu

SEQ ID NO: 639375 - RNA, 19 nt, Homo sapiens
  misc_RNA (1)...(19): siRNA sense strand
acaaacauccuaccauaug

SEQ ID NO: 639376 - RNA, 19 nt, Homo sapiens
  misc_RNA (1)...(19): siRNA sense strand
caucaaugccaacuauauu

SEQ ID NO: 639377 - RNA, 19 nt, Homo sapiens
  misc_RNA (1)...(19): siRNA sense strand
ucucaacaaugguuacaga

SEQ ID NO: 639378 - RNA, 19 nt, Homo sapiens
  misc_RNA (1)...(19): siRNA sense strand
gaagaugguccugcaacaa

SEQ ID NO: 639379 - RNA, 19 nt, Homo sapiens
  misc_RNA (1)...(19): siRNA sense strand
acacuuugcugcagaucuu

SEQ ID NO: 639380 - RNA, 19 nt, Homo sapiens
  misc_RNA (1)...(19): siRNA sense strand
uaauuggacuguugcuugu

SEQ ID NO: 639381 - RNA, 19 nt, Homo sapiens
  misc_RNA (1)...(19): siRNA sense strand
gaugaaucccaauguggua

SEQ ID NO: 639382 - RNA, 19 nt, Homo sapiens
  misc_RNA (1)...(19): siRNA sense strand
cuucagccgugugagauua

SEQ ID NO: 639383 - RNA, 19 nt, Homo sapiens
  misc_RNA (1)...(19): siRNA sense strand
uuaaagaagaggaaacuga

SEQ ID NO: 639384 - RNA, 19 nt, Homo sapiens
  misc_RNA (1)...(19): siRNA sense strand
agagagggauggaaagcuu

SEQ ID NO: 639385 - RNA, 19 nt, Homo sapiens
  misc_RNA (1)...(19): siRNA sense strand
ggaugacuuugaugccuau

SEQ ID NO: 639386 - RNA, 19 nt, Homo sapiens
  misc_RNA (1)...(19): siRNA sense strand
aaaguauccugcaguuugu

SEQ ID NO: 639387 - RNA, 19 nt, Homo sapiens
  misc_RNA (1)...(19): siRNA sense strand
caaaugcugcagaaaguau

SEQ ID NO: 639388 - RNA, 19 nt, Homo sapiens
  misc_RNA (1)...(19): siRNA sense strand
ugaagaagaagcagcaguu

SEQ ID NO: 639389 - RNA, 19 nt, Homo sapiens
  misc_RNA (1)...(19): siRNA sense strand
agauuagucuccaugaaug

SEQ ID NO: 639390 - RNA, 19 nt, Homo sapiens
  misc_RNA (1)...(19): siRNA sense strand
agaggaaggugcagacuac

SEQ ID NO: 639391 - RNA, 19 nt, Homo sapiens
  misc_RNA (1)...(19): siRNA sense strand
uguagacacuuccggauca

SEQ ID NO: 639392 - RNA, 19 nt, Homo sapiens
  misc_RNA (1)...(19): siRNA sense strand
ggaaggugcagacuacauc

SEQ ID NO: 639393 - RNA, 19 nt, Homo sapiens
  misc_RNA (1)...(19): siRNA sense strand
ggauauggccaaagacucu

SEQ ID NO: 639394 - RNA, 19 nt, Homo sapiens
  misc_RNA (1)...(19): siRNA sense strand
gaacaaaacccagacuuca

SEQ ID NO: 639395 - RNA, 19 nt, Homo sapiens
  misc_RNA (1)...(19): siRNA sense strand
agagaugaaucccaaugug

SEQ ID NO: 639396 - RNA, 19 nt, Homo sapiens
  misc_RNA (1)...(19): siRNA sense strand
ucuuagggcuggugucaga

SEQ ID NO: 639397 - RNA, 19 nt, Homo sapiens
  misc_RNA (1)...(19): siRNA sense strand
aagagggaguagcugauuu

SEQ ID NO: 639398 - RNA, 19 nt, Homo sapiens
  misc_RNA (1)...(19): siRNA sense strand
caacuauauuccuggauac

SEQ ID NO: 639399 - RNA, 19 nt, Homo sapiens
  misc_RNA (1)...(19): siRNA sense strand
uagcugauuucuuugaagu

SEQ ID NO: 639400 - RNA, 19 nt, Homo sapiens
  misc_RNA (1)...(19): siRNA sense strand
ucauagccgucucaacaau

SEQ ID NO: 639401 - RNA, 19 nt, Homo sapiens
  misc_RNA (1)...(19): siRNA sense strand
gaagaagaagcagcaguuc

SEQ ID NO: 639402 - RNA, 19 nt, Homo sapiens
  misc_RNA (1)...(19): siRNA sense strand
cugguacauuugucaauuu

SEQ ID NO: 639403 - RNA, 19 nt, Homo sapiens
  misc_RNA (1)...(19): siRNA sense strand
guuacccucauuauucuua

SEQ ID NO: 639404 - RNA, 19 nt, Homo sapiens
  misc_RNA (1)...(19): siRNA sense strand
auuggacuguugcuuguua

SEQ ID NO: 639405 - RNA, 19 nt, Homo sapiens
  misc_RNA (1)...(19): siRNA sense strand
ggugcagacuacaucaaug

SEQ ID NO: 639406 - RNA, 19 nt, Homo sapiens
  misc_RNA (1)...(19): siRNA sense strand
gcagaucuuccacugaauc

SEQ ID NO: 639407 - RNA, 19 nt, Homo sapiens
  misc_RNA (1)...(19): siRNA sense strand
gacuggauaucccacacuu

SEQ ID NO: 639408 - RNA, 19 nt, Homo sapiens
  misc_RNA (1)...(19): siRNA sense strand
uuugaggaguugaaauuga

SEQ ID NO: 639409 - RNA, 19 nt, Homo sapiens
  misc_RNA (1)...(19): siRNA sense strand
gacuuugaugccuauauua

SEQ ID NO: 639410 - RNA, 19 nt, Homo sapiens
  misc_RNA (1)...(19): siRNA sense strand
gaguagcugauuucuuuga

SEQ ID NO: 639411 - RNA, 19 nt, Homo sapiens
  misc_RNA (1)...(19): siRNA sense strand
gaaguuuucugucaacaag

SEQ ID NO: 639412 - RNA, 19 nt, Homo sapiens
  misc_RNA (1)...(19): siRNA sense strand
ccucauuauucuuaggaaa

SEQ ID NO: 639413 - RNA, 19 nt, Homo sapiens
  misc_RNA (1)...(19): siRNA sense strand
gaugucauauacgagaaug

SEQ ID NO: 639414 - RNA, 19 nt, Homo sapiens
  misc_RNA (1)...(19): siRNA sense strand
cgacagcaagcuaccaaga

SEQ ID NO: 639415 - RNA, 19 nt, Homo sapiens
  misc_RNA (1)...(19): siRNA sense strand
aagaugguccugcaacaaa

SEQ ID NO: 639416 - RNA, 19 nt, Homo sapiens
  misc_RNA (1)...(19): siRNA sense strand
gaucuuccacugaaucgau

SEQ ID NO: 639417 - RNA, 19 nt, Homo sapiens
  misc_RNA (1)...(19): siRNA sense strand
gaaagcuuccauacaacug

SEQ ID NO: 639418 - RNA, 19 nt, Homo sapiens
  misc_RNA (1)...(19): siRNA sense strand
uguagugucaccagcuuua

SEQ ID NO: 639419 - RNA, 19 nt, Homo sapiens
  misc_RNA (1)...(19): siRNA sense strand
gaaccagcuccacccaaau

SEQ ID NO: 639420 - RNA, 19 nt, Homo sapiens
  misc_RNA (1)...(19): siRNA sense strand
cuuguuacccucauuauuc

SEQ ID NO: 639421 - RNA, 19 nt, Homo sapiens
  misc_RNA (1)...(19): siRNA sense strand
cagaggagcaguacauuuu

SEQ ID NO: 639422 - RNA, 19 nt, Homo sapiens
  misc_RNA (1)...(19): siRNA sense strand
ggacaggaacauucauugc

SEQ ID NO: 639423 - RNA, 19 nt, Homo sapiens
  misc_RNA (1)...(19): siRNA sense strand
gaaggugcagacuacauca

SEQ ID NO: 639424 - RNA, 19 nt, Homo sapiens
  misc_RNA (1)...(19): siRNA sense strand
cagugucccuacguucaua

SEQ ID NO: 639425 - RNA, 19 nt, Homo sapiens
  misc_RNA (1)...(19): siRNA sense strand
ggaagagggaguagcugau

SEQ ID NO: 639426 - RNA, 19 nt, Homo sapiens
  misc_RNA (1)...(19): siRNA sense strand
cuguggagaugauuucaga

SEQ ID NO: 639427 - RNA, 19 nt, Homo sapiens
  misc_RNA (1)...(19): siRNA sense strand
cauccuaccauaugacuuc

SEQ ID NO: 639428 - RNA, 19 nt, Homo sapiens
  misc_RNA (1)...(19): siRNA sense strand
gauuagucuccaugaauga

SEQ ID NO: 639429 - RNA, 19 nt, Homo sapiens
  misc_RNA (1)...(19): siRNA sense strand
agacagaggagcaguacau

SEQ ID NO: 639430 - RNA, 19 nt, Homo sapiens
  misc_RNA (1)...(19): siRNA sense strand
gaccaucuccagccuucuu

SEQ ID NO: 639431 - RNA, 19 nt, Homo sapiens
  misc_RNA (1)...(19): siRNA sense strand
gugcaacugauguggauga

SEQ ID NO: 639432 - RNA, 19 nt, Homo sapiens
  misc_RNA (1)...(19): siRNA sense strand
acagaggagcaguacauuu

SEQ ID NO: 639433 - RNA, 19 nt, Homo sapiens
  misc_RNA (1)...(19): siRNA sense strand
cugacgagaugcaggaugu

SEQ ID NO: 639434 - RNA, 19 nt, Homo sapiens
  misc_RNA (1)...(19): siRNA sense strand
guagacacuuccggaucaa

SEQ ID NO: 639435 - RNA, 19 nt, Homo sapiens
  misc_RNA (1)...(19): siRNA sense strand
gggaguagcugauuucuuu

SEQ ID NO: 639436 - RNA, 19 nt, Homo sapiens
  misc_RNA (1)...(19): siRNA sense strand
caaagacucugacuauaaa

SEQ ID NO: 639437 - RNA, 19 nt, Homo sapiens
  misc_RNA (1)...(19): siRNA sense strand
caacaaaagucucagauua

SEQ ID NO: 639438 - RNA, 19 nt, Homo sapiens
  misc_RNA (1)...(19): siRNA sense strand
gaaaguauccugcaguuug

SEQ ID NO: 639439 - RNA, 19 nt, Homo sapiens
  misc_RNA (1)...(19): siRNA sense strand
acacaaacauccuaccaua

SEQ ID NO: 639440 - RNA, 19 nt, Homo sapiens
  misc_RNA (1)...(19): siRNA sense strand
caacugauguggaugaaga

SEQ ID NO: 639441 - RNA, 19 nt, Homo sapiens
  misc_RNA (1)...(19): siRNA sense strand
gagcaaaggucccaugauc

SEQ ID NO: 639442 - RNA, 19 nt, Homo sapiens
  misc_RNA (1)...(19): siRNA sense strand
caaguuggcuccagucaga

SEQ ID NO: 639443 - RNA, 19 nt, Homo sapiens
  misc_RNA (1)...(19): siRNA sense strand
ccaacuauauuccuggaua

SEQ ID NO: 639444 - RNA, 19 nt, Homo sapiens
  misc_RNA (1)...(19): siRNA sense strand
ccaaagacucugacuauaa

SEQ ID NO: 639445 - RNA, 19 nt, Homo sapiens
  misc_RNA (1)...(19): siRNA sense strand
caacuaugcugacgagaug

SEQ ID NO: 639446 - RNA, 19 nt, Homo sapiens
  misc_RNA (1)...(19): siRNA sense strand
guguggagcugguacauuu

SEQ ID NO: 639447 - RNA, 19 nt, Homo sapiens
  misc_RNA (1)...(19): siRNA sense strand
gaaauugauuggacuggau

SEQ ID NO: 639448 - RNA, 19 nt, Homo sapiens
  misc_RNA (1)...(19): siRNA sense strand
ggagaugauuucagaggaa

SEQ ID NO: 639449 - RNA, 19 nt, Homo sapiens
  misc_RNA (1)...(19): siRNA sense strand
caacaaugguuacagagau

SEQ ID NO: 639450 - RNA, 19 nt, Homo sapiens
  misc_RNA (1)...(19): siRNA sense strand
caaacauccuaccauauga

SEQ ID NO: 639451 - RNA, 19 nt, Homo sapiens
  misc_RNA (1)...(19): siRNA sense strand
aaaggagggugaaauguga

SEQ ID NO: 639452 - RNA, 19 nt, Homo sapiens
  misc_RNA (1)...(19): siRNA sense strand
cuacaucaaugccaacuau

SEQ ID NO: 639453 - RNA, 19 nt, Homo sapiens
  misc_RNA (1)...(19): siRNA sense strand
uuaaggauauggccaaaga

SEQ ID NO: 639454 - RNA, 19 nt, Homo sapiens
  misc_RNA (1)...(19): siRNA sense strand
gccaaagacucugacuaua

SEQ ID NO: 639455 - RNA, 19 nt, Homo sapiens
  misc_RNA (1)...(19): siRNA sense strand
gcugauuucuuugaaguuu

SEQ ID NO: 639456 - RNA, 19 nt, Homo sapiens
  misc_RNA (1)...(19): siRNA sense strand
ugacuuugaugccuauauu

SEQ ID NO: 639457 - RNA, 19 nt, Homo sapiens
  misc_RNA (1)...(19): siRNA sense strand
gcagauggcuagggagugu

SEQ ID NO: 639458 - RNA, 19 nt, Homo sapiens
  misc_RNA (1)...(19): siRNA sense strand
ggucauaccggaugucuau

SEQ ID NO: 639459 - RNA, 19 nt, Homo sapiens
  misc_RNA (1)...(19): siRNA sense strand
ggaagaugguccugcaaca

SEQ ID NO: 639460 - RNA, 19 nt, Homo sapiens
  misc_RNA (1)...(19): siRNA sense strand
cagaaaguauccugcaguu

SEQ ID NO: 639461 - RNA, 19 nt, Homo sapiens
  misc_RNA (1)...(19): siRNA sense strand
gaccauuacuggccauuca

SEQ ID NO: 639462 - RNA, 19 nt, Homo sapiens
  misc_RNA (1)...(19): siRNA sense strand
ggccaaagacucugacuau

SEQ ID NO: 639463 - RNA, 19 nt, Homo sapiens
  misc_RNA (1)...(19): siRNA sense strand
gaagagggaguagcugauu

SEQ ID NO: 639464 - RNA, 19 nt, Homo sapiens
  misc_RNA (1)...(19): siRNA sense strand
ugauguggaugaagaagaa

SEQ ID NO: 639465 - RNA, 19 nt, Homo sapiens
  misc_RNA (1)...(19): siRNA sense strand
gcaaaggucccaugaucau

SEQ ID NO: 639466 - RNA, 19 nt, Homo sapiens
  misc_RNA (1)...(19): siRNA sense strand
gcugguacauuugucaauu

SEQ ID NO: 639467 - RNA, 19 nt, Homo sapiens
  misc_RNA (1)...(19): siRNA sense strand
guucauagccgucucaaca

SEQ ID NO: 639468 - RNA, 19 nt, Homo sapiens
  misc_RNA (1)...(19): siRNA sense strand
agaaccagcuccacccaaa

SEQ ID NO: 639469 - RNA, 19 nt, Homo sapiens
  misc_RNA (1)...(19): siRNA sense strand
ucagugaugucauauacga

SEQ ID NO: 639470 - RNA, 19 nt, Homo sapiens
  misc_RNA (1)...(19): siRNA sense strand
cugcagaucuuccacugaa

SEQ ID NO: 639471 - RNA, 19 nt, Homo sapiens
  misc_RNA (1)...(19): siRNA sense strand
gggcuggugucagaaauga

SEQ ID NO: 639472 - RNA, 19 nt, Homo sapiens
  misc_RNA (1)...(19): siRNA sense strand
gcaaaugcugcagaaagua

SEQ ID NO: 639473 - RNA, 19 nt, Homo sapiens
  misc_RNA (1)...(19): siRNA sense strand
ggacggacaggaacauuca

SEQ ID NO: 639474 - RNA, 19 nt, Homo sapiens
  misc_RNA (1)...(19): siRNA sense strand
ggaaccaguugcuguuucu

SEQ ID NO: 639475 - RNA, 19 nt, Homo sapiens
  misc_RNA (1)...(19): siRNA sense strand
acaaacauccuaccauaug

SEQ ID NO: 639476 - RNA, 19 nt, Homo sapiens
  misc_RNA (1)...(19): siRNA sense strand
caucaaugccaacuauauu

SEQ ID NO: 639477 - RNA, 19 nt, Homo sapiens
  misc_RNA (1)...(19): siRNA sense strand
ucucaacaaugguuacaga

SEQ ID NO: 639478 - RNA, 19 nt, Homo sapiens
  misc_RNA (1)...(19): siRNA sense strand
gaagaugguccugcaacaa

SEQ ID NO: 639479 - RNA, 19 nt, Homo sapiens
  misc_RNA (1)...(19): siRNA sense strand
acacuuugcugcagaucuu

SEQ ID NO: 639480 - RNA, 19 nt, Homo sapiens
  misc_RNA (1)...(19): siRNA sense strand
uaauuggacuguugcuugu

SEQ ID NO: 639481 - RNA, 19 nt, Homo sapiens
  misc_RNA (1)...(19): siRNA sense strand
gaugaaucccaauguggua

SEQ ID NO: 639482 - RNA, 19 nt, Homo sapiens
  misc_RNA (1)...(19): siRNA sense strand
cuucagccgugugagauua

SEQ ID NO: 639483 - RNA, 19 nt, Homo sapiens
  misc_RNA (1)...(19): siRNA sense strand
uuaaagaagaggaaacuga

SEQ ID NO: 639484 - RNA, 19 nt, Homo sapiens
  misc_RNA (1)...(19): siRNA sense strand
agagagggauggaaagcuu

SEQ ID NO: 639485 - RNA, 19 nt, Homo sapiens
  misc_RNA (1)...(19): siRNA sense strand
ggaugacuuugaugccuau

SEQ ID NO: 639486 - RNA, 19 nt, Homo sapiens
  misc_RNA (1)...(19): siRNA sense strand
aaaguauccugcaguuugu

SEQ ID NO: 639487 - RNA, 19 nt, Homo sapiens
  misc_RNA (1)...(19): siRNA sense strand
caaaugcugcagaaaguau

SEQ ID NO: 639488 - RNA, 19 nt, Homo sapiens
  misc_RNA (1)...(19): siRNA sense strand
ugaagaagaagcagcaguu

SEQ ID NO: 639489 - RNA, 19 nt, Homo sapiens
  misc_RNA (1)...(19): siRNA sense strand
agauuagucuccaugaaug

SEQ ID NO: 639490 - RNA, 19 nt, Homo sapiens
  misc_RNA (1)...(19): siRNA sense strand
agaggaaggugcagacuac

SEQ ID NO: 639491 - RNA, 19 nt, Homo sapiens
  misc_RNA (1)...(19): siRNA sense strand
uguagacacuuccggauca

SEQ ID NO: 639492 - RNA, 19 nt, Homo sapiens
  misc_RNA (1)...(19): siRNA sense strand
ggaaggugcagacuacauc

SEQ ID NO: 639493 - RNA, 19 nt, Homo sapiens
  misc_RNA (1)...(19): siRNA sense strand
ggauauggccaaagacucu

SEQ ID NO: 639494 - RNA, 19 nt, Homo sapiens
  misc_RNA (1)...(19): siRNA sense strand
gaacaaaacccagacuuca

SEQ ID NO: 639495 - RNA, 19 nt, Homo sapiens
  misc_RNA (1)...(19): siRNA sense strand
agagaugaaucccaaugug

SEQ ID NO: 639496 - RNA, 19 nt, Homo sapiens
  misc_RNA (1)...(19): siRNA sense strand
ucuuagggcuggugucaga

SEQ ID NO: 639497 - RNA, 19 nt, Homo sapiens
  misc_RNA (1)...(19): siRNA sense strand
aagagggaguagcugauuu

SEQ ID NO: 639498 - RNA, 19 nt, Homo sapiens
  misc_RNA (1)...(19): siRNA sense strand
caacuauauuccuggauac

SEQ ID NO: 639499 - RNA, 19 nt, Homo sapiens
  misc_RNA (1)...(19): siRNA sense strand
uagcugauuucuuugaagu

SEQ ID NO: 639500 - RNA, 19 nt, Homo sapiens
  misc_RNA (1)...(19): siRNA sense strand
ucauagccgucucaacaau

SEQ ID NO: 639501 - RNA, 19 nt, Homo sapiens
  misc_RNA (1)...(19): siRNA sense strand
gaagaagaagcagcaguuc

SEQ ID NO: 639502 - RNA, 19 nt, Homo sapiens
  misc_RNA (1)...(19): siRNA sense strand
cugguacauuugucaauuu

SEQ ID NO: 639503 - RNA, 19 nt, Homo sapiens
  misc_RNA (1)...(19): siRNA sense strand
guuacccucauuauucuua

SEQ ID NO: 639504 - RNA, 19 nt, Homo sapiens
  misc_RNA (1)...(19): siRNA sense strand
auuggacuguugcuuguua

SEQ ID NO: 639505 - RNA, 19 nt, Homo sapiens
  misc_RNA (1)...(19): siRNA sense strand
ggugcagacuacaucaaug

SEQ ID NO: 639506 - RNA, 19 nt, Homo sapiens
  misc_RNA (1)...(19): siRNA sense strand
gcagaucuuccacugaauc

SEQ ID NO: 639507 - RNA, 19 nt, Homo sapiens
  misc_RNA (1)...(19): siRNA sense strand
gacuggauaucccacacuu

SEQ ID NO: 639508 - RNA, 19 nt, Homo sapiens
  misc_RNA (1)...(19): siRNA sense strand
uuugaggaguugaaauuga

SEQ ID NO: 639509 - RNA, 19 nt, Homo sapiens
  misc_RNA (1)...(19): siRNA sense strand
gacuuugaugccuauauua

SEQ ID NO: 639510 - RNA, 19 nt, Homo sapiens
  misc_RNA (1)...(19): siRNA sense strand
gaguagcugauuucuuuga

SEQ ID NO: 639511 - RNA, 19 nt, Homo sapiens
  misc_RNA (1)...(19): siRNA sense strand
gaaguuuucugucaacaag

SEQ ID NO: 639512 - RNA, 19 nt, Homo sapiens
  misc_RNA (1)...(19): siRNA sense strand
ccucauuauucuuaggaaa

SEQ ID NO: 639513 - RNA, 19 nt, Homo sapiens
  misc_RNA (1)...(19): siRNA sense strand
gaugucauauacgagaaug

SEQ ID NO: 639514 - RNA, 19 nt, Homo sapiens
  misc_RNA (1)...(19): siRNA sense strand
cgacagcaagcuaccaaga

SEQ ID NO: 639515 - RNA, 19 nt, Homo sapiens
  misc_RNA (1)...(19): siRNA sense strand
aagaugguccugcaacaaa

SEQ ID NO: 639516 - RNA, 19 nt, Homo sapiens
  misc_RNA (1)...(19): siRNA sense strand
gaucuuccacugaaucgau

SEQ ID NO: 639517 - RNA, 19 nt, Homo sapiens
  misc_RNA (1)...(19): siRNA sense strand
gaaagcuuccauacaacug

SEQ ID NO: 639518 - RNA, 19 nt, Homo sapiens
  misc_RNA (1)...(19): siRNA sense strand
uguagugucaccagcuuua

SEQ ID NO: 639519 - RNA, 19 nt, Homo sapiens
  misc_RNA (1)...(19): siRNA sense strand
gaaccagcuccacccaaau

SEQ ID NO: 639520 - RNA, 19 nt, Homo sapiens
  misc_RNA (1)...(19): siRNA sense strand
cuuguuacccucauuauuc

SEQ ID NO: 639521 - RNA, 19 nt, Homo sapiens
  misc_RNA (1)...(19): siRNA sense strand
cagaggagcaguacauuuu

SEQ ID NO: 639522 - RNA, 19 nt, Homo sapiens
  misc_RNA (1)...(19): siRNA sense strand
ggacaggaacauucauugc

SEQ ID NO: 639523 - RNA, 19 nt, Homo sapiens
  misc_RNA (1)...(19): siRNA sense strand
gaaggugcagacuacauca

SEQ ID NO: 639524 - RNA, 19 nt, Homo sapiens
  misc_RNA (1)...(19): siRNA sense strand
cagugucccuacguucaua

SEQ ID NO: 639525 - RNA, 19 nt, Homo sapiens
  misc_RNA (1)...(19): siRNA sense strand
ggaagagggaguagcugau

SEQ ID NO: 639526 - RNA, 19 nt, Homo sapiens
  misc_RNA (1)...(19): siRNA sense strand
cuguggagaugauuucaga

SEQ ID NO: 639527 - RNA, 19 nt, Homo sapiens
  misc_RNA (1)...(19): siRNA sense strand
cauccuaccauaugacuuc

SEQ ID NO: 639528 - RNA, 19 nt, Homo sapiens
  misc_RNA (1)...(19): siRNA sense strand
gauuagucuccaugaauga

SEQ ID NO: 639529 - RNA, 19 nt, Homo sapiens
  misc_RNA (1)...(19): siRNA sense strand
agacagaggagcaguacau

SEQ ID NO: 639530 - RNA, 19 nt, Homo sapiens
  misc_RNA (1)...(19): siRNA sense strand
gaccaucuccagccuucuu

SEQ ID NO: 639531 - RNA, 19 nt, Homo sapiens
  misc_RNA (1)...(19): siRNA sense strand
gugcaacugauguggauga

SEQ ID NO: 639532 - RNA, 19 nt, Homo sapiens
  misc_RNA (1)...(19): siRNA sense strand
acagaggagcaguacauuu

SEQ ID NO: 639533 - RNA, 19 nt, Homo sapiens
  misc_RNA (1)...(19): siRNA sense strand
cugacgagaugcaggaugu

SEQ ID NO: 639534 - RNA, 19 nt, Homo sapiens
  misc_RNA (1)...(19): siRNA sense strand
guagacacuuccggaucaa

SEQ ID NO: 639535 - RNA, 19 nt, Homo sapiens
  misc_RNA (1)...(19): siRNA sense strand
caaagacucugacuauaaa

SEQ ID NO: 639536 - RNA, 19 nt, Homo sapiens
  misc_RNA (1)...(19): siRNA sense strand
caacaaaagucucagauua

SEQ ID NO: 639537 - RNA, 19 nt, Homo sapiens
  misc_RNA (1)...(19): siRNA sense strand
gaaaguauccugcaguuug

SEQ ID NO: 639538 - RNA, 19 nt, Homo sapiens
  misc_RNA (1)...(19): siRNA sense strand
acacaaacauccuaccaua

SEQ ID NO: 639539 - RNA, 19 nt, Homo sapiens
  misc_RNA (1)...(19): siRNA sense strand
caacugauguggaugaaga

SEQ ID NO: 639540 - RNA, 19 nt, Homo sapiens
  misc_RNA (1)...(19): siRNA sense strand
gagcaaaggucccaugauc

SEQ ID NO: 639541 - RNA, 19 nt, Homo sapiens
  misc_RNA (1)...(19): siRNA sense strand
ccaacuauauuccuggaua

SEQ ID NO: 639542 - RNA, 19 nt, Homo sapiens
  misc_RNA (1)...(19): siRNA sense strand
ccaaagacucugacuauaa

SEQ ID NO: 639543 - RNA, 19 nt, Homo sapiens
  misc_RNA (1)...(19): siRNA sense strand
caacuaugcugacgagaug

SEQ ID NO: 639544 - RNA, 19 nt, Homo sapiens
  misc_RNA (1)...(19): siRNA sense strand
guguggagcugguacauuu

SEQ ID NO: 639545 - RNA, 19 nt, Homo sapiens
  misc_RNA (1)...(19): siRNA sense strand
gaaauugauuggacuggau

SEQ ID NO: 639546 - RNA, 19 nt, Homo sapiens
  misc_RNA (1)...(19): siRNA sense strand
ggagaugauuucagaggaa

SEQ ID NO: 639547 - RNA, 19 nt, Homo sapiens
  misc_RNA (1)...(19): siRNA sense strand
caaacauccuaccauauga

SEQ ID NO: 639548 - RNA, 19 nt, Homo sapiens
  misc_RNA (1)...(19): siRNA sense strand
aaaggagggugaaauguga

SEQ ID NO: 639549 - RNA, 19 nt, Homo sapiens
  misc_RNA (1)...(19): siRNA sense strand
cuacaucaaugccaacuau

SEQ ID NO: 639550 - RNA, 19 nt, Homo sapiens
  misc_RNA (1)...(19): siRNA sense strand
uuaaggauauggccaaaga

SEQ ID NO: 639551 - RNA, 19 nt, Homo sapiens
  misc_RNA (1)...(19): siRNA sense strand
gccaaagacucugacuaua

SEQ ID NO: 639552 - RNA, 19 nt, Homo sapiens
  misc_RNA (1)...(19): siRNA sense strand
ugacuuugaugccuauauu

SEQ ID NO: 639553 - RNA, 19 nt, Homo sapiens
  misc_RNA (1)...(19): siRNA sense strand
gcagauggcuagggagugu

SEQ ID NO: 639554 - RNA, 19 nt, Homo sapiens
  misc_RNA (1)...(19): siRNA sense strand
ggucauaccggaugucuau

SEQ ID NO: 639555 - RNA, 19 nt, Homo sapiens
  misc_RNA (1)...(19): siRNA sense strand
ggaagaugguccugcaaca

SEQ ID NO: 639556 - RNA, 19 nt, Homo sapiens
  misc_RNA (1)...(19): siRNA sense strand
cagaaaguauccugcaguu

SEQ ID NO: 639557 - RNA, 19 nt, Homo sapiens
  misc_RNA (1)...(19): siRNA sense strand
gaccauuacuggccauuca

SEQ ID NO: 639558 - RNA, 19 nt, Homo sapiens
  misc_RNA (1)...(19): siRNA sense strand
ggccaaagacucugacuau

SEQ ID NO: 639559 - RNA, 19 nt, Homo sapiens
  misc_RNA (1)...(19): siRNA sense strand
gcugguacauuugucaauu

SEQ ID NO: 639560 - RNA, 19 nt, Homo sapiens
  misc_RNA (1)...(19): siRNA sense strand
ugauguggaugaagaagaa

SEQ ID NO: 639561 - RNA, 19 nt, Homo sapiens
  misc_RNA (1)...(19): siRNA sense strand
gcaaaggucccaugaucau

SEQ ID NO: 639562 - RNA, 19 nt, Homo sapiens
  misc_RNA (1)...(19): siRNA sense strand
ucagugaugucauauacga

SEQ ID NO: 639563 - RNA, 19 nt, Homo sapiens
  misc_RNA (1)...(19): siRNA sense strand
cugcagaucuuccacugaa

SEQ ID NO: 639564 - RNA, 19 nt, Homo sapiens
  misc_RNA (1)...(19): siRNA sense strand
gggcuggugucagaaauga

SEQ ID NO: 639565 - RNA, 19 nt, Homo sapiens
  misc_RNA (1)...(19): siRNA sense strand
gcaaaugcugcagaaagua

SEQ ID NO: 639566 - RNA, 19 nt, Homo sapiens
  misc_RNA (1)...(19): siRNA sense strand
ggacggacaggaacauuca

SEQ ID NO: 639567 - RNA, 19 nt, Homo sapiens
  misc_RNA (1)...(19): siRNA sense strand
acaaacauccuaccauaug

SEQ ID NO: 639568 - RNA, 19 nt, Homo sapiens
  misc_RNA (1)...(19): siRNA sense strand
caucaaugccaacuauauu

SEQ ID NO: 639569 - RNA, 19 nt, Homo sapiens
  misc_RNA (1)...(19): siRNA sense strand
acacuuugcugcagaucuu

SEQ ID NO: 639570 - RNA, 19 nt, Homo sapiens
  misc_RNA (1)...(19): siRNA sense strand
gaagaugguccugcaacaa

SEQ ID NO: 639571 - RNA, 19 nt, Homo sapiens
  misc_RNA (1)...(19): siRNA sense strand
uaauuggacuguugcuugu

SEQ ID NO: 639572 - RNA, 19 nt, Homo sapiens
  misc_RNA (1)...(19): siRNA sense strand
agagagggauggaaagcuu

SEQ ID NO: 639573 - RNA, 19 nt, Homo sapiens
  misc_RNA (1)...(19): siRNA sense strand
gaugaaucccaauguggua

SEQ ID NO: 639574 - RNA, 19 nt, Homo sapiens
  misc_RNA (1)...(19): siRNA sense strand
cuucagccgugugagauua

SEQ ID NO: 639575 - RNA, 19 nt, Homo sapiens
  misc_RNA (1)...(19): siRNA sense strand
uuaaagaagaggaaacuga

SEQ ID NO: 639576 - RNA, 19 nt, Homo sapiens
  misc_RNA (1)...(19): siRNA sense strand
ggaugacuuugaugccuau

SEQ ID NO: 639577 - RNA, 19 nt, Homo sapiens
  misc_RNA (1)...(19): siRNA sense strand
aaaguauccugcaguuugu

SEQ ID NO: 639578 - RNA, 19 nt, Homo sapiens
  misc_RNA (1)...(19): siRNA sense strand
caaaugcugcagaaaguau

SEQ ID NO: 639579 - RNA, 19 nt, Homo sapiens
  misc_RNA (1)...(19): siRNA sense strand
ugaagaagaagcagcaguu

SEQ ID NO: 639580 - RNA, 19 nt, Homo sapiens
  misc_RNA (1)...(19): siRNA sense strand
agauuagucuccaugaaug

SEQ ID NO: 639581 - RNA, 19 nt, Homo sapiens
  misc_RNA (1)...(19): siRNA sense strand
agaggaaggugcagacuac

SEQ ID NO: 639582 - RNA, 19 nt, Homo sapiens
  misc_RNA (1)...(19): siRNA sense strand
uguagacacuuccggauca

SEQ ID NO: 639583 - RNA, 19 nt, Homo sapiens
  misc_RNA (1)...(19): siRNA sense strand
ggaaggugcagacuacauc

SEQ ID NO: 639584 - RNA, 19 nt, Homo sapiens
  misc_RNA (1)...(19): siRNA sense strand
ggauauggccaaagacucu

SEQ ID NO: 639585 - RNA, 19 nt, Homo sapiens
  misc_RNA (1)...(19): siRNA sense strand
caacuauauuccuggauac

SEQ ID NO: 639586 - RNA, 19 nt, Homo sapiens
  misc_RNA (1)...(19): siRNA sense strand
agagaugaaucccaaugug

SEQ ID NO: 639587 - RNA, 19 nt, Homo sapiens
  misc_RNA (1)...(19): siRNA sense strand
ucuuagggcuggugucaga

SEQ ID NO: 639588 - RNA, 19 nt, Homo sapiens
  misc_RNA (1)...(19): siRNA sense strand
cugguacauuugucaauuu

SEQ ID NO: 639589 - RNA, 19 nt, Homo sapiens
  misc_RNA (1)...(19): siRNA sense strand
gaagaagaagcagcaguuc

SEQ ID NO: 639590 - RNA, 19 nt, Homo sapiens
  misc_RNA (1)...(19): siRNA sense strand
guuacccucauuauucuua

SEQ ID NO: 639591 - RNA, 19 nt, Homo sapiens
  misc_RNA (1)...(19): siRNA sense strand
gacuuugaugccuauauua

SEQ ID NO: 639592 - RNA, 19 nt, Homo sapiens
  misc_RNA (1)...(19): siRNA sense strand
auuggacuguugcuuguua

SEQ ID NO: 639593 - RNA, 19 nt, Homo sapiens
  misc_RNA (1)...(19): siRNA sense strand
ggugcagacuacaucaaug

SEQ ID NO: 639594 - RNA, 19 nt, Homo sapiens
  misc_RNA (1)...(19): siRNA sense strand
gcagaucuuccacugaauc

SEQ ID NO: 639595 - RNA, 19 nt, Homo sapiens
  misc_RNA (1)...(19): siRNA sense strand
gacuggauaucccacacuu

SEQ ID NO: 639596 - RNA, 19 nt, Homo sapiens
  misc_RNA (1)...(19): siRNA sense strand
uuugaggaguugaaauuga

SEQ ID NO: 639597 - RNA, 19 nt, Homo sapiens
  misc_RNA (1)...(19): siRNA sense strand
gaaagcuuccauacaacug

SEQ ID NO: 639598 - RNA, 19 nt, Homo sapiens
  misc_RNA (1)...(19): siRNA sense strand
gaugucauauacgagaaug

SEQ ID NO: 639599 - RNA, 19 nt, Homo sapiens
  misc_RNA (1)...(19): siRNA sense strand
ccucauuauucuuaggaaa

SEQ ID NO: 639600 - RNA, 19 nt, Homo sapiens
  misc_RNA (1)...(19): siRNA sense strand
cgacagcaagcuaccaaga

SEQ ID NO: 639601 - RNA, 19 nt, Homo sapiens
  misc_RNA (1)...(19): siRNA sense strand
aagaugguccugcaacaaa

SEQ ID NO: 639602 - RNA, 19 nt, Homo sapiens
  misc_RNA (1)...(19): siRNA sense strand
gaucuuccacugaaucgau

SEQ ID NO: 639603 - RNA, 19 nt, Homo sapiens
  misc_RNA (1)...(19): siRNA sense strand
cuuguuacccucauuauuc

SEQ ID NO: 639604 - RNA, 19 nt, Homo sapiens
  misc_RNA (1)...(19): siRNA sense strand
cagaggagcaguacauuuu

SEQ ID NO: 639605 - RNA, 19 nt, Homo sapiens
  misc_RNA (1)...(19): siRNA sense strand
ggacaggaacauucauugc

SEQ ID NO: 639606 - RNA, 19 nt, Homo sapiens
  misc_RNA (1)...(19): siRNA sense strand
gaaggugcagacuacauca

SEQ ID NO: 639607 - RNA, 19 nt, Homo sapiens
  misc_RNA (1)...(19): siRNA sense strand
cauccuaccauaugacuuc

SEQ ID NO: 639608 - RNA, 19 nt, Homo sapiens
  misc_RNA (1)...(19): siRNA sense strand
cuguggagaugauuucaga

SEQ ID NO: 639609 - RNA, 19 nt, Homo sapiens
  misc_RNA (1)...(19): siRNA sense strand
gauuagucuccaugaauga

SEQ ID NO: 639610 - RNA, 19 nt, Homo sapiens
  misc_RNA (1)...(19): siRNA sense strand
agacagaggagcaguacau

SEQ ID NO: 639611 - RNA, 19 nt, Homo sapiens
  misc_RNA (1)...(19): siRNA sense strand
guagacacuuccggaucaa

SEQ ID NO: 639612 - RNA, 19 nt, Homo sapiens
  misc_RNA (1)...(19): siRNA sense strand
gugcaacugauguggauga

SEQ ID NO: 639613 - RNA, 19 nt, Homo sapiens
  misc_RNA (1)...(19): siRNA sense strand
acagaggagcaguacauuu

SEQ ID NO: 639614 - RNA, 19 nt, Homo sapiens
  misc_RNA (1)...(19): siRNA sense strand
cugacgagaugcaggaugu

SEQ ID NO: 639615 - RNA, 19 nt, Homo sapiens
  misc_RNA (1)...(19): siRNA sense strand
cuggauaucccacacuuug

SEQ ID NO: 639616 - RNA, 19 nt, Homo sapiens
  misc_RNA (1)...(19): siRNA sense strand
aaaggucccaugaucauuc

SEQ ID NO: 639617 - RNA, 19 nt, Homo sapiens
  misc_RNA (1)...(19): siRNA sense strand
caaaggucccaugaucauu

SEQ ID NO: 639618 - RNA, 19 nt, Homo sapiens
  misc_RNA (1)...(19): siRNA sense strand
ggacgacugggccuguaga

SEQ ID NO: 639619 - RNA, 19 nt, Homo sapiens
  misc_RNA (1)...(19): siRNA sense strand
cuccaugaaugaagaggaa

SEQ ID NO: 639620 - RNA, 19 nt, Homo sapiens
  misc_RNA (1)...(19): siRNA sense strand
uugaggaguugaaauugau

SEQ ID NO: 639621 - RNA, 19 nt, Homo sapiens
  misc_RNA (1)...(19): siRNA sense strand
ugacuucagccgugugaga

SEQ ID NO: 639622 - RNA, 19 nt, Homo sapiens
  misc_RNA (1)...(19): siRNA sense strand
aaauugauuggacuggaua

SEQ ID NO: 639623 - RNA, 19 nt, Homo sapiens
  misc_RNA (1)...(19): siRNA sense strand
gucauauacgagaauguua

SEQ ID NO: 639624 - RNA, 19 nt, Homo sapiens
  misc_RNA (1)...(19): siRNA sense strand
gugaugucauauacgagaa

SEQ ID NO: 639625 - RNA, 19 nt, Homo sapiens
  misc_RNA (1)...(19): siRNA sense strand
agaagaggaaacugacaaa

SEQ ID NO: 639626 - RNA, 19 nt, Homo sapiens
  misc_RNA (1)...(19): siRNA sense strand
gaaucccaaugugguagug

SEQ ID NO: 639627 - RNA, 19 nt, Homo sapiens
  misc_RNA (1)...(19): siRNA sense strand
ccacugaaucgauguaaaa

SEQ ID NO: 639628 - RNA, 19 nt, Homo sapiens
  misc_RNA (1)...(19): siRNA sense strand
gcaacaaaagucucagauu

SEQ ID NO: 639629 - RNA, 19 nt, Homo sapiens
  misc_RNA (1)...(19): siRNA sense strand
gcuuguuacccucauuauu

SEQ ID NO: 639630 - RNA, 19 nt, Homo sapiens
  misc_RNA (1)...(19): siRNA sense strand
cgagaugcaggaugugaug

SEQ ID NO: 639631 - RNA, 19 nt, Homo sapiens
  misc_RNA (1)...(19): siRNA sense strand
cacaaacauccuaccauau

SEQ ID NO: 639632 - RNA, 19 nt, Homo sapiens
  misc_RNA (1)...(19): siRNA sense strand
gugugcaacugauguggau

SEQ ID NO: 639633 - RNA, 19 nt, Homo sapiens
  misc_RNA (1)...(19): siRNA sense strand
gacagaggagcaguacauu

SEQ ID NO: 639634 - RNA, 19 nt, Homo sapiens
  misc_RNA (1)...(19): siRNA sense strand
ugucauauacgagaauguu

SEQ ID NO: 639635 - RNA, 19 nt, Homo sapiens
  misc_RNA (1)...(19): siRNA sense strand
caaagacucugacuauaaa

SEQ ID NO: 639636 - RNA, 19 nt, Homo sapiens
  misc_RNA (1)...(19): siRNA sense strand
caacaaaagucucagauua

SEQ ID NO: 639637 - RNA, 19 nt, Homo sapiens
  misc_RNA (1)...(19): siRNA sense strand
gaaaguauccugcaguuug

SEQ ID NO: 639638 - RNA, 19 nt, Homo sapiens
  misc_RNA (1)...(19): siRNA sense strand
acacaaacauccuaccaua

SEQ ID NO: 639639 - RNA, 19 nt, Homo sapiens
  misc_RNA (1)...(19): siRNA sense strand
caacugauguggaugaaga

SEQ ID NO: 639640 - RNA, 19 nt, Homo sapiens
  misc_RNA (1)...(19): siRNA sense strand
gagcaaaggucccaugauc

SEQ ID NO: 639641 - RNA, 19 nt, Homo sapiens
  misc_RNA (1)...(19): siRNA sense strand
ccaacuauauuccuggaua

SEQ ID NO: 639642 - RNA, 19 nt, Homo sapiens
  misc_RNA (1)...(19): siRNA sense strand
ccaaagacucugacuauaa

SEQ ID NO: 639643 - RNA, 19 nt, Homo sapiens
  misc_RNA (1)...(19): siRNA sense strand
caacuaugcugacgagaug

SEQ ID NO: 639644 - RNA, 19 nt, Homo sapiens
  misc_RNA (1)...(19): siRNA sense strand
guguggagcugguacauuu

SEQ ID NO: 639645 - RNA, 19 nt, Homo sapiens
  misc_RNA (1)...(19): siRNA sense strand
gaaauugauuggacuggau

SEQ ID NO: 639646 - RNA, 19 nt, Homo sapiens
  misc_RNA (1)...(19): siRNA sense strand
ggagaugauuucagaggaa

SEQ ID NO: 639647 - RNA, 19 nt, Homo sapiens
  misc_RNA (1)...(19): siRNA sense strand
caaacauccuaccauauga

SEQ ID NO: 639648 - RNA, 19 nt, Homo sapiens
  misc_RNA (1)...(19): siRNA sense strand
aaaggagggugaaauguga

SEQ ID NO: 639649 - RNA, 19 nt, Homo sapiens
  misc_RNA (1)...(19): siRNA sense strand
cuacaucaaugccaacuau

SEQ ID NO: 639650 - RNA, 19 nt, Homo sapiens
  misc_RNA (1)...(19): siRNA sense strand
uuaaggauauggccaaaga

SEQ ID NO: 639651 - RNA, 19 nt, Homo sapiens
  misc_RNA (1)...(19): siRNA sense strand
gccaaagacucugacuaua

SEQ ID NO: 639652 - RNA, 19 nt, Homo sapiens
  misc_RNA (1)...(19): siRNA sense strand
ugacuuugaugccuauauu

SEQ ID NO: 639653 - RNA, 19 nt, Homo sapiens
  misc_RNA (1)...(19): siRNA sense strand
gcagauggcuagggagugu

SEQ ID NO: 639654 - RNA, 19 nt, Homo sapiens
  misc_RNA (1)...(19): siRNA sense strand
ggucauaccggaugucuau

SEQ ID NO: 639655 - RNA, 19 nt, Homo sapiens
  misc_RNA (1)...(19): siRNA sense strand
ggaagaugguccugcaaca

SEQ ID NO: 639656 - RNA, 19 nt, Homo sapiens
  misc_RNA (1)...(19): siRNA sense strand
cagaaaguauccugcaguu

SEQ ID NO: 639657 - RNA, 19 nt, Homo sapiens
  misc_RNA (1)...(19): siRNA sense strand
gaccauuacuggccauuca

SEQ ID NO: 639658 - RNA, 19 nt, Homo sapiens
  misc_RNA (1)...(19): siRNA sense strand
ggccaaagacucugacuau

SEQ ID NO: 639659 - RNA, 19 nt, Homo sapiens
  misc_RNA (1)...(19): siRNA sense strand
gcugguacauuugucaauu

SEQ ID NO: 639660 - RNA, 19 nt, Homo sapiens
  misc_RNA (1)...(19): siRNA sense strand
ugauguggaugaagaagaa

SEQ ID NO: 639661 - RNA, 19 nt, Homo sapiens
  misc_RNA (1)...(19): siRNA sense strand
gcaaaggucccaugaucau

SEQ ID NO: 639662 - RNA, 19 nt, Homo sapiens
  misc_RNA (1)...(19): siRNA sense strand
ucagugaugucauauacga

SEQ ID NO: 639663 - RNA, 19 nt, Homo sapiens
  misc_RNA (1)...(19): siRNA sense strand
cugcagaucuuccacugaa

SEQ ID NO: 639664 - RNA, 19 nt, Homo sapiens
  misc_RNA (1)...(19): siRNA sense strand
gggcuggugucagaaauga

SEQ ID NO: 639665 - RNA, 19 nt, Homo sapiens
  misc_RNA (1)...(19): siRNA sense strand
gcaaaugcugcagaaagua

SEQ ID NO: 639666 - RNA, 19 nt, Homo sapiens
  misc_RNA (1)...(19): siRNA sense strand
ggacggacaggaacauuca

SEQ ID NO: 639667 - RNA, 19 nt, Homo sapiens
  misc_RNA (1)...(19): siRNA sense strand
acaaacauccuaccauaug

SEQ ID NO: 639668 - RNA, 19 nt, Homo sapiens
  misc_RNA (1)...(19): siRNA sense strand
caucaaugccaacuauauu

SEQ ID NO: 639669 - RNA, 19 nt, Homo sapiens
  misc_RNA (1)...(19): siRNA sense strand
acacuuugcugcagaucuu

SEQ ID NO: 639670 - RNA, 19 nt, Homo sapiens
  misc_RNA (1)...(19): siRNA sense strand
gaagaugguccugcaacaa

SEQ ID NO: 639671 - RNA, 19 nt, Homo sapiens
  misc_RNA (1)...(19): siRNA sense strand
uaauuggacuguugcuugu

SEQ ID NO: 639672 - RNA, 19 nt, Homo sapiens
  misc_RNA (1)...(19): siRNA sense strand
agagagggauggaaagcuu

SEQ ID NO: 639673 - RNA, 19 nt, Homo sapiens
  misc_RNA (1)...(19): siRNA sense strand
gaugaaucccaauguggua

SEQ ID NO: 639674 - RNA, 19 nt, Homo sapiens
  misc_RNA (1)...(19): siRNA sense strand
cuucagccgugugagauua

SEQ ID NO: 639675 - RNA, 19 nt, Homo sapiens
  misc_RNA (1)...(19): siRNA sense strand
uuaaagaagaggaaacuga

SEQ ID NO: 639676 - RNA, 19 nt, Homo sapiens
  misc_RNA (1)...(19): siRNA sense strand
ggaugacuuugaugccuau

SEQ ID NO: 639677 - RNA, 19 nt, Homo sapiens
  misc_RNA (1)...(19): siRNA sense strand
aaaguauccugcaguuugu

SEQ ID NO: 639678 - RNA, 19 nt, Homo sapiens
  misc_RNA (1)...(19): siRNA sense strand
caaaugcugcagaaaguau

SEQ ID NO: 639679 - RNA, 19 nt, Homo sapiens
  misc_RNA (1)...(19): siRNA sense strand
ugaagaagaagcagcaguu

SEQ ID NO: 639680 - RNA, 19 nt, Homo sapiens
  misc_RNA (1)...(19): siRNA sense strand
agauuagucuccaugaaug

SEQ ID NO: 639681 - RNA, 19 nt, Homo sapiens
  misc_RNA (1)...(19): siRNA sense strand
agaggaaggugcagacuac

SEQ ID NO: 639682 - RNA, 19 nt, Homo sapiens
  misc_RNA (1)...(19): siRNA sense strand
uguagacacuuccggauca

SEQ ID NO: 639683 - RNA, 19 nt, Homo sapiens
  misc_RNA (1)...(19): siRNA sense strand
ggaaggugcagacuacauc

SEQ ID NO: 639684 - RNA, 19 nt, Homo sapiens
  misc_RNA (1)...(19): siRNA sense strand
ggauauggccaaagacucu

SEQ ID NO: 639685 - RNA, 19 nt, Homo sapiens
  misc_RNA (1)...(19): siRNA sense strand
caacuauauuccuggauac

SEQ ID NO: 639686 - RNA, 19 nt, Homo sapiens
  misc_RNA (1)...(19): siRNA sense strand
agagaugaaucccaaugug

SEQ ID NO: 639687 - RNA, 19 nt, Homo sapiens
  misc_RNA (1)...(19): siRNA sense strand
ucuuagggcuggugucaga

SEQ ID NO: 639688 - RNA, 19 nt, Homo sapiens
  misc_RNA (1)...(19): siRNA sense strand
cugguacauuugucaauuu

SEQ ID NO: 639689 - RNA, 19 nt, Homo sapiens
  misc_RNA (1)...(19): siRNA sense strand
gaagaagaagcagcaguuc

SEQ ID NO: 639690 - RNA, 19 nt, Homo sapiens
  misc_RNA (1)...(19): siRNA sense strand
guuacccucauuauucuua

SEQ ID NO: 639691 - RNA, 19 nt, Homo sapiens
  misc_RNA (1)...(19): siRNA sense strand
gacuuugaugccuauauua

SEQ ID NO: 639692 - RNA, 19 nt, Homo sapiens
  misc_RNA (1)...(19): siRNA sense strand
auuggacuguugcuuguua

SEQ ID NO: 639693 - RNA, 19 nt, Homo sapiens
  misc_RNA (1)...(19): siRNA sense strand
ggugcagacuacaucaaug

SEQ ID NO: 639694 - RNA, 19 nt, Homo sapiens
  misc_RNA (1)...(19): siRNA sense strand
gcagaucuuccacugaauc

SEQ ID NO: 639695 - RNA, 19 nt, Homo sapiens
  misc_RNA (1)...(19): siRNA sense strand
gacuggauaucccacacuu

SEQ ID NO: 639696 - RNA, 19 nt, Homo sapiens
  misc_RNA (1)...(19): siRNA sense strand
uuugaggaguugaaauuga

SEQ ID NO: 639697 - RNA, 19 nt, Homo sapiens
  misc_RNA (1)...(19): siRNA sense strand
gaaagcuuccauacaacug

SEQ ID NO: 639698 - RNA, 19 nt, Homo sapiens
  misc_RNA (1)...(19): siRNA sense strand
gaugucauauacgagaaug

SEQ ID NO: 639699 - RNA, 19 nt, Homo sapiens
  misc_RNA (1)...(19): siRNA sense strand
ccucauuauucuuaggaaa

SEQ ID NO: 639700 - RNA, 19 nt, Homo sapiens
  misc_RNA (1)...(19): siRNA sense strand
cgacagcaagcuaccaaga

SEQ ID NO: 639701 - RNA, 19 nt, Homo sapiens
  misc_RNA (1)...(19): siRNA sense strand
aagaugguccugcaacaaa

SEQ ID NO: 639702 - RNA, 19 nt, Homo sapiens
  misc_RNA (1)...(19): siRNA sense strand
gaucuuccacugaaucgau

SEQ ID NO: 639703 - RNA, 19 nt, Homo sapiens
  misc_RNA (1)...(19): siRNA sense strand
cuuguuacccucauuauuc

SEQ ID NO: 639704 - RNA, 19 nt, Homo sapiens
  misc_RNA (1)...(19): siRNA sense strand
cagaggagcaguacauuuu

SEQ ID NO: 639705 - RNA, 19 nt, Homo sapiens
  misc_RNA (1)...(19): siRNA sense strand
ggacaggaacauucauugc

SEQ ID NO: 639706 - RNA, 19 nt, Homo sapiens
  misc_RNA (1)...(19): siRNA sense strand
gaaggugcagacuacauca

SEQ ID NO: 639707 - RNA, 19 nt, Homo sapiens
  misc_RNA (1)...(19): siRNA sense strand
cauccuaccauaugacuuc

SEQ ID NO: 639708 - RNA, 19 nt, Homo sapiens
  misc_RNA (1)...(19): siRNA sense strand
cuguggagaugauuucaga

SEQ ID NO: 639709 - RNA, 19 nt, Homo sapiens
  misc_RNA (1)...(19): siRNA sense strand
gauuagucuccaugaauga

SEQ ID NO: 639710 - RNA, 19 nt, Homo sapiens
  misc_RNA (1)...(19): siRNA sense strand
agacagaggagcaguacau

SEQ ID NO: 639711 - RNA, 19 nt, Homo sapiens
  misc_RNA (1)...(19): siRNA sense strand
guagacacuuccggaucaa

SEQ ID NO: 639712 - RNA, 19 nt, Homo sapiens
  misc_RNA (1)...(19): siRNA sense strand
gugcaacugauguggauga

SEQ ID NO: 639713 - RNA, 19 nt, Homo sapiens
  misc_RNA (1)...(19): siRNA sense strand
acagaggagcaguacauuu

SEQ ID NO: 639714 - RNA, 19 nt, Homo sapiens
  misc_RNA (1)...(19): siRNA sense strand
cugacgagaugcaggaugu

SEQ ID NO: 639715 - RNA, 19 nt, Homo sapiens
  misc_RNA (1)...(19): siRNA sense strand
cuggauaucccacacuuug

SEQ ID NO: 639716 - RNA, 19 nt, Homo sapiens
  misc_RNA (1)...(19): siRNA sense strand
aaaggucccaugaucauuc

SEQ ID NO: 639717 - RNA, 19 nt, Homo sapiens
  misc_RNA (1)...(19): siRNA sense strand
caaaggucccaugaucauu

SEQ ID NO: 639718 - RNA, 19 nt, Homo sapiens
  misc_RNA (1)...(19): siRNA sense strand
ggacgacugggccuguaga

SEQ ID NO: 639719 - RNA, 19 nt, Homo sapiens
  misc_RNA (1)...(19): siRNA sense strand
cuccaugaaugaagaggaa

SEQ ID NO: 639720 - RNA, 19 nt, Homo sapiens
  misc_RNA (1)...(19): siRNA sense strand
uugaggaguugaaauugau

SEQ ID NO: 639721 - RNA, 19 nt, Homo sapiens
  misc_RNA (1)...(19): siRNA sense strand
ugacuucagccgugugaga

SEQ ID NO: 639722 - RNA, 19 nt, Homo sapiens
  misc_RNA (1)...(19): siRNA sense strand
aaauugauuggacuggaua

SEQ ID NO: 639723 - RNA, 19 nt, Homo sapiens
  misc_RNA (1)...(19): siRNA sense strand
gucauauacgagaauguua

SEQ ID NO: 639724 - RNA, 19 nt, Homo sapiens
  misc_RNA (1)...(19): siRNA sense strand
gugaugucauauacgagaa

SEQ ID NO: 639725 - RNA, 19 nt, Homo sapiens
  misc_RNA (1)...(19): siRNA sense strand
agaagaggaaacugacaaa

SEQ ID NO: 639726 - RNA, 19 nt, Homo sapiens
  misc_RNA (1)...(19): siRNA sense strand
gaaucccaaugugguagug

SEQ ID NO: 639727 - RNA, 19 nt, Homo sapiens
  misc_RNA (1)...(19): siRNA sense strand
ccacugaaucgauguaaaa

SEQ ID NO: 639728 - RNA, 19 nt, Homo sapiens
  misc_RNA (1)...(19): siRNA sense strand
gcaacaaaagucucagauu

SEQ ID NO: 639729 - RNA, 19 nt, Homo sapiens
  misc_RNA (1)...(19): siRNA sense strand
gcuuguuacccucauuauu

SEQ ID NO: 639730 - RNA, 19 nt, Homo sapiens
  misc_RNA (1)...(19): siRNA sense strand
cgagaugcaggaugugaug

SEQ ID NO: 639731 - RNA, 19 nt, Homo sapiens
  misc_RNA (1)...(19): siRNA sense strand
cacaaacauccuaccauau

SEQ ID NO: 639732 - RNA, 19 nt, Homo sapiens
  misc_RNA (1)...(19): siRNA sense strand
gugugcaacugauguggau

SEQ ID NO: 639733 - RNA, 19 nt, Homo sapiens
  misc_RNA (1)...(19): siRNA sense strand
gacagaggagcaguacauu

SEQ ID NO: 639734 - RNA, 19 nt, Homo sapiens
  misc_RNA (1)...(19): siRNA sense strand
ugucauauacgagaauguu

SEQ ID NO: 639735 - RNA, 19 nt, Homo sapiens
  misc_RNA (1)...(19): siRNA sense strand
caaagacucugacuauaaa

SEQ ID NO: 639736 - RNA, 19 nt, Homo sapiens
  misc_RNA (1)...(19): siRNA sense strand
caacaaaagucucagauua

SEQ ID NO: 639737 - RNA, 19 nt, Homo sapiens
  misc_RNA (1)...(19): siRNA sense strand
gaaaguauccugcaguuug

SEQ ID NO: 639738 - RNA, 19 nt, Homo sapiens
  misc_RNA (1)...(19): siRNA sense strand
acacaaacauccuaccaua

SEQ ID NO: 639739 - RNA, 19 nt, Homo sapiens
  misc_RNA (1)...(19): siRNA sense strand
caacugauguggaugaaga

SEQ ID NO: 639740 - RNA, 19 nt, Homo sapiens
  misc_RNA (1)...(19): siRNA sense strand
gagcaaaggucccaugauc

SEQ ID NO: 639741 - RNA, 19 nt, Homo sapiens
  misc_RNA (1)...(19): siRNA sense strand
ccaacuauauuccuggaua

SEQ ID NO: 639742 - RNA, 19 nt, Homo sapiens
  misc_RNA (1)...(19): siRNA sense strand
ccaaagacucugacuauaa

SEQ ID NO: 639743 - RNA, 19 nt, Homo sapiens
  misc_RNA (1)...(19): siRNA sense strand
caacuaugcugacgagaug

SEQ ID NO: 639744 - RNA, 19 nt, Homo sapiens
  misc_RNA (1)...(19): siRNA sense strand
guguggagcugguacauuu

SEQ ID NO: 639745 - RNA, 19 nt, Homo sapiens
  misc_RNA (1)...(19): siRNA sense strand
gaaauugauuggacuggau

SEQ ID NO: 639746 - RNA, 19 nt, Homo sapiens
  misc_RNA (1)...(19): siRNA sense strand
ggagaugauuucagaggaa

SEQ ID NO: 639747 - RNA, 19 nt, Homo sapiens
  misc_RNA (1)...(19): siRNA sense strand
caaacauccuaccauauga

SEQ ID NO: 639748 - RNA, 19 nt, Homo sapiens
  misc_RNA (1)...(19): siRNA sense strand
aaaggagggugaaauguga

SEQ ID NO: 639749 - RNA, 19 nt, Homo sapiens
  misc_RNA (1)...(19): siRNA sense strand
cuacaucaaugccaacuau

SEQ ID NO: 639750 - RNA, 19 nt, Homo sapiens
  misc_RNA (1)...(19): siRNA sense strand
uuaaggauauggccaaaga

SEQ ID NO: 639751 - RNA, 19 nt, Homo sapiens
  misc_RNA (1)...(19): siRNA sense strand
gccaaagacucugacuaua

SEQ ID NO: 639752 - RNA, 19 nt, Homo sapiens
  misc_RNA (1)...(19): siRNA sense strand
ugacuuugaugccuauauu

SEQ ID NO: 639753 - RNA, 19 nt, Homo sapiens
  misc_RNA (1)...(19): siRNA sense strand
gcagauggcuagggagugu

SEQ ID NO: 639754 - RNA, 19 nt, Homo sapiens
  misc_RNA (1)...(19): siRNA sense strand
ggucauaccggaugucuau

SEQ ID NO: 639755 - RNA, 19 nt, Homo sapiens
  misc_RNA (1)...(19): siRNA sense strand
ggaagaugguccugcaaca

SEQ ID NO: 639756 - RNA, 19 nt, Homo sapiens
  misc_RNA (1)...(19): siRNA sense strand
cagaaaguauccugcaguu

SEQ ID NO: 639757 - RNA, 19 nt, Homo sapiens
  misc_RNA (1)...(19): siRNA sense strand
gaccauuacuggccauuca

SEQ ID NO: 639758 - RNA, 19 nt, Homo sapiens
  misc_RNA (1)...(19): siRNA sense strand
ggccaaagacucugacuau

SEQ ID NO: 639759 - RNA, 19 nt, Homo sapiens
  misc_RNA (1)...(19): siRNA sense strand
gcugguacauuugucaauu

SEQ ID NO: 639760 - RNA, 19 nt, Homo sapiens
  misc_RNA (1)...(19): siRNA sense strand
ugauguggaugaagaagaa

SEQ ID NO: 639761 - RNA, 19 nt, Homo sapiens
  misc_RNA (1)...(19): siRNA sense strand
gcaaaggucccaugaucau

SEQ ID NO: 639762 - RNA, 19 nt, Homo sapiens
  misc_RNA (1)...(19): siRNA sense strand
ucagugaugucauauacga

SEQ ID NO: 639763 - RNA, 19 nt, Homo sapiens
  misc_RNA (1)...(19): siRNA sense strand
cugcagaucuuccacugaa

SEQ ID NO: 639764 - RNA, 19 nt, Homo sapiens
  misc_RNA (1)...(19): siRNA sense strand
gggcuggugucagaaauga

SEQ ID NO: 639765 - RNA, 19 nt, Homo sapiens
  misc_RNA (1)...(19): siRNA sense strand
gcaaaugcugcagaaagua

SEQ ID NO: 639766 - RNA, 19 nt, Homo sapiens
  misc_RNA (1)...(19): siRNA sense strand
ggacggacaggaacauuca

SEQ ID NO: 639767 - RNA, 19 nt, Homo sapiens
  misc_RNA (1)...(19): siRNA sense strand
acaaacauccuaccauaug

SEQ ID NO: 639768 - RNA, 19 nt, Homo sapiens
  misc_RNA (1)...(19): siRNA sense strand
caucaaugccaacuauauu

SEQ ID NO: 639769 - RNA, 19 nt, Homo sapiens
  misc_RNA (1)...(19): siRNA sense strand
acacuuugcugcagaucuu

SEQ ID NO: 639770 - RNA, 19 nt, Homo sapiens
  misc_RNA (1)...(19): siRNA sense strand
gaagaugguccugcaacaa

SEQ ID NO: 639771 - RNA, 19 nt, Homo sapiens
  misc_RNA (1)...(19): siRNA sense strand
uaauuggacuguugcuugu

SEQ ID NO: 639772 - RNA, 19 nt, Homo sapiens
  misc_RNA (1)...(19): siRNA sense strand
agagagggauggaaagcuu

SEQ ID NO: 639773 - RNA, 19 nt, Homo sapiens
  misc_RNA (1)...(19): siRNA sense strand
gaugaaucccaauguggua

SEQ ID NO: 639774 - RNA, 19 nt, Homo sapiens
  misc_RNA (1)...(19): siRNA sense strand
cuucagccgugugagauua

SEQ ID NO: 639775 - RNA, 19 nt, Homo sapiens
  misc_RNA (1)...(19): siRNA sense strand
uuaaagaagaggaaacuga

SEQ ID NO: 639776 - RNA, 19 nt, Homo sapiens
  misc_RNA (1)...(19): siRNA sense strand
ggaugacuuugaugccuau

SEQ ID NO: 639777 - RNA, 19 nt, Homo sapiens
  misc_RNA (1)...(19): siRNA sense strand
aaaguauccugcaguuugu

SEQ ID NO: 639778 - RNA, 19 nt, Homo sapiens
  misc_RNA (1)...(19): siRNA sense strand
caaaugcugcagaaaguau

SEQ ID NO: 639779 - RNA, 19 nt, Homo sapiens
  misc_RNA (1)...(19): siRNA sense strand
ugaagaagaagcagcaguu

SEQ ID NO: 639780 - RNA, 19 nt, Homo sapiens
  misc_RNA (1)...(19): siRNA sense strand
agauuagucuccaugaaug

SEQ ID NO: 639781 - RNA, 19 nt, Homo sapiens
  misc_RNA (1)...(19): siRNA sense strand
agaggaaggugcagacuac

SEQ ID NO: 639782 - RNA, 19 nt, Homo sapiens
  misc_RNA (1)...(19): siRNA sense strand
uguagacacuuccggauca

SEQ ID NO: 639783 - RNA, 19 nt, Homo sapiens
  misc_RNA (1)...(19): siRNA sense strand
ggaaggugcagacuacauc

SEQ ID NO: 639784 - RNA, 19 nt, Homo sapiens
  misc_RNA (1)...(19): siRNA sense strand
ggauauggccaaagacucu

SEQ ID NO: 639785 - RNA, 19 nt, Homo sapiens
  misc_RNA (1)...(19): siRNA sense strand
caacuauauuccuggauac

SEQ ID NO: 639786 - RNA, 19 nt, Homo sapiens
  misc_RNA (1)...(19): siRNA sense strand
agagaugaaucccaaugug

SEQ ID NO: 639787 - RNA, 19 nt, Homo sapiens
  misc_RNA (1)...(19): siRNA sense strand
ucuuagggcuggugucaga

SEQ ID NO: 639788 - RNA, 19 nt, Homo sapiens
  misc_RNA (1)...(19): siRNA sense strand
cugguacauuugucaauuu

SEQ ID NO: 639789 - RNA, 19 nt, Homo sapiens
  misc_RNA (1)...(19): siRNA sense strand
gaagaagaagcagcaguuc

SEQ ID NO: 639790 - RNA, 19 nt, Homo sapiens
  misc_RNA (1)...(19): siRNA sense strand
guuacccucauuauucuua

SEQ ID NO: 639791 - RNA, 19 nt, Homo sapiens
  misc_RNA (1)...(19): siRNA sense strand
gacuuugaugccuauauua

SEQ ID NO: 639792 - RNA, 19 nt, Homo sapiens
  misc_RNA (1)...(19): siRNA sense strand
auuggacuguugcuuguua

SEQ ID NO: 639793 - RNA, 19 nt, Homo sapiens
  misc_RNA (1)...(19): siRNA sense strand
ggugcagacuacaucaaug

SEQ ID NO: 639794 - RNA, 19 nt, Homo sapiens
  misc_RNA (1)...(19): siRNA sense strand
gcagaucuuccacugaauc

SEQ ID NO: 639795 - RNA, 19 nt, Homo sapiens
  misc_RNA (1)...(19): siRNA sense strand
gacuggauaucccacacuu

SEQ ID NO: 639796 - RNA, 19 nt, Homo sapiens
  misc_RNA (1)...(19): siRNA sense strand
uuugaggaguugaaauuga

SEQ ID NO: 639797 - RNA, 19 nt, Homo sapiens
  misc_RNA (1)...(19): siRNA sense strand
gaaagcuuccauacaacug

SEQ ID NO: 639798 - RNA, 19 nt, Homo sapiens
  misc_RNA (1)...(19): siRNA sense strand
gaugucauauacgagaaug

SEQ ID NO: 639799 - RNA, 19 nt, Homo sapiens
  misc_RNA (1)...(19): siRNA sense strand
ccucauuauucuuaggaaa

SEQ ID NO: 639800 - RNA, 19 nt, Homo sapiens
  misc_RNA (1)...(19): siRNA sense strand
cgacagcaagcuaccaaga

SEQ ID NO: 639801 - RNA, 19 nt, Homo sapiens
  misc_RNA (1)...(19): siRNA sense strand
aagaugguccugcaacaaa

SEQ ID NO: 639802 - RNA, 19 nt, Homo sapiens
  misc_RNA (1)...(19): siRNA sense strand
gaucuuccacugaaucgau

SEQ ID NO: 639803 - RNA, 19 nt, Homo sapiens
  misc_RNA (1)...(19): siRNA sense strand
cuuguuacccucauuauuc

SEQ ID NO: 639804 - RNA, 19 nt, Homo sapiens
  misc_RNA (1)...(19): siRNA sense strand
cagaggagcaguacauuuu

SEQ ID NO: 639805 - RNA, 19 nt, Homo sapiens
  misc_RNA (1)...(19): siRNA sense strand
ggacaggaacauucauugc

SEQ ID NO: 639806 - RNA, 19 nt, Homo sapiens
  misc_RNA (1)...(19): siRNA sense strand
gaaggugcagacuacauca

SEQ ID NO: 639807 - RNA, 19 nt, Homo sapiens
  misc_RNA (1)...(19): siRNA sense strand
cauccuaccauaugacuuc

SEQ ID NO: 639808 - RNA, 19 nt, Homo sapiens
  misc_RNA (1)...(19): siRNA sense strand
cuguggagaugauuucaga

SEQ ID NO: 639809 - RNA, 19 nt, Homo sapiens
  misc_RNA (1)...(19): siRNA sense strand
gauuagucuccaugaauga

SEQ ID NO: 639810 - RNA, 19 nt, Homo sapiens
  misc_RNA (1)...(19): siRNA sense strand
agacagaggagcaguacau

SEQ ID NO: 639811 - RNA, 19 nt, Homo sapiens
  misc_RNA (1)...(19): siRNA sense strand
guagacacuuccggaucaa

SEQ ID NO: 639812 - RNA, 19 nt, Homo sapiens
  misc_RNA (1)...(19): siRNA sense strand
gugcaacugauguggauga

SEQ ID NO: 639813 - RNA, 19 nt, Homo sapiens
  misc_RNA (1)...(19): siRNA sense strand
acagaggagcaguacauuu

SEQ ID NO: 639814 - RNA, 19 nt, Homo sapiens
  misc_RNA (1)...(19): siRNA sense strand
cugacgagaugcaggaugu

SEQ ID NO: 639815 - RNA, 19 nt, Homo sapiens
  misc_RNA (1)...(19): siRNA sense strand
cuggauaucccacacuuug

SEQ ID NO: 639816 - RNA, 19 nt, Homo sapiens
  misc_RNA (1)...(19): siRNA sense strand
aaaggucccaugaucauuc

SEQ ID NO: 639817 - RNA, 19 nt, Homo sapiens
  misc_RNA (1)...(19): siRNA sense strand
caaaggucccaugaucauu

SEQ ID NO: 639818 - RNA, 19 nt, Homo sapiens
  misc_RNA (1)...(19): siRNA sense strand
ggacgacugggccuguaga

SEQ ID NO: 639819 - RNA, 19 nt, Homo sapiens
  misc_RNA (1)...(19): siRNA sense strand
cuccaugaaugaagaggaa

SEQ ID NO: 639820 - RNA, 19 nt, Homo sapiens
  misc_RNA (1)...(19): siRNA sense strand
uugaggaguugaaauugau

SEQ ID NO: 639821 - RNA, 19 nt, Homo sapiens
  misc_RNA (1)...(19): siRNA sense strand
ugacuucagccgugugaga

SEQ ID NO: 639822 - RNA, 19 nt, Homo sapiens
  misc_RNA (1)...(19): siRNA sense strand
aaauugauuggacuggaua

SEQ ID NO: 639823 - RNA, 19 nt, Homo sapiens
  misc_RNA (1)...(19): siRNA sense strand
gucauauacgagaauguua

SEQ ID NO: 639824 - RNA, 19 nt, Homo sapiens
  misc_RNA (1)...(19): siRNA sense strand
gugaugucauauacgagaa

SEQ ID NO: 639825 - RNA, 19 nt, Homo sapiens
  misc_RNA (1)...(19): siRNA sense strand
agaagaggaaacugacaaa

SEQ ID NO: 639826 - RNA, 19 nt, Homo sapiens
  misc_RNA (1)...(19): siRNA sense strand
gaaucccaaugugguagug

SEQ ID NO: 639827 - RNA, 19 nt, Homo sapiens
  misc_RNA (1)...(19): siRNA sense strand
ccacugaaucgauguaaaa

SEQ ID NO: 639828 - RNA, 19 nt, Homo sapiens
  misc_RNA (1)...(19): siRNA sense strand
gcaacaaaagucucagauu

SEQ ID NO: 639829 - RNA, 19 nt, Homo sapiens
  misc_RNA (1)...(19): siRNA sense strand
gcuuguuacccucauuauu

SEQ ID NO: 639830 - RNA, 19 nt, Homo sapiens
  misc_RNA (1)...(19): siRNA sense strand
cgagaugcaggaugugaug

SEQ ID NO: 639831 - RNA, 19 nt, Homo sapiens
  misc_RNA (1)...(19): siRNA sense strand
cacaaacauccuaccauau

SEQ ID NO: 639832 - RNA, 19 nt, Homo sapiens
  misc_RNA (1)...(19): siRNA sense strand
gugugcaacugauguggau

SEQ ID NO: 639833 - RNA, 19 nt, Homo sapiens
  misc_RNA (1)...(19): siRNA sense strand
gacagaggagcaguacauu

SEQ ID NO: 639834 - RNA, 19 nt, Homo sapiens
  misc_RNA (1)...(19): siRNA sense strand
ugucauauacgagaauguu

SEQ ID NO: 639835 - RNA, 19 nt, Homo sapiens
  misc_RNA (1)...(19): siRNA sense strand
caaagacucugacuauaaa

SEQ ID NO: 639836 - RNA, 19 nt, Homo sapiens
  misc_RNA (1)...(19): siRNA sense strand
caacaaaagucucagauua

SEQ ID NO: 639837 - RNA, 19 nt, Homo sapiens
  misc_RNA (1)...(19): siRNA sense strand
gaaaguauccugcaguuug

SEQ ID NO: 639838 - RNA, 19 nt, Homo sapiens
  misc_RNA (1)...(19): siRNA sense strand
acacaaacauccuaccaua

SEQ ID NO: 639839 - RNA, 19 nt, Homo sapiens
  misc_RNA (1)...(19): siRNA sense strand
caacugauguggaugaaga

SEQ ID NO: 639840 - RNA, 19 nt, Homo sapiens
  misc_RNA (1)...(19): siRNA sense strand
gagcaaaggucccaugauc

SEQ ID NO: 639841 - RNA, 19 nt, Homo sapiens
  misc_RNA (1)...(19): siRNA sense strand
ccaacuauauuccuggaua

SEQ ID NO: 639842 - RNA, 19 nt, Homo sapiens
  misc_RNA (1)...(19): siRNA sense strand
ccaaagacucugacuauaa

SEQ ID NO: 639843 - RNA, 19 nt, Homo sapiens
  misc_RNA (1)...(19): siRNA sense strand
caacuaugcugacgagaug

SEQ ID NO: 639844 - RNA, 19 nt, Homo sapiens
  misc_RNA (1)...(19): siRNA sense strand
guguggagcugguacauuu

SEQ ID NO: 639845 - RNA, 19 nt, Homo sapiens
  misc_RNA (1)...(19): siRNA sense strand
gaaauugauuggacuggau

SEQ ID NO: 639846 - RNA, 19 nt, Homo sapiens
  misc_RNA (1)...(19): siRNA sense strand
ggagaugauuucagaggaa

SEQ ID NO: 639847 - RNA, 19 nt, Homo sapiens
  misc_RNA (1)...(19): siRNA sense strand
caaacauccuaccauauga

SEQ ID NO: 639848 - RNA, 19 nt, Homo sapiens
  misc_RNA (1)...(19): siRNA sense strand
aaaggagggugaaauguga

SEQ ID NO: 639849 - RNA, 19 nt, Homo sapiens
  misc_RNA (1)...(19): siRNA sense strand
cuacaucaaugccaacuau

SEQ ID NO: 639850 - RNA, 19 nt, Homo sapiens
  misc_RNA (1)...(19): siRNA sense strand
uuaaggauauggccaaaga

SEQ ID NO: 639851 - RNA, 19 nt, Homo sapiens
  misc_RNA (1)...(19): siRNA sense strand
gccaaagacucugacuaua

SEQ ID NO: 639852 - RNA, 19 nt, Homo sapiens
  misc_RNA (1)...(19): siRNA sense strand
ugacuuugaugccuauauu

SEQ ID NO: 639853 - RNA, 19 nt, Homo sapiens
  misc_RNA (1)...(19): siRNA sense strand
gcagauggcuagggagugu

SEQ ID NO: 639854 - RNA, 19 nt, Homo sapiens
  misc_RNA (1)...(19): siRNA sense strand
ggucauaccggaugucuau

SEQ ID NO: 639855 - RNA, 19 nt, Homo sapiens
  misc_RNA (1)...(19): siRNA sense strand
ggaagaugguccugcaaca

SEQ ID NO: 639856 - RNA, 19 nt, Homo sapiens
  misc_RNA (1)...(19): siRNA sense strand
cagaaaguauccugcaguu

SEQ ID NO: 639857 - RNA, 19 nt, Homo sapiens
  misc_RNA (1)...(19): siRNA sense strand
gaccauuacuggccauuca

SEQ ID NO: 639858 - RNA, 19 nt, Homo sapiens
  misc_RNA (1)...(19): siRNA sense strand
ggccaaagacucugacuau

SEQ ID NO: 639859 - RNA, 19 nt, Homo sapiens
  misc_RNA (1)...(19): siRNA sense strand
gcugguacauuugucaauu

SEQ ID NO: 639860 - RNA, 19 nt, Homo sapiens
  misc_RNA (1)...(19): siRNA sense strand
ugauguggaugaagaagaa

SEQ ID NO: 639861 - RNA, 19 nt, Homo sapiens
  misc_RNA (1)...(19): siRNA sense strand
gcaaaggucccaugaucau

SEQ ID NO: 639862 - RNA, 19 nt, Homo sapiens
  misc_RNA (1)...(19): siRNA sense strand
ucagugaugucauauacga

SEQ ID NO: 639863 - RNA, 19 nt, Homo sapiens
  misc_RNA (1)...(19): siRNA sense strand
cugcagaucuuccacugaa

SEQ ID NO: 639864 - RNA, 19 nt, Homo sapiens
  misc_RNA (1)...(19): siRNA sense strand
gggcuggugucagaaauga

SEQ ID NO: 639865 - RNA, 19 nt, Homo sapiens
  misc_RNA (1)...(19): siRNA sense strand
gcaaaugcugcagaaagua

SEQ ID NO: 639866 - RNA, 19 nt, Homo sapiens
  misc_RNA (1)...(19): siRNA sense strand
ggacggacaggaacauuca

SEQ ID NO: 639867 - RNA, 19 nt, Homo sapiens
  misc_RNA (1)...(19): siRNA sense strand
acaaacauccuaccauaug

SEQ ID NO: 639868 - RNA, 19 nt, Homo sapiens
  misc_RNA (1)...(19): siRNA sense strand
caucaaugccaacuauauu

SEQ ID NO: 639869 - RNA, 19 nt, Homo sapiens
  misc_RNA (1)...(19): siRNA sense strand
acacuuugcugcagaucuu

SEQ ID NO: 639870 - RNA, 19 nt, Homo sapiens
  misc_RNA (1)...(19): siRNA sense strand
gaagaugguccugcaacaa

SEQ ID NO: 639871 - RNA, 19 nt, Homo sapiens
  misc_RNA (1)...(19): siRNA sense strand
uaauuggacuguugcuugu

SEQ ID NO: 639872 - RNA, 19 nt, Homo sapiens
  misc_RNA (1)...(19): siRNA sense strand
agagagggauggaaagcuu

SEQ ID NO: 639873 - RNA, 19 nt, Homo sapiens
  misc_RNA (1)...(19): siRNA sense strand
gaugaaucccaauguggua

SEQ ID NO: 639874 - RNA, 19 nt, Homo sapiens
  misc_RNA (1)...(19): siRNA sense strand
cuucagccgugugagauua

SEQ ID NO: 639875 - RNA, 19 nt, Homo sapiens
  misc_RNA (1)...(19): siRNA sense strand
uuaaagaagaggaaacuga

SEQ ID NO: 639876 - RNA, 19 nt, Homo sapiens
  misc_RNA (1)...(19): siRNA sense strand
ggaugacuuugaugccuau

SEQ ID NO: 639877 - RNA, 19 nt, Homo sapiens
  misc_RNA (1)...(19): siRNA sense strand
aaaguauccugcaguuugu

SEQ ID NO: 639878 - RNA, 19 nt, Homo sapiens
  misc_RNA (1)...(19): siRNA sense strand
caaaugcugcagaaaguau

SEQ ID NO: 639879 - RNA, 19 nt, Homo sapiens
  misc_RNA (1)...(19): siRNA sense strand
ugaagaagaagcagcaguu

SEQ ID NO: 639880 - RNA, 19 nt, Homo sapiens
  misc_RNA (1)...(19): siRNA sense strand
agauuagucuccaugaaug

SEQ ID NO: 639881 - RNA, 19 nt, Homo sapiens
  misc_RNA (1)...(19): siRNA sense strand
agaggaaggugcagacuac

SEQ ID NO: 639882 - RNA, 19 nt, Homo sapiens
  misc_RNA (1)...(19): siRNA sense strand
uguagacacuuccggauca

SEQ ID NO: 639883 - RNA, 19 nt, Homo sapiens
  misc_RNA (1)...(19): siRNA sense strand
ggaaggugcagacuacauc

SEQ ID NO: 639884 - RNA, 19 nt, Homo sapiens
  misc_RNA (1)...(19): siRNA sense strand
ggauauggccaaagacucu

SEQ ID NO: 639885 - RNA, 19 nt, Homo sapiens
  misc_RNA (1)...(19): siRNA sense strand
caacuauauuccuggauac

SEQ ID NO: 639886 - RNA, 19 nt, Homo sapiens
  misc_RNA (1)...(19): siRNA sense strand
agagaugaaucccaaugug

SEQ ID NO: 639887 - RNA, 19 nt, Homo sapiens
  misc_RNA (1)...(19): siRNA sense strand
ucuuagggcuggugucaga

SEQ ID NO: 639888 - RNA, 19 nt, Homo sapiens
  misc_RNA (1)...(19): siRNA sense strand
cugguacauuugucaauuu

SEQ ID NO: 639889 - RNA, 19 nt, Homo sapiens
  misc_RNA (1)...(19): siRNA sense strand
gaagaagaagcagcaguuc

SEQ ID NO: 639890 - RNA, 19 nt, Homo sapiens
  misc_RNA (1)...(19): siRNA sense strand
guuacccucauuauucuua

SEQ ID NO: 639891 - RNA, 19 nt, Homo sapiens
  misc_RNA (1)...(19): siRNA sense strand
gacuuugaugccuauauua

SEQ ID NO: 639892 - RNA, 19 nt, Homo sapiens
  misc_RNA (1)...(19): siRNA sense strand
auuggacuguugcuuguua

SEQ ID NO: 639893 - RNA, 19 nt, Homo sapiens
  misc_RNA (1)...(19): siRNA sense strand
ggugcagacuacaucaaug

SEQ ID NO: 639894 - RNA, 19 nt, Homo sapiens
  misc_RNA (1)...(19): siRNA sense strand
gcagaucuuccacugaauc

SEQ ID NO: 639895 - RNA, 19 nt, Homo sapiens
  misc_RNA (1)...(19): siRNA sense strand
gacuggauaucccacacuu

SEQ ID NO: 639896 - RNA, 19 nt, Homo sapiens
  misc_RNA (1)...(19): siRNA sense strand
uuugaggaguugaaauuga

SEQ ID NO: 639897 - RNA, 19 nt, Homo sapiens
  misc_RNA (1)...(19): siRNA sense strand
gaaagcuuccauacaacug

SEQ ID NO: 639898 - RNA, 19 nt, Homo sapiens
  misc_RNA (1)...(19): siRNA sense strand
gaugucauauacgagaaug

SEQ ID NO: 639899 - RNA, 19 nt, Homo sapiens
  misc_RNA (1)...(19): siRNA sense strand
ccucauuauucuuaggaaa

SEQ ID NO: 639900 - RNA, 19 nt, Homo sapiens
  misc_RNA (1)...(19): siRNA sense strand
cgacagcaagcuaccaaga

SEQ ID NO: 639901 - RNA, 19 nt, Homo sapiens
  misc_RNA (1)...(19): siRNA sense strand
aagaugguccugcaacaaa

SEQ ID NO: 639902 - RNA, 19 nt, Homo sapiens
  misc_RNA (1)...(19): siRNA sense strand
gaucuuccacugaaucgau

SEQ ID NO: 639903 - RNA, 19 nt, Homo sapiens
  misc_RNA (1)...(19): siRNA sense strand
cuuguuacccucauuauuc

SEQ ID NO: 639904 - RNA, 19 nt, Homo sapiens
  misc_RNA (1)...(19): siRNA sense strand
cagaggagcaguacauuuu

SEQ ID NO: 639905 - RNA, 19 nt, Homo sapiens
  misc_RNA (1)...(19): siRNA sense strand
ggacaggaacauucauugc

SEQ ID NO: 639906 - RNA, 19 nt, Homo sapiens
  misc_RNA (1)...(19): siRNA sense strand
gaaggugcagacuacauca

SEQ ID NO: 639907 - RNA, 19 nt, Homo sapiens
  misc_RNA (1)...(19): siRNA sense strand
cauccuaccauaugacuuc

SEQ ID NO: 639908 - RNA, 19 nt, Homo sapiens
  misc_RNA (1)...(19): siRNA sense strand
cuguggagaugauuucaga

SEQ ID NO: 639909 - RNA, 19 nt, Homo sapiens
  misc_RNA (1)...(19): siRNA sense strand
gauuagucuccaugaauga

SEQ ID NO: 639910 - RNA, 19 nt, Homo sapiens
  misc_RNA (1)...(19): siRNA sense strand
agacagaggagcaguacau

SEQ ID NO: 639911 - RNA, 19 nt, Homo sapiens
  misc_RNA (1)...(19): siRNA sense strand
guagacacuuccggaucaa

SEQ ID NO: 639912 - RNA, 19 nt, Homo sapiens
  misc_RNA (1)...(19): siRNA sense strand
gugcaacugauguggauga

SEQ ID NO: 639913 - RNA, 19 nt, Homo sapiens
  misc_RNA (1)...(19): siRNA sense strand
acagaggagcaguacauuu

SEQ ID NO: 639914 - RNA, 19 nt, Homo sapiens
  misc_RNA (1)...(19): siRNA sense strand
cugacgagaugcaggaugu

SEQ ID NO: 639915 - RNA, 19 nt, Homo sapiens
  misc_RNA (1)...(19): siRNA sense strand
cuggauaucccacacuuug

SEQ ID NO: 639916 - RNA, 19 nt, Homo sapiens
  misc_RNA (1)...(19): siRNA sense strand
aaaggucccaugaucauuc

SEQ ID NO: 639917 - RNA, 19 nt, Homo sapiens
  misc_RNA (1)...(19): siRNA sense strand
caaaggucccaugaucauu

SEQ ID NO: 639918 - RNA, 19 nt, Homo sapiens
  misc_RNA (1)...(19): siRNA sense strand
ggacgacugggccuguaga

SEQ ID NO: 639919 - RNA, 19 nt, Homo sapiens
  misc_RNA (1)...(19): siRNA sense strand
cuccaugaaugaagaggaa

SEQ ID NO: 639920 - RNA, 19 nt, Homo sapiens
  misc_RNA (1)...(19): siRNA sense strand
uugaggaguugaaauugau

SEQ ID NO: 639921 - RNA, 19 nt, Homo sapiens
  misc_RNA (1)...(19): siRNA sense strand
ugacuucagccgugugaga

SEQ ID NO: 639922 - RNA, 19 nt, Homo sapiens
  misc_RNA (1)...(19): siRNA sense strand
aaauugauuggacuggaua

SEQ ID NO: 639923 - RNA, 19 nt, Homo sapiens
  misc_RNA (1)...(19): siRNA sense strand
gucauauacgagaauguua

SEQ ID NO: 639924 - RNA, 19 nt, Homo sapiens
  misc_RNA (1)...(19): siRNA sense strand
gugaugucauauacgagaa

SEQ ID NO: 639925 - RNA, 19 nt, Homo sapiens
  misc_RNA (1)...(19): siRNA sense strand
agaagaggaaacugacaaa

SEQ ID NO: 639926 - RNA, 19 nt, Homo sapiens
  misc_RNA (1)...(19): siRNA sense strand
gaaucccaaugugguagug

SEQ ID NO: 639927 - RNA, 19 nt, Homo sapiens
  misc_RNA (1)...(19): siRNA sense strand
ccacugaaucgauguaaaa

SEQ ID NO: 639928 - RNA, 19 nt, Homo sapiens
  misc_RNA (1)...(19): siRNA sense strand
gcaacaaaagucucagauu

SEQ ID NO: 639929 - RNA, 19 nt, Homo sapiens
  misc_RNA (1)...(19): siRNA sense strand
gcuuguuacccucauuauu

SEQ ID NO: 639930 - RNA, 19 nt, Homo sapiens
  misc_RNA (1)...(19): siRNA sense strand
cgagaugcaggaugugaug

SEQ ID NO: 639931 - RNA, 19 nt, Homo sapiens
  misc_RNA (1)...(19): siRNA sense strand
cacaaacauccuaccauau

SEQ ID NO: 639932 - RNA, 19 nt, Homo sapiens
  misc_RNA (1)...(19): siRNA sense strand
gugugcaacugauguggau

SEQ ID NO: 639933 - RNA, 19 nt, Homo sapiens
  misc_RNA (1)...(19): siRNA sense strand
gacagaggagcaguacauu

SEQ ID NO: 639934 - RNA, 19 nt, Homo sapiens
  misc_RNA (1)...(19): siRNA sense strand
ugucauauacgagaauguu

SEQ ID NO: 639935 - RNA, 19 nt, Homo sapiens
  misc_RNA (1)...(19): siRNA sense strand
acacuaaggucaaauacuu

SEQ ID NO: 639936 - RNA, 19 nt, Homo sapiens
  misc_RNA (1)...(19): siRNA sense strand
uaucgucacugccgaaauu

SEQ ID NO: 639937 - RNA, 19 nt, Homo sapiens
  misc_RNA (1)...(19): siRNA sense strand
ggacuucacugaggacuuc

SEQ ID NO: 639938 - RNA, 19 nt, Homo sapiens
  misc_RNA (1)...(19): siRNA sense strand
ggaacacuaaggucaaaua

SEQ ID NO: 639939 - RNA, 19 nt, Homo sapiens
  misc_RNA (1)...(19): siRNA sense strand
gcaccaugcuggcuucaag

SEQ ID NO: 639940 - RNA, 19 nt, Homo sapiens
  misc_RNA (1)...(19): siRNA sense strand
gggcacuggugacagauga

SEQ ID NO: 639941 - RNA, 19 nt, Homo sapiens
  misc_RNA (1)...(19): siRNA sense strand
guagggaguuugaugacau

SEQ ID NO: 639942 - RNA, 19 nt, Homo sapiens
  misc_RNA (1)...(19): siRNA sense strand
aaagggagaugacgauguc

SEQ ID NO: 639943 - RNA, 19 nt, Homo sapiens
  misc_RNA (1)...(19): siRNA sense strand
ggaguggccuuuuaccaaa

SEQ ID NO: 639944 - RNA, 19 nt, Homo sapiens
  misc_RNA (1)...(19): siRNA sense strand
gggagaugacgaugucuuu

SEQ ID NO: 639945 - RNA, 19 nt, Homo sapiens
  misc_RNA (1)...(19): siRNA sense strand
gagaguagggaguuugaug

SEQ ID NO: 639946 - RNA, 19 nt, Homo sapiens
  misc_RNA (1)...(19): siRNA sense strand
cauggaagaugcugaacuc

SEQ ID NO: 639947 - RNA, 19 nt, Homo sapiens
  misc_RNA (1)...(19): siRNA sense strand
caggaacacuaaggucaaa

SEQ ID NO: 639948 - RNA, 19 nt, Homo sapiens
  misc_RNA (1)...(19): siRNA sense strand
gccgaaauuucucuaucuu

SEQ ID NO: 639949 - RNA, 19 nt, Homo sapiens
  misc_RNA (1)...(19): siRNA sense strand
gagaugacgaugucuuugu

SEQ ID NO: 639950 - RNA, 19 nt, Homo sapiens
  misc_RNA (1)...(19): siRNA sense strand
gaacacuaaggucaaauac

SEQ ID NO: 639951 - RNA, 19 nt, Homo sapiens
  misc_RNA (1)...(19): siRNA sense strand
guacagggccacccacuac

SEQ ID NO: 639952 - RNA, 19 nt, Homo sapiens
  misc_RNA (1)...(19): siRNA sense strand
ccaggcccauuucaugcua

SEQ ID NO: 639953 - RNA, 19 nt, Homo sapiens
  misc_RNA (1)...(19): siRNA sense strand
ugugcuggcuggucucgua

SEQ ID NO: 639954 - RNA, 19 nt, Homo sapiens
  misc_RNA (1)...(19): siRNA sense strand
gcugaacucuuccccauug

SEQ ID NO: 639955 - RNA, 19 nt, Homo sapiens
  misc_RNA (1)...(19): siRNA sense strand
ucacugaggacuucuucaa

SEQ ID NO: 639956 - RNA, 19 nt, Homo sapiens
  misc_RNA (1)...(19): siRNA sense strand
gaagcugguguuccuccua

SEQ ID NO: 639957 - RNA, 19 nt, Homo sapiens
  misc_RNA (1)...(19): siRNA sense strand
gcuaaagggagaugacgau

SEQ ID NO: 639958 - RNA, 19 nt, Homo sapiens
  misc_RNA (1)...(19): siRNA sense strand
ggagaugacgaugucuuug

SEQ ID NO: 639959 - RNA, 19 nt, Homo sapiens
  misc_RNA (1)...(19): siRNA sense strand
caugcuggcuucaagacau

SEQ ID NO: 639960 - RNA, 19 nt, Homo sapiens
  misc_RNA (1)...(19): siRNA sense strand
ucaggcuguuccaaggaua

SEQ ID NO: 639961 - RNA, 19 nt, Homo sapiens
  misc_RNA (1)...(19): siRNA sense strand
uaaagggagaugacgaugu

SEQ ID NO: 639962 - RNA, 19 nt, Homo sapiens
  misc_RNA (1)...(19): siRNA sense strand
ugugggcacuggugacaga

SEQ ID NO: 639963 - RNA, 19 nt, Homo sapiens
  misc_RNA (1)...(19): siRNA sense strand
uaucauggaagaugcugaa

SEQ ID NO: 639964 - RNA, 19 nt, Homo sapiens
  misc_RNA (1)...(19): siRNA sense strand
gcuccuggccaucaaguca

SEQ ID NO: 639965 - RNA, 19 nt, Homo sapiens
  misc_RNA (1)...(19): siRNA sense strand
agaguagggaguuugauga

SEQ ID NO: 639966 - RNA, 19 nt, Homo sapiens
  misc_RNA (1)...(19): siRNA sense strand
cauugaugaugucuuugug

SEQ ID NO: 639967 - RNA, 19 nt, Homo sapiens
  misc_RNA (1)...(19): siRNA sense strand
agaugacgaugucuuuguc

SEQ ID NO: 639968 - RNA, 19 nt, Homo sapiens
  misc_RNA (1)...(19): siRNA sense strand
uaaggucaaauacuucauc

SEQ ID NO: 639969 - RNA, 19 nt, Homo sapiens
  misc_RNA (1)...(19): siRNA sense strand
ugccgaaauuucucuaucu

SEQ ID NO: 639970 - RNA, 19 nt, Homo sapiens
  misc_RNA (1)...(19): siRNA sense strand
ccauugaugaugucuuugu

SEQ ID NO: 639971 - RNA, 19 nt, Homo sapiens
  misc_RNA (1)...(19): siRNA sense strand
cugcuggccuaugagagua

SEQ ID NO: 639972 - RNA, 19 nt, Homo sapiens
  misc_RNA (1)...(19): siRNA sense strand
gaaauuucucuaucuugcu

SEQ ID NO: 639973 - RNA, 19 nt, Homo sapiens
  misc_RNA (1)...(19): siRNA sense strand
caaagggaccggcgaugcu

SEQ ID NO: 639974 - RNA, 19 nt, Homo sapiens
  misc_RNA (1)...(19): siRNA sense strand
cucgagauguggaccaugu

SEQ ID NO: 639975 - RNA, 19 nt, Homo sapiens
  misc_RNA (1)...(19): siRNA sense strand
gcugcuggccuaugagagu

SEQ ID NO: 639976 - RNA, 19 nt, Homo sapiens
  misc_RNA (1)...(19): siRNA sense strand
gagaucaguuggaaagaaa

SEQ ID NO: 639977 - RNA, 19 nt, Homo sapiens
  misc_RNA (1)...(19): siRNA sense strand
ccgaguagcugaaauuguu

SEQ ID NO: 639978 - RNA, 19 nt, Homo sapiens
  misc_RNA (1)...(19): siRNA sense strand
ggagaucaguuggaaagaa

SEQ ID NO: 639979 - RNA, 19 nt, Homo sapiens
  misc_RNA (1)...(19): siRNA sense strand
gaaauucccaauccaguga

SEQ ID NO: 639980 - RNA, 19 nt, Homo sapiens
  misc_RNA (1)...(19): siRNA sense strand
ggugugaccuggaagaaau

SEQ ID NO: 639981 - RNA, 19 nt, Homo sapiens
  misc_RNA (1)...(19): siRNA sense strand
uuguugagcugcugaaaua

SEQ ID NO: 639982 - RNA, 19 nt, Homo sapiens
  misc_RNA (1)...(19): siRNA sense strand
gaaagaugaagaagaacaa

SEQ ID NO: 639983 - RNA, 19 nt, Homo sapiens
  misc_RNA (1)...(19): siRNA sense strand
gaagaagaacaaauacuag

SEQ ID NO: 639984 - RNA, 19 nt, Homo sapiens
  misc_RNA (1)...(19): siRNA sense strand
caccaaagcugcugagaac

SEQ ID NO: 639985 - RNA, 19 nt, Homo sapiens
  misc_RNA (1)...(19): siRNA sense strand
ggaauuguucagcaaauga

SEQ ID NO: 639986 - RNA, 19 nt, Homo sapiens
  misc_RNA (1)...(19): siRNA sense strand
ccacgugccuguagcuuca

SEQ ID NO: 639987 - RNA, 19 nt, Homo sapiens
  misc_RNA (1)...(19): siRNA sense strand
caaccgaguagcugaaauu

SEQ ID NO: 639988 - RNA, 19 nt, Homo sapiens
  misc_RNA (1)...(19): siRNA sense strand
gucaaaggacguuggaaua

SEQ ID NO: 639989 - RNA, 19 nt, Homo sapiens
  misc_RNA (1)...(19): siRNA sense strand
gaacaaauacuagccaaaa

SEQ ID NO: 639990 - RNA, 19 nt, Homo sapiens
  misc_RNA (1)...(19): siRNA sense strand
gaccuaaacaccauagaau

SEQ ID NO: 639991 - RNA, 19 nt, Homo sapiens
  misc_RNA (1)...(19): siRNA sense strand
ccaaagcugcugagaacaa

SEQ ID NO: 639992 - RNA, 19 nt, Homo sapiens
  misc_RNA (1)...(19): siRNA sense strand
ccagugagaaggccauaaa

SEQ ID NO: 639993 - RNA, 19 nt, Homo sapiens
  misc_RNA (1)...(19): siRNA sense strand
gggaauuguucagcaaaug

SEQ ID NO: 639994 - RNA, 19 nt, Homo sapiens
  misc_RNA (1)...(19): siRNA sense strand
uagcugaaauuguuuacuc

SEQ ID NO: 639995 - RNA, 19 nt, Homo sapiens
  misc_RNA (1)...(19): siRNA sense strand
ggucaaaggacguuggaau

SEQ ID NO: 639996 - RNA, 19 nt, Homo sapiens
  misc_RNA (1)...(19): siRNA sense strand
ccuagaugaugaugaccua

SEQ ID NO: 639997 - RNA, 19 nt, Homo sapiens
  misc_RNA (1)...(19): siRNA sense strand
uaacugagggucucuccuu

SEQ ID NO: 639998 - RNA, 19 nt, Homo sapiens
  misc_RNA (1)...(19): siRNA sense strand
ccuaaacaccauagaauuc

SEQ ID NO: 639999 - RNA, 19 nt, Homo sapiens
  misc_RNA (1)...(19): siRNA sense strand
ucaaaauccucgccuacua

SEQ ID NO: 640000 - RNA, 19 nt, Homo sapiens
  misc_RNA (1)...(19): siRNA sense strand
gaguagcugaaauuguuua

SEQ ID NO: 640001 - RNA, 19 nt, Homo sapiens
  misc_RNA (1)...(19): siRNA sense strand
gucauggccuugcagaaau

SEQ ID NO: 640002 - RNA, 19 nt, Homo sapiens
  misc_RNA (1)...(19): siRNA sense strand
gcugagaacaagaaguuug

SEQ ID NO: 640003 - RNA, 19 nt, Homo sapiens
  misc_RNA (1)...(19): siRNA sense strand
caaagcugcugagaacaag

SEQ ID NO: 640004 - RNA, 19 nt, Homo sapiens
  misc_RNA (1)...(19): siRNA sense strand
ccaaagucauuuccauugc

SEQ ID NO: 640005 - RNA, 19 nt, Homo sapiens
  misc_RNA (1)...(19): siRNA sense strand
ucauggccuugcagaaauu

SEQ ID NO: 640006 - RNA, 19 nt, Homo sapiens
  misc_RNA (1)...(19): siRNA sense strand
cuaagaaagaugaagaaga

SEQ ID NO: 640007 - RNA, 19 nt, Homo sapiens
  misc_RNA (1)...(19): siRNA sense strand
gccuguagcuucaaguucu

SEQ ID NO: 640008 - RNA, 19 nt, Homo sapiens
  misc_RNA (1)...(19): siRNA sense strand
guugagcugcugaaauauu

SEQ ID NO: 640009 - RNA, 19 nt, Homo sapiens
  misc_RNA (1)...(19): siRNA sense strand
ugucauggccuugcagaaa

SEQ ID NO: 640010 - RNA, 19 nt, Homo sapiens
  misc_RNA (1)...(19): siRNA sense strand
ugaccuaaacaccauagaa

SEQ ID NO: 640011 - RNA, 19 nt, Homo sapiens
  misc_RNA (1)...(19): siRNA sense strand
gaaauauucaggagaucag

SEQ ID NO: 640012 - RNA, 19 nt, Homo sapiens
  misc_RNA (1)...(19): siRNA sense strand
ucaccaaagcugcugagaa

SEQ ID NO: 640013 - RNA, 19 nt, Homo sapiens
  misc_RNA (1)...(19): siRNA sense strand
aaaggacguuggaauacca

SEQ ID NO: 640014 - RNA, 19 nt, Homo sapiens
  misc_RNA (1)...(19): siRNA sense strand
uagaugaugaugaccuaaa

SEQ ID NO: 640015 - RNA, 19 nt, Homo sapiens
  misc_RNA (1)...(19): siRNA sense strand
uugagcugcugaaauauuc

SEQ ID NO: 640016 - RNA, 19 nt, Homo sapiens
  misc_RNA (1)...(19): siRNA sense strand
cuaaacaccauagaauuca

SEQ ID NO: 640017 - RNA, 19 nt, Homo sapiens
  misc_RNA (1)...(19): siRNA sense strand
caggagaucaguuggaaag

SEQ ID NO: 640018 - RNA, 19 nt, Homo sapiens
  misc_RNA (1)...(19): siRNA sense strand
caaauacuagccaaaauug

SEQ ID NO: 640019 - RNA, 19 nt, Homo sapiens
  misc_RNA (1)...(19): siRNA sense strand
gaugaagaagaacaaauac

SEQ ID NO: 640020 - RNA, 19 nt, Homo sapiens
  misc_RNA (1)...(19): siRNA sense strand
cuucaaguccaaagagauu

SEQ ID NO: 640021 - RNA, 19 nt, Homo sapiens
  misc_RNA (1)...(19): siRNA sense strand
cccaaagucauuuccauug

SEQ ID NO: 640022 - RNA, 19 nt, Homo sapiens
  misc_RNA (1)...(19): siRNA sense strand
caggaggcuucaaguccaa

SEQ ID NO: 640023 - RNA, 19 nt, Homo sapiens
  misc_RNA (1)...(19): siRNA sense strand
cugcugagaacaagaaguu

SEQ ID NO: 640024 - RNA, 19 nt, Homo sapiens
  misc_RNA (1)...(19): siRNA sense strand
ccuguagcuucaaguucua

SEQ ID NO: 640025 - RNA, 19 nt, Homo sapiens
  misc_RNA (1)...(19): siRNA sense strand
caaaggacguuggaauacc

SEQ ID NO: 640026 - RNA, 19 nt, Homo sapiens
  misc_RNA (1)...(19): siRNA sense strand
ucaaaggacguuggaauac

SEQ ID NO: 640027 - RNA, 19 nt, Homo sapiens
  misc_RNA (1)...(19): siRNA sense strand
ggcuucaaguccaaagaga

SEQ ID NO: 640028 - RNA, 19 nt, Homo sapiens
  misc_RNA (1)...(19): siRNA sense strand
agaaagaugaagaagaaca

SEQ ID NO: 640029 - RNA, 19 nt, Homo sapiens
  misc_RNA (1)...(19): siRNA sense strand
cagugggugugaccuggaa

SEQ ID NO: 640030 - RNA, 19 nt, Homo sapiens
  misc_RNA (1)...(19): siRNA sense strand
uugcagaaauucccaaucc

SEQ ID NO: 640031 - RNA, 19 nt, Homo sapiens
  misc_RNA (1)...(19): siRNA sense strand
ccugcucucuucucaccaa

SEQ ID NO: 640032 - RNA, 19 nt, Homo sapiens
  misc_RNA (1)...(19): siRNA sense strand
gcucucuucucaccaaagc

SEQ ID NO: 640033 - RNA, 19 nt, Homo sapiens
  misc_RNA (1)...(19): siRNA sense strand
ccaaccgaguagcugaaau

SEQ ID NO: 640034 - RNA, 19 nt, Homo sapiens
  misc_RNA (1)...(19): siRNA sense strand
gaauuguucagcaaaugag

SEQ ID NO: 640035 - RNA, 19 nt, Homo sapiens
  misc_RNA (1)...(19): siRNA sense strand
cgaguagcugaaauuguuu

SEQ ID NO: 640036 - RNA, 19 nt, Homo sapiens
  misc_RNA (1)...(19): siRNA sense strand
gaguaguggagaaggaaga

SEQ ID NO: 640037 - RNA, 19 nt, Homo sapiens
  misc_RNA (1)...(19): siRNA sense strand
gaggugucauggccuugca

SEQ ID NO: 640038 - RNA, 19 nt, Homo sapiens
  misc_RNA (1)...(19): siRNA sense strand
gagaucaguuggaaagaaa

SEQ ID NO: 640039 - RNA, 19 nt, Homo sapiens
  misc_RNA (1)...(19): siRNA sense strand
ccgaguagcugaaauuguu

SEQ ID NO: 640040 - RNA, 19 nt, Homo sapiens
  misc_RNA (1)...(19): siRNA sense strand
ggagaucaguuggaaagaa

SEQ ID NO: 640041 - RNA, 19 nt, Homo sapiens
  misc_RNA (1)...(19): siRNA sense strand
gaaauucccaauccaguga

SEQ ID NO: 640042 - RNA, 19 nt, Homo sapiens
  misc_RNA (1)...(19): siRNA sense strand
ggugugaccuggaagaaau

SEQ ID NO: 640043 - RNA, 19 nt, Homo sapiens
  misc_RNA (1)...(19): siRNA sense strand
uuguugagcugcugaaaua

SEQ ID NO: 640044 - RNA, 19 nt, Homo sapiens
  misc_RNA (1)...(19): siRNA sense strand
gaaagaugaagaagaacaa

SEQ ID NO: 640045 - RNA, 19 nt, Homo sapiens
  misc_RNA (1)...(19): siRNA sense strand
gaagaagaacaaauacuag

SEQ ID NO: 640046 - RNA, 19 nt, Homo sapiens
  misc_RNA (1)...(19): siRNA sense strand
caccaaagcugcugagaac

SEQ ID NO: 640047 - RNA, 19 nt, Homo sapiens
  misc_RNA (1)...(19): siRNA sense strand
ggaauuguucagcaaauga

SEQ ID NO: 640048 - RNA, 19 nt, Homo sapiens
  misc_RNA (1)...(19): siRNA sense strand
ccacgugccuguagcuuca

SEQ ID NO: 640049 - RNA, 19 nt, Homo sapiens
  misc_RNA (1)...(19): siRNA sense strand
caaccgaguagcugaaauu

SEQ ID NO: 640050 - RNA, 19 nt, Homo sapiens
  misc_RNA (1)...(19): siRNA sense strand
gucaaaggacguuggaaua

SEQ ID NO: 640051 - RNA, 19 nt, Homo sapiens
  misc_RNA (1)...(19): siRNA sense strand
gaacaaauacuagccaaaa

SEQ ID NO: 640052 - RNA, 19 nt, Homo sapiens
  misc_RNA (1)...(19): siRNA sense strand
gaccuaaacaccauagaau

SEQ ID NO: 640053 - RNA, 19 nt, Homo sapiens
  misc_RNA (1)...(19): siRNA sense strand
ccaaagcugcugagaacaa

SEQ ID NO: 640054 - RNA, 19 nt, Homo sapiens
  misc_RNA (1)...(19): siRNA sense strand
ccagugagaaggccauaaa

SEQ ID NO: 640055 - RNA, 19 nt, Homo sapiens
  misc_RNA (1)...(19): siRNA sense strand
gggaauuguucagcaaaug

SEQ ID NO: 640056 - RNA, 19 nt, Homo sapiens
  misc_RNA (1)...(19): siRNA sense strand
uagcugaaauuguuuacuc

SEQ ID NO: 640057 - RNA, 19 nt, Homo sapiens
  misc_RNA (1)...(19): siRNA sense strand
ggucaaaggacguuggaau

SEQ ID NO: 640058 - RNA, 19 nt, Homo sapiens
  misc_RNA (1)...(19): siRNA sense strand
ccuagaugaugaugaccua

SEQ ID NO: 640059 - RNA, 19 nt, Homo sapiens
  misc_RNA (1)...(19): siRNA sense strand
uaacugagggucucuccuu

SEQ ID NO: 640060 - RNA, 19 nt, Homo sapiens
  misc_RNA (1)...(19): siRNA sense strand
ccuaaacaccauagaauuc

SEQ ID NO: 640061 - RNA, 19 nt, Homo sapiens
  misc_RNA (1)...(19): siRNA sense strand
ucaaaauccucgccuacua

SEQ ID NO: 640062 - RNA, 19 nt, Homo sapiens
  misc_RNA (1)...(19): siRNA sense strand
gaguagcugaaauuguuua

SEQ ID NO: 640063 - RNA, 19 nt, Homo sapiens
  misc_RNA (1)...(19): siRNA sense strand
gucauggccuugcagaaau

SEQ ID NO: 640064 - RNA, 19 nt, Homo sapiens
  misc_RNA (1)...(19): siRNA sense strand
gcugagaacaagaaguuug

SEQ ID NO: 640065 - RNA, 19 nt, Homo sapiens
  misc_RNA (1)...(19): siRNA sense strand
caaagcugcugagaacaag

SEQ ID NO: 640066 - RNA, 19 nt, Homo sapiens
  misc_RNA (1)...(19): siRNA sense strand
ccaaagucauuuccauugc

SEQ ID NO: 640067 - RNA, 19 nt, Homo sapiens
  misc_RNA (1)...(19): siRNA sense strand
ucauggccuugcagaaauu

SEQ ID NO: 640068 - RNA, 19 nt, Homo sapiens
  misc_RNA (1)...(19): siRNA sense strand
cuaagaaagaugaagaaga

SEQ ID NO: 640069 - RNA, 19 nt, Homo sapiens
  misc_RNA (1)...(19): siRNA sense strand
gccuguagcuucaaguucu

SEQ ID NO: 640070 - RNA, 19 nt, Homo sapiens
  misc_RNA (1)...(19): siRNA sense strand
guugagcugcugaaauauu

SEQ ID NO: 640071 - RNA, 19 nt, Homo sapiens
  misc_RNA (1)...(19): siRNA sense strand
ugucauggccuugcagaaa

SEQ ID NO: 640072 - RNA, 19 nt, Homo sapiens
  misc_RNA (1)...(19): siRNA sense strand
ugaccuaaacaccauagaa

SEQ ID NO: 640073 - RNA, 19 nt, Homo sapiens
  misc_RNA (1)...(19): siRNA sense strand
gaaauauucaggagaucag

SEQ ID NO: 640074 - RNA, 19 nt, Homo sapiens
  misc_RNA (1)...(19): siRNA sense strand
ucaccaaagcugcugagaa

SEQ ID NO: 640075 - RNA, 19 nt, Homo sapiens
  misc_RNA (1)...(19): siRNA sense strand
aaaggacguuggaauacca

SEQ ID NO: 640076 - RNA, 19 nt, Homo sapiens
  misc_RNA (1)...(19): siRNA sense strand
uagaugaugaugaccuaaa

SEQ ID NO: 640077 - RNA, 19 nt, Homo sapiens
  misc_RNA (1)...(19): siRNA sense strand
uugagcugcugaaauauuc

SEQ ID NO: 640078 - RNA, 19 nt, Homo sapiens
  misc_RNA (1)...(19): siRNA sense strand
cuaaacaccauagaauuca

SEQ ID NO: 640079 - RNA, 19 nt, Homo sapiens
  misc_RNA (1)...(19): siRNA sense strand
caggagaucaguuggaaag

SEQ ID NO: 640080 - RNA, 19 nt, Homo sapiens
  misc_RNA (1)...(19): siRNA sense strand
caaauacuagccaaaauug

SEQ ID NO: 640081 - RNA, 19 nt, Homo sapiens
  misc_RNA (1)...(19): siRNA sense strand
gaugaagaagaacaaauac

SEQ ID NO: 640082 - RNA, 19 nt, Homo sapiens
  misc_RNA (1)...(19): siRNA sense strand
cuucaaguccaaagagauu

SEQ ID NO: 640083 - RNA, 19 nt, Homo sapiens
  misc_RNA (1)...(19): siRNA sense strand
cccaaagucauuuccauug

SEQ ID NO: 640084 - RNA, 19 nt, Homo sapiens
  misc_RNA (1)...(19): siRNA sense strand
caggaggcuucaaguccaa

SEQ ID NO: 640085 - RNA, 19 nt, Homo sapiens
  misc_RNA (1)...(19): siRNA sense strand
cugcugagaacaagaaguu

SEQ ID NO: 640086 - RNA, 19 nt, Homo sapiens
  misc_RNA (1)...(19): siRNA sense strand
ccuguagcuucaaguucua

SEQ ID NO: 640087 - RNA, 19 nt, Homo sapiens
  misc_RNA (1)...(19): siRNA sense strand
caaaggacguuggaauacc

SEQ ID NO: 640088 - RNA, 19 nt, Homo sapiens
  misc_RNA (1)...(19): siRNA sense strand
ucaaaggacguuggaauac

SEQ ID NO: 640089 - RNA, 19 nt, Homo sapiens
  misc_RNA (1)...(19): siRNA sense strand
ggcuucaaguccaaagaga

SEQ ID NO: 640090 - RNA, 19 nt, Homo sapiens
  misc_RNA (1)...(19): siRNA sense strand
agaaagaugaagaagaaca

SEQ ID NO: 640091 - RNA, 19 nt, Homo sapiens
  misc_RNA (1)...(19): siRNA sense strand
cagugggugugaccuggaa

SEQ ID NO: 640092 - RNA, 19 nt, Homo sapiens
  misc_RNA (1)...(19): siRNA sense strand
uugcagaaauucccaaucc

SEQ ID NO: 640093 - RNA, 19 nt, Homo sapiens
  misc_RNA (1)...(19): siRNA sense strand
ccugcucucuucucaccaa

SEQ ID NO: 640094 - RNA, 19 nt, Homo sapiens
  misc_RNA (1)...(19): siRNA sense strand
gcucucuucucaccaaagc

SEQ ID NO: 640095 - RNA, 19 nt, Homo sapiens
  misc_RNA (1)...(19): siRNA sense strand
ccaaccgaguagcugaaau

SEQ ID NO: 640096 - RNA, 19 nt, Homo sapiens
  misc_RNA (1)...(19): siRNA sense strand
gaauuguucagcaaaugag

SEQ ID NO: 640097 - RNA, 19 nt, Homo sapiens
  misc_RNA (1)...(19): siRNA sense strand
cgaguagcugaaauuguuu

SEQ ID NO: 640098 - RNA, 19 nt, Homo sapiens
  misc_RNA (1)...(19): siRNA sense strand
gaguaguggagaaggaaga

SEQ ID NO: 640099 - RNA, 19 nt, Homo sapiens
  misc_RNA (1)...(19): siRNA sense strand
gaggugucauggccuugca

SEQ ID NO: 640100 - RNA, 19 nt, Homo sapiens
  misc_RNA (1)...(19): siRNA sense strand
gagaucaguuggaaagaaa

SEQ ID NO: 640101 - RNA, 19 nt, Homo sapiens
  misc_RNA (1)...(19): siRNA sense strand
ccgaguagcugaaauuguu

SEQ ID NO: 640102 - RNA, 19 nt, Homo sapiens
  misc_RNA (1)...(19): siRNA sense strand
ggagaucaguuggaaagaa

SEQ ID NO: 640103 - RNA, 19 nt, Homo sapiens
  misc_RNA (1)...(19): siRNA sense strand
gaaauucccaauccaguga

SEQ ID NO: 640104 - RNA, 19 nt, Homo sapiens
  misc_RNA (1)...(19): siRNA sense strand
ggugugaccuggaagaaau

SEQ ID NO: 640105 - RNA, 19 nt, Homo sapiens
  misc_RNA (1)...(19): siRNA sense strand
uuguugagcugcugaaaua

SEQ ID NO: 640106 - RNA, 19 nt, Homo sapiens
  misc_RNA (1)...(19): siRNA sense strand
gaaagaugaagaagaacaa

SEQ ID NO: 640107 - RNA, 19 nt, Homo sapiens
  misc_RNA (1)...(19): siRNA sense strand
gaagaagaacaaauacuag

SEQ ID NO: 640108 - RNA, 19 nt, Homo sapiens
  misc_RNA (1)...(19): siRNA sense strand
caccaaagcugcugagaac

SEQ ID NO: 640109 - RNA, 19 nt, Homo sapiens
  misc_RNA (1)...(19): siRNA sense strand
ggaauuguucagcaaauga

SEQ ID NO: 640110 - RNA, 19 nt, Homo sapiens
  misc_RNA (1)...(19): siRNA sense strand
ccacgugccuguagcuuca

SEQ ID NO: 640111 - RNA, 19 nt, Homo sapiens
  misc_RNA (1)...(19): siRNA sense strand
caaccgaguagcugaaauu

SEQ ID NO: 640112 - RNA, 19 nt, Homo sapiens
  misc_RNA (1)...(19): siRNA sense strand
gucaaaggacguuggaaua

SEQ ID NO: 640113 - RNA, 19 nt, Homo sapiens
  misc_RNA (1)...(19): siRNA sense strand
gaacaaauacuagccaaaa

SEQ ID NO: 640114 - RNA, 19 nt, Homo sapiens
  misc_RNA (1)...(19): siRNA sense strand
gaccuaaacaccauagaau

SEQ ID NO: 640115 - RNA, 19 nt, Homo sapiens
  misc_RNA (1)...(19): siRNA sense strand
ccaaagcugcugagaacaa

SEQ ID NO: 640116 - RNA, 19 nt, Homo sapiens
  misc_RNA (1)...(19): siRNA sense strand
ccagugagaaggccauaaa

SEQ ID NO: 640117 - RNA, 19 nt, Homo sapiens
  misc_RNA (1)...(19): siRNA sense strand
gggaauuguucagcaaaug

SEQ ID NO: 640118 - RNA, 19 nt, Homo sapiens
  misc_RNA (1)...(19): siRNA sense strand
uagcugaaauuguuuacuc

SEQ ID NO: 640119 - RNA, 19 nt, Homo sapiens
  misc_RNA (1)...(19): siRNA sense strand
ggucaaaggacguuggaau

SEQ ID NO: 640120 - RNA, 19 nt, Homo sapiens
  misc_RNA (1)...(19): siRNA sense strand
ccuagaugaugaugaccua

SEQ ID NO: 640121 - RNA, 19 nt, Homo sapiens
  misc_RNA (1)...(19): siRNA sense strand
uaacugagggucucuccuu

SEQ ID NO: 640122 - RNA, 19 nt, Homo sapiens
  misc_RNA (1)...(19): siRNA sense strand
ccuaaacaccauagaauuc

SEQ ID NO: 640123 - RNA, 19 nt, Homo sapiens
  misc_RNA (1)...(19): siRNA sense strand
ucaaaauccucgccuacua

SEQ ID NO: 640124 - RNA, 19 nt, Homo sapiens
  misc_RNA (1)...(19): siRNA sense strand
gaguagcugaaauuguuua

SEQ ID NO: 640125 - RNA, 19 nt, Homo sapiens
  misc_RNA (1)...(19): siRNA sense strand
gucauggccuugcagaaau

SEQ ID NO: 640126 - RNA, 19 nt, Homo sapiens
  misc_RNA (1)...(19): siRNA sense strand
gcugagaacaagaaguuug

SEQ ID NO: 640127 - RNA, 19 nt, Homo sapiens
  misc_RNA (1)...(19): siRNA sense strand
caaagcugcugagaacaag

SEQ ID NO: 640128 - RNA, 19 nt, Homo sapiens
  misc_RNA (1)...(19): siRNA sense strand
ccaaagucauuuccauugc

SEQ ID NO: 640129 - RNA, 19 nt, Homo sapiens
  misc_RNA (1)...(19): siRNA sense strand
ucauggccuugcagaaauu

SEQ ID NO: 640130 - RNA, 19 nt, Homo sapiens
  misc_RNA (1)...(19): siRNA sense strand
cuaagaaagaugaagaaga

SEQ ID NO: 640131 - RNA, 19 nt, Homo sapiens
  misc_RNA (1)...(19): siRNA sense strand
gccuguagcuucaaguucu

SEQ ID NO: 640132 - RNA, 19 nt, Homo sapiens
  misc_RNA (1)...(19): siRNA sense strand
guugagcugcugaaauauu

SEQ ID NO: 640133 - RNA, 19 nt, Homo sapiens
  misc_RNA (1)...(19): siRNA sense strand
ugucauggccuugcagaaa

SEQ ID NO: 640134 - RNA, 19 nt, Homo sapiens
  misc_RNA (1)...(19): siRNA sense strand
ugaccuaaacaccauagaa

SEQ ID NO: 640135 - RNA, 19 nt, Homo sapiens
  misc_RNA (1)...(19): siRNA sense strand
gaaauauucaggagaucag

SEQ ID NO: 640136 - RNA, 19 nt, Homo sapiens
  misc_RNA (1)...(19): siRNA sense strand
ucaccaaagcugcugagaa

SEQ ID NO: 640137 - RNA, 19 nt, Homo sapiens
  misc_RNA (1)...(19): siRNA sense strand
aaaggacguuggaauacca

SEQ ID NO: 640138 - RNA, 19 nt, Homo sapiens
  misc_RNA (1)...(19): siRNA sense strand
uagaugaugaugaccuaaa

SEQ ID NO: 640139 - RNA, 19 nt, Homo sapiens
  misc_RNA (1)...(19): siRNA sense strand
uugagcugcugaaauauuc

SEQ ID NO: 640140 - RNA, 19 nt, Homo sapiens
  misc_RNA (1)...(19): siRNA sense strand
cuaaacaccauagaauuca

SEQ ID NO: 640141 - RNA, 19 nt, Homo sapiens
  misc_RNA (1)...(19): siRNA sense strand
caggagaucaguuggaaag

SEQ ID NO: 640142 - RNA, 19 nt, Homo sapiens
  misc_RNA (1)...(19): siRNA sense strand
caaauacuagccaaaauug

SEQ ID NO: 640143 - RNA, 19 nt, Homo sapiens
  misc_RNA (1)...(19): siRNA sense strand
gaugaagaagaacaaauac

SEQ ID NO: 640144 - RNA, 19 nt, Homo sapiens
  misc_RNA (1)...(19): siRNA sense strand
cuucaaguccaaagagauu

SEQ ID NO: 640145 - RNA, 19 nt, Homo sapiens
  misc_RNA (1)...(19): siRNA sense strand
cccaaagucauuuccauug

SEQ ID NO: 640146 - RNA, 19 nt, Homo sapiens
  misc_RNA (1)...(19): siRNA sense strand
caggaggcuucaaguccaa

SEQ ID NO: 640147 - RNA, 19 nt, Homo sapiens
  misc_RNA (1)...(19): siRNA sense strand
cugcugagaacaagaaguu

SEQ ID NO: 640148 - RNA, 19 nt, Homo sapiens
  misc_RNA (1)...(19): siRNA sense strand
ccuguagcuucaaguucua

SEQ ID NO: 640149 - RNA, 19 nt, Homo sapiens
  misc_RNA (1)...(19): siRNA sense strand
caaaggacguuggaauacc

SEQ ID NO: 640150 - RNA, 19 nt, Homo sapiens
  misc_RNA (1)...(19): siRNA sense strand
ucaaaggacguuggaauac

SEQ ID NO: 640151 - RNA, 19 nt, Homo sapiens
  misc_RNA (1)...(19): siRNA sense strand
ggcuucaaguccaaagaga

SEQ ID NO: 640152 - RNA, 19 nt, Homo sapiens
  misc_RNA (1)...(19): siRNA sense strand
agaaagaugaagaagaaca

SEQ ID NO: 640153 - RNA, 19 nt, Homo sapiens
  misc_RNA (1)...(19): siRNA sense strand
cagugggugugaccuggaa

SEQ ID NO: 640154 - RNA, 19 nt, Homo sapiens
  misc_RNA (1)...(19): siRNA sense strand
uugcagaaauucccaaucc

SEQ ID NO: 640155 - RNA, 19 nt, Homo sapiens
  misc_RNA (1)...(19): siRNA sense strand
ccugcucucuucucaccaa

SEQ ID NO: 640156 - RNA, 19 nt, Homo sapiens
  misc_RNA (1)...(19): siRNA sense strand
gcucucuucucaccaaagc

SEQ ID NO: 640157 - RNA, 19 nt, Homo sapiens
  misc_RNA (1)...(19): siRNA sense strand
ccaaccgaguagcugaaau

SEQ ID NO: 640158 - RNA, 19 nt, Homo sapiens
  misc_RNA (1)...(19): siRNA sense strand
gaauuguucagcaaaugag

SEQ ID NO: 640159 - RNA, 19 nt, Homo sapiens
  misc_RNA (1)...(19): siRNA sense strand
cgaguagcugaaauuguuu

SEQ ID NO: 640160 - RNA, 19 nt, Homo sapiens
  misc_RNA (1)...(19): siRNA sense strand
gaguaguggagaaggaaga

SEQ ID NO: 640161 - RNA, 19 nt, Homo sapiens
  misc_RNA (1)...(19): siRNA sense strand
gaggugucauggccuugca

SEQ ID NO: 640162 - RNA, 19 nt, Homo sapiens
  misc_RNA (1)...(19): siRNA sense strand
gagaucaguuggaaagaaa

SEQ ID NO: 640163 - RNA, 19 nt, Homo sapiens
  misc_RNA (1)...(19): siRNA sense strand
ccgaguagcugaaauuguu

SEQ ID NO: 640164 - RNA, 19 nt, Homo sapiens
  misc_RNA (1)...(19): siRNA sense strand
ggagaucaguuggaaagaa

SEQ ID NO: 640165 - RNA, 19 nt, Homo sapiens
  misc_RNA (1)...(19): siRNA sense strand
gaaauucccaauccaguga

SEQ ID NO: 640166 - RNA, 19 nt, Homo sapiens
  misc_RNA (1)...(19): siRNA sense strand
ggugugaccuggaagaaau

SEQ ID NO: 640167 - RNA, 19 nt, Homo sapiens
  misc_RNA (1)...(19): siRNA sense strand
uuguugagcugcugaaaua

SEQ ID NO: 640168 - RNA, 19 nt, Homo sapiens
  misc_RNA (1)...(19): siRNA sense strand
gaaagaugaagaagaacaa

SEQ ID NO: 640169 - RNA, 19 nt, Homo sapiens
  misc_RNA (1)...(19): siRNA sense strand
gaagaagaacaaauacuag

SEQ ID NO: 640170 - RNA, 19 nt, Homo sapiens
  misc_RNA (1)...(19): siRNA sense strand
caccaaagcugcugagaac

SEQ ID NO: 640171 - RNA, 19 nt, Homo sapiens
  misc_RNA (1)...(19): siRNA sense strand
ggaauuguucagcaaauga

SEQ ID NO: 640172 - RNA, 19 nt, Homo sapiens
  misc_RNA (1)...(19): siRNA sense strand
ccacgugccuguagcuuca

SEQ ID NO: 640173 - RNA, 19 nt, Homo sapiens
  misc_RNA (1)...(19): siRNA sense strand
caaccgaguagcugaaauu

SEQ ID NO: 640174 - RNA, 19 nt, Homo sapiens
  misc_RNA (1)...(19): siRNA sense strand
gucaaaggacguuggaaua

SEQ ID NO: 640175 - RNA, 19 nt, Homo sapiens
  misc_RNA (1)...(19): siRNA sense strand
gaacaaauacuagccaaaa

SEQ ID NO: 640176 - RNA, 19 nt, Homo sapiens
  misc_RNA (1)...(19): siRNA sense strand
gaccuaaacaccauagaau

SEQ ID NO: 640177 - RNA, 19 nt, Homo sapiens
  misc_RNA (1)...(19): siRNA sense strand
ccaaagcugcugagaacaa

SEQ ID NO: 640178 - RNA, 19 nt, Homo sapiens
  misc_RNA (1)...(19): siRNA sense strand
ccagugagaaggccauaaa

SEQ ID NO: 640179 - RNA, 19 nt, Homo sapiens
  misc_RNA (1)...(19): siRNA sense strand
gggaauuguucagcaaaug

SEQ ID NO: 640180 - RNA, 19 nt, Homo sapiens
  misc_RNA (1)...(19): siRNA sense strand
uagcugaaauuguuuacuc

SEQ ID NO: 640181 - RNA, 19 nt, Homo sapiens
  misc_RNA (1)...(19): siRNA sense strand
ggucaaaggacguuggaau

SEQ ID NO: 640182 - RNA, 19 nt, Homo sapiens
  misc_RNA (1)...(19): siRNA sense strand
ccuagaugaugaugaccua

SEQ ID NO: 640183 - RNA, 19 nt, Homo sapiens
  misc_RNA (1)...(19): siRNA sense strand
uaacugagggucucuccuu

SEQ ID NO: 640184 - RNA, 19 nt, Homo sapiens
  misc_RNA (1)...(19): siRNA sense strand
ccuaaacaccauagaauuc

SEQ ID NO: 640185 - RNA, 19 nt, Homo sapiens
  misc_RNA (1)...(19): siRNA sense strand
ucaaaauccucgccuacua

SEQ ID NO: 640186 - RNA, 19 nt, Homo sapiens
  misc_RNA (1)...(19): siRNA sense strand
gaguagcugaaauuguuua

SEQ ID NO: 640187 - RNA, 19 nt, Homo sapiens
  misc_RNA (1)...(19): siRNA sense strand
gucauggccuugcagaaau

SEQ ID NO: 640188 - RNA, 19 nt, Homo sapiens
  misc_RNA (1)...(19): siRNA sense strand
gcugagaacaagaaguuug

SEQ ID NO: 640189 - RNA, 19 nt, Homo sapiens
  misc_RNA (1)...(19): siRNA sense strand
caaagcugcugagaacaag

SEQ ID NO: 640190 - RNA, 19 nt, Homo sapiens
  misc_RNA (1)...(19): siRNA sense strand
ccaaagucauuuccauugc

SEQ ID NO: 640191 - RNA, 19 nt, Homo sapiens
  misc_RNA (1)...(19): siRNA sense strand
ucauggccuugcagaaauu

SEQ ID NO: 640192 - RNA, 19 nt, Homo sapiens
  misc_RNA (1)...(19): siRNA sense strand
cuaagaaagaugaagaaga

SEQ ID NO: 640193 - RNA, 19 nt, Homo sapiens
  misc_RNA (1)...(19): siRNA sense strand
gccuguagcuucaaguucu

SEQ ID NO: 640194 - RNA, 19 nt, Homo sapiens
  misc_RNA (1)...(19): siRNA sense strand
guugagcugcugaaauauu

SEQ ID NO: 640195 - RNA, 19 nt, Homo sapiens
  misc_RNA (1)...(19): siRNA sense strand
ugucauggccuugcagaaa

SEQ ID NO: 640196 - RNA, 19 nt, Homo sapiens
  misc_RNA (1)...(19): siRNA sense strand
ugaccuaaacaccauagaa

SEQ ID NO: 640197 - RNA, 19 nt, Homo sapiens
  misc_RNA (1)...(19): siRNA sense strand
gaaauauucaggagaucag

SEQ ID NO: 640198 - RNA, 19 nt, Homo sapiens
  misc_RNA (1)...(19): siRNA sense strand
ucaccaaagcugcugagaa

SEQ ID NO: 640199 - RNA, 19 nt, Homo sapiens
  misc_RNA (1)...(19): siRNA sense strand
aaaggacguuggaauacca

SEQ ID NO: 640200 - RNA, 19 nt, Homo sapiens
  misc_RNA (1)...(19): siRNA sense strand
uagaugaugaugaccuaaa

SEQ ID NO: 640201 - RNA, 19 nt, Homo sapiens
  misc_RNA (1)...(19): siRNA sense strand
uugagcugcugaaauauuc

SEQ ID NO: 640202 - RNA, 19 nt, Homo sapiens
  misc_RNA (1)...(19): siRNA sense strand
cuaaacaccauagaauuca

SEQ ID NO: 640203 - RNA, 19 nt, Homo sapiens
  misc_RNA (1)...(19): siRNA sense strand
caggagaucaguuggaaag

SEQ ID NO: 640204 - RNA, 19 nt, Homo sapiens
  misc_RNA (1)...(19): siRNA sense strand
caaauacuagccaaaauug

SEQ ID NO: 640205 - RNA, 19 nt, Homo sapiens
  misc_RNA (1)...(19): siRNA sense strand
gaugaagaagaacaaauac

SEQ ID NO: 640206 - RNA, 19 nt, Homo sapiens
  misc_RNA (1)...(19): siRNA sense strand
cuucaaguccaaagagauu

SEQ ID NO: 640207 - RNA, 19 nt, Homo sapiens
  misc_RNA (1)...(19): siRNA sense strand
cccaaagucauuuccauug

SEQ ID NO: 640208 - RNA, 19 nt, Homo sapiens
  misc_RNA (1)...(19): siRNA sense strand
caggaggcuucaaguccaa

SEQ ID NO: 640209 - RNA, 19 nt, Homo sapiens
  misc_RNA (1)...(19): siRNA sense strand
cugcugagaacaagaaguu

SEQ ID NO: 640210 - RNA, 19 nt, Homo sapiens
  misc_RNA (1)...(19): siRNA sense strand
ccuguagcuucaaguucua

SEQ ID NO: 640211 - RNA, 19 nt, Homo sapiens
  misc_RNA (1)...(19): siRNA sense strand
caaaggacguuggaauacc

SEQ ID NO: 640212 - RNA, 19 nt, Homo sapiens
  misc_RNA (1)...(19): siRNA sense strand
ucaaaggacguuggaauac

SEQ ID NO: 640213 - RNA, 19 nt, Homo sapiens
  misc_RNA (1)...(19): siRNA sense strand
ggcuucaaguccaaagaga

SEQ ID NO: 640214 - RNA, 19 nt, Homo sapiens
  misc_RNA (1)...(19): siRNA sense strand
agaaagaugaagaagaaca

SEQ ID NO: 640215 - RNA, 19 nt, Homo sapiens
  misc_RNA (1)...(19): siRNA sense strand
cagugggugugaccuggaa

SEQ ID NO: 640216 - RNA, 19 nt, Homo sapiens
  misc_RNA (1)...(19): siRNA sense strand
uugcagaaauucccaaucc

SEQ ID NO: 640217 - RNA, 19 nt, Homo sapiens
  misc_RNA (1)...(19): siRNA sense strand
ccugcucucuucucaccaa

SEQ ID NO: 640218 - RNA, 19 nt, Homo sapiens
  misc_RNA (1)...(19): siRNA sense strand
gcucucuucucaccaaagc

SEQ ID NO: 640219 - RNA, 19 nt, Homo sapiens
  misc_RNA (1)...(19): siRNA sense strand
ccaaccgaguagcugaaau

SEQ ID NO: 640220 - RNA, 19 nt, Homo sapiens
  misc_RNA (1)...(19): siRNA sense strand
gaauuguucagcaaaugag

SEQ ID NO: 640221 - RNA, 19 nt, Homo sapiens
  misc_RNA (1)...(19): siRNA sense strand
cgaguagcugaaauuguuu

SEQ ID NO: 640222 - RNA, 19 nt, Homo sapiens
  misc_RNA (1)...(19): siRNA sense strand
gaguaguggagaaggaaga

SEQ ID NO: 640223 - RNA, 19 nt, Homo sapiens
  misc_RNA (1)...(19): siRNA sense strand
gaggugucauggccuugca

SEQ ID NO: 640224 - RNA, 19 nt, Homo sapiens
  misc_RNA (1)...(19): siRNA sense strand
caacagcucuugcguguac

SEQ ID NO: 640225 - RNA, 19 nt, Homo sapiens
  misc_RNA (1)...(19): siRNA sense strand
aaaccucacugacaucaaa

SEQ ID NO: 640226 - RNA, 19 nt, Homo sapiens
  misc_RNA (1)...(19): siRNA sense strand
caacugcacuucuggucaa

SEQ ID NO: 640227 - RNA, 19 nt, Homo sapiens
  misc_RNA (1)...(19): siRNA sense strand
ccagaccgcucucaacuuc

SEQ ID NO: 640228 - RNA, 19 nt, Homo sapiens
  misc_RNA (1)...(19): siRNA sense strand
gaguaaaccucacugacau

SEQ ID NO: 640229 - RNA, 19 nt, Homo sapiens
  misc_RNA (1)...(19): siRNA sense strand
caagguagcugaguuucug

SEQ ID NO: 640230 - RNA, 19 nt, Homo sapiens
  misc_RNA (1)...(19): siRNA sense strand
ggaguaaaccucacugaca

SEQ ID NO: 640231 - RNA, 19 nt, Homo sapiens
  misc_RNA (1)...(19): siRNA sense strand
gcucucaacuucucagaca

SEQ ID NO: 640232 - RNA, 19 nt, Homo sapiens
  misc_RNA (1)...(19): siRNA sense strand
cacauuguaugcacaguuu

SEQ ID NO: 640233 - RNA, 19 nt, Homo sapiens
  misc_RNA (1)...(19): siRNA sense strand
gcacucagcucugcaacag

SEQ ID NO: 640234 - RNA, 19 nt, Homo sapiens
  misc_RNA (1)...(19): siRNA sense strand
ucacugacaucaaacucaa

SEQ ID NO: 640235 - RNA, 19 nt, Homo sapiens
  misc_RNA (1)...(19): siRNA sense strand
gaauaaacagcgaagacuu

SEQ ID NO: 640236 - RNA, 19 nt, Homo sapiens
  misc_RNA (1)...(19): siRNA sense strand
caacaguucccaggaguuu

SEQ ID NO: 640237 - RNA, 19 nt, Homo sapiens
  misc_RNA (1)...(19): siRNA sense strand
gcucagcucucuccuagac

SEQ ID NO: 640238 - RNA, 19 nt, Homo sapiens
  misc_RNA (1)...(19): siRNA sense strand
gaugaggagauaacuuuga

SEQ ID NO: 640239 - RNA, 19 nt, Homo sapiens
  misc_RNA (1)...(19): siRNA sense strand
ggugacugcugcacauugu

SEQ ID NO: 640240 - RNA, 19 nt, Homo sapiens
  misc_RNA (1)...(19): siRNA sense strand
ggacacauggcgccuagug

SEQ ID NO: 640241 - RNA, 19 nt, Homo sapiens
  misc_RNA (1)...(19): siRNA sense strand
ggaguuugcucagcucucu

SEQ ID NO: 640242 - RNA, 19 nt, Homo sapiens
  misc_RNA (1)...(19): siRNA sense strand
gcacauuguaugcacaguu

SEQ ID NO: 640243 - RNA, 19 nt, Homo sapiens
  misc_RNA (1)...(19): siRNA sense strand
ucaaguuguuucccucaga

SEQ ID NO: 640244 - RNA, 19 nt, Homo sapiens
  misc_RNA (1)...(19): siRNA sense strand
caaguuguuucccucagau

SEQ ID NO: 640245 - RNA, 19 nt, Homo sapiens
  misc_RNA (1)...(19): siRNA sense strand
gaccagcagcaucccauuu

SEQ ID NO: 640246 - RNA, 19 nt, Homo sapiens
  misc_RNA (1)...(19): siRNA sense strand
aggaugaggagauaacuuu

SEQ ID NO: 640247 - RNA, 19 nt, Homo sapiens
  misc_RNA (1)...(19): siRNA sense strand
cagacucacucaccacaag

SEQ ID NO: 640248 - RNA, 19 nt, Homo sapiens
  misc_RNA (1)...(19): siRNA sense strand
gguggugacugcugcacau

SEQ ID NO: 640249 - RNA, 19 nt, Homo sapiens
  misc_RNA (1)...(19): siRNA sense strand
acacgguggugcccuuguu

SEQ ID NO: 640250 - RNA, 19 nt, Homo sapiens
  misc_RNA (1)...(19): siRNA sense strand
ccucuacagugcccagaau

SEQ ID NO: 640251 - RNA, 19 nt, Homo sapiens
  misc_RNA (1)...(19): siRNA sense strand
gugcagguguuggcucaug

SEQ ID NO: 640252 - RNA, 19 nt, Homo sapiens
  misc_RNA (1)...(19): siRNA sense strand
ggacggaagggcugaugca

SEQ ID NO: 640253 - RNA, 19 nt, Homo sapiens
  misc_RNA (1)...(19): siRNA sense strand
aggaacaacugcacuucug

SEQ ID NO: 640254 - RNA, 19 nt, Homo sapiens
  misc_RNA (1)...(19): siRNA sense strand
guaaaccucacugacauca

SEQ ID NO: 640255 - RNA, 19 nt, Homo sapiens
  misc_RNA (1)...(19): siRNA sense strand
gauaguuggugggcagucu

SEQ ID NO: 640256 - RNA, 19 nt, Homo sapiens
  misc_RNA (1)...(19): siRNA sense strand
ggaugaggagauaacuuug

SEQ ID NO: 640257 - RNA, 19 nt, Homo sapiens
  misc_RNA (1)...(19): siRNA sense strand
ugacugcugcacauuguau

SEQ ID NO: 640258 - RNA, 19 nt, Homo sapiens
  misc_RNA (1)...(19): siRNA sense strand
acagugcccagaaucauga

SEQ ID NO: 640259 - RNA, 19 nt, Homo sapiens
  misc_RNA (1)...(19): siRNA sense strand
ugacaucaaacucaacagu

SEQ ID NO: 640260 - RNA, 19 nt, Homo sapiens
  misc_RNA (1)...(19): siRNA sense strand
caaaacaguaucuuucaga

SEQ ID NO: 640261 - RNA, 19 nt, Homo sapiens
  misc_RNA (1)...(19): siRNA sense strand
auacuuacagcucggauau

SEQ ID NO: 640262 - RNA, 19 nt, Homo sapiens
  misc_RNA (1)...(19): siRNA sense strand
ccagcagcaucccauuucu

SEQ ID NO: 640263 - RNA, 19 nt, Homo sapiens
  misc_RNA (1)...(19): siRNA sense strand
gaugcaugccagggagaua

SEQ ID NO: 640264 - RNA, 19 nt, Homo sapiens
  misc_RNA (1)...(19): siRNA sense strand
cagaauaaacagcgaagac

SEQ ID NO: 640265 - RNA, 19 nt, Homo sapiens
  misc_RNA (1)...(19): siRNA sense strand
ggacuggauccaugacacu

SEQ ID NO: 640266 - RNA, 19 nt, Homo sapiens
  misc_RNA (1)...(19): siRNA sense strand
acgccaagguagcugaguu

SEQ ID NO: 640267 - RNA, 19 nt, Homo sapiens
  misc_RNA (1)...(19): siRNA sense strand
cauacuuacagcucggaua

SEQ ID NO: 640268 - RNA, 19 nt, Homo sapiens
  misc_RNA (1)...(19): siRNA sense strand
cuugcaggaugaggagaua

SEQ ID NO: 640269 - RNA, 19 nt, Homo sapiens
  misc_RNA (1)...(19): siRNA sense strand
gcuggagccuugggcaucu

SEQ ID NO: 640270 - RNA, 19 nt, Homo sapiens
  misc_RNA (1)...(19): siRNA sense strand
ccgggaccuugcaggauga

SEQ ID NO: 640271 - RNA, 19 nt, Homo sapiens
  misc_RNA (1)...(19): siRNA sense strand
agaccgcucucaacuucuc

SEQ ID NO: 640272 - RNA, 19 nt, Homo sapiens
  misc_RNA (1)...(19): siRNA sense strand
gcagagacccgagauguuu

SEQ ID NO: 640273 - RNA, 19 nt, Homo sapiens
  misc_RNA (1)...(19): siRNA sense strand
gcagggcuguguauaagau

SEQ ID NO: 640274 - RNA, 19 nt, Homo sapiens
  misc_RNA (1)...(19): siRNA sense strand
agaggaagcugugccaauu

SEQ ID NO: 640275 - RNA, 19 nt, Homo sapiens
  misc_RNA (1)...(19): siRNA sense strand
gacccgagauguuuaucau

SEQ ID NO: 640276 - RNA, 19 nt, Homo sapiens
  misc_RNA (1)...(19): siRNA sense strand
gggaccggcugaaggagaa

SEQ ID NO: 640277 - RNA, 19 nt, Homo sapiens
  misc_RNA (1)...(19): siRNA sense strand
agacuggcaucaaggaaug

SEQ ID NO: 640278 - RNA, 19 nt, Homo sapiens
  misc_RNA (1)...(19): siRNA sense strand
agacguagccugcaaaugc

SEQ ID NO: 640279 - RNA, 19 nt, Homo sapiens
  misc_RNA (1)...(19): siRNA sense strand
ggagagucaugcagauagg

SEQ ID NO: 640280 - RNA, 19 nt, Homo sapiens
  misc_RNA (1)...(19): siRNA sense strand
ggaaugccagcaccaguuc

SEQ ID NO: 640281 - RNA, 19 nt, Homo sapiens
  misc_RNA (1)...(19): siRNA sense strand
cagagacccgagauguuua

SEQ ID NO: 640282 - RNA, 19 nt, Homo sapiens
  misc_RNA (1)...(19): siRNA sense strand
caacuccugguggucauua

SEQ ID NO: 640283 - RNA, 19 nt, Homo sapiens
  misc_RNA (1)...(19): siRNA sense strand
gagcacauggccuacauag

SEQ ID NO: 640284 - RNA, 19 nt, Homo sapiens
  misc_RNA (1)...(19): siRNA sense strand
gaggaagcugugccaauug

SEQ ID NO: 640285 - RNA, 19 nt, Homo sapiens
  misc_RNA (1)...(19): siRNA sense strand
ggagcgagagaagaacuuu

SEQ ID NO: 640286 - RNA, 19 nt, Homo sapiens
  misc_RNA (1)...(19): siRNA sense strand
cagauaggcagccgagaga

SEQ ID NO: 640287 - RNA, 19 nt, Homo sapiens
  misc_RNA (1)...(19): siRNA sense strand
guaagaagugcacggagau

SEQ ID NO: 640288 - RNA, 19 nt, Homo sapiens
  misc_RNA (1)...(19): siRNA sense strand
ggauggcugugagcucaug

SEQ ID NO: 640289 - RNA, 19 nt, Homo sapiens
  misc_RNA (1)...(19): siRNA sense strand
ggaagcugugccaauugua

SEQ ID NO: 640290 - RNA, 19 nt, Homo sapiens
  misc_RNA (1)...(19): siRNA sense strand
gaagcugugccaauuguac

SEQ ID NO: 640291 - RNA, 19 nt, Homo sapiens
  misc_RNA (1)...(19): siRNA sense strand
ggagcacauggccuacaua

SEQ ID NO: 640292 - RNA, 19 nt, Homo sapiens
  misc_RNA (1)...(19): siRNA sense strand
cggagaucguggaccagua

SEQ ID NO: 640293 - RNA, 19 nt, Homo sapiens
  misc_RNA (1)...(19): siRNA sense strand
ucgcagggcuguguauaag

SEQ ID NO: 640294 - RNA, 19 nt, Homo sapiens
  misc_RNA (1)...(19): siRNA sense strand
gggagagucaugcagauag

SEQ ID NO: 640295 - RNA, 19 nt, Homo sapiens
  misc_RNA (1)...(19): siRNA sense strand
gguggucauuagcuuugaa

SEQ ID NO: 640296 - RNA, 19 nt, Homo sapiens
  misc_RNA (1)...(19): siRNA sense strand
ggcuggagcuggucaacag

SEQ ID NO: 640297 - RNA, 19 nt, Homo sapiens
  misc_RNA (1)...(19): siRNA sense strand
aggaagcugugccaauugu

SEQ ID NO: 640298 - RNA, 19 nt, Homo sapiens
  misc_RNA (1)...(19): siRNA sense strand
ucaugaaccugcaaaacaa

SEQ ID NO: 640299 - RNA, 19 nt, Homo sapiens
  misc_RNA (1)...(19): siRNA sense strand
ggagaucguggaccaguac

SEQ ID NO: 640300 - RNA, 19 nt, Homo sapiens
  misc_RNA (1)...(19): siRNA sense strand
guauaagauggcagacgua

SEQ ID NO: 640301 - RNA, 19 nt, Homo sapiens
  misc_RNA (1)...(19): siRNA sense strand
gugcagagacccgagaugu

SEQ ID NO: 640302 - RNA, 19 nt, Homo sapiens
  misc_RNA (1)...(19): siRNA sense strand
gaucguggaccaguacauc

SEQ ID NO: 640303 - RNA, 19 nt, Homo sapiens
  misc_RNA (1)...(19): siRNA sense strand
ccaagacuggcaucaagga

SEQ ID NO: 640304 - RNA, 19 nt, Homo sapiens
  misc_RNA (1)...(19): siRNA sense strand
gcuacaaccaguucaagag

SEQ ID NO: 640305 - RNA, 19 nt, Homo sapiens
  misc_RNA (1)...(19): siRNA sense strand
ggucgcagggcuguguaua

SEQ ID NO: 640306 - RNA, 19 nt, Homo sapiens
  misc_RNA (1)...(19): siRNA sense strand
gcgcugccacugcaaguuc

SEQ ID NO: 640307 - RNA, 19 nt, Homo sapiens
  misc_RNA (1)...(19): siRNA sense strand
cagaggaagcugugccaau

SEQ ID NO: 640308 - RNA, 19 nt, Homo sapiens
  misc_RNA (1)...(19): siRNA sense strand
caagacuggcaucaaggaa

SEQ ID NO: 640309 - RNA, 19 nt, Homo sapiens
  misc_RNA (1)...(19): siRNA sense strand
gagcgagagaagaacuuug

SEQ ID NO: 640310 - RNA, 19 nt, Homo sapiens
  misc_RNA (1)...(19): siRNA sense strand
ccgcuucgccaaggaguuu

SEQ ID NO: 640311 - RNA, 19 nt, Homo sapiens
  misc_RNA (1)...(19): siRNA sense strand
gucgcagggcuguguauaa

SEQ ID NO: 640312 - RNA, 19 nt, Homo sapiens
  misc_RNA (1)...(19): siRNA sense strand
gcugcuucgucagguguaa

SEQ ID NO: 640313 - RNA, 19 nt, Homo sapiens
  misc_RNA (1)...(19): siRNA sense strand
gcagagacccgagauguuu

SEQ ID NO: 640314 - RNA, 19 nt, Homo sapiens
  misc_RNA (1)...(19): siRNA sense strand
gcagggcuguguauaagau

SEQ ID NO: 640315 - RNA, 19 nt, Homo sapiens
  misc_RNA (1)...(19): siRNA sense strand
agaggaagcugugccaauu

SEQ ID NO: 640316 - RNA, 19 nt, Homo sapiens
  misc_RNA (1)...(19): siRNA sense strand
gacccgagauguuuaucau

SEQ ID NO: 640317 - RNA, 19 nt, Homo sapiens
  misc_RNA (1)...(19): siRNA sense strand
gggaccggcugaaggagaa

SEQ ID NO: 640318 - RNA, 19 nt, Homo sapiens
  misc_RNA (1)...(19): siRNA sense strand
agacuggcaucaaggaaug

SEQ ID NO: 640319 - RNA, 19 nt, Homo sapiens
  misc_RNA (1)...(19): siRNA sense strand
agacguagccugcaaaugc

SEQ ID NO: 640320 - RNA, 19 nt, Homo sapiens
  misc_RNA (1)...(19): siRNA sense strand
ggagagucaugcagauagg

SEQ ID NO: 640321 - RNA, 19 nt, Homo sapiens
  misc_RNA (1)...(19): siRNA sense strand
ggaaugccagcaccaguuc

SEQ ID NO: 640322 - RNA, 19 nt, Homo sapiens
  misc_RNA (1)...(19): siRNA sense strand
cagagacccgagauguuua

SEQ ID NO: 640323 - RNA, 19 nt, Homo sapiens
  misc_RNA (1)...(19): siRNA sense strand
caacuccugguggucauua

SEQ ID NO: 640324 - RNA, 19 nt, Homo sapiens
  misc_RNA (1)...(19): siRNA sense strand
gagcacauggccuacauag

SEQ ID NO: 640325 - RNA, 19 nt, Homo sapiens
  misc_RNA (1)...(19): siRNA sense strand
gaggaagcugugccaauug

SEQ ID NO: 640326 - RNA, 19 nt, Homo sapiens
  misc_RNA (1)...(19): siRNA sense strand
ggagcgagagaagaacuuu

SEQ ID NO: 640327 - RNA, 19 nt, Homo sapiens
  misc_RNA (1)...(19): siRNA sense strand
cagauaggcagccgagaga

SEQ ID NO: 640328 - RNA, 19 nt, Homo sapiens
  misc_RNA (1)...(19): siRNA sense strand
guaagaagugcacggagau

SEQ ID NO: 640329 - RNA, 19 nt, Homo sapiens
  misc_RNA (1)...(19): siRNA sense strand
ggauggcugugagcucaug

SEQ ID NO: 640330 - RNA, 19 nt, Homo sapiens
  misc_RNA (1)...(19): siRNA sense strand
ggaagcugugccaauugua

SEQ ID NO: 640331 - RNA, 19 nt, Homo sapiens
  misc_RNA (1)...(19): siRNA sense strand
gaagcugugccaauuguac

SEQ ID NO: 640332 - RNA, 19 nt, Homo sapiens
  misc_RNA (1)...(19): siRNA sense strand
ggagcacauggccuacaua

SEQ ID NO: 640333 - RNA, 19 nt, Homo sapiens
  misc_RNA (1)...(19): siRNA sense strand
cggagaucguggaccagua

SEQ ID NO: 640334 - RNA, 19 nt, Homo sapiens
  misc_RNA (1)...(19): siRNA sense strand
ucgcagggcuguguauaag

SEQ ID NO: 640335 - RNA, 19 nt, Homo sapiens
  misc_RNA (1)...(19): siRNA sense strand
gggagagucaugcagauag

SEQ ID NO: 640336 - RNA, 19 nt, Homo sapiens
  misc_RNA (1)...(19): siRNA sense strand
gguggucauuagcuuugaa

SEQ ID NO: 640337 - RNA, 19 nt, Homo sapiens
  misc_RNA (1)...(19): siRNA sense strand
ggcuggagcuggucaacag

SEQ ID NO: 640338 - RNA, 19 nt, Homo sapiens
  misc_RNA (1)...(19): siRNA sense strand
aggaagcugugccaauugu

SEQ ID NO: 640339 - RNA, 19 nt, Homo sapiens
  misc_RNA (1)...(19): siRNA sense strand
ucaugaaccugcaaaacaa

SEQ ID NO: 640340 - RNA, 19 nt, Homo sapiens
  misc_RNA (1)...(19): siRNA sense strand
ggagaucguggaccaguac

SEQ ID NO: 640341 - RNA, 19 nt, Homo sapiens
  misc_RNA (1)...(19): siRNA sense strand
guauaagauggcagacgua

SEQ ID NO: 640342 - RNA, 19 nt, Homo sapiens
  misc_RNA (1)...(19): siRNA sense strand
gugcagagacccgagaugu

SEQ ID NO: 640343 - RNA, 19 nt, Homo sapiens
  misc_RNA (1)...(19): siRNA sense strand
gaucguggaccaguacauc

SEQ ID NO: 640344 - RNA, 19 nt, Homo sapiens
  misc_RNA (1)...(19): siRNA sense strand
ccaagacuggcaucaagga

SEQ ID NO: 640345 - RNA, 19 nt, Homo sapiens
  misc_RNA (1)...(19): siRNA sense strand
gcuacaaccaguucaagag

SEQ ID NO: 640346 - RNA, 19 nt, Homo sapiens
  misc_RNA (1)...(19): siRNA sense strand
ggucgcagggcuguguaua

SEQ ID NO: 640347 - RNA, 19 nt, Homo sapiens
  misc_RNA (1)...(19): siRNA sense strand
gcgcugccacugcaaguuc

SEQ ID NO: 640348 - RNA, 19 nt, Homo sapiens
  misc_RNA (1)...(19): siRNA sense strand
cagaggaagcugugccaau

SEQ ID NO: 640349 - RNA, 19 nt, Homo sapiens
  misc_RNA (1)...(19): siRNA sense strand
caagacuggcaucaaggaa

SEQ ID NO: 640350 - RNA, 19 nt, Homo sapiens
  misc_RNA (1)...(19): siRNA sense strand
gagcgagagaagaacuuug

SEQ ID NO: 640351 - RNA, 19 nt, Homo sapiens
  misc_RNA (1)...(19): siRNA sense strand
ccgcuucgccaaggaguuu

SEQ ID NO: 640352 - RNA, 19 nt, Homo sapiens
  misc_RNA (1)...(19): siRNA sense strand
gucgcagggcuguguauaa

SEQ ID NO: 640353 - RNA, 19 nt, Homo sapiens
  misc_RNA (1)...(19): siRNA sense strand
gcugcuucgucagguguaa

SEQ ID NO: 640354 - RNA, 19 nt, Homo sapiens
  misc_RNA (1)...(19): siRNA sense strand
gaucugaccuccuugaaua

SEQ ID NO: 640355 - RNA, 19 nt, Homo sapiens
  misc_RNA (1)...(19): siRNA sense strand
gaauaacucuuuccucauc

SEQ ID NO: 640356 - RNA, 19 nt, Homo sapiens
  misc_RNA (1)...(19): siRNA sense strand
acacaaagaugcagagaau

SEQ ID NO: 640357 - RNA, 19 nt, Homo sapiens
  misc_RNA (1)...(19): siRNA sense strand
ucacgaaucugcagcaaga

SEQ ID NO: 640358 - RNA, 19 nt, Homo sapiens
  misc_RNA (1)...(19): siRNA sense strand
ugaaagaccugcaggacuu

SEQ ID NO: 640359 - RNA, 19 nt, Homo sapiens
  misc_RNA (1)...(19): siRNA sense strand
gaacaucauuagcaauauc

SEQ ID NO: 640360 - RNA, 19 nt, Homo sapiens
  misc_RNA (1)...(19): siRNA sense strand
caucaccacuguaaacaaa

SEQ ID NO: 640361 - RNA, 19 nt, Homo sapiens
  misc_RNA (1)...(19): siRNA sense strand
gaccagcaaucuaaaugaa

SEQ ID NO: 640362 - RNA, 19 nt, Homo sapiens
  misc_RNA (1)...(19): siRNA sense strand
gcacagauacccuuaccaa

SEQ ID NO: 640363 - RNA, 19 nt, Homo sapiens
  misc_RNA (1)...(19): siRNA sense strand
guagccaacuuaucaguga

SEQ ID NO: 640364 - RNA, 19 nt, Homo sapiens
  misc_RNA (1)...(19): siRNA sense strand
ggaacacaauguaccaaau

SEQ ID NO: 640365 - RNA, 19 nt, Homo sapiens
  misc_RNA (1)...(19): siRNA sense strand
gagguuagacacugaagua

SEQ ID NO: 640366 - RNA, 19 nt, Homo sapiens
  misc_RNA (1)...(19): siRNA sense strand
gaacacaauguaccaaaug

SEQ ID NO: 640367 - RNA, 19 nt, Homo sapiens
  misc_RNA (1)...(19): siRNA sense strand
gcacugaaguuuucuauca

SEQ ID NO: 640368 - RNA, 19 nt, Homo sapiens
  misc_RNA (1)...(19): siRNA sense strand
cagagucaauugaaagaaa

SEQ ID NO: 640369 - RNA, 19 nt, Homo sapiens
  misc_RNA (1)...(19): siRNA sense strand
ggaaacaucucgccaaacc

SEQ ID NO: 640370 - RNA, 19 nt, Homo sapiens
  misc_RNA (1)...(19): siRNA sense strand
gaacaucaccacuaucucu

SEQ ID NO: 640371 - RNA, 19 nt, Homo sapiens
  misc_RNA (1)...(19): siRNA sense strand
gugaacaucauuagcaaua

SEQ ID NO: 640372 - RNA, 19 nt, Homo sapiens
  misc_RNA (1)...(19): siRNA sense strand
cagauacccuuaccaaaca

SEQ ID NO: 640373 - RNA, 19 nt, Homo sapiens
  misc_RNA (1)...(19): siRNA sense strand
ugaccaaacugggaagaaa

SEQ ID NO: 640374 - RNA, 19 nt, Homo sapiens
  misc_RNA (1)...(19): siRNA sense strand
gaacagccagcucaacuca

SEQ ID NO: 640375 - RNA, 19 nt, Homo sapiens
  misc_RNA (1)...(19): siRNA sense strand
cggauuggcugaaggagaa

SEQ ID NO: 640376 - RNA, 19 nt, Homo sapiens
  misc_RNA (1)...(19): siRNA sense strand
gaauagaacagccaucaag

SEQ ID NO: 640377 - RNA, 19 nt, Homo sapiens
  misc_RNA (1)...(19): siRNA sense strand
gaagaaaugaagcuaguag

SEQ ID NO: 640378 - RNA, 19 nt, Homo sapiens
  misc_RNA (1)...(19): siRNA sense strand
gaaagaccugcaggacuua

SEQ ID NO: 640379 - RNA, 19 nt, Homo sapiens
  misc_RNA (1)...(19): siRNA sense strand
ggucagcucaucaagaauu

SEQ ID NO: 640380 - RNA, 19 nt, Homo sapiens
  misc_RNA (1)...(19): siRNA sense strand
ucagaacucuccaccuuca

SEQ ID NO: 640381 - RNA, 19 nt, Homo sapiens
  misc_RNA (1)...(19): siRNA sense strand
ggugagagaggcccaauug

SEQ ID NO: 640382 - RNA, 19 nt, Homo sapiens
  misc_RNA (1)...(19): siRNA sense strand
ggacaggcagagucaauug

SEQ ID NO: 640383 - RNA, 19 nt, Homo sapiens
  misc_RNA (1)...(19): siRNA sense strand
aggauacgcuggagaaguu

SEQ ID NO: 640384 - RNA, 19 nt, Homo sapiens
  misc_RNA (1)...(19): siRNA sense strand
acagccagcucaacucauu

SEQ ID NO: 640385 - RNA, 19 nt, Homo sapiens
  misc_RNA (1)...(19): siRNA sense strand
ccaagaaggacacggauug

SEQ ID NO: 640386 - RNA, 19 nt, Homo sapiens
  misc_RNA (1)...(19): siRNA sense strand
aaacaucucgccaaaccua

SEQ ID NO: 640387 - RNA, 19 nt, Homo sapiens
  misc_RNA (1)...(19): siRNA sense strand
gagaacaucaccacuaucu

SEQ ID NO: 640388 - RNA, 19 nt, Homo sapiens
  misc_RNA (1)...(19): siRNA sense strand
cacaauguaccaaauguaa

SEQ ID NO: 640389 - RNA, 19 nt, Homo sapiens
  misc_RNA (1)...(19): siRNA sense strand
ggucgagguuagacacuga

SEQ ID NO: 640390 - RNA, 19 nt, Homo sapiens
  misc_RNA (1)...(19): siRNA sense strand
agacggauauugugaacau

SEQ ID NO: 640391 - RNA, 19 nt, Homo sapiens
  misc_RNA (1)...(19): siRNA sense strand
gagaauagaacagccauca

SEQ ID NO: 640392 - RNA, 19 nt, Homo sapiens
  misc_RNA (1)...(19): siRNA sense strand
ggacacggauuggcugaag

SEQ ID NO: 640393 - RNA, 19 nt, Homo sapiens
  misc_RNA (1)...(19): siRNA sense strand
ccaaaccuaugaugacaag

SEQ ID NO: 640394 - RNA, 19 nt, Homo sapiens
  misc_RNA (1)...(19): siRNA sense strand
cccaaaggcucccgugguu

SEQ ID NO: 640395 - RNA, 19 nt, Homo sapiens
  misc_RNA (1)...(19): siRNA sense strand
uggagaacaucaccacuau

SEQ ID NO: 640396 - RNA, 19 nt, Homo sapiens
  misc_RNA (1)...(19): siRNA sense strand
acucagaacucuccaccuu

SEQ ID NO: 640397 - RNA, 19 nt, Homo sapiens
  misc_RNA (1)...(19): siRNA sense strand
ugucacagguggcauggaa

SEQ ID NO: 640398 - RNA, 19 nt, Homo sapiens
  misc_RNA (1)...(19): siRNA sense strand
gaaucaagaacgacuuuca

SEQ ID NO: 640399 - RNA, 19 nt, Homo sapiens
  misc_RNA (1)...(19): siRNA sense strand
ccagcaaucuaaaugaagu

SEQ ID NO: 640400 - RNA, 19 nt, Homo sapiens
  misc_RNA (1)...(19): siRNA sense strand
ggaagaaaugaagcuagua

SEQ ID NO: 640401 - RNA, 19 nt, Homo sapiens
  misc_RNA (1)...(19): siRNA sense strand
gaaaugaagcuaguagacu

SEQ ID NO: 640402 - RNA, 19 nt, Homo sapiens
  misc_RNA (1)...(19): siRNA sense strand
ucagcaacuucgugagauu

SEQ ID NO: 640403 - RNA, 19 nt, Homo sapiens
  misc_RNA (1)...(19): siRNA sense strand
acaaagaugcagagaauag

SEQ ID NO: 640404 - RNA, 19 nt, Homo sapiens
  misc_RNA (1)...(19): siRNA sense strand
uacaagcgguuugguauuc

SEQ ID NO: 640405 - RNA, 19 nt, Homo sapiens
  misc_RNA (1)...(19): siRNA sense strand
ucacaggucagauggagaa

SEQ ID NO: 640406 - RNA, 19 nt, Homo sapiens
  misc_RNA (1)...(19): siRNA sense strand
ggauauaaaguuguagaga

SEQ ID NO: 640407 - RNA, 19 nt, Homo sapiens
  misc_RNA (1)...(19): siRNA sense strand
ugagagaggcccaauugga

SEQ ID NO: 640408 - RNA, 19 nt, Homo sapiens
  misc_RNA (1)...(19): siRNA sense strand
caacaagggacagaaagga

SEQ ID NO: 640409 - RNA, 19 nt, Homo sapiens
  misc_RNA (1)...(19): siRNA sense strand
ggacuuacacaaagaugca

SEQ ID NO: 640410 - RNA, 19 nt, Homo sapiens
  misc_RNA (1)...(19): siRNA sense strand
caggaaggaacacaaugua

SEQ ID NO: 640411 - RNA, 19 nt, Homo sapiens
  misc_RNA (1)...(19): siRNA sense strand
gcgaaucaagaacgacuuu

SEQ ID NO: 640412 - RNA, 19 nt, Homo sapiens
  misc_RNA (1)...(19): siRNA sense strand
gcaaucugcagaaccaaau

SEQ ID NO: 640413 - RNA, 19 nt, Homo sapiens
  misc_RNA (1)...(19): siRNA sense strand
gaaggaacacaauguacca

SEQ ID NO: 640414 - RNA, 19 nt, Homo sapiens
  misc_RNA (1)...(19): siRNA sense strand
cagcaacuucgugagauua

SEQ ID NO: 640415 - RNA, 19 nt, Homo sapiens
  misc_RNA (1)...(19): siRNA sense strand
ccaacgagcagaaccugaa

SEQ ID NO: 640416 - RNA, 19 nt, Homo sapiens
  misc_RNA (1)...(19): siRNA sense strand
caggcagagucaauugaaa

SEQ ID NO: 640417 - RNA, 19 nt, Homo sapiens
  misc_RNA (1)...(19): siRNA sense strand
uggaagaaaugaagcuagu

SEQ ID NO: 640418 - RNA, 19 nt, Homo sapiens
  misc_RNA (1)...(19): siRNA sense strand
aguggaaagugaccugaaa

SEQ ID NO: 640419 - RNA, 19 nt, Homo sapiens
  misc_RNA (1)...(19): siRNA sense strand
cuucagaucagacauucua

SEQ ID NO: 640420 - RNA, 19 nt, Homo sapiens
  misc_RNA (1)...(19): siRNA sense strand
aaaauuaggugaccaaacu

SEQ ID NO: 640421 - RNA, 19 nt, Homo sapiens
  misc_RNA (1)...(19): siRNA sense strand
auggucagcucaucaagaa

SEQ ID NO: 640422 - RNA, 19 nt, Homo sapiens
  misc_RNA (1)...(19): siRNA sense strand
gcuaguagacuccaagcau

SEQ ID NO: 640423 - RNA, 19 nt, Homo sapiens
  misc_RNA (1)...(19): siRNA sense strand
gaacgcuuccagcucuuug

SEQ ID NO: 640424 - RNA, 19 nt, Homo sapiens
  misc_RNA (1)...(19): siRNA sense strand
caaagaugcagagaauaga

SEQ ID NO: 640425 - RNA, 19 nt, Homo sapiens
  misc_RNA (1)...(19): siRNA sense strand
cugcaggacuuacacaaag

SEQ ID NO: 640426 - RNA, 19 nt, Homo sapiens
  misc_RNA (1)...(19): siRNA sense strand
caggucagauggagaacau

SEQ ID NO: 640427 - RNA, 19 nt, Homo sapiens
  misc_RNA (1)...(19): siRNA sense strand
aaacugggaagaaagcuau

SEQ ID NO: 640428 - RNA, 19 nt, Homo sapiens
  misc_RNA (1)...(19): siRNA sense strand
gagcguggcggcaaaggau

SEQ ID NO: 640429 - RNA, 19 nt, Homo sapiens
  misc_RNA (1)...(19): siRNA sense strand
gucagcucaucaagaauuu

SEQ ID NO: 640430 - RNA, 19 nt, Homo sapiens
  misc_RNA (1)...(19): siRNA sense strand
guuacaagcgguuugguau

SEQ ID NO: 640431 - RNA, 19 nt, Homo sapiens
  misc_RNA (1)...(19): siRNA sense strand
auaauacccuggccaacau

SEQ ID NO: 640432 - RNA, 19 nt, Homo sapiens
  misc_RNA (1)...(19): siRNA sense strand
cugaccuccuugaauaaua

SEQ ID NO: 640433 - RNA, 19 nt, Homo sapiens
  misc_RNA (1)...(19): siRNA sense strand
uuaccaaacacacagauga

SEQ ID NO: 640434 - RNA, 19 nt, Homo sapiens
  misc_RNA (1)...(19): siRNA sense strand
caucaccacuaucucucaa

SEQ ID NO: 640435 - RNA, 19 nt, Homo sapiens
  misc_RNA (1)...(19): siRNA sense strand
caagaacgacuuucaaaau

SEQ ID NO: 640436 - RNA, 19 nt, Homo sapiens
  misc_RNA (1)...(19): siRNA sense strand
uaauggcuaugucacgaau

SEQ ID NO: 640437 - RNA, 19 nt, Homo sapiens
  misc_RNA (1)...(19): siRNA sense strand
gguuacaagcgguuuggua

SEQ ID NO: 640438 - RNA, 19 nt, Homo sapiens
  misc_RNA (1)...(19): siRNA sense strand
acaaggauacgcuggagaa

SEQ ID NO: 640439 - RNA, 19 nt, Homo sapiens
  misc_RNA (1)...(19): siRNA sense strand
agaaagcuaucagcaccaa

SEQ ID NO: 640440 - RNA, 19 nt, Homo sapiens
  misc_RNA (1)...(19): siRNA sense strand
gaugaucugaccuccuuga

SEQ ID NO: 640441 - RNA, 19 nt, Homo sapiens
  misc_RNA (1)...(19): siRNA sense strand
caggaccacuugcacagau

SEQ ID NO: 640442 - RNA, 19 nt, Homo sapiens
  misc_RNA (1)...(19): siRNA sense strand
caacgagcagaaccugaaa

SEQ ID NO: 640443 - RNA, 19 nt, Homo sapiens
  misc_RNA (1)...(19): siRNA sense strand
uaucagcaccaacucagaa

SEQ ID NO: 640444 - RNA, 19 nt, Homo sapiens
  misc_RNA (1)...(19): siRNA sense strand
gcgguuugguauucaggaa

SEQ ID NO: 640445 - RNA, 19 nt, Homo sapiens
  misc_RNA (1)...(19): siRNA sense strand
ggaaccucaucacgaaucu

SEQ ID NO: 640446 - RNA, 19 nt, Homo sapiens
  misc_RNA (1)...(19): siRNA sense strand
gcucacagcaguggaaagu

SEQ ID NO: 640447 - RNA, 19 nt, Homo sapiens
  misc_RNA (1)...(19): siRNA sense strand
ugaccuccuugaauaauac

SEQ ID NO: 640448 - RNA, 19 nt, Homo sapiens
  misc_RNA (1)...(19): siRNA sense strand
gaacgacuuucaaaaucug

SEQ ID NO: 640449 - RNA, 19 nt, Homo sapiens
  misc_RNA (1)...(19): siRNA sense strand
cugcagaaccaaauguauu

SEQ ID NO: 640450 - RNA, 19 nt, Homo sapiens
  misc_RNA (1)...(19): siRNA sense strand
caaacugggaagaaagcua

SEQ ID NO: 640451 - RNA, 19 nt, Homo sapiens
  misc_RNA (1)...(19): siRNA sense strand
acagauacccuuaccaaac

SEQ ID NO: 640452 - RNA, 19 nt, Homo sapiens
  misc_RNA (1)...(19): siRNA sense strand
gauuauggaagaaaugaag

SEQ ID NO: 640453 - RNA, 19 nt, Homo sapiens
  misc_RNA (1)...(19): siRNA sense strand
gaugcaacaagauuugaug

SEQ ID NO: 640454 - RNA, 19 nt, Homo sapiens
  misc_RNA (1)...(19): siRNA sense strand
gaucugaccuccuugaaua

SEQ ID NO: 640455 - RNA, 19 nt, Homo sapiens
  misc_RNA (1)...(19): siRNA sense strand
gaauaacucuuuccucauc

SEQ ID NO: 640456 - RNA, 19 nt, Homo sapiens
  misc_RNA (1)...(19): siRNA sense strand
acacaaagaugcagagaau

SEQ ID NO: 640457 - RNA, 19 nt, Homo sapiens
  misc_RNA (1)...(19): siRNA sense strand
ucacgaaucugcagcaaga

SEQ ID NO: 640458 - RNA, 19 nt, Homo sapiens
  misc_RNA (1)...(19): siRNA sense strand
ugaaagaccugcaggacuu

SEQ ID NO: 640459 - RNA, 19 nt, Homo sapiens
  misc_RNA (1)...(19): siRNA sense strand
gaacaucauuagcaauauc

SEQ ID NO: 640460 - RNA, 19 nt, Homo sapiens
  misc_RNA (1)...(19): siRNA sense strand
caucaccacuguaaacaaa

SEQ ID NO: 640461 - RNA, 19 nt, Homo sapiens
  misc_RNA (1)...(19): siRNA sense strand
gaccagcaaucuaaaugaa

SEQ ID NO: 640462 - RNA, 19 nt, Homo sapiens
  misc_RNA (1)...(19): siRNA sense strand
gugaagacgucaauaacuu

SEQ ID NO: 640463 - RNA, 19 nt, Homo sapiens
  misc_RNA (1)...(19): siRNA sense strand
gcacagauacccuuaccaa

SEQ ID NO: 640464 - RNA, 19 nt, Homo sapiens
  misc_RNA (1)...(19): siRNA sense strand
guagccaacuuaucaguga

SEQ ID NO: 640465 - RNA, 19 nt, Homo sapiens
  misc_RNA (1)...(19): siRNA sense strand
ggaacacaauguaccaaau

SEQ ID NO: 640466 - RNA, 19 nt, Homo sapiens
  misc_RNA (1)...(19): siRNA sense strand
gagguuagacacugaagua

SEQ ID NO: 640467 - RNA, 19 nt, Homo sapiens
  misc_RNA (1)...(19): siRNA sense strand
gaacacaauguaccaaaug

SEQ ID NO: 640468 - RNA, 19 nt, Homo sapiens
  misc_RNA (1)...(19): siRNA sense strand
gcacugaaguuuucuauca

SEQ ID NO: 640469 - RNA, 19 nt, Homo sapiens
  misc_RNA (1)...(19): siRNA sense strand
cauaaacacuagagaggaa

SEQ ID NO: 640470 - RNA, 19 nt, Homo sapiens
  misc_RNA (1)...(19): siRNA sense strand
cagagucaauugaaagaaa

SEQ ID NO: 640471 - RNA, 19 nt, Homo sapiens
  misc_RNA (1)...(19): siRNA sense strand
ggaaacaucucgccaaacc

SEQ ID NO: 640472 - RNA, 19 nt, Homo sapiens
  misc_RNA (1)...(19): siRNA sense strand
ggacaucuccagacuacaa

SEQ ID NO: 640473 - RNA, 19 nt, Homo sapiens
  misc_RNA (1)...(19): siRNA sense strand
gaacaucaccacuaucucu

SEQ ID NO: 640474 - RNA, 19 nt, Homo sapiens
  misc_RNA (1)...(19): siRNA sense strand
gugaacaucauuagcaaua

SEQ ID NO: 640475 - RNA, 19 nt, Homo sapiens
  misc_RNA (1)...(19): siRNA sense strand
cagauacccuuaccaaaca

SEQ ID NO: 640476 - RNA, 19 nt, Homo sapiens
  misc_RNA (1)...(19): siRNA sense strand
acugucaucugcauuauaa

SEQ ID NO: 640477 - RNA, 19 nt, Homo sapiens
  misc_RNA (1)...(19): siRNA sense strand
ugaccaaacugggaagaaa

SEQ ID NO: 640478 - RNA, 19 nt, Homo sapiens
  misc_RNA (1)...(19): siRNA sense strand
gaacagccagcucaacuca

SEQ ID NO: 640479 - RNA, 19 nt, Homo sapiens
  misc_RNA (1)...(19): siRNA sense strand
cggauuggcugaaggagaa

SEQ ID NO: 640480 - RNA, 19 nt, Homo sapiens
  misc_RNA (1)...(19): siRNA sense strand
gaauagaacagccaucaag

SEQ ID NO: 640481 - RNA, 19 nt, Homo sapiens
  misc_RNA (1)...(19): siRNA sense strand
gaacuucacagacaaaugc

SEQ ID NO: 640482 - RNA, 19 nt, Homo sapiens
  misc_RNA (1)...(19): siRNA sense strand
gaagaaaugaagcuaguag

SEQ ID NO: 640483 - RNA, 19 nt, Homo sapiens
  misc_RNA (1)...(19): siRNA sense strand
gaaagaccugcaggacuua

SEQ ID NO: 640484 - RNA, 19 nt, Homo sapiens
  misc_RNA (1)...(19): siRNA sense strand
ggucagcucaucaagaauu

SEQ ID NO: 640485 - RNA, 19 nt, Homo sapiens
  misc_RNA (1)...(19): siRNA sense strand
ucagaacucuccaccuuca

SEQ ID NO: 640486 - RNA, 19 nt, Homo sapiens
  misc_RNA (1)...(19): siRNA sense strand
ggugagagaggcccaauug

SEQ ID NO: 640487 - RNA, 19 nt, Homo sapiens
  misc_RNA (1)...(19): siRNA sense strand
ggacaggcagagucaauug

SEQ ID NO: 640488 - RNA, 19 nt, Homo sapiens
  misc_RNA (1)...(19): siRNA sense strand
aggauacgcuggagaaguu

SEQ ID NO: 640489 - RNA, 19 nt, Homo sapiens
  misc_RNA (1)...(19): siRNA sense strand
acagacaaaugcuacuauu

SEQ ID NO: 640490 - RNA, 19 nt, Homo sapiens
  misc_RNA (1)...(19): siRNA sense strand
acagccagcucaacucauu

SEQ ID NO: 640491 - RNA, 19 nt, Homo sapiens
  misc_RNA (1)...(19): siRNA sense strand
ccaagaaggacacggauug

SEQ ID NO: 640492 - RNA, 19 nt, Homo sapiens
  misc_RNA (1)...(19): siRNA sense strand
aaacaucucgccaaaccua

SEQ ID NO: 640493 - RNA, 19 nt, Homo sapiens
  misc_RNA (1)...(19): siRNA sense strand
gagaacaucaccacuaucu

SEQ ID NO: 640494 - RNA, 19 nt, Homo sapiens
  misc_RNA (1)...(19): siRNA sense strand
gaggaacagcaauggauaa

SEQ ID NO: 640495 - RNA, 19 nt, Homo sapiens
  misc_RNA (1)...(19): siRNA sense strand
cacaauguaccaaauguaa

SEQ ID NO: 640496 - RNA, 19 nt, Homo sapiens
  misc_RNA (1)...(19): siRNA sense strand
agacgucaauaacuucauu

SEQ ID NO: 640497 - RNA, 19 nt, Homo sapiens
  misc_RNA (1)...(19): siRNA sense strand
ggucgagguuagacacuga

SEQ ID NO: 640498 - RNA, 19 nt, Homo sapiens
  misc_RNA (1)...(19): siRNA sense strand
agacggauauugugaacau

SEQ ID NO: 640499 - RNA, 19 nt, Homo sapiens
  misc_RNA (1)...(19): siRNA sense strand
gagaauagaacagccauca

SEQ ID NO: 640500 - RNA, 19 nt, Homo sapiens
  misc_RNA (1)...(19): siRNA sense strand
ggacacggauuggcugaag

SEQ ID NO: 640501 - RNA, 19 nt, Homo sapiens
  misc_RNA (1)...(19): siRNA sense strand
ccaaaccuaugaugacaag

SEQ ID NO: 640502 - RNA, 19 nt, Homo sapiens
  misc_RNA (1)...(19): siRNA sense strand
ggagagagagccacuggau

SEQ ID NO: 640503 - RNA, 19 nt, Homo sapiens
  misc_RNA (1)...(19): siRNA sense strand
cccaaaggcucccgugguu

SEQ ID NO: 640504 - RNA, 19 nt, Homo sapiens
  misc_RNA (1)...(19): siRNA sense strand
uggagaacaucaccacuau

SEQ ID NO: 640505 - RNA, 19 nt, Homo sapiens
  misc_RNA (1)...(19): siRNA sense strand
acucagaacucuccaccuu

SEQ ID NO: 640506 - RNA, 19 nt, Homo sapiens
  misc_RNA (1)...(19): siRNA sense strand
ugucacagguggcauggaa

SEQ ID NO: 640507 - RNA, 19 nt, Homo sapiens
  misc_RNA (1)...(19): siRNA sense strand
gaaucaagaacgacuuuca

SEQ ID NO: 640508 - RNA, 19 nt, Homo sapiens
  misc_RNA (1)...(19): siRNA sense strand
ccagcaaucuaaaugaagu

SEQ ID NO: 640509 - RNA, 19 nt, Homo sapiens
  misc_RNA (1)...(19): siRNA sense strand
ggaagaaaugaagcuagua

SEQ ID NO: 640510 - RNA, 19 nt, Homo sapiens
  misc_RNA (1)...(19): siRNA sense strand
gagaggaacagcaauggau

SEQ ID NO: 640511 - RNA, 19 nt, Homo sapiens
  misc_RNA (1)...(19): siRNA sense strand
gaaaugaagcuaguagacu

SEQ ID NO: 640512 - RNA, 19 nt, Homo sapiens
  misc_RNA (1)...(19): siRNA sense strand
agacugugcuggguugauu

SEQ ID NO: 640513 - RNA, 19 nt, Homo sapiens
  misc_RNA (1)...(19): siRNA sense strand
guacugucaucugcauuau

SEQ ID NO: 640514 - RNA, 19 nt, Homo sapiens
  misc_RNA (1)...(19): siRNA sense strand
ucagcaacuucgugagauu

SEQ ID NO: 640515 - RNA, 19 nt, Homo sapiens
  misc_RNA (1)...(19): siRNA sense strand
uacaagcgguuugguauuc

SEQ ID NO: 640516 - RNA, 19 nt, Homo sapiens
  misc_RNA (1)...(19): siRNA sense strand
acaaagaugcagagaauag

SEQ ID NO: 640517 - RNA, 19 nt, Homo sapiens
  misc_RNA (1)...(19): siRNA sense strand
ucacaggucagauggagaa

SEQ ID NO: 640518 - RNA, 19 nt, Homo sapiens
  misc_RNA (1)...(19): siRNA sense strand
ggauauaaaguuguagaga

SEQ ID NO: 640519 - RNA, 19 nt, Homo sapiens
  misc_RNA (1)...(19): siRNA sense strand
ugagagaggcccaauugga

SEQ ID NO: 640520 - RNA, 19 nt, Homo sapiens
  misc_RNA (1)...(19): siRNA sense strand
gaaggaacacaauguacca

SEQ ID NO: 640521 - RNA, 19 nt, Homo sapiens
  misc_RNA (1)...(19): siRNA sense strand
caacaagggacagaaagga

SEQ ID NO: 640522 - RNA, 19 nt, Homo sapiens
  misc_RNA (1)...(19): siRNA sense strand
caggaaggaacacaaugua

SEQ ID NO: 640523 - RNA, 19 nt, Homo sapiens
  misc_RNA (1)...(19): siRNA sense strand
ggacuuacacaaagaugca

SEQ ID NO: 640524 - RNA, 19 nt, Homo sapiens
  misc_RNA (1)...(19): siRNA sense strand
gcgaaucaagaacgacuuu

SEQ ID NO: 640525 - RNA, 19 nt, Homo sapiens
  misc_RNA (1)...(19): siRNA sense strand
gcaaucugcagaaccaaau

SEQ ID NO: 640526 - RNA, 19 nt, Homo sapiens
  misc_RNA (1)...(19): siRNA sense strand
cagcaacuucgugagauua

SEQ ID NO: 640527 - RNA, 19 nt, Homo sapiens
  misc_RNA (1)...(19): siRNA sense strand
gaacgauuuccaaugugaa

SEQ ID NO: 640528 - RNA, 19 nt, Homo sapiens
  misc_RNA (1)...(19): siRNA sense strand
gcugggcaguggaacgauu

SEQ ID NO: 640529 - RNA, 19 nt, Homo sapiens
  misc_RNA (1)...(19): siRNA sense strand
ccaacgagcagaaccugaa

SEQ ID NO: 640530 - RNA, 19 nt, Homo sapiens
  misc_RNA (1)...(19): siRNA sense strand
caggcagagucaauugaaa

SEQ ID NO: 640531 - RNA, 19 nt, Homo sapiens
  misc_RNA (1)...(19): siRNA sense strand
uggaagaaaugaagcuagu

SEQ ID NO: 640532 - RNA, 19 nt, Homo sapiens
  misc_RNA (1)...(19): siRNA sense strand
aguggaaagugaccugaaa

SEQ ID NO: 640533 - RNA, 19 nt, Homo sapiens
  misc_RNA (1)...(19): siRNA sense strand
cuucagaucagacauucua

SEQ ID NO: 640534 - RNA, 19 nt, Homo sapiens
  misc_RNA (1)...(19): siRNA sense strand
aaaauuaggugaccaaacu

SEQ ID NO: 640535 - RNA, 19 nt, Homo sapiens
  misc_RNA (1)...(19): siRNA sense strand
aaugugaagacgucaauaa

SEQ ID NO: 640536 - RNA, 19 nt, Homo sapiens
  misc_RNA (1)...(19): siRNA sense strand
augcaaagcuuuucuguga

SEQ ID NO: 640537 - RNA, 19 nt, Homo sapiens
  misc_RNA (1)...(19): siRNA sense strand
auggucagcucaucaagaa

SEQ ID NO: 640538 - RNA, 19 nt, Homo sapiens
  misc_RNA (1)...(19): siRNA sense strand
gcuaguagacuccaagcau

SEQ ID NO: 640539 - RNA, 19 nt, Homo sapiens
  misc_RNA (1)...(19): siRNA sense strand
gaacgcuuccagcucuuug

SEQ ID NO: 640540 - RNA, 19 nt, Homo sapiens
  misc_RNA (1)...(19): siRNA sense strand
caaagaugcagagaauaga

SEQ ID NO: 640541 - RNA, 19 nt, Homo sapiens
  misc_RNA (1)...(19): siRNA sense strand
cugcaggacuuacacaaag

SEQ ID NO: 640542 - RNA, 19 nt, Homo sapiens
  misc_RNA (1)...(19): siRNA sense strand
caggucagauggagaacau

SEQ ID NO: 640543 - RNA, 19 nt, Homo sapiens
  misc_RNA (1)...(19): siRNA sense strand
acaaggauacgcuggagaa

SEQ ID NO: 640544 - RNA, 19 nt, Homo sapiens
  misc_RNA (1)...(19): siRNA sense strand
guuacaagcgguuugguau

SEQ ID NO: 640545 - RNA, 19 nt, Homo sapiens
  misc_RNA (1)...(19): siRNA sense strand
gguuacaagcgguuuggua

SEQ ID NO: 640546 - RNA, 19 nt, Homo sapiens
  misc_RNA (1)...(19): siRNA sense strand
gagcguggcggcaaaggau

SEQ ID NO: 640547 - RNA, 19 nt, Homo sapiens
  misc_RNA (1)...(19): siRNA sense strand
gucagcucaucaagaauuu

SEQ ID NO: 640548 - RNA, 19 nt, Homo sapiens
  misc_RNA (1)...(19): siRNA sense strand
auaauacccuggccaacau

SEQ ID NO: 640549 - RNA, 19 nt, Homo sapiens
  misc_RNA (1)...(19): siRNA sense strand
cugaccuccuugaauaaua

SEQ ID NO: 640550 - RNA, 19 nt, Homo sapiens
  misc_RNA (1)...(19): siRNA sense strand
uuaccaaacacacagauga

SEQ ID NO: 640551 - RNA, 19 nt, Homo sapiens
  misc_RNA (1)...(19): siRNA sense strand
caucaccacuaucucucaa

SEQ ID NO: 640552 - RNA, 19 nt, Homo sapiens
  misc_RNA (1)...(19): siRNA sense strand
caagaacgacuuucaaaau

SEQ ID NO: 640553 - RNA, 19 nt, Homo sapiens
  misc_RNA (1)...(19): siRNA sense strand
uaauggcuaugucacgaau

SEQ ID NO: 640554 - RNA, 19 nt, Homo sapiens
  misc_RNA (1)...(19): siRNA sense strand
gcacuggccucuucaugaa

SEQ ID NO: 640555 - RNA, 19 nt, Homo sapiens
  misc_RNA (1)...(19): siRNA sense strand
acaaggaacucaagauauu

SEQ ID NO: 640556 - RNA, 19 nt, Homo sapiens
  misc_RNA (1)...(19): siRNA sense strand
gcaauucaguggauuuaug

SEQ ID NO: 640557 - RNA, 19 nt, Homo sapiens
  misc_RNA (1)...(19): siRNA sense strand
gcacugauaucuuccuaag

SEQ ID NO: 640558 - RNA, 19 nt, Homo sapiens
  misc_RNA (1)...(19): siRNA sense strand
aaacaaggaacucaagaua

SEQ ID NO: 640559 - RNA, 19 nt, Homo sapiens
  misc_RNA (1)...(19): siRNA sense strand
gguaugacuugcaaccuaa

SEQ ID NO: 640560 - RNA, 19 nt, Homo sapiens
  misc_RNA (1)...(19): siRNA sense strand
gaaaggaggaaguauguca

SEQ ID NO: 640561 - RNA, 19 nt, Homo sapiens
  misc_RNA (1)...(19): siRNA sense strand
cuacaucaccagacaauuu

SEQ ID NO: 640562 - RNA, 19 nt, Homo sapiens
  misc_RNA (1)...(19): siRNA sense strand
caaaauuccuucuaucuga

SEQ ID NO: 640563 - RNA, 19 nt, Homo sapiens
  misc_RNA (1)...(19): siRNA sense strand
gaggaaguaugucaucauc

SEQ ID NO: 640564 - RNA, 19 nt, Homo sapiens
  misc_RNA (1)...(19): siRNA sense strand
uccaauaucugcaugcaaa

SEQ ID NO: 640565 - RNA, 19 nt, Homo sapiens
  misc_RNA (1)...(19): siRNA sense strand
gaaacugcacggagagaaa

SEQ ID NO: 640566 - RNA, 19 nt, Homo sapiens
  misc_RNA (1)...(19): siRNA sense strand
agaggaagcgcauccaaua

SEQ ID NO: 640567 - RNA, 19 nt, Homo sapiens
  misc_RNA (1)...(19): siRNA sense strand
ggaagcgcauccaauaucu

SEQ ID NO: 640568 - RNA, 19 nt, Homo sapiens
  misc_RNA (1)...(19): siRNA sense strand
uugaugaccuuguuucuug

SEQ ID NO: 640569 - RNA, 19 nt, Homo sapiens
  misc_RNA (1)...(19): siRNA sense strand
caaggaacucaagauauua

SEQ ID NO: 640570 - RNA, 19 nt, Homo sapiens
  misc_RNA (1)...(19): siRNA sense strand
cggcugagucucuaucuua

SEQ ID NO: 640571 - RNA, 19 nt, Homo sapiens
  misc_RNA (1)...(19): siRNA sense strand
gauaucuuccuaagucuuu

SEQ ID NO: 640572 - RNA, 19 nt, Homo sapiens
  misc_RNA (1)...(19): siRNA sense strand
guuugcagcuguagauuau

SEQ ID NO: 640573 - RNA, 19 nt, Homo sapiens
  misc_RNA (1)...(19): siRNA sense strand
gaaacaaggaacucaagau

SEQ ID NO: 640574 - RNA, 19 nt, Homo sapiens
  misc_RNA (1)...(19): siRNA sense strand
gccgcugccuccuggauua

SEQ ID NO: 640575 - RNA, 19 nt, Homo sapiens
  misc_RNA (1)...(19): siRNA sense strand
gcacggagagaaacaagga

SEQ ID NO: 640576 - RNA, 19 nt, Homo sapiens
  misc_RNA (1)...(19): siRNA sense strand
ccggauggauggacuuuau

SEQ ID NO: 640577 - RNA, 19 nt, Homo sapiens
  misc_RNA (1)...(19): siRNA sense strand
ggaagaagcaaauggacau

SEQ ID NO: 640578 - RNA, 19 nt, Homo sapiens
  misc_RNA (1)...(19): siRNA sense strand
gaagcuacuugccuuugca

SEQ ID NO: 640579 - RNA, 19 nt, Homo sapiens
  misc_RNA (1)...(19): siRNA sense strand
acugauaucuuccuaaguc

SEQ ID NO: 640580 - RNA, 19 nt, Homo sapiens
  misc_RNA (1)...(19): siRNA sense strand
gaggaaaggaggaaguaug

SEQ ID NO: 640581 - RNA, 19 nt, Homo sapiens
  misc_RNA (1)...(19): siRNA sense strand
aggcaggaaugcuuugauu

SEQ ID NO: 640582 - RNA, 19 nt, Homo sapiens
  misc_RNA (1)...(19): siRNA sense strand
uauccaugauucuuccuuu

SEQ ID NO: 640583 - RNA, 19 nt, Homo sapiens
  misc_RNA (1)...(19): siRNA sense strand
acagcuaaaugacagcaaa

SEQ ID NO: 640584 - RNA, 19 nt, Homo sapiens
  misc_RNA (1)...(19): siRNA sense strand
gcuguuugguugcucuuau

SEQ ID NO: 640585 - RNA, 19 nt, Homo sapiens
  misc_RNA (1)...(19): siRNA sense strand
gaggaagcgcauccaauau

SEQ ID NO: 640586 - RNA, 19 nt, Homo sapiens
  misc_RNA (1)...(19): siRNA sense strand
cuaagucuuugggagauuu

SEQ ID NO: 640587 - RNA, 19 nt, Homo sapiens
  misc_RNA (1)...(19): siRNA sense strand
ccaugauucuuccuuuaau

SEQ ID NO: 640588 - RNA, 19 nt, Homo sapiens
  misc_RNA (1)...(19): siRNA sense strand
gcugguuucugccaucaau

SEQ ID NO: 640589 - RNA, 19 nt, Homo sapiens
  misc_RNA (1)...(19): siRNA sense strand
uagaugguaugacuugcaa

SEQ ID NO: 640590 - RNA, 19 nt, Homo sapiens
  misc_RNA (1)...(19): siRNA sense strand
gagaggaagcgcauccaau

SEQ ID NO: 640591 - RNA, 19 nt, Homo sapiens
  misc_RNA (1)...(19): siRNA sense strand
ugguaugacuugcaaccua

SEQ ID NO: 640592 - RNA, 19 nt, Homo sapiens
  misc_RNA (1)...(19): siRNA sense strand
cuuuaaaggucuccuagau

SEQ ID NO: 640593 - RNA, 19 nt, Homo sapiens
  misc_RNA (1)...(19): siRNA sense strand
gcaggaaugcuuugauugc

SEQ ID NO: 640594 - RNA, 19 nt, Homo sapiens
  misc_RNA (1)...(19): siRNA sense strand
gcuuggcacuggccucuuc

SEQ ID NO: 640595 - RNA, 19 nt, Homo sapiens
  misc_RNA (1)...(19): siRNA sense strand
uguauuugaugaccuuguu

SEQ ID NO: 640596 - RNA, 19 nt, Homo sapiens
  misc_RNA (1)...(19): siRNA sense strand
ggcacuggccucuucauga

SEQ ID NO: 640597 - RNA, 19 nt, Homo sapiens
  misc_RNA (1)...(19): siRNA sense strand
gcacgauguuuuauucuuc

SEQ ID NO: 640598 - RNA, 19 nt, Homo sapiens
  misc_RNA (1)...(19): siRNA sense strand
gcaaauggacauggcaagu

SEQ ID NO: 640599 - RNA, 19 nt, Homo sapiens
  misc_RNA (1)...(19): siRNA sense strand
gagaaacaaggaacucaag

SEQ ID NO: 640600 - RNA, 19 nt, Homo sapiens
  misc_RNA (1)...(19): siRNA sense strand
aaaggucuccuagauggua

SEQ ID NO: 640601 - RNA, 19 nt, Homo sapiens
  misc_RNA (1)...(19): siRNA sense strand
gaaggcaggaaugcuuuga

SEQ ID NO: 640602 - RNA, 19 nt, Homo sapiens
  misc_RNA (1)...(19): siRNA sense strand
caucuugggacacguagaa

SEQ ID NO: 640603 - RNA, 19 nt, Homo sapiens
  misc_RNA (1)...(19): siRNA sense strand
cugagucucuaucuuacaa

SEQ ID NO: 640604 - RNA, 19 nt, Homo sapiens
  misc_RNA (1)...(19): siRNA sense strand
gaaagggagagacaucaac

SEQ ID NO: 640605 - RNA, 19 nt, Homo sapiens
  misc_RNA (1)...(19): siRNA sense strand
ggccuugccacuccacuaa

SEQ ID NO: 640606 - RNA, 19 nt, Homo sapiens
  misc_RNA (1)...(19): siRNA sense strand
caacuuuaaaggucuccua

SEQ ID NO: 640607 - RNA, 19 nt, Homo sapiens
  misc_RNA (1)...(19): siRNA sense strand
cguguguucugcuguguug

SEQ ID NO: 640608 - RNA, 19 nt, Homo sapiens
  misc_RNA (1)...(19): siRNA sense strand
caaauggacauggcaagug

SEQ ID NO: 640609 - RNA, 19 nt, Homo sapiens
  misc_RNA (1)...(19): siRNA sense strand
gagagaaacaaggaacuca

SEQ ID NO: 640610 - RNA, 19 nt, Homo sapiens
  misc_RNA (1)...(19): siRNA sense strand
ggagaggaagcgcauccaa

SEQ ID NO: 640611 - RNA, 19 nt, Homo sapiens
  misc_RNA (1)...(19): siRNA sense strand
gaggcaauucaguggauuu

SEQ ID NO: 640612 - RNA, 19 nt, Homo sapiens
  misc_RNA (1)...(19): siRNA sense strand
cuucuugucuuucucucuu

SEQ ID NO: 640613 - RNA, 19 nt, Homo sapiens
  misc_RNA (1)...(19): siRNA sense strand
gaagaagcaaauggacaug

SEQ ID NO: 640614 - RNA, 19 nt, Homo sapiens
  misc_RNA (1)...(19): siRNA sense strand
ccucucaguguuauucuuu

SEQ ID NO: 640615 - RNA, 19 nt, Homo sapiens
  misc_RNA (1)...(19): siRNA sense strand
ggaggaaguaugucaucau

SEQ ID NO: 640616 - RNA, 19 nt, Homo sapiens
  misc_RNA (1)...(19): siRNA sense strand
ggacacguagaaaauauuu

SEQ ID NO: 640617 - RNA, 19 nt, Homo sapiens
  misc_RNA (1)...(19): siRNA sense strand
gugaaggcaggaaugcuuu

SEQ ID NO: 640618 - RNA, 19 nt, Homo sapiens
  misc_RNA (1)...(19): siRNA sense strand
ugugugcucccgcugaaua

SEQ ID NO: 640619 - RNA, 19 nt, Homo sapiens
  misc_RNA (1)...(19): siRNA sense strand
gagucucuaucuuacaaag

SEQ ID NO: 640620 - RNA, 19 nt, Homo sapiens
  misc_RNA (1)...(19): siRNA sense strand
cuguuguccucuauccuua

SEQ ID NO: 640621 - RNA, 19 nt, Homo sapiens
  misc_RNA (1)...(19): siRNA sense strand
auccaugauucuuccuuua

SEQ ID NO: 640622 - RNA, 19 nt, Homo sapiens
  misc_RNA (1)...(19): siRNA sense strand
gcaucugggugcuguuugc

SEQ ID NO: 640623 - RNA, 19 nt, Homo sapiens
  misc_RNA (1)...(19): siRNA sense strand
caggaaugcuuugauugca

SEQ ID NO: 640624 - RNA, 19 nt, Homo sapiens
  misc_RNA (1)...(19): siRNA sense strand
caagugcagacaagucaug

SEQ ID NO: 640625 - RNA, 19 nt, Homo sapiens
  misc_RNA (1)...(19): siRNA sense strand
ucaaagcuugccaggguuu

SEQ ID NO: 640626 - RNA, 19 nt, Homo sapiens
  misc_RNA (1)...(19): siRNA sense strand
uggaggcacagcuaaauga

SEQ ID NO: 640627 - RNA, 19 nt, Homo sapiens
  misc_RNA (1)...(19): siRNA sense strand
uuugguugcucuuauuuca

SEQ ID NO: 640628 - RNA, 19 nt, Homo sapiens
  misc_RNA (1)...(19): siRNA sense strand
ggcaagugcagacaaguca

SEQ ID NO: 640629 - RNA, 19 nt, Homo sapiens
  misc_RNA (1)...(19): siRNA sense strand
ggugucagcaucuuucuac

SEQ ID NO: 640630 - RNA, 19 nt, Homo sapiens
  misc_RNA (1)...(19): siRNA sense strand
guuguccucuauccuuaug

SEQ ID NO: 640631 - RNA, 19 nt, Homo sapiens
  misc_RNA (1)...(19): siRNA sense strand
uggauuaucacguguguuc

SEQ ID NO: 640632 - RNA, 19 nt, Homo sapiens
  misc_RNA (1)...(19): siRNA sense strand
cagugggccuccugucugu

SEQ ID NO: 640633 - RNA, 19 nt, Homo sapiens
  misc_RNA (1)...(19): siRNA sense strand
gcugccuccuggauuauca

SEQ ID NO: 640634 - RNA, 19 nt, Homo sapiens
  misc_RNA (1)...(19): siRNA sense strand
ccaagcaugcacgauguuu

SEQ ID NO: 640635 - RNA, 19 nt, Homo sapiens
  misc_RNA (1)...(19): siRNA sense strand
ugagcaagcaguuucaaag

SEQ ID NO: 640636 - RNA, 19 nt, Homo sapiens
  misc_RNA (1)...(19): siRNA sense strand
ucagugagcaagcaguuuc

SEQ ID NO: 640637 - RNA, 19 nt, Homo sapiens
  misc_RNA (1)...(19): siRNA sense strand
ggaaguccugagcgucuug

SEQ ID NO: 640638 - RNA, 19 nt, Homo sapiens
  misc_RNA (1)...(19): siRNA sense strand
gggaaguccugagcgucuu

SEQ ID NO: 640639 - RNA, 19 nt, Homo sapiens
  misc_RNA (1)...(19): siRNA sense strand
ggacuuuauccagcauuug

SEQ ID NO: 640640 - RNA, 19 nt, Homo sapiens
  misc_RNA (1)...(19): siRNA sense strand
uuugggaguuugcuguuug

SEQ ID NO: 640641 - RNA, 19 nt, Homo sapiens
  misc_RNA (1)...(19): siRNA sense strand
cauggcaagugcagacaag

SEQ ID NO: 640642 - RNA, 19 nt, Homo sapiens
  misc_RNA (1)...(19): siRNA sense strand
uccaugauucuuccuuuaa

SEQ ID NO: 640643 - RNA, 19 nt, Homo sapiens
  misc_RNA (1)...(19): siRNA sense strand
gagcaagcaguuucaaagc

SEQ ID NO: 640644 - RNA, 19 nt, Homo sapiens
  misc_RNA (1)...(19): siRNA sense strand
ggaggaaaggaggaaguau

SEQ ID NO: 640645 - RNA, 19 nt, Homo sapiens
  misc_RNA (1)...(19): siRNA sense strand
ugaaagggagagacaucaa

SEQ ID NO: 640646 - RNA, 19 nt, Homo sapiens
  misc_RNA (1)...(19): siRNA sense strand
ggaaguaugaaaacaucua

SEQ ID NO: 640647 - RNA, 19 nt, Homo sapiens
  misc_RNA (1)...(19): siRNA sense strand
ucuccuagaugguaugacu

SEQ ID NO: 640648 - RNA, 19 nt, Homo sapiens
  misc_RNA (1)...(19): siRNA sense strand
uguuugaacccaacuguau

SEQ ID NO: 640649 - RNA, 19 nt, Homo sapiens
  misc_RNA (1)...(19): siRNA sense strand
aacaaggaacucaagauau

SEQ ID NO: 640650 - RNA, 19 nt, Homo sapiens
  misc_RNA (1)...(19): siRNA sense strand
ggagagaaacaaggaacuc

SEQ ID NO: 640651 - RNA, 19 nt, Homo sapiens
  misc_RNA (1)...(19): siRNA sense strand
uguuugcagcuguagauua

SEQ ID NO: 640652 - RNA, 19 nt, Homo sapiens
  misc_RNA (1)...(19): siRNA sense strand
gauuaucacguguguucug

SEQ ID NO: 640653 - RNA, 19 nt, Homo sapiens
  misc_RNA (1)...(19): siRNA sense strand
uacaucaccagacaauuug

SEQ ID NO: 640654 - RNA, 19 nt, Homo sapiens
  misc_RNA (1)...(19): siRNA sense strand
ccacagaaccuaagaacua

SEQ ID NO: 640655 - RNA, 19 nt, Homo sapiens
  misc_RNA (1)...(19): siRNA sense strand
gaaacggauccacuccuua

SEQ ID NO: 640656 - RNA, 19 nt, Homo sapiens
  misc_RNA (1)...(19): siRNA sense strand
caacaauggcgcaggcuuu

SEQ ID NO: 640657 - RNA, 19 nt, Homo sapiens
  misc_RNA (1)...(19): siRNA sense strand
gaaggcccagcaagaauuu

SEQ ID NO: 640658 - RNA, 19 nt, Homo sapiens
  misc_RNA (1)...(19): siRNA sense strand
gaagggcaacacagcagua

SEQ ID NO: 640659 - RNA, 19 nt, Homo sapiens
  misc_RNA (1)...(19): siRNA sense strand
ugaaacggauccacuccuu

SEQ ID NO: 640660 - RNA, 19 nt, Homo sapiens
  misc_RNA (1)...(19): siRNA sense strand
gagugacaguucauucaau

SEQ ID NO: 640661 - RNA, 19 nt, Homo sapiens
  misc_RNA (1)...(19): siRNA sense strand
gcacagcuacucgacagaa

SEQ ID NO: 640662 - RNA, 19 nt, Homo sapiens
  misc_RNA (1)...(19): siRNA sense strand
gcauugcugugcuaggaau

SEQ ID NO: 640663 - RNA, 19 nt, Homo sapiens
  misc_RNA (1)...(19): siRNA sense strand
gagcagagacggcggaaac

SEQ ID NO: 640664 - RNA, 19 nt, Homo sapiens
  misc_RNA (1)...(19): siRNA sense strand
cacagaaccuaagaacuau

SEQ ID NO: 640665 - RNA, 19 nt, Homo sapiens
  misc_RNA (1)...(19): siRNA sense strand
aaacggauccacuccuuau

SEQ ID NO: 640666 - RNA, 19 nt, Homo sapiens
  misc_RNA (1)...(19): siRNA sense strand
ggagugacaguucauucaa

SEQ ID NO: 640667 - RNA, 19 nt, Homo sapiens
  misc_RNA (1)...(19): siRNA sense strand
agugacaguucauucaauu

SEQ ID NO: 640668 - RNA, 19 nt, Homo sapiens
  misc_RNA (1)...(19): siRNA sense strand
ucagaaggcccagcaagaa

SEQ ID NO: 640669 - RNA, 19 nt, Homo sapiens
  misc_RNA (1)...(19): siRNA sense strand
ggaauugucaugcugaaac

SEQ ID NO: 640670 - RNA, 19 nt, Homo sapiens
  misc_RNA (1)...(19): siRNA sense strand
ugacaguucauucaauuuc

SEQ ID NO: 640671 - RNA, 19 nt, Homo sapiens
  misc_RNA (1)...(19): siRNA sense strand
gaauuucagaagacuguau

SEQ ID NO: 640672 - RNA, 19 nt, Homo sapiens
  misc_RNA (1)...(19): siRNA sense strand
gcucuucacuggcauugcu

SEQ ID NO: 640673 - RNA, 19 nt, Homo sapiens
  misc_RNA (1)...(19): siRNA sense strand
gacaguucauucaauuucu

SEQ ID NO: 640674 - RNA, 19 nt, Homo sapiens
  misc_RNA (1)...(19): siRNA sense strand
cuacucgacagaacaauug

SEQ ID NO: 640675 - RNA, 19 nt, Homo sapiens
  misc_RNA (1)...(19): siRNA sense strand
cguccaggaugugcucuuu

SEQ ID NO: 640676 - RNA, 19 nt, Homo sapiens
  misc_RNA (1)...(19): siRNA sense strand
gaauugucaugcugaaacg

SEQ ID NO: 640677 - RNA, 19 nt, Homo sapiens
  misc_RNA (1)...(19): siRNA sense strand
gcuacucgacagaacaauu

SEQ ID NO: 640678 - RNA, 19 nt, Homo sapiens
  misc_RNA (1)...(19): siRNA sense strand
agaaggcccagcaagaauu

SEQ ID NO: 640679 - RNA, 19 nt, Homo sapiens
  misc_RNA (1)...(19): siRNA sense strand
ggaaggcagaggaguugga

SEQ ID NO: 640680 - RNA, 19 nt, Homo sapiens
  misc_RNA (1)...(19): siRNA sense strand
gaaccgcagcugccaaugc

SEQ ID NO: 640681 - RNA, 19 nt, Homo sapiens
  misc_RNA (1)...(19): siRNA sense strand
uggcauugcugugcuagga

SEQ ID NO: 640682 - RNA, 19 nt, Homo sapiens
  misc_RNA (1)...(19): siRNA sense strand
ccaagaauuucagaagacu

SEQ ID NO: 640683 - RNA, 19 nt, Homo sapiens
  misc_RNA (1)...(19): siRNA sense strand
ggcgcaggcuuugggcuuu

SEQ ID NO: 640684 - RNA, 19 nt, Homo sapiens
  misc_RNA (1)...(19): siRNA sense strand
cagaaggcccagcaagaau

SEQ ID NO: 640685 - RNA, 19 nt, Homo sapiens
  misc_RNA (1)...(19): siRNA sense strand
uccaggaugugcucuuugu

SEQ ID NO: 640686 - RNA, 19 nt, Homo sapiens
  misc_RNA (1)...(19): siRNA sense strand
uaggaauugucaugcugaa

SEQ ID NO: 640687 - RNA, 19 nt, Homo sapiens
  misc_RNA (1)...(19): siRNA sense strand
gcuccuuugucugcuggua

SEQ ID NO: 640688 - RNA, 19 nt, Homo sapiens
  misc_RNA (1)...(19): siRNA sense strand
gcgaaccgcagcugccaau

SEQ ID NO: 640689 - RNA, 19 nt, Homo sapiens
  misc_RNA (1)...(19): siRNA sense strand
cugagcugcugaagaaaca

SEQ ID NO: 640690 - RNA, 19 nt, Homo sapiens
  misc_RNA (1)...(19): siRNA sense strand
aagacuguauccaccaugu

SEQ ID NO: 640691 - RNA, 19 nt, Homo sapiens
  misc_RNA (1)...(19): siRNA sense strand
cccaagaauuucagaagac

SEQ ID NO: 640692 - RNA, 19 nt, Homo sapiens
  misc_RNA (1)...(19): siRNA sense strand
gcgcaggcuuugggcuuuc

SEQ ID NO: 640693 - RNA, 19 nt, Homo sapiens
  misc_RNA (1)...(19): siRNA sense strand
aaccgcagcugccaaugca

SEQ ID NO: 640694 - RNA, 19 nt, Homo sapiens
  misc_RNA (1)...(19): siRNA sense strand
ccuaagaacuauggcucau

SEQ ID NO: 640695 - RNA, 19 nt, Homo sapiens
  misc_RNA (1)...(19): siRNA sense strand
gugacaguucauucaauuu

SEQ ID NO: 640696 - RNA, 19 nt, Homo sapiens
  misc_RNA (1)...(19): siRNA sense strand
ccuugcagcccucgagaaa

SEQ ID NO: 640697 - RNA, 19 nt, Homo sapiens
  misc_RNA (1)...(19): siRNA sense strand
gcuuugggcuuucuauccu

SEQ ID NO: 640698 - RNA, 19 nt, Homo sapiens
  misc_RNA (1)...(19): siRNA sense strand
uguacuaccucuggaugug

SEQ ID NO: 640699 - RNA, 19 nt, Homo sapiens
  misc_RNA (1)...(19): siRNA sense strand
cagcuacucgacagaacaa

SEQ ID NO: 640700 - RNA, 19 nt, Homo sapiens
  misc_RNA (1)...(19): siRNA sense strand
ccacagaaccuaagaacua

SEQ ID NO: 640701 - RNA, 19 nt, Homo sapiens
  misc_RNA (1)...(19): siRNA sense strand
gaaacggauccacuccuua

SEQ ID NO: 640702 - RNA, 19 nt, Homo sapiens
  misc_RNA (1)...(19): siRNA sense strand
caacaauggcgcaggcuuu

SEQ ID NO: 640703 - RNA, 19 nt, Homo sapiens
  misc_RNA (1)...(19): siRNA sense strand
gaaggcccagcaagaauuu

SEQ ID NO: 640704 - RNA, 19 nt, Homo sapiens
  misc_RNA (1)...(19): siRNA sense strand
gaagggcaacacagcagua

SEQ ID NO: 640705 - RNA, 19 nt, Homo sapiens
  misc_RNA (1)...(19): siRNA sense strand
ugaaacggauccacuccuu

SEQ ID NO: 640706 - RNA, 19 nt, Homo sapiens
  misc_RNA (1)...(19): siRNA sense strand
gagugacaguucauucaau

SEQ ID NO: 640707 - RNA, 19 nt, Homo sapiens
  misc_RNA (1)...(19): siRNA sense strand
gcacagcuacucgacagaa

SEQ ID NO: 640708 - RNA, 19 nt, Homo sapiens
  misc_RNA (1)...(19): siRNA sense strand
gcauugcugugcuaggaau

SEQ ID NO: 640709 - RNA, 19 nt, Homo sapiens
  misc_RNA (1)...(19): siRNA sense strand
gagcagagacggcggaaac

SEQ ID NO: 640710 - RNA, 19 nt, Homo sapiens
  misc_RNA (1)...(19): siRNA sense strand
cacagaaccuaagaacuau

SEQ ID NO: 640711 - RNA, 19 nt, Homo sapiens
  misc_RNA (1)...(19): siRNA sense strand
aaacggauccacuccuuau

SEQ ID NO: 640712 - RNA, 19 nt, Homo sapiens
  misc_RNA (1)...(19): siRNA sense strand
ggagugacaguucauucaa

SEQ ID NO: 640713 - RNA, 19 nt, Homo sapiens
  misc_RNA (1)...(19): siRNA sense strand
agugacaguucauucaauu

SEQ ID NO: 640714 - RNA, 19 nt, Homo sapiens
  misc_RNA (1)...(19): siRNA sense strand
ucagaaggcccagcaagaa

SEQ ID NO: 640715 - RNA, 19 nt, Homo sapiens
  misc_RNA (1)...(19): siRNA sense strand
ggaauugucaugcugaaac

SEQ ID NO: 640716 - RNA, 19 nt, Homo sapiens
  misc_RNA (1)...(19): siRNA sense strand
ugacaguucauucaauuuc

SEQ ID NO: 640717 - RNA, 19 nt, Homo sapiens
  misc_RNA (1)...(19): siRNA sense strand
gaauuucagaagacuguau

SEQ ID NO: 640718 - RNA, 19 nt, Homo sapiens
  misc_RNA (1)...(19): siRNA sense strand
gcucuucacuggcauugcu

SEQ ID NO: 640719 - RNA, 19 nt, Homo sapiens
  misc_RNA (1)...(19): siRNA sense strand
gacaguucauucaauuucu

SEQ ID NO: 640720 - RNA, 19 nt, Homo sapiens
  misc_RNA (1)...(19): siRNA sense strand
cuacucgacagaacaauug

SEQ ID NO: 640721 - RNA, 19 nt, Homo sapiens
  misc_RNA (1)...(19): siRNA sense strand
cguccaggaugugcucuuu

SEQ ID NO: 640722 - RNA, 19 nt, Homo sapiens
  misc_RNA (1)...(19): siRNA sense strand
gaauugucaugcugaaacg

SEQ ID NO: 640723 - RNA, 19 nt, Homo sapiens
  misc_RNA (1)...(19): siRNA sense strand
gcuacucgacagaacaauu

SEQ ID NO: 640724 - RNA, 19 nt, Homo sapiens
  misc_RNA (1)...(19): siRNA sense strand
agaaggcccagcaagaauu

SEQ ID NO: 640725 - RNA, 19 nt, Homo sapiens
  misc_RNA (1)...(19): siRNA sense strand
ggaaggcagaggaguugga

SEQ ID NO: 640726 - RNA, 19 nt, Homo sapiens
  misc_RNA (1)...(19): siRNA sense strand
gaaccgcagcugccaaugc

SEQ ID NO: 640727 - RNA, 19 nt, Homo sapiens
  misc_RNA (1)...(19): siRNA sense strand
uggcauugcugugcuagga

SEQ ID NO: 640728 - RNA, 19 nt, Homo sapiens
  misc_RNA (1)...(19): siRNA sense strand
ccaagaauuucagaagacu

SEQ ID NO: 640729 - RNA, 19 nt, Homo sapiens
  misc_RNA (1)...(19): siRNA sense strand
ggcgcaggcuuugggcuuu

SEQ ID NO: 640730 - RNA, 19 nt, Homo sapiens
  misc_RNA (1)...(19): siRNA sense strand
cagaaggcccagcaagaau

SEQ ID NO: 640731 - RNA, 19 nt, Homo sapiens
  misc_RNA (1)...(19): siRNA sense strand
uccaggaugugcucuuugu

SEQ ID NO: 640732 - RNA, 19 nt, Homo sapiens
  misc_RNA (1)...(19): siRNA sense strand
uaggaauugucaugcugaa

SEQ ID NO: 640733 - RNA, 19 nt, Homo sapiens
  misc_RNA (1)...(19): siRNA sense strand
gcuccuuugucugcuggua

SEQ ID NO: 640734 - RNA, 19 nt, Homo sapiens
  misc_RNA (1)...(19): siRNA sense strand
gcgaaccgcagcugccaau

SEQ ID NO: 640735 - RNA, 19 nt, Homo sapiens
  misc_RNA (1)...(19): siRNA sense strand
cugagcugcugaagaaaca

SEQ ID NO: 640736 - RNA, 19 nt, Homo sapiens
  misc_RNA (1)...(19): siRNA sense strand
aagacuguauccaccaugu

SEQ ID NO: 640737 - RNA, 19 nt, Homo sapiens
  misc_RNA (1)...(19): siRNA sense strand
cccaagaauuucagaagac

SEQ ID NO: 640738 - RNA, 19 nt, Homo sapiens
  misc_RNA (1)...(19): siRNA sense strand
gcgcaggcuuugggcuuuc

SEQ ID NO: 640739 - RNA, 19 nt, Homo sapiens
  misc_RNA (1)...(19): siRNA sense strand
aaccgcagcugccaaugca

SEQ ID NO: 640740 - RNA, 19 nt, Homo sapiens
  misc_RNA (1)...(19): siRNA sense strand
ccuaagaacuauggcucau

SEQ ID NO: 640741 - RNA, 19 nt, Homo sapiens
  misc_RNA (1)...(19): siRNA sense strand
gugacaguucauucaauuu

SEQ ID NO: 640742 - RNA, 19 nt, Homo sapiens
  misc_RNA (1)...(19): siRNA sense strand
ccuugcagcccucgagaaa

SEQ ID NO: 640743 - RNA, 19 nt, Homo sapiens
  misc_RNA (1)...(19): siRNA sense strand
gcuuugggcuuucuauccu

SEQ ID NO: 640744 - RNA, 19 nt, Homo sapiens
  misc_RNA (1)...(19): siRNA sense strand
uguacuaccucuggaugug

SEQ ID NO: 640745 - RNA, 19 nt, Homo sapiens
  misc_RNA (1)...(19): siRNA sense strand
cagcuacucgacagaacaa

SEQ ID NO: 640746 - RNA, 19 nt, Homo sapiens
  misc_RNA (1)...(19): siRNA sense strand
caaagcggaugcucugaug

SEQ ID NO: 640747 - RNA, 19 nt, Homo sapiens
  misc_RNA (1)...(19): siRNA sense strand
gaagaugcaggcccaaaug

SEQ ID NO: 640748 - RNA, 19 nt, Homo sapiens
  misc_RNA (1)...(19): siRNA sense strand
ggguuugacuucacgcuaa

SEQ ID NO: 640749 - RNA, 19 nt, Homo sapiens
  misc_RNA (1)...(19): siRNA sense strand
gggaucaguugaaggaaga

SEQ ID NO: 640750 - RNA, 19 nt, Homo sapiens
  misc_RNA (1)...(19): siRNA sense strand
ggaaauccacccucaucaa

SEQ ID NO: 640751 - RNA, 19 nt, Homo sapiens
  misc_RNA (1)...(19): siRNA sense strand
caacaucaucccagucauu

SEQ ID NO: 640752 - RNA, 19 nt, Homo sapiens
  misc_RNA (1)...(19): siRNA sense strand
gaaugugacucugaugaag

SEQ ID NO: 640753 - RNA, 19 nt, Homo sapiens
  misc_RNA (1)...(19): siRNA sense strand
ugcaagagaugcuggagaa

SEQ ID NO: 640754 - RNA, 19 nt, Homo sapiens
  misc_RNA (1)...(19): siRNA sense strand
ggagucaggccuagggaaa

SEQ ID NO: 640755 - RNA, 19 nt, Homo sapiens
  misc_RNA (1)...(19): siRNA sense strand
cacagacccuggccauuga

SEQ ID NO: 640756 - RNA, 19 nt, Homo sapiens
  misc_RNA (1)...(19): siRNA sense strand
gaggcaggaugcagagaug

SEQ ID NO: 640757 - RNA, 19 nt, Homo sapiens
  misc_RNA (1)...(19): siRNA sense strand
gaucgagccagccgcagua

SEQ ID NO: 640758 - RNA, 19 nt, Homo sapiens
  misc_RNA (1)...(19): siRNA sense strand
ccgcaagucugucaagaag

SEQ ID NO: 640759 - RNA, 19 nt, Homo sapiens
  misc_RNA (1)...(19): siRNA sense strand
gaaauccacccucaucaac

SEQ ID NO: 640760 - RNA, 19 nt, Homo sapiens
  misc_RNA (1)...(19): siRNA sense strand
ggccagugcucgcuugaca

SEQ ID NO: 640761 - RNA, 19 nt, Homo sapiens
  misc_RNA (1)...(19): siRNA sense strand
caagagaugcuggagaaga

SEQ ID NO: 640762 - RNA, 19 nt, Homo sapiens
  misc_RNA (1)...(19): siRNA sense strand
ugacucugaugaagaugaa

SEQ ID NO: 640763 - RNA, 19 nt, Homo sapiens
  misc_RNA (1)...(19): siRNA sense strand
caauuugagcaguaccuua

SEQ ID NO: 640764 - RNA, 19 nt, Homo sapiens
  misc_RNA (1)...(19): siRNA sense strand
ucacugcgauuuccugaac

SEQ ID NO: 640765 - RNA, 19 nt, Homo sapiens
  misc_RNA (1)...(19): siRNA sense strand
acacagacccuggccauug

SEQ ID NO: 640766 - RNA, 19 nt, Homo sapiens
  misc_RNA (1)...(19): siRNA sense strand
aagagaugcuggagaagau

SEQ ID NO: 640767 - RNA, 19 nt, Homo sapiens
  misc_RNA (1)...(19): siRNA sense strand
gcaaagcggaugcucugau

SEQ ID NO: 640768 - RNA, 19 nt, Homo sapiens
  misc_RNA (1)...(19): siRNA sense strand
cgaaugugacucugaugaa

SEQ ID NO: 640769 - RNA, 19 nt, Homo sapiens
  misc_RNA (1)...(19): siRNA sense strand
gaagcugauccgcgagaaa

SEQ ID NO: 640770 - RNA, 19 nt, Homo sapiens
  misc_RNA (1)...(19): siRNA sense strand
gcaguacacgagaaaguca

SEQ ID NO: 640771 - RNA, 19 nt, Homo sapiens
  misc_RNA (1)...(19): siRNA sense strand
aagugaagcugacccuugu

SEQ ID NO: 640772 - RNA, 19 nt, Homo sapiens
  misc_RNA (1)...(19): siRNA sense strand
gaaauucaucgaggagcaa

SEQ ID NO: 640773 - RNA, 19 nt, Homo sapiens
  misc_RNA (1)...(19): siRNA sense strand
gagaagaugcaggcccaaa

SEQ ID NO: 640774 - RNA, 19 nt, Homo sapiens
  misc_RNA (1)...(19): siRNA sense strand
augcagagaugaaggaaag

SEQ ID NO: 640775 - RNA, 19 nt, Homo sapiens
  misc_RNA (1)...(19): siRNA sense strand
gggcguagagauugaggaa

SEQ ID NO: 640776 - RNA, 19 nt, Homo sapiens
  misc_RNA (1)...(19): siRNA sense strand
ggaagaggagauccacauc

SEQ ID NO: 640777 - RNA, 19 nt, Homo sapiens
  misc_RNA (1)...(19): siRNA sense strand
cgagaaagucaacaucauc

SEQ ID NO: 640778 - RNA, 19 nt, Homo sapiens
  misc_RNA (1)...(19): siRNA sense strand
ggcuuccgguggugaaauu

SEQ ID NO: 640779 - RNA, 19 nt, Homo sapiens
  misc_RNA (1)...(19): siRNA sense strand
acaaggaguacguggguuu

SEQ ID NO: 640780 - RNA, 19 nt, Homo sapiens
  misc_RNA (1)...(19): siRNA sense strand
ccacaucacugcgauuucc

SEQ ID NO: 640781 - RNA, 19 nt, Homo sapiens
  misc_RNA (1)...(19): siRNA sense strand
ggccugaaccggaagaaca

SEQ ID NO: 640782 - RNA, 19 nt, Homo sapiens
  misc_RNA (1)...(19): siRNA sense strand
ccagagcgccacagagauc

SEQ ID NO: 640783 - RNA, 19 nt, Homo sapiens
  misc_RNA (1)...(19): siRNA sense strand
cccaggcccucaagcagaa

SEQ ID NO: 640784 - RNA, 19 nt, Homo sapiens
  misc_RNA (1)...(19): siRNA sense strand
ccacugcugccucuacuuc

SEQ ID NO: 640785 - RNA, 19 nt, Homo sapiens
  misc_RNA (1)...(19): siRNA sense strand
aggagcaauuugagcagua

SEQ ID NO: 640786 - RNA, 19 nt, Homo sapiens
  misc_RNA (1)...(19): siRNA sense strand
ggaugagaguggccugaac

SEQ ID NO: 640787 - RNA, 19 nt, Homo sapiens
  misc_RNA (1)...(19): siRNA sense strand
agcaguaccuuagggauga

SEQ ID NO: 640788 - RNA, 19 nt, Homo sapiens
  misc_RNA (1)...(19): siRNA sense strand
ggagcaauuugagcaguac

SEQ ID NO: 640789 - RNA, 19 nt, Homo sapiens
  misc_RNA (1)...(19): siRNA sense strand
gggaaauccacccucauca

SEQ ID NO: 640790 - RNA, 19 nt, Homo sapiens
  misc_RNA (1)...(19): siRNA sense strand
gguuugacuucacgcuaau

SEQ ID NO: 640791 - RNA, 19 nt, Homo sapiens
  misc_RNA (1)...(19): siRNA sense strand
cgcacgaucugcucuacga

SEQ ID NO: 640792 - RNA, 19 nt, Homo sapiens
  misc_RNA (1)...(19): siRNA sense strand
ccgaaugugacucugauga

SEQ ID NO: 640793 - RNA, 19 nt, Homo sapiens
  misc_RNA (1)...(19): siRNA sense strand
gccagccgcaguaagcuuu

SEQ ID NO: 640794 - RNA, 19 nt, Homo sapiens
  misc_RNA (1)...(19): siRNA sense strand
ggaugcuggugcagacaca

SEQ ID NO: 640795 - RNA, 19 nt, Homo sapiens
  misc_RNA (1)...(19): siRNA sense strand
gggcaguacacgagaaagu

SEQ ID NO: 640796 - RNA, 19 nt, Homo sapiens
  misc_RNA (1)...(19): siRNA sense strand
agugcucgcuugacacaga

SEQ ID NO: 640797 - RNA, 19 nt, Homo sapiens
  misc_RNA (1)...(19): siRNA sense strand
gcaauuugagcaguaccuu

SEQ ID NO: 640798 - RNA, 19 nt, Homo sapiens
  misc_RNA (1)...(19): siRNA sense strand
gauccacaucuaccaguuc

SEQ ID NO: 640799 - RNA, 19 nt, Homo sapiens
  misc_RNA (1)...(19): siRNA sense strand
ggaaacccaggcccucaag

SEQ ID NO: 640800 - RNA, 19 nt, Homo sapiens
  misc_RNA (1)...(19): siRNA sense strand
acgagaaagucaacaucau

SEQ ID NO: 640801 - RNA, 19 nt, Homo sapiens
  misc_RNA (1)...(19): siRNA sense strand
ucaucgaggagcaauuuga

SEQ ID NO: 640802 - RNA, 19 nt, Homo sapiens
  misc_RNA (1)...(19): siRNA sense strand
ggaccguggagguggagaa

SEQ ID NO: 640803 - RNA, 19 nt, Homo sapiens
  misc_RNA (1)...(19): siRNA sense strand
gucaacaucaucccaguca

SEQ ID NO: 640804 - RNA, 19 nt, Homo sapiens
  misc_RNA (1)...(19): siRNA sense strand
cacgagaaagucaacauca

SEQ ID NO: 640805 - RNA, 19 nt, Homo sapiens
  misc_RNA (1)...(19): siRNA sense strand
gauccgcgagaaagacgaa

SEQ ID NO: 640806 - RNA, 19 nt, Homo sapiens
  misc_RNA (1)...(19): siRNA sense strand
gcagagaugaaggaaagca

SEQ ID NO: 640807 - RNA, 19 nt, Homo sapiens
  misc_RNA (1)...(19): siRNA sense strand
ggcaggaugcagagaugaa

SEQ ID NO: 640808 - RNA, 19 nt, Homo sapiens
  misc_RNA (1)...(19): siRNA sense strand
caccgcaagucugucaaga

SEQ ID NO: 640809 - RNA, 19 nt, Homo sapiens
  misc_RNA (1)...(19): siRNA sense strand
gaaagacacuccaacuaau

SEQ ID NO: 640810 - RNA, 19 nt, Homo sapiens
  misc_RNA (1)...(19): siRNA sense strand
cagcaggaauuacuucuua

SEQ ID NO: 640811 - RNA, 19 nt, Homo sapiens
  misc_RNA (1)...(19): siRNA sense strand
gaacaaaugcgacagcaaa

SEQ ID NO: 640812 - RNA, 19 nt, Homo sapiens
  misc_RNA (1)...(19): siRNA sense strand
gcaaaugguuucacagcaa

SEQ ID NO: 640813 - RNA, 19 nt, Homo sapiens
  misc_RNA (1)...(19): siRNA sense strand
guacagaaguaaagcagaa

SEQ ID NO: 640814 - RNA, 19 nt, Homo sapiens
  misc_RNA (1)...(19): siRNA sense strand
ggacagaccucaggaugau

SEQ ID NO: 640815 - RNA, 19 nt, Homo sapiens
  misc_RNA (1)...(19): siRNA sense strand
gaacaucuccauccuacaa

SEQ ID NO: 640816 - RNA, 19 nt, Homo sapiens
  misc_RNA (1)...(19): siRNA sense strand
cgaaagacacuccaacuaa

SEQ ID NO: 640817 - RNA, 19 nt, Homo sapiens
  misc_RNA (1)...(19): siRNA sense strand
gaacaaacugcuuucgaaa

SEQ ID NO: 640818 - RNA, 19 nt, Homo sapiens
  misc_RNA (1)...(19): siRNA sense strand
ugaacaaacugcuuucgaa

SEQ ID NO: 640819 - RNA, 19 nt, Homo sapiens
  misc_RNA (1)...(19): siRNA sense strand
caacaagaacuccuagaaa

SEQ ID NO: 640820 - RNA, 19 nt, Homo sapiens
  misc_RNA (1)...(19): siRNA sense strand
gaaacagcaugagaacuug

SEQ ID NO: 640821 - RNA, 19 nt, Homo sapiens
  misc_RNA (1)...(19): siRNA sense strand
caucucaccuuuagaccua

SEQ ID NO: 640822 - RNA, 19 nt, Homo sapiens
  misc_RNA (1)...(19): siRNA sense strand
gcaacaagaacuccuagaa

SEQ ID NO: 640823 - RNA, 19 nt, Homo sapiens
  misc_RNA (1)...(19): siRNA sense strand
gcagaagcuucaagaguuc

SEQ ID NO: 640824 - RNA, 19 nt, Homo sapiens
  misc_RNA (1)...(19): siRNA sense strand
gcggaaggauggaaauguu

SEQ ID NO: 640825 - RNA, 19 nt, Homo sapiens
  misc_RNA (1)...(19): siRNA sense strand
aaagauagaggacgagaaa

SEQ ID NO: 640826 - RNA, 19 nt, Homo sapiens
  misc_RNA (1)...(19): siRNA sense strand
gcucaaugcuucgaauuca

SEQ ID NO: 640827 - RNA, 19 nt, Homo sapiens
  misc_RNA (1)...(19): siRNA sense strand
gaaggugcgguccagguua

SEQ ID NO: 640828 - RNA, 19 nt, Homo sapiens
  misc_RNA (1)...(19): siRNA sense strand
ucacagcaacgcauucuaa

SEQ ID NO: 640829 - RNA, 19 nt, Homo sapiens
  misc_RNA (1)...(19): siRNA sense strand
cauuagagguacccacaaa

SEQ ID NO: 640830 - RNA, 19 nt, Homo sapiens
  misc_RNA (1)...(19): siRNA sense strand
cagcaacgcauucuaauuc

SEQ ID NO: 640831 - RNA, 19 nt, Homo sapiens
  misc_RNA (1)...(19): siRNA sense strand
gagcccaucucaccuuuag

SEQ ID NO: 640832 - RNA, 19 nt, Homo sapiens
  misc_RNA (1)...(19): siRNA sense strand
gaacccagucugcaccuuu

SEQ ID NO: 640833 - RNA, 19 nt, Homo sapiens
  misc_RNA (1)...(19): siRNA sense strand
cgaaaucuauugaacaacu

SEQ ID NO: 640834 - RNA, 19 nt, Homo sapiens
  misc_RNA (1)...(19): siRNA sense strand
aaacugcuuucgaaaucua

SEQ ID NO: 640835 - RNA, 19 nt, Homo sapiens
  misc_RNA (1)...(19): siRNA sense strand
acaaacugcuuucgaaauc

SEQ ID NO: 640836 - RNA, 19 nt, Homo sapiens
  misc_RNA (1)...(19): siRNA sense strand
cgaauucacucaaagaaaa

SEQ ID NO: 640837 - RNA, 19 nt, Homo sapiens
  misc_RNA (1)...(19): siRNA sense strand
uggagaagcagaagcaaua

SEQ ID NO: 640838 - RNA, 19 nt, Homo sapiens
  misc_RNA (1)...(19): siRNA sense strand
gaaagggcaguggcaagua

SEQ ID NO: 640839 - RNA, 19 nt, Homo sapiens
  misc_RNA (1)...(19): siRNA sense strand
gaugugaagucagaaguuc

SEQ ID NO: 640840 - RNA, 19 nt, Homo sapiens
  misc_RNA (1)...(19): siRNA sense strand
guaaaucagcaacgaaaga

SEQ ID NO: 640841 - RNA, 19 nt, Homo sapiens
  misc_RNA (1)...(19): siRNA sense strand
gaguaaaucagcaacgaaa

SEQ ID NO: 640842 - RNA, 19 nt, Homo sapiens
  misc_RNA (1)...(19): siRNA sense strand
gaaaucuauugaacaacug

SEQ ID NO: 640843 - RNA, 19 nt, Homo sapiens
  misc_RNA (1)...(19): siRNA sense strand
ggacagugaugaagaugcu

SEQ ID NO: 640844 - RNA, 19 nt, Homo sapiens
  misc_RNA (1)...(19): siRNA sense strand
agaaacagcaugagaacuu

SEQ ID NO: 640845 - RNA, 19 nt, Homo sapiens
  misc_RNA (1)...(19): siRNA sense strand
caacuggaaguguuacuga

SEQ ID NO: 640846 - RNA, 19 nt, Homo sapiens
  misc_RNA (1)...(19): siRNA sense strand
agcagaagcuucaagaguu

SEQ ID NO: 640847 - RNA, 19 nt, Homo sapiens
  misc_RNA (1)...(19): siRNA sense strand
gcagcuuccuccucucaga

SEQ ID NO: 640848 - RNA, 19 nt, Homo sapiens
  misc_RNA (1)...(19): siRNA sense strand
ccaugaaccugcuaagucu

SEQ ID NO: 640849 - RNA, 19 nt, Homo sapiens
  misc_RNA (1)...(19): siRNA sense strand
ggauggaaauguugucacu

SEQ ID NO: 640850 - RNA, 19 nt, Homo sapiens
  misc_RNA (1)...(19): siRNA sense strand
cuucaagaguuccuacuga

SEQ ID NO: 640851 - RNA, 19 nt, Homo sapiens
  misc_RNA (1)...(19): siRNA sense strand
ugaugaagaugcucagauc

SEQ ID NO: 640852 - RNA, 19 nt, Homo sapiens
  misc_RNA (1)...(19): siRNA sense strand
uggcucagcuggucauuca

SEQ ID NO: 640853 - RNA, 19 nt, Homo sapiens
  misc_RNA (1)...(19): siRNA sense strand
ccucugagcccaacuugaa

SEQ ID NO: 640854 - RNA, 19 nt, Homo sapiens
  misc_RNA (1)...(19): siRNA sense strand
gcaagaacaggaaguagag

SEQ ID NO: 640855 - RNA, 19 nt, Homo sapiens
  misc_RNA (1)...(19): siRNA sense strand
ccacccucauguuacuuua

SEQ ID NO: 640856 - RNA, 19 nt, Homo sapiens
  misc_RNA (1)...(19): siRNA sense strand
gacagaauccucagucagu

SEQ ID NO: 640857 - RNA, 19 nt, Homo sapiens
  misc_RNA (1)...(19): siRNA sense strand
gagaauuucaccuggcauu

SEQ ID NO: 640858 - RNA, 19 nt, Homo sapiens
  misc_RNA (1)...(19): siRNA sense strand
ucuuguagcugguggaguu

SEQ ID NO: 640859 - RNA, 19 nt, Homo sapiens
  misc_RNA (1)...(19): siRNA sense strand
gagcacaagaugcaaagga

SEQ ID NO: 640860 - RNA, 19 nt, Homo sapiens
  misc_RNA (1)...(19): siRNA sense strand
cugcagcauuuauuauuga

SEQ ID NO: 640861 - RNA, 19 nt, Homo sapiens
  misc_RNA (1)...(19): siRNA sense strand
caacgcauucuaauucaug

SEQ ID NO: 640862 - RNA, 19 nt, Homo sapiens
  misc_RNA (1)...(19): siRNA sense strand
gaaaaugagacuucgguuu

SEQ ID NO: 640863 - RNA, 19 nt, Homo sapiens
  misc_RNA (1)...(19): siRNA sense strand
acagaauccucagucagua

SEQ ID NO: 640864 - RNA, 19 nt, Homo sapiens
  misc_RNA (1)...(19): siRNA sense strand
gcagaggcaagaacaggaa

SEQ ID NO: 640865 - RNA, 19 nt, Homo sapiens
  misc_RNA (1)...(19): siRNA sense strand
gcaacaccagcaauucuug

SEQ ID NO: 640866 - RNA, 19 nt, Homo sapiens
  misc_RNA (1)...(19): siRNA sense strand
gcauucuaauucaugaaga

SEQ ID NO: 640867 - RNA, 19 nt, Homo sapiens
  misc_RNA (1)...(19): siRNA sense strand
agagaggcaucgcagagaa

SEQ ID NO: 640868 - RNA, 19 nt, Homo sapiens
  misc_RNA (1)...(19): siRNA sense strand
gcaacgcauucuaauucau

SEQ ID NO: 640869 - RNA, 19 nt, Homo sapiens
  misc_RNA (1)...(19): siRNA sense strand
caguggaugugaagucaga

SEQ ID NO: 640870 - RNA, 19 nt, Homo sapiens
  misc_RNA (1)...(19): siRNA sense strand
ccugcagcauuuauuauug

SEQ ID NO: 640871 - RNA, 19 nt, Homo sapiens
  misc_RNA (1)...(19): siRNA sense strand
aacaagaacuccuagaaaa

SEQ ID NO: 640872 - RNA, 19 nt, Homo sapiens
  misc_RNA (1)...(19): siRNA sense strand
gcagauccacaugaacaaa

SEQ ID NO: 640873 - RNA, 19 nt, Homo sapiens
  misc_RNA (1)...(19): siRNA sense strand
cagcagauccacaugaaca

SEQ ID NO: 640874 - RNA, 19 nt, Homo sapiens
  misc_RNA (1)...(19): siRNA sense strand
gaauuucaccuggcauuag

SEQ ID NO: 640875 - RNA, 19 nt, Homo sapiens
  misc_RNA (1)...(19): siRNA sense strand
gggccaacuggaaguguua

SEQ ID NO: 640876 - RNA, 19 nt, Homo sapiens
  misc_RNA (1)...(19): siRNA sense strand
ggucccaguucaccaaaca

SEQ ID NO: 640877 - RNA, 19 nt, Homo sapiens
  misc_RNA (1)...(19): siRNA sense strand
aaggugcgguccagguuaa

SEQ ID NO: 640878 - RNA, 19 nt, Homo sapiens
  misc_RNA (1)...(19): siRNA sense strand
acacaucauuggaucaaag

SEQ ID NO: 640879 - RNA, 19 nt, Homo sapiens
  misc_RNA (1)...(19): siRNA sense strand
ggcaagaacaggaaguaga

SEQ ID NO: 640880 - RNA, 19 nt, Homo sapiens
  misc_RNA (1)...(19): siRNA sense strand
gaggcaagaacaggaagua

SEQ ID NO: 640881 - RNA, 19 nt, Homo sapiens
  misc_RNA (1)...(19): siRNA sense strand
uuagagguacccacaaauu

SEQ ID NO: 640882 - RNA, 19 nt, Homo sapiens
  misc_RNA (1)...(19): siRNA sense strand
ggaaggauggaaauguugu

SEQ ID NO: 640883 - RNA, 19 nt, Homo sapiens
  misc_RNA (1)...(19): siRNA sense strand
cacaagaugcaaaggauga

SEQ ID NO: 640884 - RNA, 19 nt, Homo sapiens
  misc_RNA (1)...(19): siRNA sense strand
cuuuauaccucuccuucuu

SEQ ID NO: 640885 - RNA, 19 nt, Homo sapiens
  misc_RNA (1)...(19): siRNA sense strand
ugaaccugcuaagucuuua

SEQ ID NO: 640886 - RNA, 19 nt, Homo sapiens
  misc_RNA (1)...(19): siRNA sense strand
ggaugugaagucagaaguu

SEQ ID NO: 640887 - RNA, 19 nt, Homo sapiens
  misc_RNA (1)...(19): siRNA sense strand
uagagguacccacaaauug

SEQ ID NO: 640888 - RNA, 19 nt, Homo sapiens
  misc_RNA (1)...(19): siRNA sense strand
uuauaccucuccuucuuug

SEQ ID NO: 640889 - RNA, 19 nt, Homo sapiens
  misc_RNA (1)...(19): siRNA sense strand
aaagacacuccaacuaaug

SEQ ID NO: 640890 - RNA, 19 nt, Homo sapiens
  misc_RNA (1)...(19): siRNA sense strand
gcaccaggcucagcuucag

SEQ ID NO: 640891 - RNA, 19 nt, Homo sapiens
  misc_RNA (1)...(19): siRNA sense strand
gcaggaauuacuucuuauc

SEQ ID NO: 640892 - RNA, 19 nt, Homo sapiens
  misc_RNA (1)...(19): siRNA sense strand
gaaguguuacugaaaauga

SEQ ID NO: 640893 - RNA, 19 nt, Homo sapiens
  misc_RNA (1)...(19): siRNA sense strand
gcucagauccaggaaaugg

SEQ ID NO: 640894 - RNA, 19 nt, Homo sapiens
  misc_RNA (1)...(19): siRNA sense strand
caacagcaacaccagcaau

SEQ ID NO: 640895 - RNA, 19 nt, Homo sapiens
  misc_RNA (1)...(19): siRNA sense strand
ucucagaggcaaagauaga

SEQ ID NO: 640896 - RNA, 19 nt, Homo sapiens
  misc_RNA (1)...(19): siRNA sense strand
gcagugcuuguguggauga

SEQ ID NO: 640897 - RNA, 19 nt, Homo sapiens
  misc_RNA (1)...(19): siRNA sense strand
cacaugaacaaacugcuuu

SEQ ID NO: 640898 - RNA, 19 nt, Homo sapiens
  misc_RNA (1)...(19): siRNA sense strand
aauuucaccuggcauuaga

SEQ ID NO: 640899 - RNA, 19 nt, Homo sapiens
  misc_RNA (1)...(19): siRNA sense strand
gcaacaaaagagagaauuu

SEQ ID NO: 640900 - RNA, 19 nt, Homo sapiens
  misc_RNA (1)...(19): siRNA sense strand
guugucacuucauucaaga

SEQ ID NO: 640901 - RNA, 19 nt, Homo sapiens
  misc_RNA (1)...(19): siRNA sense strand
aaacagaaaguggcagaga

SEQ ID NO: 640902 - RNA, 19 nt, Homo sapiens
  misc_RNA (1)...(19): siRNA sense strand
ggaaauguugucacuucau

SEQ ID NO: 640903 - RNA, 19 nt, Homo sapiens
  misc_RNA (1)...(19): siRNA sense strand
caaacugcuuucgaaaucu

SEQ ID NO: 640904 - RNA, 19 nt, Homo sapiens
  misc_RNA (1)...(19): siRNA sense strand
ccacaugaacaaacugcuu

SEQ ID NO: 640905 - RNA, 19 nt, Homo sapiens
  misc_RNA (1)...(19): siRNA sense strand
cagcagcagauccacauga

SEQ ID NO: 640906 - RNA, 19 nt, Homo sapiens
  misc_RNA (1)...(19): siRNA sense strand
gaaccugcuaagucuuuau

SEQ ID NO: 640907 - RNA, 19 nt, Homo sapiens
  misc_RNA (1)...(19): siRNA sense strand
ucuccugcagcauuuauua

SEQ ID NO: 640908 - RNA, 19 nt, Homo sapiens
  misc_RNA (1)...(19): siRNA sense strand
gagggaaagccacccaaca

SEQ ID NO: 640909 - RNA, 19 nt, Homo sapiens
  misc_RNA (1)...(19): siRNA sense strand
gaaagacacuccaacuaau

SEQ ID NO: 640910 - RNA, 19 nt, Homo sapiens
  misc_RNA (1)...(19): siRNA sense strand
cagcaggaauuacuucuua

SEQ ID NO: 640911 - RNA, 19 nt, Homo sapiens
  misc_RNA (1)...(19): siRNA sense strand
gaacaaaugcgacagcaaa

SEQ ID NO: 640912 - RNA, 19 nt, Homo sapiens
  misc_RNA (1)...(19): siRNA sense strand
gcaaaugguuucacagcaa

SEQ ID NO: 640913 - RNA, 19 nt, Homo sapiens
  misc_RNA (1)...(19): siRNA sense strand
guacagaaguaaagcagaa

SEQ ID NO: 640914 - RNA, 19 nt, Homo sapiens
  misc_RNA (1)...(19): siRNA sense strand
ggacagaccucaggaugau

SEQ ID NO: 640915 - RNA, 19 nt, Homo sapiens
  misc_RNA (1)...(19): siRNA sense strand
gaacaucuccauccuacaa

SEQ ID NO: 640916 - RNA, 19 nt, Homo sapiens
  misc_RNA (1)...(19): siRNA sense strand
cgaaagacacuccaacuaa

SEQ ID NO: 640917 - RNA, 19 nt, Homo sapiens
  misc_RNA (1)...(19): siRNA sense strand
gaacaaacugcuuucgaaa

SEQ ID NO: 640918 - RNA, 19 nt, Homo sapiens
  misc_RNA (1)...(19): siRNA sense strand
ugaacaaacugcuuucgaa

SEQ ID NO: 640919 - RNA, 19 nt, Homo sapiens
  misc_RNA (1)...(19): siRNA sense strand
caacaagaacuccuagaaa

SEQ ID NO: 640920 - RNA, 19 nt, Homo sapiens
  misc_RNA (1)...(19): siRNA sense strand
gaaacagcaugagaacuug

SEQ ID NO: 640921 - RNA, 19 nt, Homo sapiens
  misc_RNA (1)...(19): siRNA sense strand
caucucaccuuuagaccua

SEQ ID NO: 640922 - RNA, 19 nt, Homo sapiens
  misc_RNA (1)...(19): siRNA sense strand
gcaacaagaacuccuagaa

SEQ ID NO: 640923 - RNA, 19 nt, Homo sapiens
  misc_RNA (1)...(19): siRNA sense strand
gcagaagcuucaagaguuc

SEQ ID NO: 640924 - RNA, 19 nt, Homo sapiens
  misc_RNA (1)...(19): siRNA sense strand
gcggaaggauggaaauguu

SEQ ID NO: 640925 - RNA, 19 nt, Homo sapiens
  misc_RNA (1)...(19): siRNA sense strand
aaagauagaggacgagaaa

SEQ ID NO: 640926 - RNA, 19 nt, Homo sapiens
  misc_RNA (1)...(19): siRNA sense strand
gcucaaugcuucgaauuca

SEQ ID NO: 640927 - RNA, 19 nt, Homo sapiens
  misc_RNA (1)...(19): siRNA sense strand
gaaggugcgguccagguua

SEQ ID NO: 640928 - RNA, 19 nt, Homo sapiens
  misc_RNA (1)...(19): siRNA sense strand
ucacagcaacgcauucuaa

SEQ ID NO: 640929 - RNA, 19 nt, Homo sapiens
  misc_RNA (1)...(19): siRNA sense strand
cauuagagguacccacaaa

SEQ ID NO: 640930 - RNA, 19 nt, Homo sapiens
  misc_RNA (1)...(19): siRNA sense strand
cagcaacgcauucuaauuc

SEQ ID NO: 640931 - RNA, 19 nt, Homo sapiens
  misc_RNA (1)...(19): siRNA sense strand
gagcccaucucaccuuuag

SEQ ID NO: 640932 - RNA, 19 nt, Homo sapiens
  misc_RNA (1)...(19): siRNA sense strand
gaacccagucugcaccuuu

SEQ ID NO: 640933 - RNA, 19 nt, Homo sapiens
  misc_RNA (1)...(19): siRNA sense strand
cgaaaucuauugaacaacu

SEQ ID NO: 640934 - RNA, 19 nt, Homo sapiens
  misc_RNA (1)...(19): siRNA sense strand
aaacugcuuucgaaaucua

SEQ ID NO: 640935 - RNA, 19 nt, Homo sapiens
  misc_RNA (1)...(19): siRNA sense strand
acaaacugcuuucgaaauc

SEQ ID NO: 640936 - RNA, 19 nt, Homo sapiens
  misc_RNA (1)...(19): siRNA sense strand
cgaauucacucaaagaaaa

SEQ ID NO: 640937 - RNA, 19 nt, Homo sapiens
  misc_RNA (1)...(19): siRNA sense strand
uggagaagcagaagcaaua

SEQ ID NO: 640938 - RNA, 19 nt, Homo sapiens
  misc_RNA (1)...(19): siRNA sense strand
gaaagggcaguggcaagua

SEQ ID NO: 640939 - RNA, 19 nt, Homo sapiens
  misc_RNA (1)...(19): siRNA sense strand
gaugugaagucagaaguuc

SEQ ID NO: 640940 - RNA, 19 nt, Homo sapiens
  misc_RNA (1)...(19): siRNA sense strand
guaaaucagcaacgaaaga

SEQ ID NO: 640941 - RNA, 19 nt, Homo sapiens
  misc_RNA (1)...(19): siRNA sense strand
gaguaaaucagcaacgaaa

SEQ ID NO: 640942 - RNA, 19 nt, Homo sapiens
  misc_RNA (1)...(19): siRNA sense strand
gaaaucuauugaacaacug

SEQ ID NO: 640943 - RNA, 19 nt, Homo sapiens
  misc_RNA (1)...(19): siRNA sense strand
ggacagugaugaagaugcu

SEQ ID NO: 640944 - RNA, 19 nt, Homo sapiens
  misc_RNA (1)...(19): siRNA sense strand
agaaacagcaugagaacuu

SEQ ID NO: 640945 - RNA, 19 nt, Homo sapiens
  misc_RNA (1)...(19): siRNA sense strand
caacuggaaguguuacuga

SEQ ID NO: 640946 - RNA, 19 nt, Homo sapiens
  misc_RNA (1)...(19): siRNA sense strand
agcagaagcuucaagaguu

SEQ ID NO: 640947 - RNA, 19 nt, Homo sapiens
  misc_RNA (1)...(19): siRNA sense strand
gcagcuuccuccucucaga

SEQ ID NO: 640948 - RNA, 19 nt, Homo sapiens
  misc_RNA (1)...(19): siRNA sense strand
ccaugaaccugcuaagucu

SEQ ID NO: 640949 - RNA, 19 nt, Homo sapiens
  misc_RNA (1)...(19): siRNA sense strand
ggauggaaauguugucacu

SEQ ID NO: 640950 - RNA, 19 nt, Homo sapiens
  misc_RNA (1)...(19): siRNA sense strand
cuucaagaguuccuacuga

SEQ ID NO: 640951 - RNA, 19 nt, Homo sapiens
  misc_RNA (1)...(19): siRNA sense strand
ugaugaagaugcucagauc

SEQ ID NO: 640952 - RNA, 19 nt, Homo sapiens
  misc_RNA (1)...(19): siRNA sense strand
uggcucagcuggucauuca

SEQ ID NO: 640953 - RNA, 19 nt, Homo sapiens
  misc_RNA (1)...(19): siRNA sense strand
ccucugagcccaacuugaa

SEQ ID NO: 640954 - RNA, 19 nt, Homo sapiens
  misc_RNA (1)...(19): siRNA sense strand
gcaagaacaggaaguagag

SEQ ID NO: 640955 - RNA, 19 nt, Homo sapiens
  misc_RNA (1)...(19): siRNA sense strand
ccacccucauguuacuuua

SEQ ID NO: 640956 - RNA, 19 nt, Homo sapiens
  misc_RNA (1)...(19): siRNA sense strand
gacagaauccucagucagu

SEQ ID NO: 640957 - RNA, 19 nt, Homo sapiens
  misc_RNA (1)...(19): siRNA sense strand
gagaauuucaccuggcauu

SEQ ID NO: 640958 - RNA, 19 nt, Homo sapiens
  misc_RNA (1)...(19): siRNA sense strand
ucuuguagcugguggaguu

SEQ ID NO: 640959 - RNA, 19 nt, Homo sapiens
  misc_RNA (1)...(19): siRNA sense strand
gagcacaagaugcaaagga

SEQ ID NO: 640960 - RNA, 19 nt, Homo sapiens
  misc_RNA (1)...(19): siRNA sense strand
cugcagcauuuauuauuga

SEQ ID NO: 640961 - RNA, 19 nt, Homo sapiens
  misc_RNA (1)...(19): siRNA sense strand
caacgcauucuaauucaug

SEQ ID NO: 640962 - RNA, 19 nt, Homo sapiens
  misc_RNA (1)...(19): siRNA sense strand
gaaaaugagacuucgguuu

SEQ ID NO: 640963 - RNA, 19 nt, Homo sapiens
  misc_RNA (1)...(19): siRNA sense strand
acagaauccucagucagua

SEQ ID NO: 640964 - RNA, 19 nt, Homo sapiens
  misc_RNA (1)...(19): siRNA sense strand
gcagaggcaagaacaggaa

SEQ ID NO: 640965 - RNA, 19 nt, Homo sapiens
  misc_RNA (1)...(19): siRNA sense strand
gcaacaccagcaauucuug

SEQ ID NO: 640966 - RNA, 19 nt, Homo sapiens
  misc_RNA (1)...(19): siRNA sense strand
gcauucuaauucaugaaga

SEQ ID NO: 640967 - RNA, 19 nt, Homo sapiens
  misc_RNA (1)...(19): siRNA sense strand
agagaggcaucgcagagaa

SEQ ID NO: 640968 - RNA, 19 nt, Homo sapiens
  misc_RNA (1)...(19): siRNA sense strand
gcaacgcauucuaauucau

SEQ ID NO: 640969 - RNA, 19 nt, Homo sapiens
  misc_RNA (1)...(19): siRNA sense strand
caguggaugugaagucaga

SEQ ID NO: 640970 - RNA, 19 nt, Homo sapiens
  misc_RNA (1)...(19): siRNA sense strand
ccugcagcauuuauuauug

SEQ ID NO: 640971 - RNA, 19 nt, Homo sapiens
  misc_RNA (1)...(19): siRNA sense strand
aacaagaacuccuagaaaa

SEQ ID NO: 640972 - RNA, 19 nt, Homo sapiens
  misc_RNA (1)...(19): siRNA sense strand
gcagauccacaugaacaaa

SEQ ID NO: 640973 - RNA, 19 nt, Homo sapiens
  misc_RNA (1)...(19): siRNA sense strand
cagcagauccacaugaaca

SEQ ID NO: 640974 - RNA, 19 nt, Homo sapiens
  misc_RNA (1)...(19): siRNA sense strand
gaauuucaccuggcauuag

SEQ ID NO: 640975 - RNA, 19 nt, Homo sapiens
  misc_RNA (1)...(19): siRNA sense strand
gggccaacuggaaguguua

SEQ ID NO: 640976 - RNA, 19 nt, Homo sapiens
  misc_RNA (1)...(19): siRNA sense strand
ggucccaguucaccaaaca

SEQ ID NO: 640977 - RNA, 19 nt, Homo sapiens
  misc_RNA (1)...(19): siRNA sense strand
aaggugcgguccagguuaa

SEQ ID NO: 640978 - RNA, 19 nt, Homo sapiens
  misc_RNA (1)...(19): siRNA sense strand
acacaucauuggaucaaag

SEQ ID NO: 640979 - RNA, 19 nt, Homo sapiens
  misc_RNA (1)...(19): siRNA sense strand
ggcaagaacaggaaguaga

SEQ ID NO: 640980 - RNA, 19 nt, Homo sapiens
  misc_RNA (1)...(19): siRNA sense strand
gaggcaagaacaggaagua

SEQ ID NO: 640981 - RNA, 19 nt, Homo sapiens
  misc_RNA (1)...(19): siRNA sense strand
uuagagguacccacaaauu

SEQ ID NO: 640982 - RNA, 19 nt, Homo sapiens
  misc_RNA (1)...(19): siRNA sense strand
ggaaggauggaaauguugu

SEQ ID NO: 640983 - RNA, 19 nt, Homo sapiens
  misc_RNA (1)...(19): siRNA sense strand
cacaagaugcaaaggauga

SEQ ID NO: 640984 - RNA, 19 nt, Homo sapiens
  misc_RNA (1)...(19): siRNA sense strand
cuuuauaccucuccuucuu

SEQ ID NO: 640985 - RNA, 19 nt, Homo sapiens
  misc_RNA (1)...(19): siRNA sense strand
ugaaccugcuaagucuuua

SEQ ID NO: 640986 - RNA, 19 nt, Homo sapiens
  misc_RNA (1)...(19): siRNA sense strand
ggaugugaagucagaaguu

SEQ ID NO: 640987 - RNA, 19 nt, Homo sapiens
  misc_RNA (1)...(19): siRNA sense strand
uagagguacccacaaauug

SEQ ID NO: 640988 - RNA, 19 nt, Homo sapiens
  misc_RNA (1)...(19): siRNA sense strand
uuauaccucuccuucuuug

SEQ ID NO: 640989 - RNA, 19 nt, Homo sapiens
  misc_RNA (1)...(19): siRNA sense strand
aaagacacuccaacuaaug

SEQ ID NO: 640990 - RNA, 19 nt, Homo sapiens
  misc_RNA (1)...(19): siRNA sense strand
gcaccaggcucagcuucag

SEQ ID NO: 640991 - RNA, 19 nt, Homo sapiens
  misc_RNA (1)...(19): siRNA sense strand
gcaggaauuacuucuuauc

SEQ ID NO: 640992 - RNA, 19 nt, Homo sapiens
  misc_RNA (1)...(19): siRNA sense strand
gaaguguuacugaaaauga

SEQ ID NO: 640993 - RNA, 19 nt, Homo sapiens
  misc_RNA (1)...(19): siRNA sense strand
gcucagauccaggaaaugg

SEQ ID NO: 640994 - RNA, 19 nt, Homo sapiens
  misc_RNA (1)...(19): siRNA sense strand
caacagcaacaccagcaau

SEQ ID NO: 640995 - RNA, 19 nt, Homo sapiens
  misc_RNA (1)...(19): siRNA sense strand
ucucagaggcaaagauaga

SEQ ID NO: 640996 - RNA, 19 nt, Homo sapiens
  misc_RNA (1)...(19): siRNA sense strand
gcagugcuuguguggauga

SEQ ID NO: 640997 - RNA, 19 nt, Homo sapiens
  misc_RNA (1)...(19): siRNA sense strand
cacaugaacaaacugcuuu

SEQ ID NO: 640998 - RNA, 19 nt, Homo sapiens
  misc_RNA (1)...(19): siRNA sense strand
aauuucaccuggcauuaga

SEQ ID NO: 640999 - RNA, 19 nt, Homo sapiens
  misc_RNA (1)...(19): siRNA sense strand
gcaacaaaagagagaauuu

SEQ ID NO: 641000 - RNA, 19 nt, Homo sapiens
  misc_RNA (1)...(19): siRNA sense strand
guugucacuucauucaaga

SEQ ID NO: 641001 - RNA, 19 nt, Homo sapiens
  misc_RNA (1)...(19): siRNA sense strand
aaacagaaaguggcagaga

SEQ ID NO: 641002 - RNA, 19 nt, Homo sapiens
  misc_RNA (1)...(19): siRNA sense strand
ggaaauguugucacuucau

SEQ ID NO: 641003 - RNA, 19 nt, Homo sapiens
  misc_RNA (1)...(19): siRNA sense strand
caaacugcuuucgaaaucu

SEQ ID NO: 641004 - RNA, 19 nt, Homo sapiens
  misc_RNA (1)...(19): siRNA sense strand
ccacaugaacaaacugcuu

SEQ ID NO: 641005 - RNA, 19 nt, Homo sapiens
  misc_RNA (1)...(19): siRNA sense strand
cagcagcagauccacauga

SEQ ID NO: 641006 - RNA, 19 nt, Homo sapiens
  misc_RNA (1)...(19): siRNA sense strand
gaaccugcuaagucuuuau

SEQ ID NO: 641007 - RNA, 19 nt, Homo sapiens
  misc_RNA (1)...(19): siRNA sense strand
ucuccugcagcauuuauua

SEQ ID NO: 641008 - RNA, 19 nt, Homo sapiens
  misc_RNA (1)...(19): siRNA sense strand
gagggaaagccacccaaca

SEQ ID NO: 641009 - RNA, 19 nt, Homo sapiens
  misc_RNA (1)...(19): siRNA sense strand
gaaagacacuccaacuaau

SEQ ID NO: 641010 - RNA, 19 nt, Homo sapiens
  misc_RNA (1)...(19): siRNA sense strand
cagcaggaauuacuucuua

SEQ ID NO: 641011 - RNA, 19 nt, Homo sapiens
  misc_RNA (1)...(19): siRNA sense strand
gaacaaaugcgacagcaaa

SEQ ID NO: 641012 - RNA, 19 nt, Homo sapiens
  misc_RNA (1)...(19): siRNA sense strand
gcaaaugguuucacagcaa

SEQ ID NO: 641013 - RNA, 19 nt, Homo sapiens
  misc_RNA (1)...(19): siRNA sense strand
guacagaaguaaagcagaa

SEQ ID NO: 641014 - RNA, 19 nt, Homo sapiens
  misc_RNA (1)...(19): siRNA sense strand
ggacagaccucaggaugau

SEQ ID NO: 641015 - RNA, 19 nt, Homo sapiens
  misc_RNA (1)...(19): siRNA sense strand
gaacaucuccauccuacaa

SEQ ID NO: 641016 - RNA, 19 nt, Homo sapiens
  misc_RNA (1)...(19): siRNA sense strand
cgaaagacacuccaacuaa

SEQ ID NO: 641017 - RNA, 19 nt, Homo sapiens
  misc_RNA (1)...(19): siRNA sense strand
gaacaaacugcuuucgaaa

SEQ ID NO: 641018 - RNA, 19 nt, Homo sapiens
  misc_RNA (1)...(19): siRNA sense strand
ugaacaaacugcuuucgaa

SEQ ID NO: 641019 - RNA, 19 nt, Homo sapiens
  misc_RNA (1)...(19): siRNA sense strand
caacaagaacuccuagaaa

SEQ ID NO: 641020 - RNA, 19 nt, Homo sapiens
  misc_RNA (1)...(19): siRNA sense strand
gaaacagcaugagaacuug

SEQ ID NO: 641021 - RNA, 19 nt, Homo sapiens
  misc_RNA (1)...(19): siRNA sense strand
caucucaccuuuagaccua

SEQ ID NO: 641022 - RNA, 19 nt, Homo sapiens
  misc_RNA (1)...(19): siRNA sense strand
gcaacaagaacuccuagaa

SEQ ID NO: 641023 - RNA, 19 nt, Homo sapiens
  misc_RNA (1)...(19): siRNA sense strand
gcagaagcuucaagaguuc

SEQ ID NO: 641024 - RNA, 19 nt, Homo sapiens
  misc_RNA (1)...(19): siRNA sense strand
gcggaaggauggaaauguu

SEQ ID NO: 641025 - RNA, 19 nt, Homo sapiens
  misc_RNA (1)...(19): siRNA sense strand
aaagauagaggacgagaaa

SEQ ID NO: 641026 - RNA, 19 nt, Homo sapiens
  misc_RNA (1)...(19): siRNA sense strand
gcucaaugcuucgaauuca

SEQ ID NO: 641027 - RNA, 19 nt, Homo sapiens
  misc_RNA (1)...(19): siRNA sense strand
gaaggugcgguccagguua

SEQ ID NO: 641028 - RNA, 19 nt, Homo sapiens
  misc_RNA (1)...(19): siRNA sense strand
ucacagcaacgcauucuaa

SEQ ID NO: 641029 - RNA, 19 nt, Homo sapiens
  misc_RNA (1)...(19): siRNA sense strand
cauuagagguacccacaaa

SEQ ID NO: 641030 - RNA, 19 nt, Homo sapiens
  misc_RNA (1)...(19): siRNA sense strand
cagcaacgcauucuaauuc

SEQ ID NO: 641031 - RNA, 19 nt, Homo sapiens
  misc_RNA (1)...(19): siRNA sense strand
gagcccaucucaccuuuag

SEQ ID NO: 641032 - RNA, 19 nt, Homo sapiens
  misc_RNA (1)...(19): siRNA sense strand
gaacccagucugcaccuuu

SEQ ID NO: 641033 - RNA, 19 nt, Homo sapiens
  misc_RNA (1)...(19): siRNA sense strand
cgaaaucuauugaacaacu

SEQ ID NO: 641034 - RNA, 19 nt, Homo sapiens
  misc_RNA (1)...(19): siRNA sense strand
aaacugcuuucgaaaucua

SEQ ID NO: 641035 - RNA, 19 nt, Homo sapiens
  misc_RNA (1)...(19): siRNA sense strand
acaaacugcuuucgaaauc

SEQ ID NO: 641036 - RNA, 19 nt, Homo sapiens
  misc_RNA (1)...(19): siRNA sense strand
cgaauucacucaaagaaaa

SEQ ID NO: 641037 - RNA, 19 nt, Homo sapiens
  misc_RNA (1)...(19): siRNA sense strand
uggagaagcagaagcaaua

SEQ ID NO: 641038 - RNA, 19 nt, Homo sapiens
  misc_RNA (1)...(19): siRNA sense strand
gaaagggcaguggcaagua

SEQ ID NO: 641039 - RNA, 19 nt, Homo sapiens
  misc_RNA (1)...(19): siRNA sense strand
gaugugaagucagaaguuc

SEQ ID NO: 641040 - RNA, 19 nt, Homo sapiens
  misc_RNA (1)...(19): siRNA sense strand
guaaaucagcaacgaaaga

SEQ ID NO: 641041 - RNA, 19 nt, Homo sapiens
  misc_RNA (1)...(19): siRNA sense strand
gaguaaaucagcaacgaaa

SEQ ID NO: 641042 - RNA, 19 nt, Homo sapiens
  misc_RNA (1)...(19): siRNA sense strand
gaaaucuauugaacaacug

SEQ ID NO: 641043 - RNA, 19 nt, Homo sapiens
  misc_RNA (1)...(19): siRNA sense strand
ggacagugaugaagaugcu

SEQ ID NO: 641044 - RNA, 19 nt, Homo sapiens
  misc_RNA (1)...(19): siRNA sense strand
agaaacagcaugagaacuu

SEQ ID NO: 641045 - RNA, 19 nt, Homo sapiens
  misc_RNA (1)...(19): siRNA sense strand
caacuggaaguguuacuga

SEQ ID NO: 641046 - RNA, 19 nt, Homo sapiens
  misc_RNA (1)...(19): siRNA sense strand
agcagaagcuucaagaguu

SEQ ID NO: 641047 - RNA, 19 nt, Homo sapiens
  misc_RNA (1)...(19): siRNA sense strand
gcagcuuccuccucucaga

SEQ ID NO: 641048 - RNA, 19 nt, Homo sapiens
  misc_RNA (1)...(19): siRNA sense strand
ccaugaaccugcuaagucu

SEQ ID NO: 641049 - RNA, 19 nt, Homo sapiens
  misc_RNA (1)...(19): siRNA sense strand
ggauggaaauguugucacu

SEQ ID NO: 641050 - RNA, 19 nt, Homo sapiens
  misc_RNA (1)...(19): siRNA sense strand
cuucaagaguuccuacuga

SEQ ID NO: 641051 - RNA, 19 nt, Homo sapiens
  misc_RNA (1)...(19): siRNA sense strand
ugaugaagaugcucagauc

SEQ ID NO: 641052 - RNA, 19 nt, Homo sapiens
  misc_RNA (1)...(19): siRNA sense strand
uggcucagcuggucauuca

SEQ ID NO: 641053 - RNA, 19 nt, Homo sapiens
  misc_RNA (1)...(19): siRNA sense strand
ccucugagcccaacuugaa

SEQ ID NO: 641054 - RNA, 19 nt, Homo sapiens
  misc_RNA (1)...(19): siRNA sense strand
gcaagaacaggaaguagag

SEQ ID NO: 641055 - RNA, 19 nt, Homo sapiens
  misc_RNA (1)...(19): siRNA sense strand
ccacccucauguuacuuua

SEQ ID NO: 641056 - RNA, 19 nt, Homo sapiens
  misc_RNA (1)...(19): siRNA sense strand
gacagaauccucagucagu

SEQ ID NO: 641057 - RNA, 19 nt, Homo sapiens
  misc_RNA (1)...(19): siRNA sense strand
gagaauuucaccuggcauu

SEQ ID NO: 641058 - RNA, 19 nt, Homo sapiens
  misc_RNA (1)...(19): siRNA sense strand
ucuuguagcugguggaguu

SEQ ID NO: 641059 - RNA, 19 nt, Homo sapiens
  misc_RNA (1)...(19): siRNA sense strand
gagcacaagaugcaaagga

SEQ ID NO: 641060 - RNA, 19 nt, Homo sapiens
  misc_RNA (1)...(19): siRNA sense strand
cugcagcauuuauuauuga

SEQ ID NO: 641061 - RNA, 19 nt, Homo sapiens
  misc_RNA (1)...(19): siRNA sense strand
caacgcauucuaauucaug

SEQ ID NO: 641062 - RNA, 19 nt, Homo sapiens
  misc_RNA (1)...(19): siRNA sense strand
gaaaaugagacuucgguuu

SEQ ID NO: 641063 - RNA, 19 nt, Homo sapiens
  misc_RNA (1)...(19): siRNA sense strand
acagaauccucagucagua

SEQ ID NO: 641064 - RNA, 19 nt, Homo sapiens
  misc_RNA (1)...(19): siRNA sense strand
gcagaggcaagaacaggaa

SEQ ID NO: 641065 - RNA, 19 nt, Homo sapiens
  misc_RNA (1)...(19): siRNA sense strand
gcaacaccagcaauucuug

SEQ ID NO: 641066 - RNA, 19 nt, Homo sapiens
  misc_RNA (1)...(19): siRNA sense strand
gcauucuaauucaugaaga

SEQ ID NO: 641067 - RNA, 19 nt, Homo sapiens
  misc_RNA (1)...(19): siRNA sense strand
agagaggcaucgcagagaa

SEQ ID NO: 641068 - RNA, 19 nt, Homo sapiens
  misc_RNA (1)...(19): siRNA sense strand
gcaacgcauucuaauucau

SEQ ID NO: 641069 - RNA, 19 nt, Homo sapiens
  misc_RNA (1)...(19): siRNA sense strand
caguggaugugaagucaga

SEQ ID NO: 641070 - RNA, 19 nt, Homo sapiens
  misc_RNA (1)...(19): siRNA sense strand
ccugcagcauuuauuauug

SEQ ID NO: 641071 - RNA, 19 nt, Homo sapiens
  misc_RNA (1)...(19): siRNA sense strand
aacaagaacuccuagaaaa

SEQ ID NO: 641072 - RNA, 19 nt, Homo sapiens
  misc_RNA (1)...(19): siRNA sense strand
gcagauccacaugaacaaa

SEQ ID NO: 641073 - RNA, 19 nt, Homo sapiens
  misc_RNA (1)...(19): siRNA sense strand
cagcagauccacaugaaca

SEQ ID NO: 641074 - RNA, 19 nt, Homo sapiens
  misc_RNA (1)...(19): siRNA sense strand
gaauuucaccuggcauuag

SEQ ID NO: 641075 - RNA, 19 nt, Homo sapiens
  misc_RNA (1)...(19): siRNA sense strand
gggccaacuggaaguguua

SEQ ID NO: 641076 - RNA, 19 nt, Homo sapiens
  misc_RNA (1)...(19): siRNA sense strand
ggucccaguucaccaaaca

SEQ ID NO: 641077 - RNA, 19 nt, Homo sapiens
  misc_RNA (1)...(19): siRNA sense strand
aaggugcgguccagguuaa

SEQ ID NO: 641078 - RNA, 19 nt, Homo sapiens
  misc_RNA (1)...(19): siRNA sense strand
acacaucauuggaucaaag

SEQ ID NO: 641079 - RNA, 19 nt, Homo sapiens
  misc_RNA (1)...(19): siRNA sense strand
ggcaagaacaggaaguaga

SEQ ID NO: 641080 - RNA, 19 nt, Homo sapiens
  misc_RNA (1)...(19): siRNA sense strand
gaggcaagaacaggaagua

SEQ ID NO: 641081 - RNA, 19 nt, Homo sapiens
  misc_RNA (1)...(19): siRNA sense strand
uuagagguacccacaaauu

SEQ ID NO: 641082 - RNA, 19 nt, Homo sapiens
  misc_RNA (1)...(19): siRNA sense strand
ggaaggauggaaauguugu

SEQ ID NO: 641083 - RNA, 19 nt, Homo sapiens
  misc_RNA (1)...(19): siRNA sense strand
cacaagaugcaaaggauga

SEQ ID NO: 641084 - RNA, 19 nt, Homo sapiens
  misc_RNA (1)...(19): siRNA sense strand
cuuuauaccucuccuucuu

SEQ ID NO: 641085 - RNA, 19 nt, Homo sapiens
  misc_RNA (1)...(19): siRNA sense strand
ugaaccugcuaagucuuua

SEQ ID NO: 641086 - RNA, 19 nt, Homo sapiens
  misc_RNA (1)...(19): siRNA sense strand
ggaugugaagucagaaguu

SEQ ID NO: 641087 - RNA, 19 nt, Homo sapiens
  misc_RNA (1)...(19): siRNA sense strand
uagagguacccacaaauug

SEQ ID NO: 641088 - RNA, 19 nt, Homo sapiens
  misc_RNA (1)...(19): siRNA sense strand
uuauaccucuccuucuuug

SEQ ID NO: 641089 - RNA, 19 nt, Homo sapiens
  misc_RNA (1)...(19): siRNA sense strand
aaagacacuccaacuaaug

SEQ ID NO: 641090 - RNA, 19 nt, Homo sapiens
  misc_RNA (1)...(19): siRNA sense strand
gcaccaggcucagcuucag

SEQ ID NO: 641091 - RNA, 19 nt, Homo sapiens
  misc_RNA (1)...(19): siRNA sense strand
gcaggaauuacuucuuauc

SEQ ID NO: 641092 - RNA, 19 nt, Homo sapiens
  misc_RNA (1)...(19): siRNA sense strand
gaaguguuacugaaaauga

SEQ ID NO: 641093 - RNA, 19 nt, Homo sapiens
  misc_RNA (1)...(19): siRNA sense strand
gcucagauccaggaaaugg

SEQ ID NO: 641094 - RNA, 19 nt, Homo sapiens
  misc_RNA (1)...(19): siRNA sense strand
caacagcaacaccagcaau

SEQ ID NO: 641095 - RNA, 19 nt, Homo sapiens
  misc_RNA (1)...(19): siRNA sense strand
ucucagaggcaaagauaga

SEQ ID NO: 641096 - RNA, 19 nt, Homo sapiens
  misc_RNA (1)...(19): siRNA sense strand
gcagugcuuguguggauga

SEQ ID NO: 641097 - RNA, 19 nt, Homo sapiens
  misc_RNA (1)...(19): siRNA sense strand
cacaugaacaaacugcuuu

SEQ ID NO: 641098 - RNA, 19 nt, Homo sapiens
  misc_RNA (1)...(19): siRNA sense strand
aauuucaccuggcauuaga

SEQ ID NO: 641099 - RNA, 19 nt, Homo sapiens
  misc_RNA (1)...(19): siRNA sense strand
gcaacaaaagagagaauuu

SEQ ID NO: 641100 - RNA, 19 nt, Homo sapiens
  misc_RNA (1)...(19): siRNA sense strand
guugucacuucauucaaga

SEQ ID NO: 641101 - RNA, 19 nt, Homo sapiens
  misc_RNA (1)...(19): siRNA sense strand
aaacagaaaguggcagaga

SEQ ID NO: 641102 - RNA, 19 nt, Homo sapiens
  misc_RNA (1)...(19): siRNA sense strand
ggaaauguugucacuucau

SEQ ID NO: 641103 - RNA, 19 nt, Homo sapiens
  misc_RNA (1)...(19): siRNA sense strand
caaacugcuuucgaaaucu

SEQ ID NO: 641104 - RNA, 19 nt, Homo sapiens
  misc_RNA (1)...(19): siRNA sense strand
ccacaugaacaaacugcuu

SEQ ID NO: 641105 - RNA, 19 nt, Homo sapiens
  misc_RNA (1)...(19): siRNA sense strand
cagcagcagauccacauga

SEQ ID NO: 641106 - RNA, 19 nt, Homo sapiens
  misc_RNA (1)...(19): siRNA sense strand
gaaccugcuaagucuuuau

SEQ ID NO: 641107 - RNA, 19 nt, Homo sapiens
  misc_RNA (1)...(19): siRNA sense strand
ucuccugcagcauuuauua

SEQ ID NO: 641108 - RNA, 19 nt, Homo sapiens
  misc_RNA (1)...(19): siRNA sense strand
gagggaaagccacccaaca

SEQ ID NO: 641109 - RNA, 19 nt, Homo sapiens
  misc_RNA (1)...(19): siRNA sense strand
gaaagacacuccaacuaau

SEQ ID NO: 641110 - RNA, 19 nt, Homo sapiens
  misc_RNA (1)...(19): siRNA sense strand
cagcaggaauuacuucuua

SEQ ID NO: 641111 - RNA, 19 nt, Homo sapiens
  misc_RNA (1)...(19): siRNA sense strand
gaacaaaugcgacagcaaa

SEQ ID NO: 641112 - RNA, 19 nt, Homo sapiens
  misc_RNA (1)...(19): siRNA sense strand
gcaaaugguuucacagcaa

SEQ ID NO: 641113 - RNA, 19 nt, Homo sapiens
  misc_RNA (1)...(19): siRNA sense strand
guacagaaguaaagcagaa

SEQ ID NO: 641114 - RNA, 19 nt, Homo sapiens
  misc_RNA (1)...(19): siRNA sense strand
ggacagaccucaggaugau

SEQ ID NO: 641115 - RNA, 19 nt, Homo sapiens
  misc_RNA (1)...(19): siRNA sense strand
gaacaucuccauccuacaa

SEQ ID NO: 641116 - RNA, 19 nt, Homo sapiens
  misc_RNA (1)...(19): siRNA sense strand
cgaaagacacuccaacuaa

SEQ ID NO: 641117 - RNA, 19 nt, Homo sapiens
  misc_RNA (1)...(19): siRNA sense strand
gaacaaacugcuuucgaaa

SEQ ID NO: 641118 - RNA, 19 nt, Homo sapiens
  misc_RNA (1)...(19): siRNA sense strand
ugaacaaacugcuuucgaa

SEQ ID NO: 641119 - RNA, 19 nt, Homo sapiens
  misc_RNA (1)...(19): siRNA sense strand
caacaagaacuccuagaaa

SEQ ID NO: 641120 - RNA, 19 nt, Homo sapiens
  misc_RNA (1)...(19): siRNA sense strand
gaaacagcaugagaacuug

SEQ ID NO: 641121 - RNA, 19 nt, Homo sapiens
  misc_RNA (1)...(19): siRNA sense strand
caucucaccuuuagaccua

SEQ ID NO: 641122 - RNA, 19 nt, Homo sapiens
  misc_RNA (1)...(19): siRNA sense strand
gcaacaagaacuccuagaa

SEQ ID NO: 641123 - RNA, 19 nt, Homo sapiens
  misc_RNA (1)...(19): siRNA sense strand
gcagaagcuucaagaguuc

SEQ ID NO: 641124 - RNA, 19 nt, Homo sapiens
  misc_RNA (1)...(19): siRNA sense strand
gcggaaggauggaaauguu

SEQ ID NO: 641125 - RNA, 19 nt, Homo sapiens
  misc_RNA (1)...(19): siRNA sense strand
aaagauagaggacgagaaa

SEQ ID NO: 641126 - RNA, 19 nt, Homo sapiens
  misc_RNA (1)...(19): siRNA sense strand
gcucaaugcuucgaauuca

SEQ ID NO: 641127 - RNA, 19 nt, Homo sapiens
  misc_RNA (1)...(19): siRNA sense strand
gaaggugcgguccagguua

SEQ ID NO: 641128 - RNA, 19 nt, Homo sapiens
  misc_RNA (1)...(19): siRNA sense strand
ucacagcaacgcauucuaa

SEQ ID NO: 641129 - RNA, 19 nt, Homo sapiens
  misc_RNA (1)...(19): siRNA sense strand
cauuagagguacccacaaa

SEQ ID NO: 641130 - RNA, 19 nt, Homo sapiens
  misc_RNA (1)...(19): siRNA sense strand
cagcaacgcauucuaauuc

SEQ ID NO: 641131 - RNA, 19 nt, Homo sapiens
  misc_RNA (1)...(19): siRNA sense strand
gagcccaucucaccuuuag

SEQ ID NO: 641132 - RNA, 19 nt, Homo sapiens
  misc_RNA (1)...(19): siRNA sense strand
gaacccagucugcaccuuu

SEQ ID NO: 641133 - RNA, 19 nt, Homo sapiens
  misc_RNA (1)...(19): siRNA sense strand
cgaaaucuauugaacaacu

SEQ ID NO: 641134 - RNA, 19 nt, Homo sapiens
  misc_RNA (1)...(19): siRNA sense strand
aaacugcuuucgaaaucua

SEQ ID NO: 641135 - RNA, 19 nt, Homo sapiens
  misc_RNA (1)...(19): siRNA sense strand
acaaacugcuuucgaaauc

SEQ ID NO: 641136 - RNA, 19 nt, Homo sapiens
  misc_RNA (1)...(19): siRNA sense strand
cgaauucacucaaagaaaa

SEQ ID NO: 641137 - RNA, 19 nt, Homo sapiens
  misc_RNA (1)...(19): siRNA sense strand
uggagaagcagaagcaaua

SEQ ID NO: 641138 - RNA, 19 nt, Homo sapiens
  misc_RNA (1)...(19): siRNA sense strand
gaaagggcaguggcaagua

SEQ ID NO: 641139 - RNA, 19 nt, Homo sapiens
  misc_RNA (1)...(19): siRNA sense strand
gaugugaagucagaaguuc

SEQ ID NO: 641140 - RNA, 19 nt, Homo sapiens
  misc_RNA (1)...(19): siRNA sense strand
guaaaucagcaacgaaaga

SEQ ID NO: 641141 - RNA, 19 nt, Homo sapiens
  misc_RNA (1)...(19): siRNA sense strand
gaguaaaucagcaacgaaa

SEQ ID NO: 641142 - RNA, 19 nt, Homo sapiens
  misc_RNA (1)...(19): siRNA sense strand
gaaaucuauugaacaacug

SEQ ID NO: 641143 - RNA, 19 nt, Homo sapiens
  misc_RNA (1)...(19): siRNA sense strand
ggacagugaugaagaugcu

SEQ ID NO: 641144 - RNA, 19 nt, Homo sapiens
  misc_RNA (1)...(19): siRNA sense strand
agaaacagcaugagaacuu

SEQ ID NO: 641145 - RNA, 19 nt, Homo sapiens
  misc_RNA (1)...(19): siRNA sense strand
caacuggaaguguuacuga

SEQ ID NO: 641146 - RNA, 19 nt, Homo sapiens
  misc_RNA (1)...(19): siRNA sense strand
agcagaagcuucaagaguu

SEQ ID NO: 641147 - RNA, 19 nt, Homo sapiens
  misc_RNA (1)...(19): siRNA sense strand
gcagcuuccuccucucaga

SEQ ID NO: 641148 - RNA, 19 nt, Homo sapiens
  misc_RNA (1)...(19): siRNA sense strand
ccaugaaccugcuaagucu

SEQ ID NO: 641149 - RNA, 19 nt, Homo sapiens
  misc_RNA (1)...(19): siRNA sense strand
ggauggaaauguugucacu

SEQ ID NO: 641150 - RNA, 19 nt, Homo sapiens
  misc_RNA (1)...(19): siRNA sense strand
cuucaagaguuccuacuga

SEQ ID NO: 641151 - RNA, 19 nt, Homo sapiens
  misc_RNA (1)...(19): siRNA sense strand
ugaugaagaugcucagauc

SEQ ID NO: 641152 - RNA, 19 nt, Homo sapiens
  misc_RNA (1)...(19): siRNA sense strand
uggcucagcuggucauuca

SEQ ID NO: 641153 - RNA, 19 nt, Homo sapiens
  misc_RNA (1)...(19): siRNA sense strand
ccucugagcccaacuugaa

SEQ ID NO: 641154 - RNA, 19 nt, Homo sapiens
  misc_RNA (1)...(19): siRNA sense strand
gcaagaacaggaaguagag

SEQ ID NO: 641155 - RNA, 19 nt, Homo sapiens
  misc_RNA (1)...(19): siRNA sense strand
ccacccucauguuacuuua

SEQ ID NO: 641156 - RNA, 19 nt, Homo sapiens
  misc_RNA (1)...(19): siRNA sense strand
gacagaauccucagucagu

SEQ ID NO: 641157 - RNA, 19 nt, Homo sapiens
  misc_RNA (1)...(19): siRNA sense strand
gagaauuucaccuggcauu

SEQ ID NO: 641158 - RNA, 19 nt, Homo sapiens
  misc_RNA (1)...(19): siRNA sense strand
ucuuguagcugguggaguu

SEQ ID NO: 641159 - RNA, 19 nt, Homo sapiens
  misc_RNA (1)...(19): siRNA sense strand
gagcacaagaugcaaagga

SEQ ID NO: 641160 - RNA, 19 nt, Homo sapiens
  misc_RNA (1)...(19): siRNA sense strand
cugcagcauuuauuauuga

SEQ ID NO: 641161 - RNA, 19 nt, Homo sapiens
  misc_RNA (1)...(19): siRNA sense strand
caacgcauucuaauucaug

SEQ ID NO: 641162 - RNA, 19 nt, Homo sapiens
  misc_RNA (1)...(19): siRNA sense strand
gaaaaugagacuucgguuu

SEQ ID NO: 641163 - RNA, 19 nt, Homo sapiens
  misc_RNA (1)...(19): siRNA sense strand
acagaauccucagucagua

SEQ ID NO: 641164 - RNA, 19 nt, Homo sapiens
  misc_RNA (1)...(19): siRNA sense strand
gcagaggcaagaacaggaa

SEQ ID NO: 641165 - RNA, 19 nt, Homo sapiens
  misc_RNA (1)...(19): siRNA sense strand
gcaacaccagcaauucuug

SEQ ID NO: 641166 - RNA, 19 nt, Homo sapiens
  misc_RNA (1)...(19): siRNA sense strand
gcauucuaauucaugaaga

SEQ ID NO: 641167 - RNA, 19 nt, Homo sapiens
  misc_RNA (1)...(19): siRNA sense strand
agagaggcaucgcagagaa

SEQ ID NO: 641168 - RNA, 19 nt, Homo sapiens
  misc_RNA (1)...(19): siRNA sense strand
gcaacgcauucuaauucau

SEQ ID NO: 641169 - RNA, 19 nt, Homo sapiens
  misc_RNA (1)...(19): siRNA sense strand
caguggaugugaagucaga

SEQ ID NO: 641170 - RNA, 19 nt, Homo sapiens
  misc_RNA (1)...(19): siRNA sense strand
ccugcagcauuuauuauug

SEQ ID NO: 641171 - RNA, 19 nt, Homo sapiens
  misc_RNA (1)...(19): siRNA sense strand
aacaagaacuccuagaaaa

SEQ ID NO: 641172 - RNA, 19 nt, Homo sapiens
  misc_RNA (1)...(19): siRNA sense strand
gcagauccacaugaacaaa

SEQ ID NO: 641173 - RNA, 19 nt, Homo sapiens
  misc_RNA (1)...(19): siRNA sense strand
cagcagauccacaugaaca

SEQ ID NO: 641174 - RNA, 19 nt, Homo sapiens
  misc_RNA (1)...(19): siRNA sense strand
gaauuucaccuggcauuag

SEQ ID NO: 641175 - RNA, 19 nt, Homo sapiens
  misc_RNA (1)...(19): siRNA sense strand
gggccaacuggaaguguua

SEQ ID NO: 641176 - RNA, 19 nt, Homo sapiens
  misc_RNA (1)...(19): siRNA sense strand
ggucccaguucaccaaaca

SEQ ID NO: 641177 - RNA, 19 nt, Homo sapiens
  misc_RNA (1)...(19): siRNA sense strand
aaggugcgguccagguuaa

SEQ ID NO: 641178 - RNA, 19 nt, Homo sapiens
  misc_RNA (1)...(19): siRNA sense strand
acacaucauuggaucaaag

SEQ ID NO: 641179 - RNA, 19 nt, Homo sapiens
  misc_RNA (1)...(19): siRNA sense strand
ggcaagaacaggaaguaga

SEQ ID NO: 641180 - RNA, 19 nt, Homo sapiens
  misc_RNA (1)...(19): siRNA sense strand
gaggcaagaacaggaagua

SEQ ID NO: 641181 - RNA, 19 nt, Homo sapiens
  misc_RNA (1)...(19): siRNA sense strand
uuagagguacccacaaauu

SEQ ID NO: 641182 - RNA, 19 nt, Homo sapiens
  misc_RNA (1)...(19): siRNA sense strand
ggaaggauggaaauguugu

SEQ ID NO: 641183 - RNA, 19 nt, Homo sapiens
  misc_RNA (1)...(19): siRNA sense strand
cacaagaugcaaaggauga

SEQ ID NO: 641184 - RNA, 19 nt, Homo sapiens
  misc_RNA (1)...(19): siRNA sense strand
cuuuauaccucuccuucuu

SEQ ID NO: 641185 - RNA, 19 nt, Homo sapiens
  misc_RNA (1)...(19): siRNA sense strand
ugaaccugcuaagucuuua

SEQ ID NO: 641186 - RNA, 19 nt, Homo sapiens
  misc_RNA (1)...(19): siRNA sense strand
ggaugugaagucagaaguu

SEQ ID NO: 641187 - RNA, 19 nt, Homo sapiens
  misc_RNA (1)...(19): siRNA sense strand
uagagguacccacaaauug

SEQ ID NO: 641188 - RNA, 19 nt, Homo sapiens
  misc_RNA (1)...(19): siRNA sense strand
uuauaccucuccuucuuug

SEQ ID NO: 641189 - RNA, 19 nt, Homo sapiens
  misc_RNA (1)...(19): siRNA sense strand
aaagacacuccaacuaaug

SEQ ID NO: 641190 - RNA, 19 nt, Homo sapiens
  misc_RNA (1)...(19): siRNA sense strand
gcaccaggcucagcuucag

SEQ ID NO: 641191 - RNA, 19 nt, Homo sapiens
  misc_RNA (1)...(19): siRNA sense strand
gcaggaauuacuucuuauc

SEQ ID NO: 641192 - RNA, 19 nt, Homo sapiens
  misc_RNA (1)...(19): siRNA sense strand
gaaguguuacugaaaauga

SEQ ID NO: 641193 - RNA, 19 nt, Homo sapiens
  misc_RNA (1)...(19): siRNA sense strand
gcucagauccaggaaaugg

SEQ ID NO: 641194 - RNA, 19 nt, Homo sapiens
  misc_RNA (1)...(19): siRNA sense strand
caacagcaacaccagcaau

SEQ ID NO: 641195 - RNA, 19 nt, Homo sapiens
  misc_RNA (1)...(19): siRNA sense strand
ucucagaggcaaagauaga

SEQ ID NO: 641196 - RNA, 19 nt, Homo sapiens
  misc_RNA (1)...(19): siRNA sense strand
gcagugcuuguguggauga

SEQ ID NO: 641197 - RNA, 19 nt, Homo sapiens
  misc_RNA (1)...(19): siRNA sense strand
cacaugaacaaacugcuuu

SEQ ID NO: 641198 - RNA, 19 nt, Homo sapiens
  misc_RNA (1)...(19): siRNA sense strand
aauuucaccuggcauuaga

SEQ ID NO: 641199 - RNA, 19 nt, Homo sapiens
  misc_RNA (1)...(19): siRNA sense strand
gcaacaaaagagagaauuu

SEQ ID NO: 641200 - RNA, 19 nt, Homo sapiens
  misc_RNA (1)...(19): siRNA sense strand
guugucacuucauucaaga

SEQ ID NO: 641201 - RNA, 19 nt, Homo sapiens
  misc_RNA (1)...(19): siRNA sense strand
aaacagaaaguggcagaga

SEQ ID NO: 641202 - RNA, 19 nt, Homo sapiens
  misc_RNA (1)...(19): siRNA sense strand
ggaaauguugucacuucau

SEQ ID NO: 641203 - RNA, 19 nt, Homo sapiens
  misc_RNA (1)...(19): siRNA sense strand
caaacugcuuucgaaaucu

SEQ ID NO: 641204 - RNA, 19 nt, Homo sapiens
  misc_RNA (1)...(19): siRNA sense strand
ccacaugaacaaacugcuu

SEQ ID NO: 641205 - RNA, 19 nt, Homo sapiens
  misc_RNA (1)...(19): siRNA sense strand
cagcagcagauccacauga

SEQ ID NO: 641206 - RNA, 19 nt, Homo sapiens
  misc_RNA (1)...(19): siRNA sense strand
gaaccugcuaagucuuuau

SEQ ID NO: 641207 - RNA, 19 nt, Homo sapiens
  misc_RNA (1)...(19): siRNA sense strand
ucuccugcagcauuuauua

SEQ ID NO: 641208 - RNA, 19 nt, Homo sapiens
  misc_RNA (1)...(19): siRNA sense strand
gagggaaagccacccaaca

SEQ ID NO: 641209 - RNA, 19 nt, Homo sapiens
  misc_RNA (1)...(19): siRNA sense strand
gaaagacacuccaacuaau

SEQ ID NO: 641210 - RNA, 19 nt, Homo sapiens
  misc_RNA (1)...(19): siRNA sense strand
cagcaggaauuacuucuua

SEQ ID NO: 641211 - RNA, 19 nt, Homo sapiens
  misc_RNA (1)...(19): siRNA sense strand
gaacaaaugcgacagcaaa

SEQ ID NO: 641212 - RNA, 19 nt, Homo sapiens
  misc_RNA (1)...(19): siRNA sense strand
gcaaaugguuucacagcaa

SEQ ID NO: 641213 - RNA, 19 nt, Homo sapiens
  misc_RNA (1)...(19): siRNA sense strand
guacagaaguaaagcagaa

SEQ ID NO: 641214 - RNA, 19 nt, Homo sapiens
  misc_RNA (1)...(19): siRNA sense strand
ggacagaccucaggaugau

SEQ ID NO: 641215 - RNA, 19 nt, Homo sapiens
  misc_RNA (1)...(19): siRNA sense strand
gaacaucuccauccuacaa

SEQ ID NO: 641216 - RNA, 19 nt, Homo sapiens
  misc_RNA (1)...(19): siRNA sense strand
cgaaagacacuccaacuaa

SEQ ID NO: 641217 - RNA, 19 nt, Homo sapiens
  misc_RNA (1)...(19): siRNA sense strand
gaacaaacugcuuucgaaa

SEQ ID NO: 641218 - RNA, 19 nt, Homo sapiens
  misc_RNA (1)...(19): siRNA sense strand
ugaacaaacugcuuucgaa

SEQ ID NO: 641219 - RNA, 19 nt, Homo sapiens
  misc_RNA (1)...(19): siRNA sense strand
caacaagaacuccuagaaa

SEQ ID NO: 641220 - RNA, 19 nt, Homo sapiens
  misc_RNA (1)...(19): siRNA sense strand
gaaacagcaugagaacuug

SEQ ID NO: 641221 - RNA, 19 nt, Homo sapiens
  misc_RNA (1)...(19): siRNA sense strand
caucucaccuuuagaccua

SEQ ID NO: 641222 - RNA, 19 nt, Homo sapiens
  misc_RNA (1)...(19): siRNA sense strand
gcaacaagaacuccuagaa

SEQ ID NO: 641223 - RNA, 19 nt, Homo sapiens
  misc_RNA (1)...(19): siRNA sense strand
gcagaagcuucaagaguuc

SEQ ID NO: 641224 - RNA, 19 nt, Homo sapiens
  misc_RNA (1)...(19): siRNA sense strand
gcggaaggauggaaauguu

SEQ ID NO: 641225 - RNA, 19 nt, Homo sapiens
  misc_RNA (1)...(19): siRNA sense strand
aaagauagaggacgagaaa

SEQ ID NO: 641226 - RNA, 19 nt, Homo sapiens
  misc_RNA (1)...(19): siRNA sense strand
gcucaaugcuucgaauuca

SEQ ID NO: 641227 - RNA, 19 nt, Homo sapiens
  misc_RNA (1)...(19): siRNA sense strand
gaaggugcgguccagguua

SEQ ID NO: 641228 - RNA, 19 nt, Homo sapiens
  misc_RNA (1)...(19): siRNA sense strand
ucacagcaacgcauucuaa

SEQ ID NO: 641229 - RNA, 19 nt, Homo sapiens
  misc_RNA (1)...(19): siRNA sense strand
cauuagagguacccacaaa

SEQ ID NO: 641230 - RNA, 19 nt, Homo sapiens
  misc_RNA (1)...(19): siRNA sense strand
cagcaacgcauucuaauuc

SEQ ID NO: 641231 - RNA, 19 nt, Homo sapiens
  misc_RNA (1)...(19): siRNA sense strand
gagcccaucucaccuuuag

SEQ ID NO: 641232 - RNA, 19 nt, Homo sapiens
  misc_RNA (1)...(19): siRNA sense strand
gaacccagucugcaccuuu

SEQ ID NO: 641233 - RNA, 19 nt, Homo sapiens
  misc_RNA (1)...(19): siRNA sense strand
cgaaaucuauugaacaacu

SEQ ID NO: 641234 - RNA, 19 nt, Homo sapiens
  misc_RNA (1)...(19): siRNA sense strand
aaacugcuuucgaaaucua

SEQ ID NO: 641235 - RNA, 19 nt, Homo sapiens
  misc_RNA (1)...(19): siRNA sense strand
acaaacugcuuucgaaauc

SEQ ID NO: 641236 - RNA, 19 nt, Homo sapiens
  misc_RNA (1)...(19): siRNA sense strand
cgaauucacucaaagaaaa

SEQ ID NO: 641237 - RNA, 19 nt, Homo sapiens
  misc_RNA (1)...(19): siRNA sense strand
uggagaagcagaagcaaua

SEQ ID NO: 641238 - RNA, 19 nt, Homo sapiens
  misc_RNA (1)...(19): siRNA sense strand
gaaagggcaguggcaagua

SEQ ID NO: 641239 - RNA, 19 nt, Homo sapiens
  misc_RNA (1)...(19): siRNA sense strand
gaugugaagucagaaguuc

SEQ ID NO: 641240 - RNA, 19 nt, Homo sapiens
  misc_RNA (1)...(19): siRNA sense strand
guaaaucagcaacgaaaga

SEQ ID NO: 641241 - RNA, 19 nt, Homo sapiens
  misc_RNA (1)...(19): siRNA sense strand
gaguaaaucagcaacgaaa

SEQ ID NO: 641242 - RNA, 19 nt, Homo sapiens
  misc_RNA (1)...(19): siRNA sense strand
gaaaucuauugaacaacug

SEQ ID NO: 641243 - RNA, 19 nt, Homo sapiens
  misc_RNA (1)...(19): siRNA sense strand
ggacagugaugaagaugcu

SEQ ID NO: 641244 - RNA, 19 nt, Homo sapiens
  misc_RNA (1)...(19): siRNA sense strand
agaaacagcaugagaacuu

SEQ ID NO: 641245 - RNA, 19 nt, Homo sapiens
  misc_RNA (1)...(19): siRNA sense strand
caacuggaaguguuacuga

SEQ ID NO: 641246 - RNA, 19 nt, Homo sapiens
  misc_RNA (1)...(19): siRNA sense strand
agcagaagcuucaagaguu

SEQ ID NO: 641247 - RNA, 19 nt, Homo sapiens
  misc_RNA (1)...(19): siRNA sense strand
gcagcuuccuccucucaga

SEQ ID NO: 641248 - RNA, 19 nt, Homo sapiens
  misc_RNA (1)...(19): siRNA sense strand
ccaugaaccugcuaagucu

SEQ ID NO: 641249 - RNA, 19 nt, Homo sapiens
  misc_RNA (1)...(19): siRNA sense strand
ggauggaaauguugucacu

SEQ ID NO: 641250 - RNA, 19 nt, Homo sapiens
  misc_RNA (1)...(19): siRNA sense strand
cuucaagaguuccuacuga

SEQ ID NO: 641251 - RNA, 19 nt, Homo sapiens
  misc_RNA (1)...(19): siRNA sense strand
ugaugaagaugcucagauc

SEQ ID NO: 641252 - RNA, 19 nt, Homo sapiens
  misc_RNA (1)...(19): siRNA sense strand
uggcucagcuggucauuca

SEQ ID NO: 641253 - RNA, 19 nt, Homo sapiens
  misc_RNA (1)...(19): siRNA sense strand
ccucugagcccaacuugaa

SEQ ID NO: 641254 - RNA, 19 nt, Homo sapiens
  misc_RNA (1)...(19): siRNA sense strand
gcaagaacaggaaguagag

SEQ ID NO: 641255 - RNA, 19 nt, Homo sapiens
  misc_RNA (1)...(19): siRNA sense strand
ccacccucauguuacuuua

SEQ ID NO: 641256 - RNA, 19 nt, Homo sapiens
  misc_RNA (1)...(19): siRNA sense strand
gacagaauccucagucagu

SEQ ID NO: 641257 - RNA, 19 nt, Homo sapiens
  misc_RNA (1)...(19): siRNA sense strand
gagaauuucaccuggcauu

SEQ ID NO: 641258 - RNA, 19 nt, Homo sapiens
  misc_RNA (1)...(19): siRNA sense strand
ucuuguagcugguggaguu

SEQ ID NO: 641259 - RNA, 19 nt, Homo sapiens
  misc_RNA (1)...(19): siRNA sense strand
gagcacaagaugcaaagga

SEQ ID NO: 641260 - RNA, 19 nt, Homo sapiens
  misc_RNA (1)...(19): siRNA sense strand
cugcagcauuuauuauuga

SEQ ID NO: 641261 - RNA, 19 nt, Homo sapiens
  misc_RNA (1)...(19): siRNA sense strand
caacgcauucuaauucaug

SEQ ID NO: 641262 - RNA, 19 nt, Homo sapiens
  misc_RNA (1)...(19): siRNA sense strand
gaaaaugagacuucgguuu

SEQ ID NO: 641263 - RNA, 19 nt, Homo sapiens
  misc_RNA (1)...(19): siRNA sense strand
acagaauccucagucagua

SEQ ID NO: 641264 - RNA, 19 nt, Homo sapiens
  misc_RNA (1)...(19): siRNA sense strand
gcagaggcaagaacaggaa

SEQ ID NO: 641265 - RNA, 19 nt, Homo sapiens
  misc_RNA (1)...(19): siRNA sense strand
gcaacaccagcaauucuug

SEQ ID NO: 641266 - RNA, 19 nt, Homo sapiens
  misc_RNA (1)...(19): siRNA sense strand
gcauucuaauucaugaaga

SEQ ID NO: 641267 - RNA, 19 nt, Homo sapiens
  misc_RNA (1)...(19): siRNA sense strand
agagaggcaucgcagagaa

SEQ ID NO: 641268 - RNA, 19 nt, Homo sapiens
  misc_RNA (1)...(19): siRNA sense strand
gcaacgcauucuaauucau

SEQ ID NO: 641269 - RNA, 19 nt, Homo sapiens
  misc_RNA (1)...(19): siRNA sense strand
caguggaugugaagucaga

SEQ ID NO: 641270 - RNA, 19 nt, Homo sapiens
  misc_RNA (1)...(19): siRNA sense strand
ccugcagcauuuauuauug

SEQ ID NO: 641271 - RNA, 19 nt, Homo sapiens
  misc_RNA (1)...(19): siRNA sense strand
aacaagaacuccuagaaaa

SEQ ID NO: 641272 - RNA, 19 nt, Homo sapiens
  misc_RNA (1)...(19): siRNA sense strand
gcagauccacaugaacaaa

SEQ ID NO: 641273 - RNA, 19 nt, Homo sapiens
  misc_RNA (1)...(19): siRNA sense strand
cagcagauccacaugaaca

SEQ ID NO: 641274 - RNA, 19 nt, Homo sapiens
  misc_RNA (1)...(19): siRNA sense strand
gaauuucaccuggcauuag

SEQ ID NO: 641275 - RNA, 19 nt, Homo sapiens
  misc_RNA (1)...(19): siRNA sense strand
gggccaacuggaaguguua

SEQ ID NO: 641276 - RNA, 19 nt, Homo sapiens
  misc_RNA (1)...(19): siRNA sense strand
ggucccaguucaccaaaca

SEQ ID NO: 641277 - RNA, 19 nt, Homo sapiens
  misc_RNA (1)...(19): siRNA sense strand
aaggugcgguccagguuaa

SEQ ID NO: 641278 - RNA, 19 nt, Homo sapiens
  misc_RNA (1)...(19): siRNA sense strand
acacaucauuggaucaaag

SEQ ID NO: 641279 - RNA, 19 nt, Homo sapiens
  misc_RNA (1)...(19): siRNA sense strand
ggcaagaacaggaaguaga

SEQ ID NO: 641280 - RNA, 19 nt, Homo sapiens
  misc_RNA (1)...(19): siRNA sense strand
gaggcaagaacaggaagua

SEQ ID NO: 641281 - RNA, 19 nt, Homo sapiens
  misc_RNA (1)...(19): siRNA sense strand
uuagagguacccacaaauu

SEQ ID NO: 641282 - RNA, 19 nt, Homo sapiens
  misc_RNA (1)...(19): siRNA sense strand
ggaaggauggaaauguugu

SEQ ID NO: 641283 - RNA, 19 nt, Homo sapiens
  misc_RNA (1)...(19): siRNA sense strand
cacaagaugcaaaggauga

SEQ ID NO: 641284 - RNA, 19 nt, Homo sapiens
  misc_RNA (1)...(19): siRNA sense strand
cuuuauaccucuccuucuu

SEQ ID NO: 641285 - RNA, 19 nt, Homo sapiens
  misc_RNA (1)...(19): siRNA sense strand
ugaaccugcuaagucuuua

SEQ ID NO: 641286 - RNA, 19 nt, Homo sapiens
  misc_RNA (1)...(19): siRNA sense strand
ggaugugaagucagaaguu

SEQ ID NO: 641287 - RNA, 19 nt, Homo sapiens
  misc_RNA (1)...(19): siRNA sense strand
uagagguacccacaaauug

SEQ ID NO: 641288 - RNA, 19 nt, Homo sapiens
  misc_RNA (1)...(19): siRNA sense strand
uuauaccucuccuucuuug

SEQ ID NO: 641289 - RNA, 19 nt, Homo sapiens
  misc_RNA (1)...(19): siRNA sense strand
aaagacacuccaacuaaug

SEQ ID NO: 641290 - RNA, 19 nt, Homo sapiens
  misc_RNA (1)...(19): siRNA sense strand
gcaccaggcucagcuucag

SEQ ID NO: 641291 - RNA, 19 nt, Homo sapiens
  misc_RNA (1)...(19): siRNA sense strand
gcaggaauuacuucuuauc

SEQ ID NO: 641292 - RNA, 19 nt, Homo sapiens
  misc_RNA (1)...(19): siRNA sense strand
gaaguguuacugaaaauga

SEQ ID NO: 641293 - RNA, 19 nt, Homo sapiens
  misc_RNA (1)...(19): siRNA sense strand
gcucagauccaggaaaugg

SEQ ID NO: 641294 - RNA, 19 nt, Homo sapiens
  misc_RNA (1)...(19): siRNA sense strand
caacagcaacaccagcaau

SEQ ID NO: 641295 - RNA, 19 nt, Homo sapiens
  misc_RNA (1)...(19): siRNA sense strand
ucucagaggcaaagauaga

SEQ ID NO: 641296 - RNA, 19 nt, Homo sapiens
  misc_RNA (1)...(19): siRNA sense strand
gcagugcuuguguggauga

SEQ ID NO: 641297 - RNA, 19 nt, Homo sapiens
  misc_RNA (1)...(19): siRNA sense strand
cacaugaacaaacugcuuu

SEQ ID NO: 641298 - RNA, 19 nt, Homo sapiens
  misc_RNA (1)...(19): siRNA sense strand
aauuucaccuggcauuaga

SEQ ID NO: 641299 - RNA, 19 nt, Homo sapiens
  misc_RNA (1)...(19): siRNA sense strand
gcaacaaaagagagaauuu

SEQ ID NO: 641300 - RNA, 19 nt, Homo sapiens
  misc_RNA (1)...(19): siRNA sense strand
guugucacuucauucaaga

SEQ ID NO: 641301 - RNA, 19 nt, Homo sapiens
  misc_RNA (1)...(19): siRNA sense strand
aaacagaaaguggcagaga

SEQ ID NO: 641302 - RNA, 19 nt, Homo sapiens
  misc_RNA (1)...(19): siRNA sense strand
ggaaauguugucacuucau

SEQ ID NO: 641303 - RNA, 19 nt, Homo sapiens
  misc_RNA (1)...(19): siRNA sense strand
caaacugcuuucgaaaucu

SEQ ID NO: 641304 - RNA, 19 nt, Homo sapiens
  misc_RNA (1)...(19): siRNA sense strand
ccacaugaacaaacugcuu

SEQ ID NO: 641305 - RNA, 19 nt, Homo sapiens
  misc_RNA (1)...(19): siRNA sense strand
cagcagcagauccacauga

SEQ ID NO: 641306 - RNA, 19 nt, Homo sapiens
  misc_RNA (1)...(19): siRNA sense strand
gaaccugcuaagucuuuau

SEQ ID NO: 641307 - RNA, 19 nt, Homo sapiens
  misc_RNA (1)...(19): siRNA sense strand
ucuccugcagcauuuauua

SEQ ID NO: 641308 - RNA, 19 nt, Homo sapiens
  misc_RNA (1)...(19): siRNA sense strand
gagggaaagccacccaaca

SEQ ID NO: 641309 - RNA, 19 nt, Homo sapiens
  misc_RNA (1)...(19): siRNA sense strand
gaaguugucuugaaaguua

SEQ ID NO: 641310 - RNA, 19 nt, Homo sapiens
  misc_RNA (1)...(19): siRNA sense strand
caagauaucugcuuugaaa

SEQ ID NO: 641311 - RNA, 19 nt, Homo sapiens
  misc_RNA (1)...(19): siRNA sense strand
gcaaaugacuuaaguuuag

SEQ ID NO: 641312 - RNA, 19 nt, Homo sapiens
  misc_RNA (1)...(19): siRNA sense strand
gaacugauuucaucucuug

SEQ ID NO: 641313 - RNA, 19 nt, Homo sapiens
  misc_RNA (1)...(19): siRNA sense strand
gaugagaucuacagucuaa

SEQ ID NO: 641314 - RNA, 19 nt, Homo sapiens
  misc_RNA (1)...(19): siRNA sense strand
gaaguacaacugcaaauua

SEQ ID NO: 641315 - RNA, 19 nt, Homo sapiens
  misc_RNA (1)...(19): siRNA sense strand
ggacgaaugugaagaaaug

SEQ ID NO: 641316 - RNA, 19 nt, Homo sapiens
  misc_RNA (1)...(19): siRNA sense strand
gaaagcagauuugauguga

SEQ ID NO: 641317 - RNA, 19 nt, Homo sapiens
  misc_RNA (1)...(19): siRNA sense strand
caacauugcucuuaauuuc

SEQ ID NO: 641318 - RNA, 19 nt, Homo sapiens
  misc_RNA (1)...(19): siRNA sense strand
caaaugaagguaccuauua

SEQ ID NO: 641319 - RNA, 19 nt, Homo sapiens
  misc_RNA (1)...(19): siRNA sense strand
guaaauaacuugcgagagu

SEQ ID NO: 641320 - RNA, 19 nt, Homo sapiens
  misc_RNA (1)...(19): siRNA sense strand
uaaagagguugcuagcuua

SEQ ID NO: 641321 - RNA, 19 nt, Homo sapiens
  misc_RNA (1)...(19): siRNA sense strand
gauaaagcauggcagaauu

SEQ ID NO: 641322 - RNA, 19 nt, Homo sapiens
  misc_RNA (1)...(19): siRNA sense strand
cucaagagaugcugaauua

SEQ ID NO: 641323 - RNA, 19 nt, Homo sapiens
  misc_RNA (1)...(19): siRNA sense strand
caagaaugcuguuuguauu

SEQ ID NO: 641324 - RNA, 19 nt, Homo sapiens
  misc_RNA (1)...(19): siRNA sense strand
ccucaugguuuauucauua

SEQ ID NO: 641325 - RNA, 19 nt, Homo sapiens
  misc_RNA (1)...(19): siRNA sense strand
gaacacugaggaauauuua

SEQ ID NO: 641326 - RNA, 19 nt, Homo sapiens
  misc_RNA (1)...(19): siRNA sense strand
caagaaagaccucauuaaa

SEQ ID NO: 641327 - RNA, 19 nt, Homo sapiens
  misc_RNA (1)...(19): siRNA sense strand
gaagguaccuauuauaugc

SEQ ID NO: 641328 - RNA, 19 nt, Homo sapiens
  misc_RNA (1)...(19): siRNA sense strand
cauuaaagcucacgaaguu

SEQ ID NO: 641329 - RNA, 19 nt, Homo sapiens
  misc_RNA (1)...(19): siRNA sense strand
gaacuucucuugcuguaca

SEQ ID NO: 641330 - RNA, 19 nt, Homo sapiens
  misc_RNA (1)...(19): siRNA sense strand
aaacugcucucauuuauuc

SEQ ID NO: 641331 - RNA, 19 nt, Homo sapiens
  misc_RNA (1)...(19): siRNA sense strand
ggagcuagcccuaagauuu

SEQ ID NO: 641332 - RNA, 19 nt, Homo sapiens
  misc_RNA (1)...(19): siRNA sense strand
gaucuacagucuaagaauu

SEQ ID NO: 641333 - RNA, 19 nt, Homo sapiens
  misc_RNA (1)...(19): siRNA sense strand
ggaaagccagcacaucuua

SEQ ID NO: 641334 - RNA, 19 nt, Homo sapiens
  misc_RNA (1)...(19): siRNA sense strand
gcaagucucuaucaggaaa

SEQ ID NO: 641335 - RNA, 19 nt, Homo sapiens
  misc_RNA (1)...(19): siRNA sense strand
ucagaaagcuaacgaugaa

SEQ ID NO: 641336 - RNA, 19 nt, Homo sapiens
  misc_RNA (1)...(19): siRNA sense strand
gaacacagaggaaguaugu

SEQ ID NO: 641337 - RNA, 19 nt, Homo sapiens
  misc_RNA (1)...(19): siRNA sense strand
ggaaguaucuaguguuucu

SEQ ID NO: 641338 - RNA, 19 nt, Homo sapiens
  misc_RNA (1)...(19): siRNA sense strand
acacggaccucauauuuga

SEQ ID NO: 641339 - RNA, 19 nt, Homo sapiens
  misc_RNA (1)...(19): siRNA sense strand
gaaauaaugagagugguua

SEQ ID NO: 641340 - RNA, 19 nt, Homo sapiens
  misc_RNA (1)...(19): siRNA sense strand
gaaaaggccucauuaaauc

SEQ ID NO: 641341 - RNA, 19 nt, Homo sapiens
  misc_RNA (1)...(19): siRNA sense strand
gaaguuaacacaagcuaaa

SEQ ID NO: 641342 - RNA, 19 nt, Homo sapiens
  misc_RNA (1)...(19): siRNA sense strand
ucuggaagcucauagauaa

SEQ ID NO: 641343 - RNA, 19 nt, Homo sapiens
  misc_RNA (1)...(19): siRNA sense strand
gaaucuuccuuccaugaua

SEQ ID NO: 641344 - RNA, 19 nt, Homo sapiens
  misc_RNA (1)...(19): siRNA sense strand
gcaugcagcuuaagugaug

SEQ ID NO: 641345 - RNA, 19 nt, Homo sapiens
  misc_RNA (1)...(19): siRNA sense strand
gaggaaguaugucagcuaa

SEQ ID NO: 641346 - RNA, 19 nt, Homo sapiens
  misc_RNA (1)...(19): siRNA sense strand
gcagaaagagucaucauau

SEQ ID NO: 641347 - RNA, 19 nt, Homo sapiens
  misc_RNA (1)...(19): siRNA sense strand
ucaauugcaucuugucuuu

SEQ ID NO: 641348 - RNA, 19 nt, Homo sapiens
  misc_RNA (1)...(19): siRNA sense strand
gcuaaauccucaacacuga

SEQ ID NO: 641349 - RNA, 19 nt, Homo sapiens
  misc_RNA (1)...(19): siRNA sense strand
agaagaugcuuuaaaggua

SEQ ID NO: 641350 - RNA, 19 nt, Homo sapiens
  misc_RNA (1)...(19): siRNA sense strand
gcuaagagcucaugcaaaa

SEQ ID NO: 641351 - RNA, 19 nt, Homo sapiens
  misc_RNA (1)...(19): siRNA sense strand
gcugagagauggcuacaga

SEQ ID NO: 641352 - RNA, 19 nt, Homo sapiens
  misc_RNA (1)...(19): siRNA sense strand
caaggaaacuauagaaucu

SEQ ID NO: 641353 - RNA, 19 nt, Homo sapiens
  misc_RNA (1)...(19): siRNA sense strand
gauugaaguugucuugaaa

SEQ ID NO: 641354 - RNA, 19 nt, Homo sapiens
  misc_RNA (1)...(19): siRNA sense strand
gagagaacaugacuugcaa

SEQ ID NO: 641355 - RNA, 19 nt, Homo sapiens
  misc_RNA (1)...(19): siRNA sense strand
ugacugagcuguguuuaga

SEQ ID NO: 641356 - RNA, 19 nt, Homo sapiens
  misc_RNA (1)...(19): siRNA sense strand
agagauggcuacagaauau

SEQ ID NO: 641357 - RNA, 19 nt, Homo sapiens
  misc_RNA (1)...(19): siRNA sense strand
cgagagaaguggcaaccua

SEQ ID NO: 641358 - RNA, 19 nt, Homo sapiens
  misc_RNA (1)...(19): siRNA sense strand
agaaaggaaugacaguuaa

SEQ ID NO: 641359 - RNA, 19 nt, Homo sapiens
  misc_RNA (1)...(19): siRNA sense strand
cagcuuaagugauggguuu

SEQ ID NO: 641360 - RNA, 19 nt, Homo sapiens
  misc_RNA (1)...(19): siRNA sense strand
caacacugauuaacaagga

SEQ ID NO: 641361 - RNA, 19 nt, Homo sapiens
  misc_RNA (1)...(19): siRNA sense strand
ccaaagcuccugaaguuaa

SEQ ID NO: 641362 - RNA, 19 nt, Homo sapiens
  misc_RNA (1)...(19): siRNA sense strand
aaucaaagcugcacagaca

SEQ ID NO: 641363 - RNA, 19 nt, Homo sapiens
  misc_RNA (1)...(19): siRNA sense strand
gaagaaggacgaaugugaa

SEQ ID NO: 641364 - RNA, 19 nt, Homo sapiens
  misc_RNA (1)...(19): siRNA sense strand
ggacuuugguaaauaacuu

SEQ ID NO: 641365 - RNA, 19 nt, Homo sapiens
  misc_RNA (1)...(19): siRNA sense strand
gcuaaggacuuugguaaau

SEQ ID NO: 641366 - RNA, 19 nt, Homo sapiens
  misc_RNA (1)...(19): siRNA sense strand
gugcugaguuuaugggaua

SEQ ID NO: 641367 - RNA, 19 nt, Homo sapiens
  misc_RNA (1)...(19): siRNA sense strand
caaaucaaguccaguuuua

SEQ ID NO: 641368 - RNA, 19 nt, Homo sapiens
  misc_RNA (1)...(19): siRNA sense strand
uaaugagagugguuagaua

SEQ ID NO: 641369 - RNA, 19 nt, Homo sapiens
  misc_RNA (1)...(19): siRNA sense strand
gaccaaauacuuucaaaug

SEQ ID NO: 641370 - RNA, 19 nt, Homo sapiens
  misc_RNA (1)...(19): siRNA sense strand
cuaaggacuuugguaaaua

SEQ ID NO: 641371 - RNA, 19 nt, Homo sapiens
  misc_RNA (1)...(19): siRNA sense strand
gaagaugcaugcgaugaau

SEQ ID NO: 641372 - RNA, 19 nt, Homo sapiens
  misc_RNA (1)...(19): siRNA sense strand
cuucugggcuucaauauga

SEQ ID NO: 641373 - RNA, 19 nt, Homo sapiens
  misc_RNA (1)...(19): siRNA sense strand
agaaauagccgaagucaau

SEQ ID NO: 641374 - RNA, 19 nt, Homo sapiens
  misc_RNA (1)...(19): siRNA sense strand
cuacagaacucagugaaga

SEQ ID NO: 641375 - RNA, 19 nt, Homo sapiens
  misc_RNA (1)...(19): siRNA sense strand
uuaaagcucuuguggagaa

SEQ ID NO: 641376 - RNA, 19 nt, Homo sapiens
  misc_RNA (1)...(19): siRNA sense strand
ggagaacuuugaggucuuu

SEQ ID NO: 641377 - RNA, 19 nt, Homo sapiens
  misc_RNA (1)...(19): siRNA sense strand
uuaaagagguugcuagcuu

SEQ ID NO: 641378 - RNA, 19 nt, Homo sapiens
  misc_RNA (1)...(19): siRNA sense strand
acauggaacugcuuuauau

SEQ ID NO: 641379 - RNA, 19 nt, Homo sapiens
  misc_RNA (1)...(19): siRNA sense strand
aaacaaacacuacucacua

SEQ ID NO: 641380 - RNA, 19 nt, Homo sapiens
  misc_RNA (1)...(19): siRNA sense strand
ccucaacacugauuaacaa

SEQ ID NO: 641381 - RNA, 19 nt, Homo sapiens
  misc_RNA (1)...(19): siRNA sense strand
gaagacauccguggacauu

SEQ ID NO: 641382 - RNA, 19 nt, Homo sapiens
  misc_RNA (1)...(19): siRNA sense strand
gagagugguuagauacauu

SEQ ID NO: 641383 - RNA, 19 nt, Homo sapiens
  misc_RNA (1)...(19): siRNA sense strand
guagaucacuucaauugca

SEQ ID NO: 641384 - RNA, 19 nt, Homo sapiens
  misc_RNA (1)...(19): siRNA sense strand
gcuucaauaugauuccuua

SEQ ID NO: 641385 - RNA, 19 nt, Homo sapiens
  misc_RNA (1)...(19): siRNA sense strand
ggaauggacucuugcaaaa

SEQ ID NO: 641386 - RNA, 19 nt, Homo sapiens
  misc_RNA (1)...(19): siRNA sense strand
gcugaacacugaggaauau

SEQ ID NO: 641387 - RNA, 19 nt, Homo sapiens
  misc_RNA (1)...(19): siRNA sense strand
gauguuggcugauaauguc

SEQ ID NO: 641388 - RNA, 19 nt, Homo sapiens
  misc_RNA (1)...(19): siRNA sense strand
gaaggacgaaugugaagaa

SEQ ID NO: 641389 - RNA, 19 nt, Homo sapiens
  misc_RNA (1)...(19): siRNA sense strand
gaacauggaacugcuuuau

SEQ ID NO: 641390 - RNA, 19 nt, Homo sapiens
  misc_RNA (1)...(19): siRNA sense strand
ucacuucaauugcaucuug

SEQ ID NO: 641391 - RNA, 19 nt, Homo sapiens
  misc_RNA (1)...(19): siRNA sense strand
caaguagauuugcuaguga

SEQ ID NO: 641392 - RNA, 19 nt, Homo sapiens
  misc_RNA (1)...(19): siRNA sense strand
gauacaggcaugcagcuua

SEQ ID NO: 641393 - RNA, 19 nt, Homo sapiens
  misc_RNA (1)...(19): siRNA sense strand
uggaacaugucauaacuuu

SEQ ID NO: 641394 - RNA, 19 nt, Homo sapiens
  misc_RNA (1)...(19): siRNA sense strand
agaaagaccucauuaaagc

SEQ ID NO: 641395 - RNA, 19 nt, Homo sapiens
  misc_RNA (1)...(19): siRNA sense strand
aaagguagcccaagcguuu

SEQ ID NO: 641396 - RNA, 19 nt, Homo sapiens
  misc_RNA (1)...(19): siRNA sense strand
ccacaucacucuuugaaac

SEQ ID NO: 641397 - RNA, 19 nt, Homo sapiens
  misc_RNA (1)...(19): siRNA sense strand
caaauuagcccucucugau

SEQ ID NO: 641398 - RNA, 19 nt, Homo sapiens
  misc_RNA (1)...(19): siRNA sense strand
uaacugauaaggcaaauug

SEQ ID NO: 641399 - RNA, 19 nt, Homo sapiens
  misc_RNA (1)...(19): siRNA sense strand
ggacagauaauucuugcaa

SEQ ID NO: 641400 - RNA, 19 nt, Homo sapiens
  misc_RNA (1)...(19): siRNA sense strand
ugaaaccacucaagagaug

SEQ ID NO: 641401 - RNA, 19 nt, Homo sapiens
  misc_RNA (1)...(19): siRNA sense strand
cauagaggauuuacugaau

SEQ ID NO: 641402 - RNA, 19 nt, Homo sapiens
  misc_RNA (1)...(19): siRNA sense strand
gauuauaguucaagaaugc

SEQ ID NO: 641403 - RNA, 19 nt, Homo sapiens
  misc_RNA (1)...(19): siRNA sense strand
ugcagcagcuaaagaaaua

SEQ ID NO: 641404 - RNA, 19 nt, Homo sapiens
  misc_RNA (1)...(19): siRNA sense strand
gauaucugcuuugaaauuc

SEQ ID NO: 641405 - RNA, 19 nt, Homo sapiens
  misc_RNA (1)...(19): siRNA sense strand
caacacuacugcacaaagu

SEQ ID NO: 641406 - RNA, 19 nt, Homo sapiens
  misc_RNA (1)...(19): siRNA sense strand
gauacauucucaaacaaga

SEQ ID NO: 641407 - RNA, 19 nt, Homo sapiens
  misc_RNA (1)...(19): siRNA sense strand
gauauugcuugacaguauu

SEQ ID NO: 641408 - RNA, 19 nt, Homo sapiens
  misc_RNA (1)...(19): siRNA sense strand
uuacgaggcuauggaauaa

SEQ ID NO: 641409 - RNA, 19 nt, Homo sapiens
  misc_RNA (1)...(19): siRNA sense strand
caagaaugcuucagacaug

SEQ ID NO: 641410 - RNA, 19 nt, Homo sapiens
  misc_RNA (1)...(19): siRNA sense strand
agacaugccugaaacaauc

SEQ ID NO: 641411 - RNA, 19 nt, Homo sapiens
  misc_RNA (1)...(19): siRNA sense strand
gcaagaaugcuucagacau

SEQ ID NO: 641412 - RNA, 19 nt, Homo sapiens
  misc_RNA (1)...(19): siRNA sense strand
gcccucagcgauccgcaua

SEQ ID NO: 641413 - RNA, 19 nt, Homo sapiens
  misc_RNA (1)...(19): siRNA sense strand
gcggcaagaaugcuucaga

SEQ ID NO: 641414 - RNA, 19 nt, Homo sapiens
  misc_RNA (1)...(19): siRNA sense strand
cagacaugccugaaacaau

SEQ ID NO: 641415 - RNA, 19 nt, Homo sapiens
  misc_RNA (1)...(19): siRNA sense strand
caagaaugcuucagacaug

SEQ ID NO: 641416 - RNA, 19 nt, Homo sapiens
  misc_RNA (1)...(19): siRNA sense strand
agacaugccugaaacaauc

SEQ ID NO: 641417 - RNA, 19 nt, Homo sapiens
  misc_RNA (1)...(19): siRNA sense strand
gcaagaaugcuucagacau

SEQ ID NO: 641418 - RNA, 19 nt, Homo sapiens
  misc_RNA (1)...(19): siRNA sense strand
gcccucagcgauccgcaua

SEQ ID NO: 641419 - RNA, 19 nt, Homo sapiens
  misc_RNA (1)...(19): siRNA sense strand
gcggcaagaaugcuucaga

SEQ ID NO: 641420 - RNA, 19 nt, Homo sapiens
  misc_RNA (1)...(19): siRNA sense strand
cagacaugccugaaacaau

SEQ ID NO: 641421 - RNA, 19 nt, Homo sapiens
  misc_RNA (1)...(19): siRNA sense strand
caagaaugcuucagacaug

SEQ ID NO: 641422 - RNA, 19 nt, Homo sapiens
  misc_RNA (1)...(19): siRNA sense strand
agacaugccugaaacaauc

SEQ ID NO: 641423 - RNA, 19 nt, Homo sapiens
  misc_RNA (1)...(19): siRNA sense strand
gcaagaaugcuucagacau

SEQ ID NO: 641424 - RNA, 19 nt, Homo sapiens
  misc_RNA (1)...(19): siRNA sense strand
gcccucagcgauccgcaua

SEQ ID NO: 641425 - RNA, 19 nt, Homo sapiens
  misc_RNA (1)...(19): siRNA sense strand
gcggcaagaaugcuucaga

SEQ ID NO: 641426 - RNA, 19 nt, Homo sapiens
  misc_RNA (1)...(19): siRNA sense strand
cagacaugccugaaacaau

SEQ ID NO: 641427 - RNA, 19 nt, Homo sapiens
  misc_RNA (1)...(19): siRNA sense strand
caagaaugcuucagacaug

SEQ ID NO: 641428 - RNA, 19 nt, Homo sapiens
  misc_RNA (1)...(19): siRNA sense strand
agacaugccugaaacaauc

SEQ ID NO: 641429 - RNA, 19 nt, Homo sapiens
  misc_RNA (1)...(19): siRNA sense strand
gcaagaaugcuucagacau

SEQ ID NO: 641430 - RNA, 19 nt, Homo sapiens
  misc_RNA (1)...(19): siRNA sense strand
gcccucagcgauccgcaua

SEQ ID NO: 641431 - RNA, 19 nt, Homo sapiens
  misc_RNA (1)...(19): siRNA sense strand
gcggcaagaaugcuucaga

SEQ ID NO: 641432 - RNA, 19 nt, Homo sapiens
  misc_RNA (1)...(19): siRNA sense strand
cagacaugccugaaacaau

SEQ ID NO: 641433 - RNA, 19 nt, Homo sapiens
  misc_RNA (1)...(19): siRNA sense strand
caacaaagauucucagcuu

SEQ ID NO: 641434 - RNA, 19 nt, Homo sapiens
  misc_RNA (1)...(19): siRNA sense strand
gaagaaagguggucgaaaa

SEQ ID NO: 641435 - RNA, 19 nt, Homo sapiens
  misc_RNA (1)...(19): siRNA sense strand
ggacagaccucaggagaca

SEQ ID NO: 641436 - RNA, 19 nt, Homo sapiens
  misc_RNA (1)...(19): siRNA sense strand
ggaugggacucaacaaaga

SEQ ID NO: 641437 - RNA, 19 nt, Homo sapiens
  misc_RNA (1)...(19): siRNA sense strand
ucacacugcuguccucuaa

SEQ ID NO: 641438 - RNA, 19 nt, Homo sapiens
  misc_RNA (1)...(19): siRNA sense strand
gaaagugccgucccugaaa

SEQ ID NO: 641439 - RNA, 19 nt, Homo sapiens
  misc_RNA (1)...(19): siRNA sense strand
gaaagguggucgaaaauga

SEQ ID NO: 641440 - RNA, 19 nt, Homo sapiens
  misc_RNA (1)...(19): siRNA sense strand
cacaggagccggaaagaua

SEQ ID NO: 641441 - RNA, 19 nt, Homo sapiens
  misc_RNA (1)...(19): siRNA sense strand
ggauaaaggagaagucuau

SEQ ID NO: 641442 - RNA, 19 nt, Homo sapiens
  misc_RNA (1)...(19): siRNA sense strand
aaacaggucugggucacua

SEQ ID NO: 641443 - RNA, 19 nt, Homo sapiens
  misc_RNA (1)...(19): siRNA sense strand
aaggagagcuguuuguaug

SEQ ID NO: 641444 - RNA, 19 nt, Homo sapiens
  misc_RNA (1)...(19): siRNA sense strand
ggaaagugccgucccugaa

SEQ ID NO: 641445 - RNA, 19 nt, Homo sapiens
  misc_RNA (1)...(19): siRNA sense strand
gcaugggaaacaauucuua

SEQ ID NO: 641446 - RNA, 19 nt, Homo sapiens
  misc_RNA (1)...(19): siRNA sense strand
acacugcuguccucuaaga

SEQ ID NO: 641447 - RNA, 19 nt, Homo sapiens
  misc_RNA (1)...(19): siRNA sense strand
gggcgugccuuccuuugug

SEQ ID NO: 641448 - RNA, 19 nt, Homo sapiens
  misc_RNA (1)...(19): siRNA sense strand
caaagauucucagcuugga

SEQ ID NO: 641449 - RNA, 19 nt, Homo sapiens
  misc_RNA (1)...(19): siRNA sense strand
cacgggcugugcaguguua

SEQ ID NO: 641450 - RNA, 19 nt, Homo sapiens
  misc_RNA (1)...(19): siRNA sense strand
gagugaacguuauccaagu

SEQ ID NO: 641451 - RNA, 19 nt, Homo sapiens
  misc_RNA (1)...(19): siRNA sense strand
aaacggagaaggacauguu

SEQ ID NO: 641452 - RNA, 19 nt, Homo sapiens
  misc_RNA (1)...(19): siRNA sense strand
cgagcucacucucuugugu

SEQ ID NO: 641453 - RNA, 19 nt, Homo sapiens
  misc_RNA (1)...(19): siRNA sense strand
ggaguucaacccagaaauc

SEQ ID NO: 641454 - RNA, 19 nt, Homo sapiens
  misc_RNA (1)...(19): siRNA sense strand
ggaagaaagguggucgaaa

SEQ ID NO: 641455 - RNA, 19 nt, Homo sapiens
  misc_RNA (1)...(19): siRNA sense strand
ggucugggucacuacaaua

SEQ ID NO: 641456 - RNA, 19 nt, Homo sapiens
  misc_RNA (1)...(19): siRNA sense strand
gggcuacgaguauguguug

SEQ ID NO: 641457 - RNA, 19 nt, Homo sapiens
  misc_RNA (1)...(19): siRNA sense strand
aaagugccgucccugaaau

SEQ ID NO: 641458 - RNA, 19 nt, Homo sapiens
  misc_RNA (1)...(19): siRNA sense strand
gaaauuuacagugaaaguc

SEQ ID NO: 641459 - RNA, 19 nt, Homo sapiens
  misc_RNA (1)...(19): siRNA sense strand
ugccgucccugaaaugauu

SEQ ID NO: 641460 - RNA, 19 nt, Homo sapiens
  misc_RNA (1)...(19): siRNA sense strand
gaagucuauucuuguggau

SEQ ID NO: 641461 - RNA, 19 nt, Homo sapiens
  misc_RNA (1)...(19): siRNA sense strand
cggccgagcucacucucuu

SEQ ID NO: 641462 - RNA, 19 nt, Homo sapiens
  misc_RNA (1)...(19): siRNA sense strand
cuauggaauucuugggaaa

SEQ ID NO: 641463 - RNA, 19 nt, Homo sapiens
  misc_RNA (1)...(19): siRNA sense strand
gauaaaggagaagucuauu

SEQ ID NO: 641464 - RNA, 19 nt, Homo sapiens
  misc_RNA (1)...(19): siRNA sense strand
gacugcggauguuacgaaa

SEQ ID NO: 641465 - RNA, 19 nt, Homo sapiens
  misc_RNA (1)...(19): siRNA sense strand
aaaggagagcuguuuguau

SEQ ID NO: 641466 - RNA, 19 nt, Homo sapiens
  misc_RNA (1)...(19): siRNA sense strand
acaggagccggaaagauaa

SEQ ID NO: 641467 - RNA, 19 nt, Homo sapiens
  misc_RNA (1)...(19): siRNA sense strand
cugcggauguuacgaaagu

SEQ ID NO: 641468 - RNA, 19 nt, Homo sapiens
  misc_RNA (1)...(19): siRNA sense strand
ccucuaagacugcggaugu

SEQ ID NO: 641469 - RNA, 19 nt, Homo sapiens
  misc_RNA (1)...(19): siRNA sense strand
gaccaguauuucccaugga

SEQ ID NO: 641470 - RNA, 19 nt, Homo sapiens
  misc_RNA (1)...(19): siRNA sense strand
uugcugcacugaccaacaa

SEQ ID NO: 641471 - RNA, 19 nt, Homo sapiens
  misc_RNA (1)...(19): siRNA sense strand
gggaugggacucaacaaag

SEQ ID NO: 641472 - RNA, 19 nt, Homo sapiens
  misc_RNA (1)...(19): siRNA sense strand
gagcuggaccaaaagauuu

SEQ ID NO: 641473 - RNA, 19 nt, Homo sapiens
  misc_RNA (1)...(19): siRNA sense strand
ccugacggauaaaggagaa

SEQ ID NO: 641474 - RNA, 19 nt, Homo sapiens
  misc_RNA (1)...(19): siRNA sense strand
gauuccacccacucucuuu

SEQ ID NO: 641475 - RNA, 19 nt, Homo sapiens
  misc_RNA (1)...(19): siRNA sense strand
gggagugaacguuauccaa

SEQ ID NO: 641476 - RNA, 19 nt, Homo sapiens
  misc_RNA (1)...(19): siRNA sense strand
cugggucacuacaauauca

SEQ ID NO: 641477 - RNA, 19 nt, Homo sapiens
  misc_RNA (1)...(19): siRNA sense strand
uaugggcaauguggaagaa

SEQ ID NO: 641478 - RNA, 19 nt, Homo sapiens
  misc_RNA (1)...(19): siRNA sense strand
agugaacguuauccaaguu

SEQ ID NO: 641479 - RNA, 19 nt, Homo sapiens
  misc_RNA (1)...(19): siRNA sense strand
gucuguuccugacggauaa

SEQ ID NO: 641480 - RNA, 19 nt, Homo sapiens
  misc_RNA (1)...(19): siRNA sense strand
gagcucacucucuuguguu

SEQ ID NO: 641481 - RNA, 19 nt, Homo sapiens
  misc_RNA (1)...(19): siRNA sense strand
gccuggagcuggaccaaaa

SEQ ID NO: 641482 - RNA, 19 nt, Homo sapiens
  misc_RNA (1)...(19): siRNA sense strand
gcagcuggccucugucacu

SEQ ID NO: 641483 - RNA, 19 nt, Homo sapiens
  misc_RNA (1)...(19): siRNA sense strand
ucuaagacugcggauguua

SEQ ID NO: 641484 - RNA, 19 nt, Homo sapiens
  misc_RNA (1)...(19): siRNA sense strand
ucucuuguguugacugaca

SEQ ID NO: 641485 - RNA, 19 nt, Homo sapiens
  misc_RNA (1)...(19): siRNA sense strand
agacugcggauguuacgaa

SEQ ID NO: 641486 - RNA, 19 nt, Homo sapiens
  misc_RNA (1)...(19): siRNA sense strand
gaugggacucaacaaagau

SEQ ID NO: 641487 - RNA, 19 nt, Homo sapiens
  misc_RNA (1)...(19): siRNA sense strand
uggcgggagugaacguuau

SEQ ID NO: 641488 - RNA, 19 nt, Homo sapiens
  misc_RNA (1)...(19): siRNA sense strand
caugggaaacaauucuuau

SEQ ID NO: 641489 - RNA, 19 nt, Homo sapiens
  misc_RNA (1)...(19): siRNA sense strand
auucucagcuuggauuuca

SEQ ID NO: 641490 - RNA, 19 nt, Homo sapiens
  misc_RNA (1)...(19): siRNA sense strand
aagauucucagcuuggauu

SEQ ID NO: 641491 - RNA, 19 nt, Homo sapiens
  misc_RNA (1)...(19): siRNA sense strand
ucaggaucauagucuguuc

SEQ ID NO: 641492 - RNA, 19 nt, Homo sapiens
  misc_RNA (1)...(19): siRNA sense strand
ggucaggaucauagucugu

SEQ ID NO: 641493 - RNA, 19 nt, Homo sapiens
  misc_RNA (1)...(19): siRNA sense strand
caacaaagauucucagcuu

SEQ ID NO: 641494 - RNA, 19 nt, Homo sapiens
  misc_RNA (1)...(19): siRNA sense strand
gaagaaagguggucgaaaa

SEQ ID NO: 641495 - RNA, 19 nt, Homo sapiens
  misc_RNA (1)...(19): siRNA sense strand
ggacagaccucaggagaca

SEQ ID NO: 641496 - RNA, 19 nt, Homo sapiens
  misc_RNA (1)...(19): siRNA sense strand
ggaugggacucaacaaaga

SEQ ID NO: 641497 - RNA, 19 nt, Homo sapiens
  misc_RNA (1)...(19): siRNA sense strand
ucacacugcuguccucuaa

SEQ ID NO: 641498 - RNA, 19 nt, Homo sapiens
  misc_RNA (1)...(19): siRNA sense strand
gaaagugccgucccugaaa

SEQ ID NO: 641499 - RNA, 19 nt, Homo sapiens
  misc_RNA (1)...(19): siRNA sense strand
gaaagguggucgaaaauga

SEQ ID NO: 641500 - RNA, 19 nt, Homo sapiens
  misc_RNA (1)...(19): siRNA sense strand
cacaggagccggaaagaua

SEQ ID NO: 641501 - RNA, 19 nt, Homo sapiens
  misc_RNA (1)...(19): siRNA sense strand
ggauaaaggagaagucuau

SEQ ID NO: 641502 - RNA, 19 nt, Homo sapiens
  misc_RNA (1)...(19): siRNA sense strand
aaacaggucugggucacua

SEQ ID NO: 641503 - RNA, 19 nt, Homo sapiens
  misc_RNA (1)...(19): siRNA sense strand
aaggagagcuguuuguaug

SEQ ID NO: 641504 - RNA, 19 nt, Homo sapiens
  misc_RNA (1)...(19): siRNA sense strand
ggaaagugccgucccugaa

SEQ ID NO: 641505 - RNA, 19 nt, Homo sapiens
  misc_RNA (1)...(19): siRNA sense strand
gcaugggaaacaauucuua

SEQ ID NO: 641506 - RNA, 19 nt, Homo sapiens
  misc_RNA (1)...(19): siRNA sense strand
acacugcuguccucuaaga

SEQ ID NO: 641507 - RNA, 19 nt, Homo sapiens
  misc_RNA (1)...(19): siRNA sense strand
gggcgugccuuccuuugug

SEQ ID NO: 641508 - RNA, 19 nt, Homo sapiens
  misc_RNA (1)...(19): siRNA sense strand
caaagauucucagcuugga

SEQ ID NO: 641509 - RNA, 19 nt, Homo sapiens
  misc_RNA (1)...(19): siRNA sense strand
cacgggcugugcaguguua

SEQ ID NO: 641510 - RNA, 19 nt, Homo sapiens
  misc_RNA (1)...(19): siRNA sense strand
gagugaacguuauccaagu

SEQ ID NO: 641511 - RNA, 19 nt, Homo sapiens
  misc_RNA (1)...(19): siRNA sense strand
aaacggagaaggacauguu

SEQ ID NO: 641512 - RNA, 19 nt, Homo sapiens
  misc_RNA (1)...(19): siRNA sense strand
cgagcucacucucuugugu

SEQ ID NO: 641513 - RNA, 19 nt, Homo sapiens
  misc_RNA (1)...(19): siRNA sense strand
ggaguucaacccagaaauc

SEQ ID NO: 641514 - RNA, 19 nt, Homo sapiens
  misc_RNA (1)...(19): siRNA sense strand
ggaagaaagguggucgaaa

SEQ ID NO: 641515 - RNA, 19 nt, Homo sapiens
  misc_RNA (1)...(19): siRNA sense strand
ggucugggucacuacaaua

SEQ ID NO: 641516 - RNA, 19 nt, Homo sapiens
  misc_RNA (1)...(19): siRNA sense strand
gggcuacgaguauguguug

SEQ ID NO: 641517 - RNA, 19 nt, Homo sapiens
  misc_RNA (1)...(19): siRNA sense strand
aaagugccgucccugaaau

SEQ ID NO: 641518 - RNA, 19 nt, Homo sapiens
  misc_RNA (1)...(19): siRNA sense strand
gaaauuuacagugaaaguc

SEQ ID NO: 641519 - RNA, 19 nt, Homo sapiens
  misc_RNA (1)...(19): siRNA sense strand
ugccgucccugaaaugauu

SEQ ID NO: 641520 - RNA, 19 nt, Homo sapiens
  misc_RNA (1)...(19): siRNA sense strand
gaagucuauucuuguggau

SEQ ID NO: 641521 - RNA, 19 nt, Homo sapiens
  misc_RNA (1)...(19): siRNA sense strand
cggccgagcucacucucuu

SEQ ID NO: 641522 - RNA, 19 nt, Homo sapiens
  misc_RNA (1)...(19): siRNA sense strand
cuauggaauucuugggaaa

SEQ ID NO: 641523 - RNA, 19 nt, Homo sapiens
  misc_RNA (1)...(19): siRNA sense strand
gauaaaggagaagucuauu

SEQ ID NO: 641524 - RNA, 19 nt, Homo sapiens
  misc_RNA (1)...(19): siRNA sense strand
gacugcggauguuacgaaa

SEQ ID NO: 641525 - RNA, 19 nt, Homo sapiens
  misc_RNA (1)...(19): siRNA sense strand
aaaggagagcuguuuguau

SEQ ID NO: 641526 - RNA, 19 nt, Homo sapiens
  misc_RNA (1)...(19): siRNA sense strand
acaggagccggaaagauaa

SEQ ID NO: 641527 - RNA, 19 nt, Homo sapiens
  misc_RNA (1)...(19): siRNA sense strand
cugcggauguuacgaaagu

SEQ ID NO: 641528 - RNA, 19 nt, Homo sapiens
  misc_RNA (1)...(19): siRNA sense strand
ccucuaagacugcggaugu

SEQ ID NO: 641529 - RNA, 19 nt, Homo sapiens
  misc_RNA (1)...(19): siRNA sense strand
gaccaguauuucccaugga

SEQ ID NO: 641530 - RNA, 19 nt, Homo sapiens
  misc_RNA (1)...(19): siRNA sense strand
uugcugcacugaccaacaa

SEQ ID NO: 641531 - RNA, 19 nt, Homo sapiens
  misc_RNA (1)...(19): siRNA sense strand
gggaugggacucaacaaag

SEQ ID NO: 641532 - RNA, 19 nt, Homo sapiens
  misc_RNA (1)...(19): siRNA sense strand
gagcuggaccaaaagauuu

SEQ ID NO: 641533 - RNA, 19 nt, Homo sapiens
  misc_RNA (1)...(19): siRNA sense strand
ccugacggauaaaggagaa

SEQ ID NO: 641534 - RNA, 19 nt, Homo sapiens
  misc_RNA (1)...(19): siRNA sense strand
gauuccacccacucucuuu

SEQ ID NO: 641535 - RNA, 19 nt, Homo sapiens
  misc_RNA (1)...(19): siRNA sense strand
gggagugaacguuauccaa

SEQ ID NO: 641536 - RNA, 19 nt, Homo sapiens
  misc_RNA (1)...(19): siRNA sense strand
cugggucacuacaauauca

SEQ ID NO: 641537 - RNA, 19 nt, Homo sapiens
  misc_RNA (1)...(19): siRNA sense strand
uaugggcaauguggaagaa

SEQ ID NO: 641538 - RNA, 19 nt, Homo sapiens
  misc_RNA (1)...(19): siRNA sense strand
agugaacguuauccaaguu

SEQ ID NO: 641539 - RNA, 19 nt, Homo sapiens
  misc_RNA (1)...(19): siRNA sense strand
gucuguuccugacggauaa

SEQ ID NO: 641540 - RNA, 19 nt, Homo sapiens
  misc_RNA (1)...(19): siRNA sense strand
gagcucacucucuuguguu

SEQ ID NO: 641541 - RNA, 19 nt, Homo sapiens
  misc_RNA (1)...(19): siRNA sense strand
gccuggagcuggaccaaaa

SEQ ID NO: 641542 - RNA, 19 nt, Homo sapiens
  misc_RNA (1)...(19): siRNA sense strand
gcagcuggccucugucacu

SEQ ID NO: 641543 - RNA, 19 nt, Homo sapiens
  misc_RNA (1)...(19): siRNA sense strand
ucuaagacugcggauguua

SEQ ID NO: 641544 - RNA, 19 nt, Homo sapiens
  misc_RNA (1)...(19): siRNA sense strand
ucucuuguguugacugaca

SEQ ID NO: 641545 - RNA, 19 nt, Homo sapiens
  misc_RNA (1)...(19): siRNA sense strand
agacugcggauguuacgaa

SEQ ID NO: 641546 - RNA, 19 nt, Homo sapiens
  misc_RNA (1)...(19): siRNA sense strand
gaugggacucaacaaagau

SEQ ID NO: 641547 - RNA, 19 nt, Homo sapiens
  misc_RNA (1)...(19): siRNA sense strand
uggcgggagugaacguuau

SEQ ID NO: 641548 - RNA, 19 nt, Homo sapiens
  misc_RNA (1)...(19): siRNA sense strand
caugggaaacaauucuuau

SEQ ID NO: 641549 - RNA, 19 nt, Homo sapiens
  misc_RNA (1)...(19): siRNA sense strand
auucucagcuuggauuuca

SEQ ID NO: 641550 - RNA, 19 nt, Homo sapiens
  misc_RNA (1)...(19): siRNA sense strand
aagauucucagcuuggauu

SEQ ID NO: 641551 - RNA, 19 nt, Homo sapiens
  misc_RNA (1)...(19): siRNA sense strand
ucaggaucauagucuguuc

SEQ ID NO: 641552 - RNA, 19 nt, Homo sapiens
  misc_RNA (1)...(19): siRNA sense strand
ggucaggaucauagucugu

SEQ ID NO: 641553 - RNA, 19 nt, Homo sapiens
  misc_RNA (1)...(19): siRNA sense strand
ggacaucucucuuucuaca

SEQ ID NO: 641554 - RNA, 19 nt, Homo sapiens
  misc_RNA (1)...(19): siRNA sense strand
gggagaacgugaacaggaa

SEQ ID NO: 641555 - RNA, 19 nt, Homo sapiens
  misc_RNA (1)...(19): siRNA sense strand
gagcugauccugucugaag

SEQ ID NO: 641556 - RNA, 19 nt, Homo sapiens
  misc_RNA (1)...(19): siRNA sense strand
ucacugcuauucaucuuuc

SEQ ID NO: 641557 - RNA, 19 nt, Homo sapiens
  misc_RNA (1)...(19): siRNA sense strand
ggacagcccagagcgcuuu

SEQ ID NO: 641558 - RNA, 19 nt, Homo sapiens
  misc_RNA (1)...(19): siRNA sense strand
cuggacaucucucuuucua

SEQ ID NO: 641559 - RNA, 19 nt, Homo sapiens
  misc_RNA (1)...(19): siRNA sense strand
ggucacugcuauucaucuu

SEQ ID NO: 641560 - RNA, 19 nt, Homo sapiens
  misc_RNA (1)...(19): siRNA sense strand
aggcgaagcuggagaaguc

SEQ ID NO: 641561 - RNA, 19 nt, Homo sapiens
  misc_RNA (1)...(19): siRNA sense strand
agaagucacuggagcaucu

SEQ ID NO: 641562 - RNA, 19 nt, Homo sapiens
  misc_RNA (1)...(19): siRNA sense strand
cuacgaggcuggacaucuc

SEQ ID NO: 641563 - RNA, 19 nt, Homo sapiens
  misc_RNA (1)...(19): siRNA sense strand
cgacugcggccacaacuuc

SEQ ID NO: 641564 - RNA, 19 nt, Homo sapiens
  misc_RNA (1)...(19): siRNA sense strand
cagaaguugugccuaugga

SEQ ID NO: 641565 - RNA, 19 nt, Homo sapiens
  misc_RNA (1)...(19): siRNA sense strand
ggaucuuucuggacuacga

SEQ ID NO: 641566 - RNA, 19 nt, Homo sapiens
  misc_RNA (1)...(19): siRNA sense strand
ccaucugccucgacuacuu

SEQ ID NO: 641567 - RNA, 19 nt, Homo sapiens
  misc_RNA (1)...(19): siRNA sense strand
uagagacacugcggagguu

SEQ ID NO: 641568 - RNA, 19 nt, Homo sapiens
  misc_RNA (1)...(19): siRNA sense strand
gcagggagaacgugaacag

SEQ ID NO: 641569 - RNA, 19 nt, Homo sapiens
  misc_RNA (1)...(19): siRNA sense strand
ggacuacgaggcuggacau

SEQ ID NO: 641570 - RNA, 19 nt, Homo sapiens
  misc_RNA (1)...(19): siRNA sense strand
uugcuaagauggccgagau

SEQ ID NO: 641571 - RNA, 19 nt, Homo sapiens
  misc_RNA (1)...(19): siRNA sense strand
ucaaggcgaagcuggagaa

SEQ ID NO: 641572 - RNA, 19 nt, Homo sapiens
  misc_RNA (1)...(19): siRNA sense strand
ggcuggacaucucucuuuc

SEQ ID NO: 641573 - RNA, 19 nt, Homo sapiens
  misc_RNA (1)...(19): siRNA sense strand
gcaggaugcguugcuguuc

SEQ ID NO: 641574 - RNA, 19 nt, Homo sapiens
  misc_RNA (1)...(19): siRNA sense strand
agaacgugcugggugaguu

SEQ ID NO: 641575 - RNA, 19 nt, Homo sapiens
  misc_RNA (1)...(19): siRNA sense strand
gcaggguccaggaugugaa

SEQ ID NO: 641576 - RNA, 19 nt, Homo sapiens
  misc_RNA (1)...(19): siRNA sense strand
acaucucucuuucuacagu

SEQ ID NO: 641577 - RNA, 19 nt, Homo sapiens
  misc_RNA (1)...(19): siRNA sense strand
aggcuggacaucucucuuu

SEQ ID NO: 641578 - RNA, 19 nt, Homo sapiens
  misc_RNA (1)...(19): siRNA sense strand
ggagaagucacuggagcau

SEQ ID NO: 641579 - RNA, 19 nt, Homo sapiens
  misc_RNA (1)...(19): siRNA sense strand
gaugggucacugcuauuca

SEQ ID NO: 641580 - RNA, 19 nt, Homo sapiens
  misc_RNA (1)...(19): siRNA sense strand
gaauacagcuuucaccaaa

SEQ ID NO: 641581 - RNA, 19 nt, Homo sapiens
  misc_RNA (1)...(19): siRNA sense strand
gaagagauccguucagaaa

SEQ ID NO: 641582 - RNA, 19 nt, Homo sapiens
  misc_RNA (1)...(19): siRNA sense strand
gcaccaaauucgucucuua

SEQ ID NO: 641583 - RNA, 19 nt, Homo sapiens
  misc_RNA (1)...(19): siRNA sense strand
gcagaaacuuugugaagaa

SEQ ID NO: 641584 - RNA, 19 nt, Homo sapiens
  misc_RNA (1)...(19): siRNA sense strand
gaaguaagaucaaguuguc

SEQ ID NO: 641585 - RNA, 19 nt, Homo sapiens
  misc_RNA (1)...(19): siRNA sense strand
acaaauagcaguuaccuua

SEQ ID NO: 641586 - RNA, 19 nt, Homo sapiens
  misc_RNA (1)...(19): siRNA sense strand
gaugaaggcuggcaccaaa

SEQ ID NO: 641587 - RNA, 19 nt, Homo sapiens
  misc_RNA (1)...(19): siRNA sense strand
gaaaaggaccaaacuauua

SEQ ID NO: 641588 - RNA, 19 nt, Homo sapiens
  misc_RNA (1)...(19): siRNA sense strand
gaugugacuuuguauauug

SEQ ID NO: 641589 - RNA, 19 nt, Homo sapiens
  misc_RNA (1)...(19): siRNA sense strand
ccaaauucgucucuuagua

SEQ ID NO: 641590 - RNA, 19 nt, Homo sapiens
  misc_RNA (1)...(19): siRNA sense strand
acaaggagcucgaggacua

SEQ ID NO: 641591 - RNA, 19 nt, Homo sapiens
  misc_RNA (1)...(19): siRNA sense strand
caaaggaaaucaaggugaa

SEQ ID NO: 641592 - RNA, 19 nt, Homo sapiens
  misc_RNA (1)...(19): siRNA sense strand
caaaggaucaccuggauuu

SEQ ID NO: 641593 - RNA, 19 nt, Homo sapiens
  misc_RNA (1)...(19): siRNA sense strand
gaacucacaagcaauguuu

SEQ ID NO: 641594 - RNA, 19 nt, Homo sapiens
  misc_RNA (1)...(19): siRNA sense strand
ggagacagcaugugagauu

SEQ ID NO: 641595 - RNA, 19 nt, Homo sapiens
  misc_RNA (1)...(19): siRNA sense strand
uaucagaacucacaagcaa

SEQ ID NO: 641596 - RNA, 19 nt, Homo sapiens
  misc_RNA (1)...(19): siRNA sense strand
caaauucgucucuuaguaa

SEQ ID NO: 641597 - RNA, 19 nt, Homo sapiens
  misc_RNA (1)...(19): siRNA sense strand
gaaguaacaucaaaaguug

SEQ ID NO: 641598 - RNA, 19 nt, Homo sapiens
  misc_RNA (1)...(19): siRNA sense strand
ugaaaugggugccaaagga

SEQ ID NO: 641599 - RNA, 19 nt, Homo sapiens
  misc_RNA (1)...(19): siRNA sense strand
guuaagacguuguuugaug

SEQ ID NO: 641600 - RNA, 19 nt, Homo sapiens
  misc_RNA (1)...(19): siRNA sense strand
guacugcuccgacagauuu

SEQ ID NO: 641601 - RNA, 19 nt, Homo sapiens
  misc_RNA (1)...(19): siRNA sense strand
uuagauggcucuuauagug

SEQ ID NO: 641602 - RNA, 19 nt, Homo sapiens
  misc_RNA (1)...(19): siRNA sense strand
caacaaccagcguaauuaa

SEQ ID NO: 641603 - RNA, 19 nt, Homo sapiens
  misc_RNA (1)...(19): siRNA sense strand
gagaugguguuccuggauu

SEQ ID NO: 641604 - RNA, 19 nt, Homo sapiens
  misc_RNA (1)...(19): siRNA sense strand
gaaacuuugugaagaaucu

SEQ ID NO: 641605 - RNA, 19 nt, Homo sapiens
  misc_RNA (1)...(19): siRNA sense strand
cagaagagauccguucaga

SEQ ID NO: 641606 - RNA, 19 nt, Homo sapiens
  misc_RNA (1)...(19): siRNA sense strand
uggaaaggauggauuaaug

SEQ ID NO: 641607 - RNA, 19 nt, Homo sapiens
  misc_RNA (1)...(19): siRNA sense strand
caugugagauuccuggauu

SEQ ID NO: 641608 - RNA, 19 nt, Homo sapiens
  misc_RNA (1)...(19): siRNA sense strand
aaaaguggcuugucaauau

SEQ ID NO: 641609 - RNA, 19 nt, Homo sapiens
  misc_RNA (1)...(19): siRNA sense strand
uccaggaucuccaggaaua

SEQ ID NO: 641610 - RNA, 19 nt, Homo sapiens
  misc_RNA (1)...(19): siRNA sense strand
gggaagugaugaagcagaa

SEQ ID NO: 641611 - RNA, 19 nt, Homo sapiens
  misc_RNA (1)...(19): siRNA sense strand
gacauagggccgaaguuua

SEQ ID NO: 641612 - RNA, 19 nt, Homo sapiens
  misc_RNA (1)...(19): siRNA sense strand
gacaaaggaucaccuggau

SEQ ID NO: 641613 - RNA, 19 nt, Homo sapiens
  misc_RNA (1)...(19): siRNA sense strand
agcaagagauaguaagaua

SEQ ID NO: 641614 - RNA, 19 nt, Homo sapiens
  misc_RNA (1)...(19): siRNA sense strand
gcaagagauaguaagauaa

SEQ ID NO: 641615 - RNA, 19 nt, Homo sapiens
  misc_RNA (1)...(19): siRNA sense strand
gaagagaguuuucagaaca

SEQ ID NO: 641616 - RNA, 19 nt, Homo sapiens
  misc_RNA (1)...(19): siRNA sense strand
gaaaggggauuugauauuc

SEQ ID NO: 641617 - RNA, 19 nt, Homo sapiens
  misc_RNA (1)...(19): siRNA sense strand
caaaggagacaaaggauca

SEQ ID NO: 641618 - RNA, 19 nt, Homo sapiens
  misc_RNA (1)...(19): siRNA sense strand
guauauugaugaccaacaa

SEQ ID NO: 641619 - RNA, 19 nt, Homo sapiens
  misc_RNA (1)...(19): siRNA sense strand
gauggaaggccacaaauag

SEQ ID NO: 641620 - RNA, 19 nt, Homo sapiens
  misc_RNA (1)...(19): siRNA sense strand
uuaagacguuguuugauga

SEQ ID NO: 641621 - RNA, 19 nt, Homo sapiens
  misc_RNA (1)...(19): siRNA sense strand
cgacaaguuugcacagaug

SEQ ID NO: 641622 - RNA, 19 nt, Homo sapiens
  misc_RNA (1)...(19): siRNA sense strand
caagaugugacuuuguaua

SEQ ID NO: 641623 - RNA, 19 nt, Homo sapiens
  misc_RNA (1)...(19): siRNA sense strand
ggaauccauacucuacuua

SEQ ID NO: 641624 - RNA, 19 nt, Homo sapiens
  misc_RNA (1)...(19): siRNA sense strand
gcucacaagugguuaccuu

SEQ ID NO: 641625 - RNA, 19 nt, Homo sapiens
  misc_RNA (1)...(19): siRNA sense strand
uaagggaagugaugaagca

SEQ ID NO: 641626 - RNA, 19 nt, Homo sapiens
  misc_RNA (1)...(19): siRNA sense strand
gaaguuuauucaaguugga

SEQ ID NO: 641627 - RNA, 19 nt, Homo sapiens
  misc_RNA (1)...(19): siRNA sense strand
uugcacagauguaauaaga

SEQ ID NO: 641628 - RNA, 19 nt, Homo sapiens
  misc_RNA (1)...(19): siRNA sense strand
ggacaaaggaaaucaaggu

SEQ ID NO: 641629 - RNA, 19 nt, Homo sapiens
  misc_RNA (1)...(19): siRNA sense strand
caaauagcaguuaccuuaa

SEQ ID NO: 641630 - RNA, 19 nt, Homo sapiens
  misc_RNA (1)...(19): siRNA sense strand
ugagauuccuggauuuaau

SEQ ID NO: 641631 - RNA, 19 nt, Homo sapiens
  misc_RNA (1)...(19): siRNA sense strand
gcucaagcagcaagagaua

SEQ ID NO: 641632 - RNA, 19 nt, Homo sapiens
  misc_RNA (1)...(19): siRNA sense strand
gaaccaggaagacauggaa

SEQ ID NO: 641633 - RNA, 19 nt, Homo sapiens
  misc_RNA (1)...(19): siRNA sense strand
uaagauagcagugguacuu

SEQ ID NO: 641634 - RNA, 19 nt, Homo sapiens
  misc_RNA (1)...(19): siRNA sense strand
cuaccagucuuacuucaga

SEQ ID NO: 641635 - RNA, 19 nt, Homo sapiens
  misc_RNA (1)...(19): siRNA sense strand
gauggcaagucccaagaug

SEQ ID NO: 641636 - RNA, 19 nt, Homo sapiens
  misc_RNA (1)...(19): siRNA sense strand
acauuucucugcaugguuu

SEQ ID NO: 641637 - RNA, 19 nt, Homo sapiens
  misc_RNA (1)...(19): siRNA sense strand
ggaaguaagaucaaguugu

SEQ ID NO: 641638 - RNA, 19 nt, Homo sapiens
  misc_RNA (1)...(19): siRNA sense strand
gcccuuacauccaguuuua

SEQ ID NO: 641639 - RNA, 19 nt, Homo sapiens
  misc_RNA (1)...(19): siRNA sense strand
ugacauagggccgaaguuu

SEQ ID NO: 641640 - RNA, 19 nt, Homo sapiens
  misc_RNA (1)...(19): siRNA sense strand
ggaaaccgaggauuaaugg

SEQ ID NO: 641641 - RNA, 19 nt, Homo sapiens
  misc_RNA (1)...(19): siRNA sense strand
gaucguggacuuccugguu

SEQ ID NO: 641642 - RNA, 19 nt, Homo sapiens
  misc_RNA (1)...(19): siRNA sense strand
acaacaaccagcguaauua

SEQ ID NO: 641643 - RNA, 19 nt, Homo sapiens
  misc_RNA (1)...(19): siRNA sense strand
ggaaggccauccaguuugc

SEQ ID NO: 641644 - RNA, 19 nt, Homo sapiens
  misc_RNA (1)...(19): siRNA sense strand
ggccgaaguuuauucaagu

SEQ ID NO: 641645 - RNA, 19 nt, Homo sapiens
  misc_RNA (1)...(19): siRNA sense strand
gaggugccauuggaucaaa

SEQ ID NO: 641646 - RNA, 19 nt, Homo sapiens
  misc_RNA (1)...(19): siRNA sense strand
gaugaaaggggauuugaua

SEQ ID NO: 641647 - RNA, 19 nt, Homo sapiens
  misc_RNA (1)...(19): siRNA sense strand
gccaaguccucacgauuuc

SEQ ID NO: 641648 - RNA, 19 nt, Homo sapiens
  misc_RNA (1)...(19): siRNA sense strand
ccagaaaacuuugaaauag

SEQ ID NO: 641649 - RNA, 19 nt, Homo sapiens
  misc_RNA (1)...(19): siRNA sense strand
cagaacaagaugugacuuu

SEQ ID NO: 641650 - RNA, 19 nt, Homo sapiens
  misc_RNA (1)...(19): siRNA sense strand
gcagcaagagauaguaaga

SEQ ID NO: 641651 - RNA, 19 nt, Homo sapiens
  misc_RNA (1)...(19): siRNA sense strand
ccucacgauuucugacuaa

SEQ ID NO: 641652 - RNA, 19 nt, Homo sapiens
  misc_RNA (1)...(19): siRNA sense strand
ggaauucaaggccaucaug

SEQ ID NO: 641653 - RNA, 19 nt, Homo sapiens
  misc_RNA (1)...(19): siRNA sense strand
agaacaagaugugacuuug

SEQ ID NO: 641654 - RNA, 19 nt, Homo sapiens
  misc_RNA (1)...(19): siRNA sense strand
caaguuaagacguuguuug

SEQ ID NO: 641655 - RNA, 19 nt, Homo sapiens
  misc_RNA (1)...(19): siRNA sense strand
caaccagcguaauuaaugg

SEQ ID NO: 641656 - RNA, 19 nt, Homo sapiens
  misc_RNA (1)...(19): siRNA sense strand
ccaacaagccuucgucuac

SEQ ID NO: 641657 - RNA, 19 nt, Homo sapiens
  misc_RNA (1)...(19): siRNA sense strand
uuagagcuauugccaacaa

SEQ ID NO: 641658 - RNA, 19 nt, Homo sapiens
  misc_RNA (1)...(19): siRNA sense strand
aacagaagaugccgaacuu

SEQ ID NO: 641659 - RNA, 19 nt, Homo sapiens
  misc_RNA (1)...(19): siRNA sense strand
gggccgaaguuuauucaag

SEQ ID NO: 641660 - RNA, 19 nt, Homo sapiens
  misc_RNA (1)...(19): siRNA sense strand
ggaaaggauggauuaaugg

SEQ ID NO: 641661 - RNA, 19 nt, Homo sapiens
  misc_RNA (1)...(19): siRNA sense strand
caagggugaucguggacuu

SEQ ID NO: 641662 - RNA, 19 nt, Homo sapiens
  misc_RNA (1)...(19): siRNA sense strand
guggaagacuauauugcaa

SEQ ID NO: 641663 - RNA, 19 nt, Homo sapiens
  misc_RNA (1)...(19): siRNA sense strand
caacaagccuucgucuacu

SEQ ID NO: 641664 - RNA, 19 nt, Homo sapiens
  misc_RNA (1)...(19): siRNA sense strand
gaagaugccgaacuuagag

SEQ ID NO: 641665 - RNA, 19 nt, Homo sapiens
  misc_RNA (1)...(19): siRNA sense strand
gugaugaagcagaaacuuu

SEQ ID NO: 641666 - RNA, 19 nt, Homo sapiens
  misc_RNA (1)...(19): siRNA sense strand
caaguuugcacagauguaa

SEQ ID NO: 641667 - RNA, 19 nt, Homo sapiens
  misc_RNA (1)...(19): siRNA sense strand
agggaugccugguuuaaug

SEQ ID NO: 641668 - RNA, 19 nt, Homo sapiens
  misc_RNA (1)...(19): siRNA sense strand
ggagaaccaggaagacaug

SEQ ID NO: 641669 - RNA, 19 nt, Homo sapiens
  misc_RNA (1)...(19): siRNA sense strand
gagcccagcuaccagucuu

SEQ ID NO: 641670 - RNA, 19 nt, Homo sapiens
  misc_RNA (1)...(19): siRNA sense strand
ugauggaaggccacaaaua

SEQ ID NO: 641671 - RNA, 19 nt, Homo sapiens
  misc_RNA (1)...(19): siRNA sense strand
agaugguguuccuggauua

SEQ ID NO: 641672 - RNA, 19 nt, Homo sapiens
  misc_RNA (1)...(19): siRNA sense strand
cagaguggaagaauuagaa

SEQ ID NO: 641673 - RNA, 19 nt, Homo sapiens
  misc_RNA (1)...(19): siRNA sense strand
ggacaaccuggucaagaug

SEQ ID NO: 641674 - RNA, 19 nt, Homo sapiens
  misc_RNA (1)...(19): siRNA sense strand
cgucaaggaugcagcucaa

SEQ ID NO: 641675 - RNA, 19 nt, Homo sapiens
  misc_RNA (1)...(19): siRNA sense strand
guaauugccagaagagauc

SEQ ID NO: 641676 - RNA, 19 nt, Homo sapiens
  misc_RNA (1)...(19): siRNA sense strand
ugaugaagcagaaacuuug

SEQ ID NO: 641677 - RNA, 19 nt, Homo sapiens
  misc_RNA (1)...(19): siRNA sense strand
acauagggccgaaguuuau

SEQ ID NO: 641678 - RNA, 19 nt, Homo sapiens
  misc_RNA (1)...(19): siRNA sense strand
uggacaaccuggucaagau

SEQ ID NO: 641679 - RNA, 19 nt, Homo sapiens
  misc_RNA (1)...(19): siRNA sense strand
acauggaaaggauggauua

SEQ ID NO: 641680 - RNA, 19 nt, Homo sapiens
  misc_RNA (1)...(19): siRNA sense strand
gcacggagcugaacgauga

SEQ ID NO: 641681 - RNA, 19 nt, Homo sapiens
  misc_RNA (1)...(19): siRNA sense strand
gaagaucacucucaucaau

SEQ ID NO: 641682 - RNA, 19 nt, Homo sapiens
  misc_RNA (1)...(19): siRNA sense strand
ggacaaggaugagaauuug

SEQ ID NO: 641683 - RNA, 19 nt, Homo sapiens
  misc_RNA (1)...(19): siRNA sense strand
gaacaacucccaccacuuc

SEQ ID NO: 641684 - RNA, 19 nt, Homo sapiens
  misc_RNA (1)...(19): siRNA sense strand
ggaggccucucgcuucuuu

SEQ ID NO: 641685 - RNA, 19 nt, Homo sapiens
  misc_RNA (1)...(19): siRNA sense strand
cccaagacauggacaauga

SEQ ID NO: 641686 - RNA, 19 nt, Homo sapiens
  misc_RNA (1)...(19): siRNA sense strand
ggacagagagaccaaguca

SEQ ID NO: 641687 - RNA, 19 nt, Homo sapiens
  misc_RNA (1)...(19): siRNA sense strand
gcggagugcugaccuugaa

SEQ ID NO: 641688 - RNA, 19 nt, Homo sapiens
  misc_RNA (1)...(19): siRNA sense strand
cuacgacuuugaucucuuu

SEQ ID NO: 641689 - RNA, 19 nt, Homo sapiens
  misc_RNA (1)...(19): siRNA sense strand
gaauaccaacagcaucuuu

SEQ ID NO: 641690 - RNA, 19 nt, Homo sapiens
  misc_RNA (1)...(19): siRNA sense strand
caacuuggccaucaucauc

SEQ ID NO: 641691 - RNA, 19 nt, Homo sapiens
  misc_RNA (1)...(19): siRNA sense strand
accaaccacuucuuugaua

SEQ ID NO: 641692 - RNA, 19 nt, Homo sapiens
  misc_RNA (1)...(19): siRNA sense strand
ggaaggcggacauucguau

SEQ ID NO: 641693 - RNA, 19 nt, Homo sapiens
  misc_RNA (1)...(19): siRNA sense strand
acagagagaccaagucaga

SEQ ID NO: 641694 - RNA, 19 nt, Homo sapiens
  misc_RNA (1)...(19): siRNA sense strand
gaccuucaauauccugguu

SEQ ID NO: 641695 - RNA, 19 nt, Homo sapiens
  misc_RNA (1)...(19): siRNA sense strand
ccacuucuuugauacauac

SEQ ID NO: 641696 - RNA, 19 nt, Homo sapiens
  misc_RNA (1)...(19): siRNA sense strand
gacaagaccaggccucugu

SEQ ID NO: 641697 - RNA, 19 nt, Homo sapiens
  misc_RNA (1)...(19): siRNA sense strand
ucaccaaccacuucuuuga

SEQ ID NO: 641698 - RNA, 19 nt, Homo sapiens
  misc_RNA (1)...(19): siRNA sense strand
ggucaacgccacagaucaa

SEQ ID NO: 641699 - RNA, 19 nt, Homo sapiens
  misc_RNA (1)...(19): siRNA sense strand
gaaggugaacauccagguu

SEQ ID NO: 641700 - RNA, 19 nt, Homo sapiens
  misc_RNA (1)...(19): siRNA sense strand
guucuucugugacccaguu

SEQ ID NO: 641701 - RNA, 19 nt, Homo sapiens
  misc_RNA (1)...(19): siRNA sense strand
ucaccacgaccuucaauau

SEQ ID NO: 641702 - RNA, 19 nt, Homo sapiens
  misc_RNA (1)...(19): siRNA sense strand
gagugugccugaccaugug

SEQ ID NO: 641703 - RNA, 19 nt, Homo sapiens
  misc_RNA (1)...(19): siRNA sense strand
auacauaccugcugaucag

SEQ ID NO: 641704 - RNA, 19 nt, Homo sapiens
  misc_RNA (1)...(19): siRNA sense strand
gaaggcggacauucguauu

SEQ ID NO: 641705 - RNA, 19 nt, Homo sapiens
  misc_RNA (1)...(19): siRNA sense strand
gcagcguccucuacuccuu

SEQ ID NO: 641706 - RNA, 19 nt, Homo sapiens
  misc_RNA (1)...(19): siRNA sense strand
ggacacgccuguggguucu

SEQ ID NO: 641707 - RNA, 19 nt, Homo sapiens
  misc_RNA (1)...(19): siRNA sense strand
uggacaaggaugagaauuu

SEQ ID NO: 641708 - RNA, 19 nt, Homo sapiens
  misc_RNA (1)...(19): siRNA sense strand
ggcagccacuggacagaga

SEQ ID NO: 641709 - RNA, 19 nt, Homo sapiens
  misc_RNA (1)...(19): siRNA sense strand
ccuguggguucuucuguga

SEQ ID NO: 641710 - RNA, 19 nt, Homo sapiens
  misc_RNA (1)...(19): siRNA sense strand
ugaaccggcugcccuucuu

SEQ ID NO: 641711 - RNA, 19 nt, Homo sapiens
  misc_RNA (1)...(19): siRNA sense strand
caccaucguuucagggaau

SEQ ID NO: 641712 - RNA, 19 nt, Homo sapiens
  misc_RNA (1)...(19): siRNA sense strand
gauacauaccugcugauca

SEQ ID NO: 641713 - RNA, 19 nt, Homo sapiens
  misc_RNA (1)...(19): siRNA sense strand
gcuacgacuuugaucucuu

SEQ ID NO: 641714 - RNA, 19 nt, Homo sapiens
  misc_RNA (1)...(19): siRNA sense strand
ggaacaacucccaccacuu

SEQ ID NO: 641715 - RNA, 19 nt, Homo sapiens
  misc_RNA (1)...(19): siRNA sense strand
gcgcccacauuucacaauc

SEQ ID NO: 641716 - RNA, 19 nt, Homo sapiens
  misc_RNA (1)...(19): siRNA sense strand
gagagaccaagucagaguu

SEQ ID NO: 641717 - RNA, 19 nt, Homo sapiens
  misc_RNA (1)...(19): siRNA sense strand
cgccacagaucaagacaag

SEQ ID NO: 641718 - RNA, 19 nt, Homo sapiens
  misc_RNA (1)...(19): siRNA sense strand
ggagugcugaccuugaaug

SEQ ID NO: 641719 - RNA, 19 nt, Homo sapiens
  misc_RNA (1)...(19): siRNA sense strand
gggaauaccaacagcaucu

SEQ ID NO: 641720 - RNA, 19 nt, Homo sapiens
  misc_RNA (1)...(19): siRNA sense strand
ccgcaucccugagaauaca

SEQ ID NO: 641721 - RNA, 19 nt, Homo sapiens
  misc_RNA (1)...(19): siRNA sense strand
ggacgcccaucuucaucgu

SEQ ID NO: 641722 - RNA, 19 nt, Homo sapiens
  misc_RNA (1)...(19): siRNA sense strand
ccacagaucaagacaagac

SEQ ID NO: 641723 - RNA, 19 nt, Homo sapiens
  misc_RNA (1)...(19): siRNA sense strand
gccagccacuguacaacau

SEQ ID NO: 641724 - RNA, 19 nt, Homo sapiens
  misc_RNA (1)...(19): siRNA sense strand
ccaaccacuucuuugauac

SEQ ID NO: 641725 - RNA, 19 nt, Homo sapiens
  misc_RNA (1)...(19): siRNA sense strand
gagaccaagucagaguuca

SEQ ID NO: 641726 - RNA, 19 nt, Homo sapiens
  misc_RNA (1)...(19): siRNA sense strand
gggaaggcggacauucgua

SEQ ID NO: 641727 - RNA, 19 nt, Homo sapiens
  misc_RNA (1)...(19): siRNA sense strand
gcuuugcccuuccacucuu

SEQ ID NO: 641728 - RNA, 19 nt, Homo sapiens
  misc_RNA (1)...(19): siRNA sense strand
ccauagaccaggauaaagg

SEQ ID NO: 641729 - RNA, 19 nt, Homo sapiens
  misc_RNA (1)...(19): siRNA sense strand
caacaucuacgagcauucu

SEQ ID NO: 641730 - RNA, 19 nt, Homo sapiens
  misc_RNA (1)...(19): siRNA sense strand
ccuaccagcucacggucaa

SEQ ID NO: 641731 - RNA, 19 nt, Homo sapiens
  misc_RNA (1)...(19): siRNA sense strand
uccgggagcuggacuacga

SEQ ID NO: 641732 - RNA, 19 nt, Homo sapiens
  misc_RNA (1)...(19): siRNA sense strand
ggaccgcuacgacuuugau

SEQ ID NO: 641733 - RNA, 19 nt, Homo sapiens
  misc_RNA (1)...(19): siRNA sense strand
cgccauagaccaggauaaa

SEQ ID NO: 641734 - RNA, 19 nt, Homo sapiens
  misc_RNA (1)...(19): siRNA sense strand
gcgcaucaucaccgccaua

SEQ ID NO: 641735 - RNA, 19 nt, Homo sapiens
  misc_RNA (1)...(19): siRNA sense strand
acaucagccuguacgagaa

SEQ ID NO: 641736 - RNA, 19 nt, Homo sapiens
  misc_RNA (1)...(19): siRNA sense strand
caucaucaccgccauagac

SEQ ID NO: 641737 - RNA, 19 nt, Homo sapiens
  misc_RNA (1)...(19): siRNA sense strand
uguccacccuggccaacuu

SEQ ID NO: 641738 - RNA, 19 nt, Homo sapiens
  misc_RNA (1)...(19): siRNA sense strand
cagccacuguacaacauca

SEQ ID NO: 641739 - RNA, 19 nt, Homo sapiens
  misc_RNA (1)...(19): siRNA sense strand
caacucccaccacuucauc

SEQ ID NO: 641740 - RNA, 19 nt, Homo sapiens
  misc_RNA (1)...(19): siRNA sense strand
ucaucaaccugccuuacag

SEQ ID NO: 641741 - RNA, 19 nt, Homo sapiens
  misc_RNA (1)...(19): siRNA sense strand
guccgcaucccugagaaua

SEQ ID NO: 641742 - RNA, 19 nt, Homo sapiens
  misc_RNA (1)...(19): siRNA sense strand
gaaccggcugcccuucuuc

SEQ ID NO: 641743 - RNA, 19 nt, Homo sapiens
  misc_RNA (1)...(19): siRNA sense strand
ggaauaccaacagcaucuu

SEQ ID NO: 641744 - RNA, 19 nt, Homo sapiens
  misc_RNA (1)...(19): siRNA sense strand
cauagaccaggauaaagga

SEQ ID NO: 641745 - RNA, 19 nt, Homo sapiens
  misc_RNA (1)...(19): siRNA sense strand
uuugaucucuuugccaaug

SEQ ID NO: 641746 - RNA, 19 nt, Homo sapiens
  misc_RNA (1)...(19): siRNA sense strand
caaccacuucuuugauaca

SEQ ID NO: 641747 - RNA, 19 nt, Homo sapiens
  misc_RNA (1)...(19): siRNA sense strand
gaguacagcguggccauca

SEQ ID NO: 641748 - RNA, 19 nt, Homo sapiens
  misc_RNA (1)...(19): siRNA sense strand
cacggaaggugaacaucca

SEQ ID NO: 641749 - RNA, 19 nt, Homo sapiens
  misc_RNA (1)...(19): siRNA sense strand
cuucaccaaccacuucuuu

SEQ ID NO: 641750 - RNA, 19 nt, Homo sapiens
  misc_RNA (1)...(19): siRNA sense strand
guggaccgcuacgacuuug

SEQ ID NO: 641751 - RNA, 19 nt, Homo sapiens
  misc_RNA (1)...(19): siRNA sense strand
gagaauuugggccugaaca

SEQ ID NO: 641752 - RNA, 19 nt, Homo sapiens
  misc_RNA (1)...(19): siRNA sense strand
ccuucaauauccugguuau

SEQ ID NO: 641753 - RNA, 19 nt, Homo sapiens
  misc_RNA (1)...(19): siRNA sense strand
ggcuucauccugacuguga

SEQ ID NO: 641754 - RNA, 19 nt, Homo sapiens
  misc_RNA (1)...(19): siRNA sense strand
uuacagcaccaacaucuac

SEQ ID NO: 641755 - RNA, 19 nt, Homo sapiens
  misc_RNA (1)...(19): siRNA sense strand
gcuaugccaaggugaagau

SEQ ID NO: 641756 - RNA, 19 nt, Homo sapiens
  misc_RNA (1)...(19): siRNA sense strand
cagcauguuugagguguac

SEQ ID NO: 641757 - RNA, 19 nt, Homo sapiens
  misc_RNA (1)...(19): siRNA sense strand
gugcugaucucuggaugcu

SEQ ID NO: 641758 - RNA, 19 nt, Homo sapiens
  misc_RNA (1)...(19): siRNA sense strand
acagcauguuugaggugua

SEQ ID NO: 641759 - RNA, 19 nt, Homo sapiens
  misc_RNA (1)...(19): siRNA sense strand
gcacggagcugaacgauga

SEQ ID NO: 641760 - RNA, 19 nt, Homo sapiens
  misc_RNA (1)...(19): siRNA sense strand
gaagaucacucucaucaau

SEQ ID NO: 641761 - RNA, 19 nt, Homo sapiens
  misc_RNA (1)...(19): siRNA sense strand
ggacaaggaugagaauuug

SEQ ID NO: 641762 - RNA, 19 nt, Homo sapiens
  misc_RNA (1)...(19): siRNA sense strand
gaacaacucccaccacuuc

SEQ ID NO: 641763 - RNA, 19 nt, Homo sapiens
  misc_RNA (1)...(19): siRNA sense strand
ggaggccucucgcuucuuu

SEQ ID NO: 641764 - RNA, 19 nt, Homo sapiens
  misc_RNA (1)...(19): siRNA sense strand
cccaagacauggacaauga

SEQ ID NO: 641765 - RNA, 19 nt, Homo sapiens
  misc_RNA (1)...(19): siRNA sense strand
ggacagagagaccaaguca

SEQ ID NO: 641766 - RNA, 19 nt, Homo sapiens
  misc_RNA (1)...(19): siRNA sense strand
gcggagugcugaccuugaa

SEQ ID NO: 641767 - RNA, 19 nt, Homo sapiens
  misc_RNA (1)...(19): siRNA sense strand
cuacgacuuugaucucuuu

SEQ ID NO: 641768 - RNA, 19 nt, Homo sapiens
  misc_RNA (1)...(19): siRNA sense strand
gaauaccaacagcaucuuu

SEQ ID NO: 641769 - RNA, 19 nt, Homo sapiens
  misc_RNA (1)...(19): siRNA sense strand
caacuuggccaucaucauc

SEQ ID NO: 641770 - RNA, 19 nt, Homo sapiens
  misc_RNA (1)...(19): siRNA sense strand
accaaccacuucuuugaua

SEQ ID NO: 641771 - RNA, 19 nt, Homo sapiens
  misc_RNA (1)...(19): siRNA sense strand
ggaaggcggacauucguau

SEQ ID NO: 641772 - RNA, 19 nt, Homo sapiens
  misc_RNA (1)...(19): siRNA sense strand
acagagagaccaagucaga

SEQ ID NO: 641773 - RNA, 19 nt, Homo sapiens
  misc_RNA (1)...(19): siRNA sense strand
gaccuucaauauccugguu

SEQ ID NO: 641774 - RNA, 19 nt, Homo sapiens
  misc_RNA (1)...(19): siRNA sense strand
ccacuucuuugauacauac

SEQ ID NO: 641775 - RNA, 19 nt, Homo sapiens
  misc_RNA (1)...(19): siRNA sense strand
gacaagaccaggccucugu

SEQ ID NO: 641776 - RNA, 19 nt, Homo sapiens
  misc_RNA (1)...(19): siRNA sense strand
ucaccaaccacuucuuuga

SEQ ID NO: 641777 - RNA, 19 nt, Homo sapiens
  misc_RNA (1)...(19): siRNA sense strand
ggucaacgccacagaucaa

SEQ ID NO: 641778 - RNA, 19 nt, Homo sapiens
  misc_RNA (1)...(19): siRNA sense strand
gaaggugaacauccagguu

SEQ ID NO: 641779 - RNA, 19 nt, Homo sapiens
  misc_RNA (1)...(19): siRNA sense strand
guucuucugugacccaguu

SEQ ID NO: 641780 - RNA, 19 nt, Homo sapiens
  misc_RNA (1)...(19): siRNA sense strand
ucaccacgaccuucaauau

SEQ ID NO: 641781 - RNA, 19 nt, Homo sapiens
  misc_RNA (1)...(19): siRNA sense strand
gagugugccugaccaugug

SEQ ID NO: 641782 - RNA, 19 nt, Homo sapiens
  misc_RNA (1)...(19): siRNA sense strand
auacauaccugcugaucag

SEQ ID NO: 641783 - RNA, 19 nt, Homo sapiens
  misc_RNA (1)...(19): siRNA sense strand
gaaggcggacauucguauu

SEQ ID NO: 641784 - RNA, 19 nt, Homo sapiens
  misc_RNA (1)...(19): siRNA sense strand
gcagcguccucuacuccuu

SEQ ID NO: 641785 - RNA, 19 nt, Homo sapiens
  misc_RNA (1)...(19): siRNA sense strand
ggacacgccuguggguucu

SEQ ID NO: 641786 - RNA, 19 nt, Homo sapiens
  misc_RNA (1)...(19): siRNA sense strand
uggacaaggaugagaauuu

SEQ ID NO: 641787 - RNA, 19 nt, Homo sapiens
  misc_RNA (1)...(19): siRNA sense strand
ggcagccacuggacagaga

SEQ ID NO: 641788 - RNA, 19 nt, Homo sapiens
  misc_RNA (1)...(19): siRNA sense strand
ccuguggguucuucuguga

SEQ ID NO: 641789 - RNA, 19 nt, Homo sapiens
  misc_RNA (1)...(19): siRNA sense strand
ugaaccggcugcccuucuu

SEQ ID NO: 641790 - RNA, 19 nt, Homo sapiens
  misc_RNA (1)...(19): siRNA sense strand
caccaucguuucagggaau

SEQ ID NO: 641791 - RNA, 19 nt, Homo sapiens
  misc_RNA (1)...(19): siRNA sense strand
gauacauaccugcugauca

SEQ ID NO: 641792 - RNA, 19 nt, Homo sapiens
  misc_RNA (1)...(19): siRNA sense strand
gcuacgacuuugaucucuu

SEQ ID NO: 641793 - RNA, 19 nt, Homo sapiens
  misc_RNA (1)...(19): siRNA sense strand
ggaacaacucccaccacuu

SEQ ID NO: 641794 - RNA, 19 nt, Homo sapiens
  misc_RNA (1)...(19): siRNA sense strand
gcgcccacauuucacaauc

SEQ ID NO: 641795 - RNA, 19 nt, Homo sapiens
  misc_RNA (1)...(19): siRNA sense strand
gagagaccaagucagaguu

SEQ ID NO: 641796 - RNA, 19 nt, Homo sapiens
  misc_RNA (1)...(19): siRNA sense strand
cgccacagaucaagacaag

SEQ ID NO: 641797 - RNA, 19 nt, Homo sapiens
  misc_RNA (1)...(19): siRNA sense strand
ggagugcugaccuugaaug

SEQ ID NO: 641798 - RNA, 19 nt, Homo sapiens
  misc_RNA (1)...(19): siRNA sense strand
gggaauaccaacagcaucu

SEQ ID NO: 641799 - RNA, 19 nt, Homo sapiens
  misc_RNA (1)...(19): siRNA sense strand
ccgcaucccugagaauaca

SEQ ID NO: 641800 - RNA, 19 nt, Homo sapiens
  misc_RNA (1)...(19): siRNA sense strand
ggacgcccaucuucaucgu

SEQ ID NO: 641801 - RNA, 19 nt, Homo sapiens
  misc_RNA (1)...(19): siRNA sense strand
ccacagaucaagacaagac

SEQ ID NO: 641802 - RNA, 19 nt, Homo sapiens
  misc_RNA (1)...(19): siRNA sense strand
gccagccacuguacaacau

SEQ ID NO: 641803 - RNA, 19 nt, Homo sapiens
  misc_RNA (1)...(19): siRNA sense strand
ccaaccacuucuuugauac

SEQ ID NO: 641804 - RNA, 19 nt, Homo sapiens
  misc_RNA (1)...(19): siRNA sense strand
gagaccaagucagaguuca

SEQ ID NO: 641805 - RNA, 19 nt, Homo sapiens
  misc_RNA (1)...(19): siRNA sense strand
gggaaggcggacauucgua

SEQ ID NO: 641806 - RNA, 19 nt, Homo sapiens
  misc_RNA (1)...(19): siRNA sense strand
gcuuugcccuuccacucuu

SEQ ID NO: 641807 - RNA, 19 nt, Homo sapiens
  misc_RNA (1)...(19): siRNA sense strand
ccauagaccaggauaaagg

SEQ ID NO: 641808 - RNA, 19 nt, Homo sapiens
  misc_RNA (1)...(19): siRNA sense strand
caacaucuacgagcauucu

SEQ ID NO: 641809 - RNA, 19 nt, Homo sapiens
  misc_RNA (1)...(19): siRNA sense strand
ccuaccagcucacggucaa

SEQ ID NO: 641810 - RNA, 19 nt, Homo sapiens
  misc_RNA (1)...(19): siRNA sense strand
uccgggagcuggacuacga

SEQ ID NO: 641811 - RNA, 19 nt, Homo sapiens
  misc_RNA (1)...(19): siRNA sense strand
ggaccgcuacgacuuugau

SEQ ID NO: 641812 - RNA, 19 nt, Homo sapiens
  misc_RNA (1)...(19): siRNA sense strand
cgccauagaccaggauaaa

SEQ ID NO: 641813 - RNA, 19 nt, Homo sapiens
  misc_RNA (1)...(19): siRNA sense strand
gcgcaucaucaccgccaua

SEQ ID NO: 641814 - RNA, 19 nt, Homo sapiens
  misc_RNA (1)...(19): siRNA sense strand
acaucagccuguacgagaa

SEQ ID NO: 641815 - RNA, 19 nt, Homo sapiens
  misc_RNA (1)...(19): siRNA sense strand
caucaucaccgccauagac

SEQ ID NO: 641816 - RNA, 19 nt, Homo sapiens
  misc_RNA (1)...(19): siRNA sense strand
uguccacccuggccaacuu

SEQ ID NO: 641817 - RNA, 19 nt, Homo sapiens
  misc_RNA (1)...(19): siRNA sense strand
cagccacuguacaacauca

SEQ ID NO: 641818 - RNA, 19 nt, Homo sapiens
  misc_RNA (1)...(19): siRNA sense strand
caacucccaccacuucauc

SEQ ID NO: 641819 - RNA, 19 nt, Homo sapiens
  misc_RNA (1)...(19): siRNA sense strand
ucaucaaccugccuuacag

SEQ ID NO: 641820 - RNA, 19 nt, Homo sapiens
  misc_RNA (1)...(19): siRNA sense strand
guccgcaucccugagaaua

SEQ ID NO: 641821 - RNA, 19 nt, Homo sapiens
  misc_RNA (1)...(19): siRNA sense strand
gaaccggcugcccuucuuc

SEQ ID NO: 641822 - RNA, 19 nt, Homo sapiens
  misc_RNA (1)...(19): siRNA sense strand
ggaauaccaacagcaucuu

SEQ ID NO: 641823 - RNA, 19 nt, Homo sapiens
  misc_RNA (1)...(19): siRNA sense strand
cauagaccaggauaaagga

SEQ ID NO: 641824 - RNA, 19 nt, Homo sapiens
  misc_RNA (1)...(19): siRNA sense strand
uuugaucucuuugccaaug

SEQ ID NO: 641825 - RNA, 19 nt, Homo sapiens
  misc_RNA (1)...(19): siRNA sense strand
caaccacuucuuugauaca

SEQ ID NO: 641826 - RNA, 19 nt, Homo sapiens
  misc_RNA (1)...(19): siRNA sense strand
gaguacagcguggccauca

SEQ ID NO: 641827 - RNA, 19 nt, Homo sapiens
  misc_RNA (1)...(19): siRNA sense strand
cacggaaggugaacaucca

SEQ ID NO: 641828 - RNA, 19 nt, Homo sapiens
  misc_RNA (1)...(19): siRNA sense strand
cuucaccaaccacuucuuu

SEQ ID NO: 641829 - RNA, 19 nt, Homo sapiens
  misc_RNA (1)...(19): siRNA sense strand
guggaccgcuacgacuuug

SEQ ID NO: 641830 - RNA, 19 nt, Homo sapiens
  misc_RNA (1)...(19): siRNA sense strand
gagaauuugggccugaaca

SEQ ID NO: 641831 - RNA, 19 nt, Homo sapiens
  misc_RNA (1)...(19): siRNA sense strand
ccuucaauauccugguuau

SEQ ID NO: 641832 - RNA, 19 nt, Homo sapiens
  misc_RNA (1)...(19): siRNA sense strand
ggcuucauccugacuguga

SEQ ID NO: 641833 - RNA, 19 nt, Homo sapiens
  misc_RNA (1)...(19): siRNA sense strand
uuacagcaccaacaucuac

SEQ ID NO: 641834 - RNA, 19 nt, Homo sapiens
  misc_RNA (1)...(19): siRNA sense strand
gcuaugccaaggugaagau

SEQ ID NO: 641835 - RNA, 19 nt, Homo sapiens
  misc_RNA (1)...(19): siRNA sense strand
cagcauguuugagguguac

SEQ ID NO: 641836 - RNA, 19 nt, Homo sapiens
  misc_RNA (1)...(19): siRNA sense strand
gugcugaucucuggaugcu

SEQ ID NO: 641837 - RNA, 19 nt, Homo sapiens
  misc_RNA (1)...(19): siRNA sense strand
acagcauguuugaggugua

SEQ ID NO: 641838 - RNA, 19 nt, Homo sapiens
  misc_RNA (1)...(19): siRNA sense strand
ccacagaaccuaagaacua

SEQ ID NO: 641839 - RNA, 19 nt, Homo sapiens
  misc_RNA (1)...(19): siRNA sense strand
gaaacggauccacuccuua

SEQ ID NO: 641840 - RNA, 19 nt, Homo sapiens
  misc_RNA (1)...(19): siRNA sense strand
caacaauggcgcaggcuuu

SEQ ID NO: 641841 - RNA, 19 nt, Homo sapiens
  misc_RNA (1)...(19): siRNA sense strand
gaaggcccagcaagaauuu

SEQ ID NO: 641842 - RNA, 19 nt, Homo sapiens
  misc_RNA (1)...(19): siRNA sense strand
gaagggcaacacagcagua

SEQ ID NO: 641843 - RNA, 19 nt, Homo sapiens
  misc_RNA (1)...(19): siRNA sense strand
ugaaacggauccacuccuu

SEQ ID NO: 641844 - RNA, 19 nt, Homo sapiens
  misc_RNA (1)...(19): siRNA sense strand
gagugacaguucauucaau

SEQ ID NO: 641845 - RNA, 19 nt, Homo sapiens
  misc_RNA (1)...(19): siRNA sense strand
gcacagcuacucgacagaa

SEQ ID NO: 641846 - RNA, 19 nt, Homo sapiens
  misc_RNA (1)...(19): siRNA sense strand
gcauugcugugcuaggaau

SEQ ID NO: 641847 - RNA, 19 nt, Homo sapiens
  misc_RNA (1)...(19): siRNA sense strand
gagcagagacggcggaaac

SEQ ID NO: 641848 - RNA, 19 nt, Homo sapiens
  misc_RNA (1)...(19): siRNA sense strand
cacagaaccuaagaacuau

SEQ ID NO: 641849 - RNA, 19 nt, Homo sapiens
  misc_RNA (1)...(19): siRNA sense strand
aaacggauccacuccuuau

SEQ ID NO: 641850 - RNA, 19 nt, Homo sapiens
  misc_RNA (1)...(19): siRNA sense strand
ggagugacaguucauucaa

SEQ ID NO: 641851 - RNA, 19 nt, Homo sapiens
  misc_RNA (1)...(19): siRNA sense strand
agugacaguucauucaauu

SEQ ID NO: 641852 - RNA, 19 nt, Homo sapiens
  misc_RNA (1)...(19): siRNA sense strand
ucagaaggcccagcaagaa

SEQ ID NO: 641853 - RNA, 19 nt, Homo sapiens
  misc_RNA (1)...(19): siRNA sense strand
ggaauugucaugcugaaac

SEQ ID NO: 641854 - RNA, 19 nt, Homo sapiens
  misc_RNA (1)...(19): siRNA sense strand
ugacaguucauucaauuuc

SEQ ID NO: 641855 - RNA, 19 nt, Homo sapiens
  misc_RNA (1)...(19): siRNA sense strand
gaauuucagaagacuguau

SEQ ID NO: 641856 - RNA, 19 nt, Homo sapiens
  misc_RNA (1)...(19): siRNA sense strand
gcucuucacuggcauugcu

SEQ ID NO: 641857 - RNA, 19 nt, Homo sapiens
  misc_RNA (1)...(19): siRNA sense strand
gacaguucauucaauuucu

SEQ ID NO: 641858 - RNA, 19 nt, Homo sapiens
  misc_RNA (1)...(19): siRNA sense strand
cuacucgacagaacaauug

SEQ ID NO: 641859 - RNA, 19 nt, Homo sapiens
  misc_RNA (1)...(19): siRNA sense strand
cguccaggaugugcucuuu

SEQ ID NO: 641860 - RNA, 19 nt, Homo sapiens
  misc_RNA (1)...(19): siRNA sense strand
gaauugucaugcugaaacg

SEQ ID NO: 641861 - RNA, 19 nt, Homo sapiens
  misc_RNA (1)...(19): siRNA sense strand
gcuacucgacagaacaauu

SEQ ID NO: 641862 - RNA, 19 nt, Homo sapiens
  misc_RNA (1)...(19): siRNA sense strand
agaaggcccagcaagaauu

SEQ ID NO: 641863 - RNA, 19 nt, Homo sapiens
  misc_RNA (1)...(19): siRNA sense strand
ggaaggcagaggaguugga

SEQ ID NO: 641864 - RNA, 19 nt, Homo sapiens
  misc_RNA (1)...(19): siRNA sense strand
gaaccgcagcugccaaugc

SEQ ID NO: 641865 - RNA, 19 nt, Homo sapiens
  misc_RNA (1)...(19): siRNA sense strand
uggcauugcugugcuagga

SEQ ID NO: 641866 - RNA, 19 nt, Homo sapiens
  misc_RNA (1)...(19): siRNA sense strand
ccaagaauuucagaagacu

SEQ ID NO: 641867 - RNA, 19 nt, Homo sapiens
  misc_RNA (1)...(19): siRNA sense strand
ggcgcaggcuuugggcuuu

SEQ ID NO: 641868 - RNA, 19 nt, Homo sapiens
  misc_RNA (1)...(19): siRNA sense strand
cagaaggcccagcaagaau

SEQ ID NO: 641869 - RNA, 19 nt, Homo sapiens
  misc_RNA (1)...(19): siRNA sense strand
uccaggaugugcucuuugu

SEQ ID NO: 641870 - RNA, 19 nt, Homo sapiens
  misc_RNA (1)...(19): siRNA sense strand
uaggaauugucaugcugaa

SEQ ID NO: 641871 - RNA, 19 nt, Homo sapiens
  misc_RNA (1)...(19): siRNA sense strand
gcuccuuugucugcuggua

SEQ ID NO: 641872 - RNA, 19 nt, Homo sapiens
  misc_RNA (1)...(19): siRNA sense strand
gcgaaccgcagcugccaau

SEQ ID NO: 641873 - RNA, 19 nt, Homo sapiens
  misc_RNA (1)...(19): siRNA sense strand
cugagcugcugaagaaaca

SEQ ID NO: 641874 - RNA, 19 nt, Homo sapiens
  misc_RNA (1)...(19): siRNA sense strand
aagacuguauccaccaugu

SEQ ID NO: 641875 - RNA, 19 nt, Homo sapiens
  misc_RNA (1)...(19): siRNA sense strand
cccaagaauuucagaagac

SEQ ID NO: 641876 - RNA, 19 nt, Homo sapiens
  misc_RNA (1)...(19): siRNA sense strand
gcgcaggcuuugggcuuuc

SEQ ID NO: 641877 - RNA, 19 nt, Homo sapiens
  misc_RNA (1)...(19): siRNA sense strand
aaccgcagcugccaaugca

SEQ ID NO: 641878 - RNA, 19 nt, Homo sapiens
  misc_RNA (1)...(19): siRNA sense strand
ccuaagaacuauggcucau

SEQ ID NO: 641879 - RNA, 19 nt, Homo sapiens
  misc_RNA (1)...(19): siRNA sense strand
gugacaguucauucaauuu

SEQ ID NO: 641880 - RNA, 19 nt, Homo sapiens
  misc_RNA (1)...(19): siRNA sense strand
ccuugcagcccucgagaaa

SEQ ID NO: 641881 - RNA, 19 nt, Homo sapiens
  misc_RNA (1)...(19): siRNA sense strand
gcuuugggcuuucuauccu

SEQ ID NO: 641882 - RNA, 19 nt, Homo sapiens
  misc_RNA (1)...(19): siRNA sense strand
uguacuaccucuggaugug

SEQ ID NO: 641883 - RNA, 19 nt, Homo sapiens
  misc_RNA (1)...(19): siRNA sense strand
cagcuacucgacagaacaa

SEQ ID NO: 641884 - RNA, 19 nt, Homo sapiens
  misc_RNA (1)...(19): siRNA sense strand
ccacagaaccuaagaacua

SEQ ID NO: 641885 - RNA, 19 nt, Homo sapiens
  misc_RNA (1)...(19): siRNA sense strand
gaaacggauccacuccuua

SEQ ID NO: 641886 - RNA, 19 nt, Homo sapiens
  misc_RNA (1)...(19): siRNA sense strand
caacaauggcgcaggcuuu

SEQ ID NO: 641887 - RNA, 19 nt, Homo sapiens
  misc_RNA (1)...(19): siRNA sense strand
gaaggcccagcaagaauuu

SEQ ID NO: 641888 - RNA, 19 nt, Homo sapiens
  misc_RNA (1)...(19): siRNA sense strand
gaagggcaacacagcagua

SEQ ID NO: 641889 - RNA, 19 nt, Homo sapiens
  misc_RNA (1)...(19): siRNA sense strand
ugaaacggauccacuccuu

SEQ ID NO: 641890 - RNA, 19 nt, Homo sapiens
  misc_RNA (1)...(19): siRNA sense strand
gagugacaguucauucaau

SEQ ID NO: 641891 - RNA, 19 nt, Homo sapiens
  misc_RNA (1)...(19): siRNA sense strand
gcacagcuacucgacagaa

SEQ ID NO: 641892 - RNA, 19 nt, Homo sapiens
  misc_RNA (1)...(19): siRNA sense strand
gcauugcugugcuaggaau

SEQ ID NO: 641893 - RNA, 19 nt, Homo sapiens
  misc_RNA (1)...(19): siRNA sense strand
gagcagagacggcggaaac

SEQ ID NO: 641894 - RNA, 19 nt, Homo sapiens
  misc_RNA (1)...(19): siRNA sense strand
cacagaaccuaagaacuau

SEQ ID NO: 641895 - RNA, 19 nt, Homo sapiens
  misc_RNA (1)...(19): siRNA sense strand
aaacggauccacuccuuau

SEQ ID NO: 641896 - RNA, 19 nt, Homo sapiens
  misc_RNA (1)...(19): siRNA sense strand
ggagugacaguucauucaa

SEQ ID NO: 641897 - RNA, 19 nt, Homo sapiens
  misc_RNA (1)...(19): siRNA sense strand
agugacaguucauucaauu

SEQ ID NO: 641898 - RNA, 19 nt, Homo sapiens
  misc_RNA (1)...(19): siRNA sense strand
ucagaaggcccagcaagaa

SEQ ID NO: 641899 - RNA, 19 nt, Homo sapiens
  misc_RNA (1)...(19): siRNA sense strand
ggaauugucaugcugaaac

SEQ ID NO: 641900 - RNA, 19 nt, Homo sapiens
  misc_RNA (1)...(19): siRNA sense strand
ugacaguucauucaauuuc

SEQ ID NO: 641901 - RNA, 19 nt, Homo sapiens
  misc_RNA (1)...(19): siRNA sense strand
gaauuucagaagacuguau

SEQ ID NO: 641902 - RNA, 19 nt, Homo sapiens
  misc_RNA (1)...(19): siRNA sense strand
gcucuucacuggcauugcu

SEQ ID NO: 641903 - RNA, 19 nt, Homo sapiens
  misc_RNA (1)...(19): siRNA sense strand
gacaguucauucaauuucu

SEQ ID NO: 641904 - RNA, 19 nt, Homo sapiens
  misc_RNA (1)...(19): siRNA sense strand
cuacucgacagaacaauug

SEQ ID NO: 641905 - RNA, 19 nt, Homo sapiens
  misc_RNA (1)...(19): siRNA sense strand
cguccaggaugugcucuuu

SEQ ID NO: 641906 - RNA, 19 nt, Homo sapiens
  misc_RNA (1)...(19): siRNA sense strand
gaauugucaugcugaaacg

SEQ ID NO: 641907 - RNA, 19 nt, Homo sapiens
  misc_RNA (1)...(19): siRNA sense strand
gcuacucgacagaacaauu

SEQ ID NO: 641908 - RNA, 19 nt, Homo sapiens
  misc_RNA (1)...(19): siRNA sense strand
agaaggcccagcaagaauu

SEQ ID NO: 641909 - RNA, 19 nt, Homo sapiens
  misc_RNA (1)...(19): siRNA sense strand
ggaaggcagaggaguugga

SEQ ID NO: 641910 - RNA, 19 nt, Homo sapiens
  misc_RNA (1)...(19): siRNA sense strand
gaaccgcagcugccaaugc

SEQ ID NO: 641911 - RNA, 19 nt, Homo sapiens
  misc_RNA (1)...(19): siRNA sense strand
uggcauugcugugcuagga

SEQ ID NO: 641912 - RNA, 19 nt, Homo sapiens
  misc_RNA (1)...(19): siRNA sense strand
ccaagaauuucagaagacu

SEQ ID NO: 641913 - RNA, 19 nt, Homo sapiens
  misc_RNA (1)...(19): siRNA sense strand
ggcgcaggcuuugggcuuu

SEQ ID NO: 641914 - RNA, 19 nt, Homo sapiens
  misc_RNA (1)...(19): siRNA sense strand
cagaaggcccagcaagaau

SEQ ID NO: 641915 - RNA, 19 nt, Homo sapiens
  misc_RNA (1)...(19): siRNA sense strand
uccaggaugugcucuuugu

SEQ ID NO: 641916 - RNA, 19 nt, Homo sapiens
  misc_RNA (1)...(19): siRNA sense strand
uaggaauugucaugcugaa

SEQ ID NO: 641917 - RNA, 19 nt, Homo sapiens
  misc_RNA (1)...(19): siRNA sense strand
gcuccuuugucugcuggua

SEQ ID NO: 641918 - RNA, 19 nt, Homo sapiens
  misc_RNA (1)...(19): siRNA sense strand
gcgaaccgcagcugccaau

SEQ ID NO: 641919 - RNA, 19 nt, Homo sapiens
  misc_RNA (1)...(19): siRNA sense strand
cugagcugcugaagaaaca

SEQ ID NO: 641920 - RNA, 19 nt, Homo sapiens
  misc_RNA (1)...(19): siRNA sense strand
aagacuguauccaccaugu

SEQ ID NO: 641921 - RNA, 19 nt, Homo sapiens
  misc_RNA (1)...(19): siRNA sense strand
cccaagaauuucagaagac

SEQ ID NO: 641922 - RNA, 19 nt, Homo sapiens
  misc_RNA (1)...(19): siRNA sense strand
gcgcaggcuuugggcuuuc

SEQ ID NO: 641923 - RNA, 19 nt, Homo sapiens
  misc_RNA (1)...(19): siRNA sense strand
aaccgcagcugccaaugca

SEQ ID NO: 641924 - RNA, 19 nt, Homo sapiens
  misc_RNA (1)...(19): siRNA sense strand
ccuaagaacuauggcucau

SEQ ID NO: 641925 - RNA, 19 nt, Homo sapiens
  misc_RNA (1)...(19): siRNA sense strand
gugacaguucauucaauuu

SEQ ID NO: 641926 - RNA, 19 nt, Homo sapiens
  misc_RNA (1)...(19): siRNA sense strand
ccuugcagcccucgagaaa

SEQ ID NO: 641927 - RNA, 19 nt, Homo sapiens
  misc_RNA (1)...(19): siRNA sense strand
gcuuugggcuuucuauccu

SEQ ID NO: 641928 - RNA, 19 nt, Homo sapiens
  misc_RNA (1)...(19): siRNA sense strand
uguacuaccucuggaugug

SEQ ID NO: 641929 - RNA, 19 nt, Homo sapiens
  misc_RNA (1)...(19): siRNA sense strand
cagcuacucgacagaacaa

SEQ ID NO: 641930 - RNA, 19 nt, Homo sapiens
  misc_RNA (1)...(19): siRNA sense strand
ggaaugauguccuggaauu

SEQ ID NO: 641931 - RNA, 19 nt, Homo sapiens
  misc_RNA (1)...(19): siRNA sense strand
ccaagaacaucaagaagaa

SEQ ID NO: 641932 - RNA, 19 nt, Homo sapiens
  misc_RNA (1)...(19): siRNA sense strand
gaaugcagauggccaggaa

SEQ ID NO: 641933 - RNA, 19 nt, Homo sapiens
  misc_RNA (1)...(19): siRNA sense strand
aaagugagcauuaugguuu

SEQ ID NO: 641934 - RNA, 19 nt, Homo sapiens
  misc_RNA (1)...(19): siRNA sense strand
gcaagaugcuggugaugca

SEQ ID NO: 641935 - RNA, 19 nt, Homo sapiens
  misc_RNA (1)...(19): siRNA sense strand
gguguaacgucuuuaaauc

SEQ ID NO: 641936 - RNA, 19 nt, Homo sapiens
  misc_RNA (1)...(19): siRNA sense strand
aagaagaaagugagcauua

SEQ ID NO: 641937 - RNA, 19 nt, Homo sapiens
  misc_RNA (1)...(19): siRNA sense strand
ggaaggaggcucucacaca

SEQ ID NO: 641938 - RNA, 19 nt, Homo sapiens
  misc_RNA (1)...(19): siRNA sense strand
ggagugaaagugauucuga

SEQ ID NO: 641939 - RNA, 19 nt, Homo sapiens
  misc_RNA (1)...(19): siRNA sense strand
gaagaaagugagcauuaug

SEQ ID NO: 641940 - RNA, 19 nt, Homo sapiens
  misc_RNA (1)...(19): siRNA sense strand
gaaagugagcauuaugguu

SEQ ID NO: 641941 - RNA, 19 nt, Homo sapiens
  misc_RNA (1)...(19): siRNA sense strand
gcaauaucuucagguguaa

SEQ ID NO: 641942 - RNA, 19 nt, Homo sapiens
  misc_RNA (1)...(19): siRNA sense strand
gaauggacgugggaugaga

SEQ ID NO: 641943 - RNA, 19 nt, Homo sapiens
  misc_RNA (1)...(19): siRNA sense strand
agcaauaucuucaggugua

SEQ ID NO: 641944 - RNA, 19 nt, Homo sapiens
  misc_RNA (1)...(19): siRNA sense strand
gagugaaagugauucugaa

SEQ ID NO: 641945 - RNA, 19 nt, Homo sapiens
  misc_RNA (1)...(19): siRNA sense strand
gcgacggccuggaugauga

SEQ ID NO: 641946 - RNA, 19 nt, Homo sapiens
  misc_RNA (1)...(19): siRNA sense strand
ugcaagagcuggaacugaa

SEQ ID NO: 641947 - RNA, 19 nt, Homo sapiens
  misc_RNA (1)...(19): siRNA sense strand
gaauucagccgagguguga

SEQ ID NO: 641948 - RNA, 19 nt, Homo sapiens
  misc_RNA (1)...(19): siRNA sense strand
gaagaagagccaagcuaug

SEQ ID NO: 641949 - RNA, 19 nt, Homo sapiens
  misc_RNA (1)...(19): siRNA sense strand
gaacaucaagaagaagaaa

SEQ ID NO: 641950 - RNA, 19 nt, Homo sapiens
  misc_RNA (1)...(19): siRNA sense strand
gaagagccaagcuaugaga

SEQ ID NO: 641951 - RNA, 19 nt, Homo sapiens
  misc_RNA (1)...(19): siRNA sense strand
agaagaaagugagcauuau

SEQ ID NO: 641952 - RNA, 19 nt, Homo sapiens
  misc_RNA (1)...(19): siRNA sense strand
gucuggagcucaucaaguu

SEQ ID NO: 641953 - RNA, 19 nt, Homo sapiens
  misc_RNA (1)...(19): siRNA sense strand
cacacaggcuccaagguuu

SEQ ID NO: 641954 - RNA, 19 nt, Homo sapiens
  misc_RNA (1)...(19): siRNA sense strand
ggagagagcgagaggaaca

SEQ ID NO: 641955 - RNA, 19 nt, Homo sapiens
  misc_RNA (1)...(19): siRNA sense strand
gagccaagcuaugagaauc

SEQ ID NO: 641956 - RNA, 19 nt, Homo sapiens
  misc_RNA (1)...(19): siRNA sense strand
gccaagaacaucaagaaga

SEQ ID NO: 641957 - RNA, 19 nt, Homo sapiens
  misc_RNA (1)...(19): siRNA sense strand
ggagugcuuucgcuuucuu

SEQ ID NO: 641958 - RNA, 19 nt, Homo sapiens
  misc_RNA (1)...(19): siRNA sense strand
aagaagagccaagcuauga

SEQ ID NO: 641959 - RNA, 19 nt, Homo sapiens
  misc_RNA (1)...(19): siRNA sense strand
ggaugcugcucccuucuuc

SEQ ID NO: 641960 - RNA, 19 nt, Homo sapiens
  misc_RNA (1)...(19): siRNA sense strand
uacaggaucuucuaugucu

SEQ ID NO: 641961 - RNA, 19 nt, Homo sapiens
  misc_RNA (1)...(19): siRNA sense strand
ucacacaggcuccaagguu

SEQ ID NO: 641962 - RNA, 19 nt, Homo sapiens
  misc_RNA (1)...(19): siRNA sense strand
gaagaagaaagugagcauu

SEQ ID NO: 641963 - RNA, 19 nt, Homo sapiens
  misc_RNA (1)...(19): siRNA sense strand
cgagauggugccagcaaua

SEQ ID NO: 641964 - RNA, 19 nt, Homo sapiens
  misc_RNA (1)...(19): siRNA sense strand
gaucuucuaugucucucau

SEQ ID NO: 641965 - RNA, 19 nt, Homo sapiens
  misc_RNA (1)...(19): siRNA sense strand
gcagauggccaggaagaug

SEQ ID NO: 641966 - RNA, 19 nt, Homo sapiens
  misc_RNA (1)...(19): siRNA sense strand
cuucagguguaacgucuuu

SEQ ID NO: 641967 - RNA, 19 nt, Homo sapiens
  misc_RNA (1)...(19): siRNA sense strand
ggacgugggaugagagcaa

SEQ ID NO: 641968 - RNA, 19 nt, Homo sapiens
  misc_RNA (1)...(19): siRNA sense strand
ucuacaggaucuucuaugu

SEQ ID NO: 641969 - RNA, 19 nt, Homo sapiens
  misc_RNA (1)...(19): siRNA sense strand
cuauaucgcucgagauggu

SEQ ID NO: 641970 - RNA, 19 nt, Homo sapiens
  misc_RNA (1)...(19): siRNA sense strand
gagauggugccagcaauau

SEQ ID NO: 641971 - RNA, 19 nt, Homo sapiens
  misc_RNA (1)...(19): siRNA sense strand
augaugagaucgccgugua

SEQ ID NO: 641972 - RNA, 19 nt, Homo sapiens
  misc_RNA (1)...(19): siRNA sense strand
agaggagacugacaucgau

SEQ ID NO: 641973 - RNA, 19 nt, Homo sapiens
  misc_RNA (1)...(19): siRNA sense strand
ggauggagugaaagugauu

SEQ ID NO: 641974 - RNA, 19 nt, Homo sapiens
  misc_RNA (1)...(19): siRNA sense strand
agaagaagagccaagcuau

SEQ ID NO: 641975 - RNA, 19 nt, Homo sapiens
  misc_RNA (1)...(19): siRNA sense strand
cauuaugguuucaguggau

SEQ ID NO: 641976 - RNA, 19 nt, Homo sapiens
  misc_RNA (1)...(19): siRNA sense strand
guaacgucuuuaaauccaa

SEQ ID NO: 641977 - RNA, 19 nt, Homo sapiens
  misc_RNA (1)...(19): siRNA sense strand
ucagguguaacgucuuuaa

SEQ ID NO: 641978 - RNA, 19 nt, Homo sapiens
  misc_RNA (1)...(19): siRNA sense strand
guggauggagugaaaguga

SEQ ID NO: 641979 - RNA, 19 nt, Homo sapiens
  misc_RNA (1)...(19): siRNA sense strand
gauggugccagcaauaucu

SEQ ID NO: 641980 - RNA, 19 nt, Homo sapiens
  misc_RNA (1)...(19): siRNA sense strand
gcuggagugcuuucgcuuu

SEQ ID NO: 641981 - RNA, 19 nt, Homo sapiens
  misc_RNA (1)...(19): siRNA sense strand
cagaggagacugacaucga

SEQ ID NO: 641982 - RNA, 19 nt, Homo sapiens
  misc_RNA (1)...(19): siRNA sense strand
ccacugcagaggagacuga

SEQ ID NO: 641983 - RNA, 19 nt, Homo sapiens
  misc_RNA (1)...(19): siRNA sense strand
aagaagaagagccaagcua

SEQ ID NO: 641984 - RNA, 19 nt, Homo sapiens
  misc_RNA (1)...(19): siRNA sense strand
gugaaagugauucugaaga

SEQ ID NO: 641985 - RNA, 19 nt, Homo sapiens
  misc_RNA (1)...(19): siRNA sense strand
aagccaagaacaucaagaa

SEQ ID NO: 641986 - RNA, 19 nt, Homo sapiens
  misc_RNA (1)...(19): siRNA sense strand
uguaacgucuuuaaaucca

SEQ ID NO: 641987 - RNA, 19 nt, Homo sapiens
  misc_RNA (1)...(19): siRNA sense strand
ucuucuaugucucucauga

SEQ ID NO: 641988 - RNA, 19 nt, Homo sapiens
  misc_RNA (1)...(19): siRNA sense strand
uucuaugucucucaugauu

SEQ ID NO: 641989 - RNA, 19 nt, Homo sapiens
  misc_RNA (1)...(19): siRNA sense strand
gccgaggugugacugaucu

SEQ ID NO: 641990 - RNA, 19 nt, Homo sapiens
  misc_RNA (1)...(19): siRNA sense strand
caucaaguuccgagaguca

SEQ ID NO: 641991 - RNA, 19 nt, Homo sapiens
  misc_RNA (1)...(19): siRNA sense strand
cuggagugcuuucgcuuuc

SEQ ID NO: 641992 - RNA, 19 nt, Homo sapiens
  misc_RNA (1)...(19): siRNA sense strand
gaggugugacugaucuaga

SEQ ID NO: 641993 - RNA, 19 nt, Homo sapiens
  misc_RNA (1)...(19): siRNA sense strand
aagaacaucaagaagaaga

SEQ ID NO: 641994 - RNA, 19 nt, Homo sapiens
  misc_RNA (1)...(19): siRNA sense strand
cggccuggaugaugagauc

SEQ ID NO: 641995 - RNA, 19 nt, Homo sapiens
  misc_RNA (1)...(19): siRNA sense strand
gaguuuaaagccaagaaca

SEQ ID NO: 641996 - RNA, 19 nt, Homo sapiens
  misc_RNA (1)...(19): siRNA sense strand
agggaaugauguccuggaa

SEQ ID NO: 641997 - RNA, 19 nt, Homo sapiens
  misc_RNA (1)...(19): siRNA sense strand
ggaaggaaggaggcucuca

SEQ ID NO: 641998 - RNA, 19 nt, Homo sapiens
  misc_RNA (1)...(19): siRNA sense strand
gugcaagagcuggaacuga

SEQ ID NO: 641999 - RNA, 19 nt, Homo sapiens
  misc_RNA (1)...(19): siRNA sense strand
gcaagagcuggaacugaag

SEQ ID NO: 642000 - RNA, 19 nt, Homo sapiens
  misc_RNA (1)...(19): siRNA sense strand
ggucuggagcucaucaagu

SEQ ID NO: 642001 - RNA, 19 nt, Homo sapiens
  misc_RNA (1)...(19): siRNA sense strand
gcacggcaucugcuuugag

SEQ ID NO: 642002 - RNA, 19 nt, Homo sapiens
  misc_RNA (1)...(19): siRNA sense strand
uuaaagccaagaacaucaa

SEQ ID NO: 642003 - RNA, 19 nt, Homo sapiens
  misc_RNA (1)...(19): siRNA sense strand
ggauauagcuguucagaaa

SEQ ID NO: 642004 - RNA, 19 nt, Homo sapiens
  misc_RNA (1)...(19): siRNA sense strand
guaaagagcuggaggaguu

SEQ ID NO: 642005 - RNA, 19 nt, Homo sapiens
  misc_RNA (1)...(19): siRNA sense strand
gauccaagcugcgugauua

SEQ ID NO: 642006 - RNA, 19 nt, Homo sapiens
  misc_RNA (1)...(19): siRNA sense strand
guacauaaccgcgcuauua

SEQ ID NO: 642007 - RNA, 19 nt, Homo sapiens
  misc_RNA (1)...(19): siRNA sense strand
gcacguguaugaccucuuu

SEQ ID NO: 642008 - RNA, 19 nt, Homo sapiens
  misc_RNA (1)...(19): siRNA sense strand
gaagagcguuucaaugaga

SEQ ID NO: 642009 - RNA, 19 nt, Homo sapiens
  misc_RNA (1)...(19): siRNA sense strand
gaaaugugcugccguagau

SEQ ID NO: 642010 - RNA, 19 nt, Homo sapiens
  misc_RNA (1)...(19): siRNA sense strand
agaaagccgugaaggauua

SEQ ID NO: 642011 - RNA, 19 nt, Homo sapiens
  misc_RNA (1)...(19): siRNA sense strand
caccaaggcuggcagaaua

SEQ ID NO: 642012 - RNA, 19 nt, Homo sapiens
  misc_RNA (1)...(19): siRNA sense strand
ggagaaauauaaacccuau

SEQ ID NO: 642013 - RNA, 19 nt, Homo sapiens
  misc_RNA (1)...(19): siRNA sense strand
gcacgucugcgaaguguua

SEQ ID NO: 642014 - RNA, 19 nt, Homo sapiens
  misc_RNA (1)...(19): siRNA sense strand
aaacaagacuccaguaaag

SEQ ID NO: 642015 - RNA, 19 nt, Homo sapiens
  misc_RNA (1)...(19): siRNA sense strand
ggacagagagcacguguau

SEQ ID NO: 642016 - RNA, 19 nt, Homo sapiens
  misc_RNA (1)...(19): siRNA sense strand
acauguggcuagaguauua

SEQ ID NO: 642017 - RNA, 19 nt, Homo sapiens
  misc_RNA (1)...(19): siRNA sense strand
gaaaguaaaggauuugguu

SEQ ID NO: 642018 - RNA, 19 nt, Homo sapiens
  misc_RNA (1)...(19): siRNA sense strand
ggagagacauggaguugau

SEQ ID NO: 642019 - RNA, 19 nt, Homo sapiens
  misc_RNA (1)...(19): siRNA sense strand
gcacuucccuagagaaaca

SEQ ID NO: 642020 - RNA, 19 nt, Homo sapiens
  misc_RNA (1)...(19): siRNA sense strand
gaagggaggccaauguuug

SEQ ID NO: 642021 - RNA, 19 nt, Homo sapiens
  misc_RNA (1)...(19): siRNA sense strand
gcaauaacaugcagaaagc

SEQ ID NO: 642022 - RNA, 19 nt, Homo sapiens
  misc_RNA (1)...(19): siRNA sense strand
gcagaaagcucgggaacuc

SEQ ID NO: 642023 - RNA, 19 nt, Homo sapiens
  misc_RNA (1)...(19): siRNA sense strand
gaggagcaguugucuauca

SEQ ID NO: 642024 - RNA, 19 nt, Homo sapiens
  misc_RNA (1)...(19): siRNA sense strand
guacagcacuucccuagag

SEQ ID NO: 642025 - RNA, 19 nt, Homo sapiens
  misc_RNA (1)...(19): siRNA sense strand
gcauucaguugaucuuuga

SEQ ID NO: 642026 - RNA, 19 nt, Homo sapiens
  misc_RNA (1)...(19): siRNA sense strand
ccgauuagcucgugucaau

SEQ ID NO: 642027 - RNA, 19 nt, Homo sapiens
  misc_RNA (1)...(19): siRNA sense strand
guaccuagaucgacaacug

SEQ ID NO: 642028 - RNA, 19 nt, Homo sapiens
  misc_RNA (1)...(19): siRNA sense strand
gaaugaaggcugcagagaa

SEQ ID NO: 642029 - RNA, 19 nt, Homo sapiens
  misc_RNA (1)...(19): siRNA sense strand
gaucgacaacugaaaguaa

SEQ ID NO: 642030 - RNA, 19 nt, Homo sapiens
  misc_RNA (1)...(19): siRNA sense strand
gaaaguucgcuccguguuu

SEQ ID NO: 642031 - RNA, 19 nt, Homo sapiens
  misc_RNA (1)...(19): siRNA sense strand
guacucaguuggugggauu

SEQ ID NO: 642032 - RNA, 19 nt, Homo sapiens
  misc_RNA (1)...(19): siRNA sense strand
gcaugacuaucaaagagaa

SEQ ID NO: 642033 - RNA, 19 nt, Homo sapiens
  misc_RNA (1)...(19): siRNA sense strand
caaacaagacuccaguaaa

SEQ ID NO: 642034 - RNA, 19 nt, Homo sapiens
  misc_RNA (1)...(19): siRNA sense strand
acagagagcacguguauga

SEQ ID NO: 642035 - RNA, 19 nt, Homo sapiens
  misc_RNA (1)...(19): siRNA sense strand
ggacgcagcugucucuacu

SEQ ID NO: 642036 - RNA, 19 nt, Homo sapiens
  misc_RNA (1)...(19): siRNA sense strand
uggaagagcguuucaauga

SEQ ID NO: 642037 - RNA, 19 nt, Homo sapiens
  misc_RNA (1)...(19): siRNA sense strand
gagaggaggaugagguuaa

SEQ ID NO: 642038 - RNA, 19 nt, Homo sapiens
  misc_RNA (1)...(19): siRNA sense strand
uguaugaccucuuugagaa

SEQ ID NO: 642039 - RNA, 19 nt, Homo sapiens
  misc_RNA (1)...(19): siRNA sense strand
gcagaagggucgagaacag

SEQ ID NO: 642040 - RNA, 19 nt, Homo sapiens
  misc_RNA (1)...(19): siRNA sense strand
caacugaaaguaaaggauu

SEQ ID NO: 642041 - RNA, 19 nt, Homo sapiens
  misc_RNA (1)...(19): siRNA sense strand
gagcagaugaggacgauga

SEQ ID NO: 642042 - RNA, 19 nt, Homo sapiens
  misc_RNA (1)...(19): siRNA sense strand
gaacugggcuaggauugag

SEQ ID NO: 642043 - RNA, 19 nt, Homo sapiens
  misc_RNA (1)...(19): siRNA sense strand
gaacuagaagaaaucugua

SEQ ID NO: 642044 - RNA, 19 nt, Homo sapiens
  misc_RNA (1)...(19): siRNA sense strand
ggaacuagaagaaaucugu

SEQ ID NO: 642045 - RNA, 19 nt, Homo sapiens
  misc_RNA (1)...(19): siRNA sense strand
caacugccauguggacuug

SEQ ID NO: 642046 - RNA, 19 nt, Homo sapiens
  misc_RNA (1)...(19): siRNA sense strand
uaaagaggaacuagaagaa

SEQ ID NO: 642047 - RNA, 19 nt, Homo sapiens
  misc_RNA (1)...(19): siRNA sense strand
ggaagagcguuucaaugag

SEQ ID NO: 642048 - RNA, 19 nt, Homo sapiens
  misc_RNA (1)...(19): siRNA sense strand
gagaaagccgugaaggauu

SEQ ID NO: 642049 - RNA, 19 nt, Homo sapiens
  misc_RNA (1)...(19): siRNA sense strand
gaucagaggcccagagaag

SEQ ID NO: 642050 - RNA, 19 nt, Homo sapiens
  misc_RNA (1)...(19): siRNA sense strand
ucucucgucuguugguuua

SEQ ID NO: 642051 - RNA, 19 nt, Homo sapiens
  misc_RNA (1)...(19): siRNA sense strand
gauuagcucgugucaauga

SEQ ID NO: 642052 - RNA, 19 nt, Homo sapiens
  misc_RNA (1)...(19): siRNA sense strand
gaacuauaacaaagcacua

SEQ ID NO: 642053 - RNA, 19 nt, Homo sapiens
  misc_RNA (1)...(19): siRNA sense strand
caaagagaacaucaucaaa

SEQ ID NO: 642054 - RNA, 19 nt, Homo sapiens
  misc_RNA (1)...(19): siRNA sense strand
ggacagcaucaccgucuuu

SEQ ID NO: 642055 - RNA, 19 nt, Homo sapiens
  misc_RNA (1)...(19): siRNA sense strand
ggaaaugugcugccguaga

SEQ ID NO: 642056 - RNA, 19 nt, Homo sapiens
  misc_RNA (1)...(19): siRNA sense strand
caacauguggcuagaguau

SEQ ID NO: 642057 - RNA, 19 nt, Homo sapiens
  misc_RNA (1)...(19): siRNA sense strand
gcucgacugugcaauaaca

SEQ ID NO: 642058 - RNA, 19 nt, Homo sapiens
  misc_RNA (1)...(19): siRNA sense strand
caacgucuaugacuacaac

SEQ ID NO: 642059 - RNA, 19 nt, Homo sapiens
  misc_RNA (1)...(19): siRNA sense strand
ucaaagagaacaucaucaa

SEQ ID NO: 642060 - RNA, 19 nt, Homo sapiens
  misc_RNA (1)...(19): siRNA sense strand
caaccgggcuggcaaacca

SEQ ID NO: 642061 - RNA, 19 nt, Homo sapiens
  misc_RNA (1)...(19): siRNA sense strand
cgugaaggauuacauuugu

SEQ ID NO: 642062 - RNA, 19 nt, Homo sapiens
  misc_RNA (1)...(19): siRNA sense strand
aagaggaacuagaagaaau

SEQ ID NO: 642063 - RNA, 19 nt, Homo sapiens
  misc_RNA (1)...(19): siRNA sense strand
ucaaacaagacuccaguaa

SEQ ID NO: 642064 - RNA, 19 nt, Homo sapiens
  misc_RNA (1)...(19): siRNA sense strand
cugauuauguggagauuug

SEQ ID NO: 642065 - RNA, 19 nt, Homo sapiens
  misc_RNA (1)...(19): siRNA sense strand
aaaguucgcuccguguuug

SEQ ID NO: 642066 - RNA, 19 nt, Homo sapiens
  misc_RNA (1)...(19): siRNA sense strand
gauuacauuuguccuaaca

SEQ ID NO: 642067 - RNA, 19 nt, Homo sapiens
  misc_RNA (1)...(19): siRNA sense strand
aaagggcucucucgucugu

SEQ ID NO: 642068 - RNA, 19 nt, Homo sapiens
  misc_RNA (1)...(19): siRNA sense strand
aagagaacaucaucaaagu

SEQ ID NO: 642069 - RNA, 19 nt, Homo sapiens
  misc_RNA (1)...(19): siRNA sense strand
gccagaagaugagugaaau

SEQ ID NO: 642070 - RNA, 19 nt, Homo sapiens
  misc_RNA (1)...(19): siRNA sense strand
gaagauggacggcaugacu

SEQ ID NO: 642071 - RNA, 19 nt, Homo sapiens
  misc_RNA (1)...(19): siRNA sense strand
gagcacgucugcgaagugu

SEQ ID NO: 642072 - RNA, 19 nt, Homo sapiens
  misc_RNA (1)...(19): siRNA sense strand
gaggcucgacugugcaaua

SEQ ID NO: 642073 - RNA, 19 nt, Homo sapiens
  misc_RNA (1)...(19): siRNA sense strand
cauaaccgcgcuauuagaa

SEQ ID NO: 642074 - RNA, 19 nt, Homo sapiens
  misc_RNA (1)...(19): siRNA sense strand
ucuguugguuuacauauga

SEQ ID NO: 642075 - RNA, 19 nt, Homo sapiens
  misc_RNA (1)...(19): siRNA sense strand
ggaggccaauguuuguuuc

SEQ ID NO: 642076 - RNA, 19 nt, Homo sapiens
  misc_RNA (1)...(19): siRNA sense strand
cagaggaaaugccaaguac

SEQ ID NO: 642077 - RNA, 19 nt, Homo sapiens
  misc_RNA (1)...(19): siRNA sense strand
ggccacauuugcagaguau

SEQ ID NO: 642078 - RNA, 19 nt, Homo sapiens
  misc_RNA (1)...(19): siRNA sense strand
gaaggacgcagcugucucu

SEQ ID NO: 642079 - RNA, 19 nt, Homo sapiens
  misc_RNA (1)...(19): siRNA sense strand
ccagaggaaaugccaagua

SEQ ID NO: 642080 - RNA, 19 nt, Homo sapiens
  misc_RNA (1)...(19): siRNA sense strand
ggacaaggagaaagguguu

SEQ ID NO: 642081 - RNA, 19 nt, Homo sapiens
  misc_RNA (1)...(19): siRNA sense strand
cagagucaguaauucagaa

SEQ ID NO: 642082 - RNA, 19 nt, Homo sapiens
  misc_RNA (1)...(19): siRNA sense strand
aaagagaacaucaucaaag

SEQ ID NO: 642083 - RNA, 19 nt, Homo sapiens
  misc_RNA (1)...(19): siRNA sense strand
aaugaaggcugcagagaag

SEQ ID NO: 642084 - RNA, 19 nt, Homo sapiens
  misc_RNA (1)...(19): siRNA sense strand
ucaaugagcagagaaugaa

SEQ ID NO: 642085 - RNA, 19 nt, Homo sapiens
  misc_RNA (1)...(19): siRNA sense strand
gaggagaaggguugauuuc

SEQ ID NO: 642086 - RNA, 19 nt, Homo sapiens
  misc_RNA (1)...(19): siRNA sense strand
uaaccgcgcuauuagaaac

SEQ ID NO: 642087 - RNA, 19 nt, Homo sapiens
  misc_RNA (1)...(19): siRNA sense strand
gagcucgggcugagaagaa

SEQ ID NO: 642088 - RNA, 19 nt, Homo sapiens
  misc_RNA (1)...(19): siRNA sense strand
uggccuacguggaguauga

SEQ ID NO: 642089 - RNA, 19 nt, Homo sapiens
  misc_RNA (1)...(19): siRNA sense strand
guacuaaagaggaacuaga

SEQ ID NO: 642090 - RNA, 19 nt, Homo sapiens
  misc_RNA (1)...(19): siRNA sense strand
gcgaucccacucuaugaua

SEQ ID NO: 642091 - RNA, 19 nt, Homo sapiens
  misc_RNA (1)...(19): siRNA sense strand
cuaaagaggaacuagaaga

SEQ ID NO: 642092 - RNA, 19 nt, Homo sapiens
  misc_RNA (1)...(19): siRNA sense strand
guagaagggaggccaaugu

SEQ ID NO: 642093 - RNA, 19 nt, Homo sapiens
  misc_RNA (1)...(19): siRNA sense strand
aaaaccagcuggagauuga

SEQ ID NO: 642094 - RNA, 19 nt, Homo sapiens
  misc_RNA (1)...(19): siRNA sense strand
gcagaacugggcuaggauu

SEQ ID NO: 642095 - RNA, 19 nt, Homo sapiens
  misc_RNA (1)...(19): siRNA sense strand
gcuagaguauggccaguac

SEQ ID NO: 642096 - RNA, 19 nt, Homo sapiens
  misc_RNA (1)...(19): siRNA sense strand
ggaguacgagugggaauau

SEQ ID NO: 642097 - RNA, 19 nt, Homo sapiens
  misc_RNA (1)...(19): siRNA sense strand
cuacguggaguuuaaagaa

SEQ ID NO: 642098 - RNA, 19 nt, Homo sapiens
  misc_RNA (1)...(19): siRNA sense strand
ucagaacuauaacaaagca

SEQ ID NO: 642099 - RNA, 19 nt, Homo sapiens
  misc_RNA (1)...(19): siRNA sense strand
agucaguaauucagaacua

SEQ ID NO: 642100 - RNA, 19 nt, Homo sapiens
  misc_RNA (1)...(19): siRNA sense strand
ccacauuugcagaguauga

SEQ ID NO: 642101 - RNA, 19 nt, Homo sapiens
  misc_RNA (1)...(19): siRNA sense strand
gauauggaggccacauuug

SEQ ID NO: 642102 - RNA, 19 nt, Homo sapiens
  misc_RNA (1)...(19): siRNA sense strand
ggaguuuaaagaagagaaa

SEQ ID NO: 642103 - RNA, 19 nt, Homo sapiens
  misc_RNA (1)...(19): siRNA sense strand
aaacugauguggaguauga

SEQ ID NO: 642104 - RNA, 19 nt, Homo sapiens
  misc_RNA (1)...(19): siRNA sense strand
cuaagaaugucaucauguu

SEQ ID NO: 642105 - RNA, 19 nt, Homo sapiens
  misc_RNA (1)...(19): siRNA sense strand
ccuaccagcucaugcauaa

SEQ ID NO: 642106 - RNA, 19 nt, Homo sapiens
  misc_RNA (1)...(19): siRNA sense strand
ggacuaugcucacaacaac

SEQ ID NO: 642107 - RNA, 19 nt, Homo sapiens
  misc_RNA (1)...(19): siRNA sense strand
ggaaaucugugggcauugu

SEQ ID NO: 642108 - RNA, 19 nt, Homo sapiens
  misc_RNA (1)...(19): siRNA sense strand
caagagacacugaaauaug

SEQ ID NO: 642109 - RNA, 19 nt, Homo sapiens
  misc_RNA (1)...(19): siRNA sense strand
gcaccugccuuacuaacuc

SEQ ID NO: 642110 - RNA, 19 nt, Homo sapiens
  misc_RNA (1)...(19): siRNA sense strand
gcaagagacacugaaauau

SEQ ID NO: 642111 - RNA, 19 nt, Homo sapiens
  misc_RNA (1)...(19): siRNA sense strand
caaggacgcugggaaaucu

SEQ ID NO: 642112 - RNA, 19 nt, Homo sapiens
  misc_RNA (1)...(19): siRNA sense strand
cgcaagagacacugaaaua

SEQ ID NO: 642113 - RNA, 19 nt, Homo sapiens
  misc_RNA (1)...(19): siRNA sense strand
gcaaugggccuggcuacaa

SEQ ID NO: 642114 - RNA, 19 nt, Homo sapiens
  misc_RNA (1)...(19): siRNA sense strand
guaugagagugacgagaaa

SEQ ID NO: 642115 - RNA, 19 nt, Homo sapiens
  misc_RNA (1)...(19): siRNA sense strand
gauuucaccauucuuagua

SEQ ID NO: 642116 - RNA, 19 nt, Homo sapiens
  misc_RNA (1)...(19): siRNA sense strand
guaaggacaucgccuacca

SEQ ID NO: 642117 - RNA, 19 nt, Homo sapiens
  misc_RNA (1)...(19): siRNA sense strand
acaccaacguggcuaagaa

SEQ ID NO: 642118 - RNA, 19 nt, Homo sapiens
  misc_RNA (1)...(19): siRNA sense strand
gaaauaugcccuggagcuu

SEQ ID NO: 642119 - RNA, 19 nt, Homo sapiens
  misc_RNA (1)...(19): siRNA sense strand
ggcuggagauggacaaguu

SEQ ID NO: 642120 - RNA, 19 nt, Homo sapiens
  misc_RNA (1)...(19): siRNA sense strand
caacguggcuaagaauguc

SEQ ID NO: 642121 - RNA, 19 nt, Homo sapiens
  misc_RNA (1)...(19): siRNA sense strand
aguacgagcugaacaggaa

SEQ ID NO: 642122 - RNA, 19 nt, Homo sapiens
  misc_RNA (1)...(19): siRNA sense strand
ggacauugacgugaucaug

SEQ ID NO: 642123 - RNA, 19 nt, Homo sapiens
  misc_RNA (1)...(19): siRNA sense strand
cguggcaacucuaucuuug

SEQ ID NO: 642124 - RNA, 19 nt, Homo sapiens
  misc_RNA (1)...(19): siRNA sense strand
caaugggccuggcuacaag

SEQ ID NO: 642125 - RNA, 19 nt, Homo sapiens
  misc_RNA (1)...(19): siRNA sense strand
aagagacacugaaauaugc

SEQ ID NO: 642126 - RNA, 19 nt, Homo sapiens
  misc_RNA (1)...(19): siRNA sense strand
guacucagacaacgagaug

SEQ ID NO: 642127 - RNA, 19 nt, Homo sapiens
  misc_RNA (1)...(19): siRNA sense strand
gguggaaggaggcagaauu

SEQ ID NO: 642128 - RNA, 19 nt, Homo sapiens
  misc_RNA (1)...(19): siRNA sense strand
gcuaagaaugucaucaugu

SEQ ID NO: 642129 - RNA, 19 nt, Homo sapiens
  misc_RNA (1)...(19): siRNA sense strand
ugggaaaucugugggcauu

SEQ ID NO: 642130 - RNA, 19 nt, Homo sapiens
  misc_RNA (1)...(19): siRNA sense strand
uucagaagcucaacaccaa

SEQ ID NO: 642131 - RNA, 19 nt, Homo sapiens
  misc_RNA (1)...(19): siRNA sense strand
ggaugggugucuccacagu

SEQ ID NO: 642132 - RNA, 19 nt, Homo sapiens
  misc_RNA (1)...(19): siRNA sense strand
aauaugcccuggagcuuca

SEQ ID NO: 642133 - RNA, 19 nt, Homo sapiens
  misc_RNA (1)...(19): siRNA sense strand
ucccacgucuucacauuug

SEQ ID NO: 642134 - RNA, 19 nt, Homo sapiens
  misc_RNA (1)...(19): siRNA sense strand
ggcuaagaaugucaucaug

SEQ ID NO: 642135 - RNA, 19 nt, Homo sapiens
  misc_RNA (1)...(19): siRNA sense strand
ggaccauucccacgucuuc

SEQ ID NO: 642136 - RNA, 19 nt, Homo sapiens
  misc_RNA (1)...(19): siRNA sense strand
ucagggacauugacgugau

SEQ ID NO: 642137 - RNA, 19 nt, Homo sapiens
  misc_RNA (1)...(19): siRNA sense strand
ggaaggaggcagaauugac

SEQ ID NO: 642138 - RNA, 19 nt, Homo sapiens
  misc_RNA (1)...(19): siRNA sense strand
guggaaggaggcagaauug

SEQ ID NO: 642139 - RNA, 19 nt, Homo sapiens
  misc_RNA (1)...(19): siRNA sense strand
ggccaaggacgcugggaaa

SEQ ID NO: 642140 - RNA, 19 nt, Homo sapiens
  misc_RNA (1)...(19): siRNA sense strand
cauaacaucagggacauug

SEQ ID NO: 642141 - RNA, 19 nt, Homo sapiens
  misc_RNA (1)...(19): siRNA sense strand
ggacugguacucagacaac

SEQ ID NO: 642142 - RNA, 19 nt, Homo sapiens
  misc_RNA (1)...(19): siRNA sense strand
ugagugacacagacaagaa

SEQ ID NO: 642143 - RNA, 19 nt, Homo sapiens
  misc_RNA (1)...(19): siRNA sense strand
cggaacuccugacccuuga

SEQ ID NO: 642144 - RNA, 19 nt, Homo sapiens
  misc_RNA (1)...(19): siRNA sense strand
gcgcaagagacacugaaau

SEQ ID NO: 642145 - RNA, 19 nt, Homo sapiens
  misc_RNA (1)...(19): siRNA sense strand
gcggugaacgagagaaugu

SEQ ID NO: 642146 - RNA, 19 nt, Homo sapiens
  misc_RNA (1)...(19): siRNA sense strand
ccacgggcaccaugaagga

SEQ ID NO: 642147 - RNA, 19 nt, Homo sapiens
  misc_RNA (1)...(19): siRNA sense strand
ccaaaggcuucuucuugcu

SEQ ID NO: 642148 - RNA, 19 nt, Homo sapiens
  misc_RNA (1)...(19): siRNA sense strand
caagcacucccacuucauc

SEQ ID NO: 642149 - RNA, 19 nt, Homo sapiens
  misc_RNA (1)...(19): siRNA sense strand
ccaacguggcuaagaaugu

SEQ ID NO: 642150 - RNA, 19 nt, Homo sapiens
  misc_RNA (1)...(19): siRNA sense strand
cugccuuacuaacuccuua

SEQ ID NO: 642151 - RNA, 19 nt, Homo sapiens
  misc_RNA (1)...(19): siRNA sense strand
ccaaggacgcugggaaauc

SEQ ID NO: 642152 - RNA, 19 nt, Homo sapiens
  misc_RNA (1)...(19): siRNA sense strand
uggcaacucuaucuuuggu

SEQ ID NO: 642153 - RNA, 19 nt, Homo sapiens
  misc_RNA (1)...(19): siRNA sense strand
uaagaaugucaucauguuc

SEQ ID NO: 642154 - RNA, 19 nt, Homo sapiens
  misc_RNA (1)...(19): siRNA sense strand
gguggacuaugcucacaac

SEQ ID NO: 642155 - RNA, 19 nt, Homo sapiens
  misc_RNA (1)...(19): siRNA sense strand
agaccaagcgcaagagaca

SEQ ID NO: 642156 - RNA, 19 nt, Homo sapiens
  misc_RNA (1)...(19): siRNA sense strand
agggucagcuccaccacaa

SEQ ID NO: 642157 - RNA, 19 nt, Homo sapiens
  misc_RNA (1)...(19): siRNA sense strand
gagcguucccggugcaaca

SEQ ID NO: 642158 - RNA, 19 nt, Homo sapiens
  misc_RNA (1)...(19): siRNA sense strand
acuaugcucacaacaacua

SEQ ID NO: 642159 - RNA, 19 nt, Homo sapiens
  misc_RNA (1)...(19): siRNA sense strand
gaaaucugugggcauugug

SEQ ID NO: 642160 - RNA, 19 nt, Homo sapiens
  misc_RNA (1)...(19): siRNA sense strand
gcaugaggcgguggagaug

SEQ ID NO: 642161 - RNA, 19 nt, Homo sapiens
  misc_RNA (1)...(19): siRNA sense strand
acauguaccccaagaauaa

SEQ ID NO: 642162 - RNA, 19 nt, Homo sapiens
  misc_RNA (1)...(19): siRNA sense strand
augggugucuccacaguga

SEQ ID NO: 642163 - RNA, 19 nt, Homo sapiens
  misc_RNA (1)...(19): siRNA sense strand
ccaagacguacaacaccaa

SEQ ID NO: 642164 - RNA, 19 nt, Homo sapiens
  misc_RNA (1)...(19): siRNA sense strand
uaccagcucaugcauaaca

SEQ ID NO: 642165 - RNA, 19 nt, Homo sapiens
  misc_RNA (1)...(19): siRNA sense strand
aguaugagagugacgagaa

SEQ ID NO: 642166 - RNA, 19 nt, Homo sapiens
  misc_RNA (1)...(19): siRNA sense strand
ggagaugggaugggugucu

SEQ ID NO: 642167 - RNA, 19 nt, Homo sapiens
  misc_RNA (1)...(19): siRNA sense strand
ugccagagaaagagaaaga

SEQ ID NO: 642168 - RNA, 19 nt, Homo sapiens
  misc_RNA (1)...(19): siRNA sense strand
ggugguggccauccagauc

SEQ ID NO: 642169 - RNA, 19 nt, Homo sapiens
  misc_RNA (1)...(19): siRNA sense strand
uaaaacugauguggaguau

SEQ ID NO: 642170 - RNA, 19 nt, Homo sapiens
  misc_RNA (1)...(19): siRNA sense strand
caaguacuggcgagaccaa

SEQ ID NO: 642171 - RNA, 19 nt, Homo sapiens
  misc_RNA (1)...(19): siRNA sense strand
ggagauccaugguagcuua

SEQ ID NO: 642172 - RNA, 19 nt, Homo sapiens
  misc_RNA (1)...(19): siRNA sense strand
guucaaguauggcagauuu

SEQ ID NO: 642173 - RNA, 19 nt, Homo sapiens
  misc_RNA (1)...(19): siRNA sense strand
cagaggagcuggagguuau

SEQ ID NO: 642174 - RNA, 19 nt, Homo sapiens
  misc_RNA (1)...(19): siRNA sense strand
gauccaugguagcuuauuu

SEQ ID NO: 642175 - RNA, 19 nt, Homo sapiens
  misc_RNA (1)...(19): siRNA sense strand
gcacauagucaucaucuca

SEQ ID NO: 642176 - RNA, 19 nt, Homo sapiens
  misc_RNA (1)...(19): siRNA sense strand
gaaaccagauuugccugaa

SEQ ID NO: 642177 - RNA, 19 nt, Homo sapiens
  misc_RNA (1)...(19): siRNA sense strand
ccacugugauuuaugucua

SEQ ID NO: 642178 - RNA, 19 nt, Homo sapiens
  misc_RNA (1)...(19): siRNA sense strand
gaguuguggcugagaauua

SEQ ID NO: 642179 - RNA, 19 nt, Homo sapiens
  misc_RNA (1)...(19): siRNA sense strand
guacccagcagccauguuu

SEQ ID NO: 642180 - RNA, 19 nt, Homo sapiens
  misc_RNA (1)...(19): siRNA sense strand
gcaaagcacauagucauca

SEQ ID NO: 642181 - RNA, 19 nt, Homo sapiens
  misc_RNA (1)...(19): siRNA sense strand
aaaccuggauccugccauu

SEQ ID NO: 642182 - RNA, 19 nt, Homo sapiens
  misc_RNA (1)...(19): siRNA sense strand
gaaccuggaacucaagaug

SEQ ID NO: 642183 - RNA, 19 nt, Homo sapiens
  misc_RNA (1)...(19): siRNA sense strand
uggaggagguugacagaga

SEQ ID NO: 642184 - RNA, 19 nt, Homo sapiens
  misc_RNA (1)...(19): siRNA sense strand
aaaccagauuugccugaaa

SEQ ID NO: 642185 - RNA, 19 nt, Homo sapiens
  misc_RNA (1)...(19): siRNA sense strand
gcaaggcuggcaccaagaa

SEQ ID NO: 642186 - RNA, 19 nt, Homo sapiens
  misc_RNA (1)...(19): siRNA sense strand
cagcaucccaguugagaaa

SEQ ID NO: 642187 - RNA, 19 nt, Homo sapiens
  misc_RNA (1)...(19): siRNA sense strand
gcacuuccucuguggugua

SEQ ID NO: 642188 - RNA, 19 nt, Homo sapiens
  misc_RNA (1)...(19): siRNA sense strand
gcucgcccacugugauuua

SEQ ID NO: 642189 - RNA, 19 nt, Homo sapiens
  misc_RNA (1)...(19): siRNA sense strand
caaagcacauagucaucau

SEQ ID NO: 642190 - RNA, 19 nt, Homo sapiens
  misc_RNA (1)...(19): siRNA sense strand
uccaauuuguccagcuuua

SEQ ID NO: 642191 - RNA, 19 nt, Homo sapiens
  misc_RNA (1)...(19): siRNA sense strand
gcucggccaaguucaagua

SEQ ID NO: 642192 - RNA, 19 nt, Homo sapiens
  misc_RNA (1)...(19): siRNA sense strand
cgauugauuucccagcuau

SEQ ID NO: 642193 - RNA, 19 nt, Homo sapiens
  misc_RNA (1)...(19): siRNA sense strand
aaagugguguuccgaccuu

SEQ ID NO: 642194 - RNA, 19 nt, Homo sapiens
  misc_RNA (1)...(19): siRNA sense strand
gcuggagguuauuggagaa

SEQ ID NO: 642195 - RNA, 19 nt, Homo sapiens
  misc_RNA (1)...(19): siRNA sense strand
cucaggagcugguguuagu

SEQ ID NO: 642196 - RNA, 19 nt, Homo sapiens
  misc_RNA (1)...(19): siRNA sense strand
gagcucgcccacugugauu

SEQ ID NO: 642197 - RNA, 19 nt, Homo sapiens
  misc_RNA (1)...(19): siRNA sense strand
ugauuucccagcuauauug

SEQ ID NO: 642198 - RNA, 19 nt, Homo sapiens
  misc_RNA (1)...(19): siRNA sense strand
ccacacgaaaccagauuug

SEQ ID NO: 642199 - RNA, 19 nt, Homo sapiens
  misc_RNA (1)...(19): siRNA sense strand
cggccaaguucaaguaugg

SEQ ID NO: 642200 - RNA, 19 nt, Homo sapiens
  misc_RNA (1)...(19): siRNA sense strand
gcuauauuguggccugaag

SEQ ID NO: 642201 - RNA, 19 nt, Homo sapiens
  misc_RNA (1)...(19): siRNA sense strand
ucagaggagcuggagguua

SEQ ID NO: 642202 - RNA, 19 nt, Homo sapiens
  misc_RNA (1)...(19): siRNA sense strand
gagaauuacaagaguccaa

SEQ ID NO: 642203 - RNA, 19 nt, Homo sapiens
  misc_RNA (1)...(19): siRNA sense strand
ugucccaagucgauugauu

SEQ ID NO: 642204 - RNA, 19 nt, Homo sapiens
  misc_RNA (1)...(19): siRNA sense strand
ggucaucacccagaacauc

SEQ ID NO: 642205 - RNA, 19 nt, Homo sapiens
  misc_RNA (1)...(19): siRNA sense strand
ucgauugauuucccagcua

SEQ ID NO: 642206 - RNA, 19 nt, Homo sapiens
  misc_RNA (1)...(19): siRNA sense strand
gucccaagucgauugauuu

SEQ ID NO: 642207 - RNA, 19 nt, Homo sapiens
  misc_RNA (1)...(19): siRNA sense strand
ucacccagaacaucgauga

SEQ ID NO: 642208 - RNA, 19 nt, Homo sapiens
  misc_RNA (1)...(19): siRNA sense strand
ggaguuguggcugagaauu

SEQ ID NO: 642209 - RNA, 19 nt, Homo sapiens
  misc_RNA (1)...(19): siRNA sense strand
guggaguuguggcugagaa

SEQ ID NO: 642210 - RNA, 19 nt, Homo sapiens
  misc_RNA (1)...(19): siRNA sense strand
cagauugucccaagucgau

SEQ ID NO: 642211 - RNA, 19 nt, Homo sapiens
  misc_RNA (1)...(19): siRNA sense strand
ggagcuggagguuauugga

SEQ ID NO: 642212 - RNA, 19 nt, Homo sapiens
  misc_RNA (1)...(19): siRNA sense strand
caauuuguccagcuuuauc

SEQ ID NO: 642213 - RNA, 19 nt, Homo sapiens
  misc_RNA (1)...(19): siRNA sense strand
aagcaaagcacauagucau

SEQ ID NO: 642214 - RNA, 19 nt, Homo sapiens
  misc_RNA (1)...(19): siRNA sense strand
guccagcuuuaucaggaaa

SEQ ID NO: 642215 - RNA, 19 nt, Homo sapiens
  misc_RNA (1)...(19): siRNA sense strand
gauugucccaagucgauug

SEQ ID NO: 642216 - RNA, 19 nt, Homo sapiens
  misc_RNA (1)...(19): siRNA sense strand
aggaaaaggugcuccagaa

SEQ ID NO: 642217 - RNA, 19 nt, Homo sapiens
  misc_RNA (1)...(19): siRNA sense strand
ccaugguagcuuauuuaaa

SEQ ID NO: 642218 - RNA, 19 nt, Homo sapiens
  misc_RNA (1)...(19): siRNA sense strand
cgcccacugugauuuaugu

SEQ ID NO: 642219 - RNA, 19 nt, Homo sapiens
  misc_RNA (1)...(19): siRNA sense strand
gaggagcuggagguuauug

SEQ ID NO: 642220 - RNA, 19 nt, Homo sapiens
  misc_RNA (1)...(19): siRNA sense strand
ggagguuauuggagaaaau

SEQ ID NO: 642221 - RNA, 19 nt, Homo sapiens
  misc_RNA (1)...(19): siRNA sense strand
ccuccagcguccacacgaa

SEQ ID NO: 642222 - RNA, 19 nt, Homo sapiens
  misc_RNA (1)...(19): siRNA sense strand
ggagauccaugguagcuua

SEQ ID NO: 642223 - RNA, 19 nt, Homo sapiens
  misc_RNA (1)...(19): siRNA sense strand
guucaaguauggcagauuu

SEQ ID NO: 642224 - RNA, 19 nt, Homo sapiens
  misc_RNA (1)...(19): siRNA sense strand
cagaggagcuggagguuau

SEQ ID NO: 642225 - RNA, 19 nt, Homo sapiens
  misc_RNA (1)...(19): siRNA sense strand
gauccaugguagcuuauuu

SEQ ID NO: 642226 - RNA, 19 nt, Homo sapiens
  misc_RNA (1)...(19): siRNA sense strand
gcacauagucaucaucuca

SEQ ID NO: 642227 - RNA, 19 nt, Homo sapiens
  misc_RNA (1)...(19): siRNA sense strand
gaaaccagauuugccugaa

SEQ ID NO: 642228 - RNA, 19 nt, Homo sapiens
  misc_RNA (1)...(19): siRNA sense strand
ccacugugauuuaugucua

SEQ ID NO: 642229 - RNA, 19 nt, Homo sapiens
  misc_RNA (1)...(19): siRNA sense strand
gaguuguggcugagaauua

SEQ ID NO: 642230 - RNA, 19 nt, Homo sapiens
  misc_RNA (1)...(19): siRNA sense strand
guacccagcagccauguuu

SEQ ID NO: 642231 - RNA, 19 nt, Homo sapiens
  misc_RNA (1)...(19): siRNA sense strand
gcaaagcacauagucauca

SEQ ID NO: 642232 - RNA, 19 nt, Homo sapiens
  misc_RNA (1)...(19): siRNA sense strand
aaaccuggauccugccauu

SEQ ID NO: 642233 - RNA, 19 nt, Homo sapiens
  misc_RNA (1)...(19): siRNA sense strand
gaaccuggaacucaagaug

SEQ ID NO: 642234 - RNA, 19 nt, Homo sapiens
  misc_RNA (1)...(19): siRNA sense strand
uggaggagguugacagaga

SEQ ID NO: 642235 - RNA, 19 nt, Homo sapiens
  misc_RNA (1)...(19): siRNA sense strand
aaaccagauuugccugaaa

SEQ ID NO: 642236 - RNA, 19 nt, Homo sapiens
  misc_RNA (1)...(19): siRNA sense strand
gcaaggcuggcaccaagaa

SEQ ID NO: 642237 - RNA, 19 nt, Homo sapiens
  misc_RNA (1)...(19): siRNA sense strand
cagcaucccaguugagaaa

SEQ ID NO: 642238 - RNA, 19 nt, Homo sapiens
  misc_RNA (1)...(19): siRNA sense strand
gcacuuccucuguggugua

SEQ ID NO: 642239 - RNA, 19 nt, Homo sapiens
  misc_RNA (1)...(19): siRNA sense strand
gcucgcccacugugauuua

SEQ ID NO: 642240 - RNA, 19 nt, Homo sapiens
  misc_RNA (1)...(19): siRNA sense strand
caaagcacauagucaucau

SEQ ID NO: 642241 - RNA, 19 nt, Homo sapiens
  misc_RNA (1)...(19): siRNA sense strand
uccaauuuguccagcuuua

SEQ ID NO: 642242 - RNA, 19 nt, Homo sapiens
  misc_RNA (1)...(19): siRNA sense strand
gcucggccaaguucaagua

SEQ ID NO: 642243 - RNA, 19 nt, Homo sapiens
  misc_RNA (1)...(19): siRNA sense strand
cgauugauuucccagcuau

SEQ ID NO: 642244 - RNA, 19 nt, Homo sapiens
  misc_RNA (1)...(19): siRNA sense strand
aaagugguguuccgaccuu

SEQ ID NO: 642245 - RNA, 19 nt, Homo sapiens
  misc_RNA (1)...(19): siRNA sense strand
gcuggagguuauuggagaa

SEQ ID NO: 642246 - RNA, 19 nt, Homo sapiens
  misc_RNA (1)...(19): siRNA sense strand
cucaggagcugguguuagu

SEQ ID NO: 642247 - RNA, 19 nt, Homo sapiens
  misc_RNA (1)...(19): siRNA sense strand
gagcucgcccacugugauu

SEQ ID NO: 642248 - RNA, 19 nt, Homo sapiens
  misc_RNA (1)...(19): siRNA sense strand
ugauuucccagcuauauug

SEQ ID NO: 642249 - RNA, 19 nt, Homo sapiens
  misc_RNA (1)...(19): siRNA sense strand
ccacacgaaaccagauuug

SEQ ID NO: 642250 - RNA, 19 nt, Homo sapiens
  misc_RNA (1)...(19): siRNA sense strand
cggccaaguucaaguaugg

SEQ ID NO: 642251 - RNA, 19 nt, Homo sapiens
  misc_RNA (1)...(19): siRNA sense strand
gcuauauuguggccugaag

SEQ ID NO: 642252 - RNA, 19 nt, Homo sapiens
  misc_RNA (1)...(19): siRNA sense strand
ucagaggagcuggagguua

SEQ ID NO: 642253 - RNA, 19 nt, Homo sapiens
  misc_RNA (1)...(19): siRNA sense strand
gagaauuacaagaguccaa

SEQ ID NO: 642254 - RNA, 19 nt, Homo sapiens
  misc_RNA (1)...(19): siRNA sense strand
ugucccaagucgauugauu

SEQ ID NO: 642255 - RNA, 19 nt, Homo sapiens
  misc_RNA (1)...(19): siRNA sense strand
ggucaucacccagaacauc

SEQ ID NO: 642256 - RNA, 19 nt, Homo sapiens
  misc_RNA (1)...(19): siRNA sense strand
ucgauugauuucccagcua

SEQ ID NO: 642257 - RNA, 19 nt, Homo sapiens
  misc_RNA (1)...(19): siRNA sense strand
gucccaagucgauugauuu

SEQ ID NO: 642258 - RNA, 19 nt, Homo sapiens
  misc_RNA (1)...(19): siRNA sense strand
ucacccagaacaucgauga

SEQ ID NO: 642259 - RNA, 19 nt, Homo sapiens
  misc_RNA (1)...(19): siRNA sense strand
ggaguuguggcugagaauu

SEQ ID NO: 642260 - RNA, 19 nt, Homo sapiens
  misc_RNA (1)...(19): siRNA sense strand
guggaguuguggcugagaa

SEQ ID NO: 642261 - RNA, 19 nt, Homo sapiens
  misc_RNA (1)...(19): siRNA sense strand
cagauugucccaagucgau

SEQ ID NO: 642262 - RNA, 19 nt, Homo sapiens
  misc_RNA (1)...(19): siRNA sense strand
ggagcuggagguuauugga

SEQ ID NO: 642263 - RNA, 19 nt, Homo sapiens
  misc_RNA (1)...(19): siRNA sense strand
caauuuguccagcuuuauc

SEQ ID NO: 642264 - RNA, 19 nt, Homo sapiens
  misc_RNA (1)...(19): siRNA sense strand
aagcaaagcacauagucau

SEQ ID NO: 642265 - RNA, 19 nt, Homo sapiens
  misc_RNA (1)...(19): siRNA sense strand
guccagcuuuaucaggaaa

SEQ ID NO: 642266 - RNA, 19 nt, Homo sapiens
  misc_RNA (1)...(19): siRNA sense strand
gauugucccaagucgauug

SEQ ID NO: 642267 - RNA, 19 nt, Homo sapiens
  misc_RNA (1)...(19): siRNA sense strand
aggaaaaggugcuccagaa

SEQ ID NO: 642268 - RNA, 19 nt, Homo sapiens
  misc_RNA (1)...(19): siRNA sense strand
ccaugguagcuuauuuaaa

SEQ ID NO: 642269 - RNA, 19 nt, Homo sapiens
  misc_RNA (1)...(19): siRNA sense strand
cgcccacugugauuuaugu

SEQ ID NO: 642270 - RNA, 19 nt, Homo sapiens
  misc_RNA (1)...(19): siRNA sense strand
gaggagcuggagguuauug

SEQ ID NO: 642271 - RNA, 19 nt, Homo sapiens
  misc_RNA (1)...(19): siRNA sense strand
ggagguuauuggagaaaau

SEQ ID NO: 642272 - RNA, 19 nt, Homo sapiens
  misc_RNA (1)...(19): siRNA sense strand
ccuccagcguccacacgaa

SEQ ID NO: 642273 - RNA, 19 nt, Homo sapiens
  misc_RNA (1)...(19): siRNA sense strand
gaaauaugcuacagauaga

SEQ ID NO: 642274 - RNA, 19 nt, Homo sapiens
  misc_RNA (1)...(19): siRNA sense strand
ggaagagauugaucaugua

SEQ ID NO: 642275 - RNA, 19 nt, Homo sapiens
  misc_RNA (1)...(19): siRNA sense strand
ggaaggagauccggcguuu

SEQ ID NO: 642276 - RNA, 19 nt, Homo sapiens
  misc_RNA (1)...(19): siRNA sense strand
uaaagaaccucaauacuac

SEQ ID NO: 642277 - RNA, 19 nt, Homo sapiens
  misc_RNA (1)...(19): siRNA sense strand
gaaguuacauuagggagaa

SEQ ID NO: 642278 - RNA, 19 nt, Homo sapiens
  misc_RNA (1)...(19): siRNA sense strand
ggaaauaugcuacagauag

SEQ ID NO: 642279 - RNA, 19 nt, Homo sapiens
  misc_RNA (1)...(19): siRNA sense strand
cacuguagcugaucuauuu

SEQ ID NO: 642280 - RNA, 19 nt, Homo sapiens
  misc_RNA (1)...(19): siRNA sense strand
uaaaggacuuggaaucauu

SEQ ID NO: 642281 - RNA, 19 nt, Homo sapiens
  misc_RNA (1)...(19): siRNA sense strand
cccaauaucucaaagaauu

SEQ ID NO: 642282 - RNA, 19 nt, Homo sapiens
  misc_RNA (1)...(19): siRNA sense strand
ucacaaacuugcggaauuu

SEQ ID NO: 642283 - RNA, 19 nt, Homo sapiens
  misc_RNA (1)...(19): siRNA sense strand
gauaagaauggcaacuuua

SEQ ID NO: 642284 - RNA, 19 nt, Homo sapiens
  misc_RNA (1)...(19): siRNA sense strand
gacaaagaauuuccuaauc

SEQ ID NO: 642285 - RNA, 19 nt, Homo sapiens
  misc_RNA (1)...(19): siRNA sense strand
uaacaauccucgggacuuu

SEQ ID NO: 642286 - RNA, 19 nt, Homo sapiens
  misc_RNA (1)...(19): siRNA sense strand
gaagagauugaucauguaa

SEQ ID NO: 642287 - RNA, 19 nt, Homo sapiens
  misc_RNA (1)...(19): siRNA sense strand
uaauuucccucuacucauu

SEQ ID NO: 642288 - RNA, 19 nt, Homo sapiens
  misc_RNA (1)...(19): siRNA sense strand
ccaaagggauuguuucucu

SEQ ID NO: 642289 - RNA, 19 nt, Homo sapiens
  misc_RNA (1)...(19): siRNA sense strand
ccacuccucuuccuauuau

SEQ ID NO: 642290 - RNA, 19 nt, Homo sapiens
  misc_RNA (1)...(19): siRNA sense strand
aggaagcccugauugauaa

SEQ ID NO: 642291 - RNA, 19 nt, Homo sapiens
  misc_RNA (1)...(19): siRNA sense strand
ggauccaggucugcaauaa

SEQ ID NO: 642292 - RNA, 19 nt, Homo sapiens
  misc_RNA (1)...(19): siRNA sense strand
gaauggcaacuuuaagaaa

SEQ ID NO: 642293 - RNA, 19 nt, Homo sapiens
  misc_RNA (1)...(19): siRNA sense strand
ccacaugccuuacacugau

SEQ ID NO: 642294 - RNA, 19 nt, Homo sapiens
  misc_RNA (1)...(19): siRNA sense strand
aaacuugguuggcacugua

SEQ ID NO: 642295 - RNA, 19 nt, Homo sapiens
  misc_RNA (1)...(19): siRNA sense strand
gaaggaagcccugauugau

SEQ ID NO: 642296 - RNA, 19 nt, Homo sapiens
  misc_RNA (1)...(19): siRNA sense strand
ugacuuccgugcuacauga

SEQ ID NO: 642297 - RNA, 19 nt, Homo sapiens
  misc_RNA (1)...(19): siRNA sense strand
cagcuaaaguccaggaaga

SEQ ID NO: 642298 - RNA, 19 nt, Homo sapiens
  misc_RNA (1)...(19): siRNA sense strand
cccaggaacucacaacaaa

SEQ ID NO: 642299 - RNA, 19 nt, Homo sapiens
  misc_RNA (1)...(19): siRNA sense strand
aggaagagauugaucaugu

SEQ ID NO: 642300 - RNA, 19 nt, Homo sapiens
  misc_RNA (1)...(19): siRNA sense strand
agauaagaauggcaacuuu

SEQ ID NO: 642301 - RNA, 19 nt, Homo sapiens
  misc_RNA (1)...(19): siRNA sense strand
gcuacaugaugacaaagaa

SEQ ID NO: 642302 - RNA, 19 nt, Homo sapiens
  misc_RNA (1)...(19): siRNA sense strand
cugcaaaucuuucaccaau

SEQ ID NO: 642303 - RNA, 19 nt, Homo sapiens
  misc_RNA (1)...(19): siRNA sense strand
caaagaauuuccuaaucca

SEQ ID NO: 642304 - RNA, 19 nt, Homo sapiens
  misc_RNA (1)...(19): siRNA sense strand
gcaccacucugagauaugg

SEQ ID NO: 642305 - RNA, 19 nt, Homo sapiens
  misc_RNA (1)...(19): siRNA sense strand
gcaauaauuucccucuacu

SEQ ID NO: 642306 - RNA, 19 nt, Homo sapiens
  misc_RNA (1)...(19): siRNA sense strand
gauaugaggcagugaagga

SEQ ID NO: 642307 - RNA, 19 nt, Homo sapiens
  misc_RNA (1)...(19): siRNA sense strand
ccagaaacgauuugauuau

SEQ ID NO: 642308 - RNA, 19 nt, Homo sapiens
  misc_RNA (1)...(19): siRNA sense strand
ccuggccacuuucuagaua

SEQ ID NO: 642309 - RNA, 19 nt, Homo sapiens
  misc_RNA (1)...(19): siRNA sense strand
ugaaggaagcccugauuga

SEQ ID NO: 642310 - RNA, 19 nt, Homo sapiens
  misc_RNA (1)...(19): siRNA sense strand
gagauacagugaccuuguc

SEQ ID NO: 642311 - RNA, 19 nt, Homo sapiens
  misc_RNA (1)...(19): siRNA sense strand
ugcacgagauccagagaua

SEQ ID NO: 642312 - RNA, 19 nt, Homo sapiens
  misc_RNA (1)...(19): siRNA sense strand
ggaccguguucaagaggaa

SEQ ID NO: 642313 - RNA, 19 nt, Homo sapiens
  misc_RNA (1)...(19): siRNA sense strand
ggacaucugcaaaucuuuc

SEQ ID NO: 642314 - RNA, 19 nt, Homo sapiens
  misc_RNA (1)...(19): siRNA sense strand
aaggaagcccugauugaua

SEQ ID NO: 642315 - RNA, 19 nt, Homo sapiens
  misc_RNA (1)...(19): siRNA sense strand
caagcaccacucugagaua

SEQ ID NO: 642316 - RNA, 19 nt, Homo sapiens
  misc_RNA (1)...(19): siRNA sense strand
acaacaagcaccacucuga

SEQ ID NO: 642317 - RNA, 19 nt, Homo sapiens
  misc_RNA (1)...(19): siRNA sense strand
gugacuacuucaugccuuu

SEQ ID NO: 642318 - RNA, 19 nt, Homo sapiens
  misc_RNA (1)...(19): siRNA sense strand
aaggacaucugcaaaucuu

SEQ ID NO: 642319 - RNA, 19 nt, Homo sapiens
  misc_RNA (1)...(19): siRNA sense strand
acaaagaauuuccuaaucc

SEQ ID NO: 642320 - RNA, 19 nt, Homo sapiens
  misc_RNA (1)...(19): siRNA sense strand
uaaaguccaggaagagauu

SEQ ID NO: 642321 - RNA, 19 nt, Homo sapiens
  misc_RNA (1)...(19): siRNA sense strand
gcacuguagcugaucuauu

SEQ ID NO: 642322 - RNA, 19 nt, Homo sapiens
  misc_RNA (1)...(19): siRNA sense strand
gggcugugcucccugcaau

SEQ ID NO: 642323 - RNA, 19 nt, Homo sapiens
  misc_RNA (1)...(19): siRNA sense strand
ggagaggaguuuucuggaa

SEQ ID NO: 642324 - RNA, 19 nt, Homo sapiens
  misc_RNA (1)...(19): siRNA sense strand
auccaggucugcaauaauu

SEQ ID NO: 642325 - RNA, 19 nt, Homo sapiens
  misc_RNA (1)...(19): siRNA sense strand
cgugcuacaugaugacaaa

SEQ ID NO: 642326 - RNA, 19 nt, Homo sapiens
  misc_RNA (1)...(19): siRNA sense strand
acagaacuuuaaccugaaa

SEQ ID NO: 642327 - RNA, 19 nt, Homo sapiens
  misc_RNA (1)...(19): siRNA sense strand
uggcaugaaucccauagug

SEQ ID NO: 642328 - RNA, 19 nt, Homo sapiens
  misc_RNA (1)...(19): siRNA sense strand
gcaguuaccaaagggauug

SEQ ID NO: 642329 - RNA, 19 nt, Homo sapiens
  misc_RNA (1)...(19): siRNA sense strand
uuaaggacaucugcaaauc

SEQ ID NO: 642330 - RNA, 19 nt, Homo sapiens
  misc_RNA (1)...(19): siRNA sense strand
aagaauggcaacuuuaaga

SEQ ID NO: 642331 - RNA, 19 nt, Homo sapiens
  misc_RNA (1)...(19): siRNA sense strand
gaccacugauacuaaguuc

SEQ ID NO: 642332 - RNA, 19 nt, Homo sapiens
  misc_RNA (1)...(19): siRNA sense strand
gugaucugcuccguuguuu

SEQ ID NO: 642333 - RNA, 19 nt, Homo sapiens
  misc_RNA (1)...(19): siRNA sense strand
cuaaaggacuuggaaucau

SEQ ID NO: 642334 - RNA, 19 nt, Homo sapiens
  misc_RNA (1)...(19): siRNA sense strand
ccucaauacuacugcaguu

SEQ ID NO: 642335 - RNA, 19 nt, Homo sapiens
  misc_RNA (1)...(19): siRNA sense strand
gcucuuacacgaaguuaca

SEQ ID NO: 642336 - RNA, 19 nt, Homo sapiens
  misc_RNA (1)...(19): siRNA sense strand
uccagaaacgauuugauua

SEQ ID NO: 642337 - RNA, 19 nt, Homo sapiens
  misc_RNA (1)...(19): siRNA sense strand
cucacaaacuugcggaauu

SEQ ID NO: 642338 - RNA, 19 nt, Homo sapiens
  misc_RNA (1)...(19): siRNA sense strand
gaacuuuaaccugaaaucu

SEQ ID NO: 642339 - RNA, 19 nt, Homo sapiens
  misc_RNA (1)...(19): siRNA sense strand
gaugacaaagaauuuccua

SEQ ID NO: 642340 - RNA, 19 nt, Homo sapiens
  misc_RNA (1)...(19): siRNA sense strand
guucagaaacuaccucauc

SEQ ID NO: 642341 - RNA, 19 nt, Homo sapiens
  misc_RNA (1)...(19): siRNA sense strand
gaaagagauggaaggagau

SEQ ID NO: 642342 - RNA, 19 nt, Homo sapiens
  misc_RNA (1)...(19): siRNA sense strand
guuaaggacaucugcaaau

SEQ ID NO: 642343 - RNA, 19 nt, Homo sapiens
  misc_RNA (1)...(19): siRNA sense strand
cuacugcaguuaccaaagg

SEQ ID NO: 642344 - RNA, 19 nt, Homo sapiens
  misc_RNA (1)...(19): siRNA sense strand
uacauuagggagaaaguaa

SEQ ID NO: 642345 - RNA, 19 nt, Homo sapiens
  misc_RNA (1)...(19): siRNA sense strand
aagcaccacucugagauau

SEQ ID NO: 642346 - RNA, 19 nt, Homo sapiens
  misc_RNA (1)...(19): siRNA sense strand
gaaaguaaaagaacaccaa

SEQ ID NO: 642347 - RNA, 19 nt, Homo sapiens
  misc_RNA (1)...(19): siRNA sense strand
gcaauggaaagagauggaa

SEQ ID NO: 642348 - RNA, 19 nt, Homo sapiens
  misc_RNA (1)...(19): siRNA sense strand
uacagaacuuuaaccugaa

SEQ ID NO: 642349 - RNA, 19 nt, Homo sapiens
  misc_RNA (1)...(19): siRNA sense strand
gaaaaggacaaccaaaagu

SEQ ID NO: 642350 - RNA, 19 nt, Homo sapiens
  misc_RNA (1)...(19): siRNA sense strand
ccucauaccagaucugcuu

SEQ ID NO: 642351 - RNA, 19 nt, Homo sapiens
  misc_RNA (1)...(19): siRNA sense strand
cuuacacgaaguuacauua

SEQ ID NO: 642352 - RNA, 19 nt, Homo sapiens
  misc_RNA (1)...(19): siRNA sense strand
agaauggcaacuuuaagaa

SEQ ID NO: 642353 - RNA, 19 nt, Homo sapiens
  misc_RNA (1)...(19): siRNA sense strand
gagauugaucauguaauug

SEQ ID NO: 642354 - RNA, 19 nt, Homo sapiens
  misc_RNA (1)...(19): siRNA sense strand
gauccaggucugcaauaau

SEQ ID NO: 642355 - RNA, 19 nt, Homo sapiens
  misc_RNA (1)...(19): siRNA sense strand
cuuugacccuggccacuuu

SEQ ID NO: 642356 - RNA, 19 nt, Homo sapiens
  misc_RNA (1)...(19): siRNA sense strand
ccagagauacagugaccuu

SEQ ID NO: 642357 - RNA, 19 nt, Homo sapiens
  misc_RNA (1)...(19): siRNA sense strand
gcuaaaguccaggaagaga

SEQ ID NO: 642358 - RNA, 19 nt, Homo sapiens
  misc_RNA (1)...(19): siRNA sense strand
ucacaacaaagugcuuaaa

SEQ ID NO: 642359 - RNA, 19 nt, Homo sapiens
  misc_RNA (1)...(19): siRNA sense strand
aaaggacuuggaaucauuu

SEQ ID NO: 642360 - RNA, 19 nt, Homo sapiens
  misc_RNA (1)...(19): siRNA sense strand
aauaauuucccucuacuca

SEQ ID NO: 642361 - RNA, 19 nt, Homo sapiens
  misc_RNA (1)...(19): siRNA sense strand
ugugcucccugcaauguga

SEQ ID NO: 642362 - RNA, 19 nt, Homo sapiens
  misc_RNA (1)...(19): siRNA sense strand
uuggaaauaugcuacagau

SEQ ID NO: 642363 - RNA, 19 nt, Homo sapiens
  misc_RNA (1)...(19): siRNA sense strand
gagcauugaggaccguguu

SEQ ID NO: 642364 - RNA, 19 nt, Homo sapiens
  misc_RNA (1)...(19): siRNA sense strand
ugaggaccguguucaagag

SEQ ID NO: 642365 - RNA, 19 nt, Homo sapiens
  misc_RNA (1)...(19): siRNA sense strand
ggaaaaggacaaccaaaag

SEQ ID NO: 642366 - RNA, 19 nt, Homo sapiens
  misc_RNA (1)...(19): siRNA sense strand
caggaacucacaacaaagu

SEQ ID NO: 642367 - RNA, 19 nt, Homo sapiens
  misc_RNA (1)...(19): siRNA sense strand
gugaaggaagcccugauug

SEQ ID NO: 642368 - RNA, 19 nt, Homo sapiens
  misc_RNA (1)...(19): siRNA sense strand
gccacaugccuuacacuga

SEQ ID NO: 642369 - RNA, 19 nt, Homo sapiens
  misc_RNA (1)...(19): siRNA sense strand
guagcugaucuauuuguug

SEQ ID NO: 642370 - RNA, 19 nt, Homo sapiens
  misc_RNA (1)...(19): siRNA sense strand
gguuggcacuguagcugau

SEQ ID NO: 642371 - RNA, 19 nt, Homo sapiens
  misc_RNA (1)...(19): siRNA sense strand
ugcuacagauagauguuaa

SEQ ID NO: 642372 - RNA, 19 nt, Homo sapiens
  misc_RNA (1)...(19): siRNA sense strand
uguagcugaucuauuuguu

SEQ ID NO: 642373 - RNA, 19 nt, Homo sapiens
  misc_RNA (1)...(19): siRNA sense strand
gaaauaugcuacagauaga

SEQ ID NO: 642374 - RNA, 19 nt, Homo sapiens
  misc_RNA (1)...(19): siRNA sense strand
ggaagagauugaucaugua

SEQ ID NO: 642375 - RNA, 19 nt, Homo sapiens
  misc_RNA (1)...(19): siRNA sense strand
ggaaggagauccggcguuu

SEQ ID NO: 642376 - RNA, 19 nt, Homo sapiens
  misc_RNA (1)...(19): siRNA sense strand
gaaguuacauuagggagaa

SEQ ID NO: 642377 - RNA, 19 nt, Homo sapiens
  misc_RNA (1)...(19): siRNA sense strand
ggaaauaugcuacagauag

SEQ ID NO: 642378 - RNA, 19 nt, Homo sapiens
  misc_RNA (1)...(19): siRNA sense strand
cacuguagcugaucuauuu

SEQ ID NO: 642379 - RNA, 19 nt, Homo sapiens
  misc_RNA (1)...(19): siRNA sense strand
uaaaggacuuggaaucauu

SEQ ID NO: 642380 - RNA, 19 nt, Homo sapiens
  misc_RNA (1)...(19): siRNA sense strand
cccaauaucucaaagaauu

SEQ ID NO: 642381 - RNA, 19 nt, Homo sapiens
  misc_RNA (1)...(19): siRNA sense strand
ucacaaacuugcggaauuu

SEQ ID NO: 642382 - RNA, 19 nt, Homo sapiens
  misc_RNA (1)...(19): siRNA sense strand
uaacaauccucgggacuuu

SEQ ID NO: 642383 - RNA, 19 nt, Homo sapiens
  misc_RNA (1)...(19): siRNA sense strand
gaagagauugaucauguaa

SEQ ID NO: 642384 - RNA, 19 nt, Homo sapiens
  misc_RNA (1)...(19): siRNA sense strand
uaauuucccucuacucauu

SEQ ID NO: 642385 - RNA, 19 nt, Homo sapiens
  misc_RNA (1)...(19): siRNA sense strand
ccacuccucuuccuauuau

SEQ ID NO: 642386 - RNA, 19 nt, Homo sapiens
  misc_RNA (1)...(19): siRNA sense strand
aggaagcccugauugauaa

SEQ ID NO: 642387 - RNA, 19 nt, Homo sapiens
  misc_RNA (1)...(19): siRNA sense strand
ggauccaggucugcaauaa

SEQ ID NO: 642388 - RNA, 19 nt, Homo sapiens
  misc_RNA (1)...(19): siRNA sense strand
ccacaugccuuacacugau

SEQ ID NO: 642389 - RNA, 19 nt, Homo sapiens
  misc_RNA (1)...(19): siRNA sense strand
aaacuugguuggcacugua

SEQ ID NO: 642390 - RNA, 19 nt, Homo sapiens
  misc_RNA (1)...(19): siRNA sense strand
gaaggaagcccugauugau

SEQ ID NO: 642391 - RNA, 19 nt, Homo sapiens
  misc_RNA (1)...(19): siRNA sense strand
cagcuaaaguccaggaaga

SEQ ID NO: 642392 - RNA, 19 nt, Homo sapiens
  misc_RNA (1)...(19): siRNA sense strand
cccaggaacucacaacaaa

SEQ ID NO: 642393 - RNA, 19 nt, Homo sapiens
  misc_RNA (1)...(19): siRNA sense strand
aggaagagauugaucaugu

SEQ ID NO: 642394 - RNA, 19 nt, Homo sapiens
  misc_RNA (1)...(19): siRNA sense strand
cugcaaaucuuucaccaau

SEQ ID NO: 642395 - RNA, 19 nt, Homo sapiens
  misc_RNA (1)...(19): siRNA sense strand
gcaccacucugagauaugg

SEQ ID NO: 642396 - RNA, 19 nt, Homo sapiens
  misc_RNA (1)...(19): siRNA sense strand
gcaauaauuucccucuacu

SEQ ID NO: 642397 - RNA, 19 nt, Homo sapiens
  misc_RNA (1)...(19): siRNA sense strand
gauaugaggcagugaagga

SEQ ID NO: 642398 - RNA, 19 nt, Homo sapiens
  misc_RNA (1)...(19): siRNA sense strand
ccagaaacgauuugauuau

SEQ ID NO: 642399 - RNA, 19 nt, Homo sapiens
  misc_RNA (1)...(19): siRNA sense strand
ugaaggaagcccugauuga

SEQ ID NO: 642400 - RNA, 19 nt, Homo sapiens
  misc_RNA (1)...(19): siRNA sense strand
gagauacagugaccuuguc

SEQ ID NO: 642401 - RNA, 19 nt, Homo sapiens
  misc_RNA (1)...(19): siRNA sense strand
ugcacgagauccagagaua

SEQ ID NO: 642402 - RNA, 19 nt, Homo sapiens
  misc_RNA (1)...(19): siRNA sense strand
ggaccguguucaagaggaa

SEQ ID NO: 642403 - RNA, 19 nt, Homo sapiens
  misc_RNA (1)...(19): siRNA sense strand
ggacaucugcaaaucuuuc

SEQ ID NO: 642404 - RNA, 19 nt, Homo sapiens
  misc_RNA (1)...(19): siRNA sense strand
aaggaagcccugauugaua

SEQ ID NO: 642405 - RNA, 19 nt, Homo sapiens
  misc_RNA (1)...(19): siRNA sense strand
caagcaccacucugagaua

SEQ ID NO: 642406 - RNA, 19 nt, Homo sapiens
  misc_RNA (1)...(19): siRNA sense strand
acaacaagcaccacucuga

SEQ ID NO: 642407 - RNA, 19 nt, Homo sapiens
  misc_RNA (1)...(19): siRNA sense strand
aaggacaucugcaaaucuu

SEQ ID NO: 642408 - RNA, 19 nt, Homo sapiens
  misc_RNA (1)...(19): siRNA sense strand
uaaaguccaggaagagauu

SEQ ID NO: 642409 - RNA, 19 nt, Homo sapiens
  misc_RNA (1)...(19): siRNA sense strand
gcacuguagcugaucuauu

SEQ ID NO: 642410 - RNA, 19 nt, Homo sapiens
  misc_RNA (1)...(19): siRNA sense strand
gggcugugcucccugcaau

SEQ ID NO: 642411 - RNA, 19 nt, Homo sapiens
  misc_RNA (1)...(19): siRNA sense strand
ggagaggaguuuucuggaa

SEQ ID NO: 642412 - RNA, 19 nt, Homo sapiens
  misc_RNA (1)...(19): siRNA sense strand
auccaggucugcaauaauu

SEQ ID NO: 642413 - RNA, 19 nt, Homo sapiens
  misc_RNA (1)...(19): siRNA sense strand
uuaaggacaucugcaaauc

SEQ ID NO: 642414 - RNA, 19 nt, Homo sapiens
  misc_RNA (1)...(19): siRNA sense strand
gaccacugauacuaaguuc

SEQ ID NO: 642415 - RNA, 19 nt, Homo sapiens
  misc_RNA (1)...(19): siRNA sense strand
gugaucugcuccguuguuu

SEQ ID NO: 642416 - RNA, 19 nt, Homo sapiens
  misc_RNA (1)...(19): siRNA sense strand
uggcaugaaucccauagug

SEQ ID NO: 642417 - RNA, 19 nt, Homo sapiens
  misc_RNA (1)...(19): siRNA sense strand
cuaaaggacuuggaaucau

SEQ ID NO: 642418 - RNA, 19 nt, Homo sapiens
  misc_RNA (1)...(19): siRNA sense strand
gcucuuacacgaaguuaca

SEQ ID NO: 642419 - RNA, 19 nt, Homo sapiens
  misc_RNA (1)...(19): siRNA sense strand
uccagaaacgauuugauua

SEQ ID NO: 642420 - RNA, 19 nt, Homo sapiens
  misc_RNA (1)...(19): siRNA sense strand
cucacaaacuugcggaauu

SEQ ID NO: 642421 - RNA, 19 nt, Homo sapiens
  misc_RNA (1)...(19): siRNA sense strand
guucagaaacuaccucauc

SEQ ID NO: 642422 - RNA, 19 nt, Homo sapiens
  misc_RNA (1)...(19): siRNA sense strand
gaaagagauggaaggagau

SEQ ID NO: 642423 - RNA, 19 nt, Homo sapiens
  misc_RNA (1)...(19): siRNA sense strand
guuaaggacaucugcaaau

SEQ ID NO: 642424 - RNA, 19 nt, Homo sapiens
  misc_RNA (1)...(19): siRNA sense strand
uacauuagggagaaaguaa

SEQ ID NO: 642425 - RNA, 19 nt, Homo sapiens
  misc_RNA (1)...(19): siRNA sense strand
aagcaccacucugagauau

SEQ ID NO: 642426 - RNA, 19 nt, Homo sapiens
  misc_RNA (1)...(19): siRNA sense strand
gaaaguaaaagaacaccaa

SEQ ID NO: 642427 - RNA, 19 nt, Homo sapiens
  misc_RNA (1)...(19): siRNA sense strand
gcaauggaaagagauggaa

SEQ ID NO: 642428 - RNA, 19 nt, Homo sapiens
  misc_RNA (1)...(19): siRNA sense strand
gaaaaggacaaccaaaagu

SEQ ID NO: 642429 - RNA, 19 nt, Homo sapiens
  misc_RNA (1)...(19): siRNA sense strand
cuuacacgaaguuacauua

SEQ ID NO: 642430 - RNA, 19 nt, Homo sapiens
  misc_RNA (1)...(19): siRNA sense strand
gagauugaucauguaauug

SEQ ID NO: 642431 - RNA, 19 nt, Homo sapiens
  misc_RNA (1)...(19): siRNA sense strand
gauccaggucugcaauaau

SEQ ID NO: 642432 - RNA, 19 nt, Homo sapiens
  misc_RNA (1)...(19): siRNA sense strand
ccagagauacagugaccuu

SEQ ID NO: 642433 - RNA, 19 nt, Homo sapiens
  misc_RNA (1)...(19): siRNA sense strand
gcuaaaguccaggaagaga

SEQ ID NO: 642434 - RNA, 19 nt, Homo sapiens
  misc_RNA (1)...(19): siRNA sense strand
ucacaacaaagugcuuaaa

SEQ ID NO: 642435 - RNA, 19 nt, Homo sapiens
  misc_RNA (1)...(19): siRNA sense strand
aaaggacuuggaaucauuu

SEQ ID NO: 642436 - RNA, 19 nt, Homo sapiens
  misc_RNA (1)...(19): siRNA sense strand
aauaauuucccucuacuca

SEQ ID NO: 642437 - RNA, 19 nt, Homo sapiens
  misc_RNA (1)...(19): siRNA sense strand
ugugcucccugcaauguga

SEQ ID NO: 642438 - RNA, 19 nt, Homo sapiens
  misc_RNA (1)...(19): siRNA sense strand
gagcauugaggaccguguu

SEQ ID NO: 642439 - RNA, 19 nt, Homo sapiens
  misc_RNA (1)...(19): siRNA sense strand
uuggaaauaugcuacagau

SEQ ID NO: 642440 - RNA, 19 nt, Homo sapiens
  misc_RNA (1)...(19): siRNA sense strand
ugaggaccguguucaagag

SEQ ID NO: 642441 - RNA, 19 nt, Homo sapiens
  misc_RNA (1)...(19): siRNA sense strand
ggaaaaggacaaccaaaag

SEQ ID NO: 642442 - RNA, 19 nt, Homo sapiens
  misc_RNA (1)...(19): siRNA sense strand
caggaacucacaacaaagu

SEQ ID NO: 642443 - RNA, 19 nt, Homo sapiens
  misc_RNA (1)...(19): siRNA sense strand
gugaaggaagcccugauug

SEQ ID NO: 642444 - RNA, 19 nt, Homo sapiens
  misc_RNA (1)...(19): siRNA sense strand
gccacaugccuuacacuga

SEQ ID NO: 642445 - RNA, 19 nt, Homo sapiens
  misc_RNA (1)...(19): siRNA sense strand
guagcugaucuauuuguug

SEQ ID NO: 642446 - RNA, 19 nt, Homo sapiens
  misc_RNA (1)...(19): siRNA sense strand
uagugguguuucauggaua

SEQ ID NO: 642447 - RNA, 19 nt, Homo sapiens
  misc_RNA (1)...(19): siRNA sense strand
uguagcugaucuauuuguu

SEQ ID NO: 642448 - RNA, 19 nt, Homo sapiens
  misc_RNA (1)...(19): siRNA sense strand
gguuggcacuguagcugau

SEQ ID NO: 642449 - RNA, 19 nt, Homo sapiens
  misc_RNA (1)...(19): siRNA sense strand
ugcaauaauuucccucuac

SEQ ID NO: 642450 - RNA, 19 nt, Homo sapiens
  misc_RNA (1)...(19): siRNA sense strand
cugcaauaauuucccucua

SEQ ID NO: 642451 - RNA, 19 nt, Homo sapiens
  misc_RNA (1)...(19): siRNA sense strand
ugcuacagauagauguuaa

SEQ ID NO: 642452 - RNA, 19 nt, Homo sapiens
  misc_RNA (1)...(19): siRNA sense strand
ugaaucccauagugguguu

SEQ ID NO: 642453 - RNA, 19 nt, Homo sapiens
  misc_RNA (1)...(19): siRNA sense strand
auaggagccacaugccuua

SEQ ID NO: 642454 - RNA, 19 nt, Homo sapiens
  misc_RNA (1)...(19): siRNA sense strand
ggaacagagacaacaagca

SEQ ID NO: 642455 - RNA, 19 nt, Homo sapiens
  misc_RNA (1)...(19): siRNA sense strand
acaccaagcaucacuggau

SEQ ID NO: 642456 - RNA, 19 nt, Homo sapiens
  misc_RNA (1)...(19): siRNA sense strand
cggcguuucucccucacaa

SEQ ID NO: 642457 - RNA, 19 nt, Homo sapiens
  misc_RNA (1)...(19): siRNA sense strand
gcaauuccccaauaucuca

SEQ ID NO: 642458 - RNA, 19 nt, Homo sapiens
  misc_RNA (1)...(19): siRNA sense strand
cucaaagaauuacuaaagg

SEQ ID NO: 642459 - RNA, 19 nt, Homo sapiens
  misc_RNA (1)...(19): siRNA sense strand
uuccagaaacgauuugauu

SEQ ID NO: 642460 - RNA, 19 nt, Homo sapiens
  misc_RNA (1)...(19): siRNA sense strand
aagaggcaauuccccaaua

SEQ ID NO: 642461 - RNA, 19 nt, Homo sapiens
  misc_RNA (1)...(19): siRNA sense strand
ugaccacugauacuaaguu

SEQ ID NO: 642462 - RNA, 19 nt, Homo sapiens
  misc_RNA (1)...(19): siRNA sense strand
ggagccacaugccuuacac

SEQ ID NO: 642463 - RNA, 19 nt, Homo sapiens
  misc_RNA (1)...(19): siRNA sense strand
ugcaaaucuuucaccaauu

SEQ ID NO: 642464 - RNA, 19 nt, Homo sapiens
  misc_RNA (1)...(19): siRNA sense strand
gaucugcuccguuguuuuc

SEQ ID NO: 642465 - RNA, 19 nt, Homo sapiens
  misc_RNA (1)...(19): siRNA sense strand
ccaaaagucagaauucaau

SEQ ID NO: 642466 - RNA, 19 nt, Homo sapiens
  misc_RNA (1)...(19): siRNA sense strand
acaauccucgggacuuuau

SEQ ID NO: 642467 - RNA, 19 nt, Homo sapiens
  misc_RNA (1)...(19): siRNA sense strand
agucuaugguccuguguuc

SEQ ID NO: 642468 - RNA, 19 nt, Homo sapiens
  misc_RNA (1)...(19): siRNA sense strand
guccuguguucaccgugua

SEQ ID NO: 642469 - RNA, 19 nt, Homo sapiens
  misc_RNA (1)...(19): siRNA sense strand
gggagaaaguaaaagaaca

SEQ ID NO: 642470 - RNA, 19 nt, Homo sapiens
  misc_RNA (1)...(19): siRNA sense strand
uaaggacaucugcaaaucu

SEQ ID NO: 642471 - RNA, 19 nt, Homo sapiens
  misc_RNA (1)...(19): siRNA sense strand
ccaggucugcaauaauuuc

SEQ ID NO: 642472 - RNA, 19 nt, Homo sapiens
  misc_RNA (1)...(19): siRNA sense strand
ucccucuacucauugauug

SEQ ID NO: 642473 - RNA, 19 nt, Homo sapiens
  misc_RNA (1)...(19): siRNA sense strand
gaaauaugcuacagauaga

SEQ ID NO: 642474 - RNA, 19 nt, Homo sapiens
  misc_RNA (1)...(19): siRNA sense strand
ggaagagauugaucaugua

SEQ ID NO: 642475 - RNA, 19 nt, Homo sapiens
  misc_RNA (1)...(19): siRNA sense strand
ggaaggagauccggcguuu

SEQ ID NO: 642476 - RNA, 19 nt, Homo sapiens
  misc_RNA (1)...(19): siRNA sense strand
uaaagaaccucaauacuac

SEQ ID NO: 642477 - RNA, 19 nt, Homo sapiens
  misc_RNA (1)...(19): siRNA sense strand
gaaguuacauuagggagaa

SEQ ID NO: 642478 - RNA, 19 nt, Homo sapiens
  misc_RNA (1)...(19): siRNA sense strand
ggaaauaugcuacagauag

SEQ ID NO: 642479 - RNA, 19 nt, Homo sapiens
  misc_RNA (1)...(19): siRNA sense strand
cacuguagcugaucuauuu

SEQ ID NO: 642480 - RNA, 19 nt, Homo sapiens
  misc_RNA (1)...(19): siRNA sense strand
uaaaggacuuggaaucauu

SEQ ID NO: 642481 - RNA, 19 nt, Homo sapiens
  misc_RNA (1)...(19): siRNA sense strand
cccaauaucucaaagaauu

SEQ ID NO: 642482 - RNA, 19 nt, Homo sapiens
  misc_RNA (1)...(19): siRNA sense strand
ucacaaacuugcggaauuu

SEQ ID NO: 642483 - RNA, 19 nt, Homo sapiens
  misc_RNA (1)...(19): siRNA sense strand
gauaagaauggcaacuuua

SEQ ID NO: 642484 - RNA, 19 nt, Homo sapiens
  misc_RNA (1)...(19): siRNA sense strand
gacaaagaauuuccuaauc

SEQ ID NO: 642485 - RNA, 19 nt, Homo sapiens
  misc_RNA (1)...(19): siRNA sense strand
uaacaauccucgggacuuu

SEQ ID NO: 642486 - RNA, 19 nt, Homo sapiens
  misc_RNA (1)...(19): siRNA sense strand
gaagagauugaucauguaa

SEQ ID NO: 642487 - RNA, 19 nt, Homo sapiens
  misc_RNA (1)...(19): siRNA sense strand
uaauuucccucuacucauu

SEQ ID NO: 642488 - RNA, 19 nt, Homo sapiens
  misc_RNA (1)...(19): siRNA sense strand
ccaaagggauuguuucucu

SEQ ID NO: 642489 - RNA, 19 nt, Homo sapiens
  misc_RNA (1)...(19): siRNA sense strand
ccacuccucuuccuauuau

SEQ ID NO: 642490 - RNA, 19 nt, Homo sapiens
  misc_RNA (1)...(19): siRNA sense strand
aggaagcccugauugauaa

SEQ ID NO: 642491 - RNA, 19 nt, Homo sapiens
  misc_RNA (1)...(19): siRNA sense strand
ggauccaggucugcaauaa

SEQ ID NO: 642492 - RNA, 19 nt, Homo sapiens
  misc_RNA (1)...(19): siRNA sense strand
gaauggcaacuuuaagaaa

SEQ ID NO: 642493 - RNA, 19 nt, Homo sapiens
  misc_RNA (1)...(19): siRNA sense strand
ccacaugccuuacacugau

SEQ ID NO: 642494 - RNA, 19 nt, Homo sapiens
  misc_RNA (1)...(19): siRNA sense strand
aaacuugguuggcacugua

SEQ ID NO: 642495 - RNA, 19 nt, Homo sapiens
  misc_RNA (1)...(19): siRNA sense strand
gaaggaagcccugauugau

SEQ ID NO: 642496 - RNA, 19 nt, Homo sapiens
  misc_RNA (1)...(19): siRNA sense strand
ugacuuccgugcuacauga

SEQ ID NO: 642497 - RNA, 19 nt, Homo sapiens
  misc_RNA (1)...(19): siRNA sense strand
cagcuaaaguccaggaaga

SEQ ID NO: 642498 - RNA, 19 nt, Homo sapiens
  misc_RNA (1)...(19): siRNA sense strand
cccaggaacucacaacaaa

SEQ ID NO: 642499 - RNA, 19 nt, Homo sapiens
  misc_RNA (1)...(19): siRNA sense strand
aggaagagauugaucaugu

SEQ ID NO: 642500 - RNA, 19 nt, Homo sapiens
  misc_RNA (1)...(19): siRNA sense strand
agauaagaauggcaacuuu

SEQ ID NO: 642501 - RNA, 19 nt, Homo sapiens
  misc_RNA (1)...(19): siRNA sense strand
gcuacaugaugacaaagaa

SEQ ID NO: 642502 - RNA, 19 nt, Homo sapiens
  misc_RNA (1)...(19): siRNA sense strand
cugcaaaucuuucaccaau

SEQ ID NO: 642503 - RNA, 19 nt, Homo sapiens
  misc_RNA (1)...(19): siRNA sense strand
caaagaauuuccuaaucca

SEQ ID NO: 642504 - RNA, 19 nt, Homo sapiens
  misc_RNA (1)...(19): siRNA sense strand
gcaccacucugagauaugg

SEQ ID NO: 642505 - RNA, 19 nt, Homo sapiens
  misc_RNA (1)...(19): siRNA sense strand
gcaauaauuucccucuacu

SEQ ID NO: 642506 - RNA, 19 nt, Homo sapiens
  misc_RNA (1)...(19): siRNA sense strand
gauaugaggcagugaagga

SEQ ID NO: 642507 - RNA, 19 nt, Homo sapiens
  misc_RNA (1)...(19): siRNA sense strand
ccagaaacgauuugauuau

SEQ ID NO: 642508 - RNA, 19 nt, Homo sapiens
  misc_RNA (1)...(19): siRNA sense strand
ccuggccacuuucuagaua

SEQ ID NO: 642509 - RNA, 19 nt, Homo sapiens
  misc_RNA (1)...(19): siRNA sense strand
ugaaggaagcccugauuga

SEQ ID NO: 642510 - RNA, 19 nt, Homo sapiens
  misc_RNA (1)...(19): siRNA sense strand
gagauacagugaccuuguc

SEQ ID NO: 642511 - RNA, 19 nt, Homo sapiens
  misc_RNA (1)...(19): siRNA sense strand
ugcacgagauccagagaua

SEQ ID NO: 642512 - RNA, 19 nt, Homo sapiens
  misc_RNA (1)...(19): siRNA sense strand
ggaccguguucaagaggaa

SEQ ID NO: 642513 - RNA, 19 nt, Homo sapiens
  misc_RNA (1)...(19): siRNA sense strand
ggacaucugcaaaucuuuc

SEQ ID NO: 642514 - RNA, 19 nt, Homo sapiens
  misc_RNA (1)...(19): siRNA sense strand
aaggaagcccugauugaua

SEQ ID NO: 642515 - RNA, 19 nt, Homo sapiens
  misc_RNA (1)...(19): siRNA sense strand
caagcaccacucugagaua

SEQ ID NO: 642516 - RNA, 19 nt, Homo sapiens
  misc_RNA (1)...(19): siRNA sense strand
acaacaagcaccacucuga

SEQ ID NO: 642517 - RNA, 19 nt, Homo sapiens
  misc_RNA (1)...(19): siRNA sense strand
gugacuacuucaugccuuu

SEQ ID NO: 642518 - RNA, 19 nt, Homo sapiens
  misc_RNA (1)...(19): siRNA sense strand
aaggacaucugcaaaucuu

SEQ ID NO: 642519 - RNA, 19 nt, Homo sapiens
  misc_RNA (1)...(19): siRNA sense strand
acaaagaauuuccuaaucc

SEQ ID NO: 642520 - RNA, 19 nt, Homo sapiens
  misc_RNA (1)...(19): siRNA sense strand
uaaaguccaggaagagauu

SEQ ID NO: 642521 - RNA, 19 nt, Homo sapiens
  misc_RNA (1)...(19): siRNA sense strand
gcacuguagcugaucuauu

SEQ ID NO: 642522 - RNA, 19 nt, Homo sapiens
  misc_RNA (1)...(19): siRNA sense strand
gggcugugcucccugcaau

SEQ ID NO: 642523 - RNA, 19 nt, Homo sapiens
  misc_RNA (1)...(19): siRNA sense strand
ggagaggaguuuucuggaa

SEQ ID NO: 642524 - RNA, 19 nt, Homo sapiens
  misc_RNA (1)...(19): siRNA sense strand
auccaggucugcaauaauu

SEQ ID NO: 642525 - RNA, 19 nt, Homo sapiens
  misc_RNA (1)...(19): siRNA sense strand
cgugcuacaugaugacaaa

SEQ ID NO: 642526 - RNA, 19 nt, Homo sapiens
  misc_RNA (1)...(19): siRNA sense strand
acagaacuuuaaccugaaa

SEQ ID NO: 642527 - RNA, 19 nt, Homo sapiens
  misc_RNA (1)...(19): siRNA sense strand
uggcaugaaucccauagug

SEQ ID NO: 642528 - RNA, 19 nt, Homo sapiens
  misc_RNA (1)...(19): siRNA sense strand
gcaguuaccaaagggauug

SEQ ID NO: 642529 - RNA, 19 nt, Homo sapiens
  misc_RNA (1)...(19): siRNA sense strand
uuaaggacaucugcaaauc

SEQ ID NO: 642530 - RNA, 19 nt, Homo sapiens
  misc_RNA (1)...(19): siRNA sense strand
aagaauggcaacuuuaaga

SEQ ID NO: 642531 - RNA, 19 nt, Homo sapiens
  misc_RNA (1)...(19): siRNA sense strand
gaccacugauacuaaguuc

SEQ ID NO: 642532 - RNA, 19 nt, Homo sapiens
  misc_RNA (1)...(19): siRNA sense strand
gugaucugcuccguuguuu

SEQ ID NO: 642533 - RNA, 19 nt, Homo sapiens
  misc_RNA (1)...(19): siRNA sense strand
cuaaaggacuuggaaucau

SEQ ID NO: 642534 - RNA, 19 nt, Homo sapiens
  misc_RNA (1)...(19): siRNA sense strand
ccucaauacuacugcaguu

SEQ ID NO: 642535 - RNA, 19 nt, Homo sapiens
  misc_RNA (1)...(19): siRNA sense strand
gcucuuacacgaaguuaca

SEQ ID NO: 642536 - RNA, 19 nt, Homo sapiens
  misc_RNA (1)...(19): siRNA sense strand
uccagaaacgauuugauua

SEQ ID NO: 642537 - RNA, 19 nt, Homo sapiens
  misc_RNA (1)...(19): siRNA sense strand
cucacaaacuugcggaauu

SEQ ID NO: 642538 - RNA, 19 nt, Homo sapiens
  misc_RNA (1)...(19): siRNA sense strand
gaacuuuaaccugaaaucu

SEQ ID NO: 642539 - RNA, 19 nt, Homo sapiens
  misc_RNA (1)...(19): siRNA sense strand
gaugacaaagaauuuccua

SEQ ID NO: 642540 - RNA, 19 nt, Homo sapiens
  misc_RNA (1)...(19): siRNA sense strand
guucagaaacuaccucauc

SEQ ID NO: 642541 - RNA, 19 nt, Homo sapiens
  misc_RNA (1)...(19): siRNA sense strand
gaaagagauggaaggagau

SEQ ID NO: 642542 - RNA, 19 nt, Homo sapiens
  misc_RNA (1)...(19): siRNA sense strand
guuaaggacaucugcaaau

SEQ ID NO: 642543 - RNA, 19 nt, Homo sapiens
  misc_RNA (1)...(19): siRNA sense strand
cuacugcaguuaccaaagg

SEQ ID NO: 642544 - RNA, 19 nt, Homo sapiens
  misc_RNA (1)...(19): siRNA sense strand
uacauuagggagaaaguaa

SEQ ID NO: 642545 - RNA, 19 nt, Homo sapiens
  misc_RNA (1)...(19): siRNA sense strand
aagcaccacucugagauau

SEQ ID NO: 642546 - RNA, 19 nt, Homo sapiens
  misc_RNA (1)...(19): siRNA sense strand
gaaaguaaaagaacaccaa

SEQ ID NO: 642547 - RNA, 19 nt, Homo sapiens
  misc_RNA (1)...(19): siRNA sense strand
gcaauggaaagagauggaa

SEQ ID NO: 642548 - RNA, 19 nt, Homo sapiens
  misc_RNA (1)...(19): siRNA sense strand
uacagaacuuuaaccugaa

SEQ ID NO: 642549 - RNA, 19 nt, Homo sapiens
  misc_RNA (1)...(19): siRNA sense strand
gaaaaggacaaccaaaagu

SEQ ID NO: 642550 - RNA, 19 nt, Homo sapiens
  misc_RNA (1)...(19): siRNA sense strand
ccucauaccagaucugcuu

SEQ ID NO: 642551 - RNA, 19 nt, Homo sapiens
  misc_RNA (1)...(19): siRNA sense strand
cuuacacgaaguuacauua

SEQ ID NO: 642552 - RNA, 19 nt, Homo sapiens
  misc_RNA (1)...(19): siRNA sense strand
agaauggcaacuuuaagaa

SEQ ID NO: 642553 - RNA, 19 nt, Homo sapiens
  misc_RNA (1)...(19): siRNA sense strand
gagauugaucauguaauug

SEQ ID NO: 642554 - RNA, 19 nt, Homo sapiens
  misc_RNA (1)...(19): siRNA sense strand
gauccaggucugcaauaau

SEQ ID NO: 642555 - RNA, 19 nt, Homo sapiens
  misc_RNA (1)...(19): siRNA sense strand
cuuugacccuggccacuuu

SEQ ID NO: 642556 - RNA, 19 nt, Homo sapiens
  misc_RNA (1)...(19): siRNA sense strand
ccagagauacagugaccuu

SEQ ID NO: 642557 - RNA, 19 nt, Homo sapiens
  misc_RNA (1)...(19): siRNA sense strand
gcuaaaguccaggaagaga

SEQ ID NO: 642558 - RNA, 19 nt, Homo sapiens
  misc_RNA (1)...(19): siRNA sense strand
ucacaacaaagugcuuaaa

SEQ ID NO: 642559 - RNA, 19 nt, Homo sapiens
  misc_RNA (1)...(19): siRNA sense strand
aaaggacuuggaaucauuu

SEQ ID NO: 642560 - RNA, 19 nt, Homo sapiens
  misc_RNA (1)...(19): siRNA sense strand
aauaauuucccucuacuca

SEQ ID NO: 642561 - RNA, 19 nt, Homo sapiens
  misc_RNA (1)...(19): siRNA sense strand
ugugcucccugcaauguga

SEQ ID NO: 642562 - RNA, 19 nt, Homo sapiens
  misc_RNA (1)...(19): siRNA sense strand
uuggaaauaugcuacagau

SEQ ID NO: 642563 - RNA, 19 nt, Homo sapiens
  misc_RNA (1)...(19): siRNA sense strand
gagcauugaggaccguguu

SEQ ID NO: 642564 - RNA, 19 nt, Homo sapiens
  misc_RNA (1)...(19): siRNA sense strand
ugaggaccguguucaagag

SEQ ID NO: 642565 - RNA, 19 nt, Homo sapiens
  misc_RNA (1)...(19): siRNA sense strand
ggaaaaggacaaccaaaag

SEQ ID NO: 642566 - RNA, 19 nt, Homo sapiens
  misc_RNA (1)...(19): siRNA sense strand
caggaacucacaacaaagu

SEQ ID NO: 642567 - RNA, 19 nt, Homo sapiens
  misc_RNA (1)...(19): siRNA sense strand
gugaaggaagcccugauug

SEQ ID NO: 642568 - RNA, 19 nt, Homo sapiens
  misc_RNA (1)...(19): siRNA sense strand
gccacaugccuuacacuga

SEQ ID NO: 642569 - RNA, 19 nt, Homo sapiens
  misc_RNA (1)...(19): siRNA sense strand
guagcugaucuauuuguug

SEQ ID NO: 642570 - RNA, 19 nt, Homo sapiens
  misc_RNA (1)...(19): siRNA sense strand
gguuggcacuguagcugau

SEQ ID NO: 642571 - RNA, 19 nt, Homo sapiens
  misc_RNA (1)...(19): siRNA sense strand
ugcuacagauagauguuaa

SEQ ID NO: 642572 - RNA, 19 nt, Homo sapiens
  misc_RNA (1)...(19): siRNA sense strand
uguagcugaucuauuuguu

SEQ ID NO: 642573 - RNA, 19 nt, Homo sapiens
  misc_RNA (1)...(19): siRNA sense strand
gaaauaugcuacagauaga

SEQ ID NO: 642574 - RNA, 19 nt, Homo sapiens
  misc_RNA (1)...(19): siRNA sense strand
ggaagagauugaucaugua

SEQ ID NO: 642575 - RNA, 19 nt, Homo sapiens
  misc_RNA (1)...(19): siRNA sense strand
ggaaggagauccggcguuu

SEQ ID NO: 642576 - RNA, 19 nt, Homo sapiens
  misc_RNA (1)...(19): siRNA sense strand
gaaguuacauuagggagaa

SEQ ID NO: 642577 - RNA, 19 nt, Homo sapiens
  misc_RNA (1)...(19): siRNA sense strand
ggaaauaugcuacagauag

SEQ ID NO: 642578 - RNA, 19 nt, Homo sapiens
  misc_RNA (1)...(19): siRNA sense strand
cacuguagcugaucuauuu

SEQ ID NO: 642579 - RNA, 19 nt, Homo sapiens
  misc_RNA (1)...(19): siRNA sense strand
uaaaggacuuggaaucauu

SEQ ID NO: 642580 - RNA, 19 nt, Homo sapiens
  misc_RNA (1)...(19): siRNA sense strand
cccaauaucucaaagaauu

SEQ ID NO: 642581 - RNA, 19 nt, Homo sapiens
  misc_RNA (1)...(19): siRNA sense strand
ucacaaacuugcggaauuu

SEQ ID NO: 642582 - RNA, 19 nt, Homo sapiens
  misc_RNA (1)...(19): siRNA sense strand
uaacaauccucgggacuuu

SEQ ID NO: 642583 - RNA, 19 nt, Homo sapiens
  misc_RNA (1)...(19): siRNA sense strand
gaagagauugaucauguaa

SEQ ID NO: 642584 - RNA, 19 nt, Homo sapiens
  misc_RNA (1)...(19): siRNA sense strand
uaauuucccucuacucauu

SEQ ID NO: 642585 - RNA, 19 nt, Homo sapiens
  misc_RNA (1)...(19): siRNA sense strand
ccacuccucuuccuauuau

SEQ ID NO: 642586 - RNA, 19 nt, Homo sapiens
  misc_RNA (1)...(19): siRNA sense strand
aggaagcccugauugauaa

SEQ ID NO: 642587 - RNA, 19 nt, Homo sapiens
  misc_RNA (1)...(19): siRNA sense strand
ggauccaggucugcaauaa

SEQ ID NO: 642588 - RNA, 19 nt, Homo sapiens
  misc_RNA (1)...(19): siRNA sense strand
ccacaugccuuacacugau

SEQ ID NO: 642589 - RNA, 19 nt, Homo sapiens
  misc_RNA (1)...(19): siRNA sense strand
aaacuugguuggcacugua

SEQ ID NO: 642590 - RNA, 19 nt, Homo sapiens
  misc_RNA (1)...(19): siRNA sense strand
gaaggaagcccugauugau

SEQ ID NO: 642591 - RNA, 19 nt, Homo sapiens
  misc_RNA (1)...(19): siRNA sense strand
cagcuaaaguccaggaaga

SEQ ID NO: 642592 - RNA, 19 nt, Homo sapiens
  misc_RNA (1)...(19): siRNA sense strand
cccaggaacucacaacaaa

SEQ ID NO: 642593 - RNA, 19 nt, Homo sapiens
  misc_RNA (1)...(19): siRNA sense strand
aggaagagauugaucaugu

SEQ ID NO: 642594 - RNA, 19 nt, Homo sapiens
  misc_RNA (1)...(19): siRNA sense strand
cugcaaaucuuucaccaau

SEQ ID NO: 642595 - RNA, 19 nt, Homo sapiens
  misc_RNA (1)...(19): siRNA sense strand
gcaccacucugagauaugg

SEQ ID NO: 642596 - RNA, 19 nt, Homo sapiens
  misc_RNA (1)...(19): siRNA sense strand
gcaauaauuucccucuacu

SEQ ID NO: 642597 - RNA, 19 nt, Homo sapiens
  misc_RNA (1)...(19): siRNA sense strand
gauaugaggcagugaagga

SEQ ID NO: 642598 - RNA, 19 nt, Homo sapiens
  misc_RNA (1)...(19): siRNA sense strand
ccagaaacgauuugauuau

SEQ ID NO: 642599 - RNA, 19 nt, Homo sapiens
  misc_RNA (1)...(19): siRNA sense strand
ugaaggaagcccugauuga

SEQ ID NO: 642600 - RNA, 19 nt, Homo sapiens
  misc_RNA (1)...(19): siRNA sense strand
gagauacagugaccuuguc

SEQ ID NO: 642601 - RNA, 19 nt, Homo sapiens
  misc_RNA (1)...(19): siRNA sense strand
ugcacgagauccagagaua

SEQ ID NO: 642602 - RNA, 19 nt, Homo sapiens
  misc_RNA (1)...(19): siRNA sense strand
ggaccguguucaagaggaa

SEQ ID NO: 642603 - RNA, 19 nt, Homo sapiens
  misc_RNA (1)...(19): siRNA sense strand
ggacaucugcaaaucuuuc

SEQ ID NO: 642604 - RNA, 19 nt, Homo sapiens
  misc_RNA (1)...(19): siRNA sense strand
aaggaagcccugauugaua

SEQ ID NO: 642605 - RNA, 19 nt, Homo sapiens
  misc_RNA (1)...(19): siRNA sense strand
caagcaccacucugagaua

SEQ ID NO: 642606 - RNA, 19 nt, Homo sapiens
  misc_RNA (1)...(19): siRNA sense strand
acaacaagcaccacucuga

SEQ ID NO: 642607 - RNA, 19 nt, Homo sapiens
  misc_RNA (1)...(19): siRNA sense strand
aaggacaucugcaaaucuu

SEQ ID NO: 642608 - RNA, 19 nt, Homo sapiens
  misc_RNA (1)...(19): siRNA sense strand
uaaaguccaggaagagauu

SEQ ID NO: 642609 - RNA, 19 nt, Homo sapiens
  misc_RNA (1)...(19): siRNA sense strand
gcacuguagcugaucuauu

SEQ ID NO: 642610 - RNA, 19 nt, Homo sapiens
  misc_RNA (1)...(19): siRNA sense strand
gggcugugcucccugcaau

SEQ ID NO: 642611 - RNA, 19 nt, Homo sapiens
  misc_RNA (1)...(19): siRNA sense strand
ggagaggaguuuucuggaa

SEQ ID NO: 642612 - RNA, 19 nt, Homo sapiens
  misc_RNA (1)...(19): siRNA sense strand
auccaggucugcaauaauu

SEQ ID NO: 642613 - RNA, 19 nt, Homo sapiens
  misc_RNA (1)...(19): siRNA sense strand
uuaaggacaucugcaaauc

SEQ ID NO: 642614 - RNA, 19 nt, Homo sapiens
  misc_RNA (1)...(19): siRNA sense strand
gaccacugauacuaaguuc

SEQ ID NO: 642615 - RNA, 19 nt, Homo sapiens
  misc_RNA (1)...(19): siRNA sense strand
gugaucugcuccguuguuu

SEQ ID NO: 642616 - RNA, 19 nt, Homo sapiens
  misc_RNA (1)...(19): siRNA sense strand
uggcaugaaucccauagug

SEQ ID NO: 642617 - RNA, 19 nt, Homo sapiens
  misc_RNA (1)...(19): siRNA sense strand
cuaaaggacuuggaaucau

SEQ ID NO: 642618 - RNA, 19 nt, Homo sapiens
  misc_RNA (1)...(19): siRNA sense strand
gcucuuacacgaaguuaca

SEQ ID NO: 642619 - RNA, 19 nt, Homo sapiens
  misc_RNA (1)...(19): siRNA sense strand
uccagaaacgauuugauua

SEQ ID NO: 642620 - RNA, 19 nt, Homo sapiens
  misc_RNA (1)...(19): siRNA sense strand
cucacaaacuugcggaauu

SEQ ID NO: 642621 - RNA, 19 nt, Homo sapiens
  misc_RNA (1)...(19): siRNA sense strand
guucagaaacuaccucauc

SEQ ID NO: 642622 - RNA, 19 nt, Homo sapiens
  misc_RNA (1)...(19): siRNA sense strand
gaaagagauggaaggagau

SEQ ID NO: 642623 - RNA, 19 nt, Homo sapiens
  misc_RNA (1)...(19): siRNA sense strand
guuaaggacaucugcaaau

SEQ ID NO: 642624 - RNA, 19 nt, Homo sapiens
  misc_RNA (1)...(19): siRNA sense strand
uacauuagggagaaaguaa

SEQ ID NO: 642625 - RNA, 19 nt, Homo sapiens
  misc_RNA (1)...(19): siRNA sense strand
aagcaccacucugagauau

SEQ ID NO: 642626 - RNA, 19 nt, Homo sapiens
  misc_RNA (1)...(19): siRNA sense strand
gaaaguaaaagaacaccaa

SEQ ID NO: 642627 - RNA, 19 nt, Homo sapiens
  misc_RNA (1)...(19): siRNA sense strand
gcaauggaaagagauggaa

SEQ ID NO: 642628 - RNA, 19 nt, Homo sapiens
  misc_RNA (1)...(19): siRNA sense strand
gaaaaggacaaccaaaagu

SEQ ID NO: 642629 - RNA, 19 nt, Homo sapiens
  misc_RNA (1)...(19): siRNA sense strand
cuuacacgaaguuacauua

SEQ ID NO: 642630 - RNA, 19 nt, Homo sapiens
  misc_RNA (1)...(19): siRNA sense strand
gagauugaucauguaauug

SEQ ID NO: 642631 - RNA, 19 nt, Homo sapiens
  misc_RNA (1)...(19): siRNA sense strand
gauccaggucugcaauaau

SEQ ID NO: 642632 - RNA, 19 nt, Homo sapiens
  misc_RNA (1)...(19): siRNA sense strand
ccagagauacagugaccuu

SEQ ID NO: 642633 - RNA, 19 nt, Homo sapiens
  misc_RNA (1)...(19): siRNA sense strand
gcuaaaguccaggaagaga

SEQ ID NO: 642634 - RNA, 19 nt, Homo sapiens
  misc_RNA (1)...(19): siRNA sense strand
ucacaacaaagugcuuaaa

SEQ ID NO: 642635 - RNA, 19 nt, Homo sapiens
  misc_RNA (1)...(19): siRNA sense strand
aaaggacuuggaaucauuu

SEQ ID NO: 642636 - RNA, 19 nt, Homo sapiens
  misc_RNA (1)...(19): siRNA sense strand
aauaauuucccucuacuca

SEQ ID NO: 642637 - RNA, 19 nt, Homo sapiens
  misc_RNA (1)...(19): siRNA sense strand
ugugcucccugcaauguga

SEQ ID NO: 642638 - RNA, 19 nt, Homo sapiens
  misc_RNA (1)...(19): siRNA sense strand
gagcauugaggaccguguu

SEQ ID NO: 642639 - RNA, 19 nt, Homo sapiens
  misc_RNA (1)...(19): siRNA sense strand
uuggaaauaugcuacagau

SEQ ID NO: 642640 - RNA, 19 nt, Homo sapiens
  misc_RNA (1)...(19): siRNA sense strand
ugaggaccguguucaagag

SEQ ID NO: 642641 - RNA, 19 nt, Homo sapiens
  misc_RNA (1)...(19): siRNA sense strand
ggaaaaggacaaccaaaag

SEQ ID NO: 642642 - RNA, 19 nt, Homo sapiens
  misc_RNA (1)...(19): siRNA sense strand
caggaacucacaacaaagu

SEQ ID NO: 642643 - RNA, 19 nt, Homo sapiens
  misc_RNA (1)...(19): siRNA sense strand
gugaaggaagcccugauug

SEQ ID NO: 642644 - RNA, 19 nt, Homo sapiens
  misc_RNA (1)...(19): siRNA sense strand
gccacaugccuuacacuga

SEQ ID NO: 642645 - RNA, 19 nt, Homo sapiens
  misc_RNA (1)...(19): siRNA sense strand
guagcugaucuauuuguug

SEQ ID NO: 642646 - RNA, 19 nt, Homo sapiens
  misc_RNA (1)...(19): siRNA sense strand
uagugguguuucauggaua

SEQ ID NO: 642647 - RNA, 19 nt, Homo sapiens
  misc_RNA (1)...(19): siRNA sense strand
uguagcugaucuauuuguu

SEQ ID NO: 642648 - RNA, 19 nt, Homo sapiens
  misc_RNA (1)...(19): siRNA sense strand
gguuggcacuguagcugau

SEQ ID NO: 642649 - RNA, 19 nt, Homo sapiens
  misc_RNA (1)...(19): siRNA sense strand
ugcaauaauuucccucuac

SEQ ID NO: 642650 - RNA, 19 nt, Homo sapiens
  misc_RNA (1)...(19): siRNA sense strand
cugcaauaauuucccucua

SEQ ID NO: 642651 - RNA, 19 nt, Homo sapiens
  misc_RNA (1)...(19): siRNA sense strand
ugcuacagauagauguuaa

SEQ ID NO: 642652 - RNA, 19 nt, Homo sapiens
  misc_RNA (1)...(19): siRNA sense strand
ugaaucccauagugguguu

SEQ ID NO: 642653 - RNA, 19 nt, Homo sapiens
  misc_RNA (1)...(19): siRNA sense strand
auaggagccacaugccuua

SEQ ID NO: 642654 - RNA, 19 nt, Homo sapiens
  misc_RNA (1)...(19): siRNA sense strand
ggaacagagacaacaagca

SEQ ID NO: 642655 - RNA, 19 nt, Homo sapiens
  misc_RNA (1)...(19): siRNA sense strand
acaccaagcaucacuggau

SEQ ID NO: 642656 - RNA, 19 nt, Homo sapiens
  misc_RNA (1)...(19): siRNA sense strand
cggcguuucucccucacaa

SEQ ID NO: 642657 - RNA, 19 nt, Homo sapiens
  misc_RNA (1)...(19): siRNA sense strand
gcaauuccccaauaucuca

SEQ ID NO: 642658 - RNA, 19 nt, Homo sapiens
  misc_RNA (1)...(19): siRNA sense strand
cucaaagaauuacuaaagg

SEQ ID NO: 642659 - RNA, 19 nt, Homo sapiens
  misc_RNA (1)...(19): siRNA sense strand
uuccagaaacgauuugauu

SEQ ID NO: 642660 - RNA, 19 nt, Homo sapiens
  misc_RNA (1)...(19): siRNA sense strand
aagaggcaauuccccaaua

SEQ ID NO: 642661 - RNA, 19 nt, Homo sapiens
  misc_RNA (1)...(19): siRNA sense strand
ugaccacugauacuaaguu

SEQ ID NO: 642662 - RNA, 19 nt, Homo sapiens
  misc_RNA (1)...(19): siRNA sense strand
ggagccacaugccuuacac

SEQ ID NO: 642663 - RNA, 19 nt, Homo sapiens
  misc_RNA (1)...(19): siRNA sense strand
ugcaaaucuuucaccaauu

SEQ ID NO: 642664 - RNA, 19 nt, Homo sapiens
  misc_RNA (1)...(19): siRNA sense strand
gaucugcuccguuguuuuc

SEQ ID NO: 642665 - RNA, 19 nt, Homo sapiens
  misc_RNA (1)...(19): siRNA sense strand
ccaaaagucagaauucaau

SEQ ID NO: 642666 - RNA, 19 nt, Homo sapiens
  misc_RNA (1)...(19): siRNA sense strand
acaauccucgggacuuuau

SEQ ID NO: 642667 - RNA, 19 nt, Homo sapiens
  misc_RNA (1)...(19): siRNA sense strand
agucuaugguccuguguuc

SEQ ID NO: 642668 - RNA, 19 nt, Homo sapiens
  misc_RNA (1)...(19): siRNA sense strand
guccuguguucaccgugua

SEQ ID NO: 642669 - RNA, 19 nt, Homo sapiens
  misc_RNA (1)...(19): siRNA sense strand
gggagaaaguaaaagaaca

SEQ ID NO: 642670 - RNA, 19 nt, Homo sapiens
  misc_RNA (1)...(19): siRNA sense strand
uaaggacaucugcaaaucu

SEQ ID NO: 642671 - RNA, 19 nt, Homo sapiens
  misc_RNA (1)...(19): siRNA sense strand
ccaggucugcaauaauuuc

SEQ ID NO: 642672 - RNA, 19 nt, Homo sapiens
  misc_RNA (1)...(19): siRNA sense strand
ucccucuacucauugauug

SEQ ID NO: 642673 - RNA, 19 nt, Homo sapiens
  misc_RNA (1)...(19): siRNA sense strand
ggaagaaauuguucaguuc

SEQ ID NO: 642674 - RNA, 19 nt, Homo sapiens
  misc_RNA (1)...(19): siRNA sense strand
gaacuuggaucagaagaug

SEQ ID NO: 642675 - RNA, 19 nt, Homo sapiens
  misc_RNA (1)...(19): siRNA sense strand
ugaagcagauguugaguuu

SEQ ID NO: 642676 - RNA, 19 nt, Homo sapiens
  misc_RNA (1)...(19): siRNA sense strand
gaacgacauuuacaacuuc

SEQ ID NO: 642677 - RNA, 19 nt, Homo sapiens
  misc_RNA (1)...(19): siRNA sense strand
gcacagauauauagaacuc

SEQ ID NO: 642678 - RNA, 19 nt, Homo sapiens
  misc_RNA (1)...(19): siRNA sense strand
ugagaaggcucuagggaaa

SEQ ID NO: 642679 - RNA, 19 nt, Homo sapiens
  misc_RNA (1)...(19): siRNA sense strand
ggagagaccucagcuacug

SEQ ID NO: 642680 - RNA, 19 nt, Homo sapiens
  misc_RNA (1)...(19): siRNA sense strand
ugagggaggugaaggcuuu

SEQ ID NO: 642681 - RNA, 19 nt, Homo sapiens
  misc_RNA (1)...(19): siRNA sense strand
gagaguccauauugagauu

SEQ ID NO: 642682 - RNA, 19 nt, Homo sapiens
  misc_RNA (1)...(19): siRNA sense strand
gcacaguggucccaacagu

SEQ ID NO: 642683 - RNA, 19 nt, Homo sapiens
  misc_RNA (1)...(19): siRNA sense strand
cgaccgagaacgacauuua

SEQ ID NO: 642684 - RNA, 19 nt, Homo sapiens
  misc_RNA (1)...(19): siRNA sense strand
ccaaagacagggccaauau

SEQ ID NO: 642685 - RNA, 19 nt, Homo sapiens
  misc_RNA (1)...(19): siRNA sense strand
ccaauaugcagcacagaua

SEQ ID NO: 642686 - RNA, 19 nt, Homo sapiens
  misc_RNA (1)...(19): siRNA sense strand
cgagauggauuggguguug

SEQ ID NO: 642687 - RNA, 19 nt, Homo sapiens
  misc_RNA (1)...(19): siRNA sense strand
ggauguaugaccacagaua

SEQ ID NO: 642688 - RNA, 19 nt, Homo sapiens
  misc_RNA (1)...(19): siRNA sense strand
gggaagcguucgugcaguu

SEQ ID NO: 642689 - RNA, 19 nt, Homo sapiens
  misc_RNA (1)...(19): siRNA sense strand
aggaagaaauuguucaguu

SEQ ID NO: 642690 - RNA, 19 nt, Homo sapiens
  misc_RNA (1)...(19): siRNA sense strand
agaacgacauuuacaacuu

SEQ ID NO: 642691 - RNA, 19 nt, Homo sapiens
  misc_RNA (1)...(19): siRNA sense strand
ggaguacaguggccucagu

SEQ ID NO: 642692 - RNA, 19 nt, Homo sapiens
  misc_RNA (1)...(19): siRNA sense strand
gaccucagcuacugucucu

SEQ ID NO: 642693 - RNA, 19 nt, Homo sapiens
  misc_RNA (1)...(19): siRNA sense strand
uggcagcuauguccaaaga

SEQ ID NO: 642694 - RNA, 19 nt, Homo sapiens
  misc_RNA (1)...(19): siRNA sense strand
gagauuggcccagauggaa

SEQ ID NO: 642695 - RNA, 19 nt, Homo sapiens
  misc_RNA (1)...(19): siRNA sense strand
gaacagcauggguggcuau

SEQ ID NO: 642696 - RNA, 19 nt, Homo sapiens
  misc_RNA (1)...(19): siRNA sense strand
ggccgcagguguccauuuc

SEQ ID NO: 642697 - RNA, 19 nt, Homo sapiens
  misc_RNA (1)...(19): siRNA sense strand
cagcacagauauauagaac

SEQ ID NO: 642698 - RNA, 19 nt, Homo sapiens
  misc_RNA (1)...(19): siRNA sense strand
gaaacacaaggagaggaua

SEQ ID NO: 642699 - RNA, 19 nt, Homo sapiens
  misc_RNA (1)...(19): siRNA sense strand
ggaaacacaaggagaggau

SEQ ID NO: 642700 - RNA, 19 nt, Homo sapiens
  misc_RNA (1)...(19): siRNA sense strand
guacaaagcgaccgagaac

SEQ ID NO: 642701 - RNA, 19 nt, Homo sapiens
  misc_RNA (1)...(19): siRNA sense strand
aggaggaaguuaggucaua

SEQ ID NO: 642702 - RNA, 19 nt, Homo sapiens
  misc_RNA (1)...(19): siRNA sense strand
acagguacauugagguguu

SEQ ID NO: 642703 - RNA, 19 nt, Homo sapiens
  misc_RNA (1)...(19): siRNA sense strand
acauugagguguuuaagag

SEQ ID NO: 642704 - RNA, 19 nt, Homo sapiens
  misc_RNA (1)...(19): siRNA sense strand
ccacagaaccgagauggau

SEQ ID NO: 642705 - RNA, 19 nt, Homo sapiens
  misc_RNA (1)...(19): siRNA sense strand
ccacagauacggcgacagu

SEQ ID NO: 642706 - RNA, 19 nt, Homo sapiens
  misc_RNA (1)...(19): siRNA sense strand
ggaggaaguuaggucauac

SEQ ID NO: 642707 - RNA, 19 nt, Homo sapiens
  misc_RNA (1)...(19): siRNA sense strand
gagauggauuggguguuga

SEQ ID NO: 642708 - RNA, 19 nt, Homo sapiens
  misc_RNA (1)...(19): siRNA sense strand
ucucaggguuggaaauugu

SEQ ID NO: 642709 - RNA, 19 nt, Homo sapiens
  misc_RNA (1)...(19): siRNA sense strand
gcagcacagauauauagaa

SEQ ID NO: 642710 - RNA, 19 nt, Homo sapiens
  misc_RNA (1)...(19): siRNA sense strand
caaaggaagaaauuguuca

SEQ ID NO: 642711 - RNA, 19 nt, Homo sapiens
  misc_RNA (1)...(19): siRNA sense strand
aagcagauguugaguuugc

SEQ ID NO: 642712 - RNA, 19 nt, Homo sapiens
  misc_RNA (1)...(19): siRNA sense strand
cgggauguaugaccacaga

SEQ ID NO: 642713 - RNA, 19 nt, Homo sapiens
  misc_RNA (1)...(19): siRNA sense strand
caaagacagggccaauaug

SEQ ID NO: 642714 - RNA, 19 nt, Homo sapiens
  misc_RNA (1)...(19): siRNA sense strand
ccugugagaguccauauug

SEQ ID NO: 642715 - RNA, 19 nt, Homo sapiens
  misc_RNA (1)...(19): siRNA sense strand
ggaaguuaggucauacuca

SEQ ID NO: 642716 - RNA, 19 nt, Homo sapiens
  misc_RNA (1)...(19): siRNA sense strand
gcagguguccauuucaucu

SEQ ID NO: 642717 - RNA, 19 nt, Homo sapiens
  misc_RNA (1)...(19): siRNA sense strand
cagcauggguggcuaugac

SEQ ID NO: 642718 - RNA, 19 nt, Homo sapiens
  misc_RNA (1)...(19): siRNA sense strand
uggauuggguguugaagca

SEQ ID NO: 642719 - RNA, 19 nt, Homo sapiens
  misc_RNA (1)...(19): siRNA sense strand
gcagauguugaguuugcua

SEQ ID NO: 642720 - RNA, 19 nt, Homo sapiens
  misc_RNA (1)...(19): siRNA sense strand
acaaagcgaccgagaacga

SEQ ID NO: 642721 - RNA, 19 nt, Homo sapiens
  misc_RNA (1)...(19): siRNA sense strand
ggagguacauuggcaucgu

SEQ ID NO: 642722 - RNA, 19 nt, Homo sapiens
  misc_RNA (1)...(19): siRNA sense strand
gaaauuguucaguucuucu

SEQ ID NO: 642723 - RNA, 19 nt, Homo sapiens
  misc_RNA (1)...(19): siRNA sense strand
acagauacggcgacaguga

SEQ ID NO: 642724 - RNA, 19 nt, Homo sapiens
  misc_RNA (1)...(19): siRNA sense strand
cagguacauugagguguuu

SEQ ID NO: 642725 - RNA, 19 nt, Homo sapiens
  misc_RNA (1)...(19): siRNA sense strand
gaagcguucgugcaguuug

SEQ ID NO: 642726 - RNA, 19 nt, Homo sapiens
  misc_RNA (1)...(19): siRNA sense strand
ggacucccauuuggaugca

SEQ ID NO: 642727 - RNA, 19 nt, Homo sapiens
  misc_RNA (1)...(19): siRNA sense strand
cgacauuuacaacuucuuc

SEQ ID NO: 642728 - RNA, 19 nt, Homo sapiens
  misc_RNA (1)...(19): siRNA sense strand
gagaacgacauuuacaacu

SEQ ID NO: 642729 - RNA, 19 nt, Homo sapiens
  misc_RNA (1)...(19): siRNA sense strand
ggaagcguucgugcaguuu

SEQ ID NO: 642730 - RNA, 19 nt, Homo sapiens
  misc_RNA (1)...(19): siRNA sense strand
uugaggacgugcagaacuu

SEQ ID NO: 642731 - RNA, 19 nt, Homo sapiens
  misc_RNA (1)...(19): siRNA sense strand
agaaggcucuagggaaaca

SEQ ID NO: 642732 - RNA, 19 nt, Homo sapiens
  misc_RNA (1)...(19): siRNA sense strand
ggagagccagucagugagu

SEQ ID NO: 642733 - RNA, 19 nt, Homo sapiens
  misc_RNA (1)...(19): siRNA sense strand
gugaaggcuuuguggucaa

SEQ ID NO: 642734 - RNA, 19 nt, Homo sapiens
  misc_RNA (1)...(19): siRNA sense strand
gugagaguccauauugaga

SEQ ID NO: 642735 - RNA, 19 nt, Homo sapiens
  misc_RNA (1)...(19): siRNA sense strand
gagcagccaggaggaaguu

SEQ ID NO: 642736 - RNA, 19 nt, Homo sapiens
  misc_RNA (1)...(19): siRNA sense strand
cgaggacucccauuuggau

SEQ ID NO: 642737 - RNA, 19 nt, Homo sapiens
  misc_RNA (1)...(19): siRNA sense strand
gcauggguggcuaugacua

SEQ ID NO: 642738 - RNA, 19 nt, Homo sapiens
  misc_RNA (1)...(19): siRNA sense strand
gcagaguggugaggcuuuu

SEQ ID NO: 642739 - RNA, 19 nt, Homo sapiens
  misc_RNA (1)...(19): siRNA sense strand
uacaguggccucagugaug

SEQ ID NO: 642740 - RNA, 19 nt, Homo sapiens
  misc_RNA (1)...(19): siRNA sense strand
gccaaacgggaucacauug

SEQ ID NO: 642741 - RNA, 19 nt, Homo sapiens
  misc_RNA (1)...(19): siRNA sense strand
gcuucgaggacucccauuu

SEQ ID NO: 642742 - RNA, 19 nt, Homo sapiens
  misc_RNA (1)...(19): siRNA sense strand
guuugcuacucaugaagaa

SEQ ID NO: 642743 - RNA, 19 nt, Homo sapiens
  misc_RNA (1)...(19): siRNA sense strand
gaguccauauugagauugg

SEQ ID NO: 642744 - RNA, 19 nt, Homo sapiens
  misc_RNA (1)...(19): siRNA sense strand
guacaguggccucagugau

SEQ ID NO: 642745 - RNA, 19 nt, Homo sapiens
  misc_RNA (1)...(19): siRNA sense strand
guacauuggcaucgugaag

SEQ ID NO: 642746 - RNA, 19 nt, Homo sapiens
  misc_RNA (1)...(19): siRNA sense strand
cgcaggaguuagcugagaa

SEQ ID NO: 642747 - RNA, 19 nt, Homo sapiens
  misc_RNA (1)...(19): siRNA sense strand
ggauagggcacagguacau

SEQ ID NO: 642748 - RNA, 19 nt, Homo sapiens
  misc_RNA (1)...(19): siRNA sense strand
cugcugcccaggccacuua

SEQ ID NO: 642749 - RNA, 19 nt, Homo sapiens
  misc_RNA (1)...(19): siRNA sense strand
gugaagcagauguugaguu

SEQ ID NO: 642750 - RNA, 19 nt, Homo sapiens
  misc_RNA (1)...(19): siRNA sense strand
guguucaagucccacagaa

SEQ ID NO: 642751 - RNA, 19 nt, Homo sapiens
  misc_RNA (1)...(19): siRNA sense strand
ccgcagguguccauuucau

SEQ ID NO: 642752 - RNA, 19 nt, Homo sapiens
  misc_RNA (1)...(19): siRNA sense strand
gauagggcacagguacauu

SEQ ID NO: 642753 - RNA, 19 nt, Homo sapiens
  misc_RNA (1)...(19): siRNA sense strand
gauuggcccagauggaaga

SEQ ID NO: 642754 - RNA, 19 nt, Homo sapiens
  misc_RNA (1)...(19): siRNA sense strand
ucgcaggaguuagcugaga

SEQ ID NO: 642755 - RNA, 19 nt, Homo sapiens
  misc_RNA (1)...(19): siRNA sense strand
aaagacagggccaauaugc

SEQ ID NO: 642756 - RNA, 19 nt, Homo sapiens
  misc_RNA (1)...(19): siRNA sense strand
ccgagaacgacauuuacaa

SEQ ID NO: 642757 - RNA, 19 nt, Homo sapiens
  misc_RNA (1)...(19): siRNA sense strand
aaacacaaggagaggauag

SEQ ID NO: 642758 - RNA, 19 nt, Homo sapiens
  misc_RNA (1)...(19): siRNA sense strand
gccaauaugcagcacagau

SEQ ID NO: 642759 - RNA, 19 nt, Homo sapiens
  misc_RNA (1)...(19): siRNA sense strand
cgagaacgacauuuacaac

SEQ ID NO: 642760 - RNA, 19 nt, Homo sapiens
  misc_RNA (1)...(19): siRNA sense strand
uaagagcagccaggaggaa

SEQ ID NO: 642761 - RNA, 19 nt, Homo sapiens
  misc_RNA (1)...(19): siRNA sense strand
gguacauugagguguuuaa

SEQ ID NO: 642762 - RNA, 19 nt, Homo sapiens
  misc_RNA (1)...(19): siRNA sense strand
acagaaccgagauggauug

SEQ ID NO: 642763 - RNA, 19 nt, Homo sapiens
  misc_RNA (1)...(19): siRNA sense strand
uguugaacuuggaucagaa

SEQ ID NO: 642764 - RNA, 19 nt, Homo sapiens
  misc_RNA (1)...(19): siRNA sense strand
guccauuucaucuacacua

SEQ ID NO: 642765 - RNA, 19 nt, Homo sapiens
  misc_RNA (1)...(19): siRNA sense strand
cuucuucucuccucucaac

SEQ ID NO: 642766 - RNA, 19 nt, Homo sapiens
  misc_RNA (1)...(19): siRNA sense strand
gaccgagaacgacauuuac

SEQ ID NO: 642767 - RNA, 19 nt, Homo sapiens
  misc_RNA (1)...(19): siRNA sense strand
cuucgaggacucccauuug

SEQ ID NO: 642768 - RNA, 19 nt, Homo sapiens
  misc_RNA (1)...(19): siRNA sense strand
uguggcagcuauguccaaa

SEQ ID NO: 642769 - RNA, 19 nt, Homo sapiens
  misc_RNA (1)...(19): siRNA sense strand
cacagaaccgagauggauu

SEQ ID NO: 642770 - RNA, 19 nt, Homo sapiens
  misc_RNA (1)...(19): siRNA sense strand
gaacaacccucaggacuuu

SEQ ID NO: 642771 - RNA, 19 nt, Homo sapiens
  misc_RNA (1)...(19): siRNA sense strand
gcagugaccugugacauua

SEQ ID NO: 642772 - RNA, 19 nt, Homo sapiens
  misc_RNA (1)...(19): siRNA sense strand
guaaauacuucaugccuuu

SEQ ID NO: 642773 - RNA, 19 nt, Homo sapiens
  misc_RNA (1)...(19): siRNA sense strand
ggaaggagauccggcguuu

SEQ ID NO: 642774 - RNA, 19 nt, Homo sapiens
  misc_RNA (1)...(19): siRNA sense strand
gcacaaccauauuaauuuc

SEQ ID NO: 642775 - RNA, 19 nt, Homo sapiens
  misc_RNA (1)...(19): siRNA sense strand
ggacaucagcaaauccuua

SEQ ID NO: 642776 - RNA, 19 nt, Homo sapiens
  misc_RNA (1)...(19): siRNA sense strand
ccucaggacuuuauugauu

SEQ ID NO: 642777 - RNA, 19 nt, Homo sapiens
  misc_RNA (1)...(19): siRNA sense strand
gugaucugcuccauuauuu

SEQ ID NO: 642778 - RNA, 19 nt, Homo sapiens
  misc_RNA (1)...(19): siRNA sense strand
gaucagcaauuucuuaacu

SEQ ID NO: 642779 - RNA, 19 nt, Homo sapiens
  misc_RNA (1)...(19): siRNA sense strand
uaaccaaucucucaaaggu

SEQ ID NO: 642780 - RNA, 19 nt, Homo sapiens
  misc_RNA (1)...(19): siRNA sense strand
gcacaacccugagauaugc

SEQ ID NO: 642781 - RNA, 19 nt, Homo sapiens
  misc_RNA (1)...(19): siRNA sense strand
caagggcacaaccauauua

SEQ ID NO: 642782 - RNA, 19 nt, Homo sapiens
  misc_RNA (1)...(19): siRNA sense strand
gggcacaaccauauuaauu

SEQ ID NO: 642783 - RNA, 19 nt, Homo sapiens
  misc_RNA (1)...(19): siRNA sense strand
gcaaauccuuaaccaaucu

SEQ ID NO: 642784 - RNA, 19 nt, Homo sapiens
  misc_RNA (1)...(19): siRNA sense strand
ugacuucugugcuacauga

SEQ ID NO: 642785 - RNA, 19 nt, Homo sapiens
  misc_RNA (1)...(19): siRNA sense strand
gaaggaagcccugauugau

SEQ ID NO: 642786 - RNA, 19 nt, Homo sapiens
  misc_RNA (1)...(19): siRNA sense strand
ggaugaagguggcaauuuu

SEQ ID NO: 642787 - RNA, 19 nt, Homo sapiens
  misc_RNA (1)...(19): siRNA sense strand
cagcuaaaguccaggaaga

SEQ ID NO: 642788 - RNA, 19 nt, Homo sapiens
  misc_RNA (1)...(19): siRNA sense strand
ucaugacgcugcggaauuu

SEQ ID NO: 642789 - RNA, 19 nt, Homo sapiens
  misc_RNA (1)...(19): siRNA sense strand
auccagaucugcaauaauu

SEQ ID NO: 642790 - RNA, 19 nt, Homo sapiens
  misc_RNA (1)...(19): siRNA sense strand
ggcacaaccauauuaauuu

SEQ ID NO: 642791 - RNA, 19 nt, Homo sapiens
  misc_RNA (1)...(19): siRNA sense strand
gaagagauugaacguguga

SEQ ID NO: 642792 - RNA, 19 nt, Homo sapiens
  misc_RNA (1)...(19): siRNA sense strand
uaauuucccugacuucugu

SEQ ID NO: 642793 - RNA, 19 nt, Homo sapiens
  misc_RNA (1)...(19): siRNA sense strand
cagcaaauccuuaaccaau

SEQ ID NO: 642794 - RNA, 19 nt, Homo sapiens
  misc_RNA (1)...(19): siRNA sense strand
guuugacccucaucacuuu

SEQ ID NO: 642795 - RNA, 19 nt, Homo sapiens
  misc_RNA (1)...(19): siRNA sense strand
gcaauggaaagaaauggaa

SEQ ID NO: 642796 - RNA, 19 nt, Homo sapiens
  misc_RNA (1)...(19): siRNA sense strand
aagaaucaauggacaugaa

SEQ ID NO: 642797 - RNA, 19 nt, Homo sapiens
  misc_RNA (1)...(19): siRNA sense strand
gaaagaaauggaaggagau

SEQ ID NO: 642798 - RNA, 19 nt, Homo sapiens
  misc_RNA (1)...(19): siRNA sense strand
ugaaggaagcccugauuga

SEQ ID NO: 642799 - RNA, 19 nt, Homo sapiens
  misc_RNA (1)...(19): siRNA sense strand
acccagaggucacagcuaa

SEQ ID NO: 642800 - RNA, 19 nt, Homo sapiens
  misc_RNA (1)...(19): siRNA sense strand
ggaccguguucaagaggaa

SEQ ID NO: 642801 - RNA, 19 nt, Homo sapiens
  misc_RNA (1)...(19): siRNA sense strand
gacaucagcaaauccuuaa

SEQ ID NO: 642802 - RNA, 19 nt, Homo sapiens
  misc_RNA (1)...(19): siRNA sense strand
gggaacucacaacaaauua

SEQ ID NO: 642803 - RNA, 19 nt, Homo sapiens
  misc_RNA (1)...(19): siRNA sense strand
gauaugaagcagugaagga

SEQ ID NO: 642804 - RNA, 19 nt, Homo sapiens
  misc_RNA (1)...(19): siRNA sense strand
cccgggaacucacaacaaa

SEQ ID NO: 642805 - RNA, 19 nt, Homo sapiens
  misc_RNA (1)...(19): siRNA sense strand
acacugcaguugacuuguu

SEQ ID NO: 642806 - RNA, 19 nt, Homo sapiens
  misc_RNA (1)...(19): siRNA sense strand
caagcacaacccugagaua

SEQ ID NO: 642807 - RNA, 19 nt, Homo sapiens
  misc_RNA (1)...(19): siRNA sense strand
ugcacgagguccagagaua

SEQ ID NO: 642808 - RNA, 19 nt, Homo sapiens
  misc_RNA (1)...(19): siRNA sense strand
ccacaugcccuacacagau

SEQ ID NO: 642809 - RNA, 19 nt, Homo sapiens
  misc_RNA (1)...(19): siRNA sense strand
ggagaggaguuuucuggaa

SEQ ID NO: 642810 - RNA, 19 nt, Homo sapiens
  misc_RNA (1)...(19): siRNA sense strand
cauguuugcuucuccuuuc

SEQ ID NO: 642811 - RNA, 19 nt, Homo sapiens
  misc_RNA (1)...(19): siRNA sense strand
uaaaguccaggaagagauu

SEQ ID NO: 642812 - RNA, 19 nt, Homo sapiens
  misc_RNA (1)...(19): siRNA sense strand
gggcugugcucccugcaau

SEQ ID NO: 642813 - RNA, 19 nt, Homo sapiens
  misc_RNA (1)...(19): siRNA sense strand
gugcuucauuccugucuga

SEQ ID NO: 642814 - RNA, 19 nt, Homo sapiens
  misc_RNA (1)...(19): siRNA sense strand
uaguggugcugcauggaua

SEQ ID NO: 642815 - RNA, 19 nt, Homo sapiens
  misc_RNA (1)...(19): siRNA sense strand
ccacuccaguugucaaugg

SEQ ID NO: 642816 - RNA, 19 nt, Homo sapiens
  misc_RNA (1)...(19): siRNA sense strand
acagaacuuuaaccugaaa

SEQ ID NO: 642817 - RNA, 19 nt, Homo sapiens
  misc_RNA (1)...(19): siRNA sense strand
agagauacauugaccuucu

SEQ ID NO: 642818 - RNA, 19 nt, Homo sapiens
  misc_RNA (1)...(19): siRNA sense strand
gaacaccaagaaucaaugg

SEQ ID NO: 642819 - RNA, 19 nt, Homo sapiens
  misc_RNA (1)...(19): siRNA sense strand
gaacucacaacaaauuacu

SEQ ID NO: 642820 - RNA, 19 nt, Homo sapiens
  misc_RNA (1)...(19): siRNA sense strand
uuaaggacaucagcaaauc

SEQ ID NO: 642821 - RNA, 19 nt, Homo sapiens
  misc_RNA (1)...(19): siRNA sense strand
aaacacugcaguugacuug

SEQ ID NO: 642822 - RNA, 19 nt, Homo sapiens
  misc_RNA (1)...(19): siRNA sense strand
cggcguuucucccucauga

SEQ ID NO: 642823 - RNA, 19 nt, Homo sapiens
  misc_RNA (1)...(19): siRNA sense strand
gagauugaacgugugauug

SEQ ID NO: 642824 - RNA, 19 nt, Homo sapiens
  misc_RNA (1)...(19): siRNA sense strand
gaacgugugauuggcagaa

SEQ ID NO: 642825 - RNA, 19 nt, Homo sapiens
  misc_RNA (1)...(19): siRNA sense strand
gcaaugugaucugcuccau

SEQ ID NO: 642826 - RNA, 19 nt, Homo sapiens
  misc_RNA (1)...(19): siRNA sense strand
uaccagcugugcuucauuc

SEQ ID NO: 642827 - RNA, 19 nt, Homo sapiens
  misc_RNA (1)...(19): siRNA sense strand
gaacuuuaaccugaaaucu

SEQ ID NO: 642828 - RNA, 19 nt, Homo sapiens
  misc_RNA (1)...(19): siRNA sense strand
cauauuaauuucccugacu

SEQ ID NO: 642829 - RNA, 19 nt, Homo sapiens
  misc_RNA (1)...(19): siRNA sense strand
cgggaacucacaacaaauu

SEQ ID NO: 642830 - RNA, 19 nt, Homo sapiens
  misc_RNA (1)...(19): siRNA sense strand
gaagguggcaauuuuaaga

SEQ ID NO: 642831 - RNA, 19 nt, Homo sapiens
  misc_RNA (1)...(19): siRNA sense strand
ugugcuacaugacaacaaa

SEQ ID NO: 642832 - RNA, 19 nt, Homo sapiens
  misc_RNA (1)...(19): siRNA sense strand
ggaaaacacugcaguugac

SEQ ID NO: 642833 - RNA, 19 nt, Homo sapiens
  misc_RNA (1)...(19): siRNA sense strand
auugauugcuuccugauga

SEQ ID NO: 642834 - RNA, 19 nt, Homo sapiens
  misc_RNA (1)...(19): siRNA sense strand
ggugcugcauggauaugaa

SEQ ID NO: 642835 - RNA, 19 nt, Homo sapiens
  misc_RNA (1)...(19): siRNA sense strand
gaauuucccaacccagaga

SEQ ID NO: 642836 - RNA, 19 nt, Homo sapiens
  misc_RNA (1)...(19): siRNA sense strand
ugaacaacccucaggacuu

SEQ ID NO: 642837 - RNA, 19 nt, Homo sapiens
  misc_RNA (1)...(19): siRNA sense strand
cacaugcccuacacagaug

SEQ ID NO: 642838 - RNA, 19 nt, Homo sapiens
  misc_RNA (1)...(19): siRNA sense strand
cacugcaguugacuuguuu

SEQ ID NO: 642839 - RNA, 19 nt, Homo sapiens
  misc_RNA (1)...(19): siRNA sense strand
guauuaaggacaucagcaa

SEQ ID NO: 642840 - RNA, 19 nt, Homo sapiens
  misc_RNA (1)...(19): siRNA sense strand
uacagaacuuuaaccugaa

SEQ ID NO: 642841 - RNA, 19 nt, Homo sapiens
  misc_RNA (1)...(19): siRNA sense strand
gaugaagguggcaauuuua

SEQ ID NO: 642842 - RNA, 19 nt, Homo sapiens
  misc_RNA (1)...(19): siRNA sense strand
ccagagauacauugaccuu

SEQ ID NO: 642843 - RNA, 19 nt, Homo sapiens
  misc_RNA (1)...(19): siRNA sense strand
aggaagcccugauugaucu

SEQ ID NO: 642844 - RNA, 19 nt, Homo sapiens
  misc_RNA (1)...(19): siRNA sense strand
ccaagggcacaaccauauu

SEQ ID NO: 642845 - RNA, 19 nt, Homo sapiens
  misc_RNA (1)...(19): siRNA sense strand
ugaccugugacauuaaauu

SEQ ID NO: 642846 - RNA, 19 nt, Homo sapiens
  misc_RNA (1)...(19): siRNA sense strand
gauuggaaauauccuacag

SEQ ID NO: 642847 - RNA, 19 nt, Homo sapiens
  misc_RNA (1)...(19): siRNA sense strand
cuacagauagguauuaagg

SEQ ID NO: 642848 - RNA, 19 nt, Homo sapiens
  misc_RNA (1)...(19): siRNA sense strand
cucaggacuuuauugauug

SEQ ID NO: 642849 - RNA, 19 nt, Homo sapiens
  misc_RNA (1)...(19): siRNA sense strand
cuacaugacaacaaagaau

SEQ ID NO: 642850 - RNA, 19 nt, Homo sapiens
  misc_RNA (1)...(19): siRNA sense strand
gaccugugacauuaaauuc

SEQ ID NO: 642851 - RNA, 19 nt, Homo sapiens
  misc_RNA (1)...(19): siRNA sense strand
uaaaagaacaccaagaauc

SEQ ID NO: 642852 - RNA, 19 nt, Homo sapiens
  misc_RNA (1)...(19): siRNA sense strand
gguguucacucuguauuuu

SEQ ID NO: 642853 - RNA, 19 nt, Homo sapiens
  misc_RNA (1)...(19): siRNA sense strand
uucagaaacuaucucauuc

SEQ ID NO: 642854 - RNA, 19 nt, Homo sapiens
  misc_RNA (1)...(19): siRNA sense strand
cccaugcagugaccuguga

SEQ ID NO: 642855 - RNA, 19 nt, Homo sapiens
  misc_RNA (1)...(19): siRNA sense strand
gcuaaaguccaggaagaga

SEQ ID NO: 642856 - RNA, 19 nt, Homo sapiens
  misc_RNA (1)...(19): siRNA sense strand
gacaagcacaacccugaga

SEQ ID NO: 642857 - RNA, 19 nt, Homo sapiens
  misc_RNA (1)...(19): siRNA sense strand
gagcauugaggaccguguu

SEQ ID NO: 642858 - RNA, 19 nt, Homo sapiens
  misc_RNA (1)...(19): siRNA sense strand
gcccgguguucacucugua

SEQ ID NO: 642859 - RNA, 19 nt, Homo sapiens
  misc_RNA (1)...(19): siRNA sense strand
ggaacucacaacaaauuac

SEQ ID NO: 642860 - RNA, 19 nt, Homo sapiens
  misc_RNA (1)...(19): siRNA sense strand
ugugcucccugcaauguga

SEQ ID NO: 642861 - RNA, 19 nt, Homo sapiens
  misc_RNA (1)...(19): siRNA sense strand
uuggaaauauccuacagau

SEQ ID NO: 642862 - RNA, 19 nt, Homo sapiens
  misc_RNA (1)...(19): siRNA sense strand
ugaggaccguguucaagag

SEQ ID NO: 642863 - RNA, 19 nt, Homo sapiens
  misc_RNA (1)...(19): siRNA sense strand
cccaagggcacaaccauau

SEQ ID NO: 642864 - RNA, 19 nt, Homo sapiens
  misc_RNA (1)...(19): siRNA sense strand
gcaagacaggagccacaug

SEQ ID NO: 642865 - RNA, 19 nt, Homo sapiens
  misc_RNA (1)...(19): siRNA sense strand
ccaagaaucaauggacaug

SEQ ID NO: 642866 - RNA, 19 nt, Homo sapiens
  misc_RNA (1)...(19): siRNA sense strand
gugaaggaagcccugauug

SEQ ID NO: 642867 - RNA, 19 nt, Homo sapiens
  misc_RNA (1)...(19): siRNA sense strand
agugaccugugacauuaaa

SEQ ID NO: 642868 - RNA, 19 nt, Homo sapiens
  misc_RNA (1)...(19): siRNA sense strand
ucccagugauuggaaauau

SEQ ID NO: 642869 - RNA, 19 nt, Homo sapiens
  misc_RNA (1)...(19): siRNA sense strand
aaaagaacaccaagaauca

SEQ ID NO: 642870 - RNA, 19 nt, Homo sapiens
  misc_RNA (1)...(19): siRNA sense strand
ccagagagcuuaucaaagu

SEQ ID NO: 642871 - RNA, 19 nt, Homo sapiens
  misc_RNA (1)...(19): siRNA sense strand
cuauacagcucaagaauau

SEQ ID NO: 642872 - RNA, 19 nt, Homo sapiens
  misc_RNA (1)...(19): siRNA sense strand
cuaccaauaugauagguua

SEQ ID NO: 642873 - RNA, 19 nt, Homo sapiens
  misc_RNA (1)...(19): siRNA sense strand
ccaaacagcucagaggauu

SEQ ID NO: 642874 - RNA, 19 nt, Homo sapiens
  misc_RNA (1)...(19): siRNA sense strand
gaagaugucaaguuuguga

SEQ ID NO: 642875 - RNA, 19 nt, Homo sapiens
  misc_RNA (1)...(19): siRNA sense strand
caacaaggguaccgccuau

SEQ ID NO: 642876 - RNA, 19 nt, Homo sapiens
  misc_RNA (1)...(19): siRNA sense strand
uguggaagaugucaaguuu

SEQ ID NO: 642877 - RNA, 19 nt, Homo sapiens
  misc_RNA (1)...(19): siRNA sense strand
gcuauacagcucaagaaua

SEQ ID NO: 642878 - RNA, 19 nt, Homo sapiens
  misc_RNA (1)...(19): siRNA sense strand
gaucaacuaugacuaucca

SEQ ID NO: 642879 - RNA, 19 nt, Homo sapiens
  misc_RNA (1)...(19): siRNA sense strand
uggaagaugucaaguuugu

SEQ ID NO: 642880 - RNA, 19 nt, Homo sapiens
  misc_RNA (1)...(19): siRNA sense strand
ggccagagagcuuaucaaa

SEQ ID NO: 642881 - RNA, 19 nt, Homo sapiens
  misc_RNA (1)...(19): siRNA sense strand
cgauagagcugguuaugcu

SEQ ID NO: 642882 - RNA, 19 nt, Homo sapiens
  misc_RNA (1)...(19): siRNA sense strand
aaacaggccagagagcuua

SEQ ID NO: 642883 - RNA, 19 nt, Homo sapiens
  misc_RNA (1)...(19): siRNA sense strand
gaacagcccguagcaccaa

SEQ ID NO: 642884 - RNA, 19 nt, Homo sapiens
  misc_RNA (1)...(19): siRNA sense strand
caacaaucccaaucugaug

SEQ ID NO: 642885 - RNA, 19 nt, Homo sapiens
  misc_RNA (1)...(19): siRNA sense strand
gaugucaaguuugugauca

SEQ ID NO: 642886 - RNA, 19 nt, Homo sapiens
  misc_RNA (1)...(19): siRNA sense strand
caaacagcucagaggauua

SEQ ID NO: 642887 - RNA, 19 nt, Homo sapiens
  misc_RNA (1)...(19): siRNA sense strand
gcacuuauggagcuaguag

SEQ ID NO: 642888 - RNA, 19 nt, Homo sapiens
  misc_RNA (1)...(19): siRNA sense strand
gagcacaagcaggccaaua

SEQ ID NO: 642889 - RNA, 19 nt, Homo sapiens
  misc_RNA (1)...(19): siRNA sense strand
gcacaagcaggccaauaca

SEQ ID NO: 642890 - RNA, 19 nt, Homo sapiens
  misc_RNA (1)...(19): siRNA sense strand
gauuaugugcaccguauug

SEQ ID NO: 642891 - RNA, 19 nt, Homo sapiens
  misc_RNA (1)...(19): siRNA sense strand
ccaauacaccuauggucaa

SEQ ID NO: 642892 - RNA, 19 nt, Homo sapiens
  misc_RNA (1)...(19): siRNA sense strand
gaaguucacagagcucuag

SEQ ID NO: 642893 - RNA, 19 nt, Homo sapiens
  misc_RNA (1)...(19): siRNA sense strand
aaacagcucagaggauuau

SEQ ID NO: 642894 - RNA, 19 nt, Homo sapiens
  misc_RNA (1)...(19): siRNA sense strand
ggagcuaccaauaugauag

SEQ ID NO: 642895 - RNA, 19 nt, Homo sapiens
  misc_RNA (1)...(19): siRNA sense strand
aggauuaugugcaccguau

SEQ ID NO: 642896 - RNA, 19 nt, Homo sapiens
  misc_RNA (1)...(19): siRNA sense strand
ccaacaaucccaaucugau

SEQ ID NO: 642897 - RNA, 19 nt, Homo sapiens
  misc_RNA (1)...(19): siRNA sense strand
caauacaccuauggucaag

SEQ ID NO: 642898 - RNA, 19 nt, Homo sapiens
  misc_RNA (1)...(19): siRNA sense strand
uaauggcaguggcuaugga

SEQ ID NO: 642899 - RNA, 19 nt, Homo sapiens
  misc_RNA (1)...(19): siRNA sense strand
gggagcuaccaauaugaua

SEQ ID NO: 642900 - RNA, 19 nt, Homo sapiens
  misc_RNA (1)...(19): siRNA sense strand
gcaggccaauacaccuaug

SEQ ID NO: 642901 - RNA, 19 nt, Homo sapiens
  misc_RNA (1)...(19): siRNA sense strand
gauagagcugguuaugcua

SEQ ID NO: 642902 - RNA, 19 nt, Homo sapiens
  misc_RNA (1)...(19): siRNA sense strand
ucaacuaugacuauccaaa

SEQ ID NO: 642903 - RNA, 19 nt, Homo sapiens
  misc_RNA (1)...(19): siRNA sense strand
caacuaugacuauccaaac

SEQ ID NO: 642904 - RNA, 19 nt, Homo sapiens
  misc_RNA (1)...(19): siRNA sense strand
gccaacaaucccaaucuga

SEQ ID NO: 642905 - RNA, 19 nt, Homo sapiens
  misc_RNA (1)...(19): siRNA sense strand
cagagagcuuaucaaagug

SEQ ID NO: 642906 - RNA, 19 nt, Homo sapiens
  misc_RNA (1)...(19): siRNA sense strand
ccagcaguuuagugggaua

SEQ ID NO: 642907 - RNA, 19 nt, Homo sapiens
  misc_RNA (1)...(19): siRNA sense strand
gcuaauggcaguggcuaug

SEQ ID NO: 642908 - RNA, 19 nt, Homo sapiens
  misc_RNA (1)...(19): siRNA sense strand
uccgggagcuaccaauaug

SEQ ID NO: 642909 - RNA, 19 nt, Homo sapiens
  misc_RNA (1)...(19): siRNA sense strand
gcucuagccagcaguuuag

SEQ ID NO: 642910 - RNA, 19 nt, Homo sapiens
  misc_RNA (1)...(19): siRNA sense strand
uuaucaaagugcuggaaga

SEQ ID NO: 642911 - RNA, 19 nt, Homo sapiens
  misc_RNA (1)...(19): siRNA sense strand
ccaauaugauagguuacau

SEQ ID NO: 642912 - RNA, 19 nt, Homo sapiens
  misc_RNA (1)...(19): siRNA sense strand
uauggcaccaguagcuaua

SEQ ID NO: 642913 - RNA, 19 nt, Homo sapiens
  misc_RNA (1)...(19): siRNA sense strand
caaucaggcuaucaaucca

SEQ ID NO: 642914 - RNA, 19 nt, Homo sapiens
  misc_RNA (1)...(19): siRNA sense strand
ccaaucaggcuaucaaucc

SEQ ID NO: 642915 - RNA, 19 nt, Homo sapiens
  misc_RNA (1)...(19): siRNA sense strand
gaugguggccggagagacu

SEQ ID NO: 642916 - RNA, 19 nt, Homo sapiens
  misc_RNA (1)...(19): siRNA sense strand
caauaugauagguuacaug

SEQ ID NO: 642917 - RNA, 19 nt, Homo sapiens
  misc_RNA (1)...(19): siRNA sense strand
gcaccguauuggccgaaca

SEQ ID NO: 642918 - RNA, 19 nt, Homo sapiens
  misc_RNA (1)...(19): siRNA sense strand
cacagccacugaugucaca

SEQ ID NO: 642919 - RNA, 19 nt, Homo sapiens
  misc_RNA (1)...(19): siRNA sense strand
ggcaguggcuauggaaguc

SEQ ID NO: 642920 - RNA, 19 nt, Homo sapiens
  misc_RNA (1)...(19): siRNA sense strand
cagcagccacagccacuga

SEQ ID NO: 642921 - RNA, 19 nt, Homo sapiens
  misc_RNA (1)...(19): siRNA sense strand
ugugaucaacuaugacuau

SEQ ID NO: 642922 - RNA, 19 nt, Homo sapiens
  misc_RNA (1)...(19): siRNA sense strand
uguaucaggaugaguguga

SEQ ID NO: 642923 - RNA, 19 nt, Homo sapiens
  misc_RNA (1)...(19): siRNA sense strand
caaaacugaugcagcuugu

SEQ ID NO: 642924 - RNA, 19 nt, Homo sapiens
  misc_RNA (1)...(19): siRNA sense strand
acaaucccaaucugaugua

SEQ ID NO: 642925 - RNA, 19 nt, Homo sapiens
  misc_RNA (1)...(19): siRNA sense strand
ccuccuccuucacguaaau

SEQ ID NO: 642926 - RNA, 19 nt, Homo sapiens
  misc_RNA (1)...(19): siRNA sense strand
aacuaugacuauccaaaca

SEQ ID NO: 642927 - RNA, 19 nt, Homo sapiens
  misc_RNA (1)...(19): siRNA sense strand
cagcucagaggauuaugug

SEQ ID NO: 642928 - RNA, 19 nt, Homo sapiens
  misc_RNA (1)...(19): siRNA sense strand
gugaucaacuaugacuauc

SEQ ID NO: 642929 - RNA, 19 nt, Homo sapiens
  misc_RNA (1)...(19): siRNA sense strand
gagcugguuaugcuaaugg

SEQ ID NO: 642930 - RNA, 19 nt, Homo sapiens
  misc_RNA (1)...(19): siRNA sense strand
uagagcugguuaugcuaau

SEQ ID NO: 642931 - RNA, 19 nt, Homo sapiens
  misc_RNA (1)...(19): siRNA sense strand
uaucgggaucguagugaaa

SEQ ID NO: 642932 - RNA, 19 nt, Homo sapiens
  misc_RNA (1)...(19): siRNA sense strand
caaucccaaucugauguau

SEQ ID NO: 642933 - RNA, 19 nt, Homo sapiens
  misc_RNA (1)...(19): siRNA sense strand
cuaucgggaucguagugaa

SEQ ID NO: 642934 - RNA, 19 nt, Homo sapiens
  misc_RNA (1)...(19): siRNA sense strand
caccucaacugggagaagu

SEQ ID NO: 642935 - RNA, 19 nt, Homo sapiens
  misc_RNA (1)...(19): siRNA sense strand
cuauacagcucaagaauau

SEQ ID NO: 642936 - RNA, 19 nt, Homo sapiens
  misc_RNA (1)...(19): siRNA sense strand
cuaccaauaugauagguua

SEQ ID NO: 642937 - RNA, 19 nt, Homo sapiens
  misc_RNA (1)...(19): siRNA sense strand
gcuauacagcucaagaaua

SEQ ID NO: 642938 - RNA, 19 nt, Homo sapiens
  misc_RNA (1)...(19): siRNA sense strand
cgauagagcugguuaugcu

SEQ ID NO: 642939 - RNA, 19 nt, Homo sapiens
  misc_RNA (1)...(19): siRNA sense strand
caacaaucccaaucugaug

SEQ ID NO: 642940 - RNA, 19 nt, Homo sapiens
  misc_RNA (1)...(19): siRNA sense strand
gcacuuauggagcuaguag

SEQ ID NO: 642941 - RNA, 19 nt, Homo sapiens
  misc_RNA (1)...(19): siRNA sense strand
gagcacaagcaggccaaua

SEQ ID NO: 642942 - RNA, 19 nt, Homo sapiens
  misc_RNA (1)...(19): siRNA sense strand
gcacaagcaggccaauaca

SEQ ID NO: 642943 - RNA, 19 nt, Homo sapiens
  misc_RNA (1)...(19): siRNA sense strand
ccaauacaccuauggucaa

SEQ ID NO: 642944 - RNA, 19 nt, Homo sapiens
  misc_RNA (1)...(19): siRNA sense strand
gaaguucacagagcucuag

SEQ ID NO: 642945 - RNA, 19 nt, Homo sapiens
  misc_RNA (1)...(19): siRNA sense strand
ggagcuaccaauaugauag

SEQ ID NO: 642946 - RNA, 19 nt, Homo sapiens
  misc_RNA (1)...(19): siRNA sense strand
ccaacaaucccaaucugau

SEQ ID NO: 642947 - RNA, 19 nt, Homo sapiens
  misc_RNA (1)...(19): siRNA sense strand
caauacaccuauggucaag

SEQ ID NO: 642948 - RNA, 19 nt, Homo sapiens
  misc_RNA (1)...(19): siRNA sense strand
uaauggcaguggcuaugga

SEQ ID NO: 642949 - RNA, 19 nt, Homo sapiens
  misc_RNA (1)...(19): siRNA sense strand
gggagcuaccaauaugaua

SEQ ID NO: 642950 - RNA, 19 nt, Homo sapiens
  misc_RNA (1)...(19): siRNA sense strand
gcaggccaauacaccuaug

SEQ ID NO: 642951 - RNA, 19 nt, Homo sapiens
  misc_RNA (1)...(19): siRNA sense strand
gauagagcugguuaugcua

SEQ ID NO: 642952 - RNA, 19 nt, Homo sapiens
  misc_RNA (1)...(19): siRNA sense strand
gccaacaaucccaaucuga

SEQ ID NO: 642953 - RNA, 19 nt, Homo sapiens
  misc_RNA (1)...(19): siRNA sense strand
ccagcaguuuagugggaua

SEQ ID NO: 642954 - RNA, 19 nt, Homo sapiens
  misc_RNA (1)...(19): siRNA sense strand
gcuaauggcaguggcuaug

SEQ ID NO: 642955 - RNA, 19 nt, Homo sapiens
  misc_RNA (1)...(19): siRNA sense strand
uccgggagcuaccaauaug

SEQ ID NO: 642956 - RNA, 19 nt, Homo sapiens
  misc_RNA (1)...(19): siRNA sense strand
gcucuagccagcaguuuag

SEQ ID NO: 642957 - RNA, 19 nt, Homo sapiens
  misc_RNA (1)...(19): siRNA sense strand
uauggcaccaguagcuaua

SEQ ID NO: 642958 - RNA, 19 nt, Homo sapiens
  misc_RNA (1)...(19): siRNA sense strand
ccaauaugauagguuacau

SEQ ID NO: 642959 - RNA, 19 nt, Homo sapiens
  misc_RNA (1)...(19): siRNA sense strand
gaugguggccggagagacu

SEQ ID NO: 642960 - RNA, 19 nt, Homo sapiens
  misc_RNA (1)...(19): siRNA sense strand
caauaugauagguuacaug

SEQ ID NO: 642961 - RNA, 19 nt, Homo sapiens
  misc_RNA (1)...(19): siRNA sense strand
cacagccacugaugucaca

SEQ ID NO: 642962 - RNA, 19 nt, Homo sapiens
  misc_RNA (1)...(19): siRNA sense strand
ggcaguggcuauggaaguc

SEQ ID NO: 642963 - RNA, 19 nt, Homo sapiens
  misc_RNA (1)...(19): siRNA sense strand
cagcagccacagccacuga

SEQ ID NO: 642964 - RNA, 19 nt, Homo sapiens
  misc_RNA (1)...(19): siRNA sense strand
uguaucaggaugaguguga

SEQ ID NO: 642965 - RNA, 19 nt, Homo sapiens
  misc_RNA (1)...(19): siRNA sense strand
uaucgggaucguagugaaa

SEQ ID NO: 642966 - RNA, 19 nt, Homo sapiens
  misc_RNA (1)...(19): siRNA sense strand
ccuccuccuucacguaaau

SEQ ID NO: 642967 - RNA, 19 nt, Homo sapiens
  misc_RNA (1)...(19): siRNA sense strand
acaaucccaaucugaugua

SEQ ID NO: 642968 - RNA, 19 nt, Homo sapiens
  misc_RNA (1)...(19): siRNA sense strand
caaucccaaucugauguau

SEQ ID NO: 642969 - RNA, 19 nt, Homo sapiens
  misc_RNA (1)...(19): siRNA sense strand
gagcugguuaugcuaaugg

SEQ ID NO: 642970 - RNA, 19 nt, Homo sapiens
  misc_RNA (1)...(19): siRNA sense strand
uagagcugguuaugcuaau

SEQ ID NO: 642971 - RNA, 19 nt, Homo sapiens
  misc_RNA (1)...(19): siRNA sense strand
cuaucgggaucguagugaa

SEQ ID NO: 642972 - RNA, 19 nt, Homo sapiens
  misc_RNA (1)...(19): siRNA sense strand
caccucaacugggagaagu

SEQ ID NO: 642973 - RNA, 19 nt, Homo sapiens
  misc_RNA (1)...(19): siRNA sense strand
ccagagagcuuaucaaagu

SEQ ID NO: 642974 - RNA, 19 nt, Homo sapiens
  misc_RNA (1)...(19): siRNA sense strand
cuauacagcucaagaauau

SEQ ID NO: 642975 - RNA, 19 nt, Homo sapiens
  misc_RNA (1)...(19): siRNA sense strand
cuaccaauaugauagguua

SEQ ID NO: 642976 - RNA, 19 nt, Homo sapiens
  misc_RNA (1)...(19): siRNA sense strand
ccaaacagcucagaggauu

SEQ ID NO: 642977 - RNA, 19 nt, Homo sapiens
  misc_RNA (1)...(19): siRNA sense strand
gaagaugucaaguuuguga

SEQ ID NO: 642978 - RNA, 19 nt, Homo sapiens
  misc_RNA (1)...(19): siRNA sense strand
caacaaggguaccgccuau

SEQ ID NO: 642979 - RNA, 19 nt, Homo sapiens
  misc_RNA (1)...(19): siRNA sense strand
uguggaagaugucaaguuu

SEQ ID NO: 642980 - RNA, 19 nt, Homo sapiens
  misc_RNA (1)...(19): siRNA sense strand
gcuauacagcucaagaaua

SEQ ID NO: 642981 - RNA, 19 nt, Homo sapiens
  misc_RNA (1)...(19): siRNA sense strand
gaucaacuaugacuaucca

SEQ ID NO: 642982 - RNA, 19 nt, Homo sapiens
  misc_RNA (1)...(19): siRNA sense strand
uggaagaugucaaguuugu

SEQ ID NO: 642983 - RNA, 19 nt, Homo sapiens
  misc_RNA (1)...(19): siRNA sense strand
ggccagagagcuuaucaaa

SEQ ID NO: 642984 - RNA, 19 nt, Homo sapiens
  misc_RNA (1)...(19): siRNA sense strand
cgauagagcugguuaugcu

SEQ ID NO: 642985 - RNA, 19 nt, Homo sapiens
  misc_RNA (1)...(19): siRNA sense strand
aaacaggccagagagcuua

SEQ ID NO: 642986 - RNA, 19 nt, Homo sapiens
  misc_RNA (1)...(19): siRNA sense strand
gaacagcccguagcaccaa

SEQ ID NO: 642987 - RNA, 19 nt, Homo sapiens
  misc_RNA (1)...(19): siRNA sense strand
caacaaucccaaucugaug

SEQ ID NO: 642988 - RNA, 19 nt, Homo sapiens
  misc_RNA (1)...(19): siRNA sense strand
gaugucaaguuugugauca

SEQ ID NO: 642989 - RNA, 19 nt, Homo sapiens
  misc_RNA (1)...(19): siRNA sense strand
caaacagcucagaggauua

SEQ ID NO: 642990 - RNA, 19 nt, Homo sapiens
  misc_RNA (1)...(19): siRNA sense strand
gcacuuauggagcuaguag

SEQ ID NO: 642991 - RNA, 19 nt, Homo sapiens
  misc_RNA (1)...(19): siRNA sense strand
gagcacaagcaggccaaua

SEQ ID NO: 642992 - RNA, 19 nt, Homo sapiens
  misc_RNA (1)...(19): siRNA sense strand
gcacaagcaggccaauaca

SEQ ID NO: 642993 - RNA, 19 nt, Homo sapiens
  misc_RNA (1)...(19): siRNA sense strand
gauuaugugcaccguauug

SEQ ID NO: 642994 - RNA, 19 nt, Homo sapiens
  misc_RNA (1)...(19): siRNA sense strand
ccaauacaccuauggucaa

SEQ ID NO: 642995 - RNA, 19 nt, Homo sapiens
  misc_RNA (1)...(19): siRNA sense strand
gaaguucacagagcucuag

SEQ ID NO: 642996 - RNA, 19 nt, Homo sapiens
  misc_RNA (1)...(19): siRNA sense strand
aaacagcucagaggauuau

SEQ ID NO: 642997 - RNA, 19 nt, Homo sapiens
  misc_RNA (1)...(19): siRNA sense strand
ggagcuaccaauaugauag

SEQ ID NO: 642998 - RNA, 19 nt, Homo sapiens
  misc_RNA (1)...(19): siRNA sense strand
aggauuaugugcaccguau

SEQ ID NO: 642999 - RNA, 19 nt, Homo sapiens
  misc_RNA (1)...(19): siRNA sense strand
ccaacaaucccaaucugau

SEQ ID NO: 643000 - RNA, 19 nt, Homo sapiens
  misc_RNA (1)...(19): siRNA sense strand
caauacaccuauggucaag

SEQ ID NO: 643001 - RNA, 19 nt, Homo sapiens
  misc_RNA (1)...(19): siRNA sense strand
uaauggcaguggcuaugga

SEQ ID NO: 643002 - RNA, 19 nt, Homo sapiens
  misc_RNA (1)...(19): siRNA sense strand
gggagcuaccaauaugaua

SEQ ID NO: 643003 - RNA, 19 nt, Homo sapiens
  misc_RNA (1)...(19): siRNA sense strand
gcaggccaauacaccuaug

SEQ ID NO: 643004 - RNA, 19 nt, Homo sapiens
  misc_RNA (1)...(19): siRNA sense strand
gauagagcugguuaugcua

SEQ ID NO: 643005 - RNA, 19 nt, Homo sapiens
  misc_RNA (1)...(19): siRNA sense strand
ucaacuaugacuauccaaa

SEQ ID NO: 643006 - RNA, 19 nt, Homo sapiens
  misc_RNA (1)...(19): siRNA sense strand
caacuaugacuauccaaac

SEQ ID NO: 643007 - RNA, 19 nt, Homo sapiens
  misc_RNA (1)...(19): siRNA sense strand
gccaacaaucccaaucuga

SEQ ID NO: 643008 - RNA, 19 nt, Homo sapiens
  misc_RNA (1)...(19): siRNA sense strand
cagagagcuuaucaaagug

SEQ ID NO: 643009 - RNA, 19 nt, Homo sapiens
  misc_RNA (1)...(19): siRNA sense strand
ccagcaguuuagugggaua

SEQ ID NO: 643010 - RNA, 19 nt, Homo sapiens
  misc_RNA (1)...(19): siRNA sense strand
gcuaauggcaguggcuaug

SEQ ID NO: 643011 - RNA, 19 nt, Homo sapiens
  misc_RNA (1)...(19): siRNA sense strand
uccgggagcuaccaauaug

SEQ ID NO: 643012 - RNA, 19 nt, Homo sapiens
  misc_RNA (1)...(19): siRNA sense strand
gcucuagccagcaguuuag

SEQ ID NO: 643013 - RNA, 19 nt, Homo sapiens
  misc_RNA (1)...(19): siRNA sense strand
uuaucaaagugcuggaaga

SEQ ID NO: 643014 - RNA, 19 nt, Homo sapiens
  misc_RNA (1)...(19): siRNA sense strand
ccaauaugauagguuacau

SEQ ID NO: 643015 - RNA, 19 nt, Homo sapiens
  misc_RNA (1)...(19): siRNA sense strand
uauggcaccaguagcuaua

SEQ ID NO: 643016 - RNA, 19 nt, Homo sapiens
  misc_RNA (1)...(19): siRNA sense strand
caaucaggcuaucaaucca

SEQ ID NO: 643017 - RNA, 19 nt, Homo sapiens
  misc_RNA (1)...(19): siRNA sense strand
ccaaucaggcuaucaaucc

SEQ ID NO: 643018 - RNA, 19 nt, Homo sapiens
  misc_RNA (1)...(19): siRNA sense strand
gaugguggccggagagacu

SEQ ID NO: 643019 - RNA, 19 nt, Homo sapiens
  misc_RNA (1)...(19): siRNA sense strand
caauaugauagguuacaug

SEQ ID NO: 643020 - RNA, 19 nt, Homo sapiens
  misc_RNA (1)...(19): siRNA sense strand
gcaccguauuggccgaaca

SEQ ID NO: 643021 - RNA, 19 nt, Homo sapiens
  misc_RNA (1)...(19): siRNA sense strand
cacagccacugaugucaca

SEQ ID NO: 643022 - RNA, 19 nt, Homo sapiens
  misc_RNA (1)...(19): siRNA sense strand
ggcaguggcuauggaaguc

SEQ ID NO: 643023 - RNA, 19 nt, Homo sapiens
  misc_RNA (1)...(19): siRNA sense strand
cagcagccacagccacuga

SEQ ID NO: 643024 - RNA, 19 nt, Homo sapiens
  misc_RNA (1)...(19): siRNA sense strand
ugugaucaacuaugacuau

SEQ ID NO: 643025 - RNA, 19 nt, Homo sapiens
  misc_RNA (1)...(19): siRNA sense strand
uguaucaggaugaguguga

SEQ ID NO: 643026 - RNA, 19 nt, Homo sapiens
  misc_RNA (1)...(19): siRNA sense strand
caaaacugaugcagcuugu

SEQ ID NO: 643027 - RNA, 19 nt, Homo sapiens
  misc_RNA (1)...(19): siRNA sense strand
acaaucccaaucugaugua

SEQ ID NO: 643028 - RNA, 19 nt, Homo sapiens
  misc_RNA (1)...(19): siRNA sense strand
ccuccuccuucacguaaau

SEQ ID NO: 643029 - RNA, 19 nt, Homo sapiens
  misc_RNA (1)...(19): siRNA sense strand
aacuaugacuauccaaaca

SEQ ID NO: 643030 - RNA, 19 nt, Homo sapiens
  misc_RNA (1)...(19): siRNA sense strand
cagcucagaggauuaugug

SEQ ID NO: 643031 - RNA, 19 nt, Homo sapiens
  misc_RNA (1)...(19): siRNA sense strand
gugaucaacuaugacuauc

SEQ ID NO: 643032 - RNA, 19 nt, Homo sapiens
  misc_RNA (1)...(19): siRNA sense strand
gagcugguuaugcuaaugg

SEQ ID NO: 643033 - RNA, 19 nt, Homo sapiens
  misc_RNA (1)...(19): siRNA sense strand
uagagcugguuaugcuaau

SEQ ID NO: 643034 - RNA, 19 nt, Homo sapiens
  misc_RNA (1)...(19): siRNA sense strand
uaucgggaucguagugaaa

SEQ ID NO: 643035 - RNA, 19 nt, Homo sapiens
  misc_RNA (1)...(19): siRNA sense strand
caaucccaaucugauguau

SEQ ID NO: 643036 - RNA, 19 nt, Homo sapiens
  misc_RNA (1)...(19): siRNA sense strand
cuaucgggaucguagugaa

SEQ ID NO: 643037 - RNA, 19 nt, Homo sapiens
  misc_RNA (1)...(19): siRNA sense strand
caccucaacugggagaagu

SEQ ID NO: 643038 - RNA, 19 nt, Homo sapiens
  misc_RNA (1)...(19): siRNA sense strand
cuauacagcucaagaauau

SEQ ID NO: 643039 - RNA, 19 nt, Homo sapiens
  misc_RNA (1)...(19): siRNA sense strand
cuaccaauaugauagguua

SEQ ID NO: 643040 - RNA, 19 nt, Homo sapiens
  misc_RNA (1)...(19): siRNA sense strand
gcuauacagcucaagaaua

SEQ ID NO: 643041 - RNA, 19 nt, Homo sapiens
  misc_RNA (1)...(19): siRNA sense strand
cgauagagcugguuaugcu

SEQ ID NO: 643042 - RNA, 19 nt, Homo sapiens
  misc_RNA (1)...(19): siRNA sense strand
caacaaucccaaucugaug

SEQ ID NO: 643043 - RNA, 19 nt, Homo sapiens
  misc_RNA (1)...(19): siRNA sense strand
gcacuuauggagcuaguag

SEQ ID NO: 643044 - RNA, 19 nt, Homo sapiens
  misc_RNA (1)...(19): siRNA sense strand
gagcacaagcaggccaaua

SEQ ID NO: 643045 - RNA, 19 nt, Homo sapiens
  misc_RNA (1)...(19): siRNA sense strand
gcacaagcaggccaauaca

SEQ ID NO: 643046 - RNA, 19 nt, Homo sapiens
  misc_RNA (1)...(19): siRNA sense strand
ccaauacaccuauggucaa

SEQ ID NO: 643047 - RNA, 19 nt, Homo sapiens
  misc_RNA (1)...(19): siRNA sense strand
gaaguucacagagcucuag

SEQ ID NO: 643048 - RNA, 19 nt, Homo sapiens
  misc_RNA (1)...(19): siRNA sense strand
ggagcuaccaauaugauag

SEQ ID NO: 643049 - RNA, 19 nt, Homo sapiens
  misc_RNA (1)...(19): siRNA sense strand
ccaacaaucccaaucugau

SEQ ID NO: 643050 - RNA, 19 nt, Homo sapiens
  misc_RNA (1)...(19): siRNA sense strand
caauacaccuauggucaag

SEQ ID NO: 643051 - RNA, 19 nt, Homo sapiens
  misc_RNA (1)...(19): siRNA sense strand
uaauggcaguggcuaugga

SEQ ID NO: 643052 - RNA, 19 nt, Homo sapiens
  misc_RNA (1)...(19): siRNA sense strand
gggagcuaccaauaugaua

SEQ ID NO: 643053 - RNA, 19 nt, Homo sapiens
  misc_RNA (1)...(19): siRNA sense strand
gcaggccaauacaccuaug

SEQ ID NO: 643054 - RNA, 19 nt, Homo sapiens
  misc_RNA (1)...(19): siRNA sense strand
gauagagcugguuaugcua

SEQ ID NO: 643055 - RNA, 19 nt, Homo sapiens
  misc_RNA (1)...(19): siRNA sense strand
gccaacaaucccaaucuga

SEQ ID NO: 643056 - RNA, 19 nt, Homo sapiens
  misc_RNA (1)...(19): siRNA sense strand
ccagcaguuuagugggaua

SEQ ID NO: 643057 - RNA, 19 nt, Homo sapiens
  misc_RNA (1)...(19): siRNA sense strand
gcuaauggcaguggcuaug

SEQ ID NO: 643058 - RNA, 19 nt, Homo sapiens
  misc_RNA (1)...(19): siRNA sense strand
uccgggagcuaccaauaug

SEQ ID NO: 643059 - RNA, 19 nt, Homo sapiens
  misc_RNA (1)...(19): siRNA sense strand
gcucuagccagcaguuuag

SEQ ID NO: 643060 - RNA, 19 nt, Homo sapiens
  misc_RNA (1)...(19): siRNA sense strand
uauggcaccaguagcuaua

SEQ ID NO: 643061 - RNA, 19 nt, Homo sapiens
  misc_RNA (1)...(19): siRNA sense strand
ccaauaugauagguuacau

SEQ ID NO: 643062 - RNA, 19 nt, Homo sapiens
  misc_RNA (1)...(19): siRNA sense strand
gaugguggccggagagacu

SEQ ID NO: 643063 - RNA, 19 nt, Homo sapiens
  misc_RNA (1)...(19): siRNA sense strand
caauaugauagguuacaug

SEQ ID NO: 643064 - RNA, 19 nt, Homo sapiens
  misc_RNA (1)...(19): siRNA sense strand
cacagccacugaugucaca

SEQ ID NO: 643065 - RNA, 19 nt, Homo sapiens
  misc_RNA (1)...(19): siRNA sense strand
ggcaguggcuauggaaguc

SEQ ID NO: 643066 - RNA, 19 nt, Homo sapiens
  misc_RNA (1)...(19): siRNA sense strand
cagcagccacagccacuga

SEQ ID NO: 643067 - RNA, 19 nt, Homo sapiens
  misc_RNA (1)...(19): siRNA sense strand
uguaucaggaugaguguga

SEQ ID NO: 643068 - RNA, 19 nt, Homo sapiens
  misc_RNA (1)...(19): siRNA sense strand
uaucgggaucguagugaaa

SEQ ID NO: 643069 - RNA, 19 nt, Homo sapiens
  misc_RNA (1)...(19): siRNA sense strand
ccuccuccuucacguaaau

SEQ ID NO: 643070 - RNA, 19 nt, Homo sapiens
  misc_RNA (1)...(19): siRNA sense strand
acaaucccaaucugaugua

SEQ ID NO: 643071 - RNA, 19 nt, Homo sapiens
  misc_RNA (1)...(19): siRNA sense strand
caaucccaaucugauguau

SEQ ID NO: 643072 - RNA, 19 nt, Homo sapiens
  misc_RNA (1)...(19): siRNA sense strand
gagcugguuaugcuaaugg

SEQ ID NO: 643073 - RNA, 19 nt, Homo sapiens
  misc_RNA (1)...(19): siRNA sense strand
uagagcugguuaugcuaau

SEQ ID NO: 643074 - RNA, 19 nt, Homo sapiens
  misc_RNA (1)...(19): siRNA sense strand
cuaucgggaucguagugaa

SEQ ID NO: 643075 - RNA, 19 nt, Homo sapiens
  misc_RNA (1)...(19): siRNA sense strand
caccucaacugggagaagu

SEQ ID NO: 643076 - RNA, 19 nt, Homo sapiens
  misc_RNA (1)...(19): siRNA sense strand
gaagaggaauuaaagcaaa

SEQ ID NO: 643077 - RNA, 19 nt, Homo sapiens
  misc_RNA (1)...(19): siRNA sense strand
ccagaaauccacuguauua

SEQ ID NO: 643078 - RNA, 19 nt, Homo sapiens
  misc_RNA (1)...(19): siRNA sense strand
gggcaugccuugcucauuu

SEQ ID NO: 643079 - RNA, 19 nt, Homo sapiens
  misc_RNA (1)...(19): siRNA sense strand
gcaaugcagucuuccaauu

SEQ ID NO: 643080 - RNA, 19 nt, Homo sapiens
  misc_RNA (1)...(19): siRNA sense strand
gaaauaccacuaugaguug

SEQ ID NO: 643081 - RNA, 19 nt, Homo sapiens
  misc_RNA (1)...(19): siRNA sense strand
gaagucgacuggauuguuc

SEQ ID NO: 643082 - RNA, 19 nt, Homo sapiens
  misc_RNA (1)...(19): siRNA sense strand
ccaagaaaguugagaaauc

SEQ ID NO: 643083 - RNA, 19 nt, Homo sapiens
  misc_RNA (1)...(19): siRNA sense strand
gaagaaacaaugggaagua

SEQ ID NO: 643084 - RNA, 19 nt, Homo sapiens
  misc_RNA (1)...(19): siRNA sense strand
gcauauaagucauacauac

SEQ ID NO: 643085 - RNA, 19 nt, Homo sapiens
  misc_RNA (1)...(19): siRNA sense strand
uuaaggagcugaugacuca

SEQ ID NO: 643086 - RNA, 19 nt, Homo sapiens
  misc_RNA (1)...(19): siRNA sense strand
gaucugaacgucaacagua

SEQ ID NO: 643087 - RNA, 19 nt, Homo sapiens
  misc_RNA (1)...(19): siRNA sense strand
cgaugaaacuccugcguaa

SEQ ID NO: 643088 - RNA, 19 nt, Homo sapiens
  misc_RNA (1)...(19): siRNA sense strand
gaagccagauaaugaugaa

SEQ ID NO: 643089 - RNA, 19 nt, Homo sapiens
  misc_RNA (1)...(19): siRNA sense strand
gaaacaaugggaaguagaa

SEQ ID NO: 643090 - RNA, 19 nt, Homo sapiens
  misc_RNA (1)...(19): siRNA sense strand
gcacagaaacuugguaaug

SEQ ID NO: 643091 - RNA, 19 nt, Homo sapiens
  misc_RNA (1)...(19): siRNA sense strand
gaaagugccgagacuacua

SEQ ID NO: 643092 - RNA, 19 nt, Homo sapiens
  misc_RNA (1)...(19): siRNA sense strand
gaagcagugggaaauauaa

SEQ ID NO: 643093 - RNA, 19 nt, Homo sapiens
  misc_RNA (1)...(19): siRNA sense strand
gaaauccacuguauuaacc

SEQ ID NO: 643094 - RNA, 19 nt, Homo sapiens
  misc_RNA (1)...(19): siRNA sense strand
agggaaaucugaagaagaa

SEQ ID NO: 643095 - RNA, 19 nt, Homo sapiens
  misc_RNA (1)...(19): siRNA sense strand
ugaaauaccacuaugaguu

SEQ ID NO: 643096 - RNA, 19 nt, Homo sapiens
  misc_RNA (1)...(19): siRNA sense strand
gaaagaagaagcuuauggu

SEQ ID NO: 643097 - RNA, 19 nt, Homo sapiens
  misc_RNA (1)...(19): siRNA sense strand
aaugugggcuuaucagaaa

SEQ ID NO: 643098 - RNA, 19 nt, Homo sapiens
  misc_RNA (1)...(19): siRNA sense strand
gaggauacuucguuugcuu

SEQ ID NO: 643099 - RNA, 19 nt, Homo sapiens
  misc_RNA (1)...(19): siRNA sense strand
guaaugggaucaacaucau

SEQ ID NO: 643100 - RNA, 19 nt, Homo sapiens
  misc_RNA (1)...(19): siRNA sense strand
cggaugacccuaaggaaua

SEQ ID NO: 643101 - RNA, 19 nt, Homo sapiens
  misc_RNA (1)...(19): siRNA sense strand
gaacgucaacaguaaugaa

SEQ ID NO: 643102 - RNA, 19 nt, Homo sapiens
  misc_RNA (1)...(19): siRNA sense strand
gaaugugggcuuaucagaa

SEQ ID NO: 643103 - RNA, 19 nt, Homo sapiens
  misc_RNA (1)...(19): siRNA sense strand
gaagaccuggcaaggauuu

SEQ ID NO: 643104 - RNA, 19 nt, Homo sapiens
  misc_RNA (1)...(19): siRNA sense strand
gaagcggaaccucaaauug

SEQ ID NO: 643105 - RNA, 19 nt, Homo sapiens
  misc_RNA (1)...(19): siRNA sense strand
cuuauucucucaccuacua

SEQ ID NO: 643106 - RNA, 19 nt, Homo sapiens
  misc_RNA (1)...(19): siRNA sense strand
gagauuccuucugcucuuu

SEQ ID NO: 643107 - RNA, 19 nt, Homo sapiens
  misc_RNA (1)...(19): siRNA sense strand
gauaauggguggcaguaac

SEQ ID NO: 643108 - RNA, 19 nt, Homo sapiens
  misc_RNA (1)...(19): siRNA sense strand
ccucaaaucugacccuauc

SEQ ID NO: 643109 - RNA, 19 nt, Homo sapiens
  misc_RNA (1)...(19): siRNA sense strand
gaagaaagugccgagacua

SEQ ID NO: 643110 - RNA, 19 nt, Homo sapiens
  misc_RNA (1)...(19): siRNA sense strand
ccaggaagcauauaaguca

SEQ ID NO: 643111 - RNA, 19 nt, Homo sapiens
  misc_RNA (1)...(19): siRNA sense strand
ggaugacccuaaggaauau

SEQ ID NO: 643112 - RNA, 19 nt, Homo sapiens
  misc_RNA (1)...(19): siRNA sense strand
ucagguugcucugucauuu

SEQ ID NO: 643113 - RNA, 19 nt, Homo sapiens
  misc_RNA (1)...(19): siRNA sense strand
ggaggcaugucucaagaag

SEQ ID NO: 643114 - RNA, 19 nt, Homo sapiens
  misc_RNA (1)...(19): siRNA sense strand
aagaagaaccgaaagaaga

SEQ ID NO: 643115 - RNA, 19 nt, Homo sapiens
  misc_RNA (1)...(19): siRNA sense strand
ugaugaagcugaucguauc

SEQ ID NO: 643116 - RNA, 19 nt, Homo sapiens
  misc_RNA (1)...(19): siRNA sense strand
ucucaucccugcaguugaa

SEQ ID NO: 643117 - RNA, 19 nt, Homo sapiens
  misc_RNA (1)...(19): siRNA sense strand
caagaagcagugggaaaua

SEQ ID NO: 643118 - RNA, 19 nt, Homo sapiens
  misc_RNA (1)...(19): siRNA sense strand
gaaaguugagaaauccaaa

SEQ ID NO: 643119 - RNA, 19 nt, Homo sapiens
  misc_RNA (1)...(19): siRNA sense strand
uggagaagccagauaauga

SEQ ID NO: 643120 - RNA, 19 nt, Homo sapiens
  misc_RNA (1)...(19): siRNA sense strand
caaagggaaaucugaagaa

SEQ ID NO: 643121 - RNA, 19 nt, Homo sapiens
  misc_RNA (1)...(19): siRNA sense strand
caaccacauucuuccaguu

SEQ ID NO: 643122 - RNA, 19 nt, Homo sapiens
  misc_RNA (1)...(19): siRNA sense strand
acagggauauguuguuugu

SEQ ID NO: 643123 - RNA, 19 nt, Homo sapiens
  misc_RNA (1)...(19): siRNA sense strand
caagaaaguugagaaaucc

SEQ ID NO: 643124 - RNA, 19 nt, Homo sapiens
  misc_RNA (1)...(19): siRNA sense strand
guaaugaaggcaagcagaa

SEQ ID NO: 643125 - RNA, 19 nt, Homo sapiens
  misc_RNA (1)...(19): siRNA sense strand
gcagcggaaccuaaaguuu

SEQ ID NO: 643126 - RNA, 19 nt, Homo sapiens
  misc_RNA (1)...(19): siRNA sense strand
ggagaagccagauaaugau

SEQ ID NO: 643127 - RNA, 19 nt, Homo sapiens
  misc_RNA (1)...(19): siRNA sense strand
uugcugaacuacauugauu

SEQ ID NO: 643128 - RNA, 19 nt, Homo sapiens
  misc_RNA (1)...(19): siRNA sense strand
caucuuguaugucugugaa

SEQ ID NO: 643129 - RNA, 19 nt, Homo sapiens
  misc_RNA (1)...(19): siRNA sense strand
ugaagcugaucguaucuug

SEQ ID NO: 643130 - RNA, 19 nt, Homo sapiens
  misc_RNA (1)...(19): siRNA sense strand
cagauaaugaugaagauga

SEQ ID NO: 643131 - RNA, 19 nt, Homo sapiens
  misc_RNA (1)...(19): siRNA sense strand
uggcaaggauuucucugaa

SEQ ID NO: 643132 - RNA, 19 nt, Homo sapiens
  misc_RNA (1)...(19): siRNA sense strand
aaacaaagggaaaucugaa

SEQ ID NO: 643133 - RNA, 19 nt, Homo sapiens
  misc_RNA (1)...(19): siRNA sense strand
gacuagacauuccugaagu

SEQ ID NO: 643134 - RNA, 19 nt, Homo sapiens
  misc_RNA (1)...(19): siRNA sense strand
ggacuagacauuccugaag

SEQ ID NO: 643135 - RNA, 19 nt, Homo sapiens
  misc_RNA (1)...(19): siRNA sense strand
gaugauaaagcgaaugcaa

SEQ ID NO: 643136 - RNA, 19 nt, Homo sapiens
  misc_RNA (1)...(19): siRNA sense strand
gguaaugggaucaacauca

SEQ ID NO: 643137 - RNA, 19 nt, Homo sapiens
  misc_RNA (1)...(19): siRNA sense strand
gaaaucugaagaagaaagu

SEQ ID NO: 643138 - RNA, 19 nt, Homo sapiens
  misc_RNA (1)...(19): siRNA sense strand
ggauuuggcuaccagaaaa

SEQ ID NO: 643139 - RNA, 19 nt, Homo sapiens
  misc_RNA (1)...(19): siRNA sense strand
ggaagcauauaagucauac

SEQ ID NO: 643140 - RNA, 19 nt, Homo sapiens
  misc_RNA (1)...(19): siRNA sense strand
ggaaagcaaaagcaaaaua

SEQ ID NO: 643141 - RNA, 19 nt, Homo sapiens
  misc_RNA (1)...(19): siRNA sense strand
aaggagccauuguauguug

SEQ ID NO: 643142 - RNA, 19 nt, Homo sapiens
  misc_RNA (1)...(19): siRNA sense strand
cacagaaacuugguaaugg

SEQ ID NO: 643143 - RNA, 19 nt, Homo sapiens
  misc_RNA (1)...(19): siRNA sense strand
aagaagcagugggaaauau

SEQ ID NO: 643144 - RNA, 19 nt, Homo sapiens
  misc_RNA (1)...(19): siRNA sense strand
ugaaacuccugcguaagaa

SEQ ID NO: 643145 - RNA, 19 nt, Homo sapiens
  misc_RNA (1)...(19): siRNA sense strand
ugcagugucugguuauuga

SEQ ID NO: 643146 - RNA, 19 nt, Homo sapiens
  misc_RNA (1)...(19): siRNA sense strand
aagcagcaaugcagucuuc

SEQ ID NO: 643147 - RNA, 19 nt, Homo sapiens
  misc_RNA (1)...(19): siRNA sense strand
cagcggaaccuaaaguuuc

SEQ ID NO: 643148 - RNA, 19 nt, Homo sapiens
  misc_RNA (1)...(19): siRNA sense strand
gacaggagcuuuugaggau

SEQ ID NO: 643149 - RNA, 19 nt, Homo sapiens
  misc_RNA (1)...(19): siRNA sense strand
uggcguugaugaugauaaa

SEQ ID NO: 643150 - RNA, 19 nt, Homo sapiens
  misc_RNA (1)...(19): siRNA sense strand
agaagaaccgaaagaagaa

SEQ ID NO: 643151 - RNA, 19 nt, Homo sapiens
  misc_RNA (1)...(19): siRNA sense strand
gugccgagacuacuaaaga

SEQ ID NO: 643152 - RNA, 19 nt, Homo sapiens
  misc_RNA (1)...(19): siRNA sense strand
aaucugacccuaucggaaa

SEQ ID NO: 643153 - RNA, 19 nt, Homo sapiens
  misc_RNA (1)...(19): siRNA sense strand
uugaagaccuggcaaggau

SEQ ID NO: 643154 - RNA, 19 nt, Homo sapiens
  misc_RNA (1)...(19): siRNA sense strand
guagacagacuaugcucuu

SEQ ID NO: 643155 - RNA, 19 nt, Homo sapiens
  misc_RNA (1)...(19): siRNA sense strand
cgagacuacuaaagaaaca

SEQ ID NO: 643156 - RNA, 19 nt, Homo sapiens
  misc_RNA (1)...(19): siRNA sense strand
agaagcagugggaaauaua

SEQ ID NO: 643157 - RNA, 19 nt, Homo sapiens
  misc_RNA (1)...(19): siRNA sense strand
cagaauaccccaggauuua

SEQ ID NO: 643158 - RNA, 19 nt, Homo sapiens
  misc_RNA (1)...(19): siRNA sense strand
uaagguucaugcccaggaa

SEQ ID NO: 643159 - RNA, 19 nt, Homo sapiens
  misc_RNA (1)...(19): siRNA sense strand
gcuucucuauguaaucuug

SEQ ID NO: 643160 - RNA, 19 nt, Homo sapiens
  misc_RNA (1)...(19): siRNA sense strand
gaaugaugcugagccugau

SEQ ID NO: 643161 - RNA, 19 nt, Homo sapiens
  misc_RNA (1)...(19): siRNA sense strand
caauggagaagcagcaaug

SEQ ID NO: 643162 - RNA, 19 nt, Homo sapiens
  misc_RNA (1)...(19): siRNA sense strand
ccaagguuccauuaaguga

SEQ ID NO: 643163 - RNA, 19 nt, Homo sapiens
  misc_RNA (1)...(19): siRNA sense strand
aauccaagguuccauuaag

SEQ ID NO: 643164 - RNA, 19 nt, Homo sapiens
  misc_RNA (1)...(19): siRNA sense strand
gaagcacagaaacuuggua

SEQ ID NO: 643165 - RNA, 19 nt, Homo sapiens
  misc_RNA (1)...(19): siRNA sense strand
ggaaaucugaagaagaaag

SEQ ID NO: 643166 - RNA, 19 nt, Homo sapiens
  misc_RNA (1)...(19): siRNA sense strand
aggcaugucucaagaagca

SEQ ID NO: 643167 - RNA, 19 nt, Homo sapiens
  misc_RNA (1)...(19): siRNA sense strand
acaauccaagguuccauua

SEQ ID NO: 643168 - RNA, 19 nt, Homo sapiens
  misc_RNA (1)...(19): siRNA sense strand
gcugaacuacauugauuug

SEQ ID NO: 643169 - RNA, 19 nt, Homo sapiens
  misc_RNA (1)...(19): siRNA sense strand
gagaagcggaaccucaaau

SEQ ID NO: 643170 - RNA, 19 nt, Homo sapiens
  misc_RNA (1)...(19): siRNA sense strand
cgaaagaagaagcuuaugg

SEQ ID NO: 643171 - RNA, 19 nt, Homo sapiens
  misc_RNA (1)...(19): siRNA sense strand
gggcuuaucagaaacucaa

SEQ ID NO: 643172 - RNA, 19 nt, Homo sapiens
  misc_RNA (1)...(19): siRNA sense strand
gaacuagccaugcaaaccu

SEQ ID NO: 643173 - RNA, 19 nt, Homo sapiens
  misc_RNA (1)...(19): siRNA sense strand
agagugaggugcccagucu

SEQ ID NO: 643174 - RNA, 19 nt, Homo sapiens
  misc_RNA (1)...(19): siRNA sense strand
caaugcagucuuccaauuc

SEQ ID NO: 643175 - RNA, 19 nt, Homo sapiens
  misc_RNA (1)...(19): siRNA sense strand
ucaagaagcagugggaaau

SEQ ID NO: 643176 - RNA, 19 nt, Homo sapiens
  misc_RNA (1)...(19): siRNA sense strand
ggacaugucuccacuauca

SEQ ID NO: 643177 - RNA, 19 nt, Homo sapiens
  misc_RNA (1)...(19): siRNA sense strand
gcacaagcauuggaaauaa

SEQ ID NO: 643178 - RNA, 19 nt, Homo sapiens
  misc_RNA (1)...(19): siRNA sense strand
ggaaucacccaccaaauua

SEQ ID NO: 643179 - RNA, 19 nt, Homo sapiens
  misc_RNA (1)...(19): siRNA sense strand
caacaccaguuccaauuaa

SEQ ID NO: 643180 - RNA, 19 nt, Homo sapiens
  misc_RNA (1)...(19): siRNA sense strand
cgaggaggauucuguguua

SEQ ID NO: 643181 - RNA, 19 nt, Homo sapiens
  misc_RNA (1)...(19): siRNA sense strand
gcaccuacuuucaugauuu

SEQ ID NO: 643182 - RNA, 19 nt, Homo sapiens
  misc_RNA (1)...(19): siRNA sense strand
ucaagaagaugacugcaaa

SEQ ID NO: 643183 - RNA, 19 nt, Homo sapiens
  misc_RNA (1)...(19): siRNA sense strand
gaagaaaccgugcucagaa

SEQ ID NO: 643184 - RNA, 19 nt, Homo sapiens
  misc_RNA (1)...(19): siRNA sense strand
caacugaauuccuugaaga

SEQ ID NO: 643185 - RNA, 19 nt, Homo sapiens
  misc_RNA (1)...(19): siRNA sense strand
gcaaagacuucaacaucga

SEQ ID NO: 643186 - RNA, 19 nt, Homo sapiens
  misc_RNA (1)...(19): siRNA sense strand
gcugauacuucaauauuug

SEQ ID NO: 643187 - RNA, 19 nt, Homo sapiens
  misc_RNA (1)...(19): siRNA sense strand
gaaauggcaucagaagaga

SEQ ID NO: 643188 - RNA, 19 nt, Homo sapiens
  misc_RNA (1)...(19): siRNA sense strand
gccagaagauaccaacuuu

SEQ ID NO: 643189 - RNA, 19 nt, Homo sapiens
  misc_RNA (1)...(19): siRNA sense strand
gaaauauccucugcugaga

SEQ ID NO: 643190 - RNA, 19 nt, Homo sapiens
  misc_RNA (1)...(19): siRNA sense strand
gcaacaccaguuccaauua

SEQ ID NO: 643191 - RNA, 19 nt, Homo sapiens
  misc_RNA (1)...(19): siRNA sense strand
ggacuucauugccacacua

SEQ ID NO: 643192 - RNA, 19 nt, Homo sapiens
  misc_RNA (1)...(19): siRNA sense strand
gaaauugcacaaacacaaa

SEQ ID NO: 643193 - RNA, 19 nt, Homo sapiens
  misc_RNA (1)...(19): siRNA sense strand
gcagaggccuuugaugaug

SEQ ID NO: 643194 - RNA, 19 nt, Homo sapiens
  misc_RNA (1)...(19): siRNA sense strand
gaaaggaaaccaugcaaca

SEQ ID NO: 643195 - RNA, 19 nt, Homo sapiens
  misc_RNA (1)...(19): siRNA sense strand
gaccaaggauaaagcacua

SEQ ID NO: 643196 - RNA, 19 nt, Homo sapiens
  misc_RNA (1)...(19): siRNA sense strand
ccacugccauuaagacuga

SEQ ID NO: 643197 - RNA, 19 nt, Homo sapiens
  misc_RNA (1)...(19): siRNA sense strand
gaaacuagccagauugaag

SEQ ID NO: 643198 - RNA, 19 nt, Homo sapiens
  misc_RNA (1)...(19): siRNA sense strand
gcacucagacuguugcaaa

SEQ ID NO: 643199 - RNA, 19 nt, Homo sapiens
  misc_RNA (1)...(19): siRNA sense strand
gaaauaaugaugggacuga

SEQ ID NO: 643200 - RNA, 19 nt, Homo sapiens
  misc_RNA (1)...(19): siRNA sense strand
ugccaggccuuccaucuua

SEQ ID NO: 643201 - RNA, 19 nt, Homo sapiens
  misc_RNA (1)...(19): siRNA sense strand
gaaaauggccuaccaggaa

SEQ ID NO: 643202 - RNA, 19 nt, Homo sapiens
  misc_RNA (1)...(19): siRNA sense strand
uggaggagaugucaagauu

SEQ ID NO: 643203 - RNA, 19 nt, Homo sapiens
  misc_RNA (1)...(19): siRNA sense strand
ccacaacuccuuucauaga

SEQ ID NO: 643204 - RNA, 19 nt, Homo sapiens
  misc_RNA (1)...(19): siRNA sense strand
ucagagaccucaggaauag

SEQ ID NO: 643205 - RNA, 19 nt, Homo sapiens
  misc_RNA (1)...(19): siRNA sense strand
uaagugaggauucccauuu

SEQ ID NO: 643206 - RNA, 19 nt, Homo sapiens
  misc_RNA (1)...(19): siRNA sense strand
ggaaauugcacaaacacaa

SEQ ID NO: 643207 - RNA, 19 nt, Homo sapiens
  misc_RNA (1)...(19): siRNA sense strand
ccaaggaugugacacuguu

SEQ ID NO: 643208 - RNA, 19 nt, Homo sapiens
  misc_RNA (1)...(19): siRNA sense strand
caaugugacuccagccaaa

SEQ ID NO: 643209 - RNA, 19 nt, Homo sapiens
  misc_RNA (1)...(19): siRNA sense strand
gaggugcugugaagacuga

SEQ ID NO: 643210 - RNA, 19 nt, Homo sapiens
  misc_RNA (1)...(19): siRNA sense strand
uagaaucucugcaggaugu

SEQ ID NO: 643211 - RNA, 19 nt, Homo sapiens
  misc_RNA (1)...(19): siRNA sense strand
gcagaugcauuaacagaac

SEQ ID NO: 643212 - RNA, 19 nt, Homo sapiens
  misc_RNA (1)...(19): siRNA sense strand
gaaaccaacgugaucuuga

SEQ ID NO: 643213 - RNA, 19 nt, Homo sapiens
  misc_RNA (1)...(19): siRNA sense strand
ugaauuccuugaagagaaa

SEQ ID NO: 643214 - RNA, 19 nt, Homo sapiens
  misc_RNA (1)...(19): siRNA sense strand
cuccacaacuccuuucaua

SEQ ID NO: 643215 - RNA, 19 nt, Homo sapiens
  misc_RNA (1)...(19): siRNA sense strand
caaaagacgugaagccaaa

SEQ ID NO: 643216 - RNA, 19 nt, Homo sapiens
  misc_RNA (1)...(19): siRNA sense strand
ccacuucucucccuaagca

SEQ ID NO: 643217 - RNA, 19 nt, Homo sapiens
  misc_RNA (1)...(19): siRNA sense strand
uaccaggaauacccaaaua

SEQ ID NO: 643218 - RNA, 19 nt, Homo sapiens
  misc_RNA (1)...(19): siRNA sense strand
ggcauuggcuaaagauaug

SEQ ID NO: 643219 - RNA, 19 nt, Homo sapiens
  misc_RNA (1)...(19): siRNA sense strand
gcagaagucaagaagauga

SEQ ID NO: 643220 - RNA, 19 nt, Homo sapiens
  misc_RNA (1)...(19): siRNA sense strand
gggagaaacuguuggaaaa

SEQ ID NO: 643221 - RNA, 19 nt, Homo sapiens
  misc_RNA (1)...(19): siRNA sense strand
caagagcacucagacuguu

SEQ ID NO: 643222 - RNA, 19 nt, Homo sapiens
  misc_RNA (1)...(19): siRNA sense strand
caaugguggucauggagua

SEQ ID NO: 643223 - RNA, 19 nt, Homo sapiens
  misc_RNA (1)...(19): siRNA sense strand
ccuuuaagauguaccauga

SEQ ID NO: 643224 - RNA, 19 nt, Homo sapiens
  misc_RNA (1)...(19): siRNA sense strand
agaaccaucuccagacauu

SEQ ID NO: 643225 - RNA, 19 nt, Homo sapiens
  misc_RNA (1)...(19): siRNA sense strand
aagugaggauucccauuua

SEQ ID NO: 643226 - RNA, 19 nt, Homo sapiens
  misc_RNA (1)...(19): siRNA sense strand
ggacauggcacuagcuaca

SEQ ID NO: 643227 - RNA, 19 nt, Homo sapiens
  misc_RNA (1)...(19): siRNA sense strand
gauugaaagucagaaguug

SEQ ID NO: 643228 - RNA, 19 nt, Homo sapiens
  misc_RNA (1)...(19): siRNA sense strand
aagaaaccgugcucagaaa

SEQ ID NO: 643229 - RNA, 19 nt, Homo sapiens
  misc_RNA (1)...(19): siRNA sense strand
gauaaagcgggacuucauu

SEQ ID NO: 643230 - RNA, 19 nt, Homo sapiens
  misc_RNA (1)...(19): siRNA sense strand
cagcugauacuucaauauu

SEQ ID NO: 643231 - RNA, 19 nt, Homo sapiens
  misc_RNA (1)...(19): siRNA sense strand
gacagcugauacuucaaua

SEQ ID NO: 643232 - RNA, 19 nt, Homo sapiens
  misc_RNA (1)...(19): siRNA sense strand
augaugaccuggcagauuu

SEQ ID NO: 643233 - RNA, 19 nt, Homo sapiens
  misc_RNA (1)...(19): siRNA sense strand
uauccagacugaucccuuu

SEQ ID NO: 643234 - RNA, 19 nt, Homo sapiens
  misc_RNA (1)...(19): siRNA sense strand
gaaguaguucucaucaaga

SEQ ID NO: 643235 - RNA, 19 nt, Homo sapiens
  misc_RNA (1)...(19): siRNA sense strand
gagggcaucuccuauaaaa

SEQ ID NO: 643236 - RNA, 19 nt, Homo sapiens
  misc_RNA (1)...(19): siRNA sense strand
gagggcaucuccuauaaaa

SEQ ID NO: 643237 - RNA, 19 nt, Homo sapiens
  misc_RNA (1)...(19): siRNA sense strand
agauagaaauggcaucaga

SEQ ID NO: 643238 - RNA, 19 nt, Homo sapiens
  misc_RNA (1)...(19): siRNA sense strand
ggucuaaggcuaacaucaa

SEQ ID NO: 643239 - RNA, 19 nt, Homo sapiens
  misc_RNA (1)...(19): siRNA sense strand
aaaccgugcucagaaacua

SEQ ID NO: 643240 - RNA, 19 nt, Homo sapiens
  misc_RNA (1)...(19): siRNA sense strand
gaagcccacugccauuaag

SEQ ID NO: 643241 - RNA, 19 nt, Homo sapiens
  misc_RNA (1)...(19): siRNA sense strand
aaacacagcccacuucucu

SEQ ID NO: 643242 - RNA, 19 nt, Homo sapiens
  misc_RNA (1)...(19): siRNA sense strand
uuaaagacauggaaauugc

SEQ ID NO: 643243 - RNA, 19 nt, Homo sapiens
  misc_RNA (1)...(19): siRNA sense strand
agacugaucccuuuaagau

SEQ ID NO: 643244 - RNA, 19 nt, Homo sapiens
  misc_RNA (1)...(19): siRNA sense strand
gauacuccaucuucuaaac

SEQ ID NO: 643245 - RNA, 19 nt, Homo sapiens
  misc_RNA (1)...(19): siRNA sense strand
uggaaucacccaccaaauu

SEQ ID NO: 643246 - RNA, 19 nt, Homo sapiens
  misc_RNA (1)...(19): siRNA sense strand
caacacuccuagccaaugg

SEQ ID NO: 643247 - RNA, 19 nt, Homo sapiens
  misc_RNA (1)...(19): siRNA sense strand
ugggaucccucgauaaugu

SEQ ID NO: 643248 - RNA, 19 nt, Homo sapiens
  misc_RNA (1)...(19): siRNA sense strand
gaaaguggacaucucuaag

SEQ ID NO: 643249 - RNA, 19 nt, Homo sapiens
  misc_RNA (1)...(19): siRNA sense strand
caacuccuuucauagacaa

SEQ ID NO: 643250 - RNA, 19 nt, Homo sapiens
  misc_RNA (1)...(19): siRNA sense strand
gugacacuguugaaagaaa

SEQ ID NO: 643251 - RNA, 19 nt, Homo sapiens
  misc_RNA (1)...(19): siRNA sense strand
ggacugaagacuacugaca

SEQ ID NO: 643252 - RNA, 19 nt, Homo sapiens
  misc_RNA (1)...(19): siRNA sense strand
gaugaugaccuggcagauu

SEQ ID NO: 643253 - RNA, 19 nt, Homo sapiens
  misc_RNA (1)...(19): siRNA sense strand
ggaguagaagggagcgaua

SEQ ID NO: 643254 - RNA, 19 nt, Homo sapiens
  misc_RNA (1)...(19): siRNA sense strand
ucucuaaggucuccuccaa

SEQ ID NO: 643255 - RNA, 19 nt, Homo sapiens
  misc_RNA (1)...(19): siRNA sense strand
cuccugaucugaagaaugu

SEQ ID NO: 643256 - RNA, 19 nt, Homo sapiens
  misc_RNA (1)...(19): siRNA sense strand
cugcagaagucaagaagau

SEQ ID NO: 643257 - RNA, 19 nt, Homo sapiens
  misc_RNA (1)...(19): siRNA sense strand
gaagggagcgauacuacag

SEQ ID NO: 643258 - RNA, 19 nt, Homo sapiens
  misc_RNA (1)...(19): siRNA sense strand
ggaaaccaacgugaucuug

SEQ ID NO: 643259 - RNA, 19 nt, Homo sapiens
  misc_RNA (1)...(19): siRNA sense strand
aagguuggcuccacggaaa

SEQ ID NO: 643260 - RNA, 19 nt, Homo sapiens
  misc_RNA (1)...(19): siRNA sense strand
caagaagcccacugccauu

SEQ ID NO: 643261 - RNA, 19 nt, Homo sapiens
  misc_RNA (1)...(19): siRNA sense strand
ccacgcuccugcccaagaa

SEQ ID NO: 643262 - RNA, 19 nt, Homo sapiens
  misc_RNA (1)...(19): siRNA sense strand
cauggaaauugcacaaaca

SEQ ID NO: 643263 - RNA, 19 nt, Homo sapiens
  misc_RNA (1)...(19): siRNA sense strand
aaugaucccuugaaagaca

SEQ ID NO: 643264 - RNA, 19 nt, Homo sapiens
  misc_RNA (1)...(19): siRNA sense strand
aaggugggaucccucgaua

SEQ ID NO: 643265 - RNA, 19 nt, Homo sapiens
  misc_RNA (1)...(19): siRNA sense strand
gggaaaaccugcagaaguc

SEQ ID NO: 643266 - RNA, 19 nt, Homo sapiens
  misc_RNA (1)...(19): siRNA sense strand
ccauuaagacugagggaaa

SEQ ID NO: 643267 - RNA, 19 nt, Homo sapiens
  misc_RNA (1)...(19): siRNA sense strand
gcaacagucaaccuucuga

SEQ ID NO: 643268 - RNA, 19 nt, Homo sapiens
  misc_RNA (1)...(19): siRNA sense strand
aaagaaguggcccugguua

SEQ ID NO: 643269 - RNA, 19 nt, Homo sapiens
  misc_RNA (1)...(19): siRNA sense strand
gauagaaauggcaucagaa

SEQ ID NO: 643270 - RNA, 19 nt, Homo sapiens
  misc_RNA (1)...(19): siRNA sense strand
cugaauuccuugaagagaa

SEQ ID NO: 643271 - RNA, 19 nt, Homo sapiens
  misc_RNA (1)...(19): siRNA sense strand
gaacaagaaaguggacauc

SEQ ID NO: 643272 - RNA, 19 nt, Homo sapiens
  misc_RNA (1)...(19): siRNA sense strand
aagagcaccuccaccaguu

SEQ ID NO: 643273 - RNA, 19 nt, Homo sapiens
  misc_RNA (1)...(19): siRNA sense strand
agacauugagggagagaua

SEQ ID NO: 643274 - RNA, 19 nt, Homo sapiens
  misc_RNA (1)...(19): siRNA sense strand
aaacuagccagauugaaga

SEQ ID NO: 643275 - RNA, 19 nt, Homo sapiens
  misc_RNA (1)...(19): siRNA sense strand
ucuaaggucuccuccaagu

SEQ ID NO: 643276 - RNA, 19 nt, Homo sapiens
  misc_RNA (1)...(19): siRNA sense strand
ggacaugucuccacuauca

SEQ ID NO: 643277 - RNA, 19 nt, Homo sapiens
  misc_RNA (1)...(19): siRNA sense strand
gcacaagcauuggaaauaa

SEQ ID NO: 643278 - RNA, 19 nt, Homo sapiens
  misc_RNA (1)...(19): siRNA sense strand
ggaaucacccaccaaauua

SEQ ID NO: 643279 - RNA, 19 nt, Homo sapiens
  misc_RNA (1)...(19): siRNA sense strand
caacaccaguuccaauuaa

SEQ ID NO: 643280 - RNA, 19 nt, Homo sapiens
  misc_RNA (1)...(19): siRNA sense strand
cgaggaggauucuguguua

SEQ ID NO: 643281 - RNA, 19 nt, Homo sapiens
  misc_RNA (1)...(19): siRNA sense strand
gcaccuacuuucaugauuu

SEQ ID NO: 643282 - RNA, 19 nt, Homo sapiens
  misc_RNA (1)...(19): siRNA sense strand
ucaagaagaugacugcaaa

SEQ ID NO: 643283 - RNA, 19 nt, Homo sapiens
  misc_RNA (1)...(19): siRNA sense strand
gaagaaaccgugcucagaa

SEQ ID NO: 643284 - RNA, 19 nt, Homo sapiens
  misc_RNA (1)...(19): siRNA sense strand
caacugaauuccuugaaga

SEQ ID NO: 643285 - RNA, 19 nt, Homo sapiens
  misc_RNA (1)...(19): siRNA sense strand
gcaaagacuucaacaucga

SEQ ID NO: 643286 - RNA, 19 nt, Homo sapiens
  misc_RNA (1)...(19): siRNA sense strand
gcugauacuucaauauuug

SEQ ID NO: 643287 - RNA, 19 nt, Homo sapiens
  misc_RNA (1)...(19): siRNA sense strand
gaaauggcaucagaagaga

SEQ ID NO: 643288 - RNA, 19 nt, Homo sapiens
  misc_RNA (1)...(19): siRNA sense strand
gccagaagauaccaacuuu

SEQ ID NO: 643289 - RNA, 19 nt, Homo sapiens
  misc_RNA (1)...(19): siRNA sense strand
gaaauauccucugcugaga

SEQ ID NO: 643290 - RNA, 19 nt, Homo sapiens
  misc_RNA (1)...(19): siRNA sense strand
gcaacaccaguuccaauua

SEQ ID NO: 643291 - RNA, 19 nt, Homo sapiens
  misc_RNA (1)...(19): siRNA sense strand
ggacuucauugccacacua

SEQ ID NO: 643292 - RNA, 19 nt, Homo sapiens
  misc_RNA (1)...(19): siRNA sense strand
gaaauugcacaaacacaaa

SEQ ID NO: 643293 - RNA, 19 nt, Homo sapiens
  misc_RNA (1)...(19): siRNA sense strand
gcagaggccuuugaugaug

SEQ ID NO: 643294 - RNA, 19 nt, Homo sapiens
  misc_RNA (1)...(19): siRNA sense strand
gaaaggaaaccaugcaaca

SEQ ID NO: 643295 - RNA, 19 nt, Homo sapiens
  misc_RNA (1)...(19): siRNA sense strand
gaccaaggauaaagcacua

SEQ ID NO: 643296 - RNA, 19 nt, Homo sapiens
  misc_RNA (1)...(19): siRNA sense strand
ccacugccauuaagacuga

SEQ ID NO: 643297 - RNA, 19 nt, Homo sapiens
  misc_RNA (1)...(19): siRNA sense strand
gaaacuagccagauugaag

SEQ ID NO: 643298 - RNA, 19 nt, Homo sapiens
  misc_RNA (1)...(19): siRNA sense strand
gcacucagacuguugcaaa

SEQ ID NO: 643299 - RNA, 19 nt, Homo sapiens
  misc_RNA (1)...(19): siRNA sense strand
gaaauaaugaugggacuga

SEQ ID NO: 643300 - RNA, 19 nt, Homo sapiens
  misc_RNA (1)...(19): siRNA sense strand
ugccaggccuuccaucuua

SEQ ID NO: 643301 - RNA, 19 nt, Homo sapiens
  misc_RNA (1)...(19): siRNA sense strand
gaaaauggccuaccaggaa

SEQ ID NO: 643302 - RNA, 19 nt, Homo sapiens
  misc_RNA (1)...(19): siRNA sense strand
uggaggagaugucaagauu

SEQ ID NO: 643303 - RNA, 19 nt, Homo sapiens
  misc_RNA (1)...(19): siRNA sense strand
ccacaacuccuuucauaga

SEQ ID NO: 643304 - RNA, 19 nt, Homo sapiens
  misc_RNA (1)...(19): siRNA sense strand
ucagagaccucaggaauag

SEQ ID NO: 643305 - RNA, 19 nt, Homo sapiens
  misc_RNA (1)...(19): siRNA sense strand
uaagugaggauucccauuu

SEQ ID NO: 643306 - RNA, 19 nt, Homo sapiens
  misc_RNA (1)...(19): siRNA sense strand
ggaaauugcacaaacacaa

SEQ ID NO: 643307 - RNA, 19 nt, Homo sapiens
  misc_RNA (1)...(19): siRNA sense strand
ccaaggaugugacacuguu

SEQ ID NO: 643308 - RNA, 19 nt, Homo sapiens
  misc_RNA (1)...(19): siRNA sense strand
caaugugacuccagccaaa

SEQ ID NO: 643309 - RNA, 19 nt, Homo sapiens
  misc_RNA (1)...(19): siRNA sense strand
gaggugcugugaagacuga

SEQ ID NO: 643310 - RNA, 19 nt, Homo sapiens
  misc_RNA (1)...(19): siRNA sense strand
uagaaucucugcaggaugu

SEQ ID NO: 643311 - RNA, 19 nt, Homo sapiens
  misc_RNA (1)...(19): siRNA sense strand
gcagaugcauuaacagaac

SEQ ID NO: 643312 - RNA, 19 nt, Homo sapiens
  misc_RNA (1)...(19): siRNA sense strand
gaaaccaacgugaucuuga

SEQ ID NO: 643313 - RNA, 19 nt, Homo sapiens
  misc_RNA (1)...(19): siRNA sense strand
ugaauuccuugaagagaaa

SEQ ID NO: 643314 - RNA, 19 nt, Homo sapiens
  misc_RNA (1)...(19): siRNA sense strand
cuccacaacuccuuucaua

SEQ ID NO: 643315 - RNA, 19 nt, Homo sapiens
  misc_RNA (1)...(19): siRNA sense strand
caaaagacgugaagccaaa

SEQ ID NO: 643316 - RNA, 19 nt, Homo sapiens
  misc_RNA (1)...(19): siRNA sense strand
ccacuucucucccuaagca

SEQ ID NO: 643317 - RNA, 19 nt, Homo sapiens
  misc_RNA (1)...(19): siRNA sense strand
uaccaggaauacccaaaua

SEQ ID NO: 643318 - RNA, 19 nt, Homo sapiens
  misc_RNA (1)...(19): siRNA sense strand
ggcauuggcuaaagauaug

SEQ ID NO: 643319 - RNA, 19 nt, Homo sapiens
  misc_RNA (1)...(19): siRNA sense strand
gcagaagucaagaagauga

SEQ ID NO: 643320 - RNA, 19 nt, Homo sapiens
  misc_RNA (1)...(19): siRNA sense strand
gggagaaacuguuggaaaa

SEQ ID NO: 643321 - RNA, 19 nt, Homo sapiens
  misc_RNA (1)...(19): siRNA sense strand
caagagcacucagacuguu

SEQ ID NO: 643322 - RNA, 19 nt, Homo sapiens
  misc_RNA (1)...(19): siRNA sense strand
caaugguggucauggagua

SEQ ID NO: 643323 - RNA, 19 nt, Homo sapiens
  misc_RNA (1)...(19): siRNA sense strand
ccuuuaagauguaccauga

SEQ ID NO: 643324 - RNA, 19 nt, Homo sapiens
  misc_RNA (1)...(19): siRNA sense strand
agaaccaucuccagacauu

SEQ ID NO: 643325 - RNA, 19 nt, Homo sapiens
  misc_RNA (1)...(19): siRNA sense strand
aagugaggauucccauuua

SEQ ID NO: 643326 - RNA, 19 nt, Homo sapiens
  misc_RNA (1)...(19): siRNA sense strand
ggacauggcacuagcuaca

SEQ ID NO: 643327 - RNA, 19 nt, Homo sapiens
  misc_RNA (1)...(19): siRNA sense strand
gauugaaagucagaaguug

SEQ ID NO: 643328 - RNA, 19 nt, Homo sapiens
  misc_RNA (1)...(19): siRNA sense strand
aagaaaccgugcucagaaa

SEQ ID NO: 643329 - RNA, 19 nt, Homo sapiens
  misc_RNA (1)...(19): siRNA sense strand
gauaaagcgggacuucauu

SEQ ID NO: 643330 - RNA, 19 nt, Homo sapiens
  misc_RNA (1)...(19): siRNA sense strand
cagcugauacuucaauauu

SEQ ID NO: 643331 - RNA, 19 nt, Homo sapiens
  misc_RNA (1)...(19): siRNA sense strand
gacagcugauacuucaaua

SEQ ID NO: 643332 - RNA, 19 nt, Homo sapiens
  misc_RNA (1)...(19): siRNA sense strand
augaugaccuggcagauuu

SEQ ID NO: 643333 - RNA, 19 nt, Homo sapiens
  misc_RNA (1)...(19): siRNA sense strand
uauccagacugaucccuuu

SEQ ID NO: 643334 - RNA, 19 nt, Homo sapiens
  misc_RNA (1)...(19): siRNA sense strand
gaaguaguucucaucaaga

SEQ ID NO: 643335 - RNA, 19 nt, Homo sapiens
  misc_RNA (1)...(19): siRNA sense strand
gagggcaucuccuauaaaa

SEQ ID NO: 643336 - RNA, 19 nt, Homo sapiens
  misc_RNA (1)...(19): siRNA sense strand
gagggcaucuccuauaaaa

SEQ ID NO: 643337 - RNA, 19 nt, Homo sapiens
  misc_RNA (1)...(19): siRNA sense strand
agauagaaauggcaucaga

SEQ ID NO: 643338 - RNA, 19 nt, Homo sapiens
  misc_RNA (1)...(19): siRNA sense strand
ggucuaaggcuaacaucaa

SEQ ID NO: 643339 - RNA, 19 nt, Homo sapiens
  misc_RNA (1)...(19): siRNA sense strand
aaaccgugcucagaaacua

SEQ ID NO: 643340 - RNA, 19 nt, Homo sapiens
  misc_RNA (1)...(19): siRNA sense strand
gaagcccacugccauuaag

SEQ ID NO: 643341 - RNA, 19 nt, Homo sapiens
  misc_RNA (1)...(19): siRNA sense strand
aaacacagcccacuucucu

SEQ ID NO: 643342 - RNA, 19 nt, Homo sapiens
  misc_RNA (1)...(19): siRNA sense strand
uuaaagacauggaaauugc

SEQ ID NO: 643343 - RNA, 19 nt, Homo sapiens
  misc_RNA (1)...(19): siRNA sense strand
agacugaucccuuuaagau

SEQ ID NO: 643344 - RNA, 19 nt, Homo sapiens
  misc_RNA (1)...(19): siRNA sense strand
gauacuccaucuucuaaac

SEQ ID NO: 643345 - RNA, 19 nt, Homo sapiens
  misc_RNA (1)...(19): siRNA sense strand
uggaaucacccaccaaauu

SEQ ID NO: 643346 - RNA, 19 nt, Homo sapiens
  misc_RNA (1)...(19): siRNA sense strand
caacacuccuagccaaugg

SEQ ID NO: 643347 - RNA, 19 nt, Homo sapiens
  misc_RNA (1)...(19): siRNA sense strand
ugggaucccucgauaaugu

SEQ ID NO: 643348 - RNA, 19 nt, Homo sapiens
  misc_RNA (1)...(19): siRNA sense strand
gaaaguggacaucucuaag

SEQ ID NO: 643349 - RNA, 19 nt, Homo sapiens
  misc_RNA (1)...(19): siRNA sense strand
caacuccuuucauagacaa

SEQ ID NO: 643350 - RNA, 19 nt, Homo sapiens
  misc_RNA (1)...(19): siRNA sense strand
gugacacuguugaaagaaa

SEQ ID NO: 643351 - RNA, 19 nt, Homo sapiens
  misc_RNA (1)...(19): siRNA sense strand
ggacugaagacuacugaca

SEQ ID NO: 643352 - RNA, 19 nt, Homo sapiens
  misc_RNA (1)...(19): siRNA sense strand
gaugaugaccuggcagauu

SEQ ID NO: 643353 - RNA, 19 nt, Homo sapiens
  misc_RNA (1)...(19): siRNA sense strand
ggaguagaagggagcgaua

SEQ ID NO: 643354 - RNA, 19 nt, Homo sapiens
  misc_RNA (1)...(19): siRNA sense strand
ucucuaaggucuccuccaa

SEQ ID NO: 643355 - RNA, 19 nt, Homo sapiens
  misc_RNA (1)...(19): siRNA sense strand
cuccugaucugaagaaugu

SEQ ID NO: 643356 - RNA, 19 nt, Homo sapiens
  misc_RNA (1)...(19): siRNA sense strand
cugcagaagucaagaagau

SEQ ID NO: 643357 - RNA, 19 nt, Homo sapiens
  misc_RNA (1)...(19): siRNA sense strand
gaagggagcgauacuacag

SEQ ID NO: 643358 - RNA, 19 nt, Homo sapiens
  misc_RNA (1)...(19): siRNA sense strand
ggaaaccaacgugaucuug

SEQ ID NO: 643359 - RNA, 19 nt, Homo sapiens
  misc_RNA (1)...(19): siRNA sense strand
aagguuggcuccacggaaa

SEQ ID NO: 643360 - RNA, 19 nt, Homo sapiens
  misc_RNA (1)...(19): siRNA sense strand
caagaagcccacugccauu

SEQ ID NO: 643361 - RNA, 19 nt, Homo sapiens
  misc_RNA (1)...(19): siRNA sense strand
ccacgcuccugcccaagaa

SEQ ID NO: 643362 - RNA, 19 nt, Homo sapiens
  misc_RNA (1)...(19): siRNA sense strand
cauggaaauugcacaaaca

SEQ ID NO: 643363 - RNA, 19 nt, Homo sapiens
  misc_RNA (1)...(19): siRNA sense strand
aaugaucccuugaaagaca

SEQ ID NO: 643364 - RNA, 19 nt, Homo sapiens
  misc_RNA (1)...(19): siRNA sense strand
aaggugggaucccucgaua

SEQ ID NO: 643365 - RNA, 19 nt, Homo sapiens
  misc_RNA (1)...(19): siRNA sense strand
gggaaaaccugcagaaguc

SEQ ID NO: 643366 - RNA, 19 nt, Homo sapiens
  misc_RNA (1)...(19): siRNA sense strand
ccauuaagacugagggaaa

SEQ ID NO: 643367 - RNA, 19 nt, Homo sapiens
  misc_RNA (1)...(19): siRNA sense strand
gcaacagucaaccuucuga

SEQ ID NO: 643368 - RNA, 19 nt, Homo sapiens
  misc_RNA (1)...(19): siRNA sense strand
aaagaaguggcccugguua

SEQ ID NO: 643369 - RNA, 19 nt, Homo sapiens
  misc_RNA (1)...(19): siRNA sense strand
gauagaaauggcaucagaa

SEQ ID NO: 643370 - RNA, 19 nt, Homo sapiens
  misc_RNA (1)...(19): siRNA sense strand
cugaauuccuugaagagaa

SEQ ID NO: 643371 - RNA, 19 nt, Homo sapiens
  misc_RNA (1)...(19): siRNA sense strand
gaacaagaaaguggacauc

SEQ ID NO: 643372 - RNA, 19 nt, Homo sapiens
  misc_RNA (1)...(19): siRNA sense strand
aagagcaccuccaccaguu

SEQ ID NO: 643373 - RNA, 19 nt, Homo sapiens
  misc_RNA (1)...(19): siRNA sense strand
agacauugagggagagaua

SEQ ID NO: 643374 - RNA, 19 nt, Homo sapiens
  misc_RNA (1)...(19): siRNA sense strand
aaacuagccagauugaaga

SEQ ID NO: 643375 - RNA, 19 nt, Homo sapiens
  misc_RNA (1)...(19): siRNA sense strand
ucuaaggucuccuccaagu

SEQ ID NO: 643376 - RNA, 19 nt, Homo sapiens
  misc_RNA (1)...(19): siRNA sense strand
ggacaugucuccacuauca

SEQ ID NO: 643377 - RNA, 19 nt, Homo sapiens
  misc_RNA (1)...(19): siRNA sense strand
gcacaagcauuggaaauaa

SEQ ID NO: 643378 - RNA, 19 nt, Homo sapiens
  misc_RNA (1)...(19): siRNA sense strand
ggaaucacccaccaaauua

SEQ ID NO: 643379 - RNA, 19 nt, Homo sapiens
  misc_RNA (1)...(19): siRNA sense strand
caacaccaguuccaauuaa

SEQ ID NO: 643380 - RNA, 19 nt, Homo sapiens
  misc_RNA (1)...(19): siRNA sense strand
cgaggaggauucuguguua

SEQ ID NO: 643381 - RNA, 19 nt, Homo sapiens
  misc_RNA (1)...(19): siRNA sense strand
gcaccuacuuucaugauuu

SEQ ID NO: 643382 - RNA, 19 nt, Homo sapiens
  misc_RNA (1)...(19): siRNA sense strand
ucaagaagaugacugcaaa

SEQ ID NO: 643383 - RNA, 19 nt, Homo sapiens
  misc_RNA (1)...(19): siRNA sense strand
gaagaaaccgugcucagaa

SEQ ID NO: 643384 - RNA, 19 nt, Homo sapiens
  misc_RNA (1)...(19): siRNA sense strand
caacugaauuccuugaaga

SEQ ID NO: 643385 - RNA, 19 nt, Homo sapiens
  misc_RNA (1)...(19): siRNA sense strand
gcaaagacuucaacaucga

SEQ ID NO: 643386 - RNA, 19 nt, Homo sapiens
  misc_RNA (1)...(19): siRNA sense strand
gcugauacuucaauauuug

SEQ ID NO: 643387 - RNA, 19 nt, Homo sapiens
  misc_RNA (1)...(19): siRNA sense strand
gaaauggcaucagaagaga

SEQ ID NO: 643388 - RNA, 19 nt, Homo sapiens
  misc_RNA (1)...(19): siRNA sense strand
gccagaagauaccaacuuu

SEQ ID NO: 643389 - RNA, 19 nt, Homo sapiens
  misc_RNA (1)...(19): siRNA sense strand
gaaauauccucugcugaga

SEQ ID NO: 643390 - RNA, 19 nt, Homo sapiens
  misc_RNA (1)...(19): siRNA sense strand
gcaacaccaguuccaauua

SEQ ID NO: 643391 - RNA, 19 nt, Homo sapiens
  misc_RNA (1)...(19): siRNA sense strand
ggacuucauugccacacua

SEQ ID NO: 643392 - RNA, 19 nt, Homo sapiens
  misc_RNA (1)...(19): siRNA sense strand
gaaauugcacaaacacaaa

SEQ ID NO: 643393 - RNA, 19 nt, Homo sapiens
  misc_RNA (1)...(19): siRNA sense strand
gcagaggccuuugaugaug

SEQ ID NO: 643394 - RNA, 19 nt, Homo sapiens
  misc_RNA (1)...(19): siRNA sense strand
gaaaggaaaccaugcaaca

SEQ ID NO: 643395 - RNA, 19 nt, Homo sapiens
  misc_RNA (1)...(19): siRNA sense strand
gaccaaggauaaagcacua

SEQ ID NO: 643396 - RNA, 19 nt, Homo sapiens
  misc_RNA (1)...(19): siRNA sense strand
ccacugccauuaagacuga

SEQ ID NO: 643397 - RNA, 19 nt, Homo sapiens
  misc_RNA (1)...(19): siRNA sense strand
gaaacuagccagauugaag

SEQ ID NO: 643398 - RNA, 19 nt, Homo sapiens
  misc_RNA (1)...(19): siRNA sense strand
gcacucagacuguugcaaa

SEQ ID NO: 643399 - RNA, 19 nt, Homo sapiens
  misc_RNA (1)...(19): siRNA sense strand
gaaauaaugaugggacuga

SEQ ID NO: 643400 - RNA, 19 nt, Homo sapiens
  misc_RNA (1)...(19): siRNA sense strand
ugccaggccuuccaucuua

SEQ ID NO: 643401 - RNA, 19 nt, Homo sapiens
  misc_RNA (1)...(19): siRNA sense strand
gaaaauggccuaccaggaa

SEQ ID NO: 643402 - RNA, 19 nt, Homo sapiens
  misc_RNA (1)...(19): siRNA sense strand
uggaggagaugucaagauu

SEQ ID NO: 643403 - RNA, 19 nt, Homo sapiens
  misc_RNA (1)...(19): siRNA sense strand
ccacaacuccuuucauaga

SEQ ID NO: 643404 - RNA, 19 nt, Homo sapiens
  misc_RNA (1)...(19): siRNA sense strand
ucagagaccucaggaauag

SEQ ID NO: 643405 - RNA, 19 nt, Homo sapiens
  misc_RNA (1)...(19): siRNA sense strand
uaagugaggauucccauuu

SEQ ID NO: 643406 - RNA, 19 nt, Homo sapiens
  misc_RNA (1)...(19): siRNA sense strand
ggaaauugcacaaacacaa

SEQ ID NO: 643407 - RNA, 19 nt, Homo sapiens
  misc_RNA (1)...(19): siRNA sense strand
ccaaggaugugacacuguu

SEQ ID NO: 643408 - RNA, 19 nt, Homo sapiens
  misc_RNA (1)...(19): siRNA sense strand
caaugugacuccagccaaa

SEQ ID NO: 643409 - RNA, 19 nt, Homo sapiens
  misc_RNA (1)...(19): siRNA sense strand
gaggugcugugaagacuga

SEQ ID NO: 643410 - RNA, 19 nt, Homo sapiens
  misc_RNA (1)...(19): siRNA sense strand
uagaaucucugcaggaugu

SEQ ID NO: 643411 - RNA, 19 nt, Homo sapiens
  misc_RNA (1)...(19): siRNA sense strand
gcagaugcauuaacagaac

SEQ ID NO: 643412 - RNA, 19 nt, Homo sapiens
  misc_RNA (1)...(19): siRNA sense strand
gaaaccaacgugaucuuga

SEQ ID NO: 643413 - RNA, 19 nt, Homo sapiens
  misc_RNA (1)...(19): siRNA sense strand
ugaauuccuugaagagaaa

SEQ ID NO: 643414 - RNA, 19 nt, Homo sapiens
  misc_RNA (1)...(19): siRNA sense strand
cuccacaacuccuuucaua

SEQ ID NO: 643415 - RNA, 19 nt, Homo sapiens
  misc_RNA (1)...(19): siRNA sense strand
caaaagacgugaagccaaa

SEQ ID NO: 643416 - RNA, 19 nt, Homo sapiens
  misc_RNA (1)...(19): siRNA sense strand
ccacuucucucccuaagca

SEQ ID NO: 643417 - RNA, 19 nt, Homo sapiens
  misc_RNA (1)...(19): siRNA sense strand
uaccaggaauacccaaaua

SEQ ID NO: 643418 - RNA, 19 nt, Homo sapiens
  misc_RNA (1)...(19): siRNA sense strand
ggcauuggcuaaagauaug

SEQ ID NO: 643419 - RNA, 19 nt, Homo sapiens
  misc_RNA (1)...(19): siRNA sense strand
gcagaagucaagaagauga

SEQ ID NO: 643420 - RNA, 19 nt, Homo sapiens
  misc_RNA (1)...(19): siRNA sense strand
gggagaaacuguuggaaaa

SEQ ID NO: 643421 - RNA, 19 nt, Homo sapiens
  misc_RNA (1)...(19): siRNA sense strand
caagagcacucagacuguu

SEQ ID NO: 643422 - RNA, 19 nt, Homo sapiens
  misc_RNA (1)...(19): siRNA sense strand
caaugguggucauggagua

SEQ ID NO: 643423 - RNA, 19 nt, Homo sapiens
  misc_RNA (1)...(19): siRNA sense strand
ccuuuaagauguaccauga

SEQ ID NO: 643424 - RNA, 19 nt, Homo sapiens
  misc_RNA (1)...(19): siRNA sense strand
agaaccaucuccagacauu

SEQ ID NO: 643425 - RNA, 19 nt, Homo sapiens
  misc_RNA (1)...(19): siRNA sense strand
aagugaggauucccauuua

SEQ ID NO: 643426 - RNA, 19 nt, Homo sapiens
  misc_RNA (1)...(19): siRNA sense strand
ggacauggcacuagcuaca

SEQ ID NO: 643427 - RNA, 19 nt, Homo sapiens
  misc_RNA (1)...(19): siRNA sense strand
gauugaaagucagaaguug

SEQ ID NO: 643428 - RNA, 19 nt, Homo sapiens
  misc_RNA (1)...(19): siRNA sense strand
aagaaaccgugcucagaaa

SEQ ID NO: 643429 - RNA, 19 nt, Homo sapiens
  misc_RNA (1)...(19): siRNA sense strand
gauaaagcgggacuucauu

SEQ ID NO: 643430 - RNA, 19 nt, Homo sapiens
  misc_RNA (1)...(19): siRNA sense strand
cagcugauacuucaauauu

SEQ ID NO: 643431 - RNA, 19 nt, Homo sapiens
  misc_RNA (1)...(19): siRNA sense strand
gacagcugauacuucaaua

SEQ ID NO: 643432 - RNA, 19 nt, Homo sapiens
  misc_RNA (1)...(19): siRNA sense strand
augaugaccuggcagauuu

SEQ ID NO: 643433 - RNA, 19 nt, Homo sapiens
  misc_RNA (1)...(19): siRNA sense strand
uauccagacugaucccuuu

SEQ ID NO: 643434 - RNA, 19 nt, Homo sapiens
  misc_RNA (1)...(19): siRNA sense strand
gaaguaguucucaucaaga

SEQ ID NO: 643435 - RNA, 19 nt, Homo sapiens
  misc_RNA (1)...(19): siRNA sense strand
gagggcaucuccuauaaaa

SEQ ID NO: 643436 - RNA, 19 nt, Homo sapiens
  misc_RNA (1)...(19): siRNA sense strand
gagggcaucuccuauaaaa

SEQ ID NO: 643437 - RNA, 19 nt, Homo sapiens
  misc_RNA (1)...(19): siRNA sense strand
agauagaaauggcaucaga

SEQ ID NO: 643438 - RNA, 19 nt, Homo sapiens
  misc_RNA (1)...(19): siRNA sense strand
ggucuaaggcuaacaucaa

SEQ ID NO: 643439 - RNA, 19 nt, Homo sapiens
  misc_RNA (1)...(19): siRNA sense strand
aaaccgugcucagaaacua

SEQ ID NO: 643440 - RNA, 19 nt, Homo sapiens
  misc_RNA (1)...(19): siRNA sense strand
gaagcccacugccauuaag

SEQ ID NO: 643441 - RNA, 19 nt, Homo sapiens
  misc_RNA (1)...(19): siRNA sense strand
aaacacagcccacuucucu

SEQ ID NO: 643442 - RNA, 19 nt, Homo sapiens
  misc_RNA (1)...(19): siRNA sense strand
uuaaagacauggaaauugc

SEQ ID NO: 643443 - RNA, 19 nt, Homo sapiens
  misc_RNA (1)...(19): siRNA sense strand
agacugaucccuuuaagau

SEQ ID NO: 643444 - RNA, 19 nt, Homo sapiens
  misc_RNA (1)...(19): siRNA sense strand
gauacuccaucuucuaaac

SEQ ID NO: 643445 - RNA, 19 nt, Homo sapiens
  misc_RNA (1)...(19): siRNA sense strand
uggaaucacccaccaaauu

SEQ ID NO: 643446 - RNA, 19 nt, Homo sapiens
  misc_RNA (1)...(19): siRNA sense strand
caacacuccuagccaaugg

SEQ ID NO: 643447 - RNA, 19 nt, Homo sapiens
  misc_RNA (1)...(19): siRNA sense strand
ugggaucccucgauaaugu

SEQ ID NO: 643448 - RNA, 19 nt, Homo sapiens
  misc_RNA (1)...(19): siRNA sense strand
gaaaguggacaucucuaag

SEQ ID NO: 643449 - RNA, 19 nt, Homo sapiens
  misc_RNA (1)...(19): siRNA sense strand
caacuccuuucauagacaa

SEQ ID NO: 643450 - RNA, 19 nt, Homo sapiens
  misc_RNA (1)...(19): siRNA sense strand
gugacacuguugaaagaaa

SEQ ID NO: 643451 - RNA, 19 nt, Homo sapiens
  misc_RNA (1)...(19): siRNA sense strand
ggacugaagacuacugaca

SEQ ID NO: 643452 - RNA, 19 nt, Homo sapiens
  misc_RNA (1)...(19): siRNA sense strand
gaugaugaccuggcagauu

SEQ ID NO: 643453 - RNA, 19 nt, Homo sapiens
  misc_RNA (1)...(19): siRNA sense strand
ggaguagaagggagcgaua

SEQ ID NO: 643454 - RNA, 19 nt, Homo sapiens
  misc_RNA (1)...(19): siRNA sense strand
ucucuaaggucuccuccaa

SEQ ID NO: 643455 - RNA, 19 nt, Homo sapiens
  misc_RNA (1)...(19): siRNA sense strand
cuccugaucugaagaaugu

SEQ ID NO: 643456 - RNA, 19 nt, Homo sapiens
  misc_RNA (1)...(19): siRNA sense strand
cugcagaagucaagaagau

SEQ ID NO: 643457 - RNA, 19 nt, Homo sapiens
  misc_RNA (1)...(19): siRNA sense strand
gaagggagcgauacuacag

SEQ ID NO: 643458 - RNA, 19 nt, Homo sapiens
  misc_RNA (1)...(19): siRNA sense strand
ggaaaccaacgugaucuug

SEQ ID NO: 643459 - RNA, 19 nt, Homo sapiens
  misc_RNA (1)...(19): siRNA sense strand
aagguuggcuccacggaaa

SEQ ID NO: 643460 - RNA, 19 nt, Homo sapiens
  misc_RNA (1)...(19): siRNA sense strand
caagaagcccacugccauu

SEQ ID NO: 643461 - RNA, 19 nt, Homo sapiens
  misc_RNA (1)...(19): siRNA sense strand
ccacgcuccugcccaagaa

SEQ ID NO: 643462 - RNA, 19 nt, Homo sapiens
  misc_RNA (1)...(19): siRNA sense strand
cauggaaauugcacaaaca

SEQ ID NO: 643463 - RNA, 19 nt, Homo sapiens
  misc_RNA (1)...(19): siRNA sense strand
aaugaucccuugaaagaca

SEQ ID NO: 643464 - RNA, 19 nt, Homo sapiens
  misc_RNA (1)...(19): siRNA sense strand
aaggugggaucccucgaua

SEQ ID NO: 643465 - RNA, 19 nt, Homo sapiens
  misc_RNA (1)...(19): siRNA sense strand
gggaaaaccugcagaaguc

SEQ ID NO: 643466 - RNA, 19 nt, Homo sapiens
  misc_RNA (1)...(19): siRNA sense strand
ccauuaagacugagggaaa

SEQ ID NO: 643467 - RNA, 19 nt, Homo sapiens
  misc_RNA (1)...(19): siRNA sense strand
gcaacagucaaccuucuga

SEQ ID NO: 643468 - RNA, 19 nt, Homo sapiens
  misc_RNA (1)...(19): siRNA sense strand
aaagaaguggcccugguua

SEQ ID NO: 643469 - RNA, 19 nt, Homo sapiens
  misc_RNA (1)...(19): siRNA sense strand
gauagaaauggcaucagaa

SEQ ID NO: 643470 - RNA, 19 nt, Homo sapiens
  misc_RNA (1)...(19): siRNA sense strand
cugaauuccuugaagagaa

SEQ ID NO: 643471 - RNA, 19 nt, Homo sapiens
  misc_RNA (1)...(19): siRNA sense strand
gaacaagaaaguggacauc

SEQ ID NO: 643472 - RNA, 19 nt, Homo sapiens
  misc_RNA (1)...(19): siRNA sense strand
aagagcaccuccaccaguu

SEQ ID NO: 643473 - RNA, 19 nt, Homo sapiens
  misc_RNA (1)...(19): siRNA sense strand
agacauugagggagagaua

SEQ ID NO: 643474 - RNA, 19 nt, Homo sapiens
  misc_RNA (1)...(19): siRNA sense strand
aaacuagccagauugaaga

SEQ ID NO: 643475 - RNA, 19 nt, Homo sapiens
  misc_RNA (1)...(19): siRNA sense strand
ucuaaggucuccuccaagu

SEQ ID NO: 643476 - RNA, 19 nt, Homo sapiens
  misc_RNA (1)...(19): siRNA sense strand
ggacaugucuccacuauca

SEQ ID NO: 643477 - RNA, 19 nt, Homo sapiens
  misc_RNA (1)...(19): siRNA sense strand
gcacaagcauuggaaauaa

SEQ ID NO: 643478 - RNA, 19 nt, Homo sapiens
  misc_RNA (1)...(19): siRNA sense strand
ggaaucacccaccaaauua

SEQ ID NO: 643479 - RNA, 19 nt, Homo sapiens
  misc_RNA (1)...(19): siRNA sense strand
caacaccaguuccaauuaa

SEQ ID NO: 643480 - RNA, 19 nt, Homo sapiens
  misc_RNA (1)...(19): siRNA sense strand
cgaggaggauucuguguua

SEQ ID NO: 643481 - RNA, 19 nt, Homo sapiens
  misc_RNA (1)...(19): siRNA sense strand
gcaccuacuuucaugauuu

SEQ ID NO: 643482 - RNA, 19 nt, Homo sapiens
  misc_RNA (1)...(19): siRNA sense strand
ucaagaagaugacugcaaa

SEQ ID NO: 643483 - RNA, 19 nt, Homo sapiens
  misc_RNA (1)...(19): siRNA sense strand
gaagaaaccgugcucagaa

SEQ ID NO: 643484 - RNA, 19 nt, Homo sapiens
  misc_RNA (1)...(19): siRNA sense strand
caacugaauuccuugaaga

SEQ ID NO: 643485 - RNA, 19 nt, Homo sapiens
  misc_RNA (1)...(19): siRNA sense strand
gcaaagacuucaacaucga

SEQ ID NO: 643486 - RNA, 19 nt, Homo sapiens
  misc_RNA (1)...(19): siRNA sense strand
gcugauacuucaauauuug

SEQ ID NO: 643487 - RNA, 19 nt, Homo sapiens
  misc_RNA (1)...(19): siRNA sense strand
gaaauggcaucagaagaga

SEQ ID NO: 643488 - RNA, 19 nt, Homo sapiens
  misc_RNA (1)...(19): siRNA sense strand
gccagaagauaccaacuuu

SEQ ID NO: 643489 - RNA, 19 nt, Homo sapiens
  misc_RNA (1)...(19): siRNA sense strand
gaaauauccucugcugaga

SEQ ID NO: 643490 - RNA, 19 nt, Homo sapiens
  misc_RNA (1)...(19): siRNA sense strand
gcaacaccaguuccaauua

SEQ ID NO: 643491 - RNA, 19 nt, Homo sapiens
  misc_RNA (1)...(19): siRNA sense strand
ggacuucauugccacacua

SEQ ID NO: 643492 - RNA, 19 nt, Homo sapiens
  misc_RNA (1)...(19): siRNA sense strand
gaaauugcacaaacacaaa

SEQ ID NO: 643493 - RNA, 19 nt, Homo sapiens
  misc_RNA (1)...(19): siRNA sense strand
gcagaggccuuugaugaug

SEQ ID NO: 643494 - RNA, 19 nt, Homo sapiens
  misc_RNA (1)...(19): siRNA sense strand
gaaaggaaaccaugcaaca

SEQ ID NO: 643495 - RNA, 19 nt, Homo sapiens
  misc_RNA (1)...(19): siRNA sense strand
gaccaaggauaaagcacua

SEQ ID NO: 643496 - RNA, 19 nt, Homo sapiens
  misc_RNA (1)...(19): siRNA sense strand
ccacugccauuaagacuga

SEQ ID NO: 643497 - RNA, 19 nt, Homo sapiens
  misc_RNA (1)...(19): siRNA sense strand
gaaacuagccagauugaag

SEQ ID NO: 643498 - RNA, 19 nt, Homo sapiens
  misc_RNA (1)...(19): siRNA sense strand
gcacucagacuguugcaaa

SEQ ID NO: 643499 - RNA, 19 nt, Homo sapiens
  misc_RNA (1)...(19): siRNA sense strand
gaaauaaugaugggacuga

SEQ ID NO: 643500 - RNA, 19 nt, Homo sapiens
  misc_RNA (1)...(19): siRNA sense strand
ugccaggccuuccaucuua

SEQ ID NO: 643501 - RNA, 19 nt, Homo sapiens
  misc_RNA (1)...(19): siRNA sense strand
gaaaauggccuaccaggaa

SEQ ID NO: 643502 - RNA, 19 nt, Homo sapiens
  misc_RNA (1)...(19): siRNA sense strand
uggaggagaugucaagauu

SEQ ID NO: 643503 - RNA, 19 nt, Homo sapiens
  misc_RNA (1)...(19): siRNA sense strand
ccacaacuccuuucauaga

SEQ ID NO: 643504 - RNA, 19 nt, Homo sapiens
  misc_RNA (1)...(19): siRNA sense strand
ucagagaccucaggaauag

SEQ ID NO: 643505 - RNA, 19 nt, Homo sapiens
  misc_RNA (1)...(19): siRNA sense strand
uaagugaggauucccauuu

SEQ ID NO: 643506 - RNA, 19 nt, Homo sapiens
  misc_RNA (1)...(19): siRNA sense strand
ggaaauugcacaaacacaa

SEQ ID NO: 643507 - RNA, 19 nt, Homo sapiens
  misc_RNA (1)...(19): siRNA sense strand
ccaaggaugugacacuguu

SEQ ID NO: 643508 - RNA, 19 nt, Homo sapiens
  misc_RNA (1)...(19): siRNA sense strand
caaugugacuccagccaaa

SEQ ID NO: 643509 - RNA, 19 nt, Homo sapiens
  misc_RNA (1)...(19): siRNA sense strand
gaggugcugugaagacuga

SEQ ID NO: 643510 - RNA, 19 nt, Homo sapiens
  misc_RNA (1)...(19): siRNA sense strand
uagaaucucugcaggaugu

SEQ ID NO: 643511 - RNA, 19 nt, Homo sapiens
  misc_RNA (1)...(19): siRNA sense strand
gcagaugcauuaacagaac

SEQ ID NO: 643512 - RNA, 19 nt, Homo sapiens
  misc_RNA (1)...(19): siRNA sense strand
gaaaccaacgugaucuuga

SEQ ID NO: 643513 - RNA, 19 nt, Homo sapiens
  misc_RNA (1)...(19): siRNA sense strand
ugaauuccuugaagagaaa

SEQ ID NO: 643514 - RNA, 19 nt, Homo sapiens
  misc_RNA (1)...(19): siRNA sense strand
cuccacaacuccuuucaua

SEQ ID NO: 643515 - RNA, 19 nt, Homo sapiens
  misc_RNA (1)...(19): siRNA sense strand
caaaagacgugaagccaaa

SEQ ID NO: 643516 - RNA, 19 nt, Homo sapiens
  misc_RNA (1)...(19): siRNA sense strand
ccacuucucucccuaagca

SEQ ID NO: 643517 - RNA, 19 nt, Homo sapiens
  misc_RNA (1)...(19): siRNA sense strand
uaccaggaauacccaaaua

SEQ ID NO: 643518 - RNA, 19 nt, Homo sapiens
  misc_RNA (1)...(19): siRNA sense strand
ggcauuggcuaaagauaug

SEQ ID NO: 643519 - RNA, 19 nt, Homo sapiens
  misc_RNA (1)...(19): siRNA sense strand
gcagaagucaagaagauga

SEQ ID NO: 643520 - RNA, 19 nt, Homo sapiens
  misc_RNA (1)...(19): siRNA sense strand
gggagaaacuguuggaaaa

SEQ ID NO: 643521 - RNA, 19 nt, Homo sapiens
  misc_RNA (1)...(19): siRNA sense strand
caagagcacucagacuguu

SEQ ID NO: 643522 - RNA, 19 nt, Homo sapiens
  misc_RNA (1)...(19): siRNA sense strand
caaugguggucauggagua

SEQ ID NO: 643523 - RNA, 19 nt, Homo sapiens
  misc_RNA (1)...(19): siRNA sense strand
ccuuuaagauguaccauga

SEQ ID NO: 643524 - RNA, 19 nt, Homo sapiens
  misc_RNA (1)...(19): siRNA sense strand
agaaccaucuccagacauu

SEQ ID NO: 643525 - RNA, 19 nt, Homo sapiens
  misc_RNA (1)...(19): siRNA sense strand
aagugaggauucccauuua

SEQ ID NO: 643526 - RNA, 19 nt, Homo sapiens
  misc_RNA (1)...(19): siRNA sense strand
ggacauggcacuagcuaca

SEQ ID NO: 643527 - RNA, 19 nt, Homo sapiens
  misc_RNA (1)...(19): siRNA sense strand
gauugaaagucagaaguug

SEQ ID NO: 643528 - RNA, 19 nt, Homo sapiens
  misc_RNA (1)...(19): siRNA sense strand
aagaaaccgugcucagaaa

SEQ ID NO: 643529 - RNA, 19 nt, Homo sapiens
  misc_RNA (1)...(19): siRNA sense strand
gauaaagcgggacuucauu

SEQ ID NO: 643530 - RNA, 19 nt, Homo sapiens
  misc_RNA (1)...(19): siRNA sense strand
cagcugauacuucaauauu

SEQ ID NO: 643531 - RNA, 19 nt, Homo sapiens
  misc_RNA (1)...(19): siRNA sense strand
gacagcugauacuucaaua

SEQ ID NO: 643532 - RNA, 19 nt, Homo sapiens
  misc_RNA (1)...(19): siRNA sense strand
augaugaccuggcagauuu

SEQ ID NO: 643533 - RNA, 19 nt, Homo sapiens
  misc_RNA (1)...(19): siRNA sense strand
uauccagacugaucccuuu

SEQ ID NO: 643534 - RNA, 19 nt, Homo sapiens
  misc_RNA (1)...(19): siRNA sense strand
gaaguaguucucaucaaga

SEQ ID NO: 643535 - RNA, 19 nt, Homo sapiens
  misc_RNA (1)...(19): siRNA sense strand
gagggcaucuccuauaaaa

SEQ ID NO: 643536 - RNA, 19 nt, Homo sapiens
  misc_RNA (1)...(19): siRNA sense strand
gagggcaucuccuauaaaa

SEQ ID NO: 643537 - RNA, 19 nt, Homo sapiens
  misc_RNA (1)...(19): siRNA sense strand
agauagaaauggcaucaga

SEQ ID NO: 643538 - RNA, 19 nt, Homo sapiens
  misc_RNA (1)...(19): siRNA sense strand
ggucuaaggcuaacaucaa

SEQ ID NO: 643539 - RNA, 19 nt, Homo sapiens
  misc_RNA (1)...(19): siRNA sense strand
aaaccgugcucagaaacua

SEQ ID NO: 643540 - RNA, 19 nt, Homo sapiens
  misc_RNA (1)...(19): siRNA sense strand
gaagcccacugccauuaag

SEQ ID NO: 643541 - RNA, 19 nt, Homo sapiens
  misc_RNA (1)...(19): siRNA sense strand
aaacacagcccacuucucu

SEQ ID NO: 643542 - RNA, 19 nt, Homo sapiens
  misc_RNA (1)...(19): siRNA sense strand
uuaaagacauggaaauugc

SEQ ID NO: 643543 - RNA, 19 nt, Homo sapiens
  misc_RNA (1)...(19): siRNA sense strand
agacugaucccuuuaagau

SEQ ID NO: 643544 - RNA, 19 nt, Homo sapiens
  misc_RNA (1)...(19): siRNA sense strand
gauacuccaucuucuaaac

SEQ ID NO: 643545 - RNA, 19 nt, Homo sapiens
  misc_RNA (1)...(19): siRNA sense strand
uggaaucacccaccaaauu

SEQ ID NO: 643546 - RNA, 19 nt, Homo sapiens
  misc_RNA (1)...(19): siRNA sense strand
caacacuccuagccaaugg

SEQ ID NO: 643547 - RNA, 19 nt, Homo sapiens
  misc_RNA (1)...(19): siRNA sense strand
ugggaucccucgauaaugu

SEQ ID NO: 643548 - RNA, 19 nt, Homo sapiens
  misc_RNA (1)...(19): siRNA sense strand
gaaaguggacaucucuaag

SEQ ID NO: 643549 - RNA, 19 nt, Homo sapiens
  misc_RNA (1)...(19): siRNA sense strand
caacuccuuucauagacaa

SEQ ID NO: 643550 - RNA, 19 nt, Homo sapiens
  misc_RNA (1)...(19): siRNA sense strand
gugacacuguugaaagaaa

SEQ ID NO: 643551 - RNA, 19 nt, Homo sapiens
  misc_RNA (1)...(19): siRNA sense strand
ggacugaagacuacugaca

SEQ ID NO: 643552 - RNA, 19 nt, Homo sapiens
  misc_RNA (1)...(19): siRNA sense strand
gaugaugaccuggcagauu

SEQ ID NO: 643553 - RNA, 19 nt, Homo sapiens
  misc_RNA (1)...(19): siRNA sense strand
ggaguagaagggagcgaua

SEQ ID NO: 643554 - RNA, 19 nt, Homo sapiens
  misc_RNA (1)...(19): siRNA sense strand
ucucuaaggucuccuccaa

SEQ ID NO: 643555 - RNA, 19 nt, Homo sapiens
  misc_RNA (1)...(19): siRNA sense strand
cuccugaucugaagaaugu

SEQ ID NO: 643556 - RNA, 19 nt, Homo sapiens
  misc_RNA (1)...(19): siRNA sense strand
cugcagaagucaagaagau

SEQ ID NO: 643557 - RNA, 19 nt, Homo sapiens
  misc_RNA (1)...(19): siRNA sense strand
gaagggagcgauacuacag

SEQ ID NO: 643558 - RNA, 19 nt, Homo sapiens
  misc_RNA (1)...(19): siRNA sense strand
ggaaaccaacgugaucuug

SEQ ID NO: 643559 - RNA, 19 nt, Homo sapiens
  misc_RNA (1)...(19): siRNA sense strand
aagguuggcuccacggaaa

SEQ ID NO: 643560 - RNA, 19 nt, Homo sapiens
  misc_RNA (1)...(19): siRNA sense strand
caagaagcccacugccauu

SEQ ID NO: 643561 - RNA, 19 nt, Homo sapiens
  misc_RNA (1)...(19): siRNA sense strand
ccacgcuccugcccaagaa

SEQ ID NO: 643562 - RNA, 19 nt, Homo sapiens
  misc_RNA (1)...(19): siRNA sense strand
cauggaaauugcacaaaca

SEQ ID NO: 643563 - RNA, 19 nt, Homo sapiens
  misc_RNA (1)...(19): siRNA sense strand
aaugaucccuugaaagaca

SEQ ID NO: 643564 - RNA, 19 nt, Homo sapiens
  misc_RNA (1)...(19): siRNA sense strand
aaggugggaucccucgaua
